United States Patent Application Publication US 2013/0129668 A1 - sequence listing, part 10

SEQ ID NO: 154123 - DNA, 122 bp, Homo sapiens
tcgaccaatgggatggcggcacccggttgccagggctacggccaagcggaggtagggcctcggcactatgggcggggcctgggcggggttatataagccagcggcgggcggaaggcggggcg

SEQ ID NO: 154124 - DNA, 122 bp, Homo sapiens
atggcacgaaccttggggctgcctgcttttcctttcccctgtgttttcaacactgcatcacggacaagtaggccggcagcctgggtaacgttttggactcagatctcagcctatgcttatta

SEQ ID NO: 154125 - DNA, 122 bp, Homo sapiens
aggctagggcatttgtagttcgaggctctaccactgtgtctaggtcagacctaggaatgccgcaggtgttgcataaatgctcatcagtccaggctggaccgctcatgcccaactaagtgcca

SEQ ID NO: 154126 - DNA, 122 bp, Homo sapiens
caccagggtcagctgggctctgctgtttggtttttatttcgctggagaggcccggccaggcgatgagggccaggtcctgccaagcctcatttgtcgctttgacccaggtcctgcaacagccc

SEQ ID NO: 154127 - DNA, 122 bp, Homo sapiens
agatgcccgtcttgatgtcggccatggctgcgggtccggggagctgcgaagagcagagcgcgcagcggggctggcggcggcgcggaggagcgggaggaggagcgggaggaggaggagagggc

SEQ ID NO: 154128 - DNA, 122 bp, Homo sapiens
cggcacagcccggctctgacctcgcgggagcagtcgcctaaaagaggctccgcccttggccgcttggggtggcgcccgccaaacccgctcctaaaaggagcctctctccctctgtctgctct

SEQ ID NO: 154129 - DNA, 122 bp, Homo sapiens
aaggcgggcgcgtcccgcgggtgggcggggggggggggacgggaccggtgccgggagctccgctgccctggcgtcccctgggtccaggcccagtcgctccttgggcctctctcgcggggccg

SEQ ID NO: 154130 - DNA, 122 bp, Homo sapiens
accacacctggccttgtttttttttttttttccagacagaggctaactctgtcgcccaggcgggagtgcattgatgtgatctcggatcattgcgacctctgtctcccaggttcaagcaattc

SEQ ID NO: 154131 - DNA, 122 bp, Homo sapiens
actacaagcatggagtataaaattttgacactaagaagttccagggaggcaggccgggcgcggtggctcacgcctgtaatcccaacactttgggaggccacggtgggaggatcatgaggtca

SEQ ID NO: 154132 - DNA, 122 bp, Homo sapiens
ctgctggcggggatcttgacatccttccaggggatctgaaatagggctgcccccagggagcgtttcccatcgtcgagttaaaggcctggagcgccgagggcttaggcttctgagctaggagt

SEQ ID NO: 154133 - DNA, 122 bp, Homo sapiens
ggggtggttctctctggctcctcgagggggaagttggggcggcgacgcagccaggaccctcggctttctccaaagctgcaggtgctcgggtgcccaggtggtccctgcagcttcactgcagc

SEQ ID NO: 154134 - DNA, 122 bp, Homo sapiens
gcccacagaacgacaacttacccagagccgcctagagctggtttgcagcacgccaatctacgtaacctcaatctagcacgagcaacaggcagatttcgccatctttgttgtggtcaaggagt

SEQ ID NO: 154135 - DNA, 122 bp, Homo sapiens
gtttttgtgttgggatagaggattgttagcgagggctccttggactcagctaaggtagaacgagtgagatagagtgggaccactttgagtagagtgtggcagtgtagaaatcagctttggga

SEQ ID NO: 154136 - DNA, 122 bp, Homo sapiens
gactcccctccagcacagctcatctccagtgggctaggacggctaccacaggaggacatacgtgtcctggccacagccgccagccatcctgccgtcctcccgtcagtctctaaccccacggg

SEQ ID NO: 154137 - DNA, 122 bp, Homo sapiens
agcgtggtacctggcatatattgactgctcaaaatgtatcggttgaattcgcttttcctccgtagctacagaaatccttctaaaacccaagtctgcttccgtggttcccctctggccctcag

SEQ ID NO: 154138 - DNA, 122 bp, Homo sapiens
aaagctttagaacagttcctcaggaatttcattcctgcactttactcagtactatcagcacgacagataaaccaagtaccctcattaataataatggttacaggtttcaaaacatcttcaca

SEQ ID NO: 154139 - DNA, 122 bp, Homo sapiens
ggaggttaacatttgagtcagtgggctgtgaaagatagacccactcttaatctgggtgggcgcaatctaatcagctgccagcaaggccagaatgaaaagcaggcacaagaatgtgaaaagac

SEQ ID NO: 154140 - DNA, 122 bp, Homo sapiens
ctctgggacctctcggtcccttggtgatgttctttttgggggagtcatcccgaagacccccggggatctgaacagacgatttctgagcagggatgtcttgtggcatggcacggacgcgatca

SEQ ID NO: 154141 - DNA, 122 bp, Homo sapiens
agtaagtatcagctaaaacaaaggcacctagttagggtgaacctagtgccagtgaaaggccgatggctctcaagctgagagaataaagaggatgagatatccagaagtcacccactctcact

SEQ ID NO: 154142 - DNA, 122 bp, Homo sapiens
cgtggctgcgcccacaaagccgccgggggctgcggactacagcgaagccggcgcggggctcggccctcactacacgaggcctgggcgcctgcacgcccccgtgcttcagcccgcggctcccg

SEQ ID NO: 154143 - DNA, 122 bp, Homo sapiens
gcaccctcggttgagtagtgacaggaagtgaccgcaagggggcgctctgcccttgctctgcgcaggctgctgcggggatgcgtgtgggatttgagctgtgcgctcaggactcgtgcgctttt

SEQ ID NO: 154144 - DNA, 122 bp, Homo sapiens
gccaagggcctggggaggcacggctggaggcgggttggaggcgtggcgccgcggtgtgggcggggccgagggcctgtcgccgccgcgcccgcgggcggggcgagggcagcgcgcagctttgt

SEQ ID NO: 154145 - DNA, 122 bp, Homo sapiens
acaaggtaccccaattctcagcaacagtggtggaagctggaaagccattgagcaaacacccgaatattctggggggaaataactgctctctagaattctgtatccagacaaccatcaacgaa

SEQ ID NO: 154146 - DNA, 122 bp, Homo sapiens
ctacggccagagctgctgcctcatcgaggacggcgagcgctgcgtccggcccgcgggcaacgcctccttcagcaagagggtccagaagagcatctcgcagaagaaactcaagctggacatcg

SEQ ID NO: 154147 - DNA, 122 bp, Homo sapiens
ctccaggcgttcgtcggggacgccccccggccactcacctgcggagaactggccttgggccgatcccaggagaggccaaggagagaggagcaagagcgccacaaaagcaggcagcgccgccg

SEQ ID NO: 154148 - DNA, 122 bp, Homo sapiens
gtttttctcatttcccttcctggttagtcctgcagctggggagctcagccttctgtagaccgggaggcccctcccagggagccgaggccgggtgggctgggcagctttggaagcaccgcggc

SEQ ID NO: 154149 - DNA, 122 bp, Homo sapiens
tcaagtgattttccctcccagtctcctgagtagctgggtctacaggtgtgcaccataccccgctaatttttgtattttatttatttatttattttttgagacagagtcttgctctgttgccc

SEQ ID NO: 154150 - DNA, 122 bp, Homo sapiens
ctttcatttctttcccctggttcttacatgcatacgggaaaatgcacgtatcttgtgcgccgctctacagaaaactaaaactccatgtggcaccagcagcctcccaggtcgagaaacaactt

SEQ ID NO: 154151 - DNA, 122 bp, Homo sapiens
ttaagacagaggggcggcggcgggcagcagctgcgctgcgactgctctggaaggagaggacggggcacaaaccctgaccatgaccccccacaggctgctgccaccgctgctgctgctgctag

SEQ ID NO: 154152 - DNA, 122 bp, Homo sapiens
ccaacttagcgggttatgctggaccgggcggtgaggggaaccgaggccacccggactttccgcggctgagggcagcgccggttccttgcggtcaagatgctgcaaaacgtgactccccacaa

SEQ ID NO: 154153 - DNA, 122 bp, Homo sapiens
cgtgggagcctgcatttctgggtacgtgggctcttttttctaaagagttgacatttacaacgcattcaggggtaacatagggttataaagcacatttctactctagaccttttgctgatgaa

SEQ ID NO: 154154 - DNA, 122 bp, Homo sapiens
gcgctctggacacctggtgattccaggtagagagtggagcccaggcgcctgctggctgtgcgtgcggtgcctggaggctacagccagcgaggattcatttcagagagtacagaacaactttt

SEQ ID NO: 154155 - DNA, 122 bp, Homo sapiens
ggtcacaccgctcggccatcagaaccgcggcagaagcccccacacaaagcgccctccctccgctcctggagaggttttaaacccaggacccccggccctgcgctgtcccaaggcctctccga

SEQ ID NO: 154156 - DNA, 122 bp, Homo sapiens
ggcaggtggggtcaccccaggaggcacaggctcgggtcctgtcccccacccaagcgaccccgggaggaggagaggtctctaaggttttaagcaaagtccttgggactgactttggtagatcc

SEQ ID NO: 154157 - DNA, 122 bp, Homo sapiens
aggcccaaggctgcagggagctcagctctgtgcaagcctccaagctgaacacccagtgggcgtgctaatccccaaatgttcaacaaataggaagttactcacagtgtctccgaaagcagacc

SEQ ID NO: 154158 - DNA, 122 bp, Homo sapiens
ggccagatccaggcgggtcctaagtgtggggggaggggggcgcagggaggggcggccacgcgatcctaagaccctttcagatggtgggagagcctggagaaagagacagcgtgtgcggaggg

SEQ ID NO: 154159 - DNA, 122 bp, Homo sapiens
aataataatgattcatttaacccttccaaggcgaatccgaaccgaagggagcctgctgctcgcaccaggcggagtgacccaaggcacattccccgctccccaagaaggaaaactctatggtt

SEQ ID NO: 154160 - DNA, 122 bp, Homo sapiens
catctctccaactctccgagaacccagactagggacagacatcaggacaaaggcgactctcgcctctcacccccgagctggtttgcggagaaagtccttgagaaacagtgctgggcaaggag

SEQ ID NO: 154161 - DNA, 122 bp, Homo sapiens
tggctgtgagttctgccagtcttccagagaccccgcccctcgccgaacggcttccccgcccgcccccgccccttcaggagcccctccgctggctcggccccgactagcctctcggggcctcg

SEQ ID NO: 154162 - DNA, 122 bp, Homo sapiens
ggggttggatggtgaggtgggtcaggcaaggggggccgagctcgggtgacgcggcgctcacgtgacccgccgggcgcctacgtgggcaccagcccccgcgcccgcccgcccgccctgcggtc

SEQ ID NO: 154163 - DNA, 122 bp, Homo sapiens
ttttaaccaaaatattgctagcctaccacatcagcaggacggcactggtgcaggcggggacgctgccaccctccacgtccccaggacagacgtcgatgggcagcgggcacgctgggcaccgc

SEQ ID NO: 154164 - DNA, 122 bp, Homo sapiens
ctgatggaatacttagaggaaggtctgttctctgaagcattaggaggtcctctctttgatcgttgatcatctttcttctcattcctattgcaattgtacttttactgtggttggttggctgt

SEQ ID NO: 154165 - DNA, 122 bp, Homo sapiens
agggattgctgtggaccggaatggggtgggagaacacgttggtctccgacgactacagggcgtgggagagggctcgctattgtggccttgacctggcatgcccttgggacatgccctccccg

SEQ ID NO: 154166 - DNA, 122 bp, Homo sapiens
caacgcaggccggcccgtcgatactcacattcacagccaacccctcttactccatcaggccgccgagagccaggcgagggagctccctgacgcctcagacgcccccttcagttttgggtccg

SEQ ID NO: 154167 - DNA, 122 bp, Homo sapiens
aggaggccaaggacacctgggtgtgtctgtccctggccccagcactcaggtgcaggcagccgggccccatgctgggctctgtccctgcctcccattctctcacctccctgcttccccagccc

SEQ ID NO: 154168 - DNA, 122 bp, Homo sapiens
gtctgtccatcaatggactacgattcagccacgcaaaggtaagcgctgactcagccacaacgcaggtgagccctgaagacatggcacaaaaggcaaagaagccgctcagaaaggccacgcac

SEQ ID NO: 154169 - DNA, 122 bp, Homo sapiens
tgtcaggaacacaagggcagtctactcctggttgccgggggtgccatctccctagcaacacgggggcaatacttcctcagccacaagagagtccacagctatggccgtgcgacttgcctagc

SEQ ID NO: 154170 - DNA, 122 bp, Homo sapiens
gctgccgcatccgggcactctgctggtcgcggcgggagtggcgtggcgcaggtgaggacacggcggccgagtgtcctcgaccccagcctcagcagcactgcttggcgccccggttcccggtc

SEQ ID NO: 154171 - DNA, 122 bp, Homo sapiens
gccttcgccttacactgaatgggcgggtagcaactggggtcctcgccgccgggctggcagcggctggagaaggcgctgcgcggggtcacgtagttgctggggaagatgcccacccgctggtt

SEQ ID NO: 154172 - DNA, 122 bp, Homo sapiens
tcacttccttccttgccccggtaaaacgactggttacactttaaatcagcggcaggaaatcgcttcacgaaactcatctggctgctgcgaccaggcccttctgattctccagggaccgtgtc

SEQ ID NO: 154173 - DNA, 122 bp, Homo sapiens
catttgtctgttttttagtgtgtattaaaatgaatttatttacacagtaacatgatgccacggagtacacagcaaagtaccacagcaaaccaaagggtggcaccactgctggcagagaggac

SEQ ID NO: 154174 - DNA, 122 bp, Homo sapiens
gaagagccggcccagctgtttctctattggcggttcctccattcatgtgactcttctgcacgctcactcaaagctgatgctgagaacttgcttcctgattggtagccgggcgaatccacgtg

SEQ ID NO: 154175 - DNA, 122 bp, Homo sapiens
gtcttcatggaagtggcggagtcggttagataaccctggttaggttcttagactcgcgcccggcacagtggcactctccgatgactgttattcgtacattgtcttggtctttccccaggatt

SEQ ID NO: 154176 - DNA, 122 bp, Homo sapiens
atcttggaggtgttggtaatattcagtttcttgatcggggatctgctgatgggtgtattgcgttgtgaaaattgatcctattggacatgaattcatcatattgatcatggcttactgcagcc

SEQ ID NO: 154177 - DNA, 122 bp, Homo sapiens
atggactcggtgcggggacagaacacctggaacgcagacctgggagcacaccatagtccacgcacgaactgaatgaaagagcgtcactcacttttacagagcagttgtgttcacagcgactc

SEQ ID NO: 154178 - DNA, 122 bp, Homo sapiens
acttgaatcataccgaaaccatccccccgtctcccaccccagtggaaaaactgtcttccacgaaacctgtcctggtgccagaaaagttggggacagctgcagtgtagtatccagagttgcac

SEQ ID NO: 154179 - DNA, 122 bp, Homo sapiens
gttcatcccacagtgccagttctgcttaccaaaagtagcctacgaagcactcgcattccacgcctggctccacgtcagccagccaggcttcttacccatttaaagttacagaatagactgag

SEQ ID NO: 154180 - DNA, 122 bp, Homo sapiens
aggattaagggcggacaggacgccaaagcccaggcctcaccaccaccaatgaaggcaacccgtaggcagcaccgctcaggagcatctgccccaaaagcctggcacgtgggagccacgtgagc

SEQ ID NO: 154181 - DNA, 122 bp, Homo sapiens
ctatccagggtcggaggcgttcccagcgtttgcgcagatgcaagatggccgcgccctcgtcgccttggctccatgggggccgccatctttgagtatctgacgtacacaaggcaaagggcgcg

SEQ ID NO: 154182 - DNA, 122 bp, Homo sapiens
aggtgcccagagtaaagcctcgcactgcgtgtgagcggccagggcccagccgcatccccacggctggggcaagatccgtacctttgagcagctggccctggactcccgcaagagctgtggca

SEQ ID NO: 154183 - DNA, 122 bp, Homo sapiens
agagcacccacaacaacacacaacagaaacacgttcattttcttgactccgaggcggtcccgtccctccctgcggcgcggctgggaccacgttcacgtgcgtcacaacggcgcccctttgtg

SEQ ID NO: 154184 - DNA, 122 bp, Homo sapiens
acccagccttggtttgttcttttaatccaaacttcttgtgtagctgttaaatattggtaccgtgcagtccaaagtttgaaatttcactccatgatgaactgaagtctggttttattttgttg

SEQ ID NO: 154185 - DNA, 122 bp, Homo sapiens
ggggccagcggggcagcggcaagtcaggcagtctgcagcaggagcgctgggcatgggcttcggcccgggttgcaggaggcgtgcaccctccggccggataggcggcgcactcagggaccagg

SEQ ID NO: 154186 - DNA, 122 bp, Homo sapiens
agggaaaccgagggccaggaaacaactagaatccgacggtatttcctagctccctgatggcgcttcccatgcccccaactaaatcatgaaataacccactcacctgtttgcaccgggcctgc

SEQ ID NO: 154187 - DNA, 122 bp, Homo sapiens
ctagctgggccccttatatacctgctcggattccccggggttggggcttggtccgcccctcgcaacccggaggacccgtgattgacaggttcgcagtgatgcgccctggccaatcattaccg

SEQ ID NO: 154188 - DNA, 122 bp, Homo sapiens
atggtttccaatgaaaaggctgatgattctgggagcataaaggtcagcctggcttgcatgcgaagcagcacaaggccagacatgcatttggttcctgtaatctgagacaacagtgggaggta

SEQ ID NO: 154189 - DNA, 122 bp, Homo sapiens
acagggttgattccacagggctcctcctcaacacccatgaacctgagaagtggtcagatgcgtttcaggccactggccagcagtggggtcatggcgggaactagtcccacctgaaggactct

SEQ ID NO: 154190 - DNA, 122 bp, Homo sapiens
cctctgctttgcccctcagacacatgcttggtcactgggctgtggaacatacaggagccccgtgctccggaacacggaccacccgacaggagcacggacacagcagtcggggcgacgtgggt

SEQ ID NO: 154191 - DNA, 122 bp, Homo sapiens
gggttcagccgcatgtcagggtgaccatggaggccgccactcccgactacgggccggggtcgtcatcagctctgcccgggcctccctgagcaccggggcaatgcagggagcttgtggagatg

SEQ ID NO: 154192 - DNA, 122 bp, Homo sapiens
tcgctgagtgggtaagtggcaatgctttgccaaatattaacgaagccaatcaaagagcagcgcagccacagtatcactgcacatatatatatagatatataaatataatataaatatttatt

SEQ ID NO: 154193 - DNA, 122 bp, Homo sapiens
cattccaggcctcatcactgaacagctgagcctgagaccccacttctcaccagccaaccccgacgagtggactcagatgacaacatgccacttacaagggacacagctaggtgttgtgttgg

SEQ ID NO: 154194 - DNA, 122 bp, Homo sapiens
aaggctcttccacagtcactgcattcatacggcttttctccagtgtgacatcgctgatggcgcctaagttctgactggaagtgaaaggacttcccacactcattacatttacaagatttctt

SEQ ID NO: 154195 - DNA, 122 bp, Homo sapiens
gctgttccccaagactctacctgagtctcccgccgcagccaaccccaatccttcccacgccggagatcactgcagtgacccacccttcgttaagtgtcaggccactgggtaaaaatccctgc

SEQ ID NO: 154196 - DNA, 122 bp, Homo sapiens
gcagtgagccgtgatcatgccatggcactccaggatgggtgacagagtgataccacaactcgaaaaaaaaaagaaagttttttagacatccacatgcagttggaaacaggcagttgaacaca

SEQ ID NO: 154197 - DNA, 122 bp, Homo sapiens
ggagcgaatttcggaaacccggaggacgagtatagccttgcaagatggaaaatgccctcccgggctggcgcggtggcctgtaatcccacctactcggggtccgaggagggaggattgcctag

SEQ ID NO: 154198 - DNA, 122 bp, Homo sapiens
ccccccagagcctgccgaggcgggaaacggttccccccaagagcctgccgaggcgggaaacggttcccccccagagcctgccgaggcgggaaacggttccccccagagcctgccgagaggac

SEQ ID NO: 154199 - DNA, 122 bp, Homo sapiens
tgcaaacccttaaactaaagtaacagctgtcaaaatacagacaataaatttggcttggcgcggtggctcacacctgtaatcccagcactttgggaggccaaggcaggcagatcacattaggt

SEQ ID NO: 154200 - DNA, 122 bp, Homo sapiens
tgggtaatttagagccgcgcgccgggcgggaatgtaagatggcggagtagcaacgcaaagcgcttggtattgagtctgtggccgacttcggttccggtctctgcagcagccgtgatcgctta

SEQ ID NO: 154201 - DNA, 122 bp, Homo sapiens
tctcgcgttggtcgttgacgcagcgagccatcctctgatctcctgcgtctgcgtgggcaccgccgagatctgatgtcagggacccccaggggtgtgtgtgcccacaggcatgtgtgtgtggg

SEQ ID NO: 154202 - DNA, 122 bp, Homo sapiens
ccatgggctccgtaggttccatgggctccgtgggttccatggactctgtgggctcgggcccgacgcgcacggaggactggaggactggggcgtgtgtctgcggtgcaggcgaggcggggcgg

SEQ ID NO: 154203 - DNA, 122 bp, Homo sapiens
ctgcctcccaggttcaagcgattctccggcctcagcctcccaattggctgagactacaggcgtgtgccaccacgcccggctaattttttagtattagtagagatgggggtttcaccatcttg

SEQ ID NO: 154204 - DNA, 122 bp, Homo sapiens
ctcccaggattatgagtttataggttgaataacagaacaggtcatgtgcatgccccttgccgccacaaggtgagcactccctaagtgttcattctagtccccttccctctctcgccattgct

SEQ ID NO: 154205 - DNA, 122 bp, Homo sapiens
gaggggccgcggtgggggtgctcccagcccagcaggcagcgctggacagtgaccccggagcgggaaccagggctgcgctgggcactgaccgggccctggtaccggggattcaccctccccgg

SEQ ID NO: 154206 - DNA, 122 bp, Homo sapiens
agaaaggtgccaaaccttgcctacattgcctgtgtgtgtctttgccatcagccttcaaaacgccgctcccagcggtgcgggcgctccctctcgtgctcccttgggagacttgagggtctccc

SEQ ID NO: 154207 - DNA, 122 bp, Homo sapiens
ttgccaattggtgaggcagcccgcgtagacctagatacactgctacatatacatggaggacggtgattaatcgtaacaaggcgcgctttgtggggacgttccccgcctaccaaagggttagg

SEQ ID NO: 154208 - DNA, 122 bp, Homo sapiens
tggcgggcggccgctgctcagctggaacctggcatccccgactccctgcaggcagcgatccgcccggcccggagctccccaaagccttccaggactctgggtccccgggaggaggccggggg

SEQ ID NO: 154209 - DNA, 122 bp, Homo sapiens
ttgcctgtgttacccctgtgcacagcctctcactgtgatggggtgaaagactggaccagacgttagaagatccgagtgtttttagtagcactgaaggtcaatagatgataggtaggtagacc

SEQ ID NO: 154210 - DNA, 122 bp, Homo sapiens
atcatagtcaattactctgtgttgggtctacaccacatctgcacatactatgagcccttccgttggagataattttcacttgcggagctgcttcacttctacctgtaggagcctcatctcca

SEQ ID NO: 154211 - DNA, 122 bp, Homo sapiens
gagtctcgctctgtcgcctaggctggagtgcagtggcgcaatctcggctcacacaagctccgcctcccgggttcacaccgttctcctgcctgagcctccaaggactacaggcgcccgtcacc

SEQ ID NO: 154212 - DNA, 122 bp, Homo sapiens
agaaggctttgcactcgtcacacctacgcatcttgtctccaggaggtaacagggagggtgcgggggaggctgctgagtggttttgaaattatacagagctggatttgaacccctttcagcga

SEQ ID NO: 154213 - DNA, 122 bp, Homo sapiens
aaaaaaattactggaaaagttttgaagaagtcattgagtacaagatactgacgtaggtgccggaagaagagagcagttggccgtgctggtggaataaccctctctgcaaagggcctgggagt

SEQ ID NO: 154214 - DNA, 122 bp, Homo sapiens
ggctgggtcacagtggttattgtgcagagtgatgaatgctgcttacttgtgatgtgctgccgcccgcatctgtgggtgagaacacgcagttactgtaatttgcctggcaagtgatcagactg

SEQ ID NO: 154215 - DNA, 122 bp, Homo sapiens
ggttcattggtatgcttttttttttttgtcccacctcgctcttacctcagaaagatttgtcgaatgagtgaaagatgaacaagtaggccaatggagacagagtgagggtcttggtggggata

SEQ ID NO: 154216 - DNA, 122 bp, Homo sapiens
gccacctctttccccagcatcgcacacgtattaggtgcccagtacatatttattgaatgacgtgtgcaagtgagtgagtgtttactacacagagaaaagtgtctgtatttccagcttgggct

SEQ ID NO: 154217 - DNA, 122 bp, Homo sapiens
cagggcgggaaacccgcggccgacctcgccttgttcggaggcagcgttagagcagcttctcggaggttggccttggacgtgaattggaagcaatcagaatcttttagatgtttatacatgat

SEQ ID NO: 154218 - DNA, 122 bp, Homo sapiens
ctccctggcgcctctggttggctcaggttgtcagggggctgagctgcagcctccaattggcgagcggggcaccgaggggaaggcgcccaggaggtgggttcatccgcgtggggaagcgcccg

SEQ ID NO: 154219 - DNA, 122 bp, Homo sapiens
gaggtactgcgcaggcgtgggagggtctgcgcatgcgcagaagcactccgggcgtgctgccggcggcggtaggtggcgcgcgggtccggcgggcggttggcttgagcgggaccggagctgag

SEQ ID NO: 154220 - DNA, 122 bp, Homo sapiens
gacagtggcagccgacagggcctgctgggccctcgggcctgcgtgcacccatccccgctgcgccgggacccattctgcggtgagcacccctccctgccatcccagcagcccctcccctgtct

SEQ ID NO: 154221 - DNA, 122 bp, Homo sapiens
aacgagatttggccggcgctgcggcgtgtggggaaagatgattacactcgaaaggaatcacgactccttgcggagccattactcgtgccgctccgcacgcgcaggttctggcccggctttca

SEQ ID NO: 154222 - DNA, 122 bp, Homo sapiens
agttgtggccgagcgtgtgggcgcccacccagtgccagccgcgtccctcgtacacgtagccgtccgagcccaccacgaaactgcagaggggagggagaagcaagcaccatgcggcgtgaggg

SEQ ID NO: 154223 - DNA, 122 bp, Homo sapiens
ctgctgtccgaggtgcggctcctgccaggggtggccaatcgcaccggactgcgccgagcacgccccgccccaccgtctcagtccgcccgccccctgccccggaccacgccccaagctcggct

SEQ ID NO: 154224 - DNA, 122 bp, Homo sapiens
gtagagactatctatgtctatttcacccaagaactcacctttggatttgcacaactatatcgattgacctcttaattgagtgtttttgaaatatttaaccaggaggactataaccagtgtat

SEQ ID NO: 154225 - DNA, 122 bp, Homo sapiens
gggcacccagagcagccctgttcccggtcaattaggaccggtcccgggcaccaggcccgccgacttgtcacttcctggacctccaaacgccccttgtgacaggccttgttcctcaggaacaa

SEQ ID NO: 154226 - DNA, 122 bp, Homo sapiens
atgaaagtggccaggcagtaagttggtcacaacctctcacctgggggctgctgacaggcccggagaatcctgggggagctggagggggcagaccaggggaccccatggaagaactgatgact

SEQ ID NO: 154227 - DNA, 122 bp, Homo sapiens
aggctgggccttgctaggcagggagtttgctagcgattggcttttgtgctgccctaggcacggggtggagcagggaggaagcaggaagaggaggagctgcagtccccctccaggccccctcc

SEQ ID NO: 154228 - DNA, 122 bp, Homo sapiens
cttcccacccacttccgggtctcctctgtttacgaatgtttgggcgcgaattactctaagcgcggctctcagaagggtgcaagaagaatcagtggtgagtcgtgatatccttaaccggctgg

SEQ ID NO: 154229 - DNA, 122 bp, Homo sapiens
agattgttctcccctagcccaagcataaggcttaccttggaattacctggagccttaccacgacagcatggccttcagtacagggttgacaagtcaatagcaaacaagggccattaaaaggg

SEQ ID NO: 154230 - DNA, 122 bp, Homo sapiens
gggctgggggcgcccagctgcccggaaagggctccggggccggggccgcaatcgcagggacgggacagaacgcctgaggtcccagctgccggcccagccccacgctgctgggagaccctcgg

SEQ ID NO: 154231 - DNA, 122 bp, Homo sapiens
ctggatcctcaaatcgtgagccccaagcagtccctttccaagggattggagtgagaacctcgtggggcagagccagatctacctaggacccaaggggagtgtctcaggcaggacccccacag

SEQ ID NO: 154232 - DNA, 122 bp, Homo sapiens
tcagttccccttcatgccacagcctgcacatgccctgcagctgcgaatgaggggtgccatcgggagtgattcttacagagggagcactgcctcaatccactggagaagtgagacaatcccct

SEQ ID NO: 154233 - DNA, 122 bp, Homo sapiens
accggaatgcgcgggaatcgcagggtctgtaaggcaggacgacgctgggggacaagttaacgtggctcaagtggaggaaattcttttcctcatagaaaaaactcacaatggtctttttggag

SEQ ID NO: 154234 - DNA, 122 bp, Homo sapiens
tcctggatcacttcaagcagaaactgttctttaaatctttctaccttctaccgcccctgccgtactgcacctactgcatgctacttgagcagtctctagagggagcaagagagtaaagacag

SEQ ID NO: 154235 - DNA, 122 bp, Homo sapiens
tgacttatgcaccaagaatgcttcctgacaggaaactcaagtctctcccaacgatctacccgttgctcataaacttatccctttctggaggccacaaaacaattgtattccccttcaaaaga

SEQ ID NO: 154236 - DNA, 122 bp, Homo sapiens
ctagttactctgcaggaatgtcccaaacttctcagctgttctttaaaaaatcctgcgccacgaggctaccgagggcgacgggaaccaccgtcaaagttcctgcagcacattcctgcagccct

SEQ ID NO: 154237 - DNA, 122 bp, Homo sapiens
tacactataaaaggggaacactgtaaagctgtcagctaaactagtctttcctccacagttcgtgaggaaggaacctaatttatacattcaacaaatttatgccagctgttctctgatgtgcc

SEQ ID NO: 154238 - DNA, 122 bp, Homo sapiens
atgaagacctgggggcaggcaccgtgaggatgctgtggatgaggatgctgcggatgaggccgcgtctcccttctaccacagacccctgcaaaggcgctggcctacccctgagtagccataaa

SEQ ID NO: 154239 - DNA, 122 bp, Homo sapiens
ccagcgtcacggtggcgtaggggtcacattgcccattcacgatggggaggccctggcactcgacgatgctgaggagagaagcagaggcggcgtcaggagggagcgcagacacctgggcgaat

SEQ ID NO: 154240 - DNA, 122 bp, Homo sapiens
ctttactgccaatcagcggttgccgctgcctaagcctctccccaggtacgccgctcacgccgtaagccctcctgttggacctagcggaactccgggtttggagtcaacctcttaggggcgga

SEQ ID NO: 154241 - DNA, 122 bp, Homo sapiens
cccctacagaggactggaggggcagagaaacgtgcggcgctgcggggtcgtcgccggcctcgaacttccagagtcttacaaagggtgcacgggggccctgggtgaccttgaactcccctttg

SEQ ID NO: 154242 - DNA, 122 bp, Homo sapiens
tttctcacaaaacatatatacgcatggcagcaaaagatcaacagtatgtacccagccaggcgtgatgctcacgcctgtaatcccagaattttgggaggctgaggtgggcagatcacttgagg

SEQ ID NO: 154243 - DNA, 122 bp, Homo sapiens
tgccagctccaaggatgccttccaaggggccagcctgcatggtggcctgccacatgcttgcgtctcctcgcctggtgacatggtggcagcagtgcatggaggccgtgttttaattgagtata

SEQ ID NO: 154244 - DNA, 122 bp, Homo sapiens
ctttctctgctttctctcccctatactttctggattcttctccctttctaaccccaccaacggggacccccactctccagtagtgcccccctgggcgccactgcctgctttccggatgtgct

SEQ ID NO: 154245 - DNA, 122 bp, Homo sapiens
gcccctcacgcacccgcgagcccactgcccctgacccacccgcgagcccacaggccctgacgcacccgcgagcccaccgcccctcaagcacccgcgagcccaccgcccctcaagcacccgcg

SEQ ID NO: 154246 - DNA, 122 bp, Homo sapiens
ggcaatgagggtggctgaagggctcggcttgtcggtggggcagcgagagccgggtgcacgcgccggggaggtagccaacagccgttgggacgcgacgctggttcccaggggagagccagccg

SEQ ID NO: 154247 - DNA, 122 bp, Homo sapiens
ggattcttcgtctgtgttataatagaggaaacagacacagagaagatacagagctaataacgcagaggctggacataaccgaggtcttcaaagcttcactttggtctgtttcatccctctgc

SEQ ID NO: 154248 - DNA, 122 bp, Homo sapiens
gttgttacagcccagggaggctgccttgttggcggtgggagccgccatcttcatgcaaaacgcgccgagtagcagctccgcggcagcgcggcacccacccccgccccccaccccgcccccct

SEQ ID NO: 154249 - DNA, 122 bp, Homo sapiens
gtctctgggtccctggtgctgatgatcacaggcttcagacacccctggagctgtgcgagccgtcagtagcgtgtgtgtgtgcgtgcgtgtgtgtccatgtgcatgtgtgtgcacgtgtgcaa

SEQ ID NO: 154250 - DNA, 122 bp, Homo sapiens
gcgggaagaggccagggctgggggacccgtcgggtggggctgttacctttccacacggcccgttggcgcagtgcacacggtccgccagcgtatttaacaggccgcccagagcctcttgatcc

SEQ ID NO: 154251 - DNA, 122 bp, Homo sapiens
ggcatgtagctcatggggaggtagagaagcttggcatcccagccagctgagtagcgagtacgggggtggcaggcaatcagcgcatgctccatgcagttggtcaccaacgacagatcctgtgt

SEQ ID NO: 154252 - DNA, 122 bp, Homo sapiens
gaggctaccagcattccctgcggtttcaccaattctcctgtctgcatgcctcaatgtctccgtagtccctccggcccgcccacgccaccctgcggcccccttttcttttgtgggggcctttc

SEQ ID NO: 154253 - DNA, 122 bp, Homo sapiens
gcgcccgcgccgcggaaggttgggtaccagcctccacagctttgcagattgcaaagataacgggagctgccgcttcgcttttctttggctcctcctggccttcatcctagtaaaaccagaca

SEQ ID NO: 154254 - DNA, 122 bp, Homo sapiens
atttatgttcctaataccacattcccaccacccaggactgacaactgtcagctgtatttgcgcctatttctcctcctccaaagaacaaacctttacagatagtgctcctgtctttttgtgtt

SEQ ID NO: 154255 - DNA, 122 bp, Homo sapiens
ttcctggttaatccttgtgcctgcacctccgtatagcctagcacgtggtagacaatgaaacgactgaatgaattaatgaacaaatgaagtagtatacttcctagatgagaaaactgagactc

SEQ ID NO: 154256 - DNA, 122 bp, Homo sapiens
agggtggcctggagctgggaagaccagggctgaggtcctacgagtcacagatacaccacccgccagacgcacacccgccagggatttgcaggaggcagacgctcagacacccaactcagacg

SEQ ID NO: 154257 - DNA, 122 bp, Homo sapiens
gtttgtaaatgaatcattccctgttcagtttgatgtagcaaggtcagcttcctgctccaccggcagtgcgtgccagctctttttctcatgtgtaagctgtgaatgctgttaagcctgtaaac

SEQ ID NO: 154258 - DNA, 122 bp, Homo sapiens
cagagcgacccctgggcccacaaggcggggtccccgcgcggtccccgcgcgccccccgcccgccttacctcgctggaccagggtggccaaggagaaagcgaggcagacaaggaacgccgagc

SEQ ID NO: 154259 - DNA, 122 bp, Homo sapiens
tggcgccttcggggactgtggcgtcctggagcatctgctgctcaacgacaacctgctggccgagctcccggccgacgccttccgcggcctgcggcgcctgcgcacgctcaacctgggtggca

SEQ ID NO: 154260 - DNA, 122 bp, Homo sapiens
ttcatcatctgccctatagcacacttgaccccattgtataagaactaagtgttggctgggcgcggtggctcacacctataatccaagcactttgggaggctgaggtgggcgaatcacgaagt

SEQ ID NO: 154261 - DNA, 122 bp, Homo sapiens
cgtggcagctctaaccccagctttttcactagtaaggcactggggctgctgggccatgcccgctccccaacgcggggaaagagcttcgcgctgccgcctggctaggggcaggggcgccgccc

SEQ ID NO: 154262 - DNA, 122 bp, Homo sapiens
ggtgagcaaggagagagaggagggtcagagaatcagacccaaaaagggctggaggagactcgggagagccacccacacaacccaggccctgcacgcggcagggaaggctgccgcttcctcac

SEQ ID NO: 154263 - DNA, 122 bp, Homo sapiens
aatacagaatctgagaattcagtccagattgggcttctcaggaaagtaagtagtagtgagcgctgacctaagggttattcagagctcaccaatccataaccctttacagacaacatcattgg

SEQ ID NO: 154264 - DNA, 122 bp, Homo sapiens
tccccagccttgggacgccctgccccgcacactcaccatttctcagcttcaagggtgtcgcgaagtcttagctacgaatcatccaatacccgcaggttacagagcgatggaggctgaggctc

SEQ ID NO: 154265 - DNA, 122 bp, Homo sapiens
gcgcgccgcagccgtcgggatcacctcggggttgcgctgcttctccagcaagtgcatgcgcgccatggtctcagtcagcatgtctatgagcagttcctgctgcagcttcaggtagttgttct

SEQ ID NO: 154266 - DNA, 122 bp, Homo sapiens
gtataaactgaagttaattacttccattaatttaaatggaatatgatggtattttaaagacgccctgaaaggtaaaggccaaagataataataatgaaagataatataaagagcggaaaaga

SEQ ID NO: 154267 - DNA, 122 bp, Homo sapiens
tttaacgggcacttcttgcggggctgtgcacgtttctcagagccagactcactgcacatacgttgccttcgtgtctttgtcagatgtcaaggtattatttttaaatatacatatacattcgt

SEQ ID NO: 154268 - DNA, 122 bp, Homo sapiens
gcaggcgcgggcatccggtacagacagccgagcttaatctgaggcggggaaccagcgtcccgggggaggcgccgaagctgactttctggccgcagtggaagtgaggcgagcgagctccctta

SEQ ID NO: 154269 - DNA, 122 bp, Homo sapiens
tttagcagtctcattagaggcagttggttccagttttcaggtttggtttttctatatttccgcaaccagcttcaatgcactctctgggatacactaatatcaacatgtggcacttctttttc

SEQ ID NO: 154270 - DNA, 122 bp, Homo sapiens
gcgtgtcccggtagcgattcagctcctctgtcttcatcgtggtgaagaggctggtgaatacgtggctaatgttcttgtccaccttttgtaaagagacgtcaaggcccagccgcgaggcctgg

SEQ ID NO: 154271 - DNA, 122 bp, Homo sapiens
gcccctgaagccccccatcccttcccaaccgccgttaaaaaaaaaaagtcttccacaaaacgggtccctggtggtgccaaacaggttagggatcgctgccctaaacaatagagtacggcaac

SEQ ID NO: 154272 - DNA, 122 bp, Homo sapiens
cggcgggtacaagtcgcgattgacgcgacggcccaggcaggcactgtgggcttcaccgcccgcaacttttgaccctagaggccctgcgctgcagcctgtggcccggagggacagaagtggga

SEQ ID NO: 154273 - DNA, 122 bp, Homo sapiens
actgagcctgtctgtgcctggcctggcactggtgatgcagggactgagtcaggcagggcacgacccagagagcccatgggcagacaatgttggtgctgcatgcccgggcttaaaccagcaag

SEQ ID NO: 154274 - DNA, 122 bp, Homo sapiens
ccccgcaagcaccgcgcgcagcccggcaagcaacgcgcgcagccccggttcccgcccgcgcggagcccacgcccacccggaactcattctgtctggcaagcgccgcgcgcatcctcggttcc

SEQ ID NO: 154275 - DNA, 122 bp, Homo sapiens
aagtgtggggcctggccaggagcaggtggtgccggggaatgagtatagggcttatggtgccgtggcctgtctgctgcctggtctgtcctaaggccagtggccctgtccctaggctgtggggc

SEQ ID NO: 154276 - DNA, 122 bp, Homo sapiens
gaatgtggtggactccggcaggcctggggcaggggaatctccggtaacatccctcagtaccgaaggcaggatttcccggccacttccgtcggttggaattctcttaagcattgccctgagtc

SEQ ID NO: 154277 - DNA, 122 bp, Homo sapiens
gcactcaaaatggcagggtggtgagctcaaggacagagttagggctcacagagtgagacacgggaggccaagttctctatgcagagctttgggaagattaataaccatggagggaactccat

SEQ ID NO: 154278 - DNA, 122 bp, Homo sapiens
ggctgttaataggaatgacaaggttcaccgtgctaagaaatgactaaaatatagttcaaccgagttttaaaattcattcgtgagatctctcatttttagggatgaaaatggttcctggggtt

SEQ ID NO: 154279 - DNA, 122 bp, Homo sapiens
gcagcaagccgagacccttcccgccagatccaggccgggccttggatggccattcgccaacgaatcagcgaccagcattctagagcgcgttttgcaaccgaccaaacgctcgctttctttgg

SEQ ID NO: 154280 - DNA, 122 bp, Homo sapiens
agagggcatccctgcgcattgatacgcagaccaggcaaatgcagctcctggaagcctcctcggtccgctcttttttccctaagccatagtctgtctgcccccacccccttcccgtggaatct

SEQ ID NO: 154281 - DNA, 122 bp, Homo sapiens
ggcgagcacaaatattcccaattcataacactccctcgcactgtcaatgccccagacacgcgctatcatctctagcaaactcccccaggcgcctgcaggatgggttaaggaaggcgacgagc

SEQ ID NO: 154282 - DNA, 122 bp, Homo sapiens
gccggaccgggaagacagcagggtgctgcgagcaggtctggggaaaccgaagcgcgagcccgcgcgtggggcgaggcgggaccgcgcaggcgcagcgggaagcgacgcagaaagctccaagc

SEQ ID NO: 154283 - DNA, 122 bp, Homo sapiens
gctggaaggaggcgggtcagccgggagtggaggaagcagaaaaggctctcccacctctaacgccgcctgggggtcctggtcgattagagcatctgagaagctctggaaaaacctgtcaggaa

SEQ ID NO: 154284 - DNA, 122 bp, Homo sapiens
ccagagcagcctgttgtgccttgtgcctcgaagaggtttggtatctgccagtttctccctcgctgtttttatggctttcaaaagcagaagtaggaggctgagaaatttctctgttgaatacc

SEQ ID NO: 154285 - DNA, 122 bp, Homo sapiens
agtgtaaacttgcgcaacatcctgctcccaagaaagacgtgcacttgctacttcatccttcgctccatcttggtcctcccaactggagagaggacagcctagacgagacttcccacaaccaa

SEQ ID NO: 154286 - DNA, 122 bp, Homo sapiens
gacccttatttacccgacgaataaaggcggaggatcggcggcttccaattctttgccccacggagcccagggctgtccctggacttccaaccttttcagggctgttactccctccctccgcc

SEQ ID NO: 154287 - DNA, 122 bp, Homo sapiens
aggcgcacggtgctcctcctccactcatccctgctgggtccctgtgcctgaaaatggagccgaatcctctttcaggaacgctttagattttcgtgaaaacacagtccggcttcccaagagca

SEQ ID NO: 154288 - DNA, 122 bp, Homo sapiens
ggccacacagaacgtcccggggtctgactccgctggtgaactccctctgtgggaacaatgcgcacctgaccttgcctgcacccacgcgaggatccgctgctgggggaagcccgctccagtat

SEQ ID NO: 154289 - DNA, 122 bp, Homo sapiens
tctgcacctgctggtggcctgcgccatcctggacatggagagggacaccctcatgctgtccggcttcggctccaatgagatcctcaaggtgaggctccggccccgcccccgccctgtccccc

SEQ ID NO: 154290 - DNA, 122 bp, Homo sapiens
tcctcctccaggaaagagggcacccttcaccatccatgcctcacagcaccaggccaggcccgggacatccacaggtgcctcagaccccacccctagtttccaagagctctcagtctaggcag

SEQ ID NO: 154291 - DNA, 122 bp, Homo sapiens
gcccgagcacctgcgcgagcccgagggagcgcccggccctctgcccccgccagtcgccggcgcccaacttgggggtcccgccgtccgcagccccaagtctcgcggtgctaccgctctgaccg

SEQ ID NO: 154292 - DNA, 122 bp, Homo sapiens
ttgctccagtctccttgacaggtctccccggcaaaacccggaaaacagaggcactggaagcgaggcggagggaagcgcaagccccactccgccccgcccccgcccccgcccccgcccccgcc

SEQ ID NO: 154293 - DNA, 122 bp, Homo sapiens
tgacaaaagcgcccgtacagtgctcagtcctgtaaccaaagctgtctagggtgcagacatcgctcaccggaccgggtagggctcgtgcgctaagggcgccgggtattccagttagtggagag

SEQ ID NO: 154294 - DNA, 122 bp, Homo sapiens
acttgggggaaatgtggcgagagggcaggactcggcagcccatgggcatgccacaagatgcgcccaggcgctctggggtgaactctgctgtgacttcaggccagaggtgtctgcccccgcag

SEQ ID NO: 154295 - DNA, 122 bp, Homo sapiens
aggtcagcctgctgtgagcagctgcagggaattcaggggtttctagaagccactgaggcacgcaggtgggtgaggcaggggtgggggctgtggaggaaggtgttctgcaggggaggcgcagg

SEQ ID NO: 154296 - DNA, 122 bp, Homo sapiens
catgcacagtggccagacctcatgctcactcatgcacccttcgccactccgcacctggcccgcccttggcaggtatgggattcagggatccagccccagccgattgcagcctgccaggccga

SEQ ID NO: 154297 - DNA, 122 bp, Homo sapiens
tctcacttccgcacttggggtttcagccctcggagaagagcagccgcgtggttcccctcacgcagacatgcttgagctttccgtgttggctgttccggtgtcaccctacacacgtctgtgcg

SEQ ID NO: 154298 - DNA, 122 bp, Homo sapiens
ttgagtttggtcctcactggtcagtgaaatcttcagtcgatacctgtgtttgctggaggccgtgtgggatagatcaaacggtggagaatgtggttctggagccaggctgcctgggttcaaat

SEQ ID NO: 154299 - DNA, 122 bp, Homo sapiens
gacgcaggcagtgtttggcgataacatttcctggaattgatgcgttatctgcagcgtgtgcggctcagcaagcttgccttattcacaggaatacaaaagcccgtgcagcgcagcgctgcttt

SEQ ID NO: 154300 - DNA, 122 bp, Homo sapiens
cccgaagagagtaagggactaggtagggatcccacagaggccgccactggtctcagagctcgccaaatcccgctgggaagccgcgggcgtcccagttttgttctgcagcctgagtcccagat

SEQ ID NO: 154301 - DNA, 122 bp, Homo sapiens
gacacttttttaaatatataatatatatttaaatagaaaaaccctactcaagtcctagcccgggcgacagcacatctgtgtgtttgtggtgtggaaagccaaaacattaaaaacacatgtgc

SEQ ID NO: 154302 - DNA, 122 bp, Homo sapiens
cgaaaagttagcaaagtacgtttagtaaaaagcacacaataaaataaaaggtgtggagtacggcagacattccaggaacctggaatgtgaaacgcacgtggaaacgtccggccctgacatgc

SEQ ID NO: 154303 - DNA, 122 bp, Homo sapiens
tggaatgtgtgcgcgtgtggccgggtgacaggggcggaggatgggcggctatcaccaagccgcttgttgaaaactgcccaatcacagtggaggctgagctgagtgacaggaagacggttcaa

SEQ ID NO: 154304 - DNA, 122 bp, Homo sapiens
agtctggagaccttcttttcatgccgtcaagtctcattttgccaaggatttatttttcttcggggagagagggagagcgggggcaaaggatgttctcttaaagtatccagcgatcagagccg

SEQ ID NO: 154305 - DNA, 122 bp, Homo sapiens
cccagcagacaggatgagggcagggtgtccctgggtggctgggcccaagcccagtgcatgcgtggggcccgaagggtgggatgagggaacagcagcctgggtatgggggaaacagctcttct

SEQ ID NO: 154306 - DNA, 122 bp, Homo sapiens
gacccctgctgctacgagcctaggcttggggagagggcggagagaggccagcggggtggacgcggaccccaggacccggagcggccaccgcctccaacttcaaacttgccatcactggcatc

SEQ ID NO: 154307 - DNA, 122 bp, Homo sapiens
ggctccgtggctcctggtcctccaggtcctctggcagctggaagttgcggtccagcacctcggccgcctcctgccagttggcgaagcaggcggtgcccaggcgctggatctcgtcggcgccg

SEQ ID NO: 154308 - DNA, 122 bp, Homo sapiens
cggagagaaagcatagcgccgacgagggggaggggccgggcagaaaggagggtggggtaccgggtgggacacactgacctaggagaaagtacaacccaccccaaactttcgcagacccggga

SEQ ID NO: 154309 - DNA, 122 bp, Homo sapiens
aggcacatgccactgcacccggccgacaaatggtattctcataaccaccagaaagagacacgtcctctggtgtcagagcgtggctctgagcactgagaccgactcagttgctagcgtccacc

SEQ ID NO: 154310 - DNA, 122 bp, Homo sapiens
aaacttatttttcagttctgggtaactgaagcacaatgtcccaactcagcttcttgcttccggggcacgtcagggtgagtgtgcaagttgatctcagactcctgggggtgagtgtgactaca

SEQ ID NO: 154311 - DNA, 122 bp, Homo sapiens
gtggctaccccaagctagtacaagccagctccagcacagccacatcctttcataggaatacgtgtacacaatctacctgcaccctgagtaggaccctcaactctcaccccaaatataaaaac

SEQ ID NO: 154312 - DNA, 122 bp, Homo sapiens
cctctctaggagccgctggaggtggaaactcgttggcattaaccctgggctggaggggcccggccacggggtgggtgaggaccggacgccccggagcccgcggggctaccggggcagtgtgt

SEQ ID NO: 154313 - DNA, 122 bp, Homo sapiens
aacgtctatagacacagtttgcttaagcgagagtgggggatatatctgcccccatagagtcgatagagggtgaagcagggaaatccatgtaaggtgacaacttggtccatcttatgacatgc

SEQ ID NO: 154314 - DNA, 122 bp, Homo sapiens
ttcacaaagcccgccccacccacccaggtcagggctcagggctgcctgtgaggtgagcttcgttctcccatttcacagatggggaaactgaggcagagggcaaacgcatctgcccagtccat

SEQ ID NO: 154315 - DNA, 122 bp, Homo sapiens
tccgcgggcaaacaggcacgcacctgcctgcacagaacctcagcctctgcccgcgcccgtcgcccctcgtcacttgttccccaggatcctgtaaggcacccgcatccttcccggccacccag

SEQ ID NO: 154316 - DNA, 122 bp, Homo sapiens
gtacttcagtttctccagattaccacgtaagacagctctgtggatcctcttcagatgatacggtttaatgtagtaatggggaaatgcgaagccatccgagcacaagcgctccatgagggtgg

SEQ ID NO: 154317 - DNA, 122 bp, Homo sapiens
gtcctctcgggggctataaaaggggaacagaggctcccgcctcctcggctccactgcacccgtagccaggacagctcctctaccacactcgagaacggtgagttgcacatccaggcgctgga

SEQ ID NO: 154318 - DNA, 122 bp, Homo sapiens
tgacaggctgggattggcccaggtatcgtggctggagaccgtctgccttgcgcccctccacggccactcgccgcggagactccgccccttggaagtgccccctaattaggaatatctcctcc

SEQ ID NO: 154319 - DNA, 122 bp, Homo sapiens
gctttctcagagtcccctaaagagctgtttttttctcgcttctttgtctttttccactttcgactagccaattttgccctcttagcaaaatctgttcttgagaggaaagacacaaaatacac

SEQ ID NO: 154320 - DNA, 122 bp, Homo sapiens
gtcgccaagctctcccgattgccccctcccctcgtgccccatccccccaccccccgacggcgtacccgtgagggagtcgtaacactccacctccgtgctctccaccaggcgccgctgctcct

SEQ ID NO: 154321 - DNA, 122 bp, Homo sapiens
ttccctgagcgtcaggacggcgggtctcatacctccctcacccttgaatatgtctgccaacgcgcccaccatggcctgagactctgtcatttaaaaacgagctctgaaatatttcggacact

SEQ ID NO: 154322 - DNA, 122 bp, Homo sapiens
aaaacacataattatctccagatgagtcagcttggggaggcggaggcagcggcagcgcggcgagcgtgcagggaggccggagccctgcccggggcgggtcgcggggtgggcgggtgaactgc

SEQ ID NO: 154323 - DNA, 122 bp, Homo sapiens
gagggaagaaggaacagtggaggcgggacgccctccatctcctcggagccccgcgaggtccggcccagcaacttcccggcatccgcgctctagcctgaaccctggcctgggccgagcagtgg

SEQ ID NO: 154324 - DNA, 122 bp, Homo sapiens
tggtgggagctgcctcagctgtgagctggaaccctggtgaggccatggccagggcacccccggccagtcagccgccatgcagttcactgtgcctcgcagcccacaggcacgccctggccccg

SEQ ID NO: 154325 - DNA, 122 bp, Homo sapiens
cacgtagcctacgtgtgcagtaagctataccatctaggtttgtataagtaaactctatgacgttcacaaaataaaattgtctaatgacacatttctcagaatatatccccatcattaagaaa

SEQ ID NO: 154326 - DNA, 122 bp, Homo sapiens
actgggaggcaggatgaggggaggccatggggcggctggaggtgcggcctgggagccctgcgtgctgggccctgggcagggacggcaggcgaggcgtgtggaggaagagccgcgaagagctg

SEQ ID NO: 154327 - DNA, 122 bp, Homo sapiens
cctcggctagtccttgccgactgagctccttctctgggcactatggaagttagccaggtacgctcggagtcttagagactgccatttctcccttccacccgacttctctggaaggagaggca

SEQ ID NO: 154328 - DNA, 122 bp, Homo sapiens
ggagtcgcagagggcagaaggtagacactgagggccaggcagcggcactgcggtgggcgccgtggaaaggctggccagggatattcacattgagtagaaaaataatcgtcatttgaatacaa

SEQ ID NO: 154329 - DNA, 122 bp, Homo sapiens
agtggaatcacacacaaggttcgaaaaacaatttaataaggaaatgcacaggcatgctcccggccactcctagatgcccctcaaccgcgccagccccctcccctgcactggctgcagccacg

SEQ ID NO: 154330 - DNA, 122 bp, Homo sapiens
cccactctgcccgctcattctcagacctaagcacaagaggaagtgagtctacccatgatgcggtcacactttttgaaacctggaagtgggccacatgttgtaaaaggaagctgaacgctggt

SEQ ID NO: 154331 - DNA, 122 bp, Homo sapiens
cctttggcacagtggttcggcatcctctgggggagattttgaaaactgcaggctccgcgtcgagcccctgacctgctgaatcagaatttctggtgaaggtagggtgaaaacggggctgaatt

SEQ ID NO: 154332 - DNA, 122 bp, Homo sapiens
gggaacgctccatcactgtcacatgcccccggctccgagctagcatgtgaggtgggcgtgcgtccgcctgaggactaaaccacggagtctagccgggctcttttcgggggatcccacaagtc

SEQ ID NO: 154333 - DNA, 122 bp, Homo sapiens
gcatcgtaatggtgtccttcgtgttgacgtgaaaacccagtcttccttcagttcatttcccgtttattagggatgcaaaactccagccacaggtgacctacgactctgactccttccccacc

SEQ ID NO: 154334 - DNA, 122 bp, Homo sapiens
aactttaacaatgtcccatgtgtgagtatagcacaatccctactcggcagggagatggaacgtacacagataactctggaaagagagagatccagtttggtttcttttcagtctgttttatg

SEQ ID NO: 154335 - DNA, 122 bp, Homo sapiens
acctcaggtgatctgcctgcctcggcctcccaaagtgctgggatttcagccatgagccaccgtgcctgtcctggaggatgaatttttgaaaatatttggaagtcattcagatttccttgagg

SEQ ID NO: 154336 - DNA, 122 bp, Homo sapiens
ctgaagtggagctgcaactcaaggcattctagactgtctcagtcatataaaactgaagatcgccctaacttgcactccaggtgggttctgtaaagaaatctgcatcttcacagatgcttcct

SEQ ID NO: 154337 - DNA, 122 bp, Homo sapiens
ccccctgcttgctcaatcgatcacgaccctctcacacagacccccttagagttgtgagcccgtaaaaggtacgagaattgctcacctggggagctcagttgttggagatgtgagtcttgccg

SEQ ID NO: 154338 - DNA, 122 bp, Homo sapiens
ccggggtggggggctgctctctgtctgtagggatccaccctctaattacagctttcccagcggagaaggctccagatccaatgaggagggcgagagagggaggcagagggtccaaatttcct

SEQ ID NO: 154339 - DNA, 122 bp, Homo sapiens
ggaaatttgggtgcagacacgcacatagggagaaccccacatgaagatgcaggcagacatcggggtgtcactcctacaagacaagaaaagcccaggattgctggccaatgccagaaactggg

SEQ ID NO: 154340 - DNA, 122 bp, Homo sapiens
atatattattaaccaaaatggtagtgatgaaatgaattaactggttattagaaacctgggcgtgaagggagaagaacgctacaaaacactccaagtcctccacgttactcataaattcttgg

SEQ ID NO: 154341 - DNA, 122 bp, Homo sapiens
ttgaagagggggctaggcggggacagcggtacccacggagtctcggagtctcgaggggcacgttccctcagggctcccaaggggcgcccacaaggcgccaggctgagccggcgcagccaaat

SEQ ID NO: 154342 - DNA, 122 bp, Homo sapiens
catagagattcatgtcttcttaatacttctcagcaagctgctagctggtaacactaatatcgctaatatataagagtgggttacattctttatgtaatcccctgcttttagtgtgtcaggag

SEQ ID NO: 154343 - DNA, 122 bp, Homo sapiens
tacctggcgctcttcgtggtgggcacggtgggcaacacggtgacggcgttcacgctggcgcggaagaagtcgctgcagagcctgcagagcacggtgcattaccacctgggcagcctggcgct

SEQ ID NO: 154344 - DNA, 122 bp, Homo sapiens
catgactccagaatctatacttctaaccaaccagtgagtctcgtggagcaccagtatctgcggtgcttcctaaaaatgcggctttctagcatcaagccaaaccagctgaatctgaatctcag

SEQ ID NO: 154345 - DNA, 122 bp, Homo sapiens
ataccccgccgctctgtcagcttgagctccaggtggagctccaggtggctcctcctctcccgggggaaggcggccctggaccagcaggcgggcctgctgtactcccgctttggggctgcagg

SEQ ID NO: 154346 - DNA, 122 bp, Homo sapiens
gttgggtggggaactgaatgtaccagagacacacacattctcagagtcaggctatgtgtacgtgtctgtgtgttttgttttcttttcttttttaatagagatggggtcttggtatgttgtcc

SEQ ID NO: 154347 - DNA, 122 bp, Homo sapiens
aggcctgaccgtgccccttgctgtggaatgacctctgtctctcagcctgggccttccccccggggcggctgcctcagtcttggtgtccccagacatggtacccatgtttctggcagtcctgg

SEQ ID NO: 154348 - DNA, 122 bp, Homo sapiens
ttctgcccattggagcacccgcacactactccaaatcaaaaccactaagagttcctcccgcgcagactgctgccccttcagctgccctcgattttgctccacgcctgccggccagagcctcc

SEQ ID NO: 154349 - DNA, 122 bp, Homo sapiens
tgggggtgccgctgccactccccgcttagctcaccccagcagggctggggctggggtgtccggtgtcctgggtcaggctacacggggacacgtccatctggccctggatctcatcccgtaac

SEQ ID NO: 154350 - DNA, 122 bp, Homo sapiens
gaatgactggggtgaggcagggtcaagtgctacgggcctccttcccgtgtcctgctggaacgtcttcgtgtccacctgggtccagtcctgaatcatcttggagaaacaccttggtttctagg

SEQ ID NO: 154351 - DNA, 122 bp, Homo sapiens
tatcttgtttcataaataggaacacagtaatcttcattgtttgaaaagcaataaacttcccgaagtttccagaaaaaaaaaaaaagctatctattgatttcttttttccctccatgaagagg

SEQ ID NO: 154352 - DNA, 122 bp, Homo sapiens
ccagcgcgaggcgcccccaggagagcccggccctcgcaagggctacagctgcccggagtgcgcccgtgtctttgccagccctctgcggctgcagagccaccgcgtgtcgcactcggacctca

SEQ ID NO: 154353 - DNA, 122 bp, Homo sapiens
aaacacgatggctccaccttccgggacctgctccctggggagtatgtgcagatggcaggccgggcagggcggaggggcctggaccccacaggcaccgttatcctgctctgcaagggccgagt

SEQ ID NO: 154354 - DNA, 122 bp, Homo sapiens
gagtacaccgtagttttcaaggaaaacacaccagcaaataccggtactaggatatgcatacgtacgtgcgcatcagtgtgtgcctagagacccgggaaaccggtccatgatgataagtcaca

SEQ ID NO: 154355 - DNA, 122 bp, Homo sapiens
ggggtcagtgtaataggggattccaggagctttggcagagatgtttctgcttccagagatcgtgggatggagtttttcttaccgtgaagacatcgaccctgtgtacaccttgtgccttcact

SEQ ID NO: 154356 - DNA, 122 bp, Homo sapiens
gagcgggctgcaggagcgcgaggcagagggctcggcggccgctcccgcgtccccgcggcgcggcagcccggcacgacccagcactttgttctcattttcaggtttttttgtgcccctttcag

SEQ ID NO: 154357 - DNA, 122 bp, Homo sapiens
gagggaggaaagggaaatcgctatgttgctggctttgaagatggaggaaggagccaggatcgtaggaataaaggcagcctctagaagcttgaaaggtaaggaaatagattcaatcctagagc

SEQ ID NO: 154358 - DNA, 122 bp, Homo sapiens
ggaagcagcttgtgggatgccaggctggaatttctgaaattctgggagtgtctccctagccgggtccctggctggcctctgccagctcctgcgagacttaggcctcggtttccttttgatag

SEQ ID NO: 154359 - DNA, 122 bp, Homo sapiens
actccattttattatggaaagttaaaaaacaaacaaaacaaaacaggcaattgataaaggcggcacaatggggaaggagaggtgaggtgtctccttagccacccgacaccatctcaattcag

SEQ ID NO: 154360 - DNA, 122 bp, Homo sapiens
tgagaaggcagagcagtgtctgtgctgccaggtcctggtgaagcccaaggttgaagggggcggcttcctggagccagcacccctgcctcctggtcctggcctctcccctacccctcacatgg

SEQ ID NO: 154361 - DNA, 122 bp, Homo sapiens
cggcgactaggcggctatggagaggtacagcgtccagttgcgcccagccacactgcaggacgccgcccccgccacactacacctgataccctgcggcccaccacggtgtggcgcttcatcac

SEQ ID NO: 154362 - DNA, 122 bp, Homo sapiens
gcgccagcttcagggtcccacccccccatgcctggctcttggctgaacatttcttcccagcgcttccagcagccagaggcaggcgcccaagctcgctggctgttgctgagggcctgtaggtg

SEQ ID NO: 154363 - DNA, 122 bp, Homo sapiens
agtcagtttgtcattgcatttagtagttggatgagttatataagttgagattcaaataaacgtttcttatgtttttctaagtttagttggcagactcttctaagaagccacattgatatttg

SEQ ID NO: 154364 - DNA, 122 bp, Homo sapiens
ctcttctgtcgctttctctccttcaccacgcagtctgtgaacagcactttctacactcctcgccggcaagcaggctcgtgtcgagggtagcagattccactggcgattccactggtgctgtg

SEQ ID NO: 154365 - DNA, 122 bp, Homo sapiens
gagagagagagaaatagaaatatcctagagttttgaaagcgctttcttgctacgtggccgcggaggtgcattgggcccgcgcctccaaacggaaatcattaggtcctctctgattttctaac

SEQ ID NO: 154366 - DNA, 122 bp, Homo sapiens
tgtcatgataaagagtcagatcactgagctctgccaaaaatacctggtttggtagggtctcggctcctgctggctccctggcggatacagtccttctctccagtgtcgtttctcaacctctt

SEQ ID NO: 154367 - DNA, 122 bp, Homo sapiens
gcccttgcccggcttgtccggggagcgtgccaccttgacgaagcagtcattgaaggacagcgagtggcggatggagttctgccagcgctgctggttctgccggtaataggggaagaggtcca

SEQ ID NO: 154368 - DNA, 122 bp, Homo sapiens
aaagcagctatgacttccagaagtgaagtttgaagatagaacgacttcggcccagctccacgtttatcctatttctttgtatgcattttatattgaaaaaaatacggtacattttcttcata

SEQ ID NO: 154369 - DNA, 122 bp, Homo sapiens
cggaggcggggtacgtggggggcgggcgagtagacggtcggcatgcataggggccggaggcggggtgtgtacggggcgggtgagtagacggtcggcgtgcgtaggggccggaggcggggtgt

SEQ ID NO: 154370 - DNA, 122 bp, Homo sapiens
tgtgtctggaattggttccttcccgtgggtccttggtcctgctaacttcaagaatgaagccgaggaccctcgcggtgaaaaagttcttaaacattgcacgtccggagtttgttccttcacgt

SEQ ID NO: 154371 - DNA, 122 bp, Homo sapiens
gtgctgcctagcaagcagcatgtcccttaggcatcgccttcccagataagcagcaaaaaccgcagcccgacttgcctccggagacgggccggatccttcctgagcaattgcaaacgtgacac

SEQ ID NO: 154372 - DNA, 122 bp, Homo sapiens
tttatcgccccagggaagtgaagagtccggcaaacatccagtcaatgccatcaaggcagccggtcaccccagctgtgagggcctcggcacctgatggccacatctccccaaacactctgtag

SEQ ID NO: 154373 - DNA, 122 bp, Homo sapiens
tatgatttactacaaacagctcccctggcggagccttctcaaggactcttctgagagcatcgggcttcaccttgagcctccaaagggttgggggcagggccgaaaagaaacagagctgcact

SEQ ID NO: 154374 - DNA, 122 bp, Homo sapiens
gggctggctggtgatgctggcggccatgtggtgcaacgggtcggtgttcggcatccagaacgcttgcggggtgctcttcgtgtccatgctggaaaccttcggctccaaagacgatgacaaga

SEQ ID NO: 154375 - DNA, 122 bp, Homo sapiens
aatatttacctgtgcctggcacagagcaggcactcaaaaaatattttttagagcatgtgacgcgccatgaaccagaggagccactttaaatggacaaacggggatctcattttttttttttt

SEQ ID NO: 154376 - DNA, 122 bp, Homo sapiens
gttggcttcagttaacgatcctgctagcagcccctaggaagcagcctatccccaaaagcacgaggcctgggatggcctcacagagcagaacacccattacttaccagagggttgatgctctt

SEQ ID NO: 154377 - DNA, 122 bp, Homo sapiens
attctgacctatcacaggtcgtgtctgggagctgattgggttggaaatcattctgactcacgtgtaccttactttgtttctacagttctcttggagagatggagttctcctacatgtgacat

SEQ ID NO: 154378 - DNA, 122 bp, Homo sapiens
ggcccagccactacagagaaagccctggcgagagaagagaaaggggccgagtcgcggcgccggcaggcccgcctcccccacaggccgaggccggcaaatctgctgcctcatcccggcgtccc

SEQ ID NO: 154379 - DNA, 122 bp, Homo sapiens
ggattcaaagagggctcggtcataagtacaggctgttggctgggttttactccaagctcccgctcaaagagatgtttccagagtttctccatgtcatcccatcctgttaccagtccacgctc

SEQ ID NO: 154380 - DNA, 122 bp, Homo sapiens
ccacacgcccaccagcacgcggcggtgtcgcagttccagttttggccaggctgctgggtgcgcagtggcgcctcgccctacgacataagacacggaccatctttccacatgtggatttgcca

SEQ ID NO: 154381 - DNA, 122 bp, Homo sapiens
ttttaaaagaagggaaaaacccagtcacgctcctggagcctggttcccacgggagcaggccgggctgtccacgacggaagcctcgaccctggctggggctgtcggccgggcagcgcgggaga

SEQ ID NO: 154382 - DNA, 122 bp, Homo sapiens
aaaaaaaacaaaaaaccccagcacatcagtattgccttttcctcattggtaatagctgagcgttttcctctagagggacagtctccctcatgtcaattctacaaaagcagctaaagcaaatg

SEQ ID NO: 154383 - DNA, 122 bp, Homo sapiens
ctcgccttctcctcgagacccgggttaagtgggcagagggctccgagggtcctctcccgccgtgggattgcacagagggctgggtccgcaggctggctaaaaggacctagcccaggattgcg

SEQ ID NO: 154384 - DNA, 122 bp, Homo sapiens
ccgggttgaaatggggctccgtcacctccgagggagcaggagtgaagacccgaaggtgagcgtggattctctgccaagaatcccgtaggtggctggtggaggtcgcctcgcctttctggacc

SEQ ID NO: 154385 - DNA, 122 bp, Homo sapiens
acaggctttgtcacccacacacatccagaggtgcccacgagtgtattcggggagaagcttcgagaacaagttgaagagcgactgtccttctatgagactggagagataccacgaaagaatct

SEQ ID NO: 154386 - DNA, 122 bp, Homo sapiens
caggaagcatagtcctggcatctctcagcttctgagaagacctcagggggctttcttttacgcatggtggaaggtgaggcgggagtagccatgtcacctggtgggagtgggagcagtagagt

SEQ ID NO: 154387 - DNA, 122 bp, Homo sapiens
gtccctcccctgagtggcctctgcgggactgcagcggcctctgcgaatttccgtctggcacggacttgtgagcattagggagcaaactacaacatgaatgctgaggaagggtagaagagagg

SEQ ID NO: 154388 - DNA, 122 bp, Homo sapiens
agagctggttcttgttcttttctctctcttggcccactgggcccacagtggttaggtggccgagtgtggtttcccgaaactctttggagtcgcctgggtctgcgtgcccctggccccgtcct

SEQ ID NO: 154389 - DNA, 122 bp, Homo sapiens
tgcggtttttgcaatacttttgcaccaacctaataattgttcataattctaagagctattcggatcccattaggagcttaaaagggacaaatgtgctcagggcatgcagtttttgccttccg

SEQ ID NO: 154390 - DNA, 122 bp, Homo sapiens
cccagcctgtcttatctgtgcactcctgggagcgggtcacaaatgtcatcctctgtcttgcgtgtttcaattttttaaaaaaatgttgacaggcctggtggttccacctttcctaagtaatt

SEQ ID NO: 154391 - DNA, 122 bp, Homo sapiens
gtggcatccacatcaccccgaaatgagtgcacgggtggacgcatgagcagaaaatgactacgggagtgtcacccctaaaaatcagactagtgaaaagtacgtaggggtcggaaatataaaga

SEQ ID NO: 154392 - DNA, 122 bp, Homo sapiens
ccacacaaattagcttattttcttgtgttttcctctaattatcaaaggctatataatccacgaaccctttccccaaatcaaaataactccagatcacctcaaggtaggaggtgtttaagaaa

SEQ ID NO: 154393 - DNA, 122 bp, Homo sapiens
cacccctgacacaggcacataaccagtttccttttcggtgccgtcacaggcgggccacgtcgcaggataggtttttctacacatttaactgctaaaagggggaaagttccgctttcagacct

SEQ ID NO: 154394 - DNA, 122 bp, Homo sapiens
gtccccggacatgacagcccctggaggtgatgccccaagttcaagatctaagtgagaggccggtcagacagaggcaagagctcagcgcaccgggatggaccaggtcaggccctgggcggcag

SEQ ID NO: 154395 - DNA, 122 bp, Homo sapiens
cttgttccagcagtgaaatgggatgctctgggctcaggtacaaacaagggtgtttagaaacgcggatctccagggctcatgtgcccatttcagagtgcagacacgcagctcacccacaggga

SEQ ID NO: 154396 - DNA, 122 bp, Homo sapiens
taacagtcccaggaatggaagagaccatatcagaggcagacaaaaacctttccaagcaagcgtggggaaaccaagaagacgggatccaggaccaagtcctgcgcggaatcaacgaatcaaca

SEQ ID NO: 154397 - DNA, 122 bp, Homo sapiens
tgccggcaacgccgaggcgcttctgcatctgtgggccgaggtgtgtggcgagcgtccgagcggctggggaaagtggggtgtgggaacactgaggggtcccaaagaaaggggagaggaagaga

SEQ ID NO: 154398 - DNA, 122 bp, Homo sapiens
atgcaacttgagtagcagcacagatacgtcaacagtatcaccggggcccttcgttccatgcgtaaacccacacatgcgtaggtgaggcttcttggagctgggtttctctcttcttgaaacac

SEQ ID NO: 154399 - DNA, 122 bp, Homo sapiens
ctaccaggaacctcaacctctaacaacattggtccccgttaccgtggagtttgcgcccagcgttcgctggagggccgtttgaagaatgattgttgtcgtaaaggcctttgataataatagat

SEQ ID NO: 154400 - DNA, 122 bp, Homo sapiens
gtaggtgtacacccagccggtgatattgatctgaatataatctgcgggggtggagtatgacgttacattcaatatagcactgtgtgtgcatccaccaggtgactttgctcctaatattcacg

SEQ ID NO: 154401 - DNA, 122 bp, Homo sapiens
gtttaaaacaccctggtcttaatatctcagccccagagtaaacatttgccttaccaaatccgcagctatcccacggtcactgtttacgctggaagaggccaaaggccacggcctgcgggatg

SEQ ID NO: 154402 - DNA, 122 bp, Homo sapiens
aaaaagtaatggggcaagaaaaacagatttccttggccacttttaaagccacagcggctccgggtctgtctgatatttcacaaccaattggggttggctaaccttggcttacctcatctcct

SEQ ID NO: 154403 - DNA, 122 bp, Homo sapiens
aggcggggggggggcgcaggaagcccctgggatggggaccgcggcttgttaattacaggtcgcggggcctgatttatggggggggcgggccgcatgctgcgcgggggctgggcatgtctggg

SEQ ID NO: 154404 - DNA, 122 bp, Homo sapiens
ctccctcccgccccccgaatgctgtgtgtctgcttgaccccgggtgggaaaagccacagccggatgtgccggggcgcctgtgtccccggggccctgctctccttggtgagtccatgtggagc

SEQ ID NO: 154405 - DNA, 122 bp, Homo sapiens
ggcacagcctggtcccgggaggccccttgtgcacaggtggtggcccagggccacagtgctcgctcttgggggacgcgcggccgggggacgcggcctgtgtccggcccggggctcccggcggg

SEQ ID NO: 154406 - DNA, 122 bp, Homo sapiens
ctcaggatgagtcagcccccaaactgacagatagggaggataaaatgggaaaaaattttccgccttcagtgagcctataaaaattgcaaacacatgtaacagtcaggagctggattaactct

SEQ ID NO: 154407 - DNA, 122 bp, Homo sapiens
ctggaaaaactcaagattgggaaggtggatatgaatggcttgcccaggaagagttggaagcgtgtttactgagagtgacagaagcagccgtcacagataggagctctcattcctcatgctct

SEQ ID NO: 154408 - DNA, 122 bp, Homo sapiens
aacattttaaagatatgggagaaattaaaccatttcatttatttggttccaatatctccccgccaacctctgagagtggcatgagttccagaaggtccgctttctccagccccagcagtgga

SEQ ID NO: 154409 - DNA, 122 bp, Homo sapiens
agacctcaattatctcctttatatctgtattacacataacttcttggtgcttctgaatgacggggcacaccttaccctgagcatgagaaccttgagctcaattatgcctgaatactaaaact

SEQ ID NO: 154410 - DNA, 122 bp, Homo sapiens
tgcacactttctcggcttttactgtgatttatttttggcttttgccaccacctaccactacgacctgtttgtttttaaattttatttatttttttgtttgagacagagtcttgctcagtcgc

SEQ ID NO: 154411 - DNA, 122 bp, Homo sapiens
ggcagcagcaagcagtggcagacaaagcacaggcatgctcatggctaggtcacaagaacacgacttacaaaagtgggcggcaggcagttttggcccttgggatgtaatgtgctgaggatccc

SEQ ID NO: 154412 - DNA, 122 bp, Homo sapiens
ctcccaacgccctccccactgtaagcccccttctcaaagccagaaccattcactgactggcgcagtgaacacgtcttctatgtcactaagcatccggcatcagcggcaaagcccttctgccc

SEQ ID NO: 154413 - DNA, 122 bp, Homo sapiens
agccgttcctcagcagcacggcacaccccctcctgcggagccgcaaagctcacgagtgtgcggaaagtgacccggaccctgcagctgcctctcggccggagctagggctatgggtgttgggt

SEQ ID NO: 154414 - DNA, 122 bp, Homo sapiens
cccgtcagtccaactacggctacctatgtcttgtctgtggcttctgggcgggctggcggccggggcagcgcaatggcatggctttggtctggatgacggccccgcctccggccctcctgggc

SEQ ID NO: 154415 - DNA, 122 bp, Homo sapiens
ttaattttcttttgctctttagcatctctgctatctctgagcaaacatgcccagcttgcccgctggcctaagaagaatgagaaacacatggattggaaccactcacgctgggaccagcctag

SEQ ID NO: 154416 - DNA, 122 bp, Homo sapiens
tgacctgatctggaacaaaatgacaatgacacagctgcccatgaggctcgggcgtgagaacgccagatccaccattcaccggcagcgcagtctggtgattcaggcaccccaggcctgctttc

SEQ ID NO: 154417 - DNA, 122 bp, Homo sapiens
aaatttgagggtcttctgggatcccattctcctttgggaggggtagcgattacttttcctcgtgagacacgtcccactgccttgttgcagtggcccaaggagcggaggatcgggtccaccca

SEQ ID NO: 154418 - DNA, 122 bp, Homo sapiens
taacgtgtcagccccaagagagcgctgcccacagccccgggtgggttgggttcaactgcacggggcggggcgccaacagctcaggacttgggttgcaggctggttcttgcaccaaccagcgg

SEQ ID NO: 154419 - DNA, 122 bp, Homo sapiens
atttcacccaccatgctgccatattggacagtacaactttacactgtattatcttttaaacggtgaaattttgaagtgataaaattcttaaagttctttttataattttattattgtcattt

SEQ ID NO: 154420 - DNA, 122 bp, Homo sapiens
aactggggctgcgtgaggtgcttgccggccagcgcgagttctgggtgggtgtgggctctgcggaccccacactcggagctgctggccgaccccactgaccctgggcagtgaggggcttagca

SEQ ID NO: 154421 - DNA, 122 bp, Homo sapiens
aacttgtattgtgcaacctgtcagagcacgaatgtccccaggagactagacaacggccctcggggaaggccccacagctggcaagtctgggacctcacagccagtttcctgccgttggtccc

SEQ ID NO: 154422 - DNA, 122 bp, Homo sapiens
cagacattcctgcattttgagtcagtgttagtctttggggcgcagcctgcattccatcctcggaagctcccagcactccagggctctgtcagggctgtgaggcggaatcccacgctgacagc

SEQ ID NO: 154423 - DNA, 122 bp, Homo sapiens
acaaaactataggataaaaaccacaaaggggtagggggctaactagaaacaggcacagggcgctttttgggttgatggattgttctacagcctgattctggatgtagatgactgcagacttg

SEQ ID NO: 154424 - DNA, 122 bp, Homo sapiens
tcctgcttctttgggttgccaatcaagagtatcctcaaaacgacttgactttaattttctcggaggtgataggcttccacacaggtctccagaagccctgcattgaatatccatccacactt

SEQ ID NO: 154425 - DNA, 122 bp, Homo sapiens
actccagatgcctcagtgactccggagcttctggcaatctctcctctgctagtgcgaccacggccaggcttgagggcctcagtcagatgacccagcctttgacctaccctcatctgtgcaac

SEQ ID NO: 154426 - DNA, 122 bp, Homo sapiens
gcacattaaatggagaaaaggtatatacattaattcaaggtgtacaccccgggagaatcacggagtatgcccacccctcagcagtgctcagaagcttctatactatcctggcagaacaggtg

SEQ ID NO: 154427 - DNA, 122 bp, Homo sapiens
cgcaggtagagtcagaggcaggttcaaagacacacagagacacataggtgaagatacattcgatgtaaacagcttaggagccaggtcgggcctggtggcttctaagctcatatctgtaatcc

SEQ ID NO: 154428 - DNA, 122 bp, Homo sapiens
agtgagctgaaggatttaagaactgtcagcttcctatattatagatgggatggggtttaacgtctgcagcagccagacttcgtaagggccaagaaacttgtgtgaccttgtgtgatcttgag

SEQ ID NO: 154429 - DNA, 122 bp, Homo sapiens
gtcaagactactactgaaaattaagtgcagttctatcaagaactagaaatgaactgcacgcgtagtgtcacttaaagcaaagcttcatgaaaatataatacacttctatgaatgtatcagtg

SEQ ID NO: 154430 - DNA, 122 bp, Homo sapiens
tggtggcctttgaccgtactcgcctcccgccgggccagcatctaactaagcccgcctggccgcccttctcgggcgcgcagttgtctcgagtgtgggtacccacctccacccccaccctcacc

SEQ ID NO: 154431 - DNA, 122 bp, Homo sapiens
acctggagttcgggccgggagttcgggcagcggctcccgcggcggcggcagcggctgctgcgtgttggtccccgttggtaagtaacagtctccacggctacagtctctatggcggcggcggt

SEQ ID NO: 154432 - DNA, 122 bp, Homo sapiens
cgagactggcacagtggagacggcgaagtcctagggagagcgaagggaggtattcaggggcgcgggaggggtgatggggtatcttcaaacataggctgctctctgcctctcatttcctcagc

SEQ ID NO: 154433 - DNA, 122 bp, Homo sapiens
ttttttttctatcagtgccaaacgttgcccacattaacctgctggatttgaattttaactcggaggcgataatcacattaatttacatttctcagtttatttttccctaaaaatcccatgta

SEQ ID NO: 154434 - DNA, 122 bp, Homo sapiens
taaatataataaagtgctatcttcaaggcatttctgcatccaaaacactccccagaaacccgccgagccctcccatctatccagtctgaatgtcacaaatcatagcccagaaactgctttat

SEQ ID NO: 154435 - DNA, 122 bp, Homo sapiens
acagcgattttagaggtgggctgtggcaggaaggcagtgccccccacctgcctgcagctgcgctcccatctacattggcctttgcggggccagcctctgtccactctcttgagctctcatgt

SEQ ID NO: 154436 - DNA, 122 bp, Homo sapiens
cagctgcgagagccccgagacaacctctgcactgtttatgggatcgcattaggggagcagcggccctgcatgaccccacaggtgagcaggacacctcatcatagggtaggcacgtgagcaga

SEQ ID NO: 154437 - DNA, 122 bp, Homo sapiens
gctatggaggagcccggggttacccctcaaccgtatttggggctgctcctggaggagctacgcagggtgagcccaggcgcgatgagtgttacgtggcccaggggtcgcgggagccgccgggg

SEQ ID NO: 154438 - DNA, 122 bp, Homo sapiens
cgagcctccattcccgtttatatccacgcaggcgtttccccttacctgcaccgagcctgccgccccgtttacatccacgcaggcgttgccccttacctgcaccgagcctgccgccccgttta

SEQ ID NO: 154439 - DNA, 122 bp, Homo sapiens
cacagagcgagaccacacaggcaggcagacaccctctcctagggccagggagcccccggccgaagggcccaggcaggcagcagaactcctgcaggtctggggctgtccctgtgtcccaggct

SEQ ID NO: 154440 - DNA, 122 bp, Homo sapiens
cgggtggagagcgggggcgccaagagtgctgaggagtcggagtgtgtgagtgcgcgcaggcggggcggggtggggaccgggcggcgagccggccgggggcggggtgtaggtgatgctaggta

SEQ ID NO: 154441 - DNA, 122 bp, Homo sapiens
cccgcccctctcactgccgagggggcctttcggagctcgggcccaccgggttggaaggcccggctcctccgtgccacattcaccaccatctcgaggccgtgggaggaaaaacccggcgagtg

SEQ ID NO: 154442 - DNA, 122 bp, Homo sapiens
caaggtctagaagcagcgcagggaagggctcccgctctgggctccccccatgggaggagtcgggaggggcccctgctccgaaataaaacatcgcagatggctccggcctcttttaaaaactc

SEQ ID NO: 154443 - DNA, 122 bp, Homo sapiens
gctttcctgagcctggggaccagcttgccgccaaccctgtgagcctggggaccagcttgccgccaaccctgtgagcctggggaccagcttgccgtggaccctgtgagcctggggaccagctt

SEQ ID NO: 154444 - DNA, 122 bp, Homo sapiens
gtggcggggggaggggaccagggtacgccgcggcctcgcggattagagtggtgtgtgcgccgggcgagcgttaatagggactgctggtgtaagacgagcaaatcctgtttctatataaagcc

SEQ ID NO: 154445 - DNA, 122 bp, Homo sapiens
acccttcctcactgagcctggatgttctccaggcagggccattgctgggcgcttgggtggcgtcctcagcgctttctctcctggttgtgttgagctgtggggcttagtgtccttcagacaga

SEQ ID NO: 154446 - DNA, 122 bp, Homo sapiens
ctagaatatgtggggccaatgccaccaccttggaagggtccccttgggtgtgtggaagtccgctggtgactggagctgcctccagccccctcttggggaattctccactctcccctttactg

SEQ ID NO: 154447 - DNA, 122 bp, Homo sapiens
cgcgcgtgtgtacgtgcgccggaggcctggagagaccggagtttaacgcccagtgtaagccggaaagggaggaaggctgtgcgatgggtgggtgggtggtaggtgggtgggtggtctagtga

SEQ ID NO: 154448 - DNA, 122 bp, Homo sapiens
accctgtccccctccctcagttgcctgagttttttcttaagcccagaagaacctgtatatcgtgcccatgtgggtaacctcatggcatactttggccttgactttgacgtttatataaaaat

SEQ ID NO: 154449 - DNA, 122 bp, Homo sapiens
ggcgggcgggagggacgggacgcggtgcagtgttgttttttcccccgccaatattgcactcgtcccggcctccggcccccccggccccccggcctccccgctacccctagcggggcagcccc

SEQ ID NO: 154450 - DNA, 122 bp, Homo sapiens
ccgacagggctccggccggcggaagtggcgcccgcaggtacagacaggatgcaggggttccgctgcccgccccgcccggcccggccctgaacagaagaggactgagccccggctacgccacg

SEQ ID NO: 154451 - DNA, 122 bp, Homo sapiens
tgaggcatgcgcaccggctggccggctactttcttgaccggccaagtggcagagcggctgcgcgacccagtgccgagacggacgcgagccggagatgggggaaggggagggggtggtggtgg

SEQ ID NO: 154452 - DNA, 122 bp, Homo sapiens
gcagctctgttccagtcgaccctgcgagaaaggggtgtgcgtgtgcctggagctgggccccgtcctgcctccctgacctgtgtgctcccacagccctgagacggacggctcacagccttgcg

SEQ ID NO: 154453 - DNA, 122 bp, Homo sapiens
tgaaacaccttatcactcaacattttacaagtgaatgctgccaccatgacttctcttacacgcttatcatccttccttatcactttggagctacactcttattcccaagtctgcatatatgt

SEQ ID NO: 154454 - DNA, 122 bp, Homo sapiens
gaaggcagaggcgcctccccggctgggcctgcggagggatgacccacacgcccctcccctcgcttccttggcctggtttcacgcgactagagaaagttaaagacccgtgtgactgaagagga

SEQ ID NO: 154455 - DNA, 122 bp, Homo sapiens
gccacccattcacaagagcaaaagacattctggcaaagataagaaatcgcctgcagccaccgggcttgagtggagcagagccgccgaccccaccaggactgcaggactcaggcgctgtgcag

SEQ ID NO: 154456 - DNA, 122 bp, Homo sapiens
cggagttgtgctgagacgtcaacagtgtgtgtgactcctgagatccctggctcctttgcccggctgctctggagcaaggcttggttcaaacagattaagggggtgtagagactagggaatct

SEQ ID NO: 154457 - DNA, 122 bp, Homo sapiens
gagctgcgtggggaccgtcgggcctgccgtttcgcacctggccgaaaggggtcgctgtgccgggccagatcctatgtaaatttagctggataatctcagcaagagaaaattggctgcagtgc

SEQ ID NO: 154458 - DNA, 122 bp, Homo sapiens
gcccaggatctggaacttctgcctgttaactttcacctcgaacggattggagttggccttcgccgggccccctcgcgctcccgccggcgccccggaggccttccttcgcgccccgaccttct

SEQ ID NO: 154459 - DNA, 122 bp, Homo sapiens
aaagcaggtctccatccctcctcctccagatgaataaatgaaaggcctagctaaagcagtcgaggctgttcacaaagggtattttcaggggcaaaccctctaccacatgactcagatcccag

SEQ ID NO: 154460 - DNA, 122 bp, Homo sapiens
agcttgacactggggaatccagccagtccagcacactcttccatcctgtcctgtccaatgcgggggcactgcagaactctctagaaatgtcatgattgagcttcagagctaaaatgccttca

SEQ ID NO: 154461 - DNA, 122 bp, Homo sapiens
cctcagcgctcacctgggcggggctggcgctatccggtgcccacttggcctctgcccggccgcccaggatccctgccttccaccaggcctttgtgcgctcacccggtggagcacaaaggccc

SEQ ID NO: 154462 - DNA, 122 bp, Homo sapiens
ccgcggttacagataagaccttggggacaggtagtcctcagtccccaaatgcttacgcagcgtgtaccgtagctgttaggggagatgtctaggtgggaagatgtctaggcgggggtctcctt

SEQ ID NO: 154463 - DNA, 122 bp, Homo sapiens
ggagtggggtcttggggcagtagcaggaagcagttgccagaactgaatacttgggtctctcgggggagagaagttgggggttgaggttctgcatcttgggagggatctgatatttcaggcag

SEQ ID NO: 154464 - DNA, 122 bp, Homo sapiens
cacgcctgcgctgcctgggctcgctcttctccatgctgcaccaggcctgccgcaacgtggcgcagtataacgccaaccatcccgacttccccatgcagatcgagcagctggagcgctacatt

SEQ ID NO: 154465 - DNA, 122 bp, Homo sapiens
aaagaagcaaagcagctgtagaacattcaagtccagtcaaaatgtaagctcagaaatcagcggggaaaataaaactatattaacgtcacataactagaaaaagctgttggcaaaagagattt

SEQ ID NO: 154466 - DNA, 122 bp, Homo sapiens
tggctttgagcggcatgggtcagagcatcctgtcagggtcatgggccatgagtgaggcagcgtcggttcgtcgagagtcagcctttgggccactggggttttctcagggagccaacaggtta

SEQ ID NO: 154467 - DNA, 122 bp, Homo sapiens
atgtcagtagcttgttgttttcatcggggtttttcttgtccctttggggtgggacagggacgggggtggtgtctctgaagtcagccctcctggtttgcattctgggtgtacacgtgttcgtg

SEQ ID NO: 154468 - DNA, 122 bp, Homo sapiens
aggaccatcttgtttccttacagcgggacacgaaaagtccgttctgtgcttccaggagagcggtaacttactgggagccaagttttcctgtggggtctgactgggaggggccggggatacct

SEQ ID NO: 154469 - DNA, 122 bp, Homo sapiens
ggcagatgggtgagtactagggtgtgcagggaagatcaataaacagctctggcaattcatcgtgcgcctaacaccaaggaatacttcagtggaagagctctcattttgttgggatgaataaa

SEQ ID NO: 154470 - DNA, 122 bp, Homo sapiens
gctctgggaccgacgcggcctcctggaccgacgcagcctcctggatcaggccgaggccctcgccttctggggctgcagcccctgcacccagcctctgggacagcagcagcaggggagggttg

SEQ ID NO: 154471 - DNA, 122 bp, Homo sapiens
aaggaacagcgcgaggcacgcagccgccgcaccgtggcgcgcacgagctcagccggccggcgaccccagcgcgcccacaggtacaggtagcacagcgtgatgagcatggccgcgccgccggc

SEQ ID NO: 154472 - DNA, 122 bp, Homo sapiens
cccaccctcaggacctcatctgatccctcccaaagcccccatctccaaatatcacatctgcgtgacggcttcaacgtaggtattttggggtgatataaacattcagtccacagcagcgcccg

SEQ ID NO: 154473 - DNA, 122 bp, Homo sapiens
gctgtgtgccccttctccacccagaggtgaggaaccgtgctgagtggattccttgccctgcggccctccagcctttcttccccggactcgccgagggcggcggccgacgtgtgtggggtagt

SEQ ID NO: 154474 - DNA, 122 bp, Homo sapiens
atgcccgcagacaaaattttggcttgcaagtaaggtatatggccgcaccagtcgacccgccgcttcttcccggtcatttccccgtcctccttctccctcctccgctatttccttaactacgg

SEQ ID NO: 154475 - DNA, 122 bp, Homo sapiens
acaccggggtctcggggtttctcagggctgctgcgtttcacctcctttaacgcggaggcgcggagttgcacgtgtgggtctcagtggagccgccacaggtcttattacacaacaaagggcag

SEQ ID NO: 154476 - DNA, 122 bp, Homo sapiens
cgtgggggcctctggaagggaaccgaggctaaggttgttggccgcgcgacggtgctgggccgggggcggagaccgtggttccctaagtggcgcagaactcccgggacgcaggatcctcacgc

SEQ ID NO: 154477 - DNA, 122 bp, Homo sapiens
gaaagtagcaaccccaacctgcctgggccacaacagccaagaccactgtatcagaacagacgccagcggggcagcctgctcgttggccgggcggagcagggtcggcacacagcccgggctgg

SEQ ID NO: 154478 - DNA, 122 bp, Homo sapiens
agctctgctctgctaaaagtgtactcagtgctgttagcctagtctacactccatcactgccggaggaagtggcatgcagagtgggggttggggctggtggttagtgtggtctcccttgaaaa

SEQ ID NO: 154479 - DNA, 122 bp, Homo sapiens
tatgtggggaaccattttctgagtgtggaagtgcaagaatcagagagtactgaatgccaacgcttctatttcaggaacatggtaagttggaggtccagcttctgggctcagacgggtatagg

SEQ ID NO: 154480 - DNA, 122 bp, Homo sapiens
gttctgcaggtcagatgaccccctgcctcctgcccagttgctctgtgcctagacgtggctcgccaatctgtctcactggtgagaccgacctgatgcgcacctgccgagttttatgtgacccc

SEQ ID NO: 154481 - DNA, 122 bp, Homo sapiens
gacggaactggaagtcatccctctggggctcccctgagacaaacgcttatatgattgccccgttcccttactgtttacataaaaatgcggattcactgggccagactcaatcgtgtattcag

SEQ ID NO: 154482 - DNA, 122 bp, Homo sapiens
ggtcttctccgtgagcaggcactccagcaggtacagaatcgtttggatcaccgtgatctccggcactggcgtgatcttcttgaacccaaagcgcaacttgtccaggcacgtgggcaggtact

SEQ ID NO: 154483 - DNA, 122 bp, Homo sapiens
cctgcctcactggagaattggcagcttgacaccagggtatttgcacagacatttacatagcgatggtcctgccaccgactgtggggcacctggagcaggtggagaggtttgggggcccagag

SEQ ID NO: 154484 - DNA, 122 bp, Homo sapiens
accaccaccatgccaccatccttgagcagctctcaggggcttagcacagagcgcgtccgacgcatacctgcagccctccaggtccctgcagggtgaacccagctcccagccatgcgcgcacc

SEQ ID NO: 154485 - DNA, 122 bp, Homo sapiens
ttgacagttgtatttacagagctccgagtaggaacgtaattgcttctattaatctttctccggttgttaattgctcacttatcgggttgtgtattatgccgactgttgctcttaattcgcct

SEQ ID NO: 154486 - DNA, 122 bp, Homo sapiens
cctggatgtaccgcagcgccgtccgcagcacgctcagattggacgtcttcttgtcatccacgttggggatgttccgcttcagggtctcaaagcactctttcagatgggccctcctgaagaga

SEQ ID NO: 154487 - DNA, 122 bp, Homo sapiens
ttgtgcagacagccgatagcggattcttcgaggcgtctgtcctcttgcgaccgacacttccgctgagcaacggaagcggctttcaagatccgggcagaaactttactaattcgcttgaatcg

SEQ ID NO: 154488 - DNA, 122 bp, Homo sapiens
taggacacattctggatcgatgatgactaccggtggcgtatgagtcatatgtgatgaatacgtgtttggaactctgaggtccatcacagataaaatctggcttattctctgtttcgaatggt

SEQ ID NO: 154489 - DNA, 122 bp, Homo sapiens
acaggtctggcatttctttctttgatgtcctcttccataaggttctctgggagcaagccacgcccacaggctcagtctcccagcacccccatagtttctcctctgcctcagccggcacctct

SEQ ID NO: 154490 - DNA, 122 bp, Homo sapiens
gtgtcttcacaattttctacctcagctcaaagcctagaactattactgtgaaaactgaagcgcaggtcagcctgactgacccttcggaaggcgtgaacaagttcccttgaggacccagaagc

SEQ ID NO: 154491 - DNA, 122 bp, Homo sapiens
catcagagagggtcagtggcttacccccatctgtgccccacagtcacaacctcatgcaggcgtgtctgaccccagaaggtgctcccctgggatcctcttctagaacaacatcatgctccatg

SEQ ID NO: 154492 - DNA, 122 bp, Homo sapiens
caagctaacctccccaccccaataggatctggtggaagaaaagtcaggcaaacacaagcacgcacacaccactgggagatcagatcttctagctggctctctgctgccacagctccgccgaa

SEQ ID NO: 154493 - DNA, 122 bp, Homo sapiens
aacgcccttcccgggactgtttcccatgaaatgagtctggtgtgagccgaagctgtaatgcgtttctcatttttaaagtgtttttaaagcccgtctcggggtgggtcgcgggggctttactg

SEQ ID NO: 154494 - DNA, 122 bp, Homo sapiens
cctgctgctttccaaaataagccaacttctgtgaaatctctcttactcaccactctctgtcgaactgccagtagcagatgttttcatcactctaagttaaactacatttttttcttcctgta

SEQ ID NO: 154495 - DNA, 122 bp, Homo sapiens
tatcacccttactctgtcaaaagaccaagaacgacgtgaactctcagcaccttggggcaccgtgctgatgacacgcgcgctgaaatggaagttcagacatcacacatttcaaggaaaagtag

SEQ ID NO: 154496 - DNA, 122 bp, Homo sapiens
ccgcaaaacctcatggccacagctctacagggcccagtggtggcgaacctgcgctgccagcgcgagccgaggaagagcagagccctgggtggaagggcgatgtactcggcgatgctcagtgg

SEQ ID NO: 154497 - DNA, 122 bp, Homo sapiens
gaagcaaagtctatgcccaagaagttggaagggagagatgttggctacaatggtgtccagcgagaaacacatctcaaaaagccctgggctgaccttagtccagtgcttccgaccttgaccac

SEQ ID NO: 154498 - DNA, 122 bp, Homo sapiens
cgtggactcggcacggggaggccggtgtcgtcacgctcgtgtttctgacgatgctgtctacgcttgtttctgaattctctaaggggagactcgcaactcttagtctcctgcgactcggtttc

SEQ ID NO: 154499 - DNA, 122 bp, Homo sapiens
ggtgctttctccacaggtgacggggccagggtcggcggaggcctgatgctggccggggatcgccggccccgccaggcgtccgctctcgcccgccgcctcacttgctcgagtctcgggtggtc

SEQ ID NO: 154500 - DNA, 122 bp, Homo sapiens
ttgtatgttcctggacagagccagtcaatgaaaaccccagtcttatgttctgagggaccgcgtgtgattttcgcatcttctgttggtcagtgtggaagttgacacaatggcaaagcattaaa

SEQ ID NO: 154501 - DNA, 122 bp, Homo sapiens
agcagcttctcagggcccagctccgcactcagcatggcccgggcccggctcagcgcctgacggatgccctgcagctcctggggctcgggcccagcccgcacctgggtcagtaggtcctgcac

SEQ ID NO: 154502 - DNA, 122 bp, Homo sapiens
atgactcggaaagtaaaggaactctaggggatcttattcccaattgttcccacacccatacgccctttacaacaagattgtgtatacttcttccagaaaagttcttcaacacctgcccacat

SEQ ID NO: 154503 - DNA, 122 bp, Homo sapiens
ccagtggaaggcagccctgactcaggcttagtcagaggtcctggtccaaggtcccctgcccgctccccgctccccgctgcagcctcacagtgcccttcctggaataaaaggtggaaaatgag

SEQ ID NO: 154504 - DNA, 122 bp, Homo sapiens
tcgctctcacagaagctgacagtcagaactaccaacgctgcctggagaccggggagctggcgaccagcgaggacgaggcggcggcgctgcgggcggagctgcgggacctggagctggaggag

SEQ ID NO: 154505 - DNA, 122 bp, Homo sapiens
aaacctaagtcttcagcttccaatcaggactcagctttgggaagagcgccacgcggtgggcgaggggatgccctagtaaattcgcaggtctcttgactctttccgcctttgtttacaaccct

SEQ ID NO: 154506 - DNA, 122 bp, Homo sapiens
gaaaagtatttaccccattgccttctcccctttgatatatttaggaaaacaagactgttacgtacatttgaatcaattgcatggtgtagcctttttgtgctggttgcggcttcactgtttac

SEQ ID NO: 154507 - DNA, 122 bp, Homo sapiens
ctccgctgcccaagggtctgccctgtccccacctacagcccaggcaggggcctctcaggtcgcttcccccagcagagcctggagggccaggcaaagtccaggatgggtgtttgcagccaggc

SEQ ID NO: 154508 - DNA, 122 bp, Homo sapiens
actgggaggacagcctagtaaccagtaacaaggcacttaactggaaaaagtttgagtctgcgggaagtttagctcacaccccccagtaagaagtttagctcaaacccctggtatgcgcacaa

SEQ ID NO: 154509 - DNA, 122 bp, Homo sapiens
aaaaagggctcagatccaggaacctgttctgaacacgcacccaggcaattctgatgcaggcgagccacaggcccgctgtgaaaaaaaactgacttaatacatcaagtatagatctacaaatt

SEQ ID NO: 154510 - DNA, 122 bp, Homo sapiens
attaagtccggaaacaaacatcagagatcctctgagcatcagatcacagtagctccatttcgaagacagcaaagaggaggaaacatgcctctcaaaaacgcagtcctgtatcttccagttct

SEQ ID NO: 154511 - DNA, 122 bp, Homo sapiens
ggcacgtcacttattttgcatatgccctcctctccccgcccccatgcttggactccgccccgtctgggtcagggattgtcacctaagagcttcgtcctggcacctgattggctctctttcca

SEQ ID NO: 154512 - DNA, 122 bp, Homo sapiens
gcaggtactgccgcccctggtagttgggcagctcgtagaggacccaggagccctccagcacgttgaaggagtggatctcactgaggtggaagcggtcgtgaagagaggagcagtcctcagtg

SEQ ID NO: 154513 - DNA, 122 bp, Homo sapiens
ataaaattgtgtaagtgaaaggtgagaaggcgtgagccacggggagggaggaacatcctacgctaaggcctgcaagttcaaaggctctgaggtgggaaccaacttggccacttgaggaccag

SEQ ID NO: 154514 - DNA, 122 bp, Homo sapiens
gatgctggtggagaacctgtatcgggacgggctgatgagtgactgtgtcaggatgttcatcgccacgttccactttcctcaccccaaatatgtggacctgtacaaggtgaggccgaccaggg

SEQ ID NO: 154515 - DNA, 122 bp, Homo sapiens
gttcctggcctcagctggattagcacctcttgctggtggctgtaagggaaggaggtgtgacggtatgataccctgcatgtggtagagactcagtaagtggataccattgcggtggcttctct

SEQ ID NO: 154516 - DNA, 122 bp, Homo sapiens
tgcatgtggtaggaggcttgatcacttctgaacaaacacaccaatgagtaaatgaacgagcggcctcacagagcagcgatggggactttctgatgaagaccaggttttcagacggcgggagg

SEQ ID NO: 154517 - DNA, 122 bp, Homo sapiens
tccctcgctccagggccctcccctctggcccaggctctagtccccattaatcacaccgcgcgggctgcgacccctttaagtccggcttggatgacccagatccaaagtcatcgactctctag

SEQ ID NO: 154518 - DNA, 122 bp, Homo sapiens
tgtaaacagcctggcttctagttaggaagccataagtcctgttgcccccagaagtacacccggatggtcataagagactaaagagatctcagggccatcatatgctttacatccgatagagt

SEQ ID NO: 154519 - DNA, 122 bp, Homo sapiens
tgcgtcacgagacctagaaaacggtacaaaaccctcggggggccgctgtttctgacctagcgagtggcccgacccggacaaaatgcctcttcctcgaggaggcggcgacgagcccagcaaca

SEQ ID NO: 154520 - DNA, 122 bp, Homo sapiens
agcccggcggcaacagccgcagctccccagccccgcctggccgtcgccgccatcttagtccggagtgcctaagggtctccctgacagaaccacgaaagatctgcgcagccgcaggctggccg

SEQ ID NO: 154521 - DNA, 122 bp, Homo sapiens
cacattgctcaaatccgcagccaggtggcacctccgcaagctgggcgtgtgatgcggtggcgtcttagtgacagttggcttggctcctggaggggacactgaagggtgaagtgggggcttgt

SEQ ID NO: 154522 - DNA, 122 bp, Homo sapiens
tgcccctggcccgtgcccgtggccacctgtgggcctattcctgcgagccgctgcgacagccgctgctcaagcgagtccacgccaacgtcgacctctgggacatcgcctgccagatctttgtc

SEQ ID NO: 154523 - DNA, 122 bp, Homo sapiens
gtttccaagagaaatgcttcactggaggtctgaagggagcttcaggagtgtgctaggccccggctactcaaactgttgtccctggaccagcagcagctgggagcatgttagaaatgcaggcc

SEQ ID NO: 154524 - DNA, 122 bp, Homo sapiens
ggaggcctcggagaaggcggtttcagtgatccgtgaagagaccctgagtcttttacatcccggagaatgacaagagagtacctgggcgacgtaactttctgggttttccggagatgcggttt

SEQ ID NO: 154525 - DNA, 122 bp, Homo sapiens
caggggctctgagcaagcctgatgagctccagcaggttaactgggagcggagccacgttccggcttctctgaatctttgctttcctcctcccctcgctggccccaccctttatttactgccc

SEQ ID NO: 154526 - DNA, 122 bp, Homo sapiens
acatagcgggttctagaatgcggagggggctgggtttcctgccagagctggcagtaggtgcgcgtgggcccggaggaccgaggccatgtctatctgctcctgaggagggagaggtggtgtcc

SEQ ID NO: 154527 - DNA, 122 bp, Homo sapiens
cgggccaccccctgcagggccagcaggtcggcgcccagcgggaggctgcctccaatgcaccgggcccatcctgcccaggcgcccaccagacaggccacagccaccccccacacgctccggcc

SEQ ID NO: 154528 - DNA, 122 bp, Homo sapiens
cgcgctgctcctgcccgacgacccaccgtgccacgacctgggctgtcaccccgtgctgaccgtgtcctgggtgctgggctgtaccctggccctggtcgtatcagccttctttgtcctgaacc

SEQ ID NO: 154529 - DNA, 122 bp, Homo sapiens
gaaaagcgagggcggctgactctcgggtgaggcggtgcgggaggcgtcactgaggatcgtcgagggccaatcaaaaagaaaacatggaagggaaagagccgagagactcgatctcattcact

SEQ ID NO: 154530 - DNA, 122 bp, Homo sapiens
gttgggagggactgagagcatagggtgggcggggccggggcggggcctgaaccctggaggcggaggttgcaatgagccgatatcgcgccattgcactccagcctgggtgacagagtgagact

SEQ ID NO: 154531 - DNA, 122 bp, Homo sapiens
gtatcggttgggaattcaggactgccagcctcagttgagtagcaggagccaataggggtccgtgaatgagacaggatgagagcacggagcaagagggctggagacagcttggaggagacaca

SEQ ID NO: 154532 - DNA, 122 bp, Homo sapiens
ccaatcctggctccaccacttgccagggacttgagtaagtctctaaaattcactgaatctcggtttcctcttatataataaagggataatataattacctcctagtgcttatatgaggatca

SEQ ID NO: 154533 - DNA, 122 bp, Homo sapiens
tggcctcaccctatgaccagccatagggtggcaaggtctaggccttctcctacaggtttccggtgacccttgtgtctgtgtcacttccttcagaaatcgacgtggccgtcctcggaagtacc

SEQ ID NO: 154534 - DNA, 122 bp, Homo sapiens
ttttcaatttcacagattttatcagataatctgatgtatacagcactctaattgggcccacgaatatcaacaaatctgaaaatcacccattattcctcgtccattgctgtttatatcctctc

SEQ ID NO: 154535 - DNA, 122 bp, Homo sapiens
tcttgtaacacaggcaaacccatagtcagggacaggcaattgcagatacacatgctgatacgtccacacccaagcacagtcactcagggacacacccacactcattctgggatgcaccctca

SEQ ID NO: 154536 - DNA, 122 bp, Homo sapiens
ttgtgaaccttaaatgcttgtggaataatttaattacaaactatgtgggccaactaattgcgtgcagaattgaatgatttagactgtaagtgctgtggggaaacattgaaggattcccttgg

SEQ ID NO: 154537 - DNA, 122 bp, Homo sapiens
tagcttccctggaactatcccaggatatctcagccttctctcccatcaccacccaaccaacgctgccctggatggcctggagtccatgcgtcagatcctagggaggtgccttccctgtctgg

SEQ ID NO: 154538 - DNA, 122 bp, Homo sapiens
tctgggtggacgtggagggtgctcaggatgtgtggctggatgcaccaaagaatgaacgagcgccctgcgggaaacacggggaggtgagccggagacccctgctctgcaagctgcccgggtct

SEQ ID NO: 154539 - DNA, 122 bp, Homo sapiens
tggctcttctctaagaataatggagaaaaggtgttagtttgtactgtcgcacagggcagtcgtaggagactctgaaaaagcaaataaatcaatgttaaatcagaaatgtgaatgtagtaagg

SEQ ID NO: 154540 - DNA, 122 bp, Homo sapiens
aataggcattgatggtcaaaataagaatttcaatattgcagcaaatgacagaagagtgagcgaaagagttcctaatgtgtgacagtcttaatgattctttaaaaggtaaaggattgtatgca

SEQ ID NO: 154541 - DNA, 122 bp, Homo sapiens
tgtgtcatctttgcatccatcccaaccatgaagaattttctggctgggcctggtggctcacgcctgtaatcccagcactctgagaggccaggagttcaagaccagtctggccaacatggtga

SEQ ID NO: 154542 - DNA, 122 bp, Homo sapiens
gctaagcagtgtccaaacctcccataataggatctggactggtggatgcaaaagtgaaagcgtgctgtgagtggggaagtgggaggaaaaatgtcaaagcctactccactggagtgcatgct

SEQ ID NO: 154543 - DNA, 122 bp, Homo sapiens
gcggagggggcggcggggaaagggagggggcaggggctggcggccacaattcaaagacaccgtcaaggtgtgtgcccctcgccgtaattggagaggaagctgcctttccctcgccgattccc

SEQ ID NO: 154544 - DNA, 122 bp, Homo sapiens
agcgcttctctgagacctgctgctgaaggccccacccgacacctggcgggggctgggctgcgggccttggggcggtgtcccctgtgaatgttcaggtcagcataacaggttaggtgtggttg

SEQ ID NO: 154545 - DNA, 122 bp, Homo sapiens
gtcaggtcaggtggacaggcgtgcgtatgggtgtgcatatgggcgagtcaggtggacaggcgtgcgtatgggtgtgtgtatgggtgagtcaggtggacaggattgcgtatggatgagtcatg

SEQ ID NO: 154546 - DNA, 122 bp, Homo sapiens
acgggctgagtctggcggcggcggaagctgcagaggccaccggggcgctaactgggtggccggtgggccgctgtggcctcgagcagcctcttcgcgcggccccgcaccccggcaagcagcag

SEQ ID NO: 154547 - DNA, 122 bp, Homo sapiens
atatcaacaaatattgttagttttttatacaggaaatcaaacttccctttcttctttattcgttctcttctccctccaccttcctctaacctttccacaaagagtaaagggtatttgatttg

SEQ ID NO: 154548 - DNA, 122 bp, Homo sapiens
ggactaaggcagcagagacccagtgggtttccacactggggacccagagatctaggatcacgacgtgctgcttctccagggtccgggggcccagttctccgccccgctatctcacagaggta

SEQ ID NO: 154549 - DNA, 122 bp, Homo sapiens
gtgcctggaatcccctacgaacaccgtcgttcaccgaggagctttgggctcctggaagtccgaacaccccggatcagaggagagttggccatgactccccgtcggtaccggctgggtttggt

SEQ ID NO: 154550 - DNA, 122 bp, Homo sapiens
aaggtgagaaggactcggagagggaagaaggcccgagactcgagaatgcggggttggggccgggagggatgcaagttccctgggaattagggggtccagcctctgacctccttccggtgaat

SEQ ID NO: 154551 - DNA, 122 bp, Homo sapiens
gccactgcactttcttcccctagaattgaggccacaacagtagacacccatgctctgtcccgttccccaccagcagagctgctcaacaggatgcaataactggaggaatgagggtggtggaa

SEQ ID NO: 154552 - DNA, 122 bp, Homo sapiens
ccacctccctgttcccccacagggcacctggggatccagcctgatttttaccagaccctgcggcctgcatggggctgggtatagggctgtgaccttgacccatgcagaatagaaccctgtgt

SEQ ID NO: 154553 - DNA, 122 bp, Homo sapiens
ctccacggcaggcgtcgctaaatgacgttgccgtttccgggtcacccaggcagcttgtggcggcgaagccatcggtgttcgctgatgtccagtctatggagtcagttggtaccggtggcggc

SEQ ID NO: 154554 - DNA, 122 bp, Homo sapiens
gcaacggcagaccccgttcgaggttgcagcaaaccagaaacactctccagcagcagcaggcggagccgcgggcccgagctcactgccgagagacccccggtcccgccaggaaccccagccgc

SEQ ID NO: 154555 - DNA, 122 bp, Homo sapiens
attgagtatttgtacacttttctttagaacatatataaagggcattctctacaaatgtgccgttttaagaataaaaccccctcaaatctctcccccgaggcctgtttcacgtaaaaaacaaa

SEQ ID NO: 154556 - DNA, 122 bp, Homo sapiens
aaagctagatttggagagatttgacatttctctgtgaaacacatctttctaggcatgtgacgcctctcaagagcacgatgtaagggctccaagatgagtttgggcttcccagttccccaagt

SEQ ID NO: 154557 - DNA, 122 bp, Homo sapiens
actcggggaccacccacacccctctttcactgccggagaaaccaaggcacagagaagaaacgaagccccattccaaggataggctgctgccaaaatccaccagtcatcccagcccggaaggt

SEQ ID NO: 154558 - DNA, 122 bp, Homo sapiens
tctctccttaggaaccatagcagcatgctgttaaaaacagacatccgcacatccagggaacgtaaggcgaattccagatcccagcaggcgcagtacccaaaccccgctctctccagccacca

SEQ ID NO: 154559 - DNA, 122 bp, Homo sapiens
gatttaaatggggggaagagaagatgaaaagcaggaaagagttggcaaatactaaccaaccgataaaggaagagaaaggaggactgtacataacagaaattatcatcagctggtgaggaaag

SEQ ID NO: 154560 - DNA, 122 bp, Homo sapiens
ggaggctgaggttgcagtgagccaggatcccgccactgcactccagcctgggcgacaaaacgagaccctgtctcaaacaaaaaagaaagaaagaacaagaagaagaagaagcatgttcccaa

SEQ ID NO: 154561 - DNA, 122 bp, Homo sapiens
aaggcaggaggcggctgtggagcaggggtcagctggtgcccgggaggacgctgacaaccccgcccctctgcccccaaccagggaggttcctagagcccctatttatggccctgcagggcggt

SEQ ID NO: 154562 - DNA, 122 bp, Homo sapiens
gcctgtcacaccattttctgctgggctattagcttcagcaatctactctatgttagcacacgaaatattaataattaaatattcaagtgtgtgtgagaaaaagttttttcctatgtgcagac

SEQ ID NO: 154563 - DNA, 122 bp, Homo sapiens
ggtcttcctgttctgaacgcgcgtaacttttgcctcagtatctcacttcttggaatccggcggcgttcacgtgtgtgctccagagaagggcgccagagggtattccctgaaagtgaaaggtc

SEQ ID NO: 154564 - DNA, 122 bp, Homo sapiens
tcctggccaagggaaccaaaagcagagaagctccaagtcagaaaaaagcagcggttggcccgttgggagaattggaagccaaccagtatagctgtagcacaggcggggcccatttacgccgt

SEQ ID NO: 154565 - DNA, 122 bp, Homo sapiens
cccgccctggcccggccccgccccccagctcgtgcgcgcgcgcgcgggagagcggccgctcgcccggaagtgacgtaactctacggcctagcaaccgttgccaaggagctcgactctgggag

SEQ ID NO: 154566 - DNA, 122 bp, Homo sapiens
ccctcaaggcaggacgcccttagggtcgcgtagagttgcatgctgggaaatcctgacagccgcttccaactctgtggatttccgggttatggactacatttcccagaggcctctgggtcacg

SEQ ID NO: 154567 - DNA, 122 bp, Homo sapiens
gtgccccctcctcccacatcagctctgccggggtagggagcggtaacctggcggctcccacggactctccctggcccgacacctctcccgggcttgcctcccaaagaccccctcttttcgct

SEQ ID NO: 154568 - DNA, 122 bp, Homo sapiens
tgaggatagaggttttgctttcctcaaactattgcatttttcttttcctccctaagggtccgggcaggatgcttcctaccccagggggccacttccaaatgctgctctgtcacttggtggaa

SEQ ID NO: 154569 - DNA, 122 bp, Homo sapiens
gggcgagacagagcatgatacggggtccaacgtacttcccagaggaggctgtgaaccccccggggcggcaggtgcacttgaggacagaacagggttatttcatcttttatgctgttatgcat

SEQ ID NO: 154570 - DNA, 122 bp, Homo sapiens
gttccggcgctcggacttgaggaacttgggagggtggtgcggggggtttctgatgctttgcgttttctgcgggatttgagcagtcctttgagaaccccgaaactgaagtccgtggtgttttc

SEQ ID NO: 154571 - DNA, 122 bp, Homo sapiens
atgccattttaggcctcagcccacctgcacccaggcactcattaaaacagcacgctgctccgcactgcctcgtgttgtctgttggcatgctctcagggatcaaaccaattcaagaaccttat

SEQ ID NO: 154572 - DNA, 122 bp, Homo sapiens
tgtcttcacactgtttcaatattgggaatattgcatatagttaggattttgtgtgtgatacggcaagagttataaactcatgggtgttcccagccttaactctttgcctgccatctaaagaa

SEQ ID NO: 154573 - DNA, 122 bp, Homo sapiens
ctccacaggcagaaggagcagctgtttcctgaccacctgccgggtgcctggccctctgcacgcgcgatggctcagtgaggccctgtgtcccgccccacaggaggctgcagcctcgccccttc

SEQ ID NO: 154574 - DNA, 122 bp, Homo sapiens
tcgcctgcctcgagttcctgtgccctcagacgccacgggaaaacttgcagggacatctagcgccaggcgtggggaactgcgcgccgccgggccgggaagtggagccgaacactgcccctccg

SEQ ID NO: 154575 - DNA, 122 bp, Homo sapiens
cgccgccgtcgccgcccgcggcgcatccaggaccttcttcccccaacagaggtcccaaagcgaaaaacagacctatttggaagtaaggagggtaaagtaaaaccgaaccgaaacccacagcg

SEQ ID NO: 154576 - DNA, 122 bp, Homo sapiens
tggaggcagaggctggagggacgtagctgcaagcgcaggagcaccaagggccggtggaaccgcagaaaccgcagcgagggagccagccctgctgacactttgattccggacttccatcgcag

SEQ ID NO: 154577 - DNA, 122 bp, Homo sapiens
tggagctgggaggcagagtctgtccccatgtctgcctcctcatgcagacttttccttgtgcgcctcgcctctgcctccgtctgcgcgtttcccatctgaagtctccagatcctctcgggccc

SEQ ID NO: 154578 - DNA, 122 bp, Homo sapiens
ataccaaacaaacacactaaaaaaatgtaagcaactgggaataactggtaagcaacacaacgtatattcaggcacaaatttctcctaagaatagcaaaagaaatgtgaccagaaatatcttc

SEQ ID NO: 154579 - DNA, 122 bp, Homo sapiens
ggctccagggacctgttgatcgcaggtgtcactggcctgactggtccctgggtattggggcgtatgcgcatgctccgctcacagggtcgggctctgggcggcggagaccagccgcctgtgct

SEQ ID NO: 154580 - DNA, 122 bp, Homo sapiens
cctaaaacagctctcctggtttgggaatgaaaagtgctagcaacccaacggttcagaatccggaactctaggtctttgtcccattgccaagaaacagttcccaacccagcaggtcatgtgac

SEQ ID NO: 154581 - DNA, 122 bp, Homo sapiens
gccgcggactccaggccagctctgtcttgttgctgggcgctgccatattggcccagagagcgtccgggtcagggagctccagggaggtagcaaatcaagaaagctggtgtaataggtcccgc

SEQ ID NO: 154582 - DNA, 122 bp, Homo sapiens
gactctgtcaagtacacgctggtggtagatgagcatgcacagctggagctggtgagcctgcggccgtgcttcggagactacagtgacgagagtgactctgccaccgtctatgacaactgtgc

SEQ ID NO: 154583 - DNA, 122 bp, Homo sapiens
gcccattcctgttggaatctcctgtctgtgtgccgttctttaagatgggctggagagagtcggggcagctcttctcccgggttttcaggcctgggttgctcttctgggcacttcctggtgtt

SEQ ID NO: 154584 - DNA, 122 bp, Homo sapiens
gtcccgagccctgcagcctggggaggcagctgaggccgagcgagaatttgagtgcagaaccggcggactggcactgctgggggacctggcgcaccctccgcagctgctggcccgggtgctaa

SEQ ID NO: 154585 - DNA, 122 bp, Homo sapiens
gggcttgcagctgcgggccgggcccgaggcggaggcgcgcgggggggccctggccgaggacgagcccgcggccgcgcacctgctcccgtcgccctacagcaagatcacgcccccgcggaggc

SEQ ID NO: 154586 - DNA, 122 bp, Homo sapiens
atgattacgtgaacgttccggagagcggggagagcgcagaagcgtctctgggtgagtgaccggtgcttgtcggtgcctgcccctgcaccccgctgccccaccatgctctcagtgtgaccaga

SEQ ID NO: 154587 - DNA, 122 bp, Homo sapiens
gatggcgtccgagtgcacagtggccagtgtgattccgcagtcttgggctgttcggccaagcgcccaccggacgtgggacgctggagggtcagcagcgtggagtcctggccttcagcgtccgc

SEQ ID NO: 154588 - DNA, 122 bp, Homo sapiens
tggaatcccgcagggcctggggacctgttcacttggggaggctgggagccaggcggggtccgggttccacgaaggccaggtccagtcagtttctcaggtgaggaaaccgagctgacgcgggg

SEQ ID NO: 154589 - DNA, 122 bp, Homo sapiens
tggagcagggccacatccgcacccagccccgcagtgacatagttggggtggacgatgatccggctgacgttcagcagcccccggcccccgtagagatacacgtccccagcgtggatccggta

SEQ ID NO: 154590 - DNA, 122 bp, Homo sapiens
acagcatcagcagtgggatagtcagtgccgagttttcctggcaggacagccgacaaccaccgccacagaccagtacaaacattccaacccaggaccttttttcgcgcgccgacacagccgga

SEQ ID NO: 154591 - DNA, 122 bp, Homo sapiens
gacctagatttcacttcattcacatagattaaaggtagtactcggtgtgggccaaatacacgttttgctttttggaattctatggatttttttttaatattttcaatccacagattgtggat

SEQ ID NO: 154592 - DNA, 122 bp, Homo sapiens
cgaggcggtgctgcgttcgcctcgcttgcggcggggacccccaggcggcagccccgggcgcggcacaagttcctctgcaccgcagctgggacttgggcactgccggcctgggtgtcccgcgg

SEQ ID NO: 154593 - DNA, 122 bp, Homo sapiens
gctccgggggaggcgggggttcagagggggctccctccccacccccgccggcgtcctcctcgccctgccaggccagggccagctgcaggtccagcccctccaagtcctcgccggtcaggctg

SEQ ID NO: 154594 - DNA, 122 bp, Homo sapiens
ttcctatgttaactgtaagttaatacaagtaaacacggctatattaaaagatcaactactcggctccatagtcctgactcaaaaagaaaaaaaaaagtacagaccctgtcagtgcaacaaaa

SEQ ID NO: 154595 - DNA, 122 bp, Homo sapiens
ggccttcgtatttatcagttcactttttgaaactgcacctccagccaccctgacctctaacgctccttacattccctgtttcttgccgtcaacacttgaatgcccccttgaccttaaaagta

SEQ ID NO: 154596 - DNA, 122 bp, Homo sapiens
aagagactctcgggctgggtgggccagggagcagccagccagcagagcagcagtgtcggacggaagatggaggcggcgagcattggcctggtctgaacccttgccctccctgcctggcttct

SEQ ID NO: 154597 - DNA, 122 bp, Homo sapiens
aagtatgtctttatttgtaagcatattactgaaacgatcaaatgaacagaagtggataaacgtcgagtcacttggctgagaccatacgcatcttccgtactgcttgtattaggatgcaagat

SEQ ID NO: 154598 - DNA, 122 bp, Homo sapiens
ccccagtggccgcacctcccggaaggcgtcccgtagctcccggacaccgatcatgtctgccgtctctgccagcagcttggggcccatcagctccacgaagtcttcaaagtccacctttccgc

SEQ ID NO: 154599 - DNA, 122 bp, Homo sapiens
ccaccctgttcagcccaaatccttttatctcacccaggaacctgctctggaaacatatcacgtcatgggagaactggctctggacctgcctgagactctcagagcgaaggtcaaggctggag

SEQ ID NO: 154600 - DNA, 122 bp, Homo sapiens
ccattgactgtgaagtgtgcacatttaaatataatgttgttgactgcctttcaccagtaacggtagtgatccaaaatgcattttttgggtgggagtggcttgaattataaggaaatatttag

SEQ ID NO: 154601 - DNA, 122 bp, Homo sapiens
gccagactagggagtgcctgcgatcgggccttcccaggcgcctgggggtgccggggaacccgtggctggcctggactcttgaatcatatgacagccccagtggccagttcgggtgcaaggtg

SEQ ID NO: 154602 - DNA, 122 bp, Homo sapiens
ggaagtttgaagtgtatgaccttgggaaggcataggactttaccctggattgagaacatccggtcaaaatcagccttggagctctcactcagtgtgtgggaacaaaaatcatctcactcctc

SEQ ID NO: 154603 - DNA, 122 bp, Homo sapiens
tgcacaggttgttgccatgagcaaggatccccatgtgagaagagcgtttccctctcggagcgtcagtataatttactttttctctccatggagaatgcaaatgagcagaacttttaaagaag

SEQ ID NO: 154604 - DNA, 122 bp, Homo sapiens
tcctcgaccacctgccaggtggggcggaaacaaacggtgaccttgggcctccatcagggtcgtggggggcagagggggaaggcaccaggagccccgggcgggccagaggagcatactttaca

SEQ ID NO: 154605 - DNA, 122 bp, Homo sapiens
gggtcagaaagccacctctcctcctcttctccgcgaccccactttgctacacaaacgcaccgagactccgaccgtccccagcctccggtccctcagggatggaaggtgaggtatgtcaggaa

SEQ ID NO: 154606 - DNA, 122 bp, Homo sapiens
gcaaaaaaaaagaaaaaaaaagtccagctacacagaagcgaggagtgcgaagcaaatagccgcttcacgtcccacaccctggcagcagctgcgcccgggtctgtccggagatggtgtgtgca

SEQ ID NO: 154607 - DNA, 122 bp, Homo sapiens
ccttggccgctgcagtggactctgggagttgtagtccgcgtgccctttgcggggcagagccgcggttcccgggcacaggggatggacgcgggaggtgagaagcggacgtgctttctgattgg

SEQ ID NO: 154608 - DNA, 122 bp, Homo sapiens
ttgtctgtataaagaacatacacagcacaaccctttctggggaaattgatatttcagacccggagctcagagattttctcatatgtcaaccacatctttcagatgagagccccttaaacagg

SEQ ID NO: 154609 - DNA, 122 bp, Homo sapiens
cgtgcagggttcaggctggggctgctgcccgcactgtgtgtgcttctgcaccctttggttcgtctctcactctagtaagcatctctgcatcatttggagcaggcagtgaggtgcggcagtgc

SEQ ID NO: 154610 - DNA, 122 bp, Homo sapiens
aactgacggtactgcctgcaggcgtgtgctcgtcagaatctattcccaacacagtagaagcggaggtttcaggaggtgcagagtgactagaccacagcatgtgtgtaagaaaactgacactg

SEQ ID NO: 154611 - DNA, 122 bp, Homo sapiens
ccagctcccgccgcggcggcggtttgttcccgccgggtccctcagcggaggcgctacgcccgcccctgtcgcctcgccccaccccgcccagggagctccgccctagcccgcagctcttccgc

SEQ ID NO: 154612 - DNA, 122 bp, Homo sapiens
tctccatcctcagggtggcctgaaggttccaggagggcgtccggcgaaggcacggggctgcgaccatccagttagcagggctggtgtgactgttgagagtaaatgaaaattcgttttgtgac

SEQ ID NO: 154613 - DNA, 122 bp, Homo sapiens
gagaaattgccagacttttcccaaagcagctgcaccattttgtgtcccaccggcagtgggcgagagttccgggtggttccacttccccaccaacacttgagcacttggtgggtttttttgtg

SEQ ID NO: 154614 - DNA, 122 bp, Homo sapiens
tttcaatttcaggtcttggctgtgcaaggaagccgagagacatgagtctctaagagggcacgatattgagagggttgttatctttctgtcagcggggaaaccaagagaaaagtttaaaaagg

SEQ ID NO: 154615 - DNA, 122 bp, Homo sapiens
cctgggggtgggggtgctgccccggggcccccttcctgggtttcctggtccttttgttcacgtatccccctccccggattgaaccagcaaagagcacaaagcagaaaatacatccttgccgc

SEQ ID NO: 154616 - DNA, 122 bp, Homo sapiens
aggaaagaacttgagtgtggggaagctgtgcactttgacggcctccacctcgttggcagtcgagtccatcttggcgatgacgatgttctcatggtccttgtacgtctctcccagtttatccc

SEQ ID NO: 154617 - DNA, 122 bp, Homo sapiens
aggagattcttgagtcaggaaggtgaccggggttggaagtcgtttcaggtagcacctgcccggtctgggctcaccaggtattcagagatggagcctacgggcgctcacctgcttggtggaat

SEQ ID NO: 154618 - DNA, 122 bp, Homo sapiens
acagagctactcagatggcactgaaatagagtggtaattgatctaatgcaacttttgcctcggataacatcattatttgtgaaattatgtcagtgttgctactgccaagtcagcaagcactt

SEQ ID NO: 154619 - DNA, 122 bp, Homo sapiens
gtctcgaccctcagccgcagccccagtcccatctcagctcacgcctaagccccgccgattcgccccaccccgtattcatcctgcagaccagtcctgagcacccagccaaagctcctgcggcc

SEQ ID NO: 154620 - DNA, 122 bp, Homo sapiens
gcagggccagggccaggggcagcggggcacagggggtggtcgcgcccaggagccatgtggcgcaaggccggacccaggcgcccaccctgcctgccgggcccagccccgccagcaacacggcc

SEQ ID NO: 154621 - DNA, 122 bp, Homo sapiens
ggaaagaaacaaacgtaccattgaggttgcgtatgagtctcgcttccttctccccatcttcgtccaagccgtcaagctttagtttcttccaggcgagttcgtccctctcctgtatcttcaga

SEQ ID NO: 154622 - DNA, 122 bp, Homo sapiens
gaggggtccgcactggctgacaggtgctgtgcagggcactaagtggggccctggctgaggcggcggcaccaggttggggagaggccgcccctccctggcttctaaccacggggcaattgctc

SEQ ID NO: 154623 - DNA, 122 bp, Homo sapiens
gctccagcgtctcctggagcctggccaccgttccttttcgtggtagctaatcccagcccacgctcttctgtctgacccaactcccgcccgggtttctggatcaggcacaagtttgtatttta

SEQ ID NO: 154624 - DNA, 122 bp, Homo sapiens
tgctgattactttcacttatcaggtattttcttttcattgactactgattttggagaatacgaaagtgagtcagaagccctcttcttttgggaagcttacagtttcagtggcctgaaaaata

SEQ ID NO: 154625 - DNA, 122 bp, Homo sapiens
ggagaggctgaggactgggctggatatgctgaccatcagccaagccccatccagggcccgcgggcagttctgcgcgggggtcaggccgctggcccatttcgcagaggcggggagaggcacga

SEQ ID NO: 154626 - DNA, 122 bp, Homo sapiens
aaagaggtcacattttaatcagaagaacaaaaatgctatttttttttttttttgggtgggcgtctatccagctgtcttggggatttccagcactgttcttggaaatgttggctctaagtcga

SEQ ID NO: 154627 - DNA, 122 bp, Homo sapiens
ttgagagaagactcaaggctgcattactctgtgacgctgagcgatggcttctggacgttccggaccgccacgttttccaccggtcagtgtcatctgcctgccaattgtgtgtctgctagaaa

SEQ ID NO: 154628 - DNA, 122 bp, Homo sapiens
aaagttctcccccagagtcctgctgggttctgtgggtcccaggaagtcatatctgaaccccgtgtatatgtccactgcttccacccaattctccaaaaaaaaaaaaaaaaaaatgactgaat

SEQ ID NO: 154629 - DNA, 122 bp, Homo sapiens
gaagcagcgggcttcactcgcgcagggcgccgccctgtggcgcagcccatcttccaccttcgcatcccaaagcatcttcaaagtcagcagtggttacccccaaacctgtcaattattttgac

SEQ ID NO: 154630 - DNA, 122 bp, Homo sapiens
tccccaggctgctgctggcctgtgtgctgatttctgctttcaccacttgcctgtacatcacgcttagccaggcatcaccttttcctgaacttgtgactacgagaaataacacatcatttaat

SEQ ID NO: 154631 - DNA, 122 bp, Homo sapiens
tcacagtggggagagcacgctgcactcaagatgctagcaagcctgcagcaggcggcccagcgagacacggtcccccgcccggccaccaggcgcccgcgcacgcgcacagccgcgctcagtcc

SEQ ID NO: 154632 - DNA, 122 bp, Homo sapiens
ccctagcgtgagcagaaactctttgtgaccttgttaaagtggtccagcctcctcaggcctcgtcttcctcgttactgatgcttgtcctgcccaccccgcgagatggggaatcctaaagctcc

SEQ ID NO: 154633 - DNA, 122 bp, Homo sapiens
atttaaaataatggaaaatgtctcatttgtggatagcgtcgcttagtcaatgctgagatgcgtcttgtggaacagaatttttgggacatttgcaggtatgttttagttccagggcaattagc

SEQ ID NO: 154634 - DNA, 122 bp, Homo sapiens
gcacagcagctgctggcccaggtgctaagccccttactgcccggggcttgcgggctggcccgccagccgctcccagtgctgggccagcagagcccacacccacccggaactcgcgctggccc

SEQ ID NO: 154635 - DNA, 122 bp, Homo sapiens
catggacctcgccaatacttgctccagctttcagtcggacctggatttctgttcagattgcggctcggtcctgcctctgcccggggctcaggatacggtcacctgtattcgctgtggcttca

SEQ ID NO: 154636 - DNA, 122 bp, Homo sapiens
agaaattatcttgtctccgcgttctttcttctgccggcgagccaggtaatggtaacagagcgaaactccccagtcggaacttctgggttgcagcagcctcgccccccctccccgcagcccgc

SEQ ID NO: 154637 - DNA, 122 bp, Homo sapiens
agcttggcacagcagaaggaacagattcacttgggactggaatctggttctgccacttgccggctctgtgactttaggcaagcgacttcacattcctcagccaatttcatccgtgaaaaggt

SEQ ID NO: 154638 - DNA, 122 bp, Homo sapiens
ctttatagaaatagggttgtgttagagatgaaattaactgtgacacttcaggagttttaccgagaaagaagattaacatgttcggtcttcagcggctgtcttccctgatgcaaataatgtta

SEQ ID NO: 154639 - DNA, 122 bp, Homo sapiens
tgttcccgagtccggctaacttgtgggcctacttggcgctatgcactaagctaggtgatgcgaatgcagagatgtatgagggcagtgaatgctctaaaagagtttgctgttctggcacaagt

SEQ ID NO: 154640 - DNA, 122 bp, Homo sapiens
aggttctcaaaggccgctgccctggcagacacactctcagcgctggggttggagtttctccgctgcagacgttctatgggggcccctcgcaggaccacaccagctttgtttcctgtgccccg

SEQ ID NO: 154641 - DNA, 122 bp, Homo sapiens
gtcatggacagcggtcaaggccgtctccccttctccgtcgtcagggacagcggtcaaggccgtccccctggggcatctgcctcccgcttcacagatgagggcgtcgaggctgctcagcccag

SEQ ID NO: 154642 - DNA, 122 bp, Homo sapiens
gagaagctggccctcagcggctgggtcggtaggaattagggcagagttaggagcggcctgcggaggggcccgctcaggccgatgccggtagtggaaacagaggaagccaccgccgcgctctt

SEQ ID NO: 154643 - DNA, 122 bp, Homo sapiens
cagtctctccaccgcactgcaggggtcggcttcaggagggaaggggtttcttggcgcatgcgcactctttatacactgcaggggctagctttgctcgaggagggggcttcctggcgcctgcg

SEQ ID NO: 154644 - DNA, 122 bp, Homo sapiens
ggtctcaaatcagccatgaaaatggcagagaggccacctcttaagccaaggtttgtcctacggattttaactattccttagaaatttaccaaaatggaataagaggaggaaggtttcataaa

SEQ ID NO: 154645 - DNA, 122 bp, Homo sapiens
ctgccctccagccatctggacctccccactgggtttgggagcacctggacatatcagtaccgatctcttcccaaacctgggcgttgggcccacactcatgtggcccatggctttctgcaggt

SEQ ID NO: 154646 - DNA, 122 bp, Homo sapiens
agcaatgggcgtgatccgggcgtccgagggaagttgattgactgtaaggtttgcggtggccgctaggcgatgacaatcagcgaaggtctcttagattctgagccgttagggcttatggcctt

SEQ ID NO: 154647 - DNA, 122 bp, Homo sapiens
ctgactgtttcttagtagtagttggcaaaacacctcttaaaataccatacttgttttcatcgtctttggtgtatgaaatagttgaatatatcctttcagaataatatttggccatttacatc

SEQ ID NO: 154648 - DNA, 122 bp, Homo sapiens
aacatttttgtgtgtgtggctccacccagcctgagcttcctgactgagaggttttggtggcggtacagacacttttaactcacagtaaaagcaaaagcaacagctcaagcagcctccttgga

SEQ ID NO: 154649 - DNA, 122 bp, Homo sapiens
tgctgcgcgtcccaccgacccgctgctcgccgtccctgggccgtgctggccctccgccctcggcccagacccggaccgggccatgctccacaccaatgggaccagtcgggagggccacgtgg

SEQ ID NO: 154650 - DNA, 122 bp, Homo sapiens
gccctccaggcccttcggccgcgggccggcgggtgagctgggggtccccaggacaggccgcgccctctgtcctgcagacacctgaggcctccgatgtggctgcccactggccggacccaggt

SEQ ID NO: 154651 - DNA, 122 bp, Homo sapiens
ccaccgtcttcgagaactatgtggccgacattgaggtggacggcaagcaggtggagctggcgctgtgggacacggcgggccaggaggactacgaccgcctgcggccgctctcctacccggac

SEQ ID NO: 154652 - DNA, 122 bp, Homo sapiens
gccccaagccggacaggaccctaagaccaagtcacccaggggctgttgcctagcaaccctcgtggccccgctagcgggaaggaaaccgaacagaaaacgcacaagcgcagaaaagaaactcc

SEQ ID NO: 154653 - DNA, 122 bp, Homo sapiens
ataattacttggctcccacacagctgagttccatagatgcattattaacggcacattcctcgccataacgagagctgaacagaggtaggctccgcagaccttggcgtccgccattagcggcc

SEQ ID NO: 154654 - DNA, 122 bp, Homo sapiens
cccatgtactctgcaaacacgccggccacactcttgccccagggcccttgcgctcgctggcgcctgggcgttcttcttcgggtctgctccctgggcctgaaactgcaccttcccctgagcac

SEQ ID NO: 154655 - DNA, 122 bp, Homo sapiens
acgatgcccagcgggtagtagaagccttgccgccacaggacaatttggacccagaagagccggctgtgccgggcctcggcggtgagcctctcaagccccacacgctgcagccggcccttccg

SEQ ID NO: 154656 - DNA, 122 bp, Homo sapiens
ctcaggtaccggattgttgcaaaggtctgtacgtgcctgtgcctgcattgcgacccccggcgcgcctccagttccaaggccgagctcactttcaacagctctggaaatatgaatgtattttt

SEQ ID NO: 154657 - DNA, 122 bp, Homo sapiens
aacatcctgcgtgactggatgggctgcaaccagaaggaggtggagcggcggaaggagcggcggctgccccaggacgacgtggacatcatggtgaccatcaacgatgtgccgggctccgtgaa

SEQ ID NO: 154658 - DNA, 122 bp, Homo sapiens
ggggagggctccagggcccagtcggtgtgcagggaactgcgggcagacgagtcgctggcgcggcaggccgtgcagctgctgagtgagccccccaccgacgactcgctggacgaggccccgga

SEQ ID NO: 154659 - DNA, 122 bp, Homo sapiens
gaggcccatgtgccgggttccatccctgccgcccccccgctccgtgcctggcacagagaacgtgacaggcaaattctgatccattgaaattatggatttccagccgggcgcggtggctcacg

SEQ ID NO: 154660 - DNA, 122 bp, Homo sapiens
agcccaggagactaacctgggcaacaaagcaagaccctgtctgtattaaaattacaaaagcgtggtaaggatcatttcctcattaaccttgaacatccaaacacaaaccatcaaaaagaatc

SEQ ID NO: 154661 - DNA, 122 bp, Homo sapiens
gcgccatctgttcccattattcttggcgggggcaggagcgtgagaggtggggctctggaccgggtcaggctgtgagcacaccactcagatttctggctaaagtgctgaacttcacagccgag

SEQ ID NO: 154662 - DNA, 122 bp, Homo sapiens
tctctcgggacgcttcatggtgatgatataggtcttcgttctttctcttggtgctcagcacgcgataggatggcactgcactccccgattgtatttaggttcttgccatttttttggccatt

SEQ ID NO: 154663 - DNA, 122 bp, Homo sapiens
gcgcaggggctgctgcttcgccatgaaggatttcccgtgctgtaggagcaagtccgggaccgctggctggacgtgagcgtcctagctgtgcgttagggctaggagggctcagggtgattggg

SEQ ID NO: 154664 - DNA, 122 bp, Homo sapiens
ccgaagagccaagtcactggacaggaggtccacggagccctccgtgacggtgagcccaggcgccgcgtcctccggaggccgtgctcctctgcttctggtcactctgaggcgctgtctgtttc

SEQ ID NO: 154665 - DNA, 122 bp, Homo sapiens
gtgcgtgtagatggacagccaggaaggcagcgcagggtcgaggggagagcgcggggcaagcgagacttcagtggctctgcactttacgcagctcagggaccaaaccccttcctccttccagc

SEQ ID NO: 154666 - DNA, 122 bp, Homo sapiens
caggcctctgccctggaggaagggtggtgtaactgcccctggacgacagcctggatgtggcgaggggagacggtccacaccctgctctcaagcatggaggtcgaatgtttctaggtcagcag

SEQ ID NO: 154667 - DNA, 122 bp, Homo sapiens
gcctccggcatgacgcatgcgccctcgggctcctccgcggcagcatctcggttctcctctcgggcccatctggagcctcgcgtcttttccagtgtgggccccgccccctgccggtagaaccc

SEQ ID NO: 154668 - DNA, 122 bp, Homo sapiens
tgacccggcctcatgctctgggggccccgcgcgccacctgctggtcctgagcagcacctgcgccggtcccctccgcgtccatgcagggaggtttgtgtctgggctcacactcacctcccctc

SEQ ID NO: 154669 - DNA, 122 bp, Homo sapiens
taattggcgctaggctttgttgtaggaagtttgtaagttttaaaatagcaagtagattcacgtagaccttgtcaggaaattggtcactatccatctaggccctagaagtgagaggaggaatc

SEQ ID NO: 154670 - DNA, 122 bp, Homo sapiens
ccccaccatttaaagagacagcagcgagaccgggagccttactgcggcggaggcttccgacggaggcgggaggcgggcgcggagttgccgaggtggcgggagcgcagggagcggaggaggcg

SEQ ID NO: 154671 - DNA, 122 bp, Homo sapiens
ttactggaaaatacatggtaattgtgggaacagatcagcggtcccgcgcccgcgcgtgcccgtggaggttcagtgcccagcactttgcataccccagctcggtatgcaaagaagcttcgcga

SEQ ID NO: 154672 - DNA, 122 bp, Homo sapiens
tgaccagccaagggcagtcagagactcaggagacaggactgttcccaggctcaggagagccggcagggagctggggacaacatggaagggcctggacagcactcagctctggcctagagagg

SEQ ID NO: 154673 - DNA, 122 bp, Homo sapiens
gactttaaggtcagctcagctgttagctgcctggcagacatgggggcaacagctaactctcgtctcctccctcctcaggcacccccttgttttgcacagggctccacctcccccctgtctcc

SEQ ID NO: 154674 - DNA, 122 bp, Homo sapiens
gcttcactcttaaggctttatgtccttatatcctcttcctcagcaaccccattatcttcacgaggaaaagcagtgaatgaatatgaggggagttactgtaggtctcttgcctaggttgcaac

SEQ ID NO: 154675 - DNA, 122 bp, Homo sapiens
tcaataagtgcaagtcagtaactaaaatgaccatattcttaccaaccaaggtcatagcgtcgtgtgtttacggtgtttttaaagatttcaaaatgccgggctaatgtgattatatgtgatat

SEQ ID NO: 154676 - DNA, 122 bp, Homo sapiens
accccaagaggaggaagtgcattcgtccctccccacccccgccccccaacaccccgtgcccgcttgagctggtggacttcggggacctgcacccccagaggtccttccgggagctgcttttc

SEQ ID NO: 154677 - DNA, 122 bp, Homo sapiens
gcgggtcccggacattgcgcttaggggtcgccttgcagggccagagaagctggcagaccacgcgcgcgcacgtgccggggcggggcgtcaccgggggcggggcctggaagggcggggtcggc

SEQ ID NO: 154678 - DNA, 122 bp, Homo sapiens
aagcagccaaggggcaagaattagtggtgacaaaatttgggaggcaatccttcatgtgctcgcccacacaggtcgggcagctacaggacgcagatgtgatagacttaggagtgctggccttg

SEQ ID NO: 154679 - DNA, 122 bp, Homo sapiens
cgttttcatctacagcctccccctgtggctccacgcacgtgtctcttcctggactcccatcgtcaccctcacacactcagccagtccacccagtgggccagaggtcatccaagaccacgggc

SEQ ID NO: 154680 - DNA, 122 bp, Homo sapiens
aatttaacaacatcccctggggatgcactgtaacattcgagcagccctgctgcagaggatcgcagtgagacgggaagaatgtgtcttttccactagatggcaggccttacctgcgcttggct

SEQ ID NO: 154681 - DNA, 122 bp, Homo sapiens
ccagcagcagccggggccgggcctcacccgaggaccgaggtgccgatgaacgctcatgttcggaagacactggctccctggtttatgtatttacttaattttaagttaggctccccagatcc

SEQ ID NO: 154682 - DNA, 122 bp, Homo sapiens
tgtctctgcatacatataaattatatacttgtatcttacatcttaggggctcttcttgggcgtcacccgtgccttgtggctggggcatgtacatacacaagtggacacacaggcagagcagc

SEQ ID NO: 154683 - DNA, 122 bp, Homo sapiens
gggagaagctgcagggccgggagggttcagcaggtaagcagttcagggttcctggaaaggcgggtcccaatgcatttgctgaccgggcacctaacgggctgctctcaaaatcactgactgtc

SEQ ID NO: 154684 - DNA, 122 bp, Homo sapiens
tagacttttcccaggatctgagggcaaagagtatccgtaaatcacccctgctcctcccaccgaaacggcggcgcgagaaataaagatcagaaggcgccaagcggagctcagcgcgctccccc

SEQ ID NO: 154685 - DNA, 122 bp, Homo sapiens
tcagaagcttgtagaggggagctattcttccaagattccagatgtgtctgtgagacaacacgttatggggcaaattgatttcacccttgggaaaccagggagattttcaaagttatgtctgc

SEQ ID NO: 154686 - DNA, 122 bp, Homo sapiens
gtgcggctcactccgctggctttgtgtggacagttcttgccggtggcgttgcgtgagtttcgcctcccaggttaattgaccggttgctctgtatttttaaagaggcacgcatctgtagctga

SEQ ID NO: 154687 - DNA, 122 bp, Homo sapiens
tgtctgcagcccccaaccctccccccggtcctgcccagcaccccggaggggttcgcaccccggcctcggccccgcgcccccgcgtccccagccctgagccccagcccctccgcacctacccg

SEQ ID NO: 154688 - DNA, 122 bp, Homo sapiens
tgtaaactttttttttttttctcgctctgttgcccaggctggagtgcagtggcaggctgacggttcgctgcagcctcgaactcgtgtggctcaagcaatcctcccatctcagcctcacgagt

SEQ ID NO: 154689 - DNA, 122 bp, Homo sapiens
caggagagcgactgcagcggaggaccctctttctctaataggtttgagagtgggcaagggcggccgtgggacagacctggcctcctagagagggtcttctgagggcctctgcagagatagtg

SEQ ID NO: 154690 - DNA, 122 bp, Homo sapiens
ttacctgtttgcatttctcatgtaacttcactgtaaagaaggcaagaacttacaatagcacggtgtagcactgtggttccttcagagtctgcagaataataataacttggaaggacacacat

SEQ ID NO: 154691 - DNA, 122 bp, Homo sapiens
tacgtgacctggtccgtggcccgtgtgcaaatgtcaccaaccgtccagataacgccctgacgccatctctcctgtgcagggtccagggtcccacgtggcatttctacactgtctctcctgtg

SEQ ID NO: 154692 - DNA, 122 bp, Homo sapiens
gtttcctgaactttaatgacgggcaattagcgcggtgagtaattacgatgcctctcctgccgggactgttaacgggcagcgctgggtctccgttcctcctggctctgctgccctccagcctg

SEQ ID NO: 154693 - DNA, 122 bp, Homo sapiens
aagggtcgaaggggcttccccgccccctattctcacttcggaaaacacgggtcaaatttccgctgacttcagagcggaataaatcacgaccccagcagagaaaatttacaccttgaaaaaaa

SEQ ID NO: 154694 - DNA, 122 bp, Homo sapiens
tcgggactcagctgccggagggacaaactaacttcctgagcgcgggacctgaggctggcgcggccgggagccacctgcagcctgcggtgaggcgaccctggccctcggggcgcgcggcatgg

SEQ ID NO: 154695 - DNA, 122 bp, Homo sapiens
tttatcctggaggcaatggaaagccgctggaggtctgatgtggagaagtcagacccctgccgtcaggaaaaatctgtgcctggaggcagcttttgtccaagaccctggggacaacctggccc

SEQ ID NO: 154696 - DNA, 122 bp, Homo sapiens
tgaattttttctaaaagagttacctgctctttgtattctgcagaatggatgcacttgagccgacctaagcattcatggtcatgagatttgtggttgccactgttggttaggagcatagagat

SEQ ID NO: 154697 - DNA, 122 bp, Homo sapiens
gtattaaggtgacctcttctggaataaagtaagggatgttacatatgcatagccaatcaacggcatttaacaaggagtgaactgaagtgcttaggcacaagactgttgaaagttcagagagg

SEQ ID NO: 154698 - DNA, 122 bp, Homo sapiens
gaagggaaaaggaggcgcattagcgacttcgttttcttgcatagtactggtacagagtaccggtgatggtcgtaggggaactctatgtaaagactggatgaccaccggcctcccggaaaccc

SEQ ID NO: 154699 - DNA, 122 bp, Homo sapiens
agagaccagagcactaatggcttcctcagttcaaactttgctcgtttattcattaggtgccgaccaccgaatataaaggcagcatacagagcagaaaacaggaaagatttcttcctgcaaac

SEQ ID NO: 154700 - DNA, 122 bp, Homo sapiens
aaaaataaatcaccaacacaactcagcttttattattaattctcatgctggctcatatgccgatgaatctgaagcttttgaaatccaaaaataggaactcaatgatgagatagacttgatat

SEQ ID NO: 154701 - DNA, 122 bp, Homo sapiens
gagtacccagagttgcgaggagttttttaactggtatttttctcgtttgtcagggttaaacgttaagtaccatttggtttttagtacagtgttaggtatcgtgtggctgcaggacaggacca

SEQ ID NO: 154702 - DNA, 122 bp, Homo sapiens
aacccacacttcagactggacacatgcagactacacaaccaaaatttgaagtcaaggccacggccaaggtcatgggctctgggtaagacgaacccgggctcaggttcttgctttcatactaa

SEQ ID NO: 154703 - DNA, 122 bp, Homo sapiens
aaatgttcacctactggccacactcagtatgtacaaccttttggagttgctcttcaaatacgatctgcttatagtttggaatattccttctcaaacatgttttttggagtcttgctatgttg

SEQ ID NO: 154704 - DNA, 122 bp, Homo sapiens
ggggaggggcgggcctgggagaccttgggcgcctcctctgaaagcctcttggtaggtatccggttgatgggtgacgtgtttggccggaaagggagagcagcagattgcccctctgttttctg

SEQ ID NO: 154705 - DNA, 122 bp, Homo sapiens
gttttcatcactataaagaccacggtcctaatggcatttggtgctcagagccctggatgccgagtcctgagtatgtccaggacagtgtggaacagacaaaaaccctgaccccaaggctgatg

SEQ ID NO: 154706 - DNA, 122 bp, Homo sapiens
cccgggcctttgggtggtgagagctgggcctgggttcgacgcccgcgggcgcagggagaccggctcccctttgctgtgtgaaagtttagttctttgtagccagccgccctcgttgaaggccc

SEQ ID NO: 154707 - DNA, 122 bp, Homo sapiens
tctgtaatagtcttccttttagtgacagtaccctatggcagaggttgatctcttcgactacggtatttgaggtcaattcaaagtctccaagtaaacctttgcaaagttactaagtagtctga

SEQ ID NO: 154708 - DNA, 122 bp, Homo sapiens
cagcgcgccggaagccccgcccccggggtcgccggggcccgtagtccttctgcgagggcgcgaggactccaggagccgtcctggttcgagcatttctgaagaaactgagttcccggcgttcg

SEQ ID NO: 154709 - DNA, 122 bp, Homo sapiens
gaagctttcatcagttccctgttctgtctgatgtcccagcattaaacgctctgcgctccccgtgcgagtccagcagcgtctgatggcagcaaagcgggactgaagtagtcctgtcacgcagg

SEQ ID NO: 154710 - DNA, 122 bp, Homo sapiens
aaattgcgtgtgtgtgggtgagtgtgtgggtgtgtcgcctgtgggattgcatttttgcatcgtgtatttggatgcctgatcccctgcctccggtgggcagagggtctccttttgcccctttt

SEQ ID NO: 154711 - DNA, 122 bp, Homo sapiens
cgtcttggattcgacaaccataagcatcccgttagggcaaccaccgcagcagactaagttcgactactttctctccaaactcctcccgggccttcttcccaagctctctctttctcctggag

SEQ ID NO: 154712 - DNA, 122 bp, Homo sapiens
gaagcgggatgggactaggagcagagatggaggagccgggatacccatttagaatgtttacgtagatatagctgtgtatttataggattgttagtagcaatgtctatgtaaacattatacat

SEQ ID NO: 154713 - DNA, 122 bp, Homo sapiens
tggaggtgactgaaggcgaatgtgggaggtcatggtgggttaatgatcgccagcgctgtccggtgaaatcaaccacctgtgacaaaggtggtttttcacttttactgaacaagcatgctatt

SEQ ID NO: 154714 - DNA, 122 bp, Homo sapiens
tacccatgtaaccaattccttgtattaaattccttctgtttaaaatatctagaaatatttcggttttttttttttacttggatcctgattaactccaacctacctttctagtcttacctcct

SEQ ID NO: 154715 - DNA, 122 bp, Homo sapiens
tccgggcgtgcgacgaggagttcgcttgcccagagctggaggcgctgttccgcggctacacgctgcggctggagcaggcggccacgctgaaggcgctggccgttctcagcctgctggcgggc

SEQ ID NO: 154716 - DNA, 122 bp, Homo sapiens
tatctcttggactcaaagatgccttagggcagaggacacgttacacccagtacagaatctcggacagtgaatatcagtaaacattcggcagaaaagctctgccaaattgagtgctctgatgt

SEQ ID NO: 154717 - DNA, 122 bp, Homo sapiens
agatccacaggtgataaccatggacacctttgtacactgaaggtttataattcgcagtgccgtgctttggtgtttcagaagcagagagaggtgtttatagaatggttctgcctgaaaataga

SEQ ID NO: 154718 - DNA, 122 bp, Homo sapiens
tgagcggaggcagacaatgcttatgtatctggagacaccctaaaacaccaagcttgcttgcgttggaagtcttccagaactggttacccatattttaaagcaaagcctctgatgcccgtcag

SEQ ID NO: 154719 - DNA, 122 bp, Homo sapiens
acacccacttctgattagatcagactctgcctctgagatgctgggaggcccctcaggcggcggcaataccaagtaatgcctttagcctcctttgatcagctgtgacgggcgtcctggtctga

SEQ ID NO: 154720 - DNA, 122 bp, Homo sapiens
atccctttacttaaatctctgcaacagctcttcactggcttctgtgcatcaccattgccacggtgaccgccaggccattggtgacctggccatgctccctcccttccagcctcatatctgac

SEQ ID NO: 154721 - DNA, 122 bp, Homo sapiens
tcattacatgtgtctgtctggcctgatctgtgcatctgctcggagacgctcctgacaagtcgggaatttctctatttctccactggtgcaaagagcggatttctccctgcttctcttctgtc

SEQ ID NO: 154722 - DNA, 122 bp, Homo sapiens
attggaccggggcctcgggtcatgtgggctcgcctcacgtgactcaagtcccagggtggccgctttcagctcggactgaattacctgcgctcttttcggctggcgggctggcgggcggtgct

SEQ ID NO: 154723 - DNA, 122 bp, Homo sapiens
cggaccccggcccggcacgttaggggctgggggttggcaagcggggccagaggcactggccggggtccgaagctcacctcgtccttctctcgtcccacaacggccccttcccggctcgccgc

SEQ ID NO: 154724 - DNA, 122 bp, Homo sapiens
acatctttaaggaacttggcggtctggagccagcccgtacattaatattcaaggccacagcgctggtgagttcggcgccctctgttgtatttttgcatcccgggaaggctggcccggctctt

SEQ ID NO: 154725 - DNA, 122 bp, Homo sapiens
acatctacattatcccttaacattcatttttcacagcagcaggtctttgtagaaggatcacgtggttggagtcagtcaaatgtggccttgaatcaacaagttggttactctgtctgaaattc

SEQ ID NO: 154726 - DNA, 122 bp, Homo sapiens
ttgaaaggctgttgttatccttctgtggacaacaacagcaaaatgttaacagttaaacatcgagaaatttcaggaggatctttcagaagatgcgtttccaattttgagggggcgtcagctct

SEQ ID NO: 154727 - DNA, 122 bp, Homo sapiens
tttcagtctaagacgtgggctttctgcaaagcctccccctgccagcgagctctcggagcgcggagcctttagaaattgaggggtttactgtcaaaatgaaaatttcacttcaaattaccttg

SEQ ID NO: 154728 - DNA, 122 bp, Homo sapiens
cgcctttagcttttagtcctttgaagagccctgagagtggaaatcaagagattttttccacggggaagttctttttacaaagcgttgatttctcggcacccggcagggagggcaactggcag

SEQ ID NO: 154729 - DNA, 122 bp, Homo sapiens
ggaccgccgtgacgaccagagtagcgacccgcggggagcggcacggggtgacgctggctgcggggacccagtgacagcgtgagaggtaataggttttgacaagtttgcatcatgtgtgaata

SEQ ID NO: 154730 - DNA, 122 bp, Homo sapiens
ctcacagagcctccggcagggatgcaggtgtgcgggggtgaaggaggggcttagtttttccggaagatcaggcatttgttgttggctggcatgtccacctggagaaacactttgctggagga

SEQ ID NO: 154731 - DNA, 122 bp, Homo sapiens
tctgcagcttccgtgcacacagatcccctgggggtcttattaaaatgcagctggtgacgccggcggtctggggaggggtctgagcagctgcctttctcacaggcttccaggtgatgctgctg

SEQ ID NO: 154732 - DNA, 122 bp, Homo sapiens
actgacttcaagaatgaagccgcggaccctcgtggtgagcgttacagttattaaaggcagcgtgtccagagtttgttccttctgatgtttggatgtgttcagagtttcttccttctcgtgcg

SEQ ID NO: 154733 - DNA, 122 bp, Homo sapiens
gcctggaaatgaacgtgcttttactgtaagcccggccggaggaattccattccctcagctcgtttgcataggggcggccggcggccaatcacaggcctttccggtatcagccagggcgcggc

SEQ ID NO: 154734 - DNA, 122 bp, Homo sapiens
cctcccacggtgttcgaacagctcagtagaccgccgccaccagctggctggagcagccgccggtgacatctgcgccgcgcccacgcttcggagccaagatccacctcctctcccgcccgcac

SEQ ID NO: 154735 - DNA, 122 bp, Homo sapiens
tggggcgaggggcttacattctccaagcaccatttactcacccctttgagacgactacaacgcaaagtgaggaaatgaaacgaaaaagctggtccaaaattcggcactgcgagcgccgcggg

SEQ ID NO: 154736 - DNA, 122 bp, Homo sapiens
gggccgggccgtaccaagagcgcaaatttgcagggggaagcgcggggctccgggaatgcacgcgcggctcgagtgggcggggcggcggcccaatggccacgcccccacccccgcggccggcg

SEQ ID NO: 154737 - DNA, 122 bp, Homo sapiens
aaataacagttcctggtgactgattcaatatggagactgaagtcttgagaggcaagcgtccgtgatgacaccaaattttaatctggttgattaaaagaaagtggtgacgatgacaatgacag

SEQ ID NO: 154738 - DNA, 122 bp, Homo sapiens
gcaggcccagaagaaggtgcttttcctcttcttctttccttagctaatcctgaccttgctcgagcaatctctctctttctcacctcctgcccctcagtcttctccatctttccctccatccc

SEQ ID NO: 154739 - DNA, 122 bp, Homo sapiens
ctcttagcttgcccttcataaatttatctgcgttctatcggcattggggcaagaggagagcgaaaaggggggggaagccccgattttatatttgtgactataaaaaagcgccacccggtttc

SEQ ID NO: 154740 - DNA, 122 bp, Homo sapiens
ctgctacccgttctagagggcctgctcagtggagctggggccaagctgggcctctccagtcggctgcgggggcgcacccccgggcgctgggagtccaggcccggttttgcatcaggccctgc

SEQ ID NO: 154741 - DNA, 122 bp, Homo sapiens
agcatatgagagaagtaaaacatgtaaagctaacaattatattgtgtttacttacgggggcggggggtcctgttctcagcgctttgcatgaactcacccagtgaatcctcaccaaatccaat

SEQ ID NO: 154742 - DNA, 122 bp, Homo sapiens
cactgccctccccaggaaagctgtgctcatcttcagcagggctggtcctatccagccccacgcgaggcccagcttaaatgccccattctgcgtaggcgcaccctgcagtgtgtggctaagaa

SEQ ID NO: 154743 - DNA, 122 bp, Homo sapiens
ccctttctctctctctctctctctctctaacacgcacgcacactcccagttgttcacactcgggtcctctccagcccgacgttctcctggcacccacctgctccgcggcgccctgcgcgccc

SEQ ID NO: 154744 - DNA, 122 bp, Homo sapiens
gtttgaatcccagctgtgagcttgggcaagctcctcaacctctctgagcccatgcttcttcgtctgtaaaatggggtcagtatcagggggattgtaaagtttaatgagctcaccctttctac

SEQ ID NO: 154745 - DNA, 122 bp, Homo sapiens
cgtccatgaggcgtggggcgcgccgggcgagtccctgcttgcaggaggcgcccgagaggccgtcgcgtaccctggcaagaggagctggttagcacctcccgaccccgagaaggcccaggggg

SEQ ID NO: 154746 - DNA, 122 bp, Homo sapiens
ctcccctttctgtacccctgcttctccaccgcacaacacgcatacacatacacacacgcacgtacacatactcctggtaggggaatctgctgcaggtggcgattgtgcccgcccaagcgagg

SEQ ID NO: 154747 - DNA, 122 bp, Homo sapiens
ttcctccacggcggtggcctagctctgtcagggcaggctcaggtggttggcatctggccccgtttgaccccctccctcctttcctgtccctgcagctcccgtcccatgtgtccctgaattct

SEQ ID NO: 154748 - DNA, 122 bp, Homo sapiens
agggacaagagctcaaggggacacctggaaaagaaatactataatttaaaaaattaccaacgggctaattatacttgtgttttactggcagagcgctttgtctgttagctcttttaatcccg

SEQ ID NO: 154749 - DNA, 122 bp, Homo sapiens
agctatcaacttttattctttccttccccagagctacttaataaagaatcgtatgttctccgcttagaggtggtttgctggtttctacttctgaaaagcaaatggctgaagagattccagtg

SEQ ID NO: 154750 - DNA, 122 bp, Homo sapiens
caggctcttggcaggacttgctgtagagtcccagacggagttagccactgagtccttcagcgacccaggaaataacaacactgttggcaggtgggggagggcgcccgggaagatatccaata

SEQ ID NO: 154751 - DNA, 122 bp, Homo sapiens
tgaaggagggggaaaaaaaaaagtcttctccagctattctgtgtagagcgtcagcaccaccgaacgctaatgcttgaatggtttagaactgcggacagctcacgccagacagattcagcacc

SEQ ID NO: 154752 - DNA, 122 bp, Homo sapiens
gtacttgcccaaattttcatttaaccctaataacaatcctatgaggaagatgcaattatgcgaaaggcccattttgcaaatgagaaaactgaggcatggaagagtggcaaattttggccaag

SEQ ID NO: 154753 - DNA, 122 bp, Homo sapiens
ggtgatccacccatcttggcctcccaaagtgctaggattaaaggcgtgagccaccgcgcccggcacacaactcttgtttctgtaatatattattgtatataggacgtgtcagatacttattt

SEQ ID NO: 154754 - DNA, 122 bp, Homo sapiens
cccaatccccccatcccaggacgctcagccgtgcgtgggctgggcccactccactcccggcgcccacagttgccccagtgaaccggccagtggaggcatcctgtcccgtgtgcgggaaagga

SEQ ID NO: 154755 - DNA, 122 bp, Homo sapiens
aagaaagaaaagaaacttcagatataaagactgtgcagcatcttgaaaataatgtgtcaccgtggcattttgtttccttttaaaaaatttcctgtcagtttgacatttactactgtttctct

SEQ ID NO: 154756 - DNA, 122 bp, Homo sapiens
acacctggttttctacttgcagaagaaataagtatgagggacacttaccttgttttgctgcggtgacatccactggtgcctggtctgacttatccccccggagagtttctacctctagctcc

SEQ ID NO: 154757 - DNA, 122 bp, Homo sapiens
aaataagataattgtaaaagaaactgacgtattttaattaaaagttgtaacatactgttccgctcattcatttgggtaggtaattagaaaggactgacgtatttcaatactttaacaactct

SEQ ID NO: 154758 - DNA, 122 bp, Homo sapiens
gaacggaaaaatttaaggaaagaacatgtctacatgacctgaaggcagaaacaccggcgacggaaccagcctcagaatgattttaccccaaatcactgaaacgaccccaagagtctcatagc

SEQ ID NO: 154759 - DNA, 122 bp, Homo sapiens
tcccgccggcggggctctgccattctcggatcttggcttcagatctctgatgctccccagcgtctcttggcaaggaatctacttcgcgttcagggaattcacagccacccgcctctggtctt

SEQ ID NO: 154760 - DNA, 122 bp, Homo sapiens
cttgccgtcgtagacgcccaccgtgctacccaccatcgcgggcaggagaagcacgtcccgcgggtgcgtcttcaccacttccggcttctccgtgggcggcgcccccttcttggccttgcgca

SEQ ID NO: 154761 - DNA, 122 bp, Homo sapiens
ctaggaggggattggagagtgcagggttaggccccagacccacttcttgcctccctgattcgcccatccttcccttagtagccctgcctccctcccagcattcttgatgcctacttggcctc

SEQ ID NO: 154762 - DNA, 122 bp, Homo sapiens
ctggggcgctctgcagtcttaaagcagcagcagagacgtgcagccgaactgaggcaggaccggggagagcgcagccaccgcacagtcacgcacagtcatcaggaggaatttcttagaggctt

SEQ ID NO: 154763 - DNA, 122 bp, Homo sapiens
cttgaacactcaaggtcatcattgactattgactgctgcacagaatgtgctgtgctattacggccactttctagctcatcccctgctgtccccatctgcctttgtgcctgtagttcacagtc

SEQ ID NO: 154764 - DNA, 122 bp, Homo sapiens
catgcaacaggtgcttagtaaatatttgctgagtgcataaatgaatgtatacatgggtctcgcaggattgaggcataaaagaagtgcctatgtagagaggataccatttatctcatgttaca

SEQ ID NO: 154765 - DNA, 122 bp, Homo sapiens
ttgcgctctccccaacttgcctttgttattccagctcccttcctcgcctcgcctccgacacggtggcagcctgcaaaacgtggagcgcggagtcactgccacacctggaatccgaagcgggc

SEQ ID NO: 154766 - DNA, 122 bp, Homo sapiens
cccaaaagggagcgctacagagaggcggaaatcactgagggacaggcgctgctgaaatctcgcgagagggaccccctccctcgcccggtcgccgacttcctctgcttctcctctttcccccg

SEQ ID NO: 154767 - DNA, 122 bp, Homo sapiens
tctggggaggggccaggaaggacctggaagaagagcagcctccgcccctgcaggcccggccgccctcagccctcgaaggccgcagccgctcaccttgtctcgcgccagctcctctcgggcca

SEQ ID NO: 154768 - DNA, 122 bp, Homo sapiens
cgtgctgaagatgagcgaggagcgcagcctggagctgcgctggaccagggggttcaggcgcgagcggaatgagtcctgcttggccaggccaggctcctccgggccctcgcgctctgggccgt

SEQ ID NO: 154769 - DNA, 122 bp, Homo sapiens
attaacatttaattctcacggacacccctgaaacagatgccacagcccccattttgccaacgaggcagctgaggttcccagaggctcaataccagcaccatgagccgcagcacgcaaggcaa

SEQ ID NO: 154770 - DNA, 122 bp, Homo sapiens
cagactcactggtgattctcactgcccggtcagtccggaaatcctctgtgtctggttcatcgaggtcttccaggaaattatattctggatcatcatcatcatctgcttcatctaggaaaaaa

SEQ ID NO: 154771 - DNA, 122 bp, Homo sapiens
caccctcgcgtcctcctttccctccgtaccccagccatttgggggcaggggaggtggcggcggcttgtgtgcagatcctggcgctggcaaccctactttgcggctgcagaagccgaggaaga

SEQ ID NO: 154772 - DNA, 122 bp, Homo sapiens
agagtggtcatgtcttaaatccaggaagagctagttcatgttggcacccagggtagggagcgaagcccagggccacagcacagaggcagaggagaatagacactgaccaccaggagctgccc

SEQ ID NO: 154773 - DNA, 122 bp, Homo sapiens
gttgtctcaccaaggttctgacccttctgccacccctccttccaaacccaaggagcagtccgcctcgcagagcccgagcccgggtacccagcgggagcagctccaaacctggggcgcgagct

SEQ ID NO: 154774 - DNA, 122 bp, Homo sapiens
ccacgcgggggcgctgggacaactgcagatgttggaggggagttcgaatcccaggcttcccggcccgcagactgccccggctggccccaggacctgtttgttctcctgcaaaatagggttaa

SEQ ID NO: 154775 - DNA, 122 bp, Homo sapiens
gggcggggcctctgggcggctgcgggctagcggcgcggccagctacaaaggaccaggaggcggggatcgcggctggggcggggagggacggtgacgctcccgagccgcagcgcggagggcgg

SEQ ID NO: 154776 - DNA, 122 bp, Homo sapiens
gggatcagggtgcctggagcaaagccaggagaccgcacgcagatcaccagtgtgtgtctgcgggctgcggaggccatggccagggtcagaagttacacggagaggagcgcatgagcctgctt

SEQ ID NO: 154777 - DNA, 122 bp, Homo sapiens
aaagcgtcccagggcctcctacaccagcgcctgagcaggaagggggaggggccatgactacgaggccctgggaggtcactttagggagggctgtcctgaaacctggagcctggagcagaaag

SEQ ID NO: 154778 - DNA, 122 bp, Homo sapiens
ccgccgcgccatggacatctgcaccttcgtcttcagctacctgcttcctgtgctggttctcggcctgacctacgcgcgcaccttgcgctacctctggcgcgccgtcgacccggtggccgcgg

SEQ ID NO: 154779 - DNA, 122 bp, Homo sapiens
ctgaatagacaaaacctttcatgattaatgatgcacgggaataagtgatgaaaaaagtttcggtcccagatgatggccagtgataacaacatttttctgatgttcccatgcaatatacagtt

SEQ ID NO: 154780 - DNA, 122 bp, Homo sapiens
cgaggcggggcacggcgcgtggcgtgagacggggcggggcgcgcgtatcggcgccgcggccgcgtgacgcgttttcaaatcttcaaccgccgcagcccactcgtttgtgctttgcgccttcc

SEQ ID NO: 154781 - DNA, 122 bp, Homo sapiens
ggcgaccgtgcgctccatcttggccctctctgttgtgatcatgtcgtgggctttccgctccgcctcagacacggccttctgcagctccgtcatcgcctggcgcttcacctcattgacggcct

SEQ ID NO: 154782 - DNA, 122 bp, Homo sapiens
caagcttcattttacactactgtatgctagcgacgggttgtgacacccaagtgcagccaccgtgagcacccggcactgggagcgcgtgaacaataatgggggattcgccgtgctgcgccgtg

SEQ ID NO: 154783 - DNA, 122 bp, Homo sapiens
tgagcccgcgggctcaggcagggtttgccgacccgggaatgaccgtgcactggagggtcccgggccccaaggaacggtgggggtctgcctgattcatcccacatatacactaagccagcagg

SEQ ID NO: 154784 - DNA, 122 bp, Homo sapiens
tgcaagcaggctgcaaatcccttgccgctggtttacataacgaggctccctctcttccctcgggaggaattgagaacagatgcagagtcttggaacacatgcgcttggtttagaatagccct

SEQ ID NO: 154785 - DNA, 122 bp, Homo sapiens
gggagaaaagtgggtcttgtctataaagaacaggcttgttaaaagaacatcagaattcatcgctaaacatctctctgagcaaaacaaagcatttcctctcccctgagatcctcaactaattt

SEQ ID NO: 154786 - DNA, 122 bp, Homo sapiens
attatcttgctgagaaacacacaaagcccactgaatgaagctcttccatcccatgtacaacgatatcttgcctgaccatccgtatctctcaatctctcagttctttttaaaaactgtttttt

SEQ ID NO: 154787 - DNA, 122 bp, Homo sapiens
gcctcggggcccggcttacctcggtcaggaagcccccttcacctacacgcagcggagaagcgcccaagcaacaacgtctgcacccaaacccagtcctcagaaccgcagacgtggccctgcgt

SEQ ID NO: 154788 - DNA, 122 bp, Homo sapiens
tggggattgcatgaagtgctacgtctacagccattcgtgtggagtctgggagtagcagtccgttaataaatgttagttcttctttctccttgtaacagaattagccagtgcctaatgcatct

SEQ ID NO: 154789 - DNA, 122 bp, Homo sapiens
tagaggagccccactctctcctcccctcctcctgcttcaaaggctcaggccctggcgctacgctccgaagcccaggcgcaaatgcctcgactccccgcgccccgagtccgccgctcctcggc

SEQ ID NO: 154790 - DNA, 122 bp, Homo sapiens
tccgatgggccaccttgaatccaggactgaccgcccgtgtgtgcacagtttgttcttggacgaggactcgtgaggatcgagggctggggaccccggtgtgagcaggatggggccctgccctc

SEQ ID NO: 154791 - DNA, 122 bp, Homo sapiens
aggcttctttcaagccccgtgtagagtggccccagcctctgtgcatggaacaaagagatacgtgctgtatccaggagtaggtggcaaaccacagatgattccttttcaccctgcagcagagt

SEQ ID NO: 154792 - DNA, 122 bp, Homo sapiens
agctgtttgttgagcactttttaatatgacagaccctgtgcttggtactgagaataagatcgataagacccaacatctgccctgaggaacctcacagataaagggcaagagctaattcacaa

SEQ ID NO: 154793 - DNA, 122 bp, Homo sapiens
agcgttccctgagcgccctttggccttagagacagggaataaattcttctttccatccctcggccccctcccagagggcagcgacgaaagccctggccgagcacaaggatcggtgatctggg

SEQ ID NO: 154794 - DNA, 122 bp, Homo sapiens
gactgcggttctcctgggaagaggtggcggtggtggtggcggtggcggtggcagtggggacggataaacgtggacgcagccatgaaagttagaaaataaacccagagccctaggaggggcgc

SEQ ID NO: 154795 - DNA, 122 bp, Homo sapiens
caagctattgggagcgacgcccatcgcgctacctccagaccaggaggtagggctaggctgcgtctgctcaactggtcacgtgtttctggaagctgcacggtccctgttgctctgctcctcat

SEQ ID NO: 154796 - DNA, 122 bp, Homo sapiens
tggtgaaggcctccctgcagaagcgtcccgacggccacatcgtgagtgtgaggtgaggagcgccgatatttagcagccgttctgctgtaaaaacattattttcccctccatttaaaatacgt

SEQ ID NO: 154797 - DNA, 122 bp, Homo sapiens
cagccgcgggaagctcgggccggcagggtttccccgcacgctggcgcccagctcccggcgcggaggccgctgtaagtttcgctttccattcagtggaaaacgaaagctgggcggggtgccac

SEQ ID NO: 154798 - DNA, 122 bp, Homo sapiens
tctaggtacttctgtagtcaacaaataattatttgcctgtttaattaaagtgttcgggcacgggggaaacaaagacgagtttgcagactccagcaaaaatcttaagagtttaagtatttggg

SEQ ID NO: 154799 - DNA, 122 bp, Homo sapiens
gggccaagaaagagcggcactatttactccaaatcttcagccttgcagagtacaacaacacgatctagtggtgtctgaccgccccctagccctgatccaatcattttctcatgtggaattca

SEQ ID NO: 154800 - DNA, 122 bp, Homo sapiens
cgccgccgccgccgcctctgccgccgctgccgccgctgctaccaccaccaccagccccgccgcttcctagcaagctcactgctgcccaaaagctcccagccagggaactccaccagcctatt

SEQ ID NO: 154801 - DNA, 122 bp, Homo sapiens
tcagggcaaagatggcactgcagcagtacctggcatgatgggagtgcccctgggcacctgcgagcatcccacctccttgtttaaggaagtacaggaaccagcctcatttgattccttctatt

SEQ ID NO: 154802 - DNA, 122 bp, Homo sapiens
ttcctcctcctcaagggaaagctgcccacttctagctgccctgccatcccctttaaagggcgacttgctcagcgccaaaccgcggctccagccctctccagcctccggctcagccggctcat

SEQ ID NO: 154803 - DNA, 122 bp, Homo sapiens
tgggtcaggacttccctgcttgttctgtcctgggagatgttgtccctggccctgcagagccgggaggacacgaggcctcctgggtcacagccaacgcagcctactcctgcccactgctcgcg

SEQ ID NO: 154804 - DNA, 122 bp, Homo sapiens
tccagggaagccctctggcctttgagaccctcaatctctgcctggagccagctgatgttccgattcatcgcggagatctcagtctttgtatgctgcaggtcatctccgtgcttcccagccag

SEQ ID NO: 154805 - DNA, 122 bp, Homo sapiens
ccctgtgacatagcagcttctcttctagaaactcttatatatctttactggaaacatgtacgagaattttcagagcagcattacttttaattccaaactttcctgtaaaacccaaatgtcca

SEQ ID NO: 154806 - DNA, 122 bp, Homo sapiens
gtcggctccctccacccctgctgagatgatgcactgcgaaaacattcgctctccccgggacgcctctcggtggttcagagcagggaaaatgttgcctcaggtttaaaataatctgcccaagc

SEQ ID NO: 154807 - DNA, 122 bp, Homo sapiens
gcattggtcttgagaagcttctccgattgcagcaggacctttaagctgagaactgaaaaacgaatgggaagtgttatgagcagaaaacacattgtttagcagccaaagagcgagagagatga

SEQ ID NO: 154808 - DNA, 122 bp, Homo sapiens
gtcagtccgctctgcaaactctttagatatgccaccatcatctcttcccagggtctttttcgtctcaagaagcgcccccaaaacgccacccttggctttgacaataagctccatcacacctt

SEQ ID NO: 154809 - DNA, 122 bp, Homo sapiens
cagggcccacttttccccatccagttctttggcgcatgggttttccagcgcggcaggggtcgcgtccttaccccggagccactgatggattcccgtgcctttcactcactccccggccacac

SEQ ID NO: 154810 - DNA, 122 bp, Homo sapiens
taacccacaccgtctggctcagggtccacgccgtaacctccgggctgtgctgccgttgtccgaaagcttgcttccaactaaagaccagagatgggagggagtcgcattctccaatctcttta

SEQ ID NO: 154811 - DNA, 122 bp, Homo sapiens
accgcagtggcagcggcagagtgaccttccgttgcctctgggagctccgccacagagaaacgcagactcacagctgctgggaacgctccgccagagggtggggctgttgtgccgcggaatca

SEQ ID NO: 154812 - DNA, 122 bp, Homo sapiens
ttttcccctctaaatgcggctggccagagccggggcagtggcccaccttagcatcttcttcgtgtgtgtgtgtgtgtgtgcgcgtgtgtgtgtgtgtgtttgtgtgttgggggggtcgctag

SEQ ID NO: 154813 - DNA, 122 bp, Homo sapiens
ggccaatgggcataaacttgcagttataagatgaataagttctggaagactaacgtacagcgtggtgactatagttcataataatatatattgaaaatgtgttgagcgtacgtcttaagtat

SEQ ID NO: 154814 - DNA, 122 bp, Homo sapiens
ctggattttgctacagaagagaacaccatgtgtagggaacctgaattttttgtaataggccgtaagcatgcctgccctttggcctggaaagagacactatatcttccagggctgtttgctgt

SEQ ID NO: 154815 - DNA, 122 bp, Homo sapiens
gggctggggtatctgaagtcaactttcctccctctttctggggcctcaggcctttagtgacggggcttagaggaagggacactggcaggctgggagtccaggggtcagagccacgagggccc

SEQ ID NO: 154816 - DNA, 122 bp, Homo sapiens
cacttgggaagctccggggcatgtgaaggagctgcaaacatgagaactaatgaaccaaggcggctgccaccaggaaggaacagaacgcaggcattcaaccatgacgtctgcacagtgttagt

SEQ ID NO: 154817 - DNA, 122 bp, Homo sapiens
gggggtcgctgaggaggggactgggcggcctgggaccccgaagttggtgagtcgggaaggcggctgggctgtggcggcggccaggccgagggccgggggctggaggcctggagcttgagtga

SEQ ID NO: 154818 - DNA, 122 bp, Homo sapiens
agccgtcctaccagacgccaccgtcactgccaaatcacatctccagggcgcccagcccagcgtccttccagcgctccctggagaaccgcatgtctccaagcaagtctccttttctgccgtct

SEQ ID NO: 154819 - DNA, 122 bp, Homo sapiens
accgtgaggtttattctggacacgcaagaggggagacatgaccttggttagggttcagcccgcctctgtgaggaaggatgagccccagacggagctgagctttcctgctctgggagtctcca

SEQ ID NO: 154820 - DNA, 122 bp, Homo sapiens
tgggagagggctttccacggggcctgccgggctgttccgtgagcaccagggctgctccagcgccagctgctgctttgttctgcctgggagcagctttgtcggagacttgctactcaaacccc

SEQ ID NO: 154821 - DNA, 122 bp, Homo sapiens
gaccttgaatcagaggcccacactctatatctagctcagtctccaatttgtggggaggaccggggtgaaagatgaatgtcagagatgtggcttcatcagctgcctatgggatgggcacatgt

SEQ ID NO: 154822 - DNA, 122 bp, Homo sapiens
gtgagaaggctgggcggagttgcagaaagtcaacagaagccgaatctctgaatttctgttcgcagcctcctaggcggggccgggaaaaaaatccagtagtctgcgctgactgggcggcgagg

SEQ ID NO: 154823 - DNA, 122 bp, Homo sapiens
aagccaagaaacagccttgtgaaccgcccaaacagaacagtgagctgtgaggttgggtgtcgtttgcaggctccccaggactggctgaggatgccttgatgtggcactgattagagatgatc

SEQ ID NO: 154824 - DNA, 122 bp, Homo sapiens
aaataatgggtttcctaaataagccctcaatctttcagaaagccgtcccaataaattcaacggaggaacgttaggagactagggaaagacctctgccattggactttaaggagctgaagctc

SEQ ID NO: 154825 - DNA, 122 bp, Homo sapiens
cgcctaactacctgctctcttgtcatccgggagaagggtccgtgctgagatcatatctcacgacctggtcacctttaaaataggtctcgcttggtgattcagagtataggctttggagtcag

SEQ ID NO: 154826 - DNA, 122 bp, Homo sapiens
gaggggaggccaaggcagcaggagcgcgcacgtggcaggaagcggaccgctgctgggcaccgcagcagggctgtggccatggaaaccgctctccaactgtctcgggctccaccacggcaacc

SEQ ID NO: 154827 - DNA, 122 bp, Homo sapiens
gcgcgcacctggaaagggggctgcaggcgaggtccgctcagggcgaggaagcccggccaccgtggagtgtcggccacctcactccgcacagaagtcaaacttgtcacccggctggtccgcgg

SEQ ID NO: 154828 - DNA, 122 bp, Homo sapiens
gccattccctgcgaggtggcaaaggtacctgaacctacataaccaagcccttaaagtctccgcggcacctcttaatcgccttcccgtagctattggaggtagagaaaccgcggcgggaagcg

SEQ ID NO: 154829 - DNA, 122 bp, Homo sapiens
taaagagggtgctggcgcctcgggaacgccctcccgctgcaccctacaggaggtcgtgggcggtggcttaacagccccagtgcagagcttgaaccccaccgtccagaaggaaaggtgagtgg

SEQ ID NO: 154830 - DNA, 122 bp, Homo sapiens
tatagctacacgtttttatctttcctttcagtggaaaacatttaaaaaatttaaaatcaacgtagtgtgagattcagaggggtcttcaaagattttgtgcaaggcttccatctccatctgaa

SEQ ID NO: 154831 - DNA, 122 bp, Homo sapiens
gttggggtgaggtggggaacagcagtgacagtagttctcatccctgagcctcctccgggccggcccgtggaggagagagaaggggagggagaagggtttgcccaggccttcagacactttac

SEQ ID NO: 154832 - DNA, 122 bp, Homo sapiens
agagaggaaaatgggaacgtttgcagtcagccctaagccccgaccagaggcagttccagccgccagggtccctcacacaacgctgaaagcaaaatacacgtatttgacgtgcctcagagctg

SEQ ID NO: 154833 - DNA, 122 bp, Homo sapiens
ccactgggaacaacgtgcaccacacacagcaggtgcctgcatttagcagactctgtgttgcgtggggcaggcagccacgacctgtccacatctagctaagccgagtttgagcctgtcggcta

SEQ ID NO: 154834 - DNA, 122 bp, Homo sapiens
gtgtgcccggtgtgtgaccgacgtttcatgcgcagtgaccacctgacgaagcatgcccggcgccacatgacgaccaagaagatcccaggctggcaggcagaggttggcaagctgaacagaat

SEQ ID NO: 154835 - DNA, 122 bp, Homo sapiens
ttacacaaatatggaaattttttttcgtcccctctcccttcgcctaacagccttcttatccgccagggagggggaggttgtgtgtgtgcacacacgcgcgtgcacgcacacacactctctcg

SEQ ID NO: 154836 - DNA, 122 bp, Homo sapiens
cctgcctcgagcacttcacacgcgtgcccggggatgctggtgctgcaggtatggggaccccgctaggagagccccgggttaagggttggtaactggagaatggggtgggggtatgccagctc

SEQ ID NO: 154837 - DNA, 122 bp, Homo sapiens
gaactgtcttcgacctgaattttatttcctctaggaagacaggatggaaaccccatttcacgttttggcttcccaggagccgcaacccaggccgaccagcgcacaggtttcaggcaggaaat

SEQ ID NO: 154838 - DNA, 122 bp, Homo sapiens
agagttgagaactccccttcctggacaggtccacttaaacatgtattaattgaatacctacgaggtggcgagaactggggatgaattgaaaaggaaaaaaaaagaagaaactataggcaggc

SEQ ID NO: 154839 - DNA, 122 bp, Homo sapiens
ctgcccaggattgaagtggccccgcctcccgctccgcccccccccacctggggggccctgcgcccccgccaccaacctctggatctagcccgcgtgtgggtccaggcttctctggggaccga

SEQ ID NO: 154840 - DNA, 122 bp, Homo sapiens
gagctgttgtctcttttacagcattgattcctattgtcatggcttctccagagttcttgtcgttaacaaaattgttggccacagtcataagcaatgattgaataatcgctgggtgtactagg

SEQ ID NO: 154841 - DNA, 122 bp, Homo sapiens
aggtaccgggcgcccgccgtccgtgcctcgccagcgctccccccaggcggcctgccgcggcgtcgagcggcaggaagcagccacgctcaaaccggtttcagctgctccagaccaaactgcca

SEQ ID NO: 154842 - DNA, 122 bp, Homo sapiens
cccctcccctgctctggccgcccgctgcaatcctttggggtctgtggctgagtggggaaccgccgacccgcgatccggaacgcgactttgaggccgccgggagcatcctgtggcctctctct

SEQ ID NO: 154843 - DNA, 122 bp, Homo sapiens
agtaaaagtgttcaagcggcctctgggcgccagcaaaagaggctggggattaatttcctgcgcgctccacaagaggcggggctgggcggggcgggggcgagagggaacgagggcgcctgcgc

SEQ ID NO: 154844 - DNA, 122 bp, Homo sapiens
cacgattggtgcaggcggacgcgcgaggtcccgcgcctgcgcacacccccgaggctggcacgcacaccggtctcctaggggactggcgcctggccctgcttttcatcctctcaggagatcac

SEQ ID NO: 154845 - DNA, 122 bp, Homo sapiens
tcgttctgtggcatggtgacagccacagagctgccaggagcagtccctggggtgcgaaaacgctctccatttttgggtctcagagacccacgagcccacgccgcacaggccgggacaggaaa

SEQ ID NO: 154846 - DNA, 122 bp, Homo sapiens
gtcctaaattatcaaacttcatcgtattgtttttgcaattaaaattgcaaaccggctgggcgcagtggctcacgcctgtaatcccagcactttgggaggtcaaggcgggtggatcacctgag

SEQ ID NO: 154847 - DNA, 122 bp, Homo sapiens
tgaatattactgcttctattttcttgatgaggaaactgaagcacacagaagttaaagaaacgtgcctgtgttatacagctattaagtgggggagcaggattcaaatccatgccatctggctt

SEQ ID NO: 154848 - DNA, 122 bp, Homo sapiens
gcagccaaggccaaccttgtgcattccacccacgtaggcgcctggggccctggtcttcctcgactgcctctccactgcctggaggtcatcaaatgcccctggaccacctcctacgtgccaca

SEQ ID NO: 154849 - DNA, 122 bp, Homo sapiens
gccagagctttctccaggtcaccatggctcctcccactgtgccaccctgcctaaccccctcgattttaaaggagaagccaagactctggactttgctcagaaggtggggggcgggggaggga

SEQ ID NO: 154850 - DNA, 122 bp, Homo sapiens
aggtccgaaagagccggccgaggtagagtggagaagaaggctgccttggctgggtgcaggcggcatcttctgcaccaggtggaggacaggcagctttgcacaactgaacatccctgagccag

SEQ ID NO: 154851 - DNA, 122 bp, Homo sapiens
gccttgagacccccgcctgccctgagatagagggagactgcttgctgcaggctgcccctgcgggaaccccttggtgccctaattctcaggacacacaagctgcacaaggctgcacaagctgg

SEQ ID NO: 154852 - DNA, 122 bp, Homo sapiens
ctctcctctcgcacccgcttttaggtggccctcttctagggcggagagatcaccaaaagccgctgagcaaggacagcccttccagtcgtcgctcgcgggcacggagctgggagcgcgcggga

SEQ ID NO: 154853 - DNA, 122 bp, Homo sapiens
ggtcctccctctgcctcccgctgccagtgcgggtcccactgtgacagaggctgccacagacgttccagggcgtctctcagcgactgaggctacacagacgttccagggcgtctctcagcgag

SEQ ID NO: 154854 - DNA, 122 bp, Homo sapiens
actacaaagctagagtaatgaagactgtgtggtactggcataaggatgaccatacagacccgtggaccggaattgagaatccagaaataaatgcatactttcacaacccatcaatttttggc

SEQ ID NO: 154855 - DNA, 122 bp, Homo sapiens
tccccgtgccgtccagaaaaccaccaggatggctcatattagaaaggctaatattagtggcgatgtcagtttacaaatgagaaagagactgtctccagctggaccaaaggtgctgtcttcaa

SEQ ID NO: 154856 - DNA, 122 bp, Homo sapiens
cggttagctcagttggttagagcgtggcgctaataacgccaaggtcgcgggttcgatccccgtacgggccacaggcttttctaatgtttatttcacagtaacaattatgtttcacagtagca

SEQ ID NO: 154857 - DNA, 122 bp, Homo sapiens
ataacaggggcgggcaggatatggccggcgggagggcccctccttcgtactgggggcaaccgtctcaaccctgaggggtcacggaaagaggacagcctttcttctctggcgaatgcccttcc

SEQ ID NO: 154858 - DNA, 122 bp, Homo sapiens
accggcacgcagcctagaaggtccctttggaggactttgcagtcgggagcagtgagcatgcgcagacgccagagggcgctcctggccaggggctgagcaagcccggaggggacagggcggag

SEQ ID NO: 154859 - DNA, 122 bp, Homo sapiens
cctgttagtttcacctccaaaatgtttctcaaacaattccagccctcatgaccacaacctcgccaccttcttcccatccccttccctccaccagctcatatgcctagactgcaacctccacc

SEQ ID NO: 154860 - DNA, 122 bp, Homo sapiens
ctccgggtaataaatgcaggagcagcaccccaccctgaacttggcacagcccttactggtcgaagagcaatgtgcccctcccttccagcccgtggcccacaaaaggaagaaaaacagacaac

SEQ ID NO: 154861 - DNA, 122 bp, Homo sapiens
gccttccctcactgagtccgtttccaatgggctggaactgcggtcccccgctgttctctgcggccgtctagggatggcgctcctgcctactccggaccatccctgcttggactgaaagcctg

SEQ ID NO: 154862 - DNA, 122 bp, Homo sapiens
ccacccccgcccctgcgatcctgccagagcctagcctagcgcagccgggccaggcctggccgcagcaataactgctttttaatggattggttggaggtattctctctgacacatgccagcat

SEQ ID NO: 154863 - DNA, 122 bp, Homo sapiens
atcttgagttcctgaaaaacaactcagccagtaccttgtgacccatacttcacagtcagacgttatatataggaacattgtgcaaactatggctaggctacgtgacattttaatggtaagca

SEQ ID NO: 154864 - DNA, 122 bp, Homo sapiens
agtgttcagaaaagtgtaagttgcgcgggacagaattcacaccagtggggacgatccgttcgccagatcagcgccgtgggccctcctgagtagtgggagccgcatttatcttctaagagacc

SEQ ID NO: 154865 - DNA, 122 bp, Homo sapiens
ctcttgactcttgggcgtcccaggaattttaacttttcctcggcgtaagtgtttctcgcgcggaccccttgcaggcgcaaagcctggctcgctctggcctcctggcttgcccaggatctagg

SEQ ID NO: 154866 - DNA, 122 bp, Homo sapiens
tccctggccgggcatcacttgcgcagcatgctgcccccagaggacagggctacagttagtcgcccacacctcattcacccccttgggcccttgagcgtcttagaagccgcagatgccaagga

SEQ ID NO: 154867 - DNA, 122 bp, Homo sapiens
ggcccggggccggggacttggcttttcggctgctgggtctgccagagaccttggccttcccgccgccacctgcagggggacaagatgggaaggggctgcgttgggcagtgaagacagcaccg

SEQ ID NO: 154868 - DNA, 122 bp, Homo sapiens
catgaacggaacggaattattccctcttctaactgcagccacgatttggcgttttaacaccgggctcaaggtagcctgggtctctcttggccaaagagcccagggatgcctctaactccttt

SEQ ID NO: 154869 - DNA, 122 bp, Homo sapiens
tggccgagagtgacatcattgacatcccgcagctcttcaagctcaaagagttctctaaggcggaagcttttttccccaacatggtgaggaggtggcggctttaaaaccccagggtgtggcat

SEQ ID NO: 154870 - DNA, 122 bp, Homo sapiens
ggtgcctaaatacctattctactaaccccttgttagccaatttaagagttctaggccaggcgcagtggctcacgcctgtaatcccagcactttgggaggccaaggcgggtggatcacaaggt

SEQ ID NO: 154871 - DNA, 122 bp, Homo sapiens
cagagtcagaagccaccaccagaaccactgtgtccagagctgggctgagcctgctacacacgccccagcaaaataggtcctgcacggtggcttctctccccacctgttacaagccccagtct

SEQ ID NO: 154872 - DNA, 122 bp, Homo sapiens
attctctctgaagcctgccacctggaggcttcttatgtatattggggaccttggtctccacgatccgttatcttaacccagacattccttctattgagtctaggtctttagacaataactta

SEQ ID NO: 154873 - DNA, 122 bp, Homo sapiens
ggggtggctcctagggctagagctttgtcgcttcctgcacttctcgtccgtacaattagacgccacaaaccccaaacccaattctttaaacagccacgaaactcggaagaaaagaaaaacgg

SEQ ID NO: 154874 - DNA, 122 bp, Homo sapiens
aatatctttgacttcctgaataattcaggaacctcagaatgctttaagttggaaggaccccgcccagccttctcacgcaaagcttcaagtgttcggccctgccccaccgtaacgcgaggaag

SEQ ID NO: 154875 - DNA, 122 bp, Homo sapiens
ttggaaggggaaagggttagctggtgttggcctggcccagtcccccaggcgtgaagaaggcggggcactccttggccgcgccgggttctcgctttcccttctcgggagacagctccgtgcct

SEQ ID NO: 154876 - DNA, 122 bp, Homo sapiens
tgactaggtggggcttggctggaccgaaaactgggatgaagcggggcctccaggggtgggcggggccgaggcggggcctgttctccactccgcctctcacccagcaggattttgttttccag

SEQ ID NO: 154877 - DNA, 122 bp, Homo sapiens
tccgtctgtaaaccagcgaacaccacagcgcagggccaggggcaagcgctggataatgtccgcttagagactgacctcagctgagaagtggatgggctaatagagagcagggctggggctgg

SEQ ID NO: 154878 - DNA, 122 bp, Homo sapiens
cgtctttgtgcagggagcggggaggcccggtgtcagtcgctgccgaggctggaaacattgcgtttgaaaccattgggaagttgagggcggcacaagacgaaagccattctttctgttttagt

SEQ ID NO: 154879 - DNA, 122 bp, Homo sapiens
tttactatagttgatttttgatgtttgaggatttcagtcatctctttctttagtgagtttcgcaaactatttttgcaaagactatattgcttgtcatgtgttgtcactgaagttctgttacc

SEQ ID NO: 154880 - DNA, 122 bp, Homo sapiens
cgaaaatggcgcccagccccacacaccccagatgtgggaacattttagggctccctgggccgtgaccctcaccctagccccaaggcttctgccaggttcttcagtccagccagtcggacaaa

SEQ ID NO: 154881 - DNA, 122 bp, Homo sapiens
tataatattttatactataataaaatattccaatgacttatggataaactctcctatcaccgattttgatagagtgctcatgaagactgcatgttcctggacataatgaatgattggttaag

SEQ ID NO: 154882 - DNA, 122 bp, Homo sapiens
gccattgtcatcatggcccgttctcaatgagctgctgggcacacctcccagacgggggggcgaccgggcagaggcgcccctcacctcccgggaggggcggctggccgggtggggggctgacc

SEQ ID NO: 154883 - DNA, 122 bp, Homo sapiens
cccagacctcaccatggcagcctcagggtgcagacaacacatgggggctcagagagggtccgcgttggtcaaggtcacgcagccagcctgggacacacacatcgccctcaggccaccaccaa

SEQ ID NO: 154884 - DNA, 122 bp, Homo sapiens
tgcaggaccacggaggggtgatcgtgaacatcactgccaccctggggaaccgggggcaggcgctccaggtgcatgcaggctccgccaaggccgctgtgggtatgaccacccccccccgccca

SEQ ID NO: 154885 - DNA, 122 bp, Homo sapiens
atctgccggccatgtgtgcggctttcggggcacgatggagaagctgagtgctcgtctgggcgccagtgtagccacatgatcaagtgtgcgcgcaggcagggcaagtgcacacaagaaccccc

SEQ ID NO: 154886 - DNA, 122 bp, Homo sapiens
ccgcggcgttctctgaggtggagtattacaaacatggcgcccctcgagcccggagcccttcgcgcggagccggcggcggggtccgggcgggggggagccggggaggagggaggaggccggca

SEQ ID NO: 154887 - DNA, 122 bp, Homo sapiens
ggggtggtgtgggccctgtgacagctgtgttcctggaggctctggctggacatctctgagcgacctgattcctcttctccctgctgttactgccccttcccctctctgtctcccaccctctg

SEQ ID NO: 154888 - DNA, 122 bp, Homo sapiens
gaaggatctgaggcagaggacgtggatggtgccatgctggcgtctctgtgcatctggcagcgcaacaaaggacttctgtctgccctgcgaggctgggtcggtaaaacccacttcaattgaaa

SEQ ID NO: 154889 - DNA, 122 bp, Homo sapiens
ccaactcctgacctcaagtgatacacccgtcttggtctcccaaagtgctgggattacaggcgtgagccactttgtccagccctgttttcatgaccaccgaaaatcctcctcacctaggtcag

SEQ ID NO: 154890 - DNA, 122 bp, Homo sapiens
cggacgccgcgctagaagacctggaggtggctgagcagccgggcgcgtcccaccgtggggcgcgtgtggccctggtgacgcacacgacacccaacttctggccgggtgtgggttgcctccct

SEQ ID NO: 154891 - DNA, 122 bp, Homo sapiens
gcttcacaccaacaatctccaggtgttgaaagaagattatgtgaatgggaatgctgtgtgcgtgtgtgtatgcacgcacacatgcaattcaacaattactgaattcttcccatttgcatatt

SEQ ID NO: 154892 - DNA, 122 bp, Homo sapiens
aatggtccgtggggctctccccttgggcggagtggggcgcggtggggaacacagcttggacgcctaggcgtcctgagcccggcaccctgcgcgcagagcagacccaggcgctctcgcgagct

SEQ ID NO: 154893 - DNA, 122 bp, Homo sapiens
cccccgagcctgcagaggactccgccctgctttccctacattcagggctgctccttttgtcgccaatacaaacctgttgacaggtcacgcctgggaagcgggtggggtgtcccggagcggtg

SEQ ID NO: 154894 - DNA, 122 bp, Homo sapiens
gttgaggggggtcgcttacaggtgtggccggcctggaaacggtggtgtggctggtgagggcggagtcgatcagggaaggatcaggactttatggcagaacagagtccaccaccgtgttcgga

SEQ ID NO: 154895 - DNA, 122 bp, Homo sapiens
gcccgaaggggaaggtaagacccagtagggctggggacccagctggccacctgaagcccacggcctgtctccgtcaaacccagcgagggtcagactcacagccggaggcagcacggcggcac

SEQ ID NO: 154896 - DNA, 122 bp, Homo sapiens
tactcctcagtgccacagacgctcccagggaccaggtctctgccagatagggcagagggtcgcccccggcggggatgatgggcagcccagctagtccacggaacagagaacgcggcgccgag

SEQ ID NO: 154897 - DNA, 122 bp, Homo sapiens
atgaaaaatgtttcccttttggtttctggtgtttcctggtgggaagttagtgtctagacccgttaatggccaccagagtgacccgcactgtgctgttgaaaaaagggcagatgtggttactc

SEQ ID NO: 154898 - DNA, 122 bp, Homo sapiens
cccttgcgtcgacgcatttatgcaccttggcaactgtaagcgagcgcgccctggtgcaggcgacgccaagggacgcggggtctccataacctcgccgattctctggtcactgcgaccttcag

SEQ ID NO: 154899 - DNA, 122 bp, Homo sapiens
ttgttttcagtacctgtgggaatataagggcctgagttccatgggcaccttactctaactcgtaccactgcctcctgtcacaaagatagaaatttgtttctcctgcgataacaaccagttaa

SEQ ID NO: 154900 - DNA, 122 bp, Homo sapiens
aaggaggtggttttaaaaatcaagccaaacaggtttccatcttttaggaagaccctggaacgtgccagttgattctgaccatttctcatgaacagaaacacctaggaagggagaactggtga

SEQ ID NO: 154901 - DNA, 122 bp, Homo sapiens
ggaagggtttagttctggaaataccttgggggggaggggttgagtagtagaatgggcgggcgatggtgaaactgtggttccccttccagaatatatacaagtccacagagataaaggaagac

SEQ ID NO: 154902 - DNA, 122 bp, Homo sapiens
aagaaattcagagggcaaggaaagaaggggaatgaagaagacaggaaaaggtgaaggaggcgggcaaaggccatctggtgtgaacctggctgcccagctctttatgcacccagggcagcgtg

SEQ ID NO: 154903 - DNA, 122 bp, Homo sapiens
gcaggtgtccctggacctgcatgtcaagcatcccattgtgggaaacaacctcagactgggcgtcaggatgtcctctcaagtcaatactttccctctctggacctctgcttcctgcatcataa

SEQ ID NO: 154904 - DNA, 122 bp, Homo sapiens
ctgctgtctcgctccagtcagggctggggctcaccctgcgagtccgggagactaaagcgccgcgtaaacacaggaagcaggcgagggacccgagttagaccttgagtagggagggagagggg

SEQ ID NO: 154905 - DNA, 122 bp, Homo sapiens
gagggggctccatgtgttgtactcatgttctaggctcagtactgatggctttacatgaatcgcacaactgaaaactcataatatttcctcatggttttatagaaactgagcacagaaagact

SEQ ID NO: 154906 - DNA, 122 bp, Homo sapiens
ttgtagcggatacactttctgacctatcatgagtatacacatctgcgaagggaaaccgcgcggcgacagcgtgaggacatcccctgggcgtgagcgtctgtccgctgtctaaacagagcagc

SEQ ID NO: 154907 - DNA, 122 bp, Homo sapiens
gcttaactcatgcaaagcagctccctggaaacctccagaggagaagtgactcaacacacacgtcccagaccctctgggcccctaggcaccctcggcctgcagctgtgggggcaatggaaagt

SEQ ID NO: 154908 - DNA, 122 bp, Homo sapiens
gcgtctatttgatgctcccatcttgaacaaatcgtttccattcgatttgtttaaccaaggcgagggcggactatgttgttacttaaaagttattcttcatccaagctgtcctcagattttca

SEQ ID NO: 154909 - DNA, 122 bp, Homo sapiens
ctccctgtcttcctctcctgggctgcttctgtggcatctatcatttccttccctgaattgcgtgcacatgcacatggccacacacacacacacacaaacacacaggtgcattgtactatgcc

SEQ ID NO: 154910 - DNA, 122 bp, Homo sapiens
ggccgaggccgctaggaagggttgcacggccggactcctaacagcggctctctggcctggcgggagcagaggggcgctcacatccgcagccccgggatcttagagacagagcgctccgctcc

SEQ ID NO: 154911 - DNA, 122 bp, Homo sapiens
ctgacactacctggctatatgtacttaaacatctaggtagtcaaaagttctggccagacgcgatggctcatgactgtaatcctagccctttgagaggctgaggcaggcagatcatgaggtca

SEQ ID NO: 154912 - DNA, 122 bp, Homo sapiens
tacatatgtattttctatacctaatacactactttggaattccttgaggcctaattgcatcggggtgctctggttttgttgttgttatttctgaaatacattgactttggtgctctttattt

SEQ ID NO: 154913 - DNA, 122 bp, Homo sapiens
atgcaggtcacacagtctatttatattgtacctttgaattagaaagaggcacactcagaacgtaagacttagaattaaaggcctcccccactggccatagcagcacccctagctcacaacca

SEQ ID NO: 154914 - DNA, 122 bp, Homo sapiens
taccgtctgtataccgaggacttgaagcgctgcaagagaagggtcggtgcttagatccgacgttggaaactatgctgtcgcgtcacttcccctcaacagagcccgggaaaacgacagcacca

SEQ ID NO: 154915 - DNA, 122 bp, Homo sapiens
aataggatcttttcagcttttctgctaaggaacaaattgccagctaggcatagtggctcacgcctgtaatcccaacactttgggaggcagaggcgggcagatggctttgagctcaggagttt

SEQ ID NO: 154916 - DNA, 122 bp, Homo sapiens
tatattaaagtcctttatttagagcagaaaagccggccttgacctccactgtctcagaaccgcgagaaggagccccggacgccgcagcggaggcagcacgagcacccctcccgccgagcgca

SEQ ID NO: 154917 - DNA, 122 bp, Homo sapiens
cgctcagtcagcagaatgtgagcatggacttggccacgttcatgaagctgcggacggatgcggtgctggtatggcgagcgggaggaggggcgtgtggaggaggggcccgtggaggaggggcg

SEQ ID NO: 154918 - DNA, 122 bp, Homo sapiens
tcattgctctccgcccgagcacagagctcccgcgagcctgcaggcagcccaggactcctgcgcataccaggctctctggtcttggctctcccagccccacgccgcccactcacatctgccca

SEQ ID NO: 154919 - DNA, 122 bp, Homo sapiens
tgcagtgatagctgcagtccctggagtcctcagatgaaatagggcaaacccctgcattgccgttgactagtacaggtcaatgaacaaatgacccgcctgtcatcaaatcatgagtgctgcta

SEQ ID NO: 154920 - DNA, 122 bp, Homo sapiens
gtttgaacagtgcggctcagcttggctgcactaagtgctatgctgtgagtgcaaacaggccggccacccccacccggcctttgtttccatggacagcagcaagtcagtgtcagggacccttc

SEQ ID NO: 154921 - DNA, 122 bp, Homo sapiens
ctttcctccttggccccttatctcaccatgccgagagatgtcgcagacagatacctccttcgtgttgtgacccggagccaggtcttcatagtgcttttctctctctctcgctctcttttttt

SEQ ID NO: 154922 - DNA, 122 bp, Homo sapiens
gcgttcagggaattaacagctgcatttgccctaagaagccggggaagttactgactggctcgaaaatactcgtgcgtatggcaggatgagaggatgctttgtgatggtgttgttgctccgtc

SEQ ID NO: 154923 - DNA, 122 bp, Homo sapiens
atggtgccggcgggaatttcccgtagtatgctaacgtgttgcaatgagggcacagtgagccgtaaggatgaacagaggtcgctttcatcaccatctcggtgttggaatgagaccaccacttc

SEQ ID NO: 154924 - DNA, 122 bp, Homo sapiens
cgaactcctgacgtcagttgatttgcctgccttggcctcccaaagtgctgggattacaggcgtgagccaccacgcccggctaatcaggctgagtctcgaactcctgacctcaggtgatctcc

SEQ ID NO: 154925 - DNA, 122 bp, Homo sapiens
taggtgagcctggagaccaggccttaaaatagtggttacagtccctgacagtttacagtgcggagcctaagcagtcattcaagattgtacctttggaaatgactccattgtgtaccattctt

SEQ ID NO: 154926 - DNA, 122 bp, Homo sapiens
gatccagacctgggcaggtgagtgcggggtcgggagggaaaaagcctctgcgggaaggagcgaggggcccgcccggaggagtaaatctgcacatatatttaattacagattacaattacaat

SEQ ID NO: 154927 - DNA, 122 bp, Homo sapiens
gttaactccatatggagccctgccttctcaagcaatgaattttccaggattaattataaccgaagcaagatttagtcatggactaaaagtagctgcattatcatagaattcttaagtgttat

SEQ ID NO: 154928 - DNA, 122 bp, Homo sapiens
gccaccgcgcccggccgctttttcctctttaaagaaaaaaagattatttgaactgtccgtcgtggcaatggagagggatagccttagaggacatggcggttcattattattattattattac

SEQ ID NO: 154929 - DNA, 122 bp, Homo sapiens
ctggctcgtgtgagggtaggtgaactgggactgaggtggggacgaagccgctctcacctgcgtcgtagaaggcgtcgagcacggccgtctccccgaagtccagctccccgaagggcacggag

SEQ ID NO: 154930 - DNA, 122 bp, Homo sapiens
aacgcaattaccgctgcgttaccagcaatcccaagaggaccccagaccctctgaaggaagcgggctcctgcaggacccgggagacagtgttgaacttgaccttgctctcctcctcgggtcag

SEQ ID NO: 154931 - DNA, 122 bp, Homo sapiens
tggttatgtaggcaccctctccctagaaataatcagaattccaaactcaaagaagaaaagcgggtattcagcataaaccaagttgcttgcgcagtctagatacaatgaatcattcttatcag

SEQ ID NO: 154932 - DNA, 122 bp, Homo sapiens
gaaggggcgggggcggggcggagctcctggaaggggtcgaggcggagctgagcgccggggcgtggcaggtgcggagcttcgggaagggtaggggcggggccgagccgggggcggggcagggg

SEQ ID NO: 154933 - DNA, 122 bp, Homo sapiens
aagctttgtagagaacagcggcgtttgtttaacgtccggggatgctgaactcgaaatccccgttctgagccggctacctaaacaaccttcccgaccacctctcctgacctcggtgcttggga

SEQ ID NO: 154934 - DNA, 122 bp, Homo sapiens
cctgacagaataattatatgtacagagcaagtgtaatttattattttcacctctaaaactcgcaagcaaaagtactgtcagtagttacaaaacacctaccatttaacaagcagattgccatc

SEQ ID NO: 154935 - DNA, 122 bp, Homo sapiens
tgttagctatagtcaccctactctgctgtcaaatattagagcttattccttctatctaaccgtctgtctgtgcccattaagcagcctctcttcacctccctccctcacatccttctcagcca

SEQ ID NO: 154936 - DNA, 122 bp, Homo sapiens
tccctgatctggaagtcagtgatggagggctctcctgcccttgtgaagcccccagactgacgggggaaatagagtctcgatctgatgagggactgagagttctgcagctgaagccagctcag

SEQ ID NO: 154937 - DNA, 122 bp, Homo sapiens
agaaagaccgagtggagtcccgccccacgcccaccactgatggaagaattctgccttgatcgtctgtgatcgtcaagaaaacaaattctgatgctgtagagttgtgcttgggagtgtctctt

SEQ ID NO: 154938 - DNA, 122 bp, Homo sapiens
aataaataaaaaactgagaaggaaggttcaggacagtgtgtggcagcttggacagaacctcgtgatgagggcttctctgagacttattagtaaccaaagtgactttgggaatgtctgtgcat

SEQ ID NO: 154939 - DNA, 122 bp, Homo sapiens
agaagcttcagtagtcagatcctgatacgaaccatgcacctcctccagccatgatgacgccggccacttccacagatggaaaaataattcaggacaagccactggagggggtcacaccacct

SEQ ID NO: 154940 - DNA, 122 bp, Homo sapiens
tgatcccaggaactctgtgcggctggtgatccgaaaggtgcagttcgccccggagaaacccggcccccagccttcagccgaaaccacacgccacttcctcatgtctgaccggtccctgcacc

SEQ ID NO: 154941 - DNA, 122 bp, Homo sapiens
tcgcggtgagtgctacagttcttaaaggcggtgtgtctggagtttgttccttctgatgttcggatgtgttcggagtttcttccttctggtgggtttgtggtgtcaccggctcaggagtgaag

SEQ ID NO: 154942 - DNA, 122 bp, Homo sapiens
cgggctgacttctttgcccaggaagaaggtgtgcagcgggcccgggaggaggaggagaagcgcaaggaggtgacctcgcacttccaggtgacactgaatgacattcagctgcagatggaaca

SEQ ID NO: 154943 - DNA, 122 bp, Homo sapiens
cacgtgggaagctggtaaacaaaaacaaaaatgaatgaaacaaacaactaaacagcttgccgggcccctccaaggcccaccgaaccagcccctcgaggcagccaccgggaattttcataagc

SEQ ID NO: 154944 - DNA, 122 bp, Homo sapiens
cccacggcccgtgaaccacgtgaggtgcgacacttttgtcctgccctgggacttctgctccggcccgcgatgccgcaagacctggctcagctgcagggccccacagcctcccctccggcccc

SEQ ID NO: 154945 - DNA, 122 bp, Homo sapiens
tccaacccagaaggttttcacccccgggcaggggccatcagcagccatttgcccagcccccggcagcccccgtctctgcgttcgccttttctgggcatttcctcagaatggactcacaacat

SEQ ID NO: 154946 - DNA, 122 bp, Homo sapiens
tcaactcaccattctgtatcaagaattagaaaaatattgttctcaaggcacggtctattccgaggaactttgcttttataatgtgcgctaacagcagagctgcccttatttaaacaatcatt

SEQ ID NO: 154947 - DNA, 122 bp, Homo sapiens
agcctgacaccatgagcctaggattgggggcactggctgccacacaggcagcccttaccacgctacggttatgtccttgcaagtttgattcttacccgtaccagtgggccccggaaggtctg

SEQ ID NO: 154948 - DNA, 122 bp, Homo sapiens
agggtggggctctggggcgctcagacggcctctcccgcggcagctttgctaactgctactcgagctttgatgcgcggccaagatggaatcaggggtcagacctcagctgtgagagctgcagc

SEQ ID NO: 154949 - DNA, 122 bp, Homo sapiens
tgcaggcttgctgggggatgtcggctgatgcgagctggagagcgcgtgtggcggccgcggcgccagtgtttgtgtgtatgtgagaaagcaaggggcgagcgcgagtgcgagtgaggcaaaga

SEQ ID NO: 154950 - DNA, 122 bp, Homo sapiens
caggggagaaaaaagaaaaacatgctattgaagtgtatacatgcaataaacgcggaagctcggcactctcgaaggccacttgctactgcacaccactctccacacgagatgtgtggttcccg

SEQ ID NO: 154951 - DNA, 122 bp, Homo sapiens
gccggcttgccatccgggtaagcgcgggaaaggcggccacagggcgcggcggcagcgcagcgcgtgggatctcacgacccatccgttaacccaccgttcccaggagctccgaggcgcagcgg

SEQ ID NO: 154952 - DNA, 122 bp, Homo sapiens
acaaggctgtacactaactggttcactaaaatcatgaccagagattgtcattctggtcgacgggttttatgtgccacctggctattacgaagcgcagaaccctcttactgtttccagcctgg

SEQ ID NO: 154953 - DNA, 122 bp, Homo sapiens
gcatctgcctgccatttcccttccactcctcctttctggagtctgacattagaaagccagcgagaaggaagattcaaacaaccaaccctgatttcctgcttctccttttcatgagtgttcct

SEQ ID NO: 154954 - DNA, 122 bp, Homo sapiens
atctggctgaactggctggcaggaccaagactgcggctggggtgggcagggaagggaagccgggggctgctgtgagggatcttggagcttccctgtagcccaccttccccttgcttcatgtt

SEQ ID NO: 154955 - DNA, 122 bp, Homo sapiens
tcgtgtctctaagcctcagcttcctaatctgtgaaacaggctgatggaccagtgagataacgcctgtgaggtgcttatcacctgatactgcctcttcttgctggcacatcaagctggaggat

SEQ ID NO: 154956 - DNA, 122 bp, Homo sapiens
tgcagggacagctctcattgtgtcctcatttaggagccagagataatctatcagagataacgatatcttttttttttgtttttctggcaataagcagaaaaccagccagtccaaaacaaccc

SEQ ID NO: 154957 - DNA, 122 bp, Homo sapiens
tgccagcctaaggagcacacgtctttgaacgctggcttcacgctgtcatttaagtcatttcgtcctcttggagcctcggtttccacgtgggtaaaatgatcgtgaaaaaaagcaccgaggag

SEQ ID NO: 154958 - DNA, 122 bp, Homo sapiens
atccgcggtttccacagggaattccaggcccgccttccttctcccggaaaccttaccgctcgaggactacatttcccaggatgccctgcgactaaccaagccggaagacggttgtcttggtt

SEQ ID NO: 154959 - DNA, 122 bp, Homo sapiens
tgtggcccggttctgtccagggacaacccagagaactcttctgccctcaatgggctgcaacgcactttctccagcaaggactgaaccccagtctcggagagctaggcttcttcacgttcgtt

SEQ ID NO: 154960 - DNA, 122 bp, Homo sapiens
tgtggggagtggggagtgaggagagaagggtgttgtttctttgctgatttatttttaacccgaggttgtacaagcccctgacagtttggataaattagccaggcctcgcagtctcctaatga

SEQ ID NO: 154961 - DNA, 122 bp, Homo sapiens
aaatagcttccagtaagcactacatgtggcagagacaaggtttgtagtctcccaaactgacgtggccatgtaggagtcatctgcaagctgaagcagaagaggtattggaataaaccagagga

SEQ ID NO: 154962 - DNA, 122 bp, Homo sapiens
ctgacgttcagggaaatgcatgtctctcttcagatgggaaggagcagtggaaaggggtgacgagttcctggctggccaccaatcatcccatctttctgtgccggttcctcatctggaaagtg

SEQ ID NO: 154963 - DNA, 122 bp, Homo sapiens
cacatggcgccgtgtctagttctgtcacatggaaccatgtctagttctctcacatggctccgtgtctcattctctcacatggagccgtgtctagttctctcacatggcactgtgtctagttg

SEQ ID NO: 154964 - DNA, 122 bp, Homo sapiens
ccgttctttcttgctctgagaagtcacccggcgtgatgctgcggccatgctactcctcagcgctctgcttcccaaccaaaacaatgctccttctcatcttttccaaagcttccggccccagc

SEQ ID NO: 154965 - DNA, 122 bp, Homo sapiens
gatgaacatggcatcgaccccaccggcacctaccacggggacagcgacctgcagctggaccgcatctctgtgtactacaatgaagccacaggtaagggcaggagcccgggcagctcaggttc

SEQ ID NO: 154966 - DNA, 122 bp, Homo sapiens
caggcatacagttaacctactagttcttgccctgttgtgtgttcagcggcgttgtccgggcgggctacctcagactccgcaggaaaggttccggacaagtcctgctaatgcaagaaaccagg

SEQ ID NO: 154967 - DNA, 122 bp, Homo sapiens
agtgtacaactcttcacagagcaatcgctcaaatgcgtggcagcacgcagacatgtctctcggcttctctccttgtctctgttgccttcctctccagtcggtgctttagaaatgctttattc

SEQ ID NO: 154968 - DNA, 122 bp, Homo sapiens
gccgctggcccgcgggtgtgttcagctcaggagcggccctgcgtgtttttcccccgtggccgtcgcggacccccgtcttccaacagtggtgcgggcggggcgccccgtcctgggttcgcggc

SEQ ID NO: 154969 - DNA, 122 bp, Homo sapiens
tgatgaactccttgaagacatagaccgtgtcatcaccttcagagcctcattcgcgcctggcgcacagtgggtgcttaataaaagctgaactggactggaccttgagggaaggtccaaggaag

SEQ ID NO: 154970 - DNA, 122 bp, Homo sapiens
tacgtgcaggcacgggtttgcatgcgtggcggcggcctgtgtgtcagcctgctggatgcacgtgcgtctcggcgccgccgggaggggcttggggacacccggaagcccgccaggtcgggtgc

SEQ ID NO: 154971 - DNA, 122 bp, Homo sapiens
gcatgctaatgccttcttccggcagccttagtttcttccaaccagtgcagctccctgttccgcgagcatacgtcatcgttctcgctttccggtagctaaggcgatcagcgggacttcccact

SEQ ID NO: 154972 - DNA, 122 bp, Homo sapiens
ggatacccaagcagctcattcctgcctggcaccacagtgatcctttaggagggtggccagcggagcagggggttcaaagattcttctggggcctgaaagcttgaagggatgagtaactcctc

SEQ ID NO: 154973 - DNA, 122 bp, Homo sapiens
caaaggtaaggatgggagcggctgccttgctccttttgtgtgccttcttgtcattgtgctcgtggagttgcgtatctaacttggtgtctgcgtgggaggaaggtggtgaggggacagctcga

SEQ ID NO: 154974 - DNA, 122 bp, Homo sapiens
tgctatcattactattttggagctgagaaaactaaggtgcagagaagttaattaacctgccgagagtcacgtggcagagaaatgatttgatctagaactggctgaccgcagactccctgctc

SEQ ID NO: 154975 - DNA, 122 bp, Homo sapiens
cctctgggctcggggcacaacttctgccacattctgtgccacgtggtcactagcactgcgcggccagatttccacaggcgtccatgccgcagttgtgtgctaagggtctactgtgtggcaga

SEQ ID NO: 154976 - DNA, 122 bp, Homo sapiens
aacaggaaggcaatgcctggattaactagagacctaataaactgcgggaacaagccctaccgctgcggggccagggccagcttcgaaggctgcaagcctcacggcaacacggagccaggtcc

SEQ ID NO: 154977 - DNA, 122 bp, Homo sapiens
ggagaagagaggaagaaaggaaagaaagtaagatctggcatcacagggcccacattcccgcgtgtcagcaataggctgaaacagaagcatggtttctcacgtgtccatggaggcatctgagt

SEQ ID NO: 154978 - DNA, 122 bp, Homo sapiens
gccgggcctgcacatcctcgctaaatgtgtactgtgcaagtcttccccgggctgaggcgtcgagtggccttcgtgttcagcctccgggcgcctccgcagccgagctctttagagaaaaaaag

SEQ ID NO: 154979 - DNA, 122 bp, Homo sapiens
gagagatcccgggcgcaatcgctccccggagcggccgaggggcgcgcggggagaggcctgcgccggggtactttcaaactgaggcgcgcgcacacactcacacccacccacccactcaccca

SEQ ID NO: 154980 - DNA, 122 bp, Homo sapiens
ctccattcaaggtcaaaactttgcccagctcagccttgctcgaccctgggcagggaagcgcggacatcggcagagggagcccgaggctctccgtgcccttcgcgccggtgagttcccgaccc

SEQ ID NO: 154981 - DNA, 122 bp, Homo sapiens
actctgtactactccttgtcagtccctaatgttaatttaggttaaaagaaatgtaatgctcgcatcagtaaaagcaaggtcagactttcacctgaacagttttatttttgttttgttccgtt

SEQ ID NO: 154982 - DNA, 122 bp, Homo sapiens
ctcgctctgctgcctcctgagctcaggtcggtcgtgcccatcctggcatcaccccacagccggttctgccgcatcccgtcatgttcctcgtgctcccagcccggtcgtcctggaggcctcag

SEQ ID NO: 154983 - DNA, 122 bp, Homo sapiens
tcactgcttccacgatggaaagatggccagtccgctcccaggggcagggccaaccacggtcgcccaggcccaggtcttctacctcccagcctccgggagaacacagcccaggtctgggcctc

SEQ ID NO: 154984 - DNA, 122 bp, Homo sapiens
caagccaccccgtctgaagacgcttctccttacggagcccagaagcgcgaacggagactgcgcagatcccgtgcgctgcgccggaaacggatgcatagtctcggacaccagctcagacctgc

SEQ ID NO: 154985 - DNA, 122 bp, Homo sapiens
cacgcgtgggggtctcggggtagcaggggctgctctgtgctgggctgggccagtagggggcgccctccctgggagcagcagggccttccagaaggccagggcggtctccggcgctcagacct

SEQ ID NO: 154986 - DNA, 122 bp, Homo sapiens
acgcgcgcggattggccggaagttgtgccgggggcgggtcgggggtccgggctcggcgctcgctccgggagagttgacaaagccccgcagggaaggacgcctcgcggcgcggcgccccgggc

SEQ ID NO: 154987 - DNA, 122 bp, Homo sapiens
ttctgtacctgagagcagcagcagcaacgccaccatccagtggctgggcacaggagacaacgccagcctggccatggtcaccgctctgtccccgaccccaaacccgtgacaacgtccgaggc

SEQ ID NO: 154988 - DNA, 122 bp, Homo sapiens
acaggttggtcctcttgtccccggggccctgacacggagcctgcacaaaggagctgtccccgccccagcagctcaggtccatcctcaactccccaggctgccccggccaggccacttccagg

SEQ ID NO: 154989 - DNA, 122 bp, Homo sapiens
aggtggaggctgtgcatgcggtgagggcagtgaccccggaggacactgaaagaaacctggcgagactcggcctcccggcatcccatctttggggggaatgttgccaagcacggggctccggg

SEQ ID NO: 154990 - DNA, 122 bp, Homo sapiens
gcatttctctcgggcctgtcattctacagcgcccagtgagagcctggggtgggacgcgtccgccagacccacctttgattggttcagataaaggccaatcagacttttggggaagctcattg

SEQ ID NO: 154991 - DNA, 122 bp, Homo sapiens
ctcctcctcctgctgttgctggagctcctgcagctgcttttcgcgggtgggttgcggctccggatccaggatgtactccgggaacagaaaacgctcctgcatgtcaccaccttctccaaagc

SEQ ID NO: 154992 - DNA, 122 bp, Homo sapiens
ttctgaaggtggggctggccactctctggaggtctagaccttgaggccagagctggatcccgctagagtagagagttaattcattgcaggattcagggggcatttctgccctcatgaaggag

SEQ ID NO: 154993 - DNA, 122 bp, Homo sapiens
agacacttctagagaaggaaactttccctaacgtcacagcggggtcgggggtaaaatgggcgggtcttcgtgagaagtgagctccttctatgacaggtatgaaagagaaagctcgctggttc

SEQ ID NO: 154994 - DNA, 122 bp, Homo sapiens
cagttcggggtaggcacgggcttggcaggccctgcactcggagcagcctgccggccctgccgccccaagctgtgaggggcttagcatcttcgccagcagctgcggtgctctgggatccccag

SEQ ID NO: 154995 - DNA, 122 bp, Homo sapiens
tgttacctgatttatttcgagattgtttggtactgttttctctctgggcacctctcatttcggaaggccatcagaggcgcccactactgagcggccccggccgccgcagcagcacccggagc

SEQ ID NO: 154996 - DNA, 122 bp, Homo sapiens
cagagtctgcccggctgctcacccccaggaagatcttgatggcccgtgagcatgtgaccccggagttcccacagatgacgttctctgtcaggatcttgaaggtgggctgtgagtcgttgaca

SEQ ID NO: 154997 - DNA, 122 bp, Homo sapiens
gagaagaaaggcagatcccgcggcttgggagtgagcagagtggctaaatccagacggccgcgctccgccctccctcccctctcccctctcctccccctccacaccagggcccaggctgcctg

SEQ ID NO: 154998 - DNA, 122 bp, Homo sapiens
gtccgtgtcggtgccggagccattggccgcgcctagcaacacctcgtgtatgcagcgctccgtagctgcaggcgccgccaccgcagcagcctcttatcccatgtcctacggccagggcggca

SEQ ID NO: 154999 - DNA, 122 bp, Homo sapiens
gccacgcgtgtcacgtcaacactcgccgggctccacgaactggcgttgtcagatgaaacacggcacaactggtttgcatctcagatgaacaaggggtcatgtcttagtgtaagtatagccca

SEQ ID NO: 155000 - DNA, 122 bp, Homo sapiens
tgaaaaggtagttaagacctccaactcccggtggcagggactctacccatttcacagaagcgcaaggatggaggaaatgagtgcatcctccgtgctcagcgccggtgtcactgtaggttggg

SEQ ID NO: 155001 - DNA, 122 bp, Homo sapiens
ctggaatctgtaatgtctccacattctgtcatcagcagaagactctgaacatttttctaccgtttaaatgagtctcaattatccaatttataataatgcaaattttacttacagataaatat

SEQ ID NO: 155002 - DNA, 122 bp, Homo sapiens
acttgtaaacggcttgttccacaggccccgaattggcgagattcgctacagctcggagtgcgcggtagactttaagcagggagcgcctgcccggtccatccctccccggccccgcgtggcaa

SEQ ID NO: 155003 - DNA, 122 bp, Homo sapiens
actgaacgtgataattgaacttttaatgccaagtgtcacttttctttcaggtaaatgttccgccgctgtgatatttaaggttggtttgtgggcgctgctctttgctctgcttcattttgccc

SEQ ID NO: 155004 - DNA, 122 bp, Homo sapiens
tgaatgcataccgcatgcccaacccttctgacatgacaaggtccaggtcactaggagacacgattccttcctacgtggagaaattgggcggcatagatgagttttgtaaaaagacaatttca

SEQ ID NO: 155005 - DNA, 122 bp, Homo sapiens
ttaactcaggcatcctaccaaggcaatactctgagtcagaaatgacagtgctccctgatacgccctagaagtatgtcaatgatctcatgaaacatacttacacatatatacagaaacatact

SEQ ID NO: 155006 - DNA, 122 bp, Homo sapiens
acatgggcaacctctctgggagatacctgcgcagagaattgacggataagaagtactggccggatgaagagaggtaaggtaaaacaggaaagggcttggtgagaacggcagaggccagactg

SEQ ID NO: 155007 - DNA, 122 bp, Homo sapiens
ggaagtgtcctggggtgactcactttagactcagatattagttttctcatgttaaacagacggacctgaattggaagaggtttaccttccttttcagatactgagataggatttttcctaac

SEQ ID NO: 155008 - DNA, 122 bp, Homo sapiens
gtcagacctgaagtccattatctacttgaccaattagtaggacaacaatctcactgaacccgttttctcatatggaaataagataaaacttgaagagtgaacatcgcggtaggtgctttgta

SEQ ID NO: 155009 - DNA, 122 bp, Homo sapiens
tcagaccactgtgcaggccagtgacggcctggaggggcctggcccctacccgtgacttcacgtgccctgcagagattcagccatgggtgtgagccacagaggaggccaatacggaggctcgg

SEQ ID NO: 155010 - DNA, 122 bp, Homo sapiens
gcgagtgcccacgcggaagtgggctcagggcacctggggccacaagccacgaggcgcgcccggagtcccttcatgtcccgtcctgccgccagggggcactgcggcccccactcatccctgca

SEQ ID NO: 155011 - DNA, 122 bp, Homo sapiens
catgtgtgtccatgggtgcctgtgtgcatgggtgtgtgtccgtgtgtatatgtgtgcactcgtgtacacatgggtgtatgtgtgcatgtgtattcatgcatgtgtgtattcatgtgtgtgca

SEQ ID NO: 155012 - DNA, 122 bp, Homo sapiens
aaaccgatggaagaaaagaatgaatccaagagaaagcagaatgttagattttgattgggacggtggtggtgtttcagatccatagccatataaacattttaaatatcatcaataatttttta

SEQ ID NO: 155013 - DNA, 122 bp, Homo sapiens
ctccctcttccctcaagctgagcctcttcagctcctgtgatggcccccgggacacttactcgtctcccagtgcttgctgccttgtgttgtaatcctctgcctgtctgtgttctcccaggagg

SEQ ID NO: 155014 - DNA, 122 bp, Homo sapiens
aaagagcctgtgcgtcaccccggcctgtgctgggcggctcttgctgctgctccccagggacggcttcaacgcaggcaggacattccggaaaagcaagagagactttgcttcctctcacccac

SEQ ID NO: 155015 - DNA, 122 bp, Homo sapiens
ggaacactccggactggtgaccgccaccccaaggtttgtataacgaaccgcagaggtgcccgcccggtgaggactgcccagtgctatgtggcaacttctcaaccccatcttggaagttcgaa

SEQ ID NO: 155016 - DNA, 122 bp, Homo sapiens
agcccgcgaggcgttggctctgcctccgttgcagcctgggacgaggggcggggccagagtcgtgggcggagaggggcgagaccaggaaacggggcgtggcggccgccgtggttacaggcggt

SEQ ID NO: 155017 - DNA, 122 bp, Homo sapiens
aagggtgctggggggctccaggagtggggtctgtttcctcccctctggaggcagggtttccgtgagaccgaccccagggaagaagctgcgggaaaagtgccaggagggggctgaacttacgt

SEQ ID NO: 155018 - DNA, 122 bp, Homo sapiens
atcctttacaatttctcagtgctataaagcagccgtgccacatacctattcatatagtagcgtagcaacagaaatgaccgaggaggaggtcaggggaagaggggggcagttaagtgaggaga

SEQ ID NO: 155019 - DNA, 122 bp, Homo sapiens
cggagcagctgcggagccgcagcagctgcaaccccgaagcccacctagctgctctacgtgcgctcccgccctggaggagtgggattggttctttcaaccatcaattgccttaggagcgcttc

SEQ ID NO: 155020 - DNA, 122 bp, Homo sapiens
cgggagccctctgatggaggaagcctaaattacagcgctcataacctaacaggcagccgccgggctcaagtgccccctgattttccagaatcgaaaagaagaggaaccataaaagaagccga

SEQ ID NO: 155021 - DNA, 122 bp, Homo sapiens
aggggggctgtcttcagccaatgggcagggcggccgggaggccgggctgggcggccgaggcggaccctaccgcagtgtttgcacaggacccgggcgcagccactggggctggcgaggacaca

SEQ ID NO: 155022 - DNA, 122 bp, Homo sapiens
tgccttttattgcaagcggcgccaccggattccatttgtaaacttattagtgtgcgctcgcggggagggggctcgggaatccgggcccgggcaaccggcgccgcatgctaatcagggggcgc

SEQ ID NO: 155023 - DNA, 122 bp, Homo sapiens
atccttgtctcttacggagccattacctgggcagtgctgaggattaactctgcaaaagggcggaggaaagcttttgggacctgctcctcccatctcactgtggtcaccctcttctacagctc

SEQ ID NO: 155024 - DNA, 122 bp, Homo sapiens
ggcgggagctgtcagcgccgatcgtggggagggggctcctctgccccaggtcgatgggagcgggggcccaggctgcggtttacactgaatccacaaaaatcaccgaagcttgaaaagtgctc

SEQ ID NO: 155025 - DNA, 122 bp, Homo sapiens
cccccaccctcccccaccacgtagccttctctaccttcagtcgggaatcaatggtctggtcgcagattggtgacatcattggcgcgccgggcgtgggaggaagaaccacgtgattcaacctc

SEQ ID NO: 155026 - DNA, 122 bp, Homo sapiens
caactctacaatgaggaatcatcgagtcgcagctttcgccgcccgttgaagggccgtgcccgagatctatgcacagaggaggccacagttgctcccttacagaccaaaggcccgcaggcagg

SEQ ID NO: 155027 - DNA, 122 bp, Homo sapiens
cacagattagggagtttgaaggctttattggtgcggaatctgagggcacagccaagcccccgccaactttgatcccggatcccagcgtcactcagctctggacggttcttcccccattgctt

SEQ ID NO: 155028 - DNA, 122 bp, Homo sapiens
ccctgaggctgtggagggcagtggatgggggcgttccccgagcgagctccgtgcgggaggcgaggggcagccggcagaggccccgggcgctgcggcctctcggtctcagggcgcctcccgca

SEQ ID NO: 155029 - DNA, 122 bp, Homo sapiens
gcctcgggctcctgtgattctcctgcctcggcctgccgagtgcctgggattccaggcacgcgctgacactcctgactggtttttgtatttttggtggagacggggttttgccgtgttgaccg

SEQ ID NO: 155030 - DNA, 122 bp, Homo sapiens
ggcatgtagctccttttcctgcaataacacagctgcctccttcccagtacaattttgtcccgtctcctgtatgcccaagaaccatacaaacaagtaaagatgtacggcagaatttgcagtca

SEQ ID NO: 155031 - DNA, 122 bp, Homo sapiens
ccgtgggactggctcccgtttctccttggtgagcccggggagccggcgcatcttgtgagtcgcgtctgtgcatggcgatccgctcctccggctctcatggcattgtgccacaggcagaggcc

SEQ ID NO: 155032 - DNA, 122 bp, Homo sapiens
tgataccggctctccgtccccgcggtcttccccgcccgccatggctctgcggccggctcacgcagcgcgcctccgagtcccggccccagtgcagcttctactcaaagcacactgtagctccg

SEQ ID NO: 155033 - DNA, 122 bp, Homo sapiens
gcctgacacctgtaaagggtctgtgctgaggaggattcgtaaaagaggaaggcctctttgcggttaagaggaaggcttctgtttcccgcatgtccctgggaacggaatgtctcggtgtaaag

SEQ ID NO: 155034 - DNA, 122 bp, Homo sapiens
cttttagcattggaatgcattacaattagcaaataatgagcagtgaggatgaccagagttcgctttcattgccgtcttggttttgatgggttttggccagcttctttattccatatcccttc

SEQ ID NO: 155035 - DNA, 122 bp, Homo sapiens
ccagcgtgggggctgccaaccgggctggccagaagggcgaggtgaggggccctggggttccgggctcccgggtaaaaacagccagatggagagaggggcttcagaccccaggcccggggacc

SEQ ID NO: 155036 - DNA, 122 bp, Homo sapiens
agaggctccggggcggaagcagctccgtaagatatacctcgctgcagaggggagcaacagcggaacggagacacggtggccgggccgaaaacgtcacaaagccgcagagagcgggctctgtc

SEQ ID NO: 155037 - DNA, 122 bp, Homo sapiens
acgccggcggcatgaagcagcaggcacaggaagggccggtagttgccgaagcccacgcagcggcccagcaggcggcagtggtggtcccgacgcaggatgcagacgcggcaggcagagcagtg

SEQ ID NO: 155038 - DNA, 122 bp, Homo sapiens
acctttttacataaaacaactgcgaagagtcccagcatgaacaccgcagtctctgtgggacggatacagtgacaatggctaaaagaatctgacattcaggttgattttatattttaaaatca

SEQ ID NO: 155039 - DNA, 122 bp, Homo sapiens
ggagaggggcgtgaggagcgggaggcgccggatggggcgctggcggcgggggtggcggggcgccggcagcgcggagcccgagcgcccgggctgcgccgcctctccctgggtcttggcgccgg

SEQ ID NO: 155040 - DNA, 122 bp, Homo sapiens
tctctctctctccccaaagtgcatgcaaacacatatggaactgacataggcatccactgtcgcacttcaaattaaacagacgcacacgacagatattctcacagaaaagcagtcagccaagc

SEQ ID NO: 155041 - DNA, 122 bp, Homo sapiens
aatgctaaaaaccagccaccttttgtcctgttactggtttcattttctccatgggaatcacggactcacaggaagccttttctaaaattctgtgctgggtaattcagaaccaacagaggctc

SEQ ID NO: 155042 - DNA, 122 bp, Homo sapiens
acacagatgttcttggacatcctggaactgtaatgcaaagggctgcaaatggctacatagcgatccaatgccattgaagcaaggatgtaaaactcagtgatcaccagggcgatgaagagaag

SEQ ID NO: 155043 - DNA, 122 bp, Homo sapiens
ctcaggcagtccacctgcctctgcctccctaagtgctgggattacaggcatgagccaccgcgcctggcctatgtgctttatttttacaatcagagggctgcactagcagatctgagagcatg

SEQ ID NO: 155044 - DNA, 122 bp, Homo sapiens
gcagcggcgggctgaagttctcctcaagcgcggccagagtgggcgccaaggccgaggaggcgcctagagcaagcgaaggctgtgagggctgccagcaagctgtcacctctcagtatggcggc

SEQ ID NO: 155045 - DNA, 122 bp, Homo sapiens
agtattatttgtggcatggtctgtgtggctctgaatatatctgtttctgggggtgtccatcgcccgacctggagttgtgagaacacccggtagggtgtgcgtgtaccgggatccctgccgag

SEQ ID NO: 155046 - DNA, 122 bp, Homo sapiens
gtgcgtatcgctcaggtgctgctgtactgtcccaccaggcttacaaaaatctcagagacgcggttaggaagatttcaagacagcaacgacagagccttaaaccgagcacagggctcttccgg

SEQ ID NO: 155047 - DNA, 122 bp, Homo sapiens
ttgatgacaccgggtctcacactttgggtgggagctcacagtctactgtccagggcctggcgtccagccggcttagcggggtccacaggcctgtgtgagagctggggcgggggacctcgaca

SEQ ID NO: 155048 - DNA, 122 bp, Homo sapiens
agtcctggtcttcaagtcatagcagcctagaagcctcaggatgattccagccccacctgtcgagtcacctaagcctttgagtcttcccagctgaggtcccggatatcatgcagcagaggcat

SEQ ID NO: 155049 - DNA, 122 bp, Homo sapiens
gcactgctataaaatgcccaggttaacactgaacaacgtgagccactggactgaccaccacgtccccgctgcggactcccggcctagacttcacagtgcctttgtgaacgcttcagggccac

SEQ ID NO: 155050 - DNA, 122 bp, Homo sapiens
gctgatctggctggctaggcgggtgtccccttcctccctcaccgcccttgtgcattcctccggaagctgcacactcagtctaagaggacaaccatcctcgatagaggactgttcttcagtca

SEQ ID NO: 155051 - DNA, 122 bp, Homo sapiens
cgatctcgcgggggactctgtgatccgtgttcccctgaccctcctagtgcacaacttggccgggctcactgggctcctgcaccactgcctgtcaggtgagtgtccggggccaggttccgggg

SEQ ID NO: 155052 - DNA, 122 bp, Homo sapiens
cgcgccgcgagagaacaacagtcccagatgtctgggtcctggctccgccgccgccgccgccgcccgccccgcctacggccccgccccgcgccttaggccccgccccttcccgcccttgctga

SEQ ID NO: 155053 - DNA, 122 bp, Homo sapiens
catttaaaaaaagaggaggggaaggaaaatctacagaggaaacaaatgttgaaactcatacgcatccatcatgttttatggagtcctgtgaccagctggaatcttgtttttatagaaacagc

SEQ ID NO: 155054 - DNA, 122 bp, Homo sapiens
gccaaggagctgaggaaatccggcgcagactctcccagctggcaccaaagccttccgcttcgccgagatcctctcaggtgctcttgaggacgcgagcgacttccctaggagcgaacttccgc

SEQ ID NO: 155055 - DNA, 122 bp, Homo sapiens
gaggctggggatggtgtctgctgcggggtgttgtctggcagtgaagctggggacggtgtccgctgcagtgtgatgtctggcagtgaggctggggacggtgtctgctgcggtgtgatgtctgg

SEQ ID NO: 155056 - DNA, 122 bp, Homo sapiens
gttggcctcctgggcacaggcgtcggacacctgcaggaggtaggccagggcagcgcggtgcgcgggaccagtcagcctggccagggccccgctctccatggcctcctccacgctgcgggcca

SEQ ID NO: 155057 - DNA, 122 bp, Homo sapiens
cccagagagcacaggtagcacagtaaataccacgagacacaaggacaggtgccaccagcccgcccagaaagactagatgaacccaggccaactgatttctgggtgcggtgatgtgaggaaag

SEQ ID NO: 155058 - DNA, 122 bp, Homo sapiens
tccacagatggtgccttcttgctatgtccttacatggtagaaggggctaataagctccctcggaattatttttaagagtatcaatcccattctaatcacctctcaaaggccccacctcatat

SEQ ID NO: 155059 - DNA, 122 bp, Homo sapiens
ggggggccctcccggatccgacaccgagcgactcccctgcggggaaagcggagacttcctcggtatttagaagacagcaagccccctacggcaccgcaaggactccccctcctcagtctggg

SEQ ID NO: 155060 - DNA, 122 bp, Homo sapiens
ggattaagctttgattcaactccatgagtaactctggaatgatccctgtgaagtctaggccgcacattctatggaagtgcagttctcactggccccagccttggggggcagagttgggggct

SEQ ID NO: 155061 - DNA, 122 bp, Homo sapiens
tgtccttaattcaggaaaaacgggcacggctctgcattcaaagacctaatcccatttcgccgatacacaccaaacacttggagaaagagtggggaatttacataccttagtgcccagctgtg

SEQ ID NO: 155062 - DNA, 122 bp, Homo sapiens
gcggcgggcggggatctgggcgtggaggcgcgaggggcggggcgggcggcactgcgggcccgcggctcgggcggcaccagcggctcccggtctctctctctgctcgccctcagtcccacccg

SEQ ID NO: 155063 - DNA, 122 bp, Homo sapiens
tggaattgcacctgttactttcattctcattgcactgaccggaacttagttacaatgccacgactagcagccggggtactgggaaacatagcttttattctggacagacatatgcctagcca

SEQ ID NO: 155064 - DNA, 122 bp, Homo sapiens
ggggacactgtctggtttcataagccctggccttggctgggaccctcctgaggcccgcaccgcccctcatcctcagcaaaagcccccggactcccacctgtgctgcctggttcatgtgggcc

SEQ ID NO: 155065 - DNA, 122 bp, Homo sapiens
tagctcggggtggattctgctttacaagtactcccccttgttttgcatgaacaaagagggcgccctgggtttaggtctgggaagccccagcgcagctgcctgctgggtgtggagcggtgcac

SEQ ID NO: 155066 - DNA, 122 bp, Homo sapiens
aatgcagaacctcacataacagccacaaatctccctagatctcagaggcgggtctccatccgctcggcctcaattatccagagctgagtcaccaactatcctccctccagtctctccccagc

SEQ ID NO: 155067 - DNA, 122 bp, Homo sapiens
ggcccccctaggagagctctgggcacattcgaatcttcccaaactccaataataaaaattcgaagactttggcagagagtgtgtgtgtgtgtgtatggttgttgggcgtaggacaggtttcg

SEQ ID NO: 155068 - DNA, 122 bp, Homo sapiens
ggtccctgagactcaggacagaccaagaaggagccggatgacatggcaagccacacactgcgtcccctgagcaggacgggacagcccgactccatcctcccacctgcgactgagcccccacc

SEQ ID NO: 155069 - DNA, 122 bp, Homo sapiens
gtaggctctgagggttaaaatgttgaggggcagatgtcgcttgtgaagcgtcacataccgcgtgaccatggcagagagttccttgagcagtgaaaagcactttcctttcccaacagatagtc

SEQ ID NO: 155070 - DNA, 122 bp, Homo sapiens
aaggccccccgtcggggtgcttctggagcctgcctcccagggagcaggctgaggagctggcgggagggccggtgggcggcggcgcggacgctgctcccttgtggccggcagggggcagcctg

SEQ ID NO: 155071 - DNA, 122 bp, Homo sapiens
aatgcatttaggcttaatttcttcgccttccacatgttaacagtagagctctatgcactccggctgcaatcgtatggctttctctaacccctgcagtcacttccagatgcctgtgcttacag

SEQ ID NO: 155072 - DNA, 122 bp, Homo sapiens
accttgtgatcctcccgcctcagcctcccaaagtgctgggattacaggtgtgagccaccgcgcctggcgcaagtgcctatgattattaaggtgttatatatgtattaccttatttaatcata

SEQ ID NO: 155073 - DNA, 122 bp, Homo sapiens
ttgtctgcgtcaaatgcatcaccaggcctgggctgcagcctgcagtgtctgcacagggctcgacagtggcactgcctgtggcacccccgttcactcagccgcacgtcccgtcctctctccac

SEQ ID NO: 155074 - DNA, 122 bp, Homo sapiens
cactgtaacaacatgcacacgctgggagcccgtctgcctggcggggtggaatgtcgcttccggcgtggccctgccatggcctgggagggggagcccatgcgccacaacctagggggcaacct

SEQ ID NO: 155075 - DNA, 122 bp, Homo sapiens
actgaacaatattttatctaagtgccaagcattcctgaatagaaatattaagagtcatcacgcttgtgcagtcaacacatatttactgggcgcattctatgcacgagttattgaagacagct

SEQ ID NO: 155076 - DNA, 122 bp, Homo sapiens
atgtccgggaccagataaggccgggaggggaccctccatggagagcgggactgtgccgcccgcggtcgctgcactgggcctcctcgcccccccactccgggcccggggccagcgcgatgtca

SEQ ID NO: 155077 - DNA, 122 bp, Homo sapiens
ggagcttgttctcaccacctctccctcctttctcccccggccaacctcctccccggcgcccgaaaaagacacactgagaaatcagagccgggtagactaggtggttaaggagtttatttggg

SEQ ID NO: 155078 - DNA, 122 bp, Homo sapiens
cgtgacactgagcaagtgactttcacggtctcaaggaactcacctataacgtgggggcaacgttaccgacctcaggatatattcgaaaggaaaaaattacataggaacacctggccatttgt

SEQ ID NO: 155079 - DNA, 122 bp, Homo sapiens
cgtgggaccccaggcgtccgtggggctgatgccctgcgtctgcgtgggaccccaggcgtccgtggggctcatgccctgcatctgtggttgtctctctaggcttcctgtttgggctgaaagga

SEQ ID NO: 155080 - DNA, 122 bp, Homo sapiens
tcttatcatctatggtctttccccacttaggactgtgactgcagtatcatttactggaagcgttgttcatacttttttacccagtatttccatttgtagaatttatcctaagaaaataatca

SEQ ID NO: 155081 - DNA, 122 bp, Homo sapiens
caacaggtccaacagctcccgagggaggagggagccacgggcttgccccacccgtggcctcggcatccggccatcccggccccaccggccccggcccggccccaccctcgtggaactcagca

SEQ ID NO: 155082 - DNA, 122 bp, Homo sapiens
tgtttcttgtactaaaacgcttggtttacaaaaagtcttcccctatttgtttagagaacccgaacgatgtcgtcactggcagcgaagcgccttggcatgaaccgtaggccagctggctcagg

SEQ ID NO: 155083 - DNA, 122 bp, Homo sapiens
caagtctgctccctcgaggccacagcaagccggctacgaagcccccgtcctgtttcggaccgaagactacttcccttgttgcagtgaaaggcctcagctctgacggcctgaccactgcggca

SEQ ID NO: 155084 - DNA, 122 bp, Homo sapiens
tagagacggggtttcaccatgttggccaggctggtctagaactcctgagctcaattgatccgcctgcctggcctcctaacgtgctgtgtttacaggtgtgagccatcatgcctggcctgctt

SEQ ID NO: 155085 - DNA, 122 bp, Homo sapiens
atttaaatttgcatccttcaagcactacattgaatccacatgaatgaagtgatatgtgggcgttgcattaggtattataaataatctagagatgatttaaagtagactggagcatgtgcgta

SEQ ID NO: 155086 - DNA, 122 bp, Homo sapiens
gagctgtggaggtggacaattactgtgagtagtctagttgatttcctccattttgtaaaacgaggcatcactttttgtccatgtttttgtgttttatagttacagtaaacaatttgatgtcc

SEQ ID NO: 155087 - DNA, 122 bp, Homo sapiens
ctgctcccaggggtggtgcgtctccggtccagctgtgccgagcgctgccctgggtgcatccgtggcacctctcagggccccatccgccccgtggctaacagagctgttggtagctattaccc

SEQ ID NO: 155088 - DNA, 122 bp, Homo sapiens
ttcgctctccgccgagggtagtgacacaggcgaggacgggccccgcaggtcacatgagggcggggcctggcgggctcgtgaccttcccgtaggcggggtccctcccctcccagctcgggccg

SEQ ID NO: 155089 - DNA, 122 bp, Homo sapiens
gggtgagtctccccaatagtggcgcccttgtgatgtggaggacaggtctaccagggtgtccgtgggctgctgtctcaccggtggcttcgtagtctcggagagcagaacccggcagcttcagg

SEQ ID NO: 155090 - DNA, 122 bp, Homo sapiens
aaggcgctgactgtctcccagcctcccctcctccgcgccccctcggcagcagcgaaaacccggaaatctgatcctggccccaggagagccgggttccatgaggtgcactgagcatgctctgc

SEQ ID NO: 155091 - DNA, 122 bp, Homo sapiens
aaccacctcccccctcctccgcagtctcccccgcccacgagttcccctctggtggcagagcgcctactagcaacagtaagccctaggaaagaaagaaatcggagcaggtggggaataacatc

SEQ ID NO: 155092 - DNA, 122 bp, Homo sapiens
catccctgcagtacctttagaatggcctggatgaagatccagaaagccaggttcaaggcccggctctgcctccggccactggcctaacccggggtgagagccttcagttctcctctggaaaa

SEQ ID NO: 155093 - DNA, 122 bp, Homo sapiens
tgtgatacatctaggtgtagttttttttgtttgtatcctaattttgttctcttagttttccggatgtgtggtttggtgtaccttattatttttggaaaattcttagccattattatttcata

SEQ ID NO: 155094 - DNA, 122 bp, Homo sapiens
gcactccagcctgggcaacaagagtgaaactccatctcaaaaaaaaaaaaaaaaaagcatcgctgttaagttgctcaggtgacagctttttggtcaccaagggatccctcaccagaactaat

SEQ ID NO: 155095 - DNA, 122 bp, Homo sapiens
tcaggttggcagaagactgagctctagggacgccctccctaaggaaacaataatgaagatcgcacactttattttgaaaaccaggccagggacagctccagtttggggggaggggaagagat

SEQ ID NO: 155096 - DNA, 122 bp, Homo sapiens
ttgcagcgaaagtcacggcagttggggctggtgtcagctgatttactgcagtggcggcggcggcggcaccggcaccttgcagtatcactggggagacggcggctgtatagcgcttgccgccc

SEQ ID NO: 155097 - DNA, 122 bp, Homo sapiens
cagagcggcctgggagaggccggccctccaagggcgggagggcaggtggggtctgggccccgggtgggaaggctggcagcaggatgtaccctgcctgtgtcagtcactgctcccccaagagg

SEQ ID NO: 155098 - DNA, 122 bp, Homo sapiens
ggcaagctgcagacatttcctattattccacattcctgagtttagccacatcctggataccggcatttgtttgggtggatgccgacaatgctcgctaggctaggctggttttgcagggcacg

SEQ ID NO: 155099 - DNA, 122 bp, Homo sapiens
gggaagctgattaacaattcagatttccgggtctcaccccgacactgacgcactggagagcgcgtggccctgggatctgcgttttcccaagcgctccggagtaattctaacccaggttgccc

SEQ ID NO: 155100 - DNA, 122 bp, Homo sapiens
atcagtgttttgttctcagagctcttggtcctttcattttgtcagtgtgtttttgccctacgtagtgggtccacataccaacagagacatgtacaacttgcctctatcatcaactccttatg

SEQ ID NO: 155101 - DNA, 122 bp, Homo sapiens
tatttccaagaacccttagacagaccccaggaagagccctagctgctgttccccattcaacgtccattttcagcaggaagtagccagaaaaagtcgtcacccaataaccccctaacagcaat

SEQ ID NO: 155102 - DNA, 122 bp, Homo sapiens
cccgcaaggcgggcagagccgggcctcgagaccgttcattaggcagaatgaattgttcaccgtgcccggagtggatgaggacgagccagtgattatatttaaatttgctataattgatttgg

SEQ ID NO: 155103 - DNA, 122 bp, Homo sapiens
gtttaaagtgctggatgtttgctacaggcaccagttgcttacttatccctttcttcttttcgagttgttacctccttcagttgcaatccttggagccaccaactgcctgggatattttaccc

SEQ ID NO: 155104 - DNA, 122 bp, Homo sapiens
cagctttgccaccgccggtgccgacctttgtggctcgcctttgatcatgctctgcgtcagcgtggtagtccttctccggaggtttgggctctccctgcccacaggctttggagtctgtgctt

SEQ ID NO: 155105 - DNA, 122 bp, Homo sapiens
ttaaggaaataattttattagaaaagggttagagggtgggttccgggattagcaggagatcggtggaaggaaagaggaggtctggcaagtcctcagacatgcgcagttatctcttcatgctt

SEQ ID NO: 155106 - DNA, 122 bp, Homo sapiens
caccaccggaagtcagccaacaacagcgaattgcgtgcgcgtccccgagcctcggagcgccgcgccgcagtgcatcaaggagcatgcgcctaacactatgcgccatcccattttagggcaga

SEQ ID NO: 155107 - DNA, 122 bp, Homo sapiens
taaattgggaactcagttcccaatttacaaaaatcagggctggccaggcgcggcgactcacgcctgtaatcccagcactttgggaggctgaagccggtggatcacgaggtcaggaaatcgag

SEQ ID NO: 155108 - DNA, 122 bp, Homo sapiens
cagtggggatcgcgtgtcagtactggggtttggtgggctgccaaggggtgagccctgaggcggttttctgggaaggatagatgccatgtgtgactcagaaccaagttagggaaaaaacaagc

SEQ ID NO: 155109 - DNA, 122 bp, Homo sapiens
ctattaacctagagacccccatccctacccctccctatgaatgctttttcataaacatgccgcattctgaggaatccgaaagactccagcgtaggacagaccgctgttccaagccactggga

SEQ ID NO: 155110 - DNA, 122 bp, Homo sapiens
cttccgaaacggaagccagagaaaaaggtggaatggacaagtgacactgtggacaatgaacgcatgcgccgccgctcatcaaaatgctgctctatttatgaaaaatcccgggcctttggcga

SEQ ID NO: 155111 - DNA, 122 bp, Homo sapiens
aggagccgcggaggaggacagtgagggaggaatggaaacgagagatgtgaagttggcagccggggcatggcgttcaagattttggagatgaactgattccgcccaaatagaatcatgtttat

SEQ ID NO: 155112 - DNA, 122 bp, Homo sapiens
ttcccgcccgcgtcctatttttgccgggcgcgagaggtggggccgctattggccgacacgcgcgttgggggcggggcctatgtgtaaaaccggaaagggagggagaagggtgggatccgcga

SEQ ID NO: 155113 - DNA, 122 bp, Homo sapiens
tcagctgcctctgtttcccttttacagtcagtgacatcccctgagggcagtcccttgctgcgtattgggtcaacccccggcggcctgtggactcggctgggaggccagaagccgagggagaa

SEQ ID NO: 155114 - DNA, 122 bp, Homo sapiens
gaaacagaagcacaaggaggggtcagtcctcaggcagagctagtcaagatttgtgttgaacgtaggcttcatcctgctttgcttagtttgagagacaggtcttcccgaactttcttaatctg

SEQ ID NO: 155115 - DNA, 122 bp, Homo sapiens
gccccaccccctcggagtcagcaagctcctgagccccggtgggcgctgcccgggctttcccgtcccctgggaccctcacagcagtcggtagcagaatcagcttttggaattggtgagaaacc

SEQ ID NO: 155116 - DNA, 122 bp, Homo sapiens
gccaacgcgaggtgggtggctgcgggctcgggagcgcccagggaaatagggcgaatgcgccggagggtcgagcccttccagagagcgctgggctccagctaaacctgcggtcgagggaagcg

SEQ ID NO: 155117 - DNA, 122 bp, Homo sapiens
ccccaaaattatttcattcatattacctttctctgggctttttgcaggatgtgttcagggcggttgactgtggatccgaagagggattttagcttcgtcttatgagttctcagtaactgcag

SEQ ID NO: 155118 - DNA, 122 bp, Homo sapiens
gcccggaagaaggggaaggagaaaggcggaaattgcaggtgcctgaaccggtagggcctccgcccagttgacttcaggaagttcagagagaaacattcacagtgtgaatgatctctgcccct

SEQ ID NO: 155119 - DNA, 122 bp, Homo sapiens
tgggcgccaaggccgaggaggcgccgagagcgagcgagggctgtgaacaaactccggacacgctgtcacctctcactcttatcaaaggtgagcatctctgtgcttttccaaaatgtgtccat

SEQ ID NO: 155120 - DNA, 122 bp, Homo sapiens
ggtcccctatccaattagagaggctaacggccttctctcgtctggtttagaaggaatcgccgggggaatacaggccaaactacaattcccgagaggtagctgggctctgcgggggggggggg

SEQ ID NO: 155121 - DNA, 122 bp, Homo sapiens
acctttcaccccctctcttgccttacctcagctcaccaattttgacgctagcaaatgaagcgacgaagagagctggaaggcgggacttagtgttgcctgatccacgccgattggacaacagc

SEQ ID NO: 155122 - DNA, 122 bp, Homo sapiens
ggcccggggtggcgctgggtcagcgggtaccttctcggcggtcccctggccggccgaactcgcgcctggtgtcctgtcaccccgctccccgccctgagtgagcctgtcccctctcaggggcg

SEQ ID NO: 155123 - DNA, 122 bp, Homo sapiens
gcccggggacttgcacgggcgtgcggggtggaaccgcaggaagcggagctctcgggttcccgccccgccccgccccgccggcggcggaggcagcgagcgcgagagcccagcggagtcgctgg

SEQ ID NO: 155124 - DNA, 122 bp, Homo sapiens
caccttccctgtgccggggactgtgctaggtgctgggaatacaaagatggggagaggcctcgatgcgattcccgattcagaggcaggtggcaaatgcttttcccacagtgagggaagggctg

SEQ ID NO: 155125 - DNA, 122 bp, Homo sapiens
ggcaacagcggcttagggggcgggggcgacgtggcgggcggggtgggctgggccgcgctgcgcgggccgggccgtcggcgctcggtcggcgggcgggcggcgcgggccgcgagctgctgggg

SEQ ID NO: 155126 - DNA, 122 bp, Homo sapiens
ccacctcctggcatcactccagctccaggtagcccagcggaagctgcaggaacaagaaggcgagttccggacccgcgagcgacgcctgctgggctccctggaggaggcgcgtggcactgaaa

SEQ ID NO: 155127 - DNA, 122 bp, Homo sapiens
tcccgctcggggactttctcggaatcgcgcttcttcttccagcagcctcgaggccggccccgtccaggtctctttagctccgccccctggtgaggggcgtggcctcctcagggccggggcgt

SEQ ID NO: 155128 - DNA, 122 bp, Homo sapiens
gcggcccctcggggcccaggcgccgagctgcaggcagcgggctcactggtgtggggagtgcgcgcggcgcccggggcgcgggtcgccgccggggctcaggcgagcggccccgaaggcatcga

SEQ ID NO: 155129 - DNA, 122 bp, Homo sapiens
gtgggggtgggggggtggggactcctgcctgggtcctgtgctacccacagctttgtctaccggagcctgtgtgccacgtgctggacaaatcttaactcctcaaggactcccaaaaccagagg

SEQ ID NO: 155130 - DNA, 122 bp, Homo sapiens
gcctaccgccccgaactggccaattgcaaggggtttcacagggcgctgaactcgcgggagcgtcaccgtcctgcgacgcttcagaggatccttaggcctcagtggtctttgacccccggccc

SEQ ID NO: 155131 - DNA, 122 bp, Homo sapiens
gtcttcagggaagtgatgttgctcgggtctctcctccccttgctctggaaatctggcgtccgtcttaccttttagtgtccaagaacaactttttcaaaaagttcatatattagcttgaattt

SEQ ID NO: 155132 - DNA, 122 bp, Homo sapiens
ggcctccgcacccgccttcgccgcgtctctagcgtcgacctgatagccgcacccaccctccgctgcactgtctggggcaactgggtggttttcccggtggtttgagactaacatttagccag

SEQ ID NO: 155133 - DNA, 122 bp, Homo sapiens
gtgtaggcagtcctcaagaccacttacttccaggttcagtgattcattagcaggactcagcgtatagtcatacccatggctatgatttattacagcaaaaggatacaaagaaaaatcatcaa

SEQ ID NO: 155134 - DNA, 122 bp, Homo sapiens
cagcccgtcacagatgccagccccatgaagcgctccatctccacgctggcccagcggccccgtgggactcatctttgcagcaccaccccggaccgcccaccccctagccaggcgtcgtcgca

SEQ ID NO: 155135 - DNA, 122 bp, Homo sapiens
ccagcagcagctcaggaaggtcacagtgggccaagacgaggctcagcagaggcaggaactcgtcggcacccgcgccctcccctgtggggacatggtgagaggaagaagcttcaggtacagtc

SEQ ID NO: 155136 - DNA, 122 bp, Homo sapiens
gaagagaagttggctgagagaacactccttcgttatttattgcgtcttcatctctacatgcgtttctcattaactctctctggccaggtgaacatgaggaatactaattccggtaaaaccaa

SEQ ID NO: 155137 - DNA, 122 bp, Homo sapiens
gtagtgctgggggctggtgtggggcacttaccttcatcataagcacgatggtgttgagggcgatcatggccatgatcgtgtactcgaaaggcggagacaccacgaactgccacatgcggtac

SEQ ID NO: 155138 - DNA, 122 bp, Homo sapiens
gcccgggacggcctcgggcaccagaccagcccctgtgtccttcatctcctccagccccagcgggtcaggcaagggggtcaccaccttgcgcccaccactgccgccacggcgcggggctgccc

SEQ ID NO: 155139 - DNA, 122 bp, Homo sapiens
cccgcccgagcgcacacaatgaggcgctttcagacgtggctgcggtcccgaggtggccagcgggagctagcgccgtgggggaaggaaggagccggttggcccacccccgaccgaggggccac

SEQ ID NO: 155140 - DNA, 122 bp, Homo sapiens
agcctgggaaggtaccccacatgaacttgcgaaggaaaacatcctccaccgttcgctctgcggcatggtcctctccatccaggttacctgaagagggaagggcataatagaagaatcagcct

SEQ ID NO: 155141 - DNA, 122 bp, Homo sapiens
atggagccacagtcaggattccccaggccttcgtgcttcactgtgggtttcttgttgcgtcgcaggacaaaaacaagaaggcaaaaagcaacaaacaccgttaaaatgaggaccactaagat

SEQ ID NO: 155142 - DNA, 122 bp, Homo sapiens
ctcaggtgatctgcccactttggcctcccaaagtgctgggattacaggcatgagccaccgcgccccgcctgtagattgtcttttttaatggtcacaataatcttatgagatcattatcgttt

SEQ ID NO: 155143 - DNA, 122 bp, Homo sapiens
cccgtccgctccgcagctgcagcgtgcctgcttccggagccgcttgtctgtcttcagggccggcatctgccgagggccttggctttctgggaagagtctatgtctaaaagtcatggtcgtcc

SEQ ID NO: 155144 - DNA, 122 bp, Homo sapiens
aaaaagctcacggaaatggtggcaccagaacaaggcagtcagggcctgacgtcctctagccggcccccagggagagcagggccaccggctctctacagatgcacggccatccttttcaaatg

SEQ ID NO: 155145 - DNA, 122 bp, Homo sapiens
ctgaggcatgagaatcgcttgagcccaggagacagaggttgcagtgagctgagattgcgccgcagcactcgagtttaggtgactgagtgagactctgtcttaaaaaacaagagaaaatttta

SEQ ID NO: 155146 - DNA, 122 bp, Homo sapiens
gggagagggtaattagaggcccaggtgctggagttgccacctacctgcccctgcctgtctcgtgtcctggtgtggggctggccagctttgcctatcgtgccctgtattctaacactaatcct

SEQ ID NO: 155147 - DNA, 122 bp, Homo sapiens
actcagcacagacgcccggagcagcagatgctccctacaggagcaggcagaggtgccacacgcccaccacagcctcactcacctccaggatgaaaggcagcaccgggatgaaggcccccgag

SEQ ID NO: 155148 - DNA, 122 bp, Homo sapiens
cacctggactgctaatctgttttgtttgctcaatgtgattctgctgatattcatccatatcgctgcatgtggctgtaaggcttgcattttttactgctgcatagtattcctttgtatgaatc

SEQ ID NO: 155149 - DNA, 122 bp, Homo sapiens
tactttgtggtttgaggagctaagggttcagtggcaactttggcagaagtagtgttcattcggagatgataccagattgcagtatgtttcaaaggtatgggagaagagaaagtgaagcttgt

SEQ ID NO: 155150 - DNA, 122 bp, Homo sapiens
aggcgcagcgctgggcgcacgtccccgtcggcccggcggcccctaatgaggcgcgctgtgcgcagactgctaagagcagcatgagcacggctccggcggcccccagggccccgcgggtcggc

SEQ ID NO: 155151 - DNA, 122 bp, Homo sapiens
ccctccccagagcagaagtcccgcaggacagacagacacagacagcgctagtgaccagcacggttctcatgtaaattacaagccccagccgccagccccgccttctcttcctcctcctccgt

SEQ ID NO: 155152 - DNA, 122 bp, Homo sapiens
gatactgtcgtggggctgcgcgtgtgcgtcggtcgggtgcccacggtttgagtcctggcgcgccgcactctgtgcttctcgcagtgtctccttgggggtctccccacatgtggggctgccag

SEQ ID NO: 155153 - DNA, 122 bp, Homo sapiens
aaagtattacctacaacttccctagtaaagtctctgtgcagaagaattctcacatattcacgcaaagcgaaatcttaacactgaagatttttgtttgtttttgtttttactcaccaaagcag

SEQ ID NO: 155154 - DNA, 122 bp, Homo sapiens
gccaaggggcctagggctggaagtggccgtcttggggaccgaagccgcgcagcccgggatcgggagctgccccgacaggagcgcggaggcggcgagattcggcccccgcgcgcgcccagctc

SEQ ID NO: 155155 - DNA, 122 bp, Homo sapiens
cagggttcacacgcctagggctgtgtttggtggactggaggcctccaccacaaggtggaacggagagagttcagcaaagatgtcacacattcggccacggtgtggatgatctgtgtcccttt

SEQ ID NO: 155156 - DNA, 122 bp, Homo sapiens
gccgccgccctgacccggcctggagctgtggaaccgcccgcgcgacctccagttcccgcccgcccgtgcctggcgctccagacctgggatcctcccggcggctctgcccagctctgcccgcc

SEQ ID NO: 155157 - DNA, 122 bp, Homo sapiens
cgggtgctccccgcggggcctgtgagcgggccgccagggctgggctgggggtggcagcgccgaaccgggagcgcagcgcagggtccgggttcgctgggaggccggcggcggccgcgtggcca

SEQ ID NO: 155158 - DNA, 122 bp, Homo sapiens
cagaggctgcctagggcggggagatcctacttggattggggccgatcgtcaggaaggtgtcgcaatgtaaaattatgtccagttgtagatgtgtgtgttggggtttaactgtagggtgggca

SEQ ID NO: 155159 - DNA, 122 bp, Homo sapiens
catgcctcgtgccacatatgcctgttcccttctgtctctgggcctgttctcagtgccctccgtctccacttgctcaaatctggcccttcctgccatacccagctgcagtcatcttctagaaa

SEQ ID NO: 155160 - DNA, 122 bp, Homo sapiens
ggcagggtgtgtaaaggcagaagacacagacaaggctgccagcagatccacaccctgtggcgtgggcctgaggacgtgggaggagctgtgctgggaacagcagggagacccagggaggggag

SEQ ID NO: 155161 - DNA, 122 bp, Homo sapiens
tgtggccagcaggttctcatccatctggtgccagaccacgtcagcacagctcaggttaagcgaaggcttgcgccccacacgcaggttcagcttttccacgaactgttcctcctcgatggcat

SEQ ID NO: 155162 - DNA, 122 bp, Homo sapiens
atgagagcactgcaggaagaagaaaaagaagttcctgagtctcccctgagccaatagtcccgcagagcacaccttttctaagtggagaggaggaattttggtgtaaattgcctgatcagaaa

SEQ ID NO: 155163 - DNA, 122 bp, Homo sapiens
aaaagccatgctatttattttactatagagatggattctgacattgcttaaactggtctacgtaaaagattcctgtgattgtggtaaggggaacagtgtatatgagcagtcaacttctgttc

SEQ ID NO: 155164 - DNA, 122 bp, Homo sapiens
acggcatctacactcagagcacttcaaagccatttggggcttctcagatctttatgccttcgtggtcctctagaaaactatttaccagagataaactcccggggagaaattttgttaaatca

SEQ ID NO: 155165 - DNA, 122 bp, Homo sapiens
gtgttttctgtggcctcgcacgtgaacgcagcaggagcgcagcctgcgcaatcggacagacgccgcacagcgcttgtctgtgctcaccctctcggtcctgctcggagcttcccactgacctc

SEQ ID NO: 155166 - DNA, 122 bp, Homo sapiens
acgcaggcgactgaagacgatgggacccactgccctgcattcggtaagtcccgggtctaacggatgatccatatatttcaggtgaggagcaaaagaagggatccacctattcagttccaaaa

SEQ ID NO: 155167 - DNA, 122 bp, Homo sapiens
taaaatgcagatgtgttaacgtgagacaagtagacctggggttttcagggctttgaggtgcgaggacagcgttatgttagtggtggagttcctgtcctaacaggagtgcagtaaggcctcct

SEQ ID NO: 155168 - DNA, 122 bp, Homo sapiens
catctcgcggcctgtgttctaaacagaaacatccatagtgatctaggcagcacggggcaccgtgtccacgtccagagctctgcagagggcgaagctcttccctcctctggttccctccatcc

SEQ ID NO: 155169 - DNA, 122 bp, Homo sapiens
tgtatcgacggctccgacgagctcatgtgtggtgagccagcttctggcacggggaaggggcgtccgggctgggttcccccaggaacgtggagtttaggggaggagacgtgcctttccagcgg

SEQ ID NO: 155170 - DNA, 122 bp, Homo sapiens
ctactaaagacccatctcttccaggctagagtgctggcttacccactccaacatgagtctcgcacccctcacatctgggtgcatgctgccttcttttctcccctactcctgagtaataaaca

SEQ ID NO: 155171 - DNA, 122 bp, Homo sapiens
agtgcgctggcgggactgtgaggcttgaatgaggtgtgacacgcagctctaagcacggcacgcagtagtctccgctcactgcgggtctgtcatcaaaaacactatctccatcctgggaggca

SEQ ID NO: 155172 - DNA, 122 bp, Homo sapiens
gggcggcgggaggaggagaagacggcaggcggcggggagggggagcgggcgcggcggccccgccccactcgcttccccgggccggccctggccccggcccagccccgcacccgttcagtgcc

SEQ ID NO: 155173 - DNA, 122 bp, Homo sapiens
tgtatctgtaagaaataaaggactgtgttggagactgggtcaggcaagctcctgtaggatcgtcgttagggatacagctacttggacccaagagatttccagggcaacgtgctttgtcattc

SEQ ID NO: 155174 - DNA, 122 bp, Homo sapiens
tgtcactttcccgccctccttcagtagcattggttccctaggtgtcaatcttctttatggcgcccccagcagttgccagggcccaggtttgaggggcagataataatggacgtctcggggcg

SEQ ID NO: 155175 - DNA, 122 bp, Homo sapiens
gccacgtgactaagttagggccggtatccttctcccggcctcaggtgaggaaactgcctgcgccaggttctctgggccgcgcggagccggggctgacacagctgcggggctggggtttccga

SEQ ID NO: 155176 - DNA, 122 bp, Homo sapiens
tggaggtaatgagagccaaaaaaagtgctataaacctaatttggctagagcaagttcacacgacacgaccgtgctttaaaaacttgctctccattatgtacttccttccatcaggttgggga

SEQ ID NO: 155177 - DNA, 122 bp, Homo sapiens
ggtctcccttatgcttcgcccgggaggggggtctgccgataatctaaccccttctaggggcgcgtccgcagcggcgcggcccgcagcctgggcagggcccttccgcactcctttccgccgct

SEQ ID NO: 155178 - DNA, 122 bp, Homo sapiens
ccactagaaacagagaaatgagaactaaagtttattgaacattgacaatgtgccaggcaccgtgctaggaacttaacatcaattttcttgtataattgcccatcaggatgggttatccacat

SEQ ID NO: 155179 - DNA, 122 bp, Homo sapiens
cggcagccacggcggcaacgaacacctccgctgcgcggctgtcgggcccggctccatcaccgggctcacacaccccagggagcccaccgccgcctctccgcccccagccggcaccgcggaca

SEQ ID NO: 155180 - DNA, 122 bp, Homo sapiens
aatccttaagacggtctggcccaacactcctttgctcacagagaaaggggagaagactcccgagggtgaaaatggtacattcggagctggaactcagctcgctgaccccaagcagtgttccc

SEQ ID NO: 155181 - DNA, 122 bp, Homo sapiens
aaagcacagagtaggcaagtgctactagaatttcttttccatttttcttattgtttgtgccggacacctttatgataaaaaagcaatcaaaaaggatccttctagattgatgttctagctgc

SEQ ID NO: 155182 - DNA, 122 bp, Homo sapiens
ataaactggttccatctgaggcgactgggccagggcacagaagccttggccaaaggactgcgtgtgcctgcgaacaagcatgttcgcacctgcgagggagtccgtgtgtttgcgtgtgagcc

SEQ ID NO: 155183 - DNA, 122 bp, Homo sapiens
ccctgggcggaggtgaggggtggtctgaggagtgatgtggagttaaggcgccatcctcaccggtgactggtgcggcacctagcatgtttgacaggcggggactgcgaggcacgctgctcggg

SEQ ID NO: 155184 - DNA, 122 bp, Homo sapiens
gcaagtgctgttttgtccctttctagctttgtggcagccagtcccaactcctgtgtgcctcggttggcctttgggttggactcaacagcatgcaccacagaagatatccactggagagactg

SEQ ID NO: 155185 - DNA, 122 bp, Homo sapiens
aatggaaagagtgcagatttctgatcagctgcctggagagagagaactgtgacctaaatacgaattagtaacctgggctacatgacttattccttctgagcttcagcttcctcatctgtaaa

SEQ ID NO: 155186 - DNA, 122 bp, Homo sapiens
tacgccttctccaagtcccaagggcgcattatgaaggaattcccattaagtctggccagacgctttacagaggaattaacacaggataggaaactgaaaggagaaaaagagaaaagaccaga

SEQ ID NO: 155187 - DNA, 122 bp, Homo sapiens
gttttttttaatttcctgtttttacccgcctccagtcatgccttttattgaacctgccgtcgtcctgtgggggaaaaaaagtgggagcttctcctcctttttttccatttacctcagctctg

SEQ ID NO: 155188 - DNA, 122 bp, Homo sapiens
actgagagcatggcggctgactcctcagtctgacgatgttcctgcatcggctgcagtcggcgcagccctccaaagccctgcaccattcaggatttggcccatcccacagccatgagcggact

SEQ ID NO: 155189 - DNA, 122 bp, Homo sapiens
cgcggccccaggacagacctgcagctgaggggagcccgccctggacgcggcagggatgaccggcgtccgccccctcctgcaggatgacctgcccagcacctgctcccgccgtgcgccctccg

SEQ ID NO: 155190 - DNA, 122 bp, Homo sapiens
tggggtgagctaatcattctcattccttttgcttggtcacacagtgtgaaccacatcagacggtgaccattctgccccttctagaattcctgggaaggtcagaccacagtctcctttaatga

SEQ ID NO: 155191 - DNA, 122 bp, Homo sapiens
acgtgttttagagtaactgttcagcctcagcattaagtcagctttaggagaacagtaaatcgcccatttatctggagacttcagctgtttgaaaggccttccttctagtgcatcggtatctg

SEQ ID NO: 155192 - DNA, 122 bp, Homo sapiens
tcagccagtactgcttgcagccgagcctccagtccctgcagatactctttcttctttctccgggactggcaggctgactcccggttcttgatcattcgctgctgccgcttcagcagctttgc

SEQ ID NO: 155193 - DNA, 122 bp, Homo sapiens
ggtgcagcaaaccactatggcacatatatacctatgtaataaacctgcatgttcagcacacgtatgtatcccagaaaaagtaaaataaataaatatttcaaaaatttgccctactcctacgg

SEQ ID NO: 155194 - DNA, 122 bp, Homo sapiens
tccaatgaaggaggaggctgagaggtgcaccaatggctggatccaggcacacgcaggctccgagttcacagaagcagggccatcatgtcccggctgttgggagttcctgtgaatgttgcaac

SEQ ID NO: 155195 - DNA, 122 bp, Homo sapiens
gtggtcggccggcggcggcctcctgcacctcaccctcctgctgagcttggcggggctccgcgtagacctagatctttacctgctgctgccgccgcccaccctgctgcaggacgagctgctgt

SEQ ID NO: 155196 - DNA, 122 bp, Homo sapiens
cgccagggcgggtgaggcccagcaggacgccagctgggggctggagatgtgcatagggaccgggactaccaggagaaaggggctgcgggcacagtcagccacgcaggggggaccctcacctt

SEQ ID NO: 155197 - DNA, 122 bp, Homo sapiens
attcagcagaagtatttgtacggtcatgattctcaaaattttccagagttaagaatcgcacgggaatcttgtttaaaatataaattctgtggatgcattcccccaaattctgattatgtagc

SEQ ID NO: 155198 - DNA, 122 bp, Homo sapiens
ccgagactgttcctcacttcctgcctcactggccctggtgagggtgaggctccctgcccccggccctcaaaacagagctgcagatgaggacgccacccagctgcagtgtcaaggggctcctc

SEQ ID NO: 155199 - DNA, 122 bp, Homo sapiens
gtacaaagagctactccataaattacatcttgccaaggtgggagattgcatgggagactccggtgacaaacccttaaggcgcaataatagctatacttcctataccatggcaatatgtggca

SEQ ID NO: 155200 - DNA, 122 bp, Homo sapiens
gcagggtaggcttggctggctggggattgtggccgtgtccagaccaggctctcctctccccgtagctgtgcctgcgcggtcgctgctcctgcggtgctgcgctcgcctcgcggctgggtgga

SEQ ID NO: 155201 - DNA, 122 bp, Homo sapiens
gactgagccccggccggggggcctcagctcccaggactcacccacgctgctccgtttggccgtctgcatgaaagagcaccagctgccctttccggtcgtggccaatggccgtcctggctgat

SEQ ID NO: 155202 - DNA, 122 bp, Homo sapiens
attacaaagcttataataacacaggctgtagcaaattcttacaatacggaactttgcacacgcacacataaataaataaactacctatcccccttgtgacactgctggccgttagtttcttt

SEQ ID NO: 155203 - DNA, 122 bp, Homo sapiens
agaatatcaccgttggtaaaagatacccggcagagttatgcaaatagttcctcttttcaacgtcatatccggaaacgacgctcaacagattttgagtttgacccacattcgaacttttatca

SEQ ID NO: 155204 - DNA, 122 bp, Homo sapiens
ttctgagacagctgtctttgagctcttcagactggagctggagtggcctctccaggcctgcggagaacacctcccaggacccagcactcacctatcgaaggccttcacgcggcccaggagtt

SEQ ID NO: 155205 - DNA, 122 bp, Homo sapiens
gtccaaggtcctgtagaaggacacccacagcagctgctcgtgggaatccttggaggccagcgggtagtctcggttcttcttcaggtcggtgcaggcgataatggccaccagctcatcgagat

SEQ ID NO: 155206 - DNA, 122 bp, Homo sapiens
accttggttcccttgaagctgtagggaaaaggctggctgcgcgcacggggcgctgtccctcggcgcccgaaggtgtagagcactgattttgactgattttggaatccgaaagacttcctttt

SEQ ID NO: 155207 - DNA, 122 bp, Homo sapiens
agaagcaagtttacatgtcatctttattttttgctttagtcctctttgatacgcaacctacggctctctgagtccttgaaaaagaaccaactctggaacgggattataagtataactttgtt

SEQ ID NO: 155208 - DNA, 122 bp, Homo sapiens
ggctcttcagaccttaaacagtctaggctccgtccccagagtctagaatagagcctgccacgtaattggcactcaataaatgttacatgaattaatggaaaccatcctggcacgagtggtag

SEQ ID NO: 155209 - DNA, 122 bp, Homo sapiens
tgctgcgcatgctcatctacagaaacgccgcttggcctttggactacaccatctgtcgctcgctctaacgagccggcgttgccgccaggggacgctcgggccgcaggaggtcgctgggtcgt

SEQ ID NO: 155210 - DNA, 122 bp, Homo sapiens
ggaaggcggtaggtacctaccttcaggtatctttccggaaaagtcctggctggcgtcccccggcagccctcgggcccagcaggctggaatcgcacacaccctgccttccagctctgcctgct

SEQ ID NO: 155211 - DNA, 122 bp, Homo sapiens
agtgagccgcccgccttggcctcccaaagtgctgggattacaggtgtgagccaccatgcccggcccagaactaaaccttaaagaaaaagccattcttggtaatctagtgtctgttaggtcct

SEQ ID NO: 155212 - DNA, 122 bp, Homo sapiens
aatgcaaagcagggggcggggccgagggcccggggagggggctccaggcgatttcagagtcgcgagtcggggccgggatttcgcagggaaagcccagcggttgcagctgcggcggatccctc

SEQ ID NO: 155213 - DNA, 122 bp, Homo sapiens
ctgtttgtttttccttaacatcccaacatagaaaacacacactttgttttaaagtaacagcgaggaaccgcctcgctgtggtctttcgcttgcttggcattgcccctagggtgctcggagat

SEQ ID NO: 155214 - DNA, 122 bp, Homo sapiens
ggcattgcgcggccagcgacttgctctgcgcttgcttaaccgctgtcgtgcccagatcctcgggccttcgggtttctgattcttggttagtggggtccatttgcttgtgtatcctagttgtt

SEQ ID NO: 155215 - DNA, 122 bp, Homo sapiens
ctattatttatagcttcttttactttgcaaaccgcactggatagtaaattacttctggcacgcagccttgtcagcttgccaaatttcaactggagcaagtttctacagccaggctaatatgc

SEQ ID NO: 155216 - DNA, 122 bp, Homo sapiens
gctgcgccccgccccctgccccgccctggcggccggcccccgccgtattcctccgagccgcgggacgcgcgattctgccctggcgccctggcacccccgcacccgcttcaggtcgcccccgg

SEQ ID NO: 155217 - DNA, 122 bp, Homo sapiens
cgaaaaacaaaacacctgtcctcttggccccgggtgaggaattcagccccacagagcatccgggagtgctgagagagatctggtttcacaaatccactccgggcttccttcccggagtgtcc

SEQ ID NO: 155218 - DNA, 122 bp, Homo sapiens
gcgcccagcctgcaaaaacgtcccaacacagacagggcaggcccagtgccccaaggcaaacgcccaccaatggggtggccaggtgtggctgggaccaacggaggcagaagccgttctcttcc

SEQ ID NO: 155219 - DNA, 122 bp, Homo sapiens
attcagcaaggcaaggtggacctgagagtctgtgtttctggtgagccacaggtagcaccccggctgctggtccctggtctggggaaaggcaggcagagttggagagacccttcccgggttcc

SEQ ID NO: 155220 - DNA, 122 bp, Homo sapiens
ctgcaacctccctgcctcattctcctgtctcagcctgccgagtgcctgtgattgcaggcgcgcgccgccacgcctgactggttttcgtatttttttggtggagacggggtttcgctgtgttg

SEQ ID NO: 155221 - DNA, 122 bp, Homo sapiens
aagaaccaacctgctggcagccggtgaggacgctacagcatcttctctcctcacttgcctcgtgcggtggctgctactcctcctcctccgtctcctcccctcctcctccttggcagccacca

SEQ ID NO: 155222 - DNA, 122 bp, Homo sapiens
tcagtttggctgagcgctgaaagttctttatcctaagaaaccccttagtcctcgcaaactcggagaattggtcactatacaagctacctggaacacatgccattttatccaagtctcttaaa

SEQ ID NO: 155223 - DNA, 122 bp, Homo sapiens
cgcccgggaagcttcgccctctgctggcagacggcgggatccatcgggtgctgggaggaccgggaatcacagcaggctgaccagccataacagacagagtataaccccaaagagtcaatcgc

SEQ ID NO: 155224 - DNA, 122 bp, Homo sapiens
ctcacggaggccgcgtggctttcccagggctccaccccactggtgagtggtcagccaggacgtggctccccgtccctccggtgaccaggtgggcactggctcctgatggttcgaagccccgg

SEQ ID NO: 155225 - DNA, 122 bp, Homo sapiens
gcgggtgccggtaactgaacggatgcaaggcgatgtgcatgagcgcagacctgtgggggccggcggcgggtgtatccctggctcaaaggaaaaggcccgcgcgtagactcagggcacgaggt

SEQ ID NO: 155226 - DNA, 122 bp, Homo sapiens
ctgttgaaatgctcaagacttaattatttgccttttgaaatcactgtaaatgcccccatccggttcctcttcttcccaggtgtgccaaggaattaatcttggtttcactacaattaaaattc

SEQ ID NO: 155227 - DNA, 122 bp, Homo sapiens
cccttttgaaagccccggggtgctaaaggagcagaaggaaagcccggcttagcatccacacggccaccaaagctcggagggcagagactgccgggaggaactgatctgatgagaggatccat

SEQ ID NO: 155228 - DNA, 122 bp, Homo sapiens
attactcttttctacaatatgagtcctcctgatgcaaaagtttccaaaatgcaataaattcgttcatccatgcccagtttatacgactattattcattttaataattgctttatattacagt

SEQ ID NO: 155229 - DNA, 122 bp, Homo sapiens
tcctgggggctggcctgtgggaatgggcacaatagctctaccagtctccttgacacccttcgagatcgcaagcactccacggactcctggtgccttagttgagcaggatttagtgactcaat

SEQ ID NO: 155230 - DNA, 122 bp, Homo sapiens
cagactgctgtgctagcaatcagcgagactctgtgggcgtaggtccctccgagccaggtgcgggatataatctcatggtgcgccgttttttaagcccctcggaacagcgcagtattcgggtg

SEQ ID NO: 155231 - DNA, 122 bp, Homo sapiens
aaggatctgttagatcctggaatcccttcttgcatccatccctccctggtagctaggtcccgatatactcctgtcttgtgagattgtcgagatgagatgggggaccactcttcctctgtcct

SEQ ID NO: 155232 - DNA, 122 bp, Homo sapiens
aactcaaacctcacagaaaccctttgaggtcggtactattaacaatccccattttacatacgagtaaactgaagcatggatagactaaagtaaagtgcctgaggtcaactagtgaggaggcg

SEQ ID NO: 155233 - DNA, 122 bp, Homo sapiens
cagcctgtgctgagggtagcagtgtatgagctaccagcgtgcatgtcagcgaccctggcccgacaggccacgtcctgcaatcggcccggctgcctcttcgccctgtcgtgttctgtgttagt

SEQ ID NO: 155234 - DNA, 122 bp, Homo sapiens
tggccccgccccctccagcgctctccgcctagccccgcccccaggagatttccggcttctcggtactggcctagccgtaaagggctccgctccgcccctagagcaaccgtttcctcctcagt

SEQ ID NO: 155235 - DNA, 122 bp, Homo sapiens
ccaatagaaaacttaaggccgcaactaagtaacggatcgctgcgaaggccaaactagccacgccaacgcccccactggagcctccccagcgctccgcccccgctcgcgagaacagcggcgac

SEQ ID NO: 155236 - DNA, 122 bp, Homo sapiens
ttccccctcccctttacacttcctctgtggagcccacttgttgctcaggcaaggcgcatgcgcggcaggacgcccagattcctcccagccggcccctcctccgcgcctccgccctcccctcc

SEQ ID NO: 155237 - DNA, 122 bp, Homo sapiens
tgccagggcaaagagggctggttccgccactgagcagcctggccaaaggcttagcgcaggcgcaaattctgcggaccccagagccagagacccaggagtgtggcgtgtgggaagggtagggc

SEQ ID NO: 155238 - DNA, 122 bp, Homo sapiens
cagggagagtgctttttaggtgcaaatatcggcaccccatactgtctcaggacaaagaggcggaaacctgtgctgcgcctcgcggctgagggtttccaacacccgaggaagaggatggggtg

SEQ ID NO: 155239 - DNA, 122 bp, Homo sapiens
ggcccatccttggtcccagctgtctgacaactaattctcaggaaggggctgtcttaggtccggttccctagagacagacagagtgcaagataggaattgagcaggaagctctggagtgtgag

SEQ ID NO: 155240 - DNA, 122 bp, Homo sapiens
acttacatatgtatgtacatatatatatataatgttttacatcctaaacagtctacttcacgtcttcaccaaatgtgcagcagcgtgattcacaggttcaccactggaaaatagaccttaaa

SEQ ID NO: 155241 - DNA, 122 bp, Homo sapiens
tccccaaagaacagtctttacattcaaactgggacatcaaagttatgctaataagaggttcgaccaccaagccagctggtctgtactttaacttagtatttgaatttcaatcctaaaataca

SEQ ID NO: 155242 - DNA, 122 bp, Homo sapiens
ttaatttcggggtctaaacacacgccccttgacgagaacctagagggatggagaatatttcgttatgcttcgtaataaacttccccaaaggagactccgggtccgccccgtcaagttcagga

SEQ ID NO: 155243 - DNA, 122 bp, Homo sapiens
gctgaagggatctctgccaccatgggtggtggggcaactgagggaggccgggggatgaatcggcgaaacttacgtaggttgggggcataacagctgcccttcacgggcacctccccgggccc

SEQ ID NO: 155244 - DNA, 122 bp, Homo sapiens
acccctgtccacatgagccagccagggttgagctagtgcttgccacacccaaaaagacaccgacatttggattgctggctcctcactatattttgaacaattctgccatagatcaagggacc

SEQ ID NO: 155245 - DNA, 122 bp, Homo sapiens
gctagtgctctcctttggtgcagaaccaccgcatccactttctcaggcccaggggaggggcggggcggggcgatttcgccttgccgcagagccagtctgcgcctgcgcggactgcggcagag

SEQ ID NO: 155246 - DNA, 122 bp, Homo sapiens
tccgttccgccgctacttcaggccgggtcatgctaacggaagtgcttcctttttacagtccgggtggacccaaagctccgtggcggtgctgaactttagggcagccactagccacggactta

SEQ ID NO: 155247 - DNA, 122 bp, Homo sapiens
acataggaacattgttctgtcatgaaacagacaaccgactggccctctgcccatgttccccgggaatgagggtgcattcagcctcagtggcagttttgtaaaagttcttgaacacaaaagag

SEQ ID NO: 155248 - DNA, 122 bp, Homo sapiens
tagctgggattacaggcgcccaccacgtccagcttatttttgtaattttagtagagacagcgtttcaccacgttgcccaggctgctctcgaactgacctcagttgatccgcccacctcggcc

SEQ ID NO: 155249 - DNA, 122 bp, Homo sapiens
tgcgattgattattacctccggtgagagtaattgcctgcagggaaggatgatgccagccccggatccgggctgctctctggaggacagtttctgtaccacaccagggccttgcttcagggcc

SEQ ID NO: 155250 - DNA, 122 bp, Homo sapiens
ccccagcggagggcatgggggtgggccgccccaacaggtacgtgcctccatgcaaggcaccgctgagccatcccctcctgctctgctgcgtcgcccccatccacccctgccccagcatccct

SEQ ID NO: 155251 - DNA, 122 bp, Homo sapiens
ccactggttagtggagcgttccagactctcctcgtcctgttcctatccactcactccaggcgactttccatgctgtgctgccggctcctgcagccacatctccaacctggacctcattccag

SEQ ID NO: 155252 - DNA, 122 bp, Homo sapiens
ccctttggggcgtctcccatcgggaaatggcagcccctgacctgccccgtggggatgaaacgggctctttgcggggggcctgtggggtatgggcctcctgtcagcagcccgtcccggtgggt

SEQ ID NO: 155253 - DNA, 122 bp, Homo sapiens
cccacaccccctcggagctcgcccgctccctcgctcgcgctctccttccaaagaactctccggtcctagagagccacgaatcaacaccgcggcgcattctatataaacggcaaggtgtgggc

SEQ ID NO: 155254 - DNA, 122 bp, Homo sapiens
actggttttaagtgtagttgccgacgcaatggcagcctttgcagtggaacctcaggggcccgcgttaggtgagtgaaatattgcttttccttgctggcactgccatccatgctctgggcctg

SEQ ID NO: 155255 - DNA, 122 bp, Homo sapiens
gaaggacgccagggggagcaagaacctacactctccagatatcgcgagaggtcccgcgctcgccacgacactgagtgttctgttttgggcggaagcgctggacgagaggaggaattactcta

SEQ ID NO: 155256 - DNA, 122 bp, Homo sapiens
gccgagcgcaggccccgccccgcgcgttcccaatggccggcgccgttcacccggccggagcgcccaggcctgcagccccctattggcccgcggaggtccccaccctcagcgcggccccgccc

SEQ ID NO: 155257 - DNA, 122 bp, Homo sapiens
ggtttgggcggcgccggaggcctagcgggactcaccttcccctggatggacagcggccgccgctttgccaaggaccggctcacgggtgaggttgtctgacccctccagcgtcacgcccgact

SEQ ID NO: 155258 - DNA, 122 bp, Homo sapiens
gctgggcaaatggaataaacagcacagatggtgacaattatatgccgtcacggtgaggaccgaagaggtgtcacatgtggtttgttttttatctgatgcttaaacaagttcctaaaagtaat

SEQ ID NO: 155259 - DNA, 122 bp, Homo sapiens
ggattctggggtgctcagtccacgcagactgacatggagctgtggcgcaagcccccgagacgtttaggaatcccttacaccccagttcccacctggcttagtattctacataaaattaccag

SEQ ID NO: 155260 - DNA, 122 bp, Homo sapiens
agctgaagacgttttcttctttgaaagcacaggaaccacagccctgtggattttgcgagtcgcggggctcccggagccgctgggagggcagccgtgtgagatgcggggctgcgagcgtggaa

SEQ ID NO: 155261 - DNA, 122 bp, Homo sapiens
cgctgccacacggaaaggccacctacaggtgtcctgatgcacgggaggtcccggccaacacgaaccagtagccaggagagtgaggggaccttcggatgattccagcttccagccttgaggag

SEQ ID NO: 155262 - DNA, 122 bp, Homo sapiens
ggccaagtgcgttgtttcaggtcccctgcctgggatccctgcactttgcaaagttagctgcgcggctgcagaggtccgagatccttccggccttagtacctgacccacggtccggcaccccc

SEQ ID NO: 155263 - DNA, 122 bp, Homo sapiens
ccctcggagcctgaggggattcgggagggaggagtcgccgtggggcggggcggggcggggcgggggagggctcccaaggccccgaggacagtcccaccctcaccgacaggaccgtccctgcg

SEQ ID NO: 155264 - DNA, 122 bp, Homo sapiens
gtgcccgcgtccccgaggcaaccgactgcgccgcccccaccctcgcgcggccgggcgggacgtgcctccagatcagggcctccggaccctggccccgcgtcgccgctcttgcccgctgctgc

SEQ ID NO: 155265 - DNA, 122 bp, Homo sapiens
ccaccccatctccctggactccccaaatgtcactctacacatagcattaagagtgcttgccgaaggcagatcacgaggtcaagagagcgagactatcctggccaacatggtgaaaccccgtc

SEQ ID NO: 155266 - DNA, 122 bp, Homo sapiens
tctgaggatgtatgctggccctgaaggccagcgtggggaacaagagccgaatggccatgccgggtgggagacgtgtgtgctgttcacggcacacctcggctgcctgccttctccctgactgt

SEQ ID NO: 155267 - DNA, 122 bp, Homo sapiens
gggcctggtcccattctgaaaaagtgggaacaccctgccttctcttcaggcgtttgcaagcggcgtccagggtagtgccttctgtaagaaggaaaaaacaaaaagttttagccttgtttagt

SEQ ID NO: 155268 - DNA, 122 bp, Homo sapiens
ggctccatctccaatacaatcacattggggattacgactttgatgatgaattggggtgggcggcaaacatttagtctgtagcacttattaatacaaaggcttttgaatattttcaccaagtc

SEQ ID NO: 155269 - DNA, 122 bp, Homo sapiens
agtcagctctaccccagtgattaatgtattctgtacacagtagcacccatggtacaggaacgccccttcttcggtcacctagtaacttttcactagtcaacaccaaactgaataaccactat

SEQ ID NO: 155270 - DNA, 122 bp, Homo sapiens
gggaactctccacaccagctgcatccggtcggccgattcacagaccttgcgccctgcccacgacttcaggaaaaaatggaaaagggggtacttaaactccagtttctaaaaatgatgcccag

SEQ ID NO: 155271 - DNA, 122 bp, Homo sapiens
cctcttacagaccccttgtcacactctatgacctcctcagttggtgtggtctttgtttcccgctcttattttaaaataactcagctggcatagcattgaagcccagccaagtttttaattta

SEQ ID NO: 155272 - DNA, 122 bp, Homo sapiens
aggaccctctcctgtcatgaaagctgctgcctgggaacctgttgggttccttggtgttcccgggagccccatgaactgtggtggaggcggaggtgaaacctagcatggcaccagctcccagc

SEQ ID NO: 155273 - DNA, 122 bp, Homo sapiens
cctcccactgctcttaggcaaagagccagcaacagggcccctggacgattcttgcaaagacgtacgcagtcaaggcgtaggaacagccagggctgacttttgctgctgactacacccagggg

SEQ ID NO: 155274 - DNA, 122 bp, Homo sapiens
catcacggctcggcagggctctctgggttctcagtgccctcctaggtctgcaatgcagtgcgggagaggaggaatatgggcttgtgggggcaggggcagcgcccggactcctcccggggcag

SEQ ID NO: 155275 - DNA, 122 bp, Homo sapiens
gcacacaaagcaaagatttcactgcccgctagtttaaaaatgaatattttaccaagatatcgatcagcgttataaaattcagttaagtacaatgggatcctggcaaaaaaaaaaaaaaaaga

SEQ ID NO: 155276 - DNA, 122 bp, Homo sapiens
ccccagctcaccgcctccccactccagcatggccgcctccaccatgtccatctgctccagcgcctgcactgactcttggcgggtagtcgactgcccagagagctgctgcgagccctgctgct

SEQ ID NO: 155277 - DNA, 122 bp, Homo sapiens
agaagaacttctccagggcgctggcacagcggcagtactcgctgtccggggggttgtactcgcgacagttggcgatgacccgctgcaggtcggccacaaagagcttccgggtcacgtagtag

SEQ ID NO: 155278 - DNA, 122 bp, Homo sapiens
gcagcgtatcgataagcacatgcacacaacgccctggagtactcgccctgcagtacttgccgtgcagagtatcgatgagcacatgcacacaacaccctggagtactcaccctgtggagtatc

SEQ ID NO: 155279 - DNA, 122 bp, Homo sapiens
gcttgttaaactacagactctctggccctttctatgaagacctgctagggccttgggggtcggacctgagaaatcggcataacaggtgcttctgtaacccctctcagtgaagtgggaacccc

SEQ ID NO: 155280 - DNA, 122 bp, Homo sapiens
cggcaggtgcatgggaagaaactgcggaatgaaacaaccgcgagctaagagatggggcagcgggagaaatgaattcgagttccgcctcctaccaggaagaaccggctcgggccggagggctg

SEQ ID NO: 155281 - DNA, 122 bp, Homo sapiens
gtgtggcggcgcctttgttccaaaccttggcctgtggttgggggtcctgcggctgggacccgcccctgacccctccctgcccagaggggctgtctttgggtgcagaaggagctggtggggtc

SEQ ID NO: 155282 - DNA, 122 bp, Homo sapiens
ctaattcctgcttcttggcggtcaggcgggcccggagctcctcagcctcggcacacagctcggtttctgcctggagctgctcctgcagctgcaatttctctgccatgagctgcaaacaacaa

SEQ ID NO: 155283 - DNA, 122 bp, Homo sapiens
ttctgaaacttgtgtgctggcggcctgccacgtgctgactggctgagtggcagctgcttgcgctgtgcggactagctggtgagcacgttggcagttggcatgggctctgggggtgggaactt

SEQ ID NO: 155284 - DNA, 122 bp, Homo sapiens
gccatatcagacccagccgggcgggtctgggaggccgggggccaacaatgggctcccgcacgcctgtttcatgtaaatccggggccccagccctgcgagccccggcccagcccctacacccc

SEQ ID NO: 155285 - DNA, 122 bp, Homo sapiens
aactgccttaggaggcatccaggtgagcacgcgggcgggagccattctcaccgctggctgcggtagtctgcagggcttgggatcctgcggggctgtgcctgctccctgcagccgccgtggtc

SEQ ID NO: 155286 - DNA, 122 bp, Homo sapiens
tgcagtgggcatgggggaggggctgggacgtcccacctcctcccacctcgatggaaaccacgagtctgtgccagcccagccgactgtcggggggtttggcagcctcctttcccatggtggta

SEQ ID NO: 155287 - DNA, 122 bp, Homo sapiens
tctcgggcacgcgcgcgcagaacgcctgcctccggcgatgcacatgcgtacaccgccgcccgacgcgcatgcgtacaccgccgtccaacgctcctgccagctccgctcctctagtccaagtc

SEQ ID NO: 155288 - DNA, 122 bp, Homo sapiens
gctgctaccagcagcacctctgaacaggctcttactaaatgccaggcatccttctgtgtgcgtacccccatgagacaccaacatcctatgagaaccatcagtcccactatacaggtaaacga

SEQ ID NO: 155289 - DNA, 122 bp, Homo sapiens
gtgagaaaggaattcagacaacagggatcaagtcttaaacatgtcacctgggaaaacaaccgaagggccccttcagagagagctttctttctgggactcaggcagagttgtcacacttgttt

SEQ ID NO: 155290 - DNA, 122 bp, Homo sapiens
tccagagtctccacctggattcttcgcaagactttctgagacctagcaggacctgagctgcggctatgactctggcaaaaggagtctggtcttgccggaacgggcgggggttgggggtgtgg

SEQ ID NO: 155291 - DNA, 122 bp, Homo sapiens
gcagaacctcaggtttcacttactaacaggagctgtaaaggtcttgggtgccttaaatcacgctgtggctccagccactccacaggaattttttttttttttttttttttttgagacagggt

SEQ ID NO: 155292 - DNA, 122 bp, Homo sapiens
aaagggcacctaagcgtgaacagagccggtgcctgcaaaacctccaggaagagctgggtgcgagtgggcgtttgatacacgctgctggctgtcaataccgtgtgatccacactggatgttga

SEQ ID NO: 155293 - DNA, 122 bp, Homo sapiens
tgcttgaaagagctctgaaagattattctctgtcagtgagcccagagaaacagaaaacaacgagccagagctggggcttcctgagaagtttgggccccccgcccccgctacatgctcacctg

SEQ ID NO: 155294 - DNA, 122 bp, Homo sapiens
accatatggtgttggggaacaggtgtgcgggtaatgaagagcccagctccaattaagcgtcggggaacccggccggattcccactgaatcttgcgcttgggttgaggcccacttacaaatga

SEQ ID NO: 155295 - DNA, 122 bp, Homo sapiens
ggttggttcaattagtgggtcagaacatgaattctgaataaacactgcccctgagcccaccgcttcctaatgattgtaatgaagcccatctgctctgtgctctggagtccactgagcatgta

SEQ ID NO: 155296 - DNA, 122 bp, Homo sapiens
gcagcctgggaagtccaaaaggctcccaaaataacctgcagtctgctgggtatttcccaccgttgactcattcataagtgcactggaaggagagttacgactgtgggtgcatttccctgcgt

SEQ ID NO: 155297 - DNA, 122 bp, Homo sapiens
aaaggctggagcgcagacagggcaaatgaactcatgtgagcccttctgcaatcactgttacggctttgtatttattcatcttgcaccgcacttaaatgtgcaataaaaagcaaaaagtgtgc

SEQ ID NO: 155298 - DNA, 122 bp, Homo sapiens
gccggccccacgtccactgcagagcctctgccggccccacgtccactacagcgcctctgccggccccacgtccactccagcgcctctgccggccccacgtccactccagcgcctctgccggc

SEQ ID NO: 155299 - DNA, 122 bp, Homo sapiens
gggatggcttcactgaacacggagtctggaattccgtgcacactcatgtgaccggtgttccggaaaaagaagcaggaggcggctgggcgcggtggctcacgcctgtaatcccagcactttga

SEQ ID NO: 155300 - DNA, 122 bp, Homo sapiens
gtcggattccgcggtgccagcccttccccatggccgaccctgagaagttgcaggtttcttcgccgcccccgccgcctccttctccctcctcttcagacgcctctgcagcatcttaccctggc

SEQ ID NO: 155301 - DNA, 122 bp, Homo sapiens
aaggagagaggatctttacaggtgcctgtagtggtggttactactatctttcagagtcatcgcttccttaacggcaaagtaatttaaaatacccttagcgctagaaatgaagtccatgtacg

SEQ ID NO: 155302 - DNA, 122 bp, Homo sapiens
agtcttgctctgtggcccaggctggagtgcagtggcaggatctctgctcactgcaagctccgcctcccgggttcaggccattctcctgcctgagcctcccgagctgctgggactacaggcac

SEQ ID NO: 155303 - DNA, 122 bp, Homo sapiens
cgctctgtttcctgtggtctttctgggatgggtagcagctgcaggacgaagctgacgtgacgttatgtttgttgcttcttcagcatgagccaactagatggagcaatctgacacaaaaccca

SEQ ID NO: 155304 - DNA, 122 bp, Homo sapiens
ggcaccttggactgcagtgggcggggcctggggtggggatgagggtgcactgaccagcaccgcagcagcttggggaggttggggtgctgttaacatgccatcttataggtcggaagtggaaa

SEQ ID NO: 155305 - DNA, 122 bp, Homo sapiens
tcggtcaaagaacagcggacgaggggctcacaggaaccagttcacaagttttggtacttgcgctgcatccccaccagcagaagtgccgatatggttaggatatttgtccccacccaaatctc

SEQ ID NO: 155306 - DNA, 122 bp, Homo sapiens
gatgtcggcccttcccccgtgctatgtttagaaaggtgtcagccccaaagtggcccgtctcggcggtcacccagaaggtaatcacgagtgtctctaaaaccccatctgtgacctttctgcac

SEQ ID NO: 155307 - DNA, 122 bp, Homo sapiens
aaaccctttcctcggaaattctcagcgcaaagactttgccctattccaaaatggctccggcgcctacaacttaagcatagcgcaggtccggaagttacgcaaccccataaggtagcacgccg

SEQ ID NO: 155308 - DNA, 122 bp, Homo sapiens
agactctgtctcaaacaaacaaaaaaacaaatcagcaaacactacaaaccaagacttcctcgccaccaaccctcagagccacttgtttaacatttcagcccaccactgaatgacacattgaa

SEQ ID NO: 155309 - DNA, 122 bp, Homo sapiens
ggcagggaaacgcgctctctgggacaggtgccaactccgagacaaaagacataaaataggcggcaacgggggaagcgcggccggcgcgctcgggcggggacggcggcgccgcgggggccgca

SEQ ID NO: 155310 - DNA, 122 bp, Homo sapiens
aaataagccactggccagtctcacaactcaggaatgtttcctcaaggagttgggagtcatcgctttgaaatgttatcatttaagaagataacgcaccacctgatgccactcccatcttttag

SEQ ID NO: 155311 - DNA, 122 bp, Homo sapiens
cagacaccaggaaccctccggtcccactggccacgtgctcagggctgggtaatttcctcccgctcaagggtaggaacatacctgcgcttaaaactgaggctgccgcacctccgcagacgtag

SEQ ID NO: 155312 - DNA, 122 bp, Homo sapiens
tcagcagaaagttcgttgcactgaaattatcactctggctcattcagctcaaagactcttcgctgctcaaacacatagctgtgtgggccatggaaatacatgctgcaggaaacagcctctga

SEQ ID NO: 155313 - DNA, 122 bp, Homo sapiens
ctcctatcagtcattcctacccgattccagatactgtattttaataaggaaagttagggacgttttaataaaagtagaaggaagagttatgacaacagatgtccactgcagtctggctttgt

SEQ ID NO: 155314 - DNA, 122 bp, Homo sapiens
gtgaacagtttacccatggaaatggggctccagcacaaagctgctcacatcttccagtcacgctccagggaacagccagggcttgtgggcccagatgaggctttagtggttggagaaggagc

SEQ ID NO: 155315 - DNA, 122 bp, Homo sapiens
ggcccccgctcacttgaggtagctgggatgggagaggagggtctgaggaaggggcacgtccggctccatgatggaaatctcgaccacccgcgtgaccagcagttcaggctggaagacgtagg

SEQ ID NO: 155316 - DNA, 122 bp, Homo sapiens
agacgtccgtcccagccaagcccggagcagcccccggtctgccgtcccctcagccgcccccgagccaagcgggccctgagctctgtcccggccgcacgctctttatgaagccccagggcccg

SEQ ID NO: 155317 - DNA, 122 bp, Homo sapiens
attgcacctgatacagacctgttcctttggagggccttgggacacatggagggggtccatcgcagacaggaccaccgggaggtggagaggctaagatgctagcaaagggcagacctgtaaga

SEQ ID NO: 155318 - DNA, 122 bp, Homo sapiens
cggaaaggagggggcggggcgggattggcgagcagcgtggtgttggtgggggggcagtcccgcctccagccccagttagatgccaacccgcccgcagcctcttaaaatagagaaaccgcctc

SEQ ID NO: 155319 - DNA, 122 bp, Homo sapiens
agacagaactggagtgaaattgcaaagcagggtggttttggtctctgcagaggccatttgcgactcactcaccaactccggtgtcagggtgctggtgggtgacagggaagaggttgagcaag

SEQ ID NO: 155320 - DNA, 122 bp, Homo sapiens
aaagctctaactcctgctctgctgtcaaagccttacttcccacgaagagtaggggccaggcgggccaactgtaagggggaagcggcccggggtgaggtaagaggaccctcctaggtgccgct

SEQ ID NO: 155321 - DNA, 122 bp, Homo sapiens
ccactgtccactttggatttctgcgctggggaacatcagcagcattttgtcaaaagcccacggaggcccacgctgcgcgcctcgccggtaacagtcactctcccgtttaaaaacagagcgcc

SEQ ID NO: 155322 - DNA, 122 bp, Homo sapiens
tcgccccagcgattcgggagaagcagtgggaactctgagctccccgaatcgagcccgctgcgcctggcatctcccttcccttccccttgacaaacgacccaacctcaatcatccctgctcct

SEQ ID NO: 155323 - DNA, 122 bp, Homo sapiens
tggaggtgaggacaatcgccaaggagggagaaggaaaaggaggaccctggttaatctgcacgccaagggtggagtcgctcagtcattcattcaacaaacatctattcagtgcctactcagtg

SEQ ID NO: 155324 - DNA, 122 bp, Homo sapiens
atccacgtgcgcgggaattggctggcggaagctcctgcccccaggcagtcctgggtcacgcgcacttgtagtagcttgcatttaccaagacagtgagacagtggcctggcgcggtgtctcat

SEQ ID NO: 155325 - DNA, 122 bp, Homo sapiens
cttcttacgcgcgtctggaggccaaggttagagcagcacagcgaggcatgtagctacaggcgcctctgcatttccgtgtatttgttggctttttactgctgacaggtggaacacacggaagg

SEQ ID NO: 155326 - DNA, 122 bp, Homo sapiens
ggtgacctctgcaccgcccacaggacacctgtctctgctgcgtggtggtgacctctgcaccgcccacaggatgcctgtctctgctgcatggtggtgacctctgcactgcccgtggggacgcc

SEQ ID NO: 155327 - DNA, 122 bp, Homo sapiens
gccgcaggaaccgtggagttggaaagtgggggcgccgcggctggggggctgcttcagctgcgcctcggccagcgatcggcgggccgggctcaaatccagccaggctgggcaggcggtggccg

SEQ ID NO: 155328 - DNA, 122 bp, Homo sapiens
aaaataaaaaacggtaacaaatttacagcttggcaggccccagggaggagctgacctttgcgaagctctagcgcagccaggtttcagctgtaggggttgggacaggtcagttcgcccaagtg

SEQ ID NO: 155329 - DNA, 122 bp, Homo sapiens
tggacggtgagcggcgtctgggcccagagctgggtgccatcagcagtaagaggacccctgcgctcgcggggtgcccgccttaccccgcggggaggggtcaggcctaggggccacggcccgct

SEQ ID NO: 155330 - DNA, 122 bp, Homo sapiens
cttgttgcagcagccctagcaaactaatacaataaccaaaaagtaatcagtaaaaaacatcgtgtactctaaattttgccactcaaagtgtgatccccaggccaacagttttggtgccacct

SEQ ID NO: 155331 - DNA, 122 bp, Homo sapiens
cgcttgcctaccctctttttctccaacccagcagctgagctctgggcgcagcctggagcgcgtgagcacgcagcccggccccccgcacgagcacacacacacacacacacacacacacacac

SEQ ID NO: 155332 - DNA, 122 bp, Homo sapiens
tctgcaggggagaagagagaagggttacacgggagccttccctcttccacatttcccacccggccagccccatcccagcagtggccctggctcgatgtcatgaccctgcctgcagtgcctgc

SEQ ID NO: 155333 - DNA, 122 bp, Homo sapiens
ccttaataattgcggttatttcctgtttctattacttcttaacctgcaatagcatgcatgcgcacacatatacacacacacacacagaatagcaattttatacatgcgcttacatgtatgtg

SEQ ID NO: 155334 - DNA, 122 bp, Homo sapiens
tcgggggcggggtaggccggcagagctcagctcgcgccgtgggtccacatgtttttatttcgtgaccctgaccgcgtcccggccataacttcctctgcgttacaacggggataataatcccc

SEQ ID NO: 155335 - DNA, 122 bp, Homo sapiens
aagagccattgatagttttgcccaacttttctgcacaagatagccctttttaatgtcagacggtttcaaggcatctcccatgattgcttttacccactgattgagaaaaattcataatgata

SEQ ID NO: 155336 - DNA, 122 bp, Homo sapiens
agttcctaagggcacagatgccatgtcggggcgtggaggtttctgactagaggcagagcccgagtagaaacaggtctgaacggatggaactgcaggctgggccccggggtgggatttggaac

SEQ ID NO: 155337 - DNA, 122 bp, Homo sapiens
ccaggcgcgccaaggaaagtgctacaaaagccatccatcttgcaagcgttggtgccgaggcgcaacgctgagaacgcaaatactaaagggcgctgttctttcctcgtggagctcacagtccg

SEQ ID NO: 155338 - DNA, 122 bp, Homo sapiens
ctctgtgacccacaccctgttcgtgcactccctcctctttgaaaattgctaataaaaactcgctggttttacggctcagggggcatcacggaacctgcggacatgtgatgtctcccctggac

SEQ ID NO: 155339 - DNA, 122 bp, Homo sapiens
agctcagaggaagaggaatcactgaagtctcagagaagtctccactcatcccttcctcaccgtcacatcagccttttctttccttctagaagtcatcactgactcaaggatataagtttgat

SEQ ID NO: 155340 - DNA, 122 bp, Homo sapiens
tgcagagagagagggaagaagaaagcgagttatggattgctggagggactgcaagcaattcgtcaaactgtgcaagtgatttccttcagagccagcatatggcagattgattttgtccaacg

SEQ ID NO: 155341 - DNA, 122 bp, Homo sapiens
tcctgcagccgcccatacgtcaggaagtcggccacgtctgcgccgttgtccacaaagaggcgcacaaactcgggcttgttgctgaccagggcgtccaccatcacctcctccaggtcacagga

SEQ ID NO: 155342 - DNA, 122 bp, Homo sapiens
tggtgtgcattttaattttaacacaccagaagatatgctatgtgaacctagtaagcttaccgcaactgcaatgttccaaagttaagagacaataatttcaacaaaaacaaggaaaaggaggt

SEQ ID NO: 155343 - DNA, 122 bp, Homo sapiens
gttgtgtgggcaggccgtctcttatctcaacattctggattcccgagctccccctctacccggcccacctacctggcggccttcacaggcctttaatgccttctccaactcgtgccggatac

SEQ ID NO: 155344 - DNA, 122 bp, Homo sapiens
cacgacacacacacgagcgcgcgcacacacacacacacacacacacacgcacacacacaccgagaagtggaatgcataggagcaacaataggaacctggctaagaatctttttaagattttt

SEQ ID NO: 155345 - DNA, 122 bp, Homo sapiens
attcctctacatttaacaatgtgtggtttgttgccatattgctgcaaataatgtactgatcggagtcagattttatggaacttaaacagcttccctgcagtagccttccccaggaaagtcat

SEQ ID NO: 155346 - DNA, 122 bp, Homo sapiens
ccagggtccaggacagccgctgacgccagatcccccataagtaacatctaccctcagggacgtgtctgcaccagtgagactgctgctctggattcgggagtgagcgcatacttcattctctt

SEQ ID NO: 155347 - DNA, 122 bp, Homo sapiens
cgcgtctgtgccttttatctccctgtgcagggactgggcgaccctccgttctgttgctgccggtgaggcgggagagcgccggggccgacacgcgccgtgagtatgtgcgggcagcgctcttc

SEQ ID NO: 155348 - DNA, 122 bp, Homo sapiens
acgtagtagaccaccaggtagtagccggccgagttgaagacccaccagagggaccacaggcgcagctgcggccgccgcaggctgtcccccagctcccgcagcatccgcgccagcactgagtc

SEQ ID NO: 155349 - DNA, 122 bp, Homo sapiens
cccgtctatttgtctgtgcacattcctgggctcagacggtggcttccgaggccggaacttcggagtcacctgctccgcacttgagtctggaacgtctcagaccggacccctccctttacagc

SEQ ID NO: 155350 - DNA, 122 bp, Homo sapiens
gtcatggcatggaattagtcttcttcaacttctatgtttggctcccagtttccagtacgacgaggaaaaccacctccttctatcactcagcccccaacttgagtggggagatgaagctgtgt

SEQ ID NO: 155351 - DNA, 122 bp, Homo sapiens
ttcttgatttctgccgaggcccaccgcctggctttgacgacacacatctttctgcattggcgggagtctccccatagcagatgagccacggtggctttcggtagggctgatacatgctttgg

SEQ ID NO: 155352 - DNA, 122 bp, Homo sapiens
gctgacagggcagccagcacttattctccctaattgtctcatttgcagttgtgggtgccacgcctggccccgagtgtgttggggaaggtaaagaacctccactttggtcttctcagttccct

SEQ ID NO: 155353 - DNA, 122 bp, Homo sapiens
aagccggaagactatagcttcccggcatgcagcacgcttccccctattagatttgaggcgcggccggcgcgttgcccactgggagttgtagtcagtggcgcgttgccctgacgcctgccggg

SEQ ID NO: 155354 - DNA, 122 bp, Homo sapiens
gtctagacaaatcggctctggccaggcagcgggcaaggtgaactgttgggtagttacgctcgcaggaacggaatcacgcaatacctgttttgtgtctggcttactttactaggcatagtatc

SEQ ID NO: 155355 - DNA, 122 bp, Homo sapiens
tcacagccagggggaccacctaaaacatgattgtaagtgacgctccctcatgcccctgcacgaataatcatgtaagattctcataaagagggtcccccagcaccagctgctgctggctcgtt

SEQ ID NO: 155356 - DNA, 122 bp, Homo sapiens
gccaggcgctgtggaggctgccgggagccgtagttcggcttccctcggccaagccgatgccgggaggagggttcggcccctacctgactctcctcaggacccgccctccgaccttccctttc

SEQ ID NO: 155357 - DNA, 122 bp, Homo sapiens
gtggacatgcctttggtaagctgaccagagtcctcctggcgttcctccacctggacacaccgcagacgcaccctgtccggtgtgagcagtacccgttcctcagccgtggagccccttcctcc

SEQ ID NO: 155358 - DNA, 122 bp, Homo sapiens
aacccctttcctctctgctctcccctcaaaacaagtttcaggatcttgcaggcctcgcggcgtcgttcttcgttgtggcggcctgtggctctttgaaaaacacgacgaggcctgcaaaatgc

SEQ ID NO: 155359 - DNA, 122 bp, Homo sapiens
gtgtgacgcacacccacctttttggcctggttgatgatgtagctggtccagatccagttgcgcttgaggtgtccgtagaagctggaatcgagccctgcggcacccagcccatctccagggat

SEQ ID NO: 155360 - DNA, 122 bp, Homo sapiens
ggcgacacctataggattgcttccgggcactcctcagccaggaggtgctggcctggggcccggagctcggcagggccgggcggctccgcggcgttggcccagaggacgcgcgcccccgcccg

SEQ ID NO: 155361 - DNA, 122 bp, Homo sapiens
ggcagtgatcaggctgccccgccatggacacctaagtatacatacctgtatccctaagctcgacttcatcacaaagaattggtcaaccagctttttgtgaaggggtctcatatcttgaggta

SEQ ID NO: 155362 - DNA, 122 bp, Homo sapiens
gaagggccaaggtgagggctgagggaccgtcactcaccatccttgtcgcagataaccactcgggccccgctgttcactgagaataggaagggaacaggttactctccgagccttggttaaag

SEQ ID NO: 155363 - DNA, 122 bp, Homo sapiens
taagtggctgctggagcgtctcgggggacagccagtgtctgcggcgccgagagggccgttcgtggactcaaatgggtatcacccctaccgtttatagtcctcccaatagtctgcatctcgtt

SEQ ID NO: 155364 - DNA, 122 bp, Homo sapiens
ttccgagacttacccttccataagactgttttcagcaatctagaggctccgtagtgcagacgcagccctgcaactttgctgtgcactgagacctttccgagtttaaaccaagcgaaaggtga

SEQ ID NO: 155365 - DNA, 122 bp, Homo sapiens
gacccgctgaagccaggggaggaagcaccctggcgggtcactggctgatggaaggacaggcgccgtgatggttaagtgtgtccatgttggctacctgatttcttttcagccagtctcagctt

SEQ ID NO: 155366 - DNA, 122 bp, Homo sapiens
tcttgagcaccggctggcgaaggtgtctgcagcggcgtctctggccgacagggggcagcacggcgccagcgtcctcgcccagcgcactggctgcccgggccggcccaccgcgtggtctgtgg

SEQ ID NO: 155367 - DNA, 122 bp, Homo sapiens
tgtggccaaactgatcttcctgccaccaaagcctgcaggctgttcccactgcagtgaagacgtgcggcggtgagcctgcctctcctgcctgcgttgggaggtgaggttcggatgtgatcaac

SEQ ID NO: 155368 - DNA, 122 bp, Homo sapiens
ctgcaagaggccacggagccagcgacgggaggccttgaagccagtgacgacccactcagccgagctgccgctttcgcagcacgccaaggacactcatgaggaccatgatacttccactgaga

SEQ ID NO: 155369 - DNA, 122 bp, Homo sapiens
ggagcgtgccgctaatttattaatgaatggaggtcgcgaggcgcagctggccaatcagggcgccctggactccgggaggcctgcgagccacgcgcaccggagcccgctccctttcagcagct

SEQ ID NO: 155370 - DNA, 122 bp, Homo sapiens
gaactggcacttcctacgctgtttgtccagctgagacttgtccgccagagccaaactggccggctggactggctcccgggagcgaaacttcctcgaggcgctggggtggggaggctgtaggc

SEQ ID NO: 155371 - DNA, 122 bp, Homo sapiens
ttaagtggctatgggaactagcctgaggtcccagacgctgtccactgtgctgctgccctccgctatctccaagcagagcgcaggttcagctgcctttgaaagacacctaccgcctggcctgg

SEQ ID NO: 155372 - DNA, 122 bp, Homo sapiens
gcgtgagcgacgcagaagacagcagaagacgggtgatttctgcatttccatctgaggtagcgggttcatctcacttgggagtgccagacagtgggcgcaggtcagtgggtgcgtgcaccgtg

SEQ ID NO: 155373 - DNA, 122 bp, Homo sapiens
cccacaagccgcagcgcccaggaatcccctgggcgcctccgcgtcccccgcgggctgtcccggcaggcaggcagcccaccccagggctcccctcgtggaaggacacccctgctgaccctggc

SEQ ID NO: 155374 - DNA, 122 bp, Homo sapiens
gcttttctcgtggtcgggcgaggagtcctgcttgagtgagaagttgccattgagacagagcggggggctgagcgggccctcgtactcggagctgttgtagtccgggctcgcgccgccaccgc

SEQ ID NO: 155375 - DNA, 122 bp, Homo sapiens
agggcaggaaggaaatgaggagaatggagaatttgtgggtaagagactgtccagaagcagcgtgtgctcagaggcatccagtgctggagaggatgagtgaaataaaaatggaagccacttta

SEQ ID NO: 155376 - DNA, 122 bp, Homo sapiens
ctgccccttattttcattacaaacaaaggtccacagagggcacatttaaaacgaagaagtcgtcactactgtccacccactgcctggcctacgtctttgtaacaaaggccctcttgggtttt

SEQ ID NO: 155377 - DNA, 122 bp, Homo sapiens
tattgtgaagctaagtccgggtgagcaggaactagcgccaagcctgatggtgaggccccacgggtgtggggaagtgaggctggacaccccgggtagctgccaacctctaccctggggaggga

SEQ ID NO: 155378 - DNA, 122 bp, Homo sapiens
gagcaaagacggctttcatttagcaacgtgcagctgccgacaggcacagtgacaccaacacgggattctttcgctacatctctcaacatgagacttcaagaaaggagaaaagacctccttca

SEQ ID NO: 155379 - DNA, 122 bp, Homo sapiens
tccgaagaagcactcggtgcctgccccgctgggagcgcaagcattgttacctatcagcgccgcacttaacagttgttaatagcagtaagccctcactaaattgtcactgctggcagaccgca

SEQ ID NO: 155380 - DNA, 122 bp, Homo sapiens
agcggaaaaacttaaaagtccagacagccaaagcgtgagaaccctccagggactgcaccacgcgcccacagtctctctgcgcatgctcacacgcgacctccccacaaagctactccgcgggc

SEQ ID NO: 155381 - DNA, 122 bp, Homo sapiens
agcaccaagtaactggtgcccgaatgggtaaagctcagggcattcctgggggcccactagcgcccctgcaccagccagaggttgaagtgaatagggtaggcagccatggaaggctccctgga

SEQ ID NO: 155382 - DNA, 122 bp, Homo sapiens
gtgtgcacacgtgtgtgtggcatgtgcacgtgtgtgccctggcagccactataacgtgcccggcagtggccgctgttcgcccaggttggcccagttcagtcctgcttctcagggtggctggt

SEQ ID NO: 155383 - DNA, 122 bp, Homo sapiens
atctacatctgaatgtcaaggcatagcttttccaggagcttttaaaccgacctttcaattcgaagacgtaactgcgccaggagctttgtctccctggcatataaaagcatagaagagagcaa

SEQ ID NO: 155384 - DNA, 122 bp, Homo sapiens
catttacgttacgcaaattccctaccccagccggccggagagagaaagccagaaacctcgcgaccagccatgggccacctctccggaaaaacaccgggatattttttttctcctgcagaaaa

SEQ ID NO: 155385 - DNA, 122 bp, Homo sapiens
aagaatcgaaagagagagaaagtcagagcatgcatactctgaacttaaagtagccaatcccgggggatgctttaggcgggaaaatcagggtctccacccccagttagaaagttctgtccctg

SEQ ID NO: 155386 - DNA, 122 bp, Homo sapiens
tggttgttccgtggcagagcaggcccctttcctccctcacctgtccgaccccttgatggccgtgttggacttgacccgaaaggccttggcaaacatgtctgctggggtggcctggggaagag

SEQ ID NO: 155387 - DNA, 122 bp, Homo sapiens
cctctcctcctgggtgtaataatacagattatttttacttatcttttaaaaagatgtgaccgtgctattcatactgtgtgcaattcacaggagacaattttcaagatttcacttattttttg

SEQ ID NO: 155388 - DNA, 122 bp, Homo sapiens
tcctggctgctggtctgggcttgtccccacctgccccttgctttcttgtgcagctcttcacggcagctggccccagccagcggaaggcgcctatgagccctgagcctgtggtcctcagcttg

SEQ ID NO: 155389 - DNA, 122 bp, Homo sapiens
atgatatgcaccgccattccccttcccatggttttgctaaccgtgtacctcagcctgtaccgtaggggagcatgagctttgaattaacacaacggaaatgggaacaaatctagctgaacgtc

SEQ ID NO: 155390 - DNA, 122 bp, Homo sapiens
agtggaacccccggaccgggagtgagtcagcctgggaggggctgtgggcggggcctggtccggagaggggctgactttgggtctgtatctgtccccggccagctatcaatgacttcagttac

SEQ ID NO: 155391 - DNA, 122 bp, Homo sapiens
gtcagctgtaaaatgggtctctgtttaacccctcatggatcctcatggagatgaaaggtgcgctcatgaattactggtgctgacagcccagcaaggcctcgccgcagggggtcccctttgtt

SEQ ID NO: 155392 - DNA, 122 bp, Homo sapiens
tgcccggaaggaagccgtgggctggcctcgggcgggtcgcggggtgggggtctgcgcaggcgcgaaggggcgccggcagtggccggggagacgctggggtccactgacgtccctttgtcttt

SEQ ID NO: 155393 - DNA, 122 bp, Homo sapiens
tggtggacatgtgcgggttccgagggcatgttacgctccgggccagaaatgcatctgtcacgggactcaccgggcaccctgccctgccctgccctgccgagctgcccacccgctcctgcccg

SEQ ID NO: 155394 - DNA, 122 bp, Homo sapiens
acaggttaacccagccagcggcttccgggctgttgcctgggttaccagagctccgccccacgcccttgcgtatatccggcgagcccagtgcgcaggcgcctcccaaagcctatctcgggtcc

SEQ ID NO: 155395 - DNA, 122 bp, Homo sapiens
tctcagggcttccttttccctttccaaaaaattaggtctgtgaagctcctttttgtcccccgggctttggaaggactagaaaagtgccacctgaaaggcatgttcagcttctcagagcagtt

SEQ ID NO: 155396 - DNA, 122 bp, Homo sapiens
cacagtaatcagaggcggcctttacaaatagattgcatttgaccttgttggtttgatggacgggagtggagtccggccgcggacggcgtcccttccagggccggccgccagagggcgagcgc

SEQ ID NO: 155397 - DNA, 122 bp, Homo sapiens
cctgaagacctgacaacagccgttactctggctgacaagtcattggatttctggcgcacgcgcggcgcggcacgggcagcttccggtttccagccttgcccccgcccctaccttccgcccca

SEQ ID NO: 155398 - DNA, 122 bp, Homo sapiens
cgctaggaagcggcgctcgaaactctgcagcaagagtttggtacccgcgttctcctcaggcgccatgacgtgggcggggccgcagcgttgccaggagaccgggcggaagccgggcctggact

SEQ ID NO: 155399 - DNA, 122 bp, Homo sapiens
agagccggggtctcactatgttacccaggcgatttcatcccactgtgtgagaaggttctgcgttcctctgcttatgttgctgtgcagttgttactgaaggtcgcctgtagagggcgccagtc

SEQ ID NO: 155400 - DNA, 122 bp, Homo sapiens
tgctatcagaaaagcaaactgcttcccctctttcgccatcagactcatggttctgcttttcgtttatttgctgtaccttttctgcctagctattgttgatcacctttgggatgattgagttg

SEQ ID NO: 155401 - DNA, 122 bp, Homo sapiens
ccagggcctcactctggcccggctagcagcctcagtttcctccaacttgggttcctccaccgtgggctctccccgccgcccgcccctgggcacactcacagccaatgagcatgacgcagatg

SEQ ID NO: 155402 - DNA, 122 bp, Homo sapiens
ggcgggaggggccctggaaaccacacgatcaggggaactcttggactgtgcgccccaggtcgaggatctcgagggatgtcttgagcccagaggtccgggggaagtaaggtactctgtcggct

SEQ ID NO: 155403 - DNA, 122 bp, Homo sapiens
gtccggtgtccaggccgtggggagccgagacgcagccccctcccgtcgcccccaggcgcccgccccccactcaccagccagcagcgcgcagggcagcagcagccagtacaggaccgcgccga

SEQ ID NO: 155404 - DNA, 122 bp, Homo sapiens
ggggaggtgtctaaaccatctttttttgctggggacatgcaaatacatggaaactcacaacggctgtgtacttctcacaaactttcaaaaggtgttttgtgaattgagctaaattcactgct

SEQ ID NO: 155405 - DNA, 122 bp, Homo sapiens
gagacagaggatacagtaccggtaggggacatagtcagggtgatcaggaacaacttccctcgcaaggtgacattcgagcgaagacttacaggaggagaaaggcgccaggcctcggaaatggg

SEQ ID NO: 155406 - DNA, 122 bp, Homo sapiens
actggacataacagaatgctgagtggtcgtcaaggacccccagactctctctgccttcagcgagaccatccctctcccaggcaacacaaggctcccctatctcccatctgggattggccacc

SEQ ID NO: 155407 - DNA, 122 bp, Homo sapiens
ttcatcccaccctcacccctttccagccaaggtggctgatgggagtcaggctctcgagggcgcattgccacgaaacagcgtgtgtgagcgcgttgtccccggcccccggcgccacttcccct

SEQ ID NO: 155408 - DNA, 122 bp, Homo sapiens
ttcctaacacaaggctggaaacaggtcggaagtcaaggtagccattcttgggacaatcctcgaagtcagggaagccattctcgggacaatcaggggcctcaatagggcattttctttttttt

SEQ ID NO: 155409 - DNA, 122 bp, Homo sapiens
attaattatgaaagtgggaaggtgccacaggcatacttaaccaatttcacaatttgccaacggctaacttttgctaagtctaatacaaggctttgattttacatttgatgaaatttcccaac

SEQ ID NO: 155410 - DNA, 122 bp, Homo sapiens
caggaatcccctagggatcttgccaaggtgcagcctgactcagtgggtgtgggcaggtcccgagagctggcatttctagccagttcctaggtcgtaggaacctgcctatctggagatcacag

SEQ ID NO: 155411 - DNA, 122 bp, Homo sapiens
atctgttacatgttgtgcagagagtgcttatgaagccttagaaatatctgtgtttcagcacgggattggatttcttcaggagactctatggggcagtatattgattctcctaaggggtgacc

SEQ ID NO: 155412 - DNA, 122 bp, Homo sapiens
tgagctgttcgctcctgctctgccaccttctgccgcagaggaatcagctccccaagctcccgctgggcccgcagcagctctgcccgcagtcccccagcggcctgcttgctctgctccagctc

SEQ ID NO: 155413 - DNA, 122 bp, Homo sapiens
ttaggccatctggatgtatacctgcaagtcacaggggatgcgatggcctggcctgggatgcgatggcctggcctgacaactattacctatgttatgtttattattttaagctttattattac

SEQ ID NO: 155414 - DNA, 122 bp, Homo sapiens
gatagctaccagtctcattactcagatttgctctgagaggaaggccagtgcaatcacccacgagaagactgcctctttacctgtccatagtggtgtccagagtgtcttcttgcctccctgca

SEQ ID NO: 155415 - DNA, 122 bp, Homo sapiens
gcctgatactgggcctttggctggggtttggggagctgcccccacccccaaaagccttagcgcctagtggcggatcctgctcccgctccactagcagcagatgatacctgtggcatggtctg

SEQ ID NO: 155416 - DNA, 122 bp, Homo sapiens
cgaagggccctacgctgcgcgggctccggttggtcagccgcacctccaggcgcacggggtcgcccacctggcaggccgccacagcctcgcggtcacatggctgtccgtccaccagcacatct

SEQ ID NO: 155417 - DNA, 122 bp, Homo sapiens
gaaatactaataaaatgggcttgttattctgttggagtgagtgcctaggaagggtttcgtcgttgtagaaacgcccctacaagagtctcaccagtcacacaggactgcccaccatttccccg

SEQ ID NO: 155418 - DNA, 122 bp, Homo sapiens
gccgggccctgctgctggaagtgctccgtgggcttcgcgcagctggggatcggcaggtcgcggggaggctcccgagctaggtcgcggcctggctggacccaggcaccgccgacgcctcctgg

SEQ ID NO: 155419 - DNA, 122 bp, Homo sapiens
aagtcagctccagggggactcacatgcacataggcccacacacacacgtggacaggcaggcgggtgctctcacacccacagcagcacagaaacaaggcacactcaggcagacccacccgtcc

SEQ ID NO: 155420 - DNA, 122 bp, Homo sapiens
aggtgtggaaagcagggacaagtgcagtcccaagccccagtatgctgtgtgtgttcccagcgttggttcttatggaatctcagagttgtggtcaaggttatccagttgaggtgttgctgttg

SEQ ID NO: 155421 - DNA, 122 bp, Homo sapiens
ttcctctctccgcgagcgggggggggagctgcaggcggggcccgaagcgccccgggggcacgtggagcggcctctggctcacctgcgcctcccgggccccagcccagcgccgccgcgtcacc

SEQ ID NO: 155422 - DNA, 122 bp, Homo sapiens
cttggtgttgtcctcacaatagtgagtttcataagatctgtcttaaagtgtggcacctcccgccaccccttgctccctctctggccatgtgagatgcctgcttcccttcaccttcagtaatg

SEQ ID NO: 155423 - DNA, 122 bp, Homo sapiens
gcttttgaactgcaaaagagctctgggcgtacaggacagtgagtcacacggtgcctggtccgggcccaaccctggacaccaacaccactcaactcaagggcaggtacccggctgctgccaag

SEQ ID NO: 155424 - DNA, 122 bp, Homo sapiens
cctgggggagggagaggaagagagcctcgtttcgtttcggggctctggacctgagcctcccgcccagggcccaccgcaccccgctaggacctgggatttcccagtctccacaccggcccgga

SEQ ID NO: 155425 - DNA, 122 bp, Homo sapiens
tgcagagcgagccggggactttcgagcgggcaggaagcccagcgttccgggttccaggagcgtttctgggagtccgcgcggcccctgcaggtggaggcgcgcggggcgcgtgcacaggcgcg

SEQ ID NO: 155426 - DNA, 122 bp, Homo sapiens
tggcaagaaggtaatgtctgcggcagtacatgccacccccaagctgtacaatacataatacgatcatgctttccaaaatggccagcttactgtgattggttaaatatccccctggttcatgt

SEQ ID NO: 155427 - DNA, 122 bp, Homo sapiens
gccctctcctgcagttgcatagccaaatacctggcatggcccctggctccatgcatgtttcgtgcacaccagctgctgcagacccagattccacccctggactttccttttttttttctttt

SEQ ID NO: 155428 - DNA, 122 bp, Homo sapiens
ccagcagaggctgcactctgtctcctgggcttctgcgtgtaccaaagttcgggggcagatcgggtcgggggctccctaacccgggacctgggccatccaacaggccgaggtggacatcctgg

SEQ ID NO: 155429 - DNA, 122 bp, Homo sapiens
gggctgtaattacccccagaggagcagggaagacacaagcgcagaatgccggagcaagggcggcagcaaggctcccagacctgtccccagcccagccatcagcaggggagagaaagcgaaac

SEQ ID NO: 155430 - DNA, 122 bp, Homo sapiens
ccattttcgtcgtcatcttttttgtctggtttgggattctttgccttttcttctgcaatgcgtctttcaatagccgcaagagattctctggtgaagaagttgaagctgtcaggtcctggtgg

SEQ ID NO: 155431 - DNA, 122 bp, Homo sapiens
agggaggagactgaccacgcggaagtgtgctggtgggcgctggggggacagccagtgggacggggtggagaagtggtttcacaggtgtgcttaccccgtgtcagtacagcccccgttgtgca

SEQ ID NO: 155432 - DNA, 122 bp, Homo sapiens
aatgaatgaatgaaatccactagaactgcagaagggtagtattttaacttctgctggccccgccttccctttctgtccgacatcaaggaccctcggaagatgagatttctccgatccacaca

SEQ ID NO: 155433 - DNA, 122 bp, Homo sapiens
ttttctgatgtttaactacctgcctagatgtaacatattccaatatttgaatttaaataacgtcgtattattgacactcttaattctagacaatattttagggtgaagtgtgtaagttctgg

SEQ ID NO: 155434 - DNA, 122 bp, Homo sapiens
ttgtgttttgggaggaggtgaagcctccttatatcgctgggtccaggtccacaccctccacgcagcctgtccgtgctggccttgcgtgtcacctggccgcggtgtgtttgtcggctcacacc

SEQ ID NO: 155435 - DNA, 122 bp, Homo sapiens
cgtccctctcagtggcgccgctgagtgaggcggaagggccggcgggtggcgggtggcgggcggcgggcagtggccgggcgctgaggccagaggggcggagcggccgagctgctggggcgggg

SEQ ID NO: 155436 - DNA, 122 bp, Homo sapiens
cgcgggctctggaaaagggcaagaccaggcacggcgcaggtgctctctgtcgggagaatgcggccacgcgcggtgcgttcacagcgggagaaaccctcctgggagggacgggtaggacgccg

SEQ ID NO: 155437 - DNA, 122 bp, Homo sapiens
gcgggggggggattttctcgactgaggatgctgctgcccggtagccagcaagggccctgtcggtctcaaacgtgaattttggaccgacacaatctcatgtagtgattgttctgcttcctgtg

SEQ ID NO: 155438 - DNA, 122 bp, Homo sapiens
attttctcagtgagaattttctcacaatctcctagtcagactgttatgttcttacctaatcgccgatgttctcatatagtcttctgtacctctttaataacaattaatcttttgagttataa

SEQ ID NO: 155439 - DNA, 122 bp, Homo sapiens
acttccgacatggcacggtgttcctcacacacgtctcggtcagggggtctatgtcttccacgatgacgaatggggcctcctccagggtgacgatgctgagatggttgtcatccggctcacag

SEQ ID NO: 155440 - DNA, 122 bp, Homo sapiens
acacgtccaagtacaacctggtgacgcacatcctgggccacaacggcatcaagccacactcgtgcccacactgcagcaagctcttcaagcagcccagccacctgcagacgcacctgctgacg

SEQ ID NO: 155441 - DNA, 122 bp, Homo sapiens
ctattggagaaaatagcccaggcccaccactgatggccccaggttggggggtggtggttgcggggatgtcaagaaggccctcactgaaggggtcaagagagaagggcaggccgggcgcggcg

SEQ ID NO: 155442 - DNA, 122 bp, Homo sapiens
ccctccgcaaagctccggccggtcctcagctccgtgccacaccagtctggcctgtaggcccgccccagcccgcccccgcccgcccccggctccgccctcaggctggcacccactccgccccc

SEQ ID NO: 155443 - DNA, 122 bp, Homo sapiens
ggtcctcccagagagcggggcagccagaaatagggcgacgggccagcgtctctgtggacacggggcagggcgggcggcgcgggctcacctggaacaggatctgcagcaccccgtggatgatg

SEQ ID NO: 155444 - DNA, 122 bp, Homo sapiens
agctggcttgatggggaccacagtaaatcaggaggaacagtggaggctggtgtgggatctcgggggccagaacctggccaggggatgttgacccaaaaaaaaacagcagcagcagtagaaac

SEQ ID NO: 155445 - DNA, 122 bp, Homo sapiens
ggcatggagagcaactccccagcgcatgagagccgctctcggtccgaggtgcctcagctgcgggcgtctccctgccagcagggcagaggatagggctagactgtccccatctctcaggtcca

SEQ ID NO: 155446 - DNA, 122 bp, Homo sapiens
tgggcctgctcgcccgcgccccggcgggcctggcagaggaccagccccagctgcggaccccggggcagtctaaaccctggggccttgagttcccgttttgtcaatgggagaaaatgcaccaa

SEQ ID NO: 155447 - DNA, 122 bp, Homo sapiens
ccctcctgggttgcggcgtctgctcgcccttctgcgtccgcagctcggtccccacgttcccgctcgctgggccccacaggccaggagcgttgcccctttaacaagagtagcccgggtcgctc

SEQ ID NO: 155448 - DNA, 122 bp, Homo sapiens
gagggaagcttggaggtttgcaggcaaaggagaagacttgaaattttggacacaggcccacgatcaattggctaatagaatgagtgacatcagacactaaacactgggcctatctgtgaagt

SEQ ID NO: 155449 - DNA, 122 bp, Homo sapiens
attcgcttctcgcctcaggcggaatcgctcacccgacggcacgtagtcctcgtcctcctccgacgtagagaagtcttcggagtcgaattcctccatgttgctgccgctcgacgctggtcaaa

SEQ ID NO: 155450 - DNA, 122 bp, Homo sapiens
cccttcatccatcaatgccttcttcaaaaaagcatgggtcagattccttcacacaaatgccgcatggctacttcctccaataattgcatttttacaggggaccacacctgaagccaggtctc

SEQ ID NO: 155451 - DNA, 122 bp, Homo sapiens
ccatttggacagggagcttccgagccccatgctggcaaagacctggatcttagaaccctccggtgcccaaatcccatgcctttacccgaggtcctaaagatagtgaggcccagatagggagt

SEQ ID NO: 155452 - DNA, 122 bp, Homo sapiens
gctcgcgctggatgttcagaggagaacgaggatggtagccgaggtgtgtgctgctttggacgctctgcttttagcaaccgcagctttcgcgtagcagaataaatccgagaataacgctccca

SEQ ID NO: 155453 - DNA, 122 bp, Homo sapiens
ttattatttcctatattcagtaggtgtggctttacaacaagattacatctttgggccgggcgtggtggctcaggcctgtaatcccagcactttgggaggccaaggcaggcagatcatctgag

SEQ ID NO: 155454 - DNA, 122 bp, Homo sapiens
actgagaaggccactctgagcctcaggatcctcatctgtgaggcagggcatcagggctttcggtatctcaaagatcccttccaacttaaccattccaaagcttaagggacttcggaggtatt

SEQ ID NO: 155455 - DNA, 122 bp, Homo sapiens
ctgatttctaccgcaggcagatatcttccgagaccccgggcccctaggctggcctcgcgccgctaccccagggccccaaatgcctgagagaggtggaagaactcttataactaggcttctgc

SEQ ID NO: 155456 - DNA, 122 bp, Homo sapiens
ccggggaaacgcggggcgagcctgggagtactggagaacttctcgccgagagggcacaggcggtttcacagggctctcggttctgagactttcctcttgggtaatgggacctgagatggaag

SEQ ID NO: 155457 - DNA, 122 bp, Homo sapiens
tatttcaatattttaacaaacagaatggtcttgcaactgtgcattgtctgaaagccatcccgctgaagcctgaacttagatcagcttctctaatgaatgttgacgatagaaagtacttttgg

SEQ ID NO: 155458 - DNA, 122 bp, Homo sapiens
atccctgaaagcattctatctccccactcctcaaagtgatcatggctcctgggcctctaacgcaacactcggcttcatgtatgcaaatggtaggcactcaataaacaaagtgagtgactaca

SEQ ID NO: 155459 - DNA, 122 bp, Homo sapiens
gttatattatgatgctttaactgtagagttcattggtcaaatagtatgcttagggaaatacgtttactttgagtaatagttttcaccagaagattgtaggttatatgtgagagtaactttta

SEQ ID NO: 155460 - DNA, 122 bp, Homo sapiens
ctgtgcttcacccctgaagctgggttggatggcatcagtggttcctaatgtgttgagacacgccgcggaccagagaatgcttggaaggggaacggtggagaaaaggggccagatggcagcgg

SEQ ID NO: 155461 - DNA, 122 bp, Homo sapiens
cgggaggaggggcgggggctggccagatgactgtatctatgcaaaggcggaggcggtgggcggggagggggctggattcagtagagggcaaggggcactcacatccccggcgcgccactcgc

SEQ ID NO: 155462 - DNA, 122 bp, Homo sapiens
atattggatcatggtgaactctaatccagtgctggtctccctagaaaaagagtttggacacggatacaaacatagaagacagggtagaagaccacttgacaacaaaactgagattggagtca

SEQ ID NO: 155463 - DNA, 122 bp, Homo sapiens
ctgcgaatacccgcgcgtccgctcgggtggggcgggggctggctgcaggcgatgttggctcgcggcggctgaggctcctggccggagctgcccaccatggtctggcgccaggggcgcaggcg

SEQ ID NO: 155464 - DNA, 122 bp, Homo sapiens
gaggccttagcgaacacatggcagctgtgattggtcccatccacctttcctacatcttgccgtatatctaatacaaacctcatacatctaaagttcacaacaatccactgatgtttctactt

SEQ ID NO: 155465 - DNA, 122 bp, Homo sapiens
ataaatctttttttttttaaggcagcctaggtctgacacacctaatagaacagaagctctcgcttctttcttctctttccatcagtcagtgatgccctttgtgggcaggtttgtgcacagat

SEQ ID NO: 155466 - DNA, 122 bp, Homo sapiens
aagtttgcaagacgcgcctccctcccacccctcccccttcctcgcccaacttcccatagccgcggcctcaactaaaagtggccattgacctttcaagctttcgagcagtgatgcaatagaat

SEQ ID NO: 155467 - DNA, 122 bp, Homo sapiens
tcgtggcagagggtgcatcccacgcagagccatactagtcccggagccaggggccccgggcggcggcagtcaagatcaagtttctgccctaaaggaggggatgctgggcaggagctgccggc

SEQ ID NO: 155468 - DNA, 122 bp, Homo sapiens
tgcaattgttctgagttttaagttagttaacatgataaactgcatagaacacccctgccacgtagcagacactcaataaatgttagctattatcatttacataagaggaaaccaaagcttag

SEQ ID NO: 155469 - DNA, 122 bp, Homo sapiens
cgttgtagaggaaattctgcagcttgcggtagaaggcgttgcgcttggggggcttcccggcgcccgcgccgcccgcgcgaggtttgctgaggatgctgccgcgcttgggggcctcggagccg

SEQ ID NO: 155470 - DNA, 122 bp, Homo sapiens
catggggctcttgggaagataaaatgctgtagcagatgcgctgagtaagcttccaacacgcgagagctgccctgctacagtcattgccatcatcgccctggcctcaggggatgccactgcac

SEQ ID NO: 155471 - DNA, 122 bp, Homo sapiens
tctccctttcatccaccggcccccagcctcctcctgccctggctacctctccaggctccccgacaccattgtccggcccccgcggcgtccctgtccccgcagcacacagaggcccctttgtc

SEQ ID NO: 155472 - DNA, 122 bp, Homo sapiens
gactgcaaagaacccgcccccgagggggtgctatccccaatcaacagtctttttgctcgtcgccaggggaagtgcttcctgctgacaggtcagctcacgtgtcagtcagagtctgcctctca

SEQ ID NO: 155473 - DNA, 122 bp, Homo sapiens
ggatgacccaaaccagacaaacctcaagcaacataagggaaggagcagctctcgctgtcacggagagacactgtgactcattctggagcactggcttcgtaccaagcgcagccaagagatca

SEQ ID NO: 155474 - DNA, 122 bp, Homo sapiens
gagccagcgattcctgcaagccccgccgcgggacccgctcctcccgcctgcccctcctcccgcgaccaatcaccttcaggattcaggaatcggggtctcggtctctctctctctctctctct

SEQ ID NO: 155475 - DNA, 122 bp, Homo sapiens
tttcttggcttggggagaattcctccaatagcgttttataggcctgcgacatatcttcaacgctttggccgaaaagaagaaaaaaccttattagtttattttttgctagctttatgatgtgt

SEQ ID NO: 155476 - DNA, 122 bp, Homo sapiens
tataggcgcctcctccgcccgccgcccgggagccgcagccgccgccgccactgccactcccgctctctcagcgccgccgtcgccaccgccaccgccaccgccactaccaccgtctgagtctg

SEQ ID NO: 155477 - DNA, 122 bp, Homo sapiens
acattcacactttggatgttcttgaggtgaattccctgcagtgtctgcaagcactggcagcgcagttcagtgaccacggacgctcctagggaagaatagactcgctgattgagcggggctgt

SEQ ID NO: 155478 - DNA, 122 bp, Homo sapiens
agctggctcccagcttccagggctatccatccagggacctccaagacaggggcctcatggcgggcccctcacacccagccccccaaaacctgcctccatccctctcctccaggctgtggtct

SEQ ID NO: 155479 - DNA, 122 bp, Homo sapiens
gcctgccccagctgcaggcccggtgctacacgggctcgggaacagaacatcgtgggcatgcgcagagcatgcccatccgtggcaggtacgccacagcagacacaaaggtatgggagcttggt

SEQ ID NO: 155480 - DNA, 122 bp, Homo sapiens
tgtgaggagcccctctgcccggccgcccagtctgggaagtgaggagcgcctcttcccggccgccaccctgtctaggaagaagtgaggagagtctctgcctggctgcccatcgtctgggatgt

SEQ ID NO: 155481 - DNA, 122 bp, Homo sapiens
ctggggcgttttctcatgtagcccaagtgacccaaggtcttcttgagctttggaaccagtcgcgtcccacttgacacagcacccgactcccagtttctcaatcgtgttggccctccggcgat

SEQ ID NO: 155482 - DNA, 122 bp, Homo sapiens
ttgagcctctttctgggtctctgcctgggtcatgtggccggctgtctatcgttttctcggcgtttccactttgggttcgtggagacctcgaccacgtgaggagatgcgtcagtcccggggca

SEQ ID NO: 155483 - DNA, 122 bp, Homo sapiens
gctgtcctggtggtttctggtctgcagagggttaacaatgatgacaataacgttgcctcccgggctgagtttctcatctgctctatcaggcccaccccctactccggactgattctccacat

SEQ ID NO: 155484 - DNA, 122 bp, Homo sapiens
tatctgcactgagaaaatgaggcagggcacaaggtggtttccctgccagggccagggacgcgtctttcaagagcccttcccagtctcacaagtatctctggggccattagcacaggagacag

SEQ ID NO: 155485 - DNA, 122 bp, Homo sapiens
ttttaaacagagagcaagtgtaggagtaacaagtgccccccttgccgcggtcttgctaatcgcatcgccttttgagactttacgagacttctggggggccggtagctaagggagttactgga

SEQ ID NO: 155486 - DNA, 122 bp, Homo sapiens
cctaccctgggtcctagcctgtcaggggctccgaaaacccaggctcaggtcggtcctgcccggcacctgtttcacacatgtacactccggtctgaggttggtcctctcccccaccccaccca

SEQ ID NO: 155487 - DNA, 122 bp, Homo sapiens
ggaccataaggtgtatggcacattcactgataaaacatcccctattccctcccaagaaagcggagatactttaatcaagtcaaagaccagagaagacagggtgctcctgcttacagctcagc

SEQ ID NO: 155488 - DNA, 122 bp, Homo sapiens
gtggtaccgctggctgtgtcgcctgtctggggtgctgggggcagtctgtgagtatccagtcggggagaggggccggccccgccgcgcatgcgctcctcgccctgccctgccccgccccgccc

SEQ ID NO: 155489 - DNA, 122 bp, Homo sapiens
atggcgagggaggctccaaagagtttcgggagggggcgccggatctggtttaagagaccgcggaacagatggtggagagctcctggatgaaagtttttgaacaggcactcgctaatagactt

SEQ ID NO: 155490 - DNA, 122 bp, Homo sapiens
gaaccaagataaattagtgaagtttatgatccggatcggtgttttcagcattctttatctcgtaccactcttggttgtaattggatgctacttttatgagcaagcttaccggggcatctggg

SEQ ID NO: 155491 - DNA, 122 bp, Homo sapiens
gcagctcggagagaggttaggaaaatctctccggaacgcgttgggaggccccctcattcccgccccctcccgggcgcacggagacccccggctccagggagcgcttaccgatccggatgacg

SEQ ID NO: 155492 - DNA, 122 bp, Homo sapiens
ccccaagagctatcgaaaggccagccttgctcaccccattggaaccagcatcagaaacctcgatttagagtccaatttggaaacagatccgtgcctttctcggtgaaatgggaagttgccta

SEQ ID NO: 155493 - DNA, 122 bp, Homo sapiens
gagagaaacatgtcattttgtcagtcacgcccctactaagtgaaagagcagggatttgaacgctggctggtctggttctcatcagtgctctcccgagaagctccaagcccagtgaagagggt

SEQ ID NO: 155494 - DNA, 122 bp, Homo sapiens
cacatatgtacaaaggcattccagagcccagttttcgaggctgaggaaagaccccgagagcgcttcgcacagcacgcttaccagcgtccgaaacactgctctcagggcggggcacagcggaa

SEQ ID NO: 155495 - DNA, 122 bp, Homo sapiens
gcgactgcagttctgaagcctaactggttgcccgtgccgcctcggaggtgaagtgtactgcgctgattggcttccaggcgccggccgcgtgtgatgtcccgggcaacgattggctctcgcct

SEQ ID NO: 155496 - DNA, 122 bp, Homo sapiens
ctggcggccgtcctggtcccggcgctccccgcgcaaacggaccccggccgcagcgccctccgccccaccctggcggccccagcagcccctgcacccccgaactcgcgcgccggctccccggc

SEQ ID NO: 155497 - DNA, 122 bp, Homo sapiens
tcccgatctgattcctgatccttgattccttgatccttggtcccgccatgggagcctgagcgccccctattcccccctggcccccagcccccggggccttgagggggaagaggcagcggtct

SEQ ID NO: 155498 - DNA, 122 bp, Homo sapiens
ccctttccgagtcaaagaaaggggtgacggacgcacctggaaaatcgggtcactcccacccgaatattgcgcttttcagaccggattaagaaacggcgcaccacgagactatatcccacacc

SEQ ID NO: 155499 - DNA, 122 bp, Homo sapiens
gtctgctcagtccaacgtttaatattaagatggcaggagcaaatagtcacatttgtattccgcggactgcaaaaacagccattcccacaatacctccgtactgagtgcccatgaccctcgcg

SEQ ID NO: 155500 - DNA, 122 bp, Homo sapiens
acccagcttagagaggaggtgattcagcattgcttactaagaaggctaactcccatgcaacgttgacagaatttgttataacatctccttggaaaccattccagtgtctgagcatcagagca

SEQ ID NO: 155501 - DNA, 122 bp, Homo sapiens
tctagagctctagtttgttgctgaagtttgggagaggatggcctctacctgtgcacacatcgagttaattttccagagtcttttgaagttaatagggagcggcttttctgtttgtttatttt

SEQ ID NO: 155502 - DNA, 122 bp, Homo sapiens
cctatcagcacttgtgcccatggtcagtcaggctcaggggcactcacaaagcagagtagtcgattgaaaagcaagcataaaagataaggttggactatgcttgcgatacaccttatcgaggc

SEQ ID NO: 155503 - DNA, 122 bp, Homo sapiens
ctgaggggagcggcgaccccgccagccccggtctctttccctggcggcggcggcttcttccgtgggacaatatgttcaagagaatggccgaatttgggcctgactccggcgggagagtaaag

SEQ ID NO: 155504 - DNA, 122 bp, Homo sapiens
tgcacaaaacccagtgcctgctcttggactctctttccttgtttgtaaagcggggtccgtcggaccagtgggtttgagagctctgccaccgggtcaggctgagagtctcctcactgggctgg

SEQ ID NO: 155505 - DNA, 122 bp, Homo sapiens
aggaagggcccgagcccgtgccagctgcctgggggtgagggctgcctgcccctgggccttcggctgagtaggtttggaaagcactccctttgtctaattacgcctgatccggtatccaggga

SEQ ID NO: 155506 - DNA, 122 bp, Homo sapiens
gaataggattggggccttagggtctatacagaactgacttggtttccggccatccggttccgctccctgggggagggtttgtgtcatagcaagcgcccaacatttcccagggcagtgggtgc

SEQ ID NO: 155507 - DNA, 122 bp, Homo sapiens
agccccagacataagccccagatgattgagagaccgggctacacacgtgtggatgtcccccgtgcatacacacaagcacccatccgataggctgggatccagctgcaagtttggacactgac

SEQ ID NO: 155508 - DNA, 122 bp, Homo sapiens
gtgtttcagaaatagaatggagacctttgcccaacccggcttcctggaactgaatgagtacgcagactgagagggcatgcaggacttatacagagggccttgcagacttataaagactttag

SEQ ID NO: 155509 - DNA, 122 bp, Homo sapiens
tgccaatttaataggcaaaatctctaaatgtattcaaaatgctttcaccaaaaggccaatcggttaatagacgcaccctataacttttctccggttacagacacagtgcatgaaagcaacaa

SEQ ID NO: 155510 - DNA, 122 bp, Homo sapiens
ctgagtgaggggagaggggaggttaggagggggtgagctctccttctccctgcaataaatcggcttagcggacgagagccgaacagcccagaaaggattaaagaaaagtctgtataatacgc

SEQ ID NO: 155511 - DNA, 122 bp, Homo sapiens
gacagcagcaggtcagtgagcagcaccagcccgccgagctcagcaggcagctcctccagccggttttccgacacgtccaggcacaccaggcgccgcaggttcccgagctcctgcaggtgggc

SEQ ID NO: 155512 - DNA, 122 bp, Homo sapiens
agaatcctgttcggagtcagtgcctaaaagagccagtcggctctgagctgctttttattgcgatgagctaagtttgttgtgtgattaactggaaagatctaggtctgaactccctcttacgg

SEQ ID NO: 155513 - DNA, 122 bp, Homo sapiens
agattccagggatcagcagccagctcttcacaccagcctcgtctctgggcattggagccacgccggcaaaggtcacgtgcagccagttggacgaggggtaaaatgccacccgaatctgttta

SEQ ID NO: 155514 - DNA, 122 bp, Homo sapiens
gtacttctcgcggatcttctccttgtcctgcatgatcttcctggccatggggctcagcgacgagaagtaagtgaagcgctttcgctcccggtcgtccagaggccggttcccgctcatgaccg

SEQ ID NO: 155515 - DNA, 122 bp, Homo sapiens
attgctttatgcaaagcagcgccggggcctcgcgccagccgattggatgctccctctccccgcctggtgcaattggtccgtttgtttgaatatgaatacacttgttttcggctccgccggtg

SEQ ID NO: 155516 - DNA, 122 bp, Homo sapiens
tcactcatgcccccactgaaacatcctcatggagccattagtgctggaacgaaggcagcccgtttcctgtaggcagtgggtcaggcttttctctttccaggcaggatctcgtctcatttgtg

SEQ ID NO: 155517 - DNA, 122 bp, Homo sapiens
agccacgttcccaggcccggccggctaccgccccttccgcatgcgcgtgagaacgcgccccgcccacttccgccatgctgacggcagccgccaggccccaatcccggtcccgcccccgcgag

SEQ ID NO: 155518 - DNA, 122 bp, Homo sapiens
aagacgataaaaagcactaagttacaaataaacacgtcccggagcaaggcccggctgccgcgcgcccctcccccggccggcgcccccgccccggacgcgcggccccaacagccgcccgcagc

SEQ ID NO: 155519 - DNA, 122 bp, Homo sapiens
gaggagctggccaccatgcctgcccaatggtgacagtcctcggcacaactgtcagctcagcgacttgcagcaccagtgatgacagcagcgtcctacatgaggttttcctttgccaggcacca

SEQ ID NO: 155520 - DNA, 122 bp, Homo sapiens
ggtggcttgggaacagatgaccgtgtgattgaatctcgaggcaggcgagccagagcctggcgctagctgagggggagccccacccctctctccggtggctccacgtggctccgtcaccacgc

SEQ ID NO: 155521 - DNA, 122 bp, Homo sapiens
gacagacggacgctgcagcctccgccctccgctcggccagccccccgcctgagcccgcttcgaggccgggtgacccagcctcgcccccaccccgggacccctcccaacccccgccgcccccg

SEQ ID NO: 155522 - DNA, 122 bp, Homo sapiens
ggccccgctaccctgcacggagctgtccctgggccagcacccgcttcgggccaccgcagacgaagaccggcagatggccatcctgctgctggtgcacagctcctgggacaaggtgaaagaaa

SEQ ID NO: 155523 - DNA, 122 bp, Homo sapiens
agtcaattttatgacaaaattaatctgcagcgtgacttgtggagccccagagggaggtcacggaggccggtaaatatgtaaacgtgggtttttcggtttccgtttcgcatgaatacaaaata

SEQ ID NO: 155524 - DNA, 122 bp, Homo sapiens
ggatttcagttcaaaacctgccctagcactgcttgtgtcaggaggacctgtgactcaccccgctgaacctctgcatccttctgagtccctgcacccacctgagcctctgcacccatctaagt

SEQ ID NO: 155525 - DNA, 122 bp, Homo sapiens
tcactgctggctccgggttgttgaccccctgggagaatgaacattcgggctgtcggggaccggggaaggctcagccgtgactgctgacgaaaaacacaaacatctgtgaggggagaggcggg

SEQ ID NO: 155526 - DNA, 122 bp, Homo sapiens
attgtgggcagtcccttcaacacctggagtccctggtctggaaaggtagggtggcaatttcgtctttgtagatgtgaagagggtaactgagtcttctgggcttcctctctctggggccctca

SEQ ID NO: 155527 - DNA, 122 bp, Homo sapiens
ggagccgaggctccaggcggcagggaaccaggcctaagggattgctccggcaaccaggggcgccaatccgctcgcctatcgaaacaggcgcaactgcgccgctgctagggggcgccaaaaca

SEQ ID NO: 155528 - DNA, 122 bp, Homo sapiens
gggcttgaaagatgccttcaacacagactcttctaggaatccagccagttttgggacggccgtttcacaaaaccaaaaaacaccaagtaacatttctaaccggagaattgccggttttagca

SEQ ID NO: 155529 - DNA, 122 bp, Homo sapiens
tctattcctcctttcccgatttcctctttacttaataaagtgaaatgacaaacaccaaaccggtcagaacattacgaggagctgagtgtgagctctctgaggcgtggggaagtggaaggcat

SEQ ID NO: 155530 - DNA, 122 bp, Homo sapiens
tgtccttcagcaaacacaccaagatttgcttatccttttgctctgggctttcagttatttcgtgccgactgttataaaaagatacatggtatcttctgaccttctgagccgccctccgaggc

SEQ ID NO: 155531 - DNA, 122 bp, Homo sapiens
gagccggcaacgagggaaatggaggcaagagacggtcccggcgtgtttgagaggaaagtccgctggaaggcggccaggcacagtggattatctatttttaacttttcatactataatgttaa

SEQ ID NO: 155532 - DNA, 122 bp, Homo sapiens
cacctcactgaggcgtctctctcccagcccagtggacctcatgcaaggggaggtccgacccggctgccacagccccatccccgccatgaggcctgggccggacctgagctgggactccacac

SEQ ID NO: 155533 - DNA, 122 bp, Homo sapiens
atgcaagcatcacgaagaaggttctgagaatgcctctgtttacgtacgtgagttttctcccgtatccagggaaatcctcagagcggtccaaatctccacttgcagattctacacaaagtgtg

SEQ ID NO: 155534 - DNA, 122 bp, Homo sapiens
ctctcgccccctggatattaggaacaatatcacagggttggtgtacaccccctgcgaaatcggaagaaatatcaccctctccacctttggatgttagggacaatatcacggggaggtctacg

SEQ ID NO: 155535 - DNA, 122 bp, Homo sapiens
gggtggctgggccggcctcgggggcgggggctcgggggcgggggctcaggggcggggccacgtggctcctccttgcgggcggaggcaggcggtgccgcggcgccgggacccgactcatccgg

SEQ ID NO: 155536 - DNA, 122 bp, Homo sapiens
ctgtcactacctgtctactgagaagcagctcaggaggagaattaagagtgagcaaaagaccgggggctgtagctcacacctgtaatcccaacactttggcaggtggattacttgaagtaagg

SEQ ID NO: 155537 - DNA, 122 bp, Homo sapiens
caatactgacacacagccgacactcaataaaagtttgttgaattgacaaaaataaatttgcggcttcttgcccagtacttggcacttagaggccctcaataaatgactatcgagtttatatt

SEQ ID NO: 155538 - DNA, 122 bp, Homo sapiens
atgcccagttcttagtatcttttaactatgtcaatcctttttaattcacattcatgggcacgcattaggtgaagctaaacaaagaatctatgcctagaggaagactcacacatgaaacaagg

SEQ ID NO: 155539 - DNA, 122 bp, Homo sapiens
cctgggaaggattcccccaaatcttggctacttcctgcctgccagcttgctccctggcagcgaagtcccagtagctcacccatgcttcatcccagctcttggggttcaccgtctgaaggctc

SEQ ID NO: 155540 - DNA, 122 bp, Homo sapiens
gaaaccaaagttcaccctgaggggaacattaggattttgattcctaaagtttacagcagacggagaatgggctggaagtggttccctttagaacaaaagtctgttttcctgtatttattgac

SEQ ID NO: 155541 - DNA, 122 bp, Homo sapiens
cgccttcctgacctttggaagacatgacaaagctgcctggacacggacgcccctgctgtacggccacagcacccctgggtttgcagagcacgcagccttcctagggctttccacctggcgag

SEQ ID NO: 155542 - DNA, 122 bp, Homo sapiens
cagcgctggggatgaggcctcggcagacctgtctcttcgcgtttttctttcttcgttcttcgccggcgtagtgctctctgacttgccgagctcagagctttacctcagggctttggcgggtg

SEQ ID NO: 155543 - DNA, 122 bp, Homo sapiens
gcaggaaagagagctgggcaatcagtggagcccgcgccggcccagacagtgggcctagggcgaccccagggctgagcctcattctgggggtaacccccacccgccacttaccggagttgtga

SEQ ID NO: 155544 - DNA, 122 bp, Homo sapiens
gggtgagccggcgcgtggtgggaagaactgggggtccgaggtaatagagtgtagggaggccgggttgccttggaaaaatgctgcctgctctttcaaagggggaggaatcaaggggggtggtg

SEQ ID NO: 155545 - DNA, 122 bp, Homo sapiens
gttaataacttcccctgattttcctcgggatgggctggaaagagccacgagccagccaggcgcatcctgcgtttgtttgtgcggggagcgaggccgggaatatctgatcgggcggagcaagc

SEQ ID NO: 155546 - DNA, 122 bp, Homo sapiens
gcatagctctccgtcggcgcgcctgagcctccggatgccgggggaccgcggagccgcgggcggcctgagggtacgcctcatggtcctgccagacccctgatgcccgaagcccgaccagacgc

SEQ ID NO: 155547 - DNA, 122 bp, Homo sapiens
tcttctaccacacaattcgaagtgtttggtgagctagaatcccgataagaggaggattttcggtttctgtttctgcccagccctgaagaggctgcagcgctacgcgctgccgggagactggg

SEQ ID NO: 155548 - DNA, 122 bp, Homo sapiens
cctcacccttttcttgatgaacttgagggcctgtttgtcctttgagaccttgaacaactccgtggtgtgatactctacgtggcgaagcaacacacctctcagatcatgtcccacactaactt

SEQ ID NO: 155549 - DNA, 122 bp, Homo sapiens
acgcattccaacctctgacttgctgcttattgtgtttgcctgcacattgcaaattcaactcggtgcgaagggagactgagtacaaatactcgtcactcccaagatcacctgaaagtcgggac

SEQ ID NO: 155550 - DNA, 122 bp, Homo sapiens
aggggcacccagtacaccggtctatgtgtgcacgcacacccacacgcatgggcacacacacgtgggcatacacatgccacgaggacctgcacgaggtccctgcccaggtcagctccctcgca

SEQ ID NO: 155551 - DNA, 122 bp, Homo sapiens
gtttttctgggctgcttgacaagactcagacagtatttgtgaatatcaagctttgtcccacgtggtaaataaacttgtttagaaacacctgtaaagcttaaacgcgtgctttcttcaacgcg

SEQ ID NO: 155552 - DNA, 122 bp, Homo sapiens
aagcgatccacctgcctcggcctcccaaagtgctgggattacagcatgagccattgtgcccggccaatgtcatttttaataatagctgtagctaagtttcttaagtgcttgctatatactga

SEQ ID NO: 155553 - DNA, 122 bp, Homo sapiens
gaaacttcaacaacagattagcaaacagaaaactaggcccagcgccagtgcccttgacaacgggctcagggcaatttggcgagacggagctggcccagccttggtgtgattacagaatgcca

SEQ ID NO: 155554 - DNA, 122 bp, Homo sapiens
ctatactaaggcggtggccctaagacgacgcgggggttctggtgcgcacttacgtgcagtcggatgcgctgggtgagttcccacacccggtagatgtaagggaaaaactgcattacccagaa

SEQ ID NO: 155555 - DNA, 122 bp, Homo sapiens
ttctcgtgtgactttttttgtgtctctctgtctttctttttgtgtgtgttgtggtgggggcggggtgtgtttcttctgcagaaagaaaatcattatgccctgagaatcggggaatggggatt

SEQ ID NO: 155556 - DNA, 122 bp, Homo sapiens
gatgggggctttgggaaggtgttgcctaggttgtgtttaaggtgcctgcaggttgagagacgcagtagtggtcgagtcttggggagtctggggctgctagttcttccacctggctctggacc

SEQ ID NO: 155557 - DNA, 122 bp, Homo sapiens
cttcatggctcctggggacctcagagaacattgatagaagatcctagaagaaccacaacccgtggcaggtggttttatttccctgggtttgaaggaggctccacagacaagagaccagagga

SEQ ID NO: 155558 - DNA, 122 bp, Homo sapiens
cggttttgggagctcgacgctcgacatcactacctgcgggtggccaccagcggcggaagtcgggcgtttacaggcagaagtaacagagtgtcgagagactcccagtcccaccctctaaaccc

SEQ ID NO: 155559 - DNA, 122 bp, Homo sapiens
tcctgaatgtcttagcctctgaccacagctgtgctttctttgcctgtcttctcaatgccacgttcatctccatttcacaaccaagcaacagaccaaggcaacaggcttcgactttgcttctt

SEQ ID NO: 155560 - DNA, 122 bp, Homo sapiens
tagaggcaggtgagttatgtgccaggttccttctgatgttctctgccccttgggccagtgcgtataccatgtgagtgtgtgtgcgtgtgtgtgcgccttcgttgggtggaacgaagaggagt

SEQ ID NO: 155561 - DNA, 122 bp, Homo sapiens
ctgcttagcaggaggcaggctgggcattgggttagcagtactggctctagagaattctaccgcataactgatatcttacacagaacagctctcttcctggcttgggcttcactaaggccatt

SEQ ID NO: 155562 - DNA, 122 bp, Homo sapiens
tcgagagcaaaaagctggatggagtgatcctgggtccctgacaaggggcccccacagaggcgcacgcgagggggtcctcaccgtgatgttgcagtggatgcggacaggatccccaggcaccg

SEQ ID NO: 155563 - DNA, 122 bp, Homo sapiens
gagggacaggactccgggggtcagcggtgggtgcggggcgtggggcctgtccatctcctccgggtggcggaaggcccggccccgggccagcggatccacaatctggaagggaggggggcggt

SEQ ID NO: 155564 - DNA, 122 bp, Homo sapiens
ctgtttcctgtaagtcacttttcttttcctgttcgtaaatattgctccaccacacagcagcgccatagtcactctgatcctattctagtttgggaagctgcctgattcacaagtcattattt

SEQ ID NO: 155565 - DNA, 122 bp, Homo sapiens
cccggacacccggtcgctggtggtgtttcccatggctgcagctcgtcggggaccacctaccgcggggaacgacaccgggctgggaacacctcagccgccgcgtcaggggcgccccccggccc

SEQ ID NO: 155566 - DNA, 122 bp, Homo sapiens
ccgcagtaccatggagagcggcgggcccgtcctttggctggggaatgggtgggctcggcccgtggtcgcagcccctccaggtctggatgctgcggagcgaggtgcttttacctttgcatcgt

SEQ ID NO: 155567 - DNA, 122 bp, Homo sapiens
ggaagcccttgtcatgtaaatagctgtcggggactggtgtattgtcgccgccccagccggcgggacctggggcgaatccacacccattgtctgctgcccaaggggcctccggctggggggcg

SEQ ID NO: 155568 - DNA, 122 bp, Homo sapiens
ccgtcccctctgtcactgcctgtcctcagagctccagctctccctcgcggtcgcttaccacgtgacatgacacatgcagtcctggatgggtgacagcccgggaaggctggcgggtctcctag

SEQ ID NO: 155569 - DNA, 122 bp, Homo sapiens
tataaatgcaaaggccttattgttgttctttgttcagggataccattgtctagtcatccacgggcagcctggagttttcccagggtttgcggcgcgcactcccctcccccgcccccacagac

SEQ ID NO: 155570 - DNA, 122 bp, Homo sapiens
atccactttagctgaatgccatattgttgtacatgaacccatctccaccccttctttcctcgtacaatttgccagtgtgctagaaggacctaacaaaggcctgagttctggccacagatttt

SEQ ID NO: 155571 - DNA, 122 bp, Homo sapiens
cacagctgccacactggcacctcgtggtcccttgaagaccgcccagggaaagcctctaagcgctgcaccacctcctcaccctctcccctgggtggtggcagcaacagcctgagcgtgtgcgc

SEQ ID NO: 155572 - DNA, 122 bp, Homo sapiens
tgtcacaattttacatttatcagttgatgaatatttggcctgtttccatcttttggctatcgtgaatagtgttgccgtgaacattcatgtatgagtttttgtttgaacatttgtagttatct

SEQ ID NO: 155573 - DNA, 122 bp, Homo sapiens
aatagaagcaaaagagtaagcaggttttaccagagtgtacctttaaagtttcaaagaacccgcacatccactatctcatcaattcacagaatgttctgagagacaacaagaatagatattat

SEQ ID NO: 155574 - DNA, 122 bp, Homo sapiens
tttcacctccctttagccaattccattcctggctacctcatcccctccagtctgaaaggacgtggtaagtacttgtctgttccctatgcttttctctctctcactctcttcctctcctccca

SEQ ID NO: 155575 - DNA, 122 bp, Homo sapiens
gagacactaaggaaaagatctaaacaaagttctatggcagagatctcatccatcagacttcgacaactattaggagggctgaatccaggctaccaagggaacactttaagaatattctggtc

SEQ ID NO: 155576 - DNA, 122 bp, Homo sapiens
atgtggagttagacagcctgagtttgagcgcacagcctgccacctcctagctctgcaaaccggagcaagtcaccctctgaggcccagttgctttccctgtaaattggaagtaatacaaatat

SEQ ID NO: 155577 - DNA, 122 bp, Homo sapiens
ccctcttgagtgaggtcacacagggagtaagtgagggagctgggatgtgaactttctcctcgccccccttcattgactggcctagatcaccctgggagtcaagtgcgggccagccttagcag

SEQ ID NO: 155578 - DNA, 122 bp, Homo sapiens
cctgggtgcacttaaaaccgatttacaggatttccattaactaactgtctgtacacgcggcgcgccttctgtctttttcaatctccaagcgcgattggaaacccggacagccgcccgcgcgg

SEQ ID NO: 155579 - DNA, 122 bp, Homo sapiens
aaaacaggctggaaaagggagtctggagagagcttggtgttgtaatgaaccatggggagccgcctcgttggccctgtgattacccaggaactgaatagagagggggccctgggagacctcag

SEQ ID NO: 155580 - DNA, 122 bp, Homo sapiens
ttaattctggtagaaggtgaggccagggctcaaaaagcctggatatcttaacattctaatcgttttttattcttcttcttcctttttagagacacggtctcactctgtcactcaggctgggg

SEQ ID NO: 155581 - DNA, 122 bp, Homo sapiens
acagtctgctattaatacaggattttaaaaagttaaatagaagcaattatttggcataggcggcagtgacagtgaactcctcagaggacaggagtgaacccccagccccagggaagaactcc

SEQ ID NO: 155582 - DNA, 122 bp, Homo sapiens
taggacatataaaagtttcacaaagtccttgtattcagctcttctgattctttgagtccacgatttgttggtatttattcttcagatactgagcatctactgtgtcagctcagaaatgtaga

SEQ ID NO: 155583 - DNA, 122 bp, Homo sapiens
aggtcacggcgcgacaaaggatgcgctagagccaccttcggccttcaggagcaggtgaaacgcaatcttcccatgggccaggaatggcgacgtccgcactgcgcaggcccagcgtggcgccg

SEQ ID NO: 155584 - DNA, 122 bp, Homo sapiens
cacaccctctgcggtgttctttctaaatgccgtagctaccttaattgccttcatacttagcgcatctgtgcctagggaaaaatgggtgtagggttggcagtgcccaccacccccaaccctac

SEQ ID NO: 155585 - DNA, 122 bp, Homo sapiens
cgggaggccgaggctggcggatcactcgcggttaggagctggagaccagcccggccaacacggcgaaaacccgtctccacccaaaaaatacgaaaaccagtcaggcgtggcggcgtgaggct

SEQ ID NO: 155586 - DNA, 122 bp, Homo sapiens
gtgttaacaactcgccattggagagatccttaaccttttactatctttgtgctggacactcgagtggaaaaatcaaaggcaatggggctcacagacctgcactgtttttacggtagatcaga

SEQ ID NO: 155587 - DNA, 122 bp, Homo sapiens
aacatttgttgagcacttacttgtgccaggcatccttctaaatactttacatatttcactcgctgaattgtcacaataaccctatgaagcaaatacatatcatacattttacaggtaaggaa

SEQ ID NO: 155588 - DNA, 122 bp, Homo sapiens
cctgtcatcaacagcttcagtaagaatcatgaggagtcacaggcgctgtggctgcaggagcgtctgggaccaccaggactgtttattttccttcaagggtcattgcatgcagggctcgaact

SEQ ID NO: 155589 - DNA, 122 bp, Homo sapiens
cgtgctcaggatgcttgttattgggcgaggtgagtgtgtcccaggccttggtgctaccttcgctggcatcgttccaagggctttcttcatctacggggtcgaaattcgaggtgtccatgggg

SEQ ID NO: 155590 - DNA, 122 bp, Homo sapiens
tcttctggaacctctttaaatgacttttgccgatccacgtgctgcaaagaagacctgaaccgtgcctatgaccctgcgcggcgactacagggacagaatttggctttccttctctttccaat

SEQ ID NO: 155591 - DNA, 122 bp, Homo sapiens
acggggggctgtgactgggccaggcaggggcggctcttctggcggcagtgacagagctcacgctgcatcgctgtgccccggggaagacttcacagctatggatatttagggtccagttcagt

SEQ ID NO: 155592 - DNA, 122 bp, Homo sapiens
agactcaaaggcaggccgaggggaaggctttatagcggaaaaaggagaaggcttcaggtacgtcctgttggtggtgcaggaaagctacagttgggctcattagaagaggggcatcctaagta

SEQ ID NO: 155593 - DNA, 122 bp, Homo sapiens
cttaggccagttcctggcacacattaaactctggataaatgttattttttatttcacaaacgggtgaaactgagagagcttagagcaggacatataggctgctttaccagctttgtgaatat

SEQ ID NO: 155594 - DNA, 122 bp, Homo sapiens
agtatttctgaaagggtgctcaacatttgagtcaggcatttcagtacagactagttaaaccggcaaattatgtacttgtgaagttctagccagagtgaggaccccctgggatgcaagccaaa

SEQ ID NO: 155595 - DNA, 122 bp, Homo sapiens
gtatattatcaagttttgttatgcctgtcttacagcttgtggttgtattgaaaaagtacccgatgagctccctagagaggatacctgttctgctctatcattttcaagttcatcctaaagat

SEQ ID NO: 155596 - DNA, 122 bp, Homo sapiens
tggacagggaaatctgcacaagtatttcgggtcacaaagaaggacgccccaggaagcccgcgctccctctggcctacctccctggccagggcccggagccctccgcttctaggcactgggag

SEQ ID NO: 155597 - DNA, 122 bp, Homo sapiens
tgaggcgtccctacacgcaagatgtacgttccggaaaggtgggacagctggacgtggggtcgggggcttccgggtcataggtggataagacgaatcattgcattctatgagtctctgatcag

SEQ ID NO: 155598 - DNA, 122 bp, Homo sapiens
gccgctccgcatggcggatccagccaatcagcgcgccgtgcaccgagcttcccgcctacgcgaggctgctcatccaatagaaaggagctttaccgctcgggacttgtcaattgacagtggcc

SEQ ID NO: 155599 - DNA, 122 bp, Homo sapiens
gtacgctgctgggtcctcaggcctgttcctctgtcctgctgtgtggttttaactgatggccgtcctcggcccgccctccttccctcctgcctccgtccttccagttgcagggctggggctgc

SEQ ID NO: 155600 - DNA, 122 bp, Homo sapiens
agaaaccttctgtggttgggccgcctcttggggggccgggtgcgccggggctgcagggcccgcagcatgtgggcggccgccccgctcacaaaggcacacagctcccgggggccgggctcgga

SEQ ID NO: 155601 - DNA, 122 bp, Homo sapiens
cagggtctgctccaccttccagtccacaggaccacacagctgcagggacgcaaagggagccgttgggcagctaacgtggcagggacgcccctttcctctccagcctccatgtgcgatatctc

SEQ ID NO: 155602 - DNA, 122 bp, Homo sapiens
aaatccagacattcccgtttggctgagcactctaggcctacatccatgaagctaggagagcgacactcaaagactgcactattgagagaagctaacgttaaaggcagtgaatatattcggga

SEQ ID NO: 155603 - DNA, 122 bp, Homo sapiens
accaggggttttggaaggactgcagtggtaaaggttgtggcgctccctgggacactgattcggagtgtggttgtgtgcagctgagcgtttggcggtgggtgaagccacgtggactgatgact

SEQ ID NO: 155604 - DNA, 122 bp, Homo sapiens
gtgggtgccaccgagcgcgtgtatcattgtcagagtgtctgtgtcactggcaagggtaagcgggagggagcagctggacctgggtagtgactgagcctggaaggaaagaggggtccccacca

SEQ ID NO: 155605 - DNA, 122 bp, Homo sapiens
gggcgccgcccggggaggcctgtgggtggctccggaggccaggctgtggcccggggctcccgagtcgcgctgcggcggctcttcctccctgccgctgcagcagagccgggctggggcgcaga

SEQ ID NO: 155606 - DNA, 122 bp, Homo sapiens
cccgtgagcaacagagtccatgcttacaggccagccgaggcaggaaggcttcacccaggccgggtggcgtcccgctctgccctcggccggctccgtgcctgggccgtgtttgtgcatgcgtt

SEQ ID NO: 155607 - DNA, 122 bp, Homo sapiens
gacacaagccaaccaaggctacagttagagaccggtcctcagaggcctcgtgtagtgcgacgcccttgtgtggcagtaagaaaacgagggtcctggaaaggccccggacactgcttgtggac

SEQ ID NO: 155608 - DNA, 122 bp, Homo sapiens
ttgagcaggagccaggctgagtggtctaggaccttccagccacaggtctcagggctgggacgggggagggtaaaaatgccaatagggtacgtgactgatcccttggtctccactccaaataa

SEQ ID NO: 155609 - DNA, 122 bp, Homo sapiens
ccccggggctcagacggtctcccgtggccatagaggcatccccggggctcagacgcctcccgtggccaaggaccactccccaggagccacgcctgccaggggtgccatgggcatcagagggc

SEQ ID NO: 155610 - DNA, 122 bp, Homo sapiens
ggggccctgtcaccgcgatcttaattgattcccaaaggatccagaaaagggacacattggcgcccgcccagggcgggcggggtcccccgggcggccaggccgatggggtggatgggcttctg

SEQ ID NO: 155611 - DNA, 122 bp, Homo sapiens
tgctggcaatcagggccgcagtgtgttctgcgcctgcccagagctgactcctgatttaaccgctggcgtaaccgcgggttgcacgcatgcgtgctgaaaagcctttcaccctcacgtggttt

SEQ ID NO: 155612 - DNA, 122 bp, Homo sapiens
aggttttggcaaatcaccaacctgggtggaggagaaaccgccctgggcattctgctgcttcgtgatccacttcacgatgttggttgcagaggtcaggtcctccgaggttggggctggctggg

SEQ ID NO: 155613 - DNA, 122 bp, Homo sapiens
gctcaagcaatcctcccgcttcggtctcccaagcaatcctcccgcttcggtctcccaaagcgctgagattccaggcgtgaaccaccgcgctcgaccaggaaaaaaaatatatatatatataa

SEQ ID NO: 155614 - DNA, 122 bp, Homo sapiens
aatttggctaagctattgagaaggctacaatatgtggaagtgtttatcagatatctgcgccgagagcataacttcctgtcagcccaaatagaggcaaaaatattttaaaggccaaagaataa

SEQ ID NO: 155615 - DNA, 122 bp, Homo sapiens
gcaagagacaattcccaaaagaccttaaacactgtgcttcaaattaagtcttgagggtgacgggagagctactaaaggcatttcagcctgggagcaacgtgatcaagaattttggtatagca

SEQ ID NO: 155616 - DNA, 122 bp, Homo sapiens
ccaagcgtcatgcctttgcctcacgcagacacaacacggtggagcagctgcactacatcccgggccaccacacctgctacacagccagcaagaccgaagtgaccgtgtgaccggcggggcag

SEQ ID NO: 155617 - DNA, 122 bp, Homo sapiens
tatcttagctctgataagatccacccctcagggcccacaatctcaacagtgtcctaacctcggtaagagtctctagcaagaggtgcagcctgcaagatgatcttcgcattcctgcgctcact

SEQ ID NO: 155618 - DNA, 122 bp, Homo sapiens
gttgcttctcttccgagacagcctaagcttttggagctgtctttgtttttctcttcatctcgtctcctttctccctctcgggagctgctggtgatgcctcagtttctctaactgaggtctga

SEQ ID NO: 155619 - DNA, 122 bp, Homo sapiens
gaggcctccttgagggccctgcggtgcaccatcaccctggggggagggcctggcagcgcccggagccccgccgctgacctctgcccttgcccgcaggtccccccactacgcctgccccgagg

SEQ ID NO: 155620 - DNA, 122 bp, Homo sapiens
ggggccgggccctttaggacgaaggcggccacaccagagacgcaccggcatgacaaaggccgccagggacccagtggctgtgaaataaagagatgaaggctttgggggtgggtgcccggagt

SEQ ID NO: 155621 - DNA, 122 bp, Homo sapiens
acgctgtaacctgactctccagccagatggacacttagtgctgaggcagcacctcgggggcgccaaagaggggcacaggggcagctgctacccaggcccagcccgttgggcactcagggccc

SEQ ID NO: 155622 - DNA, 122 bp, Homo sapiens
tgctaaatcagcaccacatgggcagtttcaacctggaaccaaagggccaccacccctcaccgcctaaccagttggaaacagggctgtcctgagccaacacccaggagagctgtgccagggcc

SEQ ID NO: 155623 - DNA, 122 bp, Homo sapiens
gtggggatcccaccgcggctcagtgtctagggccggtcccggcagccttctctcccgccccgccccgcaggtcctcgcgcaccccccgcgcccccgcaggcccagcacccatggctgcggcc

SEQ ID NO: 155624 - DNA, 122 bp, Homo sapiens
ggaacgcgccggacctgagggcttgtggtcgcgagggccgtgagaggcagcagtcagctgcgccgcgctgcgcttccccgggtggaggcggccggggagccgggacttgaagagccggcgcc

SEQ ID NO: 155625 - DNA, 122 bp, Homo sapiens
tggtcccctcctctggactgctgggactctaagctaggccctccccaggttccatcactgcggcgccaacccgcggctgggctgtccgcaagagggagttgaaggcgcgcggaatcccgagg

SEQ ID NO: 155626 - DNA, 122 bp, Homo sapiens
cagtctcgcatgaaatccttaaaaagaattccctgattgtcctacgtcattctggtgaatcgtgtatgtgtacttgtgggggtcagatgatgtgagaggttggaggtacgagtgagaaggag

SEQ ID NO: 155627 - DNA, 122 bp, Homo sapiens
ttatatacatgcggcctcacctggaagagaaataaaccacttgtactaaaatgtgcgttccgtttctgacttccacagctgcaggaaataacgagggtattgaaagatggagcgctcccctc

SEQ ID NO: 155628 - DNA, 122 bp, Homo sapiens
ttgcgcgagatccaaaaaccctctccgggggtttggatggggacccctttcctgtaacaccgctatactgtctgggttcaggcattgaagttattggactgcagagggcactgcctcattca

SEQ ID NO: 155629 - DNA, 122 bp, Homo sapiens
ggtgtggccacaactgtgtgtgtcaccacgggacggacccccggaccctgtcttgggaggcgagctgctctgcctggggtggccggtttcctcccctggagcccagggaggcagttgtggcc

SEQ ID NO: 155630 - DNA, 122 bp, Homo sapiens
ttctgtagaggacagtccagtttatctgccgaggattcctcttggaaaggaacgccaactcgcatttcgcattaagaaactggaaaaccttcccgtcggtcctggcgtagcgcctcccgtgt

SEQ ID NO: 155631 - DNA, 122 bp, Homo sapiens
tccatgccatcagcatctgcgtcgccctgtggtggtgtcagtgccatggctggtgccacgcggatgtcagcagcaaccagatggtgttgagtccactgacggcaatccacagcctcctcagc

SEQ ID NO: 155632 - DNA, 122 bp, Homo sapiens
ataagtgttgatacagtgttgataaggatttgggaacccaacaaaacctagaaggcagagcgtgggggtaataagctgtgttttgtctcactgaaggtggagattgggattcacgggaatgg

SEQ ID NO: 155633 - DNA, 122 bp, Homo sapiens
aaagagaagttcccagcgcccacctcacattctcgaatcgccttttcctccagcgggacccgactaatgagacggcccgaggatgccctatggtagttacttttaggcttccacagtgattg

SEQ ID NO: 155634 - DNA, 122 bp, Homo sapiens
gagacactgaggcccagacaggtgccaggcaggggaggagttgcggtgaggcaggtggtccgggaggaagtcccattaacttcagagctcagaaaacaggactgtccctccagaaagggcct

SEQ ID NO: 155635 - DNA, 122 bp, Homo sapiens
ccgggcggtcccggccagaggaaagggcgccctgggagggcccctcgtggctgcagaccccgcaggtcgagtctgccacggatggaactttggaaaaagctagggaaaaggagaaaccgagc

SEQ ID NO: 155636 - DNA, 122 bp, Homo sapiens
ggtctccctcccaggaaagcaggtggagacctccaggcttttctagaaaatataccagttcggacgcaagcccaggcgcgtcctcggagcctgtgctggccctcgccacagcctgcccaatt

SEQ ID NO: 155637 - DNA, 122 bp, Homo sapiens
gggtgctcaggtaccatgcttctggcccagcctcctgagctgtggcacaggcaagagcaccggcccacggggtctgcatggggcagtgacctgttctctctaagcttcagctttctcatctg

SEQ ID NO: 155638 - DNA, 122 bp, Homo sapiens
gcgatgccagggagggcgaagaaacccagcagcgggaagccgcctaccggtgggctagtgcggcgggggaagggaatcggcctgcatccgagactccgccgctgtggcgtgggacctcccct

SEQ ID NO: 155639 - DNA, 122 bp, Homo sapiens
gcgcgttaggaagtcaatagagattcagggccgtggcctggacccacagagaggaacaatcgcctgggtagcccattggcccgcggccgggtccgacgtcagtgatgacaggtcctgccgca

SEQ ID NO: 155640 - DNA, 122 bp, Homo sapiens
tctgttcacaatgattaacaatccaactggaaacttgtaattgcaaaagccaccctaaatcggtaacttataacttatatattagggcccatgtgacctaataaagaacatctttatccaag

SEQ ID NO: 155641 - DNA, 122 bp, Homo sapiens
gtggacgggagttctgaagggggcggatgggtgcccagcagagccctaaggcctccatggcgatgtgctctaaatccctgggccaggagctatccatggtactgggaccttcgagactgcac

SEQ ID NO: 155642 - DNA, 122 bp, Homo sapiens
tgagtggtaagcagtgttgagggagggtcttcttagttccagaaaccacaggaagctgcacgatggaggaataggaaccagtggaagacacacctgtgttagaatgaggacaccaacagggt

SEQ ID NO: 155643 - DNA, 122 bp, Homo sapiens
tagttactagcatgactgtcctcagtcatttccatttactttccccaggacaacagggctcggagttaggtatgggcatggcagagggtgtatttgagtgtttgcatatgaggcacacatgg

SEQ ID NO: 155644 - DNA, 122 bp, Homo sapiens
ctgctcccagagtggtggcctgtaggccagctccgccgggggcgagtcagggcctggtgacggctccccatacaggctggcgtcctccgacccctcgtcttcctgcaagtcccggtataagt

SEQ ID NO: 155645 - DNA, 122 bp, Homo sapiens
gctggagaaaattcaacctcccaggagactcagaaggctgagctggctgctcatgctcaccgggaaaaggatcagtctccacaggagaacatggaggctcagttggggccttctcttgggtt

SEQ ID NO: 155646 - DNA, 122 bp, Homo sapiens
gactataggcacgtgccaccatgtcaggctaatttttttaaaatgtatccttagtagagacggggtttcaccatgttagccaggatggtctcggtctcctgaccttgcgatccgcccgcctc

SEQ ID NO: 155647 - DNA, 122 bp, Homo sapiens
tactttctgaattaactgagacctgtctcagattttctgggcctgcaggccctatacaggcgaaccactttttatcttttatatcatactcttactgtgccttttctgtgtctagctttgtt

SEQ ID NO: 155648 - DNA, 122 bp, Homo sapiens
gacagaccttggatcataagaaataggactgagcctttaaatcctggaaggatgccgctgcggctcatatttctttcctatgtaaagcttgcttaagcagctggcataaaattgacactaaa

SEQ ID NO: 155649 - DNA, 122 bp, Homo sapiens
agtaaatcttttcacttgtaaacatataattaaatttgaggcttagtgcagtggctcactcggaggctgaagtgggcggatcccctgaggtcaggagttcgagaccagcctggtcaacatgg

SEQ ID NO: 155650 - DNA, 122 bp, Homo sapiens
gcttctcccggttatataactcttcctctcgccgtgtcctggtttcaactccacagactccgccctggaacagcgcggggaggggcgggagagttggggacccagacagattccggctggcg

SEQ ID NO: 155651 - DNA, 122 bp, Homo sapiens
ctggagtatccttccatttctcagccaaatactcatcttttgagactgaaatcacactggcgggaatgaagattgtgccagccttctcttatgggcacctagccgccttcaccttcttcctc

SEQ ID NO: 155652 - DNA, 122 bp, Homo sapiens
tgtctgagcaaagaggagcagcaagctggtaaacctgaaatactcatccaaagaaaccaacgtcgtcaacaattctgtgaaaaatgtggttatggtagggcttccaacttatttctggaact

SEQ ID NO: 155653 - DNA, 122 bp, Homo sapiens
ggaacaatgcccaaattttggggaacgcaaggcagagttctttctgccttgcgggcttagcgaatgggtgtcctggaggaggggaccccggggactccgttaatgtgggaaccgtgattaat

SEQ ID NO: 155654 - DNA, 122 bp, Homo sapiens
cagagatgattttagatttgaaagaggctttctgacctctcagatcaagctccttcacaacgtattttgcagaatagtagcacacagtgaacattcttgcaagtgattccccagttaactct

SEQ ID NO: 155655 - DNA, 122 bp, Homo sapiens
acctcttctctcggggggccgacaaacaggggtgctgcgcctgcgcgtccccggcggcagcgggctgtcctctaagcgcctgtcttccggctcctctgcatgctgggatacggagtccttgg

SEQ ID NO: 155656 - DNA, 122 bp, Homo sapiens
cgtagtttgaggtgtgtgcagagaccgccgtgcgttgccctccgggcagagcccacctgacgaggggtctctctgggtctccccagcctggcctggcctgctggtcactcctccacttggat

SEQ ID NO: 155657 - DNA, 122 bp, Homo sapiens
ccattctgcaaacacagcagccacctcagctgtcctagctgggaacctacttggcaaaaccgtttttggcaatctctttgcacaatattcactgactgtggctgtgaatggatataattaga

SEQ ID NO: 155658 - DNA, 122 bp, Homo sapiens
gggacgggggcagggagaccggacccagaggcactggggtagggctcggcagggcgggtccgggcggagcgcggggtgcggagggcggaggcggctccggcgcccgctctgcccgccgctgg

SEQ ID NO: 155659 - DNA, 122 bp, Homo sapiens
catgaccactaacatgacaaattcttaacactgccaaggaactcagtctattctaggggccgttactatacaacaatctgctctcattctatccctgtaattattaatgtcaccactagcaa

SEQ ID NO: 155660 - DNA, 122 bp, Homo sapiens
tccaagggtctggaaacatcttcgtgggacccatcgagaggttgtttaaagactggcacccgctcccgcgcccaggtggggaaagggctggccagaagtgaaagtccggtcggggcgccaca

SEQ ID NO: 155661 - DNA, 122 bp, Homo sapiens
ttgctgctgggctctagtccgttgttgttgtgcaggaatttgggtgcagggtgaagacatcgtttggtttttaaaagaagaaggaaatgcagattcttcttatgttaaaatctcatgatttt

SEQ ID NO: 155662 - DNA, 122 bp, Homo sapiens
aaagaccaggaaaacaccatgcttctgggttaaagataaaccaagaaggtattttaaaagcgagctgctggtccagtgggaacaatagataagttaaaggcctggggatgaagccaatttca

SEQ ID NO: 155663 - DNA, 122 bp, Homo sapiens
tccatggacagagttatttcccgccttgacccgcacattgccatgtgctgaacagagaaacgaggggcgatggggctccgtgaaggagcacgaaggagctgcgtgcggagcgtcctgcggtg

SEQ ID NO: 155664 - DNA, 122 bp, Homo sapiens
gaactttttcagggtgtgtggaaagatctcgaggcgtgtccccccctacccccaggaggccgagaccctgagcccccttgtgcgtcgcttccagaagcacgtccttccttgccccagagcgc

SEQ ID NO: 155665 - DNA, 122 bp, Homo sapiens
actacagctgccccacactgtgggcacacaaatgacctgctgatgttaaattaactgacccgtgtatgtcataaggtttctctcaattctgttcacactcttggaaaaatgcctcagaaagt

SEQ ID NO: 155666 - DNA, 122 bp, Homo sapiens
gcagtgcgcgcacgggtatcacagatacacgcagtgtgcacacggatagcacacgtagtacgcatgggtatcacatgcagtgcacacacaggtatcacacgcacgcagtgtgcacactggta

SEQ ID NO: 155667 - DNA, 122 bp, Homo sapiens
actcccctcaacactcactggaggactccacgctgttccaggctgtacttgccaccatcccgcatggctgtgttgtgtacagcctcgatggcccggtcaatggcctggaggacatcctgctc

SEQ ID NO: 155668 - DNA, 122 bp, Homo sapiens
ggccacgcccccggaagcggcggtgcaggtacgaaaagcgcgcgcggggattccaggagtcgtggtgaccagggaggggagccgggccagcgggcggcaggagactaggggagctgagccat

SEQ ID NO: 155669 - DNA, 122 bp, Homo sapiens
tactccgcccccgggcaggggtaggggagggtctattcggcagggggtggcctagctgtccgtactccccaaacgcaaccttccagtcccaaacccaggcgttctaagcgctcaggacgacg

SEQ ID NO: 155670 - DNA, 122 bp, Homo sapiens
gattccgacagcaggtaaatatgtcacttctaaaaccgttgaccatcgaggttggaaaggcggcagaaggtggccggcttctaaaaccgttgaccatcgaggttggaaaggcggcagaaggc

SEQ ID NO: 155671 - DNA, 122 bp, Homo sapiens
cggggacccgctgctcgaccccggcctgccggagcccgaggccccgccccctgcgggtcccgaaccgcttaccctcatccctgggcctgtcgagcccttcagcatcgtgaccatgcccgggc

SEQ ID NO: 155672 - DNA, 122 bp, Homo sapiens
agaggcggagggcggttgctaggaaacagcgtcttcgggaggaagtgacttccccaccgccgggtctctcgggtacccaacaccgctcttcggcccaacgtgtcgctggggcaaccacccag

SEQ ID NO: 155673 - DNA, 122 bp, Homo sapiens
gctgtgtgacggtgcacacgtaagaacgggccacacaggggatgctgatgatcggcgcagcggatcagagagcagcctggcgcggtttcctgcagctgaagatgctcacacccttgacaaag

SEQ ID NO: 155674 - DNA, 122 bp, Homo sapiens
ccctagcggcgccgccggggaactgcgcccgctcgcgccgggaggggccctcgcgccccgcgcccacaggtgcacgcgcccttggcgccgcctgcaccccacgcgccccctccgctccccgg

SEQ ID NO: 155675 - DNA, 122 bp, Homo sapiens
ggagtgacttttggaaccgcccactcccttcccccaactagaatgcttttaaataaatctcgtagttcctcacttgagctgagctaagcctggggctccttgaacctggaactcgggtttat

SEQ ID NO: 155676 - DNA, 122 bp, Homo sapiens
ttggaaatagatgttccttctcattaacaggttaaaacagaattctggatgggtgtttcccgtgcggggtgttacccaggtttactcgtctcgccccggggctgctggtgtcgctcctggca

SEQ ID NO: 155677 - DNA, 122 bp, Homo sapiens
cgcagctcccgcaccggcctggcgggttttgtggttagcaagttcctgcttccgtcgcagcgacggcaagtttgccgcgggggaagggcacgttcctgccctgcaacccggagctgcttccc

SEQ ID NO: 155678 - DNA, 122 bp, Homo sapiens
ccaacgaaacgggaccaagaaggaggccactgagagagctcctgactggactccttgcatcgaagcatcacaccttgaggacaacagggagaggaaatggggttgggactgtagtgacagac

SEQ ID NO: 155679 - DNA, 122 bp, Homo sapiens
gagaatggaggcagctactggaggccaagcacctccaggcactcaaggccctggggacagcgctactgactccactgcctcagggcaggcacggtgctgctctaccacttcctctgggcttt

SEQ ID NO: 155680 - DNA, 122 bp, Homo sapiens
tttggaggaagctgccatctggtgttggtgtctcagtgccattcccattccccgcccccacgctgcagccccgtccactcacacgggtctgggggtgcccacgctgcagtcccgtccactca

SEQ ID NO: 155681 - DNA, 122 bp, Homo sapiens
catgttctggcaatccacataggggaactcactggttgttcagtatctgtgaccctccctcgctcatgtctgtataatctacataatctaccccctttactctctgctctccttccttccac

SEQ ID NO: 155682 - DNA, 122 bp, Homo sapiens
acgcgttgcatagcaaccaggtctcctgcccctccctttgagacaagaggcggacctggacgccccgctcaaagatggcggctgactgagccgctttcaatttatttagcttttgacaataa

SEQ ID NO: 155683 - DNA, 122 bp, Homo sapiens
agctctgccaggctgcggcggggcagcacgctgtcctgctcccccaggggcatcccgtggcggctgatgacaaagatctgtgactcccggggcaggctgggcagcaggtccagggggagctg

SEQ ID NO: 155684 - DNA, 122 bp, Homo sapiens
gtaaattaacctgttttaaaacacaatacaactgctgccattcacacagcctgagatgtccgagtacctcaattgggaagtaaatcaaacactaacacctaacataaatcatatcaacatat

SEQ ID NO: 155685 - DNA, 122 bp, Homo sapiens
ccacagacaacgttgctaaacatattaattggtcccataaatacttgagcaaaacaaatgcgaaaatctgtcccgaattcagcctagaagaagcccagccctgcgcgtcacacttctgtgta

SEQ ID NO: 155686 - DNA, 122 bp, Homo sapiens
gcgagaacgcagagggaaggtagccgcaggacgcggggtgaagagggctgtgggagggggcgctacctgtgcccgggtccagtccccaaaccagcagcagcagcacgggcaggacgagcgga

SEQ ID NO: 155687 - DNA, 122 bp, Homo sapiens
gtccagcaggatgtgtccggtgccatagccgaagaaggcgttggtggtggcggccatggccgccccgcagcccagctgacgacagaccacagcggcatccggcagcccccagtcgtcgtcac

SEQ ID NO: 155688 - DNA, 122 bp, Homo sapiens
ggcggttgtacaccttcaccacatggaaccggaagctgtagacaccccggacaggggctacgaaggagccagaggcccggtcaaagccaccgccctcgttcaccaggacctgggggaagcag

SEQ ID NO: 155689 - DNA, 122 bp, Homo sapiens
ggcccccgatgagactgctggcgggctggctgtgcctgagcctggcgtccgtgtggctggcgcggaggatgtggacgctgcggagcccgctcacccgctccctgtacgtgaacatgactagc

SEQ ID NO: 155690 - DNA, 122 bp, Homo sapiens
cacgtaaaatgcggtcgggtagaaacctacttccggtccagctcactagccctggagttccggccccggagcggagcttctgccgagcagaggcggggcctggggactgggcgttaacatcc

SEQ ID NO: 155691 - DNA, 122 bp, Homo sapiens
cttgggggcggagatctgccctgggcctgtgtcagggaagggggcttggggagggtgagccggacactgagctgtgtacaagtccacaaccgtgtgagcggcacgaggtctccccgctgcag

SEQ ID NO: 155692 - DNA, 122 bp, Homo sapiens
cgcgcggctccaccagctgcttcagcacctgcgcctcctgcgttgggaagggaacggagccgcttcccctgcccaatgcgttggcctccagggtggcactcccaaaagtggaaactgatttc

SEQ ID NO: 155693 - DNA, 122 bp, Homo sapiens
tccctggtggcacaagtttctcaagacactttctaactaagaaatggaacatcagctgggcgtggtgccgcatacctgtaatcccagcctgttgggaagctgaggcaggaagatcatttgag

SEQ ID NO: 155694 - DNA, 122 bp, Homo sapiens
gcctcctttgccctcccttcccccatgctggagaagcagggcccgggcccggtgcgggaacggggaggaggtaaaccagtcctgtcaccgcactgagagaggctgtaaacggcacatgctct

SEQ ID NO: 155695 - DNA, 122 bp, Homo sapiens
tacgttgtagccgcatcggatttcaagggcagaaccttcaaggtcgttggggccagtgcccgtgtggtatttgtttttgctgagcggctctttgctgtgctgcatctcctcgcctcctttga

SEQ ID NO: 155696 - DNA, 122 bp, Homo sapiens
tcccgccaactgtgggatgttctctttctgccccgaatccctggagcgggagcgagagcccgccgctctcagagataccgagataaccgcctgcgaggaggcgcttcgtgaacccagtgcag

SEQ ID NO: 155697 - DNA, 122 bp, Homo sapiens
caacccttcaaagaagaaagtttagcatttccactttactgttaaagaaacaggttcaaccgggcgcagtggcttacacccagcactttgggaggctgacgcggatggatcacttgagccca

SEQ ID NO: 155698 - DNA, 122 bp, Homo sapiens
ggagacctgaggaacgccaggaaagtggtgaggcttctcagaggcggccccgtccggctccgggcctggcggattagaggaatacgtggaatttccaaatttagcattcaggaatagcttcg

SEQ ID NO: 155699 - DNA, 122 bp, Homo sapiens
gcatggagagggcaacaacaggaaatggagagaaatccgtgcaaggcactgttttcaagccgttataccatgtttaagtgtgttataaaatatgtacctttaaaaatgagaagcaggtttgg

SEQ ID NO: 155700 - DNA, 122 bp, Homo sapiens
tctacgtcggcagggggcgctgcacagctgcggggcggggtagcttagacacggggcgtccggctaaggccggggacccagggtggtgggcggggtgtcccgcccgcctgtggaccccgcgc

SEQ ID NO: 155701 - DNA, 122 bp, Homo sapiens
ccacccggggccccggccgtgtcgggtctgcggcgtcccgtcgccgggctagagagaagccggtgcaccaacaaaggggcggggagccaggcgcactcacccaggtcaccagcgggctctgc

SEQ ID NO: 155702 - DNA, 122 bp, Homo sapiens
gaggagggggctgagctgaactcagcagaagttacatgcacaaggttagtggcccccacacgcctccccagcccgctgccgcgctgacatctttggagaggaggcttaggaaggcgaggcgc

SEQ ID NO: 155703 - DNA, 122 bp, Homo sapiens
ccggcgctgggggcccatcccatgcccacgctccctgccagtggcccgcagcccacctggcgtagctgaccaggcagagcagcggtgtctccagcagctgcaccaccaggagcggcccggac

SEQ ID NO: 155704 - DNA, 122 bp, Homo sapiens
cagcgagcttcttctcttaactctaggctgaggcctttgagaactcattttaacagagaacgtggagggccaagagaaccagataccaggaggaggagggattcgagaagtggacaattgta

SEQ ID NO: 155705 - DNA, 122 bp, Homo sapiens
aaccgatcttctttgtgccccagctccatccccgccccaccaccctgtcctctcatcccccggctgctgagtgtgcacagaggcatgtccccttgaactcagaggcgccgtcgccctgggcc

SEQ ID NO: 155706 - DNA, 122 bp, Homo sapiens
aggccctgcagggagagggctttgcagagcacacagtgaggcgtcgctggcccggagggacgagtcaaggacagctgtgtgccttcacagtcccgcgctgtcgagacacagcccgaagtagt

SEQ ID NO: 155707 - DNA, 122 bp, Homo sapiens
tgggtcacccgggcggtgtcgcatgtcgtctgcggggaggttggggctgctcgcgcgaggcgctctgggtctcatttccgaggccgaaaatgctggctccaaagtggtgccctgggagatga

SEQ ID NO: 155708 - DNA, 122 bp, Homo sapiens
cgcagccctttctgggtctcctgtcccgagcgccagcaccgccagcagcgccgccagccgcgccccaggacccatagccagcgctcgcgaacttcccctcagacagtcctggccgcgcggcg

SEQ ID NO: 155709 - DNA, 122 bp, Homo sapiens
ggcgtcggcagcggctcaggttcaccaagaggtcggcggagggctctgcgggagggcgggcgtcggcggcgcaggggcgggggcgggggagggcggggccggaggctcaggggcggtgccgg

SEQ ID NO: 155710 - DNA, 122 bp, Homo sapiens
ggggaaataagttttccccaactcacacagcataagcaatgtttgacagcaatataatgccgttgtaaactactgagagtattgtatctgttctggtaaccatgtacagaatgtgaaactgt

SEQ ID NO: 155711 - DNA, 122 bp, Homo sapiens
gccaggccacctgcctcggccatcgcaccccggatccaacgcccttccagaggagggcagcgccctggtaagagccgggggttccctgggccttggccttgcctccccgggcctccgaagcc

SEQ ID NO: 155712 - DNA, 122 bp, Homo sapiens
tcaggtgatccacccgccttagccttccaaaggctgtggacacctgtagtcacaactactcgggaggctgaggcaggagaattgcttgaacccaggaggcagaggttgcagtgaggtgagat

SEQ ID NO: 155713 - DNA, 122 bp, Homo sapiens
ccgaagtgtgcacgcccctctttggcggcctcagggcctagaacaatgaatgagtcaacgcgcctgcgcgccacgagagcctacccacgcatgcgcaaaaggcttagctagctaagccgcgg

SEQ ID NO: 155714 - DNA, 122 bp, Homo sapiens
gcacagagaaaataatttacttgccccaaatcactgtttaatagttcatcattggccaggcgcggtggctgacgcctgtaaccccagcactttgggaagccgagatgggcggatcacttgat

SEQ ID NO: 155715 - DNA, 122 bp, Homo sapiens
ccttcgtgggggcgatgtccaccaccggcacccattcctccgccagggccttcatggggacgatggccactgccaccactgatgccaccgccagggccttcgtggggacgatgtcctccacc

SEQ ID NO: 155716 - DNA, 122 bp, Homo sapiens
accgggccgggcaggaagtgacgggcgcccggaggcgggcaggggcggggcctggggctgcgcggcggggcgggggcgcccacctcccggctgccgggaacgaacgcggaaacccaggcgcg

SEQ ID NO: 155717 - DNA, 122 bp, Homo sapiens
gtggcagaatgttctctgctgggtaagagagaagtttcacactcaaggggatgaaaatcccgactgattagtcataaacactgctaaaccctggaagtgggatcggaaggataatatcttcc

SEQ ID NO: 155718 - DNA, 122 bp, Homo sapiens
aatatctttgcagactgtaatgaccctgtgaaaatcaagtttgagggaatgaaagaatagcgacttggttagtttgaagaatcagcaaaggcttcttcaaagaagggacacatttgaccgga

SEQ ID NO: 155719 - DNA, 122 bp, Homo sapiens
ggactcaaccacggcaaaccctgagtaataccgtgcggcagatgcacctgagggtgggttcggagttccaatctgagctatggaacctgggtatggacaactggataatccacttctcattt

SEQ ID NO: 155720 - DNA, 122 bp, Homo sapiens
gcttcctcgctctccgagtgcgcaagcgcagcgcaccgagtggacattttggtctttgtccgcgggtcagtacggcccctgggtccacgtggcgcgaaagtaggaggtgggatctgggcgtc

SEQ ID NO: 155721 - DNA, 122 bp, Homo sapiens
agtattttatagaagaacttgtaaaaccaagtggtgcatttcattagaactcaagtggcccggagaaaagaaaaagaactcatttcccatgagctcttagagccactgaaagctcagaacaa

SEQ ID NO: 155722 - DNA, 122 bp, Homo sapiens
gaagctgtgagtccttgggccctggaaggagcgcagcctctgagacactccgctccagcccggcttagcgcgccttcatattcatcatcaaaataagacggttagaatcttgcagcagtgag

SEQ ID NO: 155723 - DNA, 122 bp, Homo sapiens
cctaaggcaggtagcccctacagctgtgttgttcccctattggctagggttggaccacaccgtctgagctaattgttactggctattttaaagagagcaggggtaagagccggattggcagg

SEQ ID NO: 155724 - DNA, 122 bp, Homo sapiens
gcaggacggccaagaccagcgcgagggccctgggcaaggcccgacaggtgagcggggaggcgctctccgccggtgccgggcggctggtctgctctggacgccgcgtgacgccattcgcctgc

SEQ ID NO: 155725 - DNA, 122 bp, Homo sapiens
attttcctttgtaaaggcaacacagattttcatttgtaaaggtgtttttctctccagtcccgagtgtaggataattattcttatctgcctaacaaaacttactaaacaagccttatctaccc

SEQ ID NO: 155726 - DNA, 122 bp, Homo sapiens
gcgccattcccgcagggcgcagggcgagtgtgccccctggagttgtgccgcgcagctgcccggctcccaggccttcaggatggattttgacccctgccaacctccacctgtccacctgcggg

SEQ ID NO: 155727 - DNA, 122 bp, Homo sapiens
tcctgcaatagcttcccttacagttatctactgaaccctggctcactgcactgctttccacgctcttctgttatatttcttggtggcttcagtagtcatgatgacactgcttccaacatttg

SEQ ID NO: 155728 - DNA, 122 bp, Homo sapiens
tccatgcagccccaggagggccctgagcacgcgcactcaccgcacatgcccaccccaatgcgtgggcatccactgcgcgtctcccttacgtgactcagttgtcgtctctgcctcagcccagt

SEQ ID NO: 155729 - DNA, 122 bp, Homo sapiens
aagcaattctcccacctcagcctcccgaatagctgggctataggcacatgtcaccacactcggctagttttgaaaaaatttttttgtaggcagtgtaccactatattgtccaggcccatctc

SEQ ID NO: 155730 - DNA, 122 bp, Homo sapiens
gggagtagaggtggagcttttcggttgctggaagactgttttgctttgcttgggggaacacgggaaggttagcggctccctctcccaggaccgccaagggaccgctttaaagtccgcagcgg

SEQ ID NO: 155731 - DNA, 122 bp, Homo sapiens
cattgtgtgagccccgcgcttctgtgggctctgtcgtgcgccgtgcctggcgctgctgcgcggaaatgtattatctcctaatcgttagaggcccctgcattattctgtgtaattaacttgac

SEQ ID NO: 155732 - DNA, 122 bp, Homo sapiens
aaccagacgggctgagagcagttcccgggcctccagaggctgcggctcgcacagctttgccggctgtggttatgaactgtgatctgacagtggaaggcagcacttgttaggaaatctttatg

SEQ ID NO: 155733 - DNA, 122 bp, Homo sapiens
agcgcgcgtactcctctcggttatagatgtatctggtcacaagacgcacgcgctccgtcccgttggtgaagtagcacatgcccttaaactggaacacgaaatcctctgcggggaatcaccgg

SEQ ID NO: 155734 - DNA, 122 bp, Homo sapiens
gctccgcctcctgggtagcggttactgcacggtcaggggcccggcgccgcgatgagttggcgcctccccctgaaacggcccggcctcggcgggatgcgctcgggtgcccggccgagacggaa

SEQ ID NO: 155735 - DNA, 122 bp, Homo sapiens
caacttggcactgggcttaatcacagcagcaggctagagagtatgcaagatggaatttaccgtctttttggaaccttctctccaaggtgatatcctatcacttttgcctgatcctattggct

SEQ ID NO: 155736 - DNA, 122 bp, Homo sapiens
atgggaataacaacagtgtctacctcgtggccttaggagggctgggagctagcgctgtggcgttagggcctggcaactgccccgtgagcatgaatatcacgacagtaagcgttacccgttaa

SEQ ID NO: 155737 - DNA, 122 bp, Homo sapiens
gcacgggcccgggggaccagggtctggctctctcccgaggaatgctgagcaggctctggacgcctctccgtgcacaccccagacctggggaggggagctctccggacaccccagctggccgc

SEQ ID NO: 155738 - DNA, 122 bp, Homo sapiens
aaatataagtttccctgagttctgtgagccactctaacaaactaattgaaccccaagagacggctgtaggaaccccagtggaagctgattggtcagaaattctggagcttggacttgtgact

SEQ ID NO: 155739 - DNA, 122 bp, Homo sapiens
cagtcccttgttgttgttttgtctggagtgtctgtcatcaggaatttggcccgacacccacgcgctccgcaagggagccagggggaggggaaggacacaggagacagaactcctgggggaga

SEQ ID NO: 155740 - DNA, 122 bp, Homo sapiens
atttattattcataaacttacctaaattctttcagctgaaaacatcgttgatcaaagaaacgctactgcatgctttggaagtcagaaatgcacccaacacattcagaaggcccagcttcagg

SEQ ID NO: 155741 - DNA, 122 bp, Homo sapiens
tctgcagtcatctgactctgaaaacctcggtgctgggctcacgctgtgactccactgggacgtcctgagtcattggcagtctcgcttggcatccattctctgaccgccgccggctttccacc

SEQ ID NO: 155742 - DNA, 122 bp, Homo sapiens
gactacgtttcccggcgtgcagcgtgctggccgtaagcattacgtcctccatcgcgggcgcgcaatgcacctcggggatggtagtgttctggtggcccaacggttttaacagcccgggaatc

SEQ ID NO: 155743 - DNA, 122 bp, Homo sapiens
catgtcacgttgttccttccatctcggctgtcccgagtgccacagccggggccactgctgcgagtgagggctacggtcctgctggcctttccaggtggccttctgcctgctccgctcggcga

SEQ ID NO: 155744 - DNA, 122 bp, Homo sapiens
tgcggtgtctgcgaccgggaccaaggcggagcaaagtcgccgggggtgtggggtgttccacgctatgttgggagtgttcgctttcgaggtacatgactacgttctaaattttttttttttga

SEQ ID NO: 155745 - DNA, 122 bp, Homo sapiens
tctccaaaaaaatgaaaataaataaaacaaatgttacctgtggttgatccaaggggtaaccggaggtgtgtggccctgtgccaccaccccaaattgtgcctgttgtccaaacacagcttcct

SEQ ID NO: 155746 - DNA, 122 bp, Homo sapiens
cctgtgcagagagaggacacggcttcaggaggggatgctccccaactcgcaagcagcttccgacgcagttgccaccctcaggacaccaagcccgcctgcccgcccaccctccctgggaccca

SEQ ID NO: 155747 - DNA, 122 bp, Homo sapiens
gtgaaggagagaggcgggattgacagcctctctggcggtccggaggcgggactaggaggacgtcccggtaacgattgggcagggtcctgcgtaagggcgcatgcgacactggaagtagcgag

SEQ ID NO: 155748 - DNA, 122 bp, Homo sapiens
atgcgcgacccagcccggcctgccagcctggaactcggatggggaggtctcgcctccgcgcgccgctagttccgccgccttctcgcgctccctgcgtgtcctctcgatgccctttcctccgc

SEQ ID NO: 155749 - DNA, 122 bp, Homo sapiens
ggcggggcggggaggggcagttcgcggccggagggagccggctggatggaggcgcggaggcggtgccgcgggggcgggacagagcctgactgggcagagcgtggagggcggagactcccagg

SEQ ID NO: 155750 - DNA, 122 bp, Homo sapiens
gaaatggagggaccatgtttttctttcccaattagggcagcttgtgaaaggcccactgaacgttcagtgcaaagacttttatggctatgttccatagtcagaaatgcatattgcagagtccc

SEQ ID NO: 155751 - DNA, 122 bp, Homo sapiens
gtccttggtgactgagcctcagtctacttggttgggaaataggacggtcgggagtgaacccgcccagggtgggcttccagtcacccgcacatatgcggggcactggccgcccatccctgcca

SEQ ID NO: 155752 - DNA, 122 bp, Homo sapiens
gctacctcccaggcaaaaattcggcctggttaaactggaaagaccaggaaagcccgcccacgggcgtccggggaacgcctgcaaagtgccagcaccctaccaacccaggcgccgcacgggtg

SEQ ID NO: 155753 - DNA, 122 bp, Homo sapiens
agctataactcgttaactcttatggggcctcagcgttgagatgctcattctaggtacccccgagggggacaaatcccttcctagtggctcggatgcaaggttgcgtcccacagatagggttt

SEQ ID NO: 155754 - DNA, 122 bp, Homo sapiens
ttggggtattcctggtcagtctcgtggccgggttggggtattcctggtcagtctcgcggccgggttggggtattcctggtcagtctcgtggttgggttggggtattcctggtcagtctcgtg

SEQ ID NO: 155755 - DNA, 122 bp, Homo sapiens
tacttttattttgcgctttcagcaaaatcctttctgggttgagtagccgtgagctgcccgcggccgacctacctgaccgggggcgcagggagtgcggaccacgccagcaggactgtcctggg

SEQ ID NO: 155756 - DNA, 122 bp, Homo sapiens
gaagggagtgggccaaatccacaaaatccacatagctgattactcctagagcaagtggggcgagaaccttggtcacttgactcaggacagtgacttttcactcttctctctttccaccagga

SEQ ID NO: 155757 - DNA, 122 bp, Homo sapiens
tctccattcctcttaacagtcctgggtgggggaggggggagtatatttcctccaagttatcgatgggaaactgaagctcagagccgtcaaggccacccaagcaggaagtggctgtgaggctg

SEQ ID NO: 155758 - DNA, 122 bp, Homo sapiens
cctatgtgtggactgacaatgaataaaagaagcagaaatccatggtgaactttatttcagcgaatagaggacaaagatcagcgacagctcctgtgggattcgggagatttgtcagccacgta

SEQ ID NO: 155759 - DNA, 122 bp, Homo sapiens
cgctagaggatggcccacgctcccgccccggattcaaccagattcccagcacgcagcagacgccctaaagcctgctgaatgcaatgggtacaagaacagcggagtgtgcccctgtggctggc

SEQ ID NO: 155760 - DNA, 122 bp, Homo sapiens
cgcagagctgaggaactgcgtgtggagtcagcccagtctggatgcacaggaggatgctggcggcacagtgagtgaggcctggtgccagagctgtgcggaccccttgttggccatggagcagc

SEQ ID NO: 155761 - DNA, 122 bp, Homo sapiens
gcgcgcccttctgcacggggaccccagcccacccccgtacggacacgccttccaccatctcgcctagaaggctgctgggaccccagacccagagccccggtcacactcccgtcccatgctgt

SEQ ID NO: 155762 - DNA, 122 bp, Homo sapiens
gcgggaggggtgatggggtatcttcaaacataggctgctctctgcctctcatttcctcagcgggcgcccaggcccttccgacccccacctgcaccccctccctccctaggctggtcccgctc

SEQ ID NO: 155763 - DNA, 122 bp, Homo sapiens
taatgtacataagataacgtgaggaggcaatacagtgttgggaggggcgggaataagagccgggatggcaggcagctagagtgcaggggagtcattgacttgttcattcattcgttagcacc

SEQ ID NO: 155764 - DNA, 122 bp, Homo sapiens
ggcacttctaggcagctaccaggagatcccggttccaataatgaaatactacaatgttctcggcagcctgtcctctcagtgagctgtgtcctaggattcacccacaccaacatcatttcaag

SEQ ID NO: 155765 - DNA, 122 bp, Homo sapiens
gcgcaggcagaggtgctgaggacggtcaggggcagcgaggaacgccacaggaggccgacgcgggacgtacgtggagcggtgttccacggcgggctggaggacgcacgctgcctgcctccaag

SEQ ID NO: 155766 - DNA, 122 bp, Homo sapiens
ggcggtgagcaggggcgtttgttattttgctccacgcctgggcagagccacgccccttgtcgcgctattggtggagtcccttcccggggcggggaagagacggtgaccccacccccccccgc

SEQ ID NO: 155767 - DNA, 122 bp, Homo sapiens
gcccggaagcgaagaggagaggcgagaacagcccccccgccccatctcgccgtctgcagccgccctccccttgtgcaggaccccagggactggtaggcagtgccccttccctgtggctgcag

SEQ ID NO: 155768 - DNA, 122 bp, Homo sapiens
cacgattcacgggaatcagcggtggaaatgggagtggctcttctattacccttagtgatccgctagtgaaatttttgcttcccatccttgaaacatcggactcttgctggcctagaggtctt

SEQ ID NO: 155769 - DNA, 122 bp, Homo sapiens
ccggtgcccaccggcacaggaaggacagccactcgagcagaaagcgccgggtcttctccacgccctgcgtgtccgagccccagtgctccaggccgtagttggtgaagtcccgcaggatgtcc

SEQ ID NO: 155770 - DNA, 122 bp, Homo sapiens
ccctaaacgtgtgacgtttttgtccaccagcacagttaaaagctccagctctgaaaaggacgcccaactgcgccactggctaattgtttgaccctaatggaagcctgaatttcctcaatctg

SEQ ID NO: 155771 - DNA, 122 bp, Homo sapiens
cttctgcaagaaagctttaactgctttgacatgccaaaaatccaggtgtgaattaaacaacgaatgctttacctcgttttcaccactagttctaccagtcagaatcttttcaaatcatcctc

SEQ ID NO: 155772 - DNA, 122 bp, Homo sapiens
ggacatggtccaggggcctgctgagtccaggcagccgcgagcgcagacccccgaagcccgcgcgtaggcgcccatggctcagcagcttcctcctggggttccccggccctggaaaggccggg

SEQ ID NO: 155773 - DNA, 122 bp, Homo sapiens
gacggactgggccagggtcgggccacagccaagaacagtcggccacggcgtcccggggcccgggccgtcctcctgtctgtcatctgtctgtctgtcagcctttctggccaccctctgcctgc

SEQ ID NO: 155774 - DNA, 122 bp, Homo sapiens
ggccataggagaagtcactgggtcccctggtctgattgggtcctcgtccataggcagcaccgccaggcaccacatgagacaagggatggaattatggactggagcgggaaagaagaatgagg

SEQ ID NO: 155775 - DNA, 122 bp, Homo sapiens
agagcagccaatgaaatcaagagggctttcaccaggatagccaaaaggctaagaagcaggcgagggaagttttgcagaaacagcagaagcatgaatctgtctgatgcgggcttgtttgtgaa

SEQ ID NO: 155776 - DNA, 122 bp, Homo sapiens
acggaagcccgacccacaacaaagctagtgacagttcatttccttcctgcttacgggggccggcgagaggaaaggatggcggatgtgagagggggaggaaggacgcgggctgggagaatcca

SEQ ID NO: 155777 - DNA, 122 bp, Homo sapiens
gtctctgctcagggcttcggggaccctttccagccattgccctgcacctacccaccagatcgccgccctggtgggcgctcctggccctgtcctccgcgcttagtttgtcattgggcgcccag

SEQ ID NO: 155778 - DNA, 122 bp, Homo sapiens
gcccggccggtgcccagcgctctgagagcccgcggagcgcagcaggcgcagctagccccgcgcacccagcgcggccctcacgtggccccgccccgcacccgcccctggccccgccccgcacc

SEQ ID NO: 155779 - DNA, 122 bp, Homo sapiens
cacgaaattaagcgtgggtataaatgaggctgcagaactgtgctgtgcggctgccctcgacgccctgcctatgggggggctgcaaccctgcacctctgtaaacctgcttctcccaccaccag

SEQ ID NO: 155780 - DNA, 122 bp, Homo sapiens
ggcttgcagccccaggggccaggccaggaccctcagcagcagcttgtgcccaagaagaagcggcagcggttcgtggacaagaacggccggtgcaatgtacagcacggcaacctgggcagcga

SEQ ID NO: 155781 - DNA, 122 bp, Homo sapiens
gcccgcccgggccccggttcgcccatctaagctgatgcttgggccccagctggacattcacgctcccaggccatccccgcttgccagatgttttttgcacctcagggtggtgggggatcggg

SEQ ID NO: 155782 - DNA, 122 bp, Homo sapiens
cggactcccagacccagacctcctttcaatcacatttgttcaaattattcagcaatatagcgcatgtaatcttgtgtaaagacagcaaatggggcaaaataattctccccagagaaagcgtc

SEQ ID NO: 155783 - DNA, 122 bp, Homo sapiens
aggagccgcgcaggaggccagaggctgagccctgaggggcggggacaggccgcttccctgcgtgcagtttcacaagctcaagctgctgtgtgcggtccggaaagagtagtatgaggcctgac

SEQ ID NO: 155784 - DNA, 122 bp, Homo sapiens
agaggaagctgtgagacaggcagggtgtgcgtgcaatgctttggaaacagcgaagcgtcacgcaatcttaattctctctttccacccgaccaccagcagcaccccagcccgcagcttcccca

SEQ ID NO: 155785 - DNA, 122 bp, Homo sapiens
tacttcactgcggggagcatgccagtcacgtgccagctgcactactgtgcacggggcagacgggctctcccagggctacccagccaccctcccagggtgtgccccagactcacaggcgcatt

SEQ ID NO: 155786 - DNA, 122 bp, Homo sapiens
cgggccgcgcccccggcgccccgcacctggcgcagctcctcgcggcacacggcgcagtagcgctgctcgcagagcacccgcatcttggtagagcagcggtagcacaccgggtggtcgcagcg

SEQ ID NO: 155787 - DNA, 122 bp, Homo sapiens
tatccctttaaagaaaaggaccatggagttagccaaggccagttggctgagaatcaagtccgtgggtctcagcttgtgtccagtgaacaaaattaagttataaaaacaaaggagaaaggaat

SEQ ID NO: 155788 - DNA, 122 bp, Homo sapiens
ggcgttccgggctcgccagccgtgccacccagccctgccccaggactagccgacccctcgcgcagtccggggagccactccccccaactcacgccccgctactccagccgcagctcggctcc

SEQ ID NO: 155789 - DNA, 122 bp, Homo sapiens
atccctctctgtaacctcactagagcactcaaagttttccaaatatgctggggccttccacgcccctgtgttcttgctcctgttcttccctttgcccaagatgccctctaaccttttctctt

SEQ ID NO: 155790 - DNA, 122 bp, Homo sapiens
gagggcgctgtgaggagagcgaggctcctccgggaaagctccttctgctccaggtgacagcggagagagatgccaccgcgcggcgaccggcagggccgcgtcccctctgcgtcctagcacag

SEQ ID NO: 155791 - DNA, 122 bp, Homo sapiens
tgttctttacttggctcctgctcagggactgttcttggatgatttttgttttagtaatgccgatatgttaaagagggtttttctggtttttgttttatggcaattacactttctctctttcc

SEQ ID NO: 155792 - DNA, 122 bp, Homo sapiens
gggctgtgccctaggcccaggacagtgtcctggccaggccaggcgcagttctaggcggcccggggaaggcgaacccaggggctgctcccccaggccttgggagccgcgcggtggggagggtt

SEQ ID NO: 155793 - DNA, 122 bp, Homo sapiens
ggagtggagctcgcggctattttcagctccagcggctccctgccttcctttctcctttcccgctggcccttgccaggtaggcctgccctggctgctccccagtgagcgggtgtttggggttt

SEQ ID NO: 155794 - DNA, 122 bp, Homo sapiens
gttaaaccccccaggcagtgcctcgggcagactaagtccagcacctcatcattatcctcccggaaatccttgggttggatgaatctgcaaccattagctagaatggaaaggttttgacctgt

SEQ ID NO: 155795 - DNA, 122 bp, Homo sapiens
aaacaatgtagtaaagaatgaagagaaagcgggccttcctggaccaatgatgacaactgccggcgtatgagtgttgggtgatgaataatacgtgtctagaactctgaggtccaacatacaaa

SEQ ID NO: 155796 - DNA, 122 bp, Homo sapiens
ttcttttcttttttccttttgagatggagtctctgtcacccaggtgggagtgcagtggcgcgatcttggctcactgcaacctccgcctcccaggttcacatgattctccctgcctcagcctc

SEQ ID NO: 155797 - DNA, 122 bp, Homo sapiens
tttggtggagccggtgaaatccaggttcccagagtgaccaggcggcatcttttggaacctcgaggaggcgccggccggggctgctagatgccctgcagggagtggttggggtcactgcgctc

SEQ ID NO: 155798 - DNA, 122 bp, Homo sapiens
gttttcggcaagagctgcttcccgagcgggttcacggtggaggtgtgaacggccacggggcggctggtctggttctcgtccattaagaccttgagttcttcgttagcttcagtgagactgac

SEQ ID NO: 155799 - DNA, 122 bp, Homo sapiens
accaacgtaaattgaagaggcgtaaggagatgaggccaaagaggaaaggggaccaggtcacgtagaacctcgtagaccactgcagaaccttggcttacgtacgcagagacagcaggaaccac

SEQ ID NO: 155800 - DNA, 122 bp, Homo sapiens
accgcctgacaggtacccccttctccctcccgccgcccggttctgtgctaacgcgactttcgccctcagggttggagctgtatttgcggtagctgtttcttagctcccagcaagtccggggc

SEQ ID NO: 155801 - DNA, 122 bp, Homo sapiens
gaccttctcggcttcgggcagcggtgctgttccttaggaagctccaacccttggctctaccggactgcgggcatctttcccgagcactgcacggaagaaaagaaaattggcacttatttcag

SEQ ID NO: 155802 - DNA, 122 bp, Homo sapiens
gtaaaagataaagcacaccagtgacaaaatggatatgtttcccaccatgaatgcatatttcgtttgtggcagtttaaatattacactttgcttcaatgctgtctgctggttacaaatagccc

SEQ ID NO: 155803 - DNA, 122 bp, Homo sapiens
atacattgctaacgttttagctcatcccaccctacgttttaatccctcagatgcagacatcgcggacagccacgcccactcaagaaatttccgaaacagaaagtttgtctgcaacagcgcgc

SEQ ID NO: 155804 - DNA, 122 bp, Homo sapiens
cccgccaccccggccccggtgctgggcaaggccctggtcaaaggcctgcacgacagccaacgcctgcagtgggaggtgagcttcgagctggggacccctggaccggagcggggcggcgcgca

SEQ ID NO: 155805 - DNA, 122 bp, Homo sapiens
tacattaaaaacacaccagcccagatgcaaaaggctgcagatcatatgattccattcatacgaaatgcccaggacaggcgaatccagagagacagacaggaggtgagcaattgccaggggct

SEQ ID NO: 155806 - DNA, 122 bp, Homo sapiens
agtagggtgtaggaaggcctgcctctgcctatggtggggtcttgggaaccaggaggaggccgtgacccgagaaaggtgctggactgaagcctcaaccctcctctacttgagccattcctgca

SEQ ID NO: 155807 - DNA, 122 bp, Homo sapiens
cctcaggacccctacctgggatcctcagagctggggcagaagcctcatctgtagccctggcgtccgggcagccttgtgacccagggcctctgggaaggcagccgtggccccttatggctcct

SEQ ID NO: 155808 - DNA, 122 bp, Homo sapiens
gaggcacagctcatctaaaaatccttagttggctttggacgtaatggatggccccatccacggaacccccaccccagagttaggttctgttggaaccacagcaaagcttgctgacattcaca

SEQ ID NO: 155809 - DNA, 122 bp, Homo sapiens
gcgatttacttttgcgtagtgtctccgaggtggtcacaaaccaaacatgactgagtctggcgagcagtcacgtgaataaggaccgcgaacgcgccgtcatctctgctctgacaaggtgagca

SEQ ID NO: 155810 - DNA, 122 bp, Homo sapiens
ccgagacccggggctccgcgagacaaaaagatgcaggatcactgcatcttcagaggaagccgcgctggggcagtcagattttgccggcgaaaatcccgttcttgatctgctcgttccagctc

SEQ ID NO: 155811 - DNA, 122 bp, Homo sapiens
gctgcgaaagagaaagtctaccttgtacttcaacacccaggagaagagcgccaggcgccgcgggggtgagtgaggggacactgtctggagagctcctacccccatctaaaaggaaccccctc

SEQ ID NO: 155812 - DNA, 122 bp, Homo sapiens
ccagcttcccacaaaccagtgccatggctcagcctgggcgccgccgggtgcaggtccttccgtgacatcctatagctccgaggccggcgggagaacccagaaggtctccagcaggccgggcc

SEQ ID NO: 155813 - DNA, 122 bp, Homo sapiens
gttgcattaaaaaaacagaattcccaccgtgtcccagattttccaaataatcctgccattcggaagcctgttcatagccccaaagtactgaaaggccttgcaaaatgctcataggtggaaca

SEQ ID NO: 155814 - DNA, 122 bp, Homo sapiens
ttttggagcaataggcttttcagggggtatcccaataggccaggacggcctgcatcttcacgtagcccctctgctcttgagctttctccttcctgccacctggggtggtggaaagggcattg

SEQ ID NO: 155815 - DNA, 122 bp, Homo sapiens
tcccccgccgccaggctcgggtagactgactcggtcggcgttcggcccgcctgggcttcccgggccccttccgtgcaaaccctcccgatgaaggcaggggacctcgccagagaaccccgacc

SEQ ID NO: 155816 - DNA, 122 bp, Homo sapiens
cagatgaccacacgtggacaccatgtttaggaagcagaattgggatcatatcatccgcaccgctgtgcagctttccatttgtatgccttccttttgctatcatattctggagatctttccat

SEQ ID NO: 155817 - DNA, 122 bp, Homo sapiens
cacgacacgcacccactgggtcgggccgcctccttgcagggagtctcaaggatgggctggcgtcagggaggggcccagggggcgctttcccaacactggtcgcagtcattgttggtataacg

SEQ ID NO: 155818 - DNA, 122 bp, Homo sapiens
acgaaggggtgtgtgtgattatctttattaataatccggtgggctggtgttttttctatccgtcttcatcagtgtttccagcccacctgggagacctcgttagcgcagaatccaaaaccgtg

SEQ ID NO: 155819 - DNA, 122 bp, Homo sapiens
cccgagccccgcagaggggcggcagggccagcgacctccacccctcggccccccgggacccggactgcgacccctgccccggggaccccagcgaccccaacgactctcatccctcagagccc

SEQ ID NO: 155820 - DNA, 122 bp, Homo sapiens
tgcacataattcacttcaacaatgcaaaagcttccaaacctccagcctcctttgggctgccggtgtggcctccaaggtccactgaaaagccatccccagccagcagaaacatgcctgtgtct

SEQ ID NO: 155821 - DNA, 122 bp, Homo sapiens
tcggctgtttgtcaaggcccctgtggtgccgtgaagcaatggccgctcggcctgccagggcgccaggaccctgcgctgtccgccgtggccggcgcgtccacacggtggcgcgccgcacagcc

SEQ ID NO: 155822 - DNA, 122 bp, Homo sapiens
cgcctcagcgatggggccctgctcctccgggtgctgggcatcatgtaaggggcatcgggccggggcggtggcggggaaggatctgagaggaggggaagcgggtgggcggagcctgatgctca

SEQ ID NO: 155823 - DNA, 122 bp, Homo sapiens
tggctgggcaacgcacgggagagtccacagctgcgctccatcagccagaggagcacggaacgcggaacccaggaacgcagacaaagccactgtggggcacggggcaacagacaaggagaggc

SEQ ID NO: 155824 - DNA, 122 bp, Homo sapiens
ggcactcacagcccaagggcctccttcaaaccaagtttgctaacgatggagaggaactgtcgcaattttagaaaacgtctattctatgagctgtgatggagactggatgtagggatacttct

SEQ ID NO: 155825 - DNA, 122 bp, Homo sapiens
ctcctcccgagccccgagggcactgtgttgaatttggtcgcctcaggtaggcgctgcatgcgccccctctccacaggcccctcaactcacgcattgccagaggcatttgagtttgccaccca

SEQ ID NO: 155826 - DNA, 122 bp, Homo sapiens
cactataatctaattaaatacaatgccaagggaaatatgtcactgtaatggtgaaacacacgtgctatttccttctcttctccatgaaaggggcagctaagtcataatttaggaagaaggta

SEQ ID NO: 155827 - DNA, 122 bp, Homo sapiens
agcctaaagccagaaaccgccggccacactccctgcttggaaattctcacaaacagggagcgccatcattctacgctgtcaagagtccgtgattccaggttcttgggggtctgtgaagtgct

SEQ ID NO: 155828 - DNA, 122 bp, Homo sapiens
cacctccctcctcctgcatccgtccacaccaccttcctcctgctgcatccgtccacaccacgtccctgctgctgcgtctgtcctcaccatacccactctaatttgtcagggcccaaccacag

SEQ ID NO: 155829 - DNA, 122 bp, Homo sapiens
aggcggcaggatgctgcgcgccgccctgtccctgctcgcgctgcccctggcgggggcggccgaagagcccacccagaagccagagtccccgggcgagcctcccccaggcttagagctcttcc

SEQ ID NO: 155830 - DNA, 122 bp, Homo sapiens
cctcgcacgtcctctgaaactacgctatgctctgcttttgcggcgcgatgggcgtgggagcgggggctgcccaaagatgggctggggttggaggaagtggcccggtagccgctgtgtgtcct

SEQ ID NO: 155831 - DNA, 122 bp, Homo sapiens
cgaaactccgtctcaaaataataataataataataataataataatcacccatacagacgcgcaggactcaacgcaggactgccagctccactgccctgagccccccggtgccaggcccagc

SEQ ID NO: 155832 - DNA, 122 bp, Homo sapiens
tctccttttccttccatcgagatcagcagatcagcttcagtcaggtgccttgtggcagagcgtggatcccacatggggtccttagaatactacttccctatggctcccaggcacctcgttgg

SEQ ID NO: 155833 - DNA, 122 bp, Homo sapiens
ggactcctgggctctgtgtccgcggggccatctagaaacactcccttgtccccccttcagcggcatagtacctgttgcccgccatctgagggaggtgcaggtgccaatccttcacgtgacgt

SEQ ID NO: 155834 - DNA, 122 bp, Homo sapiens
cttggcatcggcaacgatgttgcaggccctggcgtgggccctctgggcctgagccctcctcgcagccctgcgggacccctctgtcccccttgaacaccacgttcacccagcgtgggttcctc

SEQ ID NO: 155835 - DNA, 122 bp, Homo sapiens
aacaggccggcgaggctggcaaggtgcccgggcccggggcggaaagcaggaagtcgatcccgcgggcgcggcccagggtgcggcgctgcagatgcagcacggggtcgcggggcgggcgccca

SEQ ID NO: 155836 - DNA, 122 bp, Homo sapiens
gggctcagggggaacaggtctgtcacgataccaggggattgtggagagtagcgtggggaccggcccagcccagtaacggtcagcagagcccctgcccctctcccagggcctggaggctgtac

SEQ ID NO: 155837 - DNA, 122 bp, Homo sapiens
aatcttcagggcggttaattcgcaccggcgtgtaaatttctttagtctttcgggaagtggcggtaaattcatacaaatccagcagggagggaagagaagggagtaaaaccacgatctcggag

SEQ ID NO: 155838 - DNA, 122 bp, Homo sapiens
gcggtgcccagtccccagccggcggcagcgcgaagcgccttccccgcttgggggagcgggcgtggacctgcagctggagtgccttactagtgaaaaagctggggttggagctgccacggggg

SEQ ID NO: 155839 - DNA, 122 bp, Homo sapiens
tgggtgccattattatcatcaccccaactttgcaggaatctgaagcacaaggttaggaaacgcctgcaaagtcgcacaatcactacattcgaaggcacatgcagatctgggcagctggatct

SEQ ID NO: 155840 - DNA, 122 bp, Homo sapiens
atcggcgccctttcctctgattgggcgggacgaggcccaggggtgggccaacagacaaagcgggaggcaggaattggttaagccagaagagagggcggggccttggcccgcgcgggaggcgg

SEQ ID NO: 155841 - DNA, 122 bp, Homo sapiens
atggaatcacagtatcctcatcaaatcataaaagggaggttgagagagacgatttagccacggtggcagagattggagtatggcagccacaacccaaggatgccagcagccaccagaaacaa

SEQ ID NO: 155842 - DNA, 122 bp, Homo sapiens
cccgagaacacaggcttcgcagcctcgctttctgaaatggtgtgtgccgagtcagattgccgctcagagaaaatacaagcccgttttccctagctgtgccatttggtgctctgccaggctgc

SEQ ID NO: 155843 - DNA, 122 bp, Homo sapiens
gccctgccaaggcaccaacgcaagaaagccgggggagcctcggtcgcattgctggaagatcgtctaaacatccccgctgctcggccgctaggccggcaggtgttcgggccccgctcccccgg

SEQ ID NO: 155844 - DNA, 122 bp, Homo sapiens
caccttcggcccggcggcggcggcggcggcaggggccgcttggagcctggaatcgagcggcgtcatttacaaatgtcactggaaattcttcagctcaatgagtccagccagtcagccttctc

SEQ ID NO: 155845 - DNA, 122 bp, Homo sapiens
agcccgggaaggtgaggcggggaccccgggggcgcgcgaacggcaggggagctcagggcgcggagtcctggagaatgcagaataattggaaggaattatagaaaatcagaagcgcagctcag

SEQ ID NO: 155846 - DNA, 122 bp, Homo sapiens
gagtttaagggaagaggaggccacatttcttgagccttaagacactcgggaggaggttggcgggtagggcagggatgcagagtggttgcttccttggagagtgggacctcatttgtctacac

SEQ ID NO: 155847 - DNA, 122 bp, Homo sapiens
taagtgtgggagcgatgcctgccgcacgagagccgccgaggtgccgagccttccaacaagcggcctagggaggtcttggaaaaatgccatttctgaggtggactacacgcccactttacaga

SEQ ID NO: 155848 - DNA, 122 bp, Homo sapiens
ttaaaaatgactttctgtgttttcccaatataattactaagacatgttccctcataaaatcgatcattttcaaatcatgaaaataagaatatattttgacaattcattaatatagcagcttc

SEQ ID NO: 155849 - DNA, 122 bp, Homo sapiens
ccccaggacccctgctgtccttcccgcagcttcttcttggagtctcagggcaaaccctttcgagcagcacctcccagtggccagaagctgaaatgacagcagtggtactgcctggtaaaaga

SEQ ID NO: 155850 - DNA, 122 bp, Homo sapiens
aaatatatgtattaagaaccgcaagcccactgtgtgccagccgccgttggtagttttacacgtgcgatcttatttaatacttcctgggacctaatgagtcaggtgccatcatgatccgttta

SEQ ID NO: 155851 - DNA, 122 bp, Homo sapiens
tgctgtacccagggaggggaagaagccccctatgcatcactgggtggggactgatgacatcgtggctgctgcatctgcacaggggttattacacagcagctaagagggtgaccaggacccac

SEQ ID NO: 155852 - DNA, 122 bp, Homo sapiens
tgaggaaaggaggtaaagggagtacccggcacgcagaatacctgccaagtaagcattacacgaatctgttttcttgggtagtgttttcatcttcttgttttattgttttatgtctctgcagg

SEQ ID NO: 155853 - DNA, 122 bp, Homo sapiens
aaaatttttttcatataattgctgaaaaaaataaataagtttaaatttgcaaaaccatcccgttttttcagacaaacttgagggtcgaggtcggagtcgaccatgtttcgaaggtgtgtggc

SEQ ID NO: 155854 - DNA, 122 bp, Homo sapiens
ctcttccaccttcccaggctgggaggcaagtgcggtcggagggtcacgccgggggctgggcgttgctgctaggagttccctccaccgaaagtgtgtctcaggaatctcgggtcgggatctgg

SEQ ID NO: 155855 - DNA, 122 bp, Homo sapiens
tttttgaagccctcaccagtgcagacgttggtgccatgcttctcatacagcctgcagaaccgtgaggcaaataagcctcttttctctatgtcacccacagtcagggattcctttatagcaac

SEQ ID NO: 155856 - DNA, 122 bp, Homo sapiens
ggctccggcgcggctttctagagatatctacggaaagggcggggcctcccagctccttcgcgatccttcctggcgccggccccgcccttcgtccgccaccccacccccactccgccccctgc

SEQ ID NO: 155857 - DNA, 122 bp, Homo sapiens
taatccttctacacagatgttatgcttattctacactcaaggaaccgaagctcagagatgcgcacatcttgcccaacccacacagcaggtggtggtgagcctggatttgaactgccttgtcc

SEQ ID NO: 155858 - DNA, 122 bp, Homo sapiens
ttcgcggtcccatttacacgaggagagtcacattgagtaattaaaaatcacaaagcaaagcgacagcagtggagaccatcatttgacttgcatagttccatctatattttccttatgcaata

SEQ ID NO: 155859 - DNA, 122 bp, Homo sapiens
ggcttgggccgtgggcagcaggagggctggagaggcatggggggaaccccgctctccctccggcatggggcctccacctgcagcagtaagcagcctctcagcccctgagcctggggacctgc

SEQ ID NO: 155860 - DNA, 122 bp, Homo sapiens
aagcacaagggcggtgatagctccagtggcccccaacgcttggtttctttccgtctcatccgggatctgcaccagcatctgagagaaaggggtgagccccagtctccagtccggggtcccct

SEQ ID NO: 155861 - DNA, 122 bp, Homo sapiens
gggggcggtggcagggtcactaattcagtgtctgcctctgtgctctttgggttctgtctccgcagccagcttttcagcagtcctgccccctctgcctttacaggtcctgctttgaccatttc

SEQ ID NO: 155862 - DNA, 122 bp, Homo sapiens
tggctgtaatatcggcacagggacagagacagcagctggactctcgggatgaaacggaatcgattcccagcgtctccaacagggcaggagtgagtggagtatgttgcaaaataagaactcag

SEQ ID NO: 155863 - DNA, 122 bp, Homo sapiens
agtcaaagaaaggggtgactgacgcacctggaaaatcgggtcactcccacccgaatattgcgcttttcggaccggcttaaaaaacaccgcaccacgagattatatgccgcacctggcttgga

SEQ ID NO: 155864 - DNA, 122 bp, Homo sapiens
ctaggcggccacagtctggtgccagctgggtcacaaacagctccgtgacctgtttgtaaacgcgatgctcttagttccagactaaccgctcacaagggtgaagcacttaattaattcatctc

SEQ ID NO: 155865 - DNA, 122 bp, Homo sapiens
ccctatgctatggatggagaaaccaaggcccgggtctccctcacacagccaagaagtggccgaagctgaattccagcagtccgggggaagcaacacacctgggtgtacccagtgcgagcctg

SEQ ID NO: 155866 - DNA, 122 bp, Homo sapiens
cttactgcaaatctttcatgagtctgatgaacttggggcctgcggagctgcatcccacctcggcctcggcctggccccttcctgagacggtctgggctgtttcctagcacctgcggcccgcg

SEQ ID NO: 155867 - DNA, 122 bp, Homo sapiens
ttcccatcccaccccgcttgatgcctctgatgttctccagttcccttctcccaggtcccacgtctgctccccgccacctccagggaatcacctgtcatggtggatgagtttgagctcacagc

SEQ ID NO: 155868 - DNA, 122 bp, Homo sapiens
aggacggtgaactcatttcagaaccatagttttgactcaagaattttgatggggtcttcacgttggttgagcttcttggtcctaatatcattgagagaattaaatcatgatattaaaacatt

SEQ ID NO: 155869 - DNA, 122 bp, Homo sapiens
gctgcgtcactggtttgcaggcgctttcctcttggaagtggcgactgctgcgggcctgagcgctggtctcacgcgcctcgggagccaggttggcggcgcgatgaggcgcagcaaggctgacg

SEQ ID NO: 155870 - DNA, 122 bp, Homo sapiens
agagagagaagcaagcgctcagtgctgagcttacctgggccaggtagagggatgtggccacgggcaggaagtggctgtgggaatctggcgctacaggttcctctgccaccccacttcctcca

SEQ ID NO: 155871 - DNA, 122 bp, Homo sapiens
tgagggaatgaaaatgttttttatttgttatctacacactcgaaaaagagaaaccagctgcggtactgtcccatttttgtcatcagcaccagtgtccgtcaggaaggcaggtggtggtgcag

SEQ ID NO: 155872 - DNA, 122 bp, Homo sapiens
gcgggcttcgggaaggggcggggccggactgcggaaggaccgcgaggtgggggcgggggccgcgtccgcgcgcgcggggcggccgcggcggtgagcctgcgcgtcagggccgccggcctctc

SEQ ID NO: 155873 - DNA, 122 bp, Homo sapiens
aattgtagttcgctctctccatggtttgcccgcgcttggcacccatcgcccccccgcccccgcccaaaaaaaagtttctgaatcttactttgattgtatcattagagttgatgtgggagaca

SEQ ID NO: 155874 - DNA, 122 bp, Homo sapiens
tctctggctggcactgaattgctgttcaccagatgccagcaatgaggacactccccctcccggatgcaggactggttgccaccatggggaggggtgcaccgtgccacgtgctcccaggacac

SEQ ID NO: 155875 - DNA, 122 bp, Homo sapiens
agagaagaacacggggaagcataaatttttaaaattcattccctcgatataataattctacgaggcatttattgctgctcagctctaaggagaaccaatcagcaagtatctttcttgtggcc

SEQ ID NO: 155876 - DNA, 122 bp, Homo sapiens
cctttgaaatgcaaacggaatcatattattctctggtgaaattatctcatatattcctatcgcatttaaaattaattcagaataatcccatgattatcaaaaccctatgtgctcttccacaa

SEQ ID NO: 155877 - DNA, 122 bp, Homo sapiens
ggggtgaagggaggctgcaagcttggcagaatgtttgaacaagacaaagagcagttccagcgaccaaataaggaagtgagtgctgaagtatttcagaatagaagtgtgtcagggactcaagg

SEQ ID NO: 155878 - DNA, 122 bp, Homo sapiens
cgaaaaagagtacatcctgacacacagggtttttatcctttcgacaaagggaagcagccacgctcattcagagcagcactttctaggaagcacatccaaggaggaatctccagcgcaggtcc

SEQ ID NO: 155879 - DNA, 122 bp, Homo sapiens
actgtgggtccttcagcctttaaaaaccatgccgtggtttaaaaacttaaaactatatttcggcagaacgctgagcatttcttcaaatcactctgagaagcttgagtgtctttaatttcacc

SEQ ID NO: 155880 - DNA, 122 bp, Homo sapiens
gtggttcagagcagggaaaatgttgcctcaggtttaaaataatctgcccaagcaccccagcgcgggagaaacgttctcactcgctctctgctcgctgcgggcgctccccgccctctgctgcc

SEQ ID NO: 155881 - DNA, 122 bp, Homo sapiens
ggaggctgagccagaataatcggttgaacccaggaggcggaggttgcagtgagccgagatcgagccactgcactgcagcctggggaacagagagagactctgtcctaaaataataataaaat

SEQ ID NO: 155882 - DNA, 122 bp, Homo sapiens
ccctctctctctctctgtatgtatgtgtgtgtgtgtgtgtgtgtgtgtgcgcgctgcgcgcgcatgattgtggtcttaaaggtgtgatgaattacgggcaaaccttttgtcttaaacagggt

SEQ ID NO: 155883 - DNA, 122 bp, Homo sapiens
gttggagcatatgatggcttgggctgccattccctagccagaacccatcttccagaaaatcgatgaggctgcacatgtccagataacaatcacagaatggggtgtatatctctgatgaagtg

SEQ ID NO: 155884 - DNA, 122 bp, Homo sapiens
cctgagattaatttgttgcacttccattgcagttgtgaattttcaaaggccctcttgaatcgacttttagaccagttctgtagtgtgaatacccgtaggagcacccagattgctctgtgttt

SEQ ID NO: 155885 - DNA, 122 bp, Homo sapiens
gttgtcaatgggactgggccccatggagcagggggtagtgctcctccgggaggctccggccgcacaggagcccttggagttggtgggaggctcaggcatggtggactgcaggtcccgagccc

SEQ ID NO: 155886 - DNA, 122 bp, Homo sapiens
ctgtccacagggagctccagcccttctcacactcgacccgcaggtgggtataggcaggagcggccacccaggactggggccgacggggcctcctgcgtgcgggtggacagcccctcgttcca

SEQ ID NO: 155887 - DNA, 122 bp, Homo sapiens
tagcactggcaccccattcctgttctgccccaggtagctggtgcattccccggtgctcaccggctcgaccccccagcaacacgagagacctcacagagggagtcacactaacgtggtcgggg

SEQ ID NO: 155888 - DNA, 122 bp, Homo sapiens
ttagaagatgcaaagggttcttccgcgaacctggaagagccccccgggctcgcctctcgccgcggtcccacacttgcctgacctcaaccacactctcccggtccaggccccgctggagaacg

SEQ ID NO: 155889 - DNA, 122 bp, Homo sapiens
cctctgggcctcgagtccaaagcccgtgtgtgatcaggagactggcctggaggcccagctcggccccagagctctccctggcctgggaaggggtgtgtgctgggggccctggaaggctacag

SEQ ID NO: 155890 - DNA, 122 bp, Homo sapiens
tatttttctaaggtcaagtatgccccccgaccttgggtcctagttggtagaaagcatttccgaagtggagacatctggatggcagatgtgaagttggctgggatgggcgaaggtctggaagg

SEQ ID NO: 155891 - DNA, 122 bp, Homo sapiens
ggaggaggcgggtggtgggtgcgggattcagggagcccaaggctgagtagttatgtcccccggagccctgcgacctcatgcctggtctttgagtcggccagacctgagccgcctacctctga

SEQ ID NO: 155892 - DNA, 122 bp, Homo sapiens
gggcccatcaacttcaccatgtttctgaacctgtttggggagaagctgagcggtgagcaccggtggggcaggcctggccctcctagctaattcctaacagttagagatccggacatttcacg

SEQ ID NO: 155893 - DNA, 122 bp, Homo sapiens
gatgaggctgagggtgtctaccaataacacaacgccacagagcttccttggcacacttcccgctgctgctatgtgggatcctgtctggctcgcttaggattctgcaggtcaccaggtggtga

SEQ ID NO: 155894 - DNA, 122 bp, Homo sapiens
ctcgggggtcgccacagcctggcaccctcatcgggcctgttacgcacgttctggtctctccgtgcccacagacccgccaagctcaccagccaatgtgcagccagcacaagcccgacctgcta

SEQ ID NO: 155895 - DNA, 122 bp, Homo sapiens
gctgccgccccgggagcgggcgtccagcctccgggcaccgccgcgcggccgcctccgccccgcctccgtgctgtagcccagctgcagcccctgcccctgcccgcccttcccgggccccctga

SEQ ID NO: 155896 - DNA, 122 bp, Homo sapiens
gctgtgccagtactcgctgggctgcgggctgacctgtggcctgagcttcctgcaggagggcgcccctcaccgcacgctgaacctgctgctgagcctcgggctggccacgctgctgggcctgg

SEQ ID NO: 155897 - DNA, 122 bp, Homo sapiens
gggcaacctgagtgagaaggcacaggtggcgggcgggcaagtgcagagccctgaagccgacgggctgctgaccctggagcgccctggctcggggactcctgcccaggctggcgatgatgctg

SEQ ID NO: 155898 - DNA, 122 bp, Homo sapiens
agcgagccgcctgtgaatgtgcacgcttttgtttgggttcaagagaccgtgttgcgatcccgttcttctttccccctcatttcttgtttgtctcccttctgctgtggcaatcgcctttggtg

SEQ ID NO: 155899 - DNA, 122 bp, Homo sapiens
cctcgttcccaaccaaccgcacaaaacccgcaacacctcgcgtccccgcggggtctcccgcgcccctggcccggccctcccggccgcccccagcaggcgccccgctctccgcgggaactctg

SEQ ID NO: 155900 - DNA, 122 bp, Homo sapiens
tgatgcccccttctgcttgatttcatcacaagaaacgcgcatccggcagcatttcccgaccgccttcaccgccagtcccggtctgcatggtcagtttgaaccaggctgccgagagcgcacca

SEQ ID NO: 155901 - DNA, 122 bp, Homo sapiens
ggcgagggtgaagttacctgcgtgcgtgctggggctggcatctgcctggttcgcatttggcggtaaatatcaccgtctgcacacggggaggcctccgatttccccattgtttggaaactgtg

SEQ ID NO: 155902 - DNA, 122 bp, Homo sapiens
gtatcatgcttctggagaaaacgctaactgaaaacacaggcggggtgagagtggctctcacgtggccgggcgctgaaggagcccagcccgcgcggcagcatggggcgcactcactggtgtgg

SEQ ID NO: 155903 - DNA, 122 bp, Homo sapiens
ataactggataaagaaaaaaccatctccgacagccttggaggcgggatgaaggcgtggcccggtgggcgtgaccaacagcaaaagtttaagcgttattggctgtattccttagttgctcact

SEQ ID NO: 155904 - DNA, 122 bp, Homo sapiens
agctgatacaaacacatagaaatacaatctcaccaaagagctaagaagccctccaacacacgcccaatttcagcatacagctaagactacacaacacacacacaagctcaacaaagagctaa

SEQ ID NO: 155905 - DNA, 122 bp, Homo sapiens
tggtctttccatccttaaatccatgaaatttcatcttctcttactgccatgaagtgagttcgttgaatctattaaatcttagtgactctcatttcagcatccttgtttactctcacaggaca

SEQ ID NO: 155906 - DNA, 122 bp, Homo sapiens
taaatgcaaaagcaaaagcattaagtagctttctggcataaacatattgcagctgggtagcgtggccgagcggtctaaggcgctggattaaggctccagtctcttcgggggcgtgggttcga

SEQ ID NO: 155907 - DNA, 122 bp, Homo sapiens
cagtcttcaatagtcaacgtcatggccattccagagagaaaaggtccaagttcagtgcctcgaaccttgttgccttccgtgaaaggaagcagttgaaatgagctttgcccctggtgacactc

SEQ ID NO: 155908 - DNA, 122 bp, Homo sapiens
aaaatgcaaaatatagctaggcgtggtggtacacacctgtagtctcagctacgtgggaggcggcagcaggagaatctcttgaacccgtgagaaggagattgcagtgagctaaaatcacacca

SEQ ID NO: 155909 - DNA, 122 bp, Homo sapiens
aagagggcatctacgtggcgatccagcgcagtgacaagcggatccacctcgctgtggtcacggagatcaacagagaaaactattgggtcacggtagagtgggtggagaaagcagtcaaaaaa

SEQ ID NO: 155910 - DNA, 122 bp, Homo sapiens
acaagggatctccactactgcggccacacacttttctcccaaacgcttcccggaaagcaccggagggctgggcagtcaggtgtaaacaggcgtccaatcaaggacctgcagtgtgggtggtg

SEQ ID NO: 155911 - DNA, 122 bp, Homo sapiens
gttttctaactagctttattttagcacagccataaatctggctgtaattgtctttaactccgatgactcatacatctaagcatttcatttaactttcaaccgtgaaaaattccaactgattt

SEQ ID NO: 155912 - DNA, 122 bp, Homo sapiens
tcgctgggcaccagccactgccatcgggagaggagtgcctgtcagctgccgccacccactcgaccctgccgccgcgactcgcaagctgtggccctttggggcttcttttataagggcacaaa

SEQ ID NO: 155913 - DNA, 122 bp, Homo sapiens
gtaccctggctccttagggtcctcccacaagataacgcagtctcttgtcaagcacagactcgcccgaaaaatgagacctgagaaaggggcaaggctgaggcatctgttcaaagacaagcttc

SEQ ID NO: 155914 - DNA, 122 bp, Homo sapiens
ttttttgttattaataagttatacagactttctagaacatgtgcaaacagtactgaagcacgtgtagaaacacaagccttgcccctctgtctgctccccagaggtcatggtggtggtcaggc

SEQ ID NO: 155915 - DNA, 122 bp, Homo sapiens
tgtcttcttcccgctatcactccgtgtgggtcaaacctctgcctgcccactggagagcagcgggaatggcttcaggaagcggctgccgcctccgagactcaccgacctgccgtgctgccact

SEQ ID NO: 155916 - DNA, 122 bp, Homo sapiens
gtaatgatgacttattagaagcagccagccctgtacgtgcctgtaggatagatgctagaacgttctacaaatgtgtgcacatacacatcacgtatgtgtgaaggtgcacacctgtccctaga

SEQ ID NO: 155917 - DNA, 122 bp, Homo sapiens
taaaaatggcttatacaggagcataacacacaatcaatgttcaataaagtgtgacctgaacgtgactgtgaattaaaaatatttcctatcattctcactttcctagaatttaacagtaatga

SEQ ID NO: 155918 - DNA, 122 bp, Homo sapiens
tctggagacgtggaatccacccgcggaaactccgagcccctccgactgagcatgcgccatcgccaggcggcttttggtcacaggctcccgagttctcctagctggggctgcggagctggggg

SEQ ID NO: 155919 - DNA, 122 bp, Homo sapiens
acttcaagttctccctggacccagaacagtcctccaagcttgcttttcaaactccagaatcggctgaggaagggatcacctcatcacaatgacactgaagtgaaaaaagcagagttcagtag

SEQ ID NO: 155920 - DNA, 122 bp, Homo sapiens
cgggcggagctggggcctgggagggatcccttgaccctgagcctcggcctgcctggaagtcggcatgctttgtgaattcccaaattctcaggctttaactatgccgcttattcttattttat

SEQ ID NO: 155921 - DNA, 122 bp, Homo sapiens
ccagcgccagcgccaggcgccgagcgcttagcagccgcgacaggctccggacccccgatacgtctgcagtcgcctccgcgcagtcccgccagtccctgcgcagactgcgcctgcgcaccacg

SEQ ID NO: 155922 - DNA, 122 bp, Homo sapiens
catgatctgcccacctcggcctctcaaagtgctggggttacaggcatgagccactgtgcccggccaggactgactttcacattgcccaggctggtcttgaattgggctcaagccatctgccc

SEQ ID NO: 155923 - DNA, 122 bp, Homo sapiens
gaatctcatgtctatagcttcatccaaacttttatcatcatgtgtactggcagctaaaaacgtcgttactggggaccctgtgacatttattacactggtgctggtactagcgttacgcacag

SEQ ID NO: 155924 - DNA, 122 bp, Homo sapiens
agaaatgcaaatattcattgattgaattcgcacagaggtgtaagtgattcttggtagattcgttccataaagaataggttttctttgatgaaaggacactgggaattttagcaggatgggga

SEQ ID NO: 155925 - DNA, 122 bp, Homo sapiens
tcgccggtccgcgggagccttcggtcttcttgtctgtgacctactacttcgaccacaacgcggtgacttggaggaactttcccaagtattttcttcaccagtatcatgaggagaggaaacaa

SEQ ID NO: 155926 - DNA, 122 bp, Homo sapiens
gccgcagcacagcctcactggcataagatcccgggtcccaattgtttggagcgctggtttcggttgccaggcaactgcccagccatctatgacagaggaattccctcagaggagggcgccac

SEQ ID NO: 155927 - DNA, 122 bp, Homo sapiens
aaacaaaacaaacaaaaaaaacagttctgatggtgtcccgtccacttatttttaacgccacgttttagttctttaaacacatgggtcacgatactcccaggcccaggttgggccgctctctt

SEQ ID NO: 155928 - DNA, 122 bp, Homo sapiens
cttgaattacggcttcaaaataactcacattccactataaggaggctcagaggatgccaccgagtggacggacgtgagcaggaccacagagacaacccagtgggacacgcaacactgttccc

SEQ ID NO: 155929 - DNA, 122 bp, Homo sapiens
ttcccataagcagagcccttgaaggtgctggcacagattccacgatctgaggcctcctgacggcctctggagcccccttctgccgcttcccacgtagggctgccgcgtgtggtccgaaaatc

SEQ ID NO: 155930 - DNA, 122 bp, Homo sapiens
acacgagcactggcaagttcacctgcaaagtccccggcctctactactttgtctaccacgcgtcgcatacagccaacctgtgcgtgctgctgtaccgcagcggcgtcaaagtggtcaccttc

SEQ ID NO: 155931 - DNA, 122 bp, Homo sapiens
ccgcgtgggaagttagcttcggcgttttggggcacagggcaagcgatgtagagtgcgcgccggttcatcttgattcagtcctgtgctacggagactcaagagcagcggcagggattcctaaa

SEQ ID NO: 155932 - DNA, 122 bp, Homo sapiens
tcagtccagttgccaagaatctggagcccccgactgacccatcaaggtccgatttggcttcggacacctcgcagatcaccccgcggctcagagcccggatcctgaagggcgcagcgtgggca

SEQ ID NO: 155933 - DNA, 122 bp, Homo sapiens
gtccctcccttcaccctccacagtcagggacaggctgcgtggtgtgcctccccatctgtgcgtggcctcagcgcagcaggcctgtcctgcccattgctaaaggtagagcccggcagattcat

SEQ ID NO: 155934 - DNA, 122 bp, Homo sapiens
ctgcgccttcatggggacccttacccagccgaattggtgatggggaatcggagactgctgcgcagcatctggcgatgccaggaaccagcagggaggggaaagggggagagaaggggcccaag

SEQ ID NO: 155935 - DNA, 122 bp, Homo sapiens
gtctgggtggggtgggagggacgacgctggcaaaggcgggctgagaggatttctttatttcgcgttcagacccaacacactcggacaccttggggccctgtgagggctaagcagggtggtgg

SEQ ID NO: 155936 - DNA, 122 bp, Homo sapiens
ttctttctgtaatcccctagggagtcctatcttgtcattccccctttcgaagtgggaacacggatattgcccacatgagagaaatctcctgttatgggttggtgttatggggaaagggtttg

SEQ ID NO: 155937 - DNA, 122 bp, Homo sapiens
ccctatcctttcctgcagtgtgaatgggaaacgctacttcgaatgccaggccaagtatggcgcctttgtcaagccagcagtcgtgacggtgggggacttcccggaggaggactacgggttgg

SEQ ID NO: 155938 - DNA, 122 bp, Homo sapiens
gtctagagcccaccgcggtggagcgtcagccctcctgagtggcggttcctgtgggcgggacgcctgggttgccatggagaccgagagcccagccccgcggagccccgggtgtgcaccgggac

SEQ ID NO: 155939 - DNA, 122 bp, Homo sapiens
acagcaggagagggtgcctgaggtgtgggggggatgggggtgctggccaaggtaggggtacgggcctggaggaattcttggttcttaagaaaggctggcacaggtgtctcaagggtagcagg

SEQ ID NO: 155940 - DNA, 122 bp, Homo sapiens
taagactaactcaagataatcctagagtcttaaagcatttcaggccagtgtggtgtcttgcgcctgtactcccagcactttgggaggccgaggcaggtggatcgcttgagcccaggagtttt

SEQ ID NO: 155941 - DNA, 122 bp, Homo sapiens
gaacacctgcttcctctcgttgccttgtgtgaaagtcgcgttgtattttcctgcgcttggcgctgcgcccgcggagctcagggccgtgacccggtgctcgcagccccccgaccccgcagcgg

SEQ ID NO: 155942 - DNA, 122 bp, Homo sapiens
tgccgccatgcagcactacggggtgaacggctactcactgcacgccatgaactcactcagcgccatgtacaacctgcaccagcaggcagcccagcaggcccagcatgcccccgactaccggc

SEQ ID NO: 155943 - DNA, 122 bp, Homo sapiens
tttgcccctgcccagcacacaatggaggagcccgggtgggtctgcagcctctccagggtgcggcgtgggccccggccgtgtgagccgctgcctccccgagcagcaggttccgcagcccctcc

SEQ ID NO: 155944 - DNA, 122 bp, Homo sapiens
ggcaggcggtgggaagggatgtcaatacccccagggcatgaccagcaccactcaccgggccgggcgtgcctctctccgaaggcgggaccatgtccggcgagaggacttgaggagggtcgatg

SEQ ID NO: 155945 - DNA, 122 bp, Homo sapiens
ggtggaggctcctcccgcccggagctgcgcccccaccggctccgagggtgtagccgccagcgcctgggacgccccctccccgcaaagtgtccccgaattgcactctctggtcccggagctgc

SEQ ID NO: 155946 - DNA, 122 bp, Homo sapiens
tacatatccaaagtagcctttaatttctccctgttcctgtgcacgttgttacatcccttccgatcctggaaaagccaggcagctgtcctcagcaccctgaggtgttaattatttctcaatta

SEQ ID NO: 155947 - DNA, 122 bp, Homo sapiens
tcatgcccataaggaacacctcactcatttgtaccagtttggtagaaaggacagtctgaacgaattcattcaaaaaggcctgcaaacctactagaggtcttcagatcttttatcagggcccc

SEQ ID NO: 155948 - DNA, 122 bp, Homo sapiens
cctggctctaccctcctgggccacacaggctagcagggcaacagtgtttgtgatgaaacccggtgattgcgtgaatgtgtgggtgattgacagtgttgttggaactgtgagacactgtgagc

SEQ ID NO: 155949 - DNA, 122 bp, Homo sapiens
tctgtaaactagaatctcagtttttagtaaatgtaagggggtaatgggaaataaggcctacgcaaagacaggagaggcacagatgtctttgcaagaatatgggactatccaaaggtggccaa

SEQ ID NO: 155950 - DNA, 122 bp, Homo sapiens
tgacgttattccaggagtgggcgagggagggcggggcctctcggggccaagccccgcccccgcccctataaatacggcttcccgggctctttgtggggctgagtgctcagtggagagcgggg

SEQ ID NO: 155951 - DNA, 122 bp, Homo sapiens
gtggctcatgcctgtaatcctagcactttgggatgctgaggtgggaggatcatttgagctcgggaattcaagattagccagggcagcatagtgagatgccatctctaccaaaaatacaaaaa

SEQ ID NO: 155952 - DNA, 122 bp, Homo sapiens
ccccgccacctccgccgccggcagccgcacagccaccacccggggcaccgcgggccgccgcgggcctcctgcctgggggcaaagcccgcgagttcaaccgcaaccagcgcaaagactcagag

SEQ ID NO: 155953 - DNA, 122 bp, Homo sapiens
gctctaagaggcatggacgagagttggcggtgaccaagccactggaagctcctggagactcgaggtagaacgaatgtgggaacagggcaggagtcccagaatgggatgttgaggctgggggt

SEQ ID NO: 155954 - DNA, 122 bp, Homo sapiens
gggaagacccttggccagcatgctgtccccacagctgtgactgtacctgctccacttcagcggggactgctaggatgactgtagccctgggccaccagggccaagattataactaccagctc

SEQ ID NO: 155955 - DNA, 122 bp, Homo sapiens
atcgacatgatgacggcccatcactcggcaacgcgaaggaacggactgccggaacacacacgcctcagaataatcacactgcctgagaggaaccaacccaaaaaatagcttcagtcgcgtga

SEQ ID NO: 155956 - DNA, 122 bp, Homo sapiens
gtctcctcacattctcaagctgaggacattccatagctactctgaagctctcctttctcacgtgcagctcgagctgtgtccaaacgcccagcaacggctttctgtttaagtacacgtttgtt

SEQ ID NO: 155957 - DNA, 122 bp, Homo sapiens
ccagtaggagctggggagaaaaattttaccaaacgagttaaagaaggaacgagctcctcacgcagcagctctggtgaggctgctttgatggccgctggctccggccccttgtttccttctgt

SEQ ID NO: 155958 - DNA, 122 bp, Homo sapiens
gcctggctgtgagcattccttggggagggaggtacaagggctagataggagtgacaggggcgaaagtcttactctgaatcctagggtgtagtgtgattagtggcatcttagctgctataagc

SEQ ID NO: 155959 - DNA, 122 bp, Homo sapiens
caggcaggggtcagggagtagaccaggggccgaggtgcccggaggccagccatgtagggccgtgaggctggtgaggtttgagagtcagggaccctgaccttcacgccctttctcagggccct

SEQ ID NO: 155960 - DNA, 122 bp, Homo sapiens
tgggtaacagagtgagactctgtctcaattaaaaaacaaacaaacaaaaacacttgcacacgcatgttaacagtagcacaatttgccactgcaaaaatatgaaacaaacctaaaatgcccat

SEQ ID NO: 155961 - DNA, 122 bp, Homo sapiens
tggcatttcagggatacaaacaaaccatcaagaaacgaccagtgctggcctctggccacccgctgtgagagttaccactgcagaaccataggctgggtctgatgccctcagcaggacacatt

SEQ ID NO: 155962 - DNA, 122 bp, Homo sapiens
agagtgaggtagctgaagtgggcagaggcccagctggggttctcctgcccaccctgcttccggcttacccagggcaacctgacaccagagggagcatcaggaggctgaccaagagccccgcc

SEQ ID NO: 155963 - DNA, 122 bp, Homo sapiens
tccttatatcccatggaatcaactaaagccctgttggctggcttcgtttctttttaatcacgatatgtatgtttggccctggaggtttggtaagcctgagctgttgcacatatggctgcctc

SEQ ID NO: 155964 - DNA, 122 bp, Homo sapiens
gagagaagaaaacaaaatctctcgtctgagcatgactcttggcggtggtgctttcgccagcgcgtctgcagcggttcccagagaaagcccgccaggcagggacagactgacagaccgacgga

SEQ ID NO: 155965 - DNA, 122 bp, Homo sapiens
gcttccatcgcccgcaactagcgccgctgtcgagattttccgcaatacaactgcaggggtcgttatttcctcgcctacggatccctacgcttcccaactcagagaggaggaggacaggtggg

SEQ ID NO: 155966 - DNA, 122 bp, Homo sapiens
cccctgctcagaggtttcactgcaaatacagtctccattttcagcagattctcagctcagcgtctcagtccgaccttggtcggctccctctcccattctgccccaaagccataataaacttc

SEQ ID NO: 155967 - DNA, 122 bp, Homo sapiens
tgaggcacccccactgactagcgtgccggaccctgcaggtgttggaacaaggttcgtggtcgcggcggcctcacgtaaaatgaatccgcggccggcgcgcggcccgcgggctccctctagag

SEQ ID NO: 155968 - DNA, 122 bp, Homo sapiens
caaccgcccgcggagccagacctcccagctctgcgccccaggaccgcgcggtgcaacctgcgcatgcgcacccgcgtcccgctgctgtttagccgtttccaaggctacgaagcccatcggcc

SEQ ID NO: 155969 - DNA, 122 bp, Homo sapiens
agatgttaatactgaatacctatttcttttttttcttcttgagacgcagtctggttctgtcgcccagggtggagtgcaatggcgcgatctcagctcactgcaatctccacctcccgagttca

SEQ ID NO: 155970 - DNA, 122 bp, Homo sapiens
caacacgggggctgctggggttgcagagtctccaggaaccccagcctgagaggagcttcccgtgactgccaagaagccacgttctgaggaggccccggagtggccccagctcagccctgcag

SEQ ID NO: 155971 - DNA, 122 bp, Homo sapiens
aatttcctctcggggtggtccgttccaccttaaataacttgggctttttggtcccaaacgcgccctgtagttcaggtttttttgtcctccctgcagcagctgtcaccctgcattactcgcag

SEQ ID NO: 155972 - DNA, 122 bp, Homo sapiens
caatcgctttcaacaaagtgattataaaatgaatccaagaggtggctttcaatgtgaactcgaaggatggttaggattctgtctggtggatacagattaaaaaaaagatattcaaacaaagg

SEQ ID NO: 155973 - DNA, 122 bp, Homo sapiens
aggggcctcagggtttttgcctcctgcccgctcccgcatcttcaagataatcgtgatcggcgactccaatgtgggcaagacatgcctgacctaccgcttctgcgctggccgcttccccgacc

SEQ ID NO: 155974 - DNA, 122 bp, Homo sapiens
aaaaaagagaaaagcctccatcgtgacaaaggggttaaataagcaaccagaggccgggcacggtggctcacacctgtaatgccagcaccttgggaggccaaggtgggcagatcacgaggtca

SEQ ID NO: 155975 - DNA, 122 bp, Homo sapiens
cgaaccgaattggggtctggaggtcggaggctcaggggcgtctcggggggaatttgcattcgtagcccctgcaggcgtgtccggaggggtggaggccgtccagcctggggtgtctgccgacc

SEQ ID NO: 155976 - DNA, 122 bp, Homo sapiens
agacagcctggtgctaggggcatctttccccagttccaagtcagcggcagcacgttgtcacgtggcactgggcacggtgagaggatttatttacaccatggcaaccggcacatgctacaaac

SEQ ID NO: 155977 - DNA, 122 bp, Homo sapiens
cagggctcaatgggctctgaaaaagcatcttagcacagagaacacttctctaccaatccccgtcataaacctatttggcagcctatagcccatcttttctgcctgttctttaatcatcacct

SEQ ID NO: 155978 - DNA, 122 bp, Homo sapiens
atcagcatcacatccttggtgcctcactggagtcagtggctgccctgcctgtgcccacaacgtgacggcgtggagacttatccgtgtagatccacgaagccttggttcacttattttggcag

SEQ ID NO: 155979 - DNA, 122 bp, Homo sapiens
ggcagtggctggcgtggccctcatggccagcaggtgctaggactcctctggaggcccaggcgcctgtctaagctgccggctgtggaccacctgcagagctccccccgcagcctggcggagct

SEQ ID NO: 155980 - DNA, 122 bp, Homo sapiens
acctcacctgcaaccttgttttctttcaaatgttcattgaacccactattaccgtctcctcgttcttctccagctgtttgttcaggattggacacaacatcctagaaaatacacatacaaaa

SEQ ID NO: 155981 - DNA, 122 bp, Homo sapiens
gggagtttatttccttttccagggagtactgaggcccggcccatcaatgcccacgctacacgaggcatactagacagtcgctgcctaagccaaagtcagatcaccgatattcttccaggaaa

SEQ ID NO: 155982 - DNA, 122 bp, Homo sapiens
agatgtggagtcaccacacctagacgactcttcatttcttatccttgccgctcccacacacgtgcaaacaagccccagggtgctaagggcactctgtgggacactttggatattaaaaggtc

SEQ ID NO: 155983 - DNA, 122 bp, Homo sapiens
cgcgggtgcaaaacagccaacctgggtgcagacctcaggggcctgcggaccacggctccccggccctcaaaccatgacccccgaatctaacagggtgcccgtttgcacacacgtgggagcgt

SEQ ID NO: 155984 - DNA, 122 bp, Homo sapiens
ttgcagccacgtgactttgggttatggtcacatgtctgccacctgcctgctgagggacctcggtgagtcccttaactctcctgagcctcatctgaaaaataggagtaatagaacctgctctg

SEQ ID NO: 155985 - DNA, 122 bp, Homo sapiens
caccgtgcctgccccagaatggtttttaaagccacagttgagaggccacccattgcccggcgcctggacagtgatcatcttgttcatcttgttcagtcctttcttgtgtgattggaattatt

SEQ ID NO: 155986 - DNA, 122 bp, Homo sapiens
gtgaggacacacagtgggtgctcactaatgaagtttcctctccgagcttggtgacttactcgttgagagaggaaagggagaccgagtcaagaatggctcccaactgtggccccgtggtggtg

SEQ ID NO: 155987 - DNA, 122 bp, Homo sapiens
ttataaggagtaaatgagcaaatacacgcaaattacccagcacggtgcctggcataaaatcggcgctcaatgagtacgaagcgtgaagggtcgccggccccgcgtccccgccttgcaggagc

SEQ ID NO: 155988 - DNA, 122 bp, Homo sapiens
tcacttactagttttgtagacttgaacaagtggtatagctgatctaagcctcagtttcctcgtgtaaaacagcaatagtatatattacttagcagtgtttgagaaatcaatcaataaatgta

SEQ ID NO: 155989 - DNA, 122 bp, Homo sapiens
ttcccatttaggctaagccaggatgagatcacaaagtcactcatggtaaccaggtccccgcgctggaagtgtgctttcccagtgaatggctaaatactaacaaaagaaacctttgactcaaa

SEQ ID NO: 155990 - DNA, 122 bp, Homo sapiens
cctcgcagcagttgtacttgatgtcgtgtttgtagcctggggctttgatgatggcccactcgccgctctcccaatagtccttgaggttcatggaagagccgatcaggaccagatcgattttc

SEQ ID NO: 155991 - DNA, 122 bp, Homo sapiens
tgctttcttttgttaagccaagacttgagagaaacctggcagccgtctctaagtctggcacgatttcacctcagacgcactcggttggtttggatgttgagggagaccgcacatgagagagg

SEQ ID NO: 155992 - DNA, 122 bp, Homo sapiens
ctccttttcattctatatgaagttctccgatggcctacatggggctccagggaaggggtccgtgaatagagaagacatattgaagatgatgtcccaccccagctagcccagaagcactgagg

SEQ ID NO: 155993 - DNA, 122 bp, Homo sapiens
cagcagatgatcgagcgtgtggagaagaccaccggggacaagcggactcgcatccagggccgtgtcgcccacctcactggcatccatgcagtggaggaagtcagcctggaggagttctgtac

SEQ ID NO: 155994 - DNA, 122 bp, Homo sapiens
ggactcatggatgtgcaccctttgctccctgctctttctgcctctgggctcatgtatctgcgcagctctggtaccctctgtgggtgccatctctacctctgacacagactgcctgccttgaa

SEQ ID NO: 155995 - DNA, 122 bp, Homo sapiens
acgcccggcttgggggttttggctggtttcccttgtgtcctagtcagcttgagaaaccctcggatgcactcgccacttttacagtgtggctttgctcatctgggtgggaggtactgcctggg

SEQ ID NO: 155996 - DNA, 122 bp, Homo sapiens
ttgttattgccttaattgaatggctgtgtaatgagtaacctgtagaccatccctcccacccgtgcctggcctcctgtgcattcttggggaggacctgtgtgctgcattcctagagcatcatc

SEQ ID NO: 155997 - DNA, 122 bp, Homo sapiens
ccctgccagcctccgccctgaacttatgtgcagttaccacctgcacatggcacggggccgcgggagtggcaacccccaactcggccagcagccaccagcagcatagactccaggaccatacg

SEQ ID NO: 155998 - DNA, 122 bp, Homo sapiens
ttccagcagcattttctcttctttcctctttttatttatttcagaaacagggtcttgagacgggcgcggtgactcacgcctgtaatcccagcactttgggaggccgaggcgggcggatcacc

SEQ ID NO: 155999 - DNA, 122 bp, Homo sapiens
acccctcgggctcccgtccctagggaaatgtgaagtatcccgggagaggtccgagggcggcggcggcggcggtgaaaagccccactcctccgcgtggaccgggatcctcaggggtgcggcgc

SEQ ID NO: 156000 - DNA, 122 bp, Homo sapiens
tgcaagctacccaccatgttgggcagttttgtgtgtaggtgtgtgtgttttgtgtctttgcgtggaggcacagtaccattaaaatattcaccctcatagaaggaggcagaccccctgaaacc

SEQ ID NO: 156001 - DNA, 122 bp, Homo sapiens
tcatttagatgcctttgactgtaagtaccagaaagccctgactcaaaatgcctgaaacaacggaggtagggccactccagcgtggtttgtcaggattccaactcagcttctttgcaattctc

SEQ ID NO: 156002 - DNA, 122 bp, Homo sapiens
ccagcaggggcttggtttctattcttagtgcatctgggtaatgtggttatgttcatgatgcgtctagtttctgcactgccagggatagccttcggttcattctatgttagggtgtacaaatg

SEQ ID NO: 156003 - DNA, 122 bp, Homo sapiens
aacacagtcactcctggcggcaaaccaaacaaaaccagagtcatctggggaaaagtaactcgggcccatggaaacagtggcatggttcgtgccaaattccgaagcaatcttcctgctaaggc

SEQ ID NO: 156004 - DNA, 122 bp, Homo sapiens
cctttaatctttttgttttggtttgaatctgctcggcgcagactggccaaggatcctctccgccctcccccttcctcctggcgcgggagaggcaccggatatccccaccctccccgagctct

SEQ ID NO: 156005 - DNA, 122 bp, Homo sapiens
ccaccaaggtgagtgtgcaggccaccaacactgccaaaaatattctgtaccactctgcatcgatggaaatccagtactcttgtctcaccacaatgtaatgggcgactaccgattttttgacc

SEQ ID NO: 156006 - DNA, 122 bp, Homo sapiens
aagcgaggtagtccggctgtggatttctgcttcttcccaccttgctgtctgtatggtgcccgaaaacacagaggaaaggccgggagctggcaggtgaggaggtggagaggagtgcttcaccc

SEQ ID NO: 156007 - DNA, 122 bp, Homo sapiens
agattccttagggaaaggaaggtctcccagacggcaggagcggcaggccttaggggcagccgcaggggctcgggagtctgaacatacccggtttgaattcagactctggcacgccccatgcg

SEQ ID NO: 156008 - DNA, 122 bp, Homo sapiens
cggagggcaagaaagcgtaggcttcacgctggatctccacccaggcctcagtggccttcccgtgtgcctcccccgcagctgctgagaaaaccacaccagagagcgagaacgtcatcagagag

SEQ ID NO: 156009 - DNA, 122 bp, Homo sapiens
gttgattgagttccgctgtcttagaaccccgtcgaacaaggcgagttcatttcagactgacgtaccaccgcttatcaatttaggagccagtaaaattaaccgcttcggagctgattttctcg

SEQ ID NO: 156010 - DNA, 122 bp, Homo sapiens
aacatttagggagagtcacaacagtttgacaaatacggtgctctctgagagaactggatgcggaaaacaaaaatttgtcttctccatgatcacccccacaagttgtgtgggagtgagttggg

SEQ ID NO: 156011 - DNA, 122 bp, Homo sapiens
cgctggcttacactcacacagtcgctggctcactctcacagtcactcgagtgcacactcacggacgcacccacacaaaagctgtgctcccacaggctcagtcatgtgcaaatcacccttcat

SEQ ID NO: 156012 - DNA, 122 bp, Homo sapiens
ggggacacaaagatgccttagaatggttaggaagacattctagtaaaaacaacgaagtaacggtttaaaaaaactcagagcagctcagtcatgccttaggagagtgtgcagagtgcttggag

SEQ ID NO: 156013 - DNA, 122 bp, Homo sapiens
cccgaggaaaacctggactttccgaaacagctgaccgctcaggcccaggaaggctgatggcggaggcccaaagatacagtgaccttcctggggagatctgcggggcagcaacttggggcgac

SEQ ID NO: 156014 - DNA, 122 bp, Homo sapiens
ctaggacttgaagggacgtggaggcttctttacttggaagctgatagcgtttggctgtgtcgccacccaaatctcatcttgaattgtggctcccataatccccatacttcatacgtgggacc

SEQ ID NO: 156015 - DNA, 122 bp, Homo sapiens
tgagcgcgggagtccgaggactgcctgtcacagcctcctcctcttccccgcagggccacccgttcatcgtgcagttcaatgatggaaatgccgccgtggtgtccatgtgggtgtgccgggcg

SEQ ID NO: 156016 - DNA, 122 bp, Homo sapiens
acaatgaggactaccaacaggtgcctaaataactgattcaaggcagggtgtgagctccaacggagaactcagggactggagggattgccaagggagaaattctttctgatggggatggagag

SEQ ID NO: 156017 - DNA, 122 bp, Homo sapiens
gagaaatgaaactggaagtcctggacatggatgttttcattcttccatcaaaatctttcacgcttggtaaccttaatataccgactttaatatctagacacacctgagtctatttccccgta

SEQ ID NO: 156018 - DNA, 122 bp, Homo sapiens
actgagccctggccaggcccagtgggaagtgctttacatacattaatttatccagtaaaacgaggacttgaaaacattggcagtaaaagcatcatcaatatgtaaagataatgatgatgata

SEQ ID NO: 156019 - DNA, 122 bp, Homo sapiens
acgtggattggagaggaaaggaagtattgaaggcaggaggactggcttgaatgctgctatcgttaccatagtccaaatgtaagatgatgaatgtaagatgatcagtaaaaatgggaagaagt

SEQ ID NO: 156020 - DNA, 122 bp, Homo sapiens
tattaacgttataaacattagacccgcttctgcgcgccggacggcgccggacgaggtgcgcgcagtcttctagctgagctcggaggcagatccagaagtcgcggctcccaccccaggcctcg

SEQ ID NO: 156021 - DNA, 122 bp, Homo sapiens
gagtgagattaacatatacaggagatcctgggtaaattgacttgttgaatggagacgttacgtcgaagtactcaatgtggcaaagcttttttgctgaatgtttactgatattcactatcctg

SEQ ID NO: 156022 - DNA, 122 bp, Homo sapiens
ccagcgggcgacgggggggcgcgcggtaggccctgcaacaaggccagggcctgggggggccggcaggagagcgaacccgaggcatcgtggtgccatggcggggccgcccccacgggcatggg

SEQ ID NO: 156023 - DNA, 122 bp, Homo sapiens
cgggacgcagggtcagctggggcaaactcgagaaggcagaggccggtgctccgcggagggcgggagactcacggctgcagcccctacggtcctcgtgcagccggtagccggcctcgcaggag

SEQ ID NO: 156024 - DNA, 122 bp, Homo sapiens
ttgaatcttaagcacgtatgaattgcttactcacaaatgagtaccataacatttgctgaccgggattggcaagataccttaccaaatgactatgttagtaaatacagtcatgcattacttaa

SEQ ID NO: 156025 - DNA, 122 bp, Homo sapiens
acaaacaaacaaacaaaaaaacgcagcccgagacagatcagaaactaggtgtatgtagggcgccaggttatgacactgttctctgacatccacagggcgcaaaaagaaaacctcactagtca

SEQ ID NO: 156026 - DNA, 122 bp, Homo sapiens
aaggagcgctaaaggccaggggcggtcccacccgcgaagccctggaaggcggattggctgcgcgaggaagtggcgtgtcctcacttgagctgtctgggagcgagagtaagagataaaggcaa

SEQ ID NO: 156027 - DNA, 122 bp, Homo sapiens
tgtgttcgggtgtgggcctgttcgagcagtgctcacccctcagtttggaagatgaatcgtcgttgcattttgggttcttccagttgcctgctgtttgactatcgctgttcttcctcagttag

SEQ ID NO: 156028 - DNA, 122 bp, Homo sapiens
gcagccagtgctctgcacagagccctgagcagcctctggacattagtcccagccccagcacggcccgtcccccacgctgatgtcaccgcacccagaccttggaggccccctccggctccgcc

SEQ ID NO: 156029 - DNA, 122 bp, Homo sapiens
tttttttttatttttgagacagagtttcactcttgttgcccaggctggagtgcagtggcacggtctcggctcaccacaacctccacctccggggttcaaacgattctcctgcctcagcctcc

SEQ ID NO: 156030 - DNA, 122 bp, Homo sapiens
cctgacagccaatgagcgggcgcctcccggcggggtggtgggtaattaatgagggccgggcgctgattggctgcagcgtcgtggccgggggcagggcggcggggtaggttgttcctgaggtg

SEQ ID NO: 156031 - DNA, 122 bp, Homo sapiens
ttcaggtgatccacctgcctcagcctcccaaagtgctgggattataggcatgagccattccgcccagctggaggttggtgattctggaacttctaccacacgtgggaggaggggagcagaag

SEQ ID NO: 156032 - DNA, 122 bp, Homo sapiens
gtgggcaggagctacccttcccgtggccccggaccttgggtgggctgtgggctcagggagcggaggggaggccttaagcatccactctctgcccggtgtttttgttctcatcagggagcctc

SEQ ID NO: 156033 - DNA, 122 bp, Homo sapiens
tggaatcgcgggtcgcggacgctcgccgccggccatagctcagcctagcgccgccaaggccgacggccctcagcctctgccatggacttcgaggacggtaagcgctgcctctggctggtcgg

SEQ ID NO: 156034 - DNA, 122 bp, Homo sapiens
ctgcccgctccccgccccgggctcactccatgtgaggccccagtcggggcagccacctgccgtgcctgttggaagttgcctctgccatgctgggccctgctgtcctgggcctcagcctctgg

SEQ ID NO: 156035 - DNA, 122 bp, Homo sapiens
tctgaagtgggctgcaagctgcattcaaaggggcttctcaccccagactgagggtgggagcgagggctgcgaggctgcaccctggagatgcagccaggccaggcactcacttacgctgccag

SEQ ID NO: 156036 - DNA, 122 bp, Homo sapiens
gtaggaagaagactggagtctagtaaactaggggtgggagatttaaaatgaaaaataaaacgagtcagaggaatggtaagttagtcttttaaaaaccaggaaaggtatgtacgcaaaagcaa

SEQ ID NO: 156037 - DNA, 122 bp, Homo sapiens
ctgccagtggtgcggacctgggcgggtgccggagcccggatcacagaggggcaaggcgagcgctctaggcccactcctggcgtggggcgctggagggtggcaaggccgcgacaggggctgtg

SEQ ID NO: 156038 - DNA, 122 bp, Homo sapiens
agcctaggctcccggaaggtaaacacatcgccaagggctgggcagaaggcgggtgtgggacgggtgagtggccagctaaaagtgattggcagctgccatgtccacgtgctccgagcttggaa

SEQ ID NO: 156039 - DNA, 122 bp, Homo sapiens
cagcgggctggcaaagaggaaagggcgataccacccggagacctccggcaactttctgcccgcggcagctgctcattcacgcgtttcttataagcccaggagccaatcagaggctgcgtcgg

SEQ ID NO: 156040 - DNA, 122 bp, Homo sapiens
ggccgcgggcggttggttttccttgacggccactttggacctgttcaggccgctgggacgcgtgggtggcggagtttccggagacattgattcccgagcgggggagtaggggaggttgcgga

SEQ ID NO: 156041 - DNA, 122 bp, Homo sapiens
attctgtgcaccatcgtggtgtgtgggccttggggaggccttttgcccgagagagaagggcggataaacagagggactttgggggtgagtacatgcatgccaggcaacggccctgatagaaa

SEQ ID NO: 156042 - DNA, 122 bp, Homo sapiens
ccaattggctgatgcacatgtcactcattattcaattggctttcggttggtgcgctctaccgtccatcagtgacattgcacagacctattggtcaaatcaacgtcgctctagacgcctctgg

SEQ ID NO: 156043 - DNA, 122 bp, Homo sapiens
gaggtggtgggggtctggggttgggtgggagccagggatggcacagaggagcagtctctccgggtgacagtgcaggggagtggccctgggtgggaaggggacacccccgctggttctgagca

SEQ ID NO: 156044 - DNA, 122 bp, Homo sapiens
acttctcagtgatcttcctgtataactaaatattcgctcattagggctttttgttgttgtcgttcaccttctcaccttctttcattaaatccagatctttaacatcccagctgagcagcaca

SEQ ID NO: 156045 - DNA, 122 bp, Homo sapiens
tactcttgatctggtacttctagctcctgatatttctgcgggtggttgggggctcttgaccgtccccttgcttcaggaatttcatggaggtggtgggtggagagatgaaacagcaatgatgg

SEQ ID NO: 156046 - DNA, 122 bp, Homo sapiens
gagtgtaaccaccttgagaagtcttggcaaactccagatggccacgcagagggccttttgcgggtgccaggctatgtctggatctgaccggtaacgctgagtgctgggcattgctgctgtgg

SEQ ID NO: 156047 - DNA, 122 bp, Homo sapiens
aggggtcgtggaggcggcccccctgcagtcatgacgcacctgtaaactggctgcatctcccgggctatgccgatgatggcgcctggcaggaaactgtcaaattcctcaaacaactcccggat

SEQ ID NO: 156048 - DNA, 122 bp, Homo sapiens
gtggggaatgtagattcgagtccaggggacctgagttcaaaggtgggctgtgccactcaccgggaaatgggacgtagatgcttcagggctgtttcaagcctggtgctgggcaccctgcaggc

SEQ ID NO: 156049 - DNA, 122 bp, Homo sapiens
ttggtgcttttcatccttgcttttgttgccttgggctgcagaaatgctctgtgcatcaagcgcccctgtgatactgtttggggatcagctccttgactttcccattttcagcagtgtatacc

SEQ ID NO: 156050 - DNA, 122 bp, Homo sapiens
gtcccccggacacctctgggcttaggactcaggggaacagattcccagaagcaggttccccgccgcgtccggcgcccgggctctgcagccgccccctgctctgcctcctgcacccgcagggc

SEQ ID NO: 156051 - DNA, 122 bp, Homo sapiens
cagacgccgggtcgcacagaagtaattaaaccaatccctctggcggtggggcccaggcgtcggtactttttttaatttcccacttgaatccaatgggaatccaagtttaagggctagaagac

SEQ ID NO: 156052 - DNA, 122 bp, Homo sapiens
ttcactcagagatctagaagcaactgccctggggactatcctcctccccttcctcatccccgcctcccctcagtgatccacaggcaatgatcctcttactggttcaggtttttatcttcacc

SEQ ID NO: 156053 - DNA, 122 bp, Homo sapiens
gaactttttctatggcgtctgtgttcaaacccactagtttcacagtcctgggagggataacgctcattaatctccgccttcttttctccagacccccgccccccaaatccggtgaatcttct

SEQ ID NO: 156054 - DNA, 122 bp, Homo sapiens
taatttggcatgactattgcgtcatcgtggaggtcgtcgtggttccccgagaggcctccacgtcttctcccagcatcggggcctttggacgcttccgggcgctgcgggcacttgcgcgagga

SEQ ID NO: 156055 - DNA, 122 bp, Homo sapiens
gctgcgccggatctgaggcagggccagcctgtgggagcagcaacatcgctcgcaggacagcgatggagcccccacgaatccgcgtgaaagcagcaaccacctagaaatgaacgtacagctgc

SEQ ID NO: 156056 - DNA, 122 bp, Homo sapiens
gcgggggaacagcacactcttctgttgaaaagagttactcaaacagaggcaacagttaaccggtcatgaaaactccttcttttagagcctggacataattcccacaccctgaaatatcttca

SEQ ID NO: 156057 - DNA, 122 bp, Homo sapiens
cgccccctcaccgcccgctcacctggggcgtgcggcaccccattgcccgctcaccttgagcgtgtagtcctctggggacagcttgtagcctttgcctcccagcttcagtgtgatcgcgggca

SEQ ID NO: 156058 - DNA, 122 bp, Homo sapiens
ttctaggaaaagagctaaaagccggatcggtgaccgaaaggtgtgggtctcagggttccccgggtctaactcgccgggtccaaccgcagcatcagccttggggcggcagataatctttcggt

SEQ ID NO: 156059 - DNA, 122 bp, Homo sapiens
agcttcattttcttttcagccttttcttaagcgtccgcattctccactatgcatttattacgttggtgcaaaactaattgcaccaacctatatatgtaattagagaaaagtaattacttttg

SEQ ID NO: 156060 - DNA, 122 bp, Homo sapiens
accagccagctcactggtgacgtggagcaacgaattgcaggagcccataggaggcctcggcggtccccgggcgccgcagttttaagagaacccattattagatggaggcacttaaaaaccag

SEQ ID NO: 156061 - DNA, 122 bp, Homo sapiens
taggagtgaaaggaagataagccttctcatgctttactccactagctcgccggtattcaccggggatttgtgggccccggacaggacaggatgagttgaagggggctgagtgtgtatgttcc

SEQ ID NO: 156062 - DNA, 122 bp, Homo sapiens
tatcccttcaaaacttttagctgagtatgccgtttcttgctggttccctgatacaggattcgtggactcctcccttccatagtaccctttgttaatagtggcaattacaacagagtgacatt

SEQ ID NO: 156063 - DNA, 122 bp, Homo sapiens
caaaaaaaggcctggtcactacggcacaaggacacatacaaaatggtcagaagtgtacgtcggtactgaaggcattatgaaatgttctttggagcatgaacaaaagtgcagacagccagagg

SEQ ID NO: 156064 - DNA, 122 bp, Homo sapiens
aggcagattcgtggcctggggaggccactgtgaggcaaatgctcagttttcggaggatgccgtgaggcagggagaaacttggctttcagtggccgcagtgagggaatagtttgattgctgag

SEQ ID NO: 156065 - DNA, 122 bp, Homo sapiens
ccaaaagcctgctgtgtataaagtgctgtattcagtctagcacaggcgcggtaaaccgatcgcaccatacgatggctgtgattaagaaggggaggaggggcataggggagaagaggaagatc

SEQ ID NO: 156066 - DNA, 122 bp, Homo sapiens
ggcagctgtaacgggagacatttgtacatttattcaccgaatccttgagaactcactgtacgttgagccctggaagtgcaagtgttttgaagtcagaagagcagcacattggctggaggaaa

SEQ ID NO: 156067 - DNA, 122 bp, Homo sapiens
gggtaacctggaggagtcatcgcgagaattgaccaaacgcagctcctccaatcaggagttcgaggaggtcgtgacgtcaccggggtggccggtagcaatccggtttagttaaccagccactg

SEQ ID NO: 156068 - DNA, 122 bp, Homo sapiens
tcgaaaccattctccacgcaggacccaaagcggtttgcaagcaggatttcttagccaccccgtgcagtagcacattcatgaactaatctggcttcgcgtgtaatgtgcttgtatgagagagg

SEQ ID NO: 156069 - DNA, 122 bp, Homo sapiens
tgggacctcgagaaagctcctcccatcctcactggcctgtaagggtgtggactgaacaaacgatttcacgattaatacctgtgtatgtgatacatgagcttactagacaatatcacccatca

SEQ ID NO: 156070 - DNA, 122 bp, Homo sapiens
caggtcttttttctctagcaccttttttcctctcttggtctcagctgggcctggttctcccggggcaggagggagggggtgtgggtggggcctgaggccccgcagctgctgccttgtgcctg

SEQ ID NO: 156071 - DNA, 122 bp, Homo sapiens
acccttccgcagcttcccacctcctccagacgcacgtgtttaaagagtccctgctccaaccggtcccgccccacctccgctcggcctccagccctgcttgtactgctggcttcaagtttcct

SEQ ID NO: 156072 - DNA, 122 bp, Homo sapiens
agatgcggaaaaggctgtgattgacttgtataaccgttggtttaacggacagccaatccacgccgagctgtcgcctgtgaccgacttcagagaagcctgctgcagtcagtatgagatgggag

SEQ ID NO: 156073 - DNA, 122 bp, Homo sapiens
gcgggaggtagaaaagccagtggcatttcaagtggcagcaacagaggtctcatgtcatatcgtgcctcaaagaggaaggaaactgtctgctggaaggacagcctgcctaacacactcacaca

SEQ ID NO: 156074 - DNA, 122 bp, Homo sapiens
ccggggagctcggacatctccaacagcccagtcggctccgccatagtcccagcgtttctacggagactggaataacggcactgcactgctgtatgcgagacctgcgcatgcgcgagtctcag

SEQ ID NO: 156075 - DNA, 122 bp, Homo sapiens
ttttgtcgtggatggctgagcgtgaggctgagccacccctgcctcctggtggatgtgggccgcacccctccagctggtcccacctgccgaccagctgttctggttgctccctcatctatagg

SEQ ID NO: 156076 - DNA, 122 bp, Homo sapiens
gtccaggcccgaacccctgaagacgggctccgcccccggcacccgctcgcgccccgcccccggctggaggagtctctcctggaccatccgaacctagcctgtcccggcccgcagcctctatg

SEQ ID NO: 156077 - DNA, 122 bp, Homo sapiens
ctgctgcacccgaacatttccagcgcaccctacacacatgtccttacttaatccctagcccgactctgtggaagagcttaggtgagacccattttccagagttcctacctgtttcctacttg

SEQ ID NO: 156078 - DNA, 122 bp, Homo sapiens
actaacgaacaaacggctcactaaattcaaacatgagtttcagcctggtcgccgagccggcgggtagaaaaaacctttcccctcctaaccctccgcagatgtcggccccgcactccgcccag

SEQ ID NO: 156079 - DNA, 122 bp, Homo sapiens
ggactaccaacgaaggggacccgggagatggcgggtgggggcccccgggaggacagtgggcgagggagggggtccttgccaggcctggggcggccgggggcggtcctgggctcccctccgtc

SEQ ID NO: 156080 - DNA, 122 bp, Homo sapiens
ctcagggcaacgaaggccctcccacccctctggcagctgggagctggcgggtgggcccatcgggacccagggccttgggctctgtcccctgacatcctggggcccttcaggagctgacctgt

SEQ ID NO: 156081 - DNA, 122 bp, Homo sapiens
tggcgctgggtggccacggaggtcccgcgctccccgaccgagatagggcgggccctatttcggggagatgttgggcaccaactttttttaaagccccgtgggtggttctccgggatctccca

SEQ ID NO: 156082 - DNA, 122 bp, Homo sapiens
gaccgctggggtctctgggtgccgcggcctcggctctccggggcgatgagggactagaggcgccctgaggcccgcctgcctcccgcgctctggccaccccggcgggaaaaggatcgggcggg

SEQ ID NO: 156083 - DNA, 122 bp, Homo sapiens
ctctgcaacatccctggtgtaccacactattagtttggtgaccattgtggagtcccctctcgcaatgactgggcttggccagcaggacattagcaggtatgatgcccgcaaagcttgtcaaa

SEQ ID NO: 156084 - DNA, 122 bp, Homo sapiens
gggaggggatgcaagcgggaggataaagcgatgaagtgtgctgcgttaccgcgcatcaggcgctgttgttggagccggaacaccgtgcgactctgaccgaaccggccccctcctcgcgcaca

SEQ ID NO: 156085 - DNA, 122 bp, Homo sapiens
cgccgaaaggatcgccccccctagtcaaaccgctcgcgccccagaggcctcatggagtcccgcctcaggctcgggccttggcccccaaagaaagccactccgacgtgtttgagatgggctta

SEQ ID NO: 156086 - DNA, 122 bp, Homo sapiens
ggtgcgggagctacggggcccagggattgtgtttaaagtagtgcttctaccaacatgtcccgtggttccagcgccggttttgaccgccacattaccattttttcacccgagggtcggctcta

SEQ ID NO: 156087 - DNA, 122 bp, Homo sapiens
aaaggtgctgcgtgctgtctttcaactcccgactttttgaatggcatacaatcgtccggccgcagagcggtgagccaaagtcggagtcagctcagactctgcaaacgaaaaataataacaat

SEQ ID NO: 156088 - DNA, 122 bp, Homo sapiens
cctcagccccggccccggcctccctacgccgccgccaccgccgctccagcttcgcccgcccggctccgccagccgccgacgtcccggtgcctcgctcaatacgctcccctcgggcgcgaggc

SEQ ID NO: 156089 - DNA, 122 bp, Homo sapiens
caacaagcttctgggcaaagtcaccatcgcacagggtggcgtcctgcccaacatccaggccgtgctactgcccaagaagaccgagagccaccacaaggcgaagggcaagtagaagcctggat

SEQ ID NO: 156090 - DNA, 122 bp, Homo sapiens
ctggcgggccctcgattcgtcagcagtcggggtcagtgctggcccagagccaaggcggctcgtgggtgtctgggaggtttggggttgctcagaggagccccccaggtcagacttggtgctcc

SEQ ID NO: 156091 - DNA, 122 bp, Homo sapiens
tgtggtttctcctcttaggtagggagaggacggagtggatgccagccttgggaaggtggtcggtttccagtcccagggagaggtgagggacctgagtccttcgcatttgctcacatgctagt

SEQ ID NO: 156092 - DNA, 122 bp, Homo sapiens
ggctgctcaggtcccttgtctctgttcagtgttttcccctccgtcttccctcgtgaagatcgggtagcttcactattctgtcctcgagctcacggatgctttctgctggcctctgcatcctg

SEQ ID NO: 156093 - DNA, 122 bp, Homo sapiens
accccctgtaaactgaggataatggctcttacctcaaagcattgttaggattggagagaacgcatgttacatacttagaagaatgcttggtatgggtctcaagaactcttagctcttattgt

SEQ ID NO: 156094 - DNA, 122 bp, Homo sapiens
gcccagtgcagcgtccgggacagcagagcgaggagctgcctcagcctcagcccagtgcggcgtcctcggagcagcagaggccccggggctgcagggtctcccccaacctctccctgcggtgc

SEQ ID NO: 156095 - DNA, 122 bp, Homo sapiens
gctccgcagatacctggagaacgggaaggagacgctgcagcgcacgggtaccaggggccacggggcgcctccctgatcgcctgtagatctcccgggctggcctcccacaaggaggggagaca

SEQ ID NO: 156096 - DNA, 122 bp, Homo sapiens
gggggccttggaatgagagtggaggggcgagcgtccctggccgctgtccatactcgtcagcggaggcccaagcgcccacgctggacccgattccagaagggcccaccttctgaagacacgaa

SEQ ID NO: 156097 - DNA, 122 bp, Homo sapiens
taaagggtgactctttcctgtcccggcctgcgtggtgtgggcttgtgggtctttgagacccgaaaattgagagcgttttcgcactccagcggctgctcctggcggctctgcggccgtcacca

SEQ ID NO: 156098 - DNA, 122 bp, Homo sapiens
gctctctcagcccctctgcggacctgcagagcaccctcaggaactcgaggcaggtaagttcggccgtggaggctcttcccacctctggggttcggctcctgtgcgcccctaaacttctccct

SEQ ID NO: 156099 - DNA, 122 bp, Homo sapiens
gggccgcacctaccagcggctgcagctcctccaggtgagccagggtgcggcacaggaggccggcgcaggacgacttggaggccaggagtgtgtccaccgtcgtggcatcgtctgccgtcccg

SEQ ID NO: 156100 - DNA, 122 bp, Homo sapiens
ctgtttgggagtcccaggggtgacaacgggtctggccgtgcagtacgggctgtgtctggccgtccgtctcctgggtcagcgcgtgcctctcctcggtcatgcctggatttacagtcgctcgt

SEQ ID NO: 156101 - DNA, 122 bp, Homo sapiens
tagcccagatcacgtctctattgcactccccggaatcatccttaggtcgggagtaccctacgccacctccagggacgcttctagcacttctacatgcccttatccctccaaactccaggggg

SEQ ID NO: 156102 - DNA, 122 bp, Homo sapiens
gcagcgccgcgtgtgtaacggcgggggcgtgtcggcgggaaggacaatcgggccgggactcgcggtgtccgggtgaccgcggcttcccgggagcagacctctgtgggcactgtgaggcggaa

SEQ ID NO: 156103 - DNA, 122 bp, Homo sapiens
acagcctgaatgactttggtctttgaaagtgtatttctcagagtttaatctccaaggattcggaacaaaatgaacacattattcatcctatcctgaaatgatacttgtgtgtgtgctgggtg

SEQ ID NO: 156104 - DNA, 122 bp, Homo sapiens
acagcgggggctcccgggaggtaggggaggtggccagaccggtggggggctccgccatgccgtgcaagtgctcagggccgcctcaccctccatctggccccagcccatgccggccttccctc

SEQ ID NO: 156105 - DNA, 122 bp, Homo sapiens
actccatgaaaacttgttgatttcttgttgcattcacaaccacagaggttgaacgctgggcggtcaaatcctggctcatcactaccttccagtccttagtcctcaacgttagatttcattcc

SEQ ID NO: 156106 - DNA, 122 bp, Homo sapiens
acattgttgtgaagatcatgcttataatctgtttaaaacaatgcccagccataataagctcgctaaatgttggtggttatttttatcctgtcaatggcatctctgtccaatcaagaacaagt

SEQ ID NO: 156107 - DNA, 122 bp, Homo sapiens
gtagcagacagagcaggaattccaatctgaagccaccctgcctttcctgtgggctggggccggtgtctgcaggccatgctcttgttgaccatggtgtaggctggagccgagctgggaggaag

SEQ ID NO: 156108 - DNA, 122 bp, Homo sapiens
tgcaaatatcatcttccacactaaacccttctatgggggcaagaagcacagaattactgccgagattttgtaggtattttttctgccttagagctcttatgcttttctgaaataactgcctt

SEQ ID NO: 156109 - DNA, 122 bp, Homo sapiens
acccaaacctcatgtcgaactgggatcccccgtgtcagaggcggccgcgtgggaggtgaccggatcgcgggtggacccttcatgaagggttcagcaccatccccttggtgctgtcctgggac

SEQ ID NO: 156110 - DNA, 122 bp, Homo sapiens
cgacggcccccgcgacgctcgctcctcattggacagaccgagcttacgcctcaaggaagccgggccaaccgaagctcagcgcatggcttgaaatcgaggtcaaaggagacagaggcagcgcc

SEQ ID NO: 156111 - DNA, 122 bp, Homo sapiens
cctggcccaggggaggcatgagggctacataagacagtgtgggtcaagctgagagctctgcgcctgggactgggtggtgcaggtagcaccaggtccctctggtggagagctcatgcttggct

SEQ ID NO: 156112 - DNA, 122 bp, Homo sapiens
cctctttactgcccgtgattctgataatcgaatgagaggtgtgccagaggacaatgggaccgcgcagccacagccagttggggcccagcccctgcccccctgcccttgcagcagcgctgacc

SEQ ID NO: 156113 - DNA, 122 bp, Homo sapiens
taaaccttaacaccacaaagttgaccctgctgggctcctaaaaaacacaaagcaagcaagcgcgaagagaaaaatcgcaccctgcacctatccagacagcacaaacccaggtggccccggga

SEQ ID NO: 156114 - DNA, 122 bp, Homo sapiens
atgatggagcccagtgagccaccgtccgtggagtgtcagagcctcctaggatggccacgccgaaggtgcggaaggaggcggctggcccagcgtcagacgtttccagcatccgcgggagtgaa

SEQ ID NO: 156115 - DNA, 122 bp, Homo sapiens
tccggctctgcgtctccctctctgcagcctgtgtaagctattataattaaaatggttttccgggaagggatgagtgtgatgtccttgagaggaaatgaatgtcctggcctgggactctacac

SEQ ID NO: 156116 - DNA, 122 bp, Homo sapiens
ggggctaatcttccacagcggagttccgcacgggcgcagcagccctgccacttcaccgtacgctcccaacactggccccagggaccccgttctggtagtttctcagggctttccctgtgaag

SEQ ID NO: 156117 - DNA, 122 bp, Homo sapiens
ccacgcagaggacgccggaacaccctggaagccgagaaatggtgtgtgtgagggggctggcgtccgggcgactgggagaggggctggaatcggccggaaccggctgaggcgggacccgggcc

SEQ ID NO: 156118 - DNA, 122 bp, Homo sapiens
aatcgcccagaatgccactggagagagcgtcttgttagcttacactcagcatcgcctcaacgcagccgttcactctggagcttgcctctttaacctgtaaataaatacccctggttaactcc

SEQ ID NO: 156119 - DNA, 122 bp, Homo sapiens
tataatgagcagggcacatgccacaggaaagagccagagggaaaagttgaggttgagcatcgcagaaggttaccatggatgctacactgtttttaaaaaggtaaatattcaggattgagcag

SEQ ID NO: 156120 - DNA, 122 bp, Homo sapiens
gctgcacctcggagccgctggctcacaggcggctgctttctcctggggcctgtctgctgccggcttgcctgtcctcctgggtcctgcccacgcgcttctgcccccaggcccgtgcaggcgtg

SEQ ID NO: 156121 - DNA, 122 bp, Homo sapiens
gcagtggcaaagtagaagcatggagaccaagcctttaaaactttctgactttggtgttaacgttctgttcctcattttcccttctgtaacatagtgatgatgctgcgtgctctagttatatt

SEQ ID NO: 156122 - DNA, 122 bp, Homo sapiens
agacggaagcagaacgtgaggtggccccggggccgggagggacacgtgaggagcgggcggcgcgctgggttgctttctcgggggtcgggtgagggccaggcggcggtccctacccggatccg

SEQ ID NO: 156123 - DNA, 122 bp, Homo sapiens
agtatgcactccttaaatatttgcagaatttaagtgccacataagtgaccacgtgggcaacgccctcggggccttaagccgcgccatttttggggctaggattggttggaccctccgtcacg

SEQ ID NO: 156124 - DNA, 122 bp, Homo sapiens
agcatctgtaatttcacctttctccgcctccttttctcagagcccctcttcttgggcctgcgattcctcacctggaagggagaagagtggacttcctgcctagagaacaccttggtaaactc

SEQ ID NO: 156125 - DNA, 122 bp, Homo sapiens
gaaacaagacaaaagctcagagcacccagaattatcagggcaggaaggggaaagagtggccgaggtgtcctagcagctttcttgccatgtaccttgtggaggcgccgctggctctggctctt

SEQ ID NO: 156126 - DNA, 122 bp, Homo sapiens
cactcctgcttctgggtcaccacgcgggcactgctggcaaccgagctgtgggttcacagacgctgcctgaaaacaaccgccacccccgagagcagcggagcctcttcatcagccatggcggc

SEQ ID NO: 156127 - DNA, 122 bp, Homo sapiens
acagctaagacatttagtctttcccctacagaggctgtggcaggaagactgctctgcccacgacagaacgaggagactgtaggaaagtgtgcatggctggcaactgaccccctgtgagcagt

SEQ ID NO: 156128 - DNA, 122 bp, Homo sapiens
tcattctttaattacttacaggggtcagtcacctgatgggacgcctttgctggagacagacggtactgacaagcagattagttgcacgttgggaggtgggaggagggaggagacgaggagag

SEQ ID NO: 156129 - DNA, 122 bp, Homo sapiens
gcgacggcggcggcggtgaaggcagcgggtcccggcctcggctctgcgcgcccgcgctcccggcaccgcagccaacaagttcggaacgagactgacagctcgctcgcccattcgtcacccgc

SEQ ID NO: 156130 - DNA, 122 bp, Homo sapiens
atctctaatggcgagcgctgtgaaacccgaaatctcgaacgcgggagcgcagattggcttcggtccacactgactgacgagtggccacacgccattcctcagaggaggcgcgtccgcgctct

SEQ ID NO: 156131 - DNA, 122 bp, Homo sapiens
gacgcgcgcagtggaccgcgatttaggggcacagggtctcccggggaccagcggctggagcgctccggccgagcacccgcagtcccggcgccgcggccccaccccggccccgccctcttccg

SEQ ID NO: 156132 - DNA, 122 bp, Homo sapiens
gacaagtcttgtactggaaaagtttcctgaagtcttaaaatttacaaccacacaaagcaacgcggaaacctccaattgtttctagttaaaatataaaaaagaaatcagagaatattggagac

SEQ ID NO: 156133 - DNA, 122 bp, Homo sapiens
cgcataggctttttctgaagtcagttactttgggtgctaacaatctttttgtaatattttcgttctcatctctaattgagactcattcaacttttctactttccaggtactgtattctatta

SEQ ID NO: 156134 - DNA, 122 bp, Homo sapiens
atgcatcagaatcacctgattcctgagcttactgaaacacatgttgctggcccccacctgcggagtttctgattcagcagatctggggttgggccctgggatttgagtctttaataagctcc

SEQ ID NO: 156135 - DNA, 122 bp, Homo sapiens
ttaagcagatcgccaggttccatcttcgcagactctggttcagcaggtagcaggttagcccgagaatctgcatttctaacaagctcctaggcgtgcccacgctgtcagtattggcagcccaa

SEQ ID NO: 156136 - DNA, 122 bp, Homo sapiens
agtccctgtagatttgagagcagaaaacatttattttatttgttactaaaacaaggaactcgattagaagtcaacagtatgagatgaaaactagagattatgagccatgattcttttactca

SEQ ID NO: 156137 - DNA, 122 bp, Homo sapiens
ggcacagggaaatggagccaggtccagccgggtgcaggcagcgtgggtgtcggggcgggccggccatcggcagtgtgggaaccagtaggcggcgtggcacgtaaggaactcagcttcagaaa

SEQ ID NO: 156138 - DNA, 122 bp, Homo sapiens
gggggctgggcttcccctttcacatcgccctttagaggcccacgtgtgggcattggcccgcgatctgaaaggggctgtcctgttcctcatgggcgctgccagcgccacgcactcctctttct

SEQ ID NO: 156139 - DNA, 122 bp, Homo sapiens
ttgatgtcccctccccttactagagtgctgagcattcgaaatatcaccagatccccaaagcgaagtgcaaggggcatggctggaatcaccagcctctttcctggggaataaaataggttcag

SEQ ID NO: 156140 - DNA, 122 bp, Homo sapiens
cgaagggccaaaactagccaagagccacagtgaataaattgccaagcaggcacttgaactcggcaatcccaatttcctagaaaagttcctctcccatggcagtgggggacaggtcccaagtc

SEQ ID NO: 156141 - DNA, 122 bp, Homo sapiens
tgtgtgcgtgtgcgcgcgtgtgtgtggtagggacgtcatacaggacgcgtggcctacgaacgtgctaaaccactggcaataaaaacacagagtgtggggccgggagcggtggctcacgcctg

SEQ ID NO: 156142 - DNA, 122 bp, Homo sapiens
gcgaacctgcgagggctgcaagggctttttcaaggtgagcgcacgccgccccctcccctccgcacccagccccctcactgaagggagcttctaagtgagtgtaggagcatccttgttcttcc

SEQ ID NO: 156143 - DNA, 122 bp, Homo sapiens
tgagtatctggccctctgaggctcagcatatgacagctaagtgtcaggcaggatcctctgcggggtcttcctttgcatgtctgaagctggatctccctcccctaccctgctcctaggctgct

SEQ ID NO: 156144 - DNA, 122 bp, Homo sapiens
cagccatcgcataggggggaacggacccttttgtgggccctcgggtccccccgtggtccccgctggcgcgctcgtcctctgccacccccagatctctgcgcactccccactcctgggcgttc

SEQ ID NO: 156145 - DNA, 122 bp, Homo sapiens
aaagggaaactaagaaagtaagccaccatttcatagaattctgcattgctagtcattttacgtcccctctgaaaatcactccaatttgcttttttcattaaactgacttctggccaaaaaaa

SEQ ID NO: 156146 - DNA, 122 bp, Homo sapiens
gtctctatgaatttgactacttttcagtatctcataaaagtagaatcatagatttgtgaccgacttatctgacttagcataatgtcttcaaggttcatccatgtagtagcatgtgccagaat

SEQ ID NO: 156147 - DNA, 122 bp, Homo sapiens
actgaggaaggaccctacctcctggaccagtccaaaagaagaactcctgcgagagagctccggaggaaaagggtagggttcctaaaataaccagggcattttggaataggtggctacattta

SEQ ID NO: 156148 - DNA, 122 bp, Homo sapiens
cgggctctttaaggtgggtcccgccccgtaggcctcccctcgcgccagcccctcccatcccggaaaggctcagcccaagcccggccccgcccgccctcggccccgcccatggcagagcgcag

SEQ ID NO: 156149 - DNA, 122 bp, Homo sapiens
agcaaatgtcatacttaatgataaaagactgtaagcttttcctctaagattagaaacaagcgtagaatgtctaattttgccacttttattcaacatagtactggaagtcctagccagagaaa

SEQ ID NO: 156150 - DNA, 122 bp, Homo sapiens
gggccgtgtgcctgtgaccagcctcctgggctctgtcacggctgcgctgtggctgtacgccgtggcgctgcagggctgtgcatggtgtgacccgaatcccttccaggagcttcgagaacaac

SEQ ID NO: 156151 - DNA, 122 bp, Homo sapiens
ggctcgggttctggcccctgcctggctttccttacccttttcgggtagtacctggaccagcgggttcacttgcccgcggccgccggaagttgcgcaaactcagcttgccggagccccaggtg

SEQ ID NO: 156152 - DNA, 122 bp, Homo sapiens
acgaaaacgcgcatatccgttcccagcatgctgcgcggtaacccataacatgcaagactacgtttcacatgcagtacggcgccagctgtcagtgtttttttgtttgtttttcccccaagatt

SEQ ID NO: 156153 - DNA, 122 bp, Homo sapiens
gtggcagcgggggcttcaacctgcccttgaaccggggtctggagcgcgcgcttgaggaggcggccaactccggggggctgaacctgagcgccaggaaattgaaggaatttccccgtaccgca

SEQ ID NO: 156154 - DNA, 122 bp, Homo sapiens
gtgagtggtcatcagtcaggtgcccagcccttggtgtggtgaagctcaggctcttcctggcgccctggtctcctgcacggagctgcggtgagcacatccgggtcccgatggatgcatgcgtg

SEQ ID NO: 156155 - DNA, 122 bp, Homo sapiens
aaaggctagaggctggggtgtttgattgcgaaaatttgcaggaggcactggctggggagccgagaaattggggagccagaggtccaccaggtcaggaatttagaggactagggtcggggctc

SEQ ID NO: 156156 - DNA, 122 bp, Homo sapiens
ctccggccaatagcaagttgaactacaggaagaactcttcccggagccaaacacggcaaccgacgggaaggccgggcttctggctcaagtgtgccaagcctttttttttttttttaagaggt

SEQ ID NO: 156157 - DNA, 122 bp, Homo sapiens
gcaaccattaatctactttccatctctatcaatttgcctattctggacatttcatataaacggaatcatccattatttgtcctgttgggtctgacttctttcatttagcataatgttttcaa

SEQ ID NO: 156158 - DNA, 122 bp, Homo sapiens
ctacggtgtaaaacaacaaccgtttcacagtgttcacagattctctgggtcaggtcagggcggagcaaggatgacttgtctctcctttgtgatgtatagggctcagctggaaggctcaagca

SEQ ID NO: 156159 - DNA, 122 bp, Homo sapiens
tatactgtaattaaaataattatcctaactagtaccaaaggcttccccttagcaatcactcgaagtgtgccagcacctccactcacttcacgtcaagcgattcccatcattgtttcactgat

SEQ ID NO: 156160 - DNA, 122 bp, Homo sapiens
ggcgcagggcgtggggctcaggtggacacctggcgggcctcctggcgggggcgccctggccgcccgggcccctccgggctccttccgggttggcagcggcggcgcagggggcggggggcagc

SEQ ID NO: 156161 - DNA, 122 bp, Homo sapiens
gagaggtcagttcgagaggtgtgaatatccggagaccggggagaaggaagccgcaaaattcgtcccagctgcctgcgactagttaccaaacttcagtgcctaccaaagacctattttctgac

SEQ ID NO: 156162 - DNA, 122 bp, Homo sapiens
cgccccatcccctccctctccgcaggttacctgctcaactggtgcctcctgcaggcaggacgcaacctcagtgctggccccgggcatgcgggcctcgagagggcaggtggcagggccagccg

SEQ ID NO: 156163 - DNA, 122 bp, Homo sapiens
tatgtactttgtcatagattgaattgtatctcccccaaaagacatgctgaagccttaacccgctgtacctatgaatatgactttatttggatatgggatccttgctgatataatcaagttaa

SEQ ID NO: 156164 - DNA, 122 bp, Homo sapiens
aacctcgagaatcgccttaaaaaaaaaaaaaaagccacgacccttcaggggtccggggggcgttgcccgctccccaccccgcgccaaggagggaaaccaccaccggtcaccgctccctgcgc

SEQ ID NO: 156165 - DNA, 122 bp, Homo sapiens
tctccgggcgggagccagtccccgcgtggtggtggggggcatccgggagaactggggttccgggcggcggaggagactgggtccgcgcccccagccccacagcccctcacctggcgcggccg

SEQ ID NO: 156166 - DNA, 122 bp, Homo sapiens
tgcctccctttctgactttggccgccccctctcactgtccgcctctctctctcacgcttccgggaaccagtcttgcaggtcctggcccgtagccgggcaggcatcaccccggtggctgtggc

SEQ ID NO: 156167 - DNA, 122 bp, Homo sapiens
tgaacaaatagtggtccatccatacagtggaatattattcggccatgaaaaggaatgaagcgctgccacatgggtggatgctggaaacattatgctaaggaaaggaaggcagacacaaaagg

SEQ ID NO: 156168 - DNA, 122 bp, Homo sapiens
tggactcttcctcccaccccatcttccctgtccctttctttttccacagcagctctgcaacgggccaatagcttccagtctccaaccccaagcaaataccagaactggaggagagaattctg

SEQ ID NO: 156169 - DNA, 122 bp, Homo sapiens
cctgcccggcccagcctgccggggaggccgggggcgggctccgggatcgggccaaggagacgcgcgtggccgtgcatccctctccacccaggccacctgcacagctggcctcgcgatcccgc

SEQ ID NO: 156170 - DNA, 122 bp, Homo sapiens
ctattgtctcctcagaaggcataaaagctcagggggcgtgaaagagtccaggcgctggagcgaggagccagagagagctgcggagagctgccagctgcagcggggtgagagcctaggccagg

SEQ ID NO: 156171 - DNA, 122 bp, Homo sapiens
tctaaggggcgggttctctccatttcccactcccacgtgtggggagagcagccccaccgccggctcatacccctgcagtgttccccaggcccgcaggggggcagcagagcgaccctgggagc

SEQ ID NO: 156172 - DNA, 122 bp, Homo sapiens
tgggtcctgatgtccctgtttcagatgctctgctccctgcccccgcatctctggagtcatcgggctgctgcatgcccatcaacctgagtagttgcaggctattggtgtcatttctggaaaag

SEQ ID NO: 156173 - DNA, 122 bp, Homo sapiens
gtgaagggggaggggacttcctgaggtgtgaccaatctagagaaaggactgggctgagggcgtggtcaaacaagcgacatctaaaaataaggggcggggctagaaccagggggagttcgcct

SEQ ID NO: 156174 - DNA, 122 bp, Homo sapiens
tgttgaggttggaacgagctgcagcagctacagggctgagcccttgagtttgggcgtctccgggggtgaggttcctgcggtggccgcgtgctggttccgttagccagcggggctcttgcacg

SEQ ID NO: 156175 - DNA, 122 bp, Homo sapiens
tgtgttaggatgtgcactgacttaataagctttctccaagtatcaagtattcagtaaaaacgatacaacattgtcacacattgtatcgtttgacaatatcgtattggttttaagattaaact

SEQ ID NO: 156176 - DNA, 122 bp, Homo sapiens
aagctgtggttggctggccatgggaccgagagttgaggccagggtcgggaaagccacgtccgtgtggccgtggccttctctcctctgcagcaccccatcgctgccgtgggcagagcagccgt

SEQ ID NO: 156177 - DNA, 122 bp, Homo sapiens
ggcgcggggccactgccggagctgaggccaggcggtgtggaggggcgggccaggctctcccgggcgcggctcctcagtaccataaatcactccttgttgggggcagccccctgagatggggc

SEQ ID NO: 156178 - DNA, 122 bp, Homo sapiens
agactggaggctacaagagggaaaatgatgttcagtcaccaatacataacgtagcacaaacgtgcaggtaggttttcgtagtagttggtcccaagctaaggaagtcagttaattcctgaccg

SEQ ID NO: 156179 - DNA, 122 bp, Homo sapiens
gctggcgcagcagaatccagacctgcacaacgccgagttgagcaagatgctgggtgagtccgagtcgcagacccaggcggccgggcgcgctggcgcgaatcgctaggccgatttcttaaacc

SEQ ID NO: 156180 - DNA, 122 bp, Homo sapiens
tgaatgccacattctgtttgccacaattcagtgtgtttagttaacacttgccgcgtgtcacggttgtccctgcagaccaaccagcgatacgccgctagccctggctcccagaaagccgcagc

SEQ ID NO: 156181 - DNA, 122 bp, Homo sapiens
ggcagctgatttccaatcagaaaccaggtttaaggacattaagactagtgatctttgcctcgcactatactgaggaaatgctataacaacaaatagctggaaaagtaagaattatgttaact

SEQ ID NO: 156182 - DNA, 122 bp, Homo sapiens
gatctccgcccataaccagcagctgcgggagcagtcggagcagctggagcaggacaaccgcgcgctccgcggccagagcttgcagctggtgggtgccgcggcgcaaggacagggacgtggaa

SEQ ID NO: 156183 - DNA, 122 bp, Homo sapiens
cggggttggctttaagagtactcgagtgtcctccagcttagttccacgttctccaaccgtcgctccggtgacccttcgacctggattcgagcccccgtgatggacgccacttgccaagacca

SEQ ID NO: 156184 - DNA, 122 bp, Homo sapiens
actccaagtaatttagacgaagaaacttctggagctggacggatcccccagggtgcgccgcgcctggactgggaagggcccccggacccgcggcgcaggggagggccgggccgccagggggc

SEQ ID NO: 156185 - DNA, 122 bp, Homo sapiens
tctctgcaacccaagccaatggcattacctttcctctccccgttcagaatgattataactcgtctggaatcctgctcggtgcttgggttgcatcttgccacatacatttttaagtttgcagc

SEQ ID NO: 156186 - DNA, 122 bp, Homo sapiens
cgggacccagaggcggggcgtcggccggggaccgctgctcctccggggcgtggctgctgccgagcatctcccagctcagccgagcccgtgcccaggccacgctttgttccagccgccgcctc

SEQ ID NO: 156187 - DNA, 122 bp, Homo sapiens
gacgccccgtctggtagcatcccagatccagcacgttccttccggccctgcaccccggcccggtgcctcacaccccgctaccccaagcatccagactctaaggcagcccctgcatctcagtc

SEQ ID NO: 156188 - DNA, 122 bp, Homo sapiens
ggtcacacagctgtgagtggtggagccgggacttgaacccgtgctctatccactacaccccgctgcctctcatggagaagaggcagggtagtgtaatggagagagtgcgggccgagtagcag

SEQ ID NO: 156189 - DNA, 122 bp, Homo sapiens
taccacagaatatatgtcataatgctggcacaacagacacatcccttttagttttgcagacgaggagtaaccgttgccctggaccacaaagccacttagcggcagagcctcgcacccgcgaa

SEQ ID NO: 156190 - DNA, 122 bp, Homo sapiens
aagcacaaataggattacttttccatctgactggctcaggcagctggtgagaacagcgctcgtgtcatcagccagactgcgccgcctggagccgggccagtggccgtgcgccgaggcagctc

SEQ ID NO: 156191 - DNA, 122 bp, Homo sapiens
tctgcgtaaccgacctgcccggcacaccggccctctctgtgtacgagtaacccacctgcccggcacacgggccctctctgtgtacgagtaacccacctgcccggcacacgggccctctctgt

SEQ ID NO: 156192 - DNA, 122 bp, Homo sapiens
catacctcatgttattgtgcttcacttgattgtactttgcagatagtggtttttacaaatcgaaggttcaaggcaacccatccaacagcattgcttactttgtgtctctatgccacatttgg

SEQ ID NO: 156193 - DNA, 122 bp, Homo sapiens
tggcccacccacgaggcagggtggagggttcttcctggatccaagggtggaacctccccacgagcctgggtccatccccttggatagcttaggaaggaaggaaagagcgagctgcacacagc

SEQ ID NO: 156194 - DNA, 122 bp, Homo sapiens
aggaagcagagataataaaggaagtggaagaaaatcaagaaaatcattgatttctagtctcggatgaattagaagatactgtgtactattgaagagcaggttcagtcagatctcctcctctc

SEQ ID NO: 156195 - DNA, 122 bp, Homo sapiens
cagcatactactgcttccggatgcagaagtggacctccagtgtatgccttacccacgtggcgaacgttgtctctgacgggcgatttattcattcctcgtccccctcttaccctcctcctccc

SEQ ID NO: 156196 - DNA, 122 bp, Homo sapiens
ccaggggctccacaaacttgctgcaagtcgtcggggctgcagctgcaggtaagggtgaggcggggccgcggcctgggctgccgagcacgccccctcccagccccaagcgtgcacgcccccca

SEQ ID NO: 156197 - DNA, 122 bp, Homo sapiens
cacaaccttggctcgcggaatcctgggaggtgtagttttgcgtacgaggacagcccgcgccgccaccagcctgcggaatgttgggagtgataatttgcgccgagaggctgagttttacttag

SEQ ID NO: 156198 - DNA, 122 bp, Homo sapiens
tagattcttggccttcattacagcagcaagttcagctgcccaaaggcagtcttgaaagtccggaagaggtggtagcttctcatttgctgaaacagttttagaacagcacaagctaggtgctg

SEQ ID NO: 156199 - DNA, 122 bp, Homo sapiens
atcaggagtccaaacctctgaggtctgatctctgctctgtcaaggactttcggcaagtctcgtgacctctggctctttcacttcctccccacctgccaaatggggataaataatcttaccta

SEQ ID NO: 156200 - DNA, 122 bp, Homo sapiens
cacactgtggaacattactcagcctttaaaaggaagggaatgccgacacctgctgccacgcgcaggaacattgaggacgctctgccgagggaaacgggccagtcctaagacaaacaccgcat

SEQ ID NO: 156201 - DNA, 122 bp, Homo sapiens
gggtatgctagaagctcaacctccccattgtgcatgtgatatacatataacaaacaagcacgtgtaccttctgaatctaaaataaaatagaaaaagaaaaaagccaaagaaaaacatcccgg

SEQ ID NO: 156202 - DNA, 122 bp, Homo sapiens
tcctgagtgcgcgttccttgctggtcctgaacccctcggccaggcagggcttggcagggccgtttcctgtcctaaccaggatcaagggattgcgcggcttgctggtgaagcttggcagggcc

SEQ ID NO: 156203 - DNA, 122 bp, Homo sapiens
aggcgctggggacgctgcagggccagcaatgtgggctctggtgggggctccactgggggccgctggcccacccgcaggtccatgggctgcggctgagggcctggtgtgtctgcacagggcct

SEQ ID NO: 156204 - DNA, 122 bp, Homo sapiens
acctgaacgccctgtttagctcccagcatttcatgattccgcttccctgctccgtaaaaccgaagaaaaccgagatttccgtcaccgagaaatgcacttagcaagagggggaaattcggtgt

SEQ ID NO: 156205 - DNA, 122 bp, Homo sapiens
ttcctttttcgtctgcctgcggctggaggcggcagggattccggagttgggggatcctgacggggactccccaggcctgggggtgaggaggtggggacagaaagcccggccctagttctccc

SEQ ID NO: 156206 - DNA, 122 bp, Homo sapiens
gagtcgacctgcagtacagcgttattagtctttttatttgcttattgcatcttgggagcgcgtgggtgggtgaagggagcgaggataggaagtctatggagatttacaccagtttttttttt

SEQ ID NO: 156207 - DNA, 122 bp, Homo sapiens
agcggccgggactcaggaagatggtggcccagtggggctctctccttgggtgtgtgggagcggagtcccctcgctcttctgggatagaacgctccgttgagctccccaaactgctcccgtgc

SEQ ID NO: 156208 - DNA, 122 bp, Homo sapiens
tggctgaacagcaagctctctgggctctgcaactagagaacatctctaacataacataaacgttgggcagctgctgggagctggagagggctcagtctgaacagctgtgtgaggtttgacct

SEQ ID NO: 156209 - DNA, 122 bp, Homo sapiens
atcatttcagaaatagagatagagtttgtctttgatatgcagatgcttctcaacttacaacggcattactatccacagaaaaatcataagtcaaaccatcataagctgggaactgtctgtat

SEQ ID NO: 156210 - DNA, 122 bp, Homo sapiens
gaaatattcagccaaaagtgcctgatcgtgcccgctcatccccagggaaggggtgagagacgattccggagagacctctgtgagttttgacaagagagtgggaacgcgccacggagacactg

SEQ ID NO: 156211 - DNA, 122 bp, Homo sapiens
ggctcagccgccggcagggacagccagagccttggggccagacgcgcaggagcggcgtcccgcaactcaaggaccctcaaggcccaaggatgaatgtccctgacagggcaagccaggcccca

SEQ ID NO: 156212 - DNA, 122 bp, Homo sapiens
cggtttgggggaatgatgggaatttgtgggaatgtgcgttttaggggaatgatgatccatcgctagcaagttttccaagggggctgtgacccagaagagttaagaatcacaatttcttcatg

SEQ ID NO: 156213 - DNA, 122 bp, Homo sapiens
ggctgggtaatttgtaagtgtcaatcactcgcagccatcagagaggatgcagcgatctaacggctgcattctaactaagtcaggcgagcccgcagccggccggctgccagcaagcccccaga

SEQ ID NO: 156214 - DNA, 122 bp, Homo sapiens
cccggagtgcaggcaggagggggtgtggcgggggaagtgttcggctagggggtgaaggcccgggcaagctcacccttcagtgttgatttaaagggatggggaaggtcaggaagtagagccgg

SEQ ID NO: 156215 - DNA, 122 bp, Homo sapiens
ggggtgaagccacacacctctgggatcatgtcccacacaaatttagtgagtttggtcaggcgcccacagtggctgtgcctgggcttgctcacattcttggtcaccttgtggcccttgttgag

SEQ ID NO: 156216 - DNA, 122 bp, Homo sapiens
gggggccgcatttatccctgtgtctctcaggccccgcagagacgggggtggggtgggtgacgccagggaagcaggccccttttcccaagggaagaatccccttccggaggcccgccgggcca

SEQ ID NO: 156217 - DNA, 122 bp, Homo sapiens
tgccaaatgtaataggaaacagcctttcttcatgcattccacaaatattggctcggcgcccgggaagctcatcttccacgatctgtacttccggaggagtcccagaggaacacctcctcagt

SEQ ID NO: 156218 - DNA, 122 bp, Homo sapiens
cttgtacagatacatttagtagagcttaccacatagccttcccctaacaaattccaaagacgtccacagcccccttatgtaatgaggtccaatcaatgatcaattagccatgctagtggcta

SEQ ID NO: 156219 - DNA, 122 bp, Homo sapiens
gtcctgaacccccagcccctccgcaggcccatggtcagcgcgtcccacccgggtctctgccggaactccacattgtctctatccaatccaccactgatgggcaggcctatgtctctgctgtt

SEQ ID NO: 156220 - DNA, 122 bp, Homo sapiens
taagctttctggggtggcctatggttggggtgtgctggttgggcactttgggaaaaaagccggtatggctgccttcatgtcttacagctggagaaacacatggcaacggggagaccaccgcc

SEQ ID NO: 156221 - DNA, 122 bp, Homo sapiens
ataattcaagccgtgcaggagtaaaagccgactccttccccgcagggtctccaggtgtcccgggtctccctgtcccaatagtcgagtgtctttctcgagttggtgacaacaagctgcatgcc

SEQ ID NO: 156222 - DNA, 122 bp, Homo sapiens
ggtttcccagtataggaggacggtcacggtacgtagtatagagttgtcctgagggtgaagcgagtttacacttggtgaggcgcttcgaatcgtgcctggccggccccaaatgagcacgcagt

SEQ ID NO: 156223 - DNA, 122 bp, Homo sapiens
ctgaaggtgcagctgctttcccttgtcattcgcagaaccacgaggtactgccagggtttccgcagtgcctgcgtcctcgtgggtgttacaggccctccagagtgacgctgggcgcaggaggc

SEQ ID NO: 156224 - DNA, 122 bp, Homo sapiens
cagtgttgaagatcatcaccttcaccaagaacaaccagttccaggccctgctgcagtatgcggaccccgtgagcgcccagcacgccaagctggtgagtggggctcccgggacggcgcccgcc

SEQ ID NO: 156225 - DNA, 122 bp, Homo sapiens
gcgggttttgcagtcaacttcgctccgaatttacagaaaacagctactatgctagggacgcggaacagtgtattagagactgaaaaacaggccgggatcggtggctctacgcctgtaatccc

SEQ ID NO: 156226 - DNA, 122 bp, Homo sapiens
gagctagctggcatggcggcctgcattgcagcggggcactgggctgcaatgggcctaggccggagtttccaagccgccaggactctgctccccccgccggcctctatcgcctgcagtaagtg

SEQ ID NO: 156227 - DNA, 122 bp, Homo sapiens
ctccagagctccgccctaccccgccccgccctttcgggcgctccccaggccgcgcgcgcccgcggccccccacccagccacccctcgatgcccggtgcctttccaggcgccgcggagccacg

SEQ ID NO: 156228 - DNA, 122 bp, Homo sapiens
caccgccggatggccgcggatagctgccgggagtttccgtcttggtctccttggttaccgcgttacctcggtacccatagcaaccagaaagctgggttctgccactgtccgccggcagaggg

SEQ ID NO: 156229 - DNA, 122 bp, Homo sapiens
ggcaagcgtatctctccattgaacactgagtctgaaatgccctgcacacacttgtgatcccgtgcagaaggaaggagcagggacagccccttgaatgaggaagctaacagtgcctcttctaa

SEQ ID NO: 156230 - DNA, 122 bp, Homo sapiens
aaggagctgaggagagccgcgcaatggaaacctgggtgcagggactgtggggcccgaaggcggggctgggcgcgctctcgcagagccccccccgccttgcccttccttccctccttcgtccc

SEQ ID NO: 156231 - DNA, 122 bp, Homo sapiens
accctccctcaagcctggccccggagggctcgcctctgttccccttcactagatttggggcgccccagccaatgcaggtggactcaggagtttcccccatcaccatatggtcccaacgcctg

SEQ ID NO: 156232 - DNA, 122 bp, Homo sapiens
cctggaaaaaattgttaagccttcagcattcccgtgtcaaagtaatcactgtgactaatacgcagcaataaatgacaaaaaacagaaatacaaattgctgttttacattatgtcagtactta

SEQ ID NO: 156233 - DNA, 122 bp, Homo sapiens
aggtgaggcaagtagccctggctctcatatccccaggcccttcccagcccccagcagccccgtcctgggctacatgaggggagtaaaaaccacccaggactgtcaggacctctccctctcac

SEQ ID NO: 156234 - DNA, 122 bp, Homo sapiens
cgggagctagggctggagacgtgaagtccaggggagcgagcaaggcagccaaggaggcagcggcgaggcagcgagagagagccaggcggccggagctccgcgccgagccgcagccggtgccc

SEQ ID NO: 156235 - DNA, 122 bp, Homo sapiens
gccgctggctagggaggtccagtctcctgcaggccagggagggcttcctctgggtgcagccgtctccctccgctcctcagcttggctacttggtgctcggaccccgcatcctagtcctcgtc

SEQ ID NO: 156236 - DNA, 122 bp, Homo sapiens
ctccaattaactaacaaagcggttgccgacgaccaatagtaaggcagtaggatgaggctccggcataaggcccacctcctacctgccgggcgggacgagcaacatgattggtggaatcgagt

SEQ ID NO: 156237 - DNA, 122 bp, Homo sapiens
ctcccacctttggcgtcacgttcaaaacaatcctttgactacaactcccagaaggccgagcggcttagcgagtgcacccgctctcggctgctccggcaaactacacatcccaaagggcagcg

SEQ ID NO: 156238 - DNA, 122 bp, Homo sapiens
cctttcctagtcaaagaaagtggtgacagacggcacttggaaaattgggtcactcccacccgaatactgcacttttccgacgggcttaaaacacggcggcgcaccacgagattatatgccgc

SEQ ID NO: 156239 - DNA, 122 bp, Homo sapiens
aagctgaggtttctaaggggacgactaaggaatccacgcatcactaacgttatagagactcgcgaagtgccgctgtgttggttgtgaaatttccctcttgtagctgtctctcgtcagattta

SEQ ID NO: 156240 - DNA, 122 bp, Homo sapiens
ggttccctccctccatccttcccctcgagttgtgcccaccgtaaagaggtgggtctggagcgtctcctcgggtcctggagtgcctttccctgggaggaaaacttgcgccgtgaagcgttcct

SEQ ID NO: 156241 - DNA, 122 bp, Homo sapiens
cggatgtctagtctccaaggtaaccgcgagggggcgcgcgcagtccaggtcggagaccgccgccccagactaccctgcactgcgaccgcacaacaagtctttctagatcaaagccgccaggg

SEQ ID NO: 156242 - DNA, 122 bp, Homo sapiens
tgttgtttcccgtcaccgctgtaacaaatgccacacaccggaggcttaaaacaacagaaacgtatcccccacagccctgaaagcagagggctggcatcaaggagcctgcccgggggtgccag

SEQ ID NO: 156243 - DNA, 122 bp, Homo sapiens
ccgggccgggacgtcctctgctccccggtacctcctaggatcccgtcccaaaatccccagcgactccccacgggccaggaggccccctgctccccggtacctcctgggatcccgtccccaag

SEQ ID NO: 156244 - DNA, 122 bp, Homo sapiens
cttgctcagagcagcgtgactcgtgcccaaggcaggtcactccgtctggcctctcccttccgccaacactgcccagctccaggcacagaagcctcctttgggacccacttctgagagggaaa

SEQ ID NO: 156245 - DNA, 122 bp, Homo sapiens
gcagagtttgcagcttgctggtctttgcttcatggatggctggcttcctaataatttttccgccactcctgatgggtctccagcttgatttctgtgcagccaacactgtagatcatttcttc

SEQ ID NO: 156246 - DNA, 122 bp, Homo sapiens
cccggccagggacagcctgacagaaacaaaatgtccgctacaaggaggagccggaagtcccgcccacgcaccccccgcaggcactgaaacacccctctcctgggccctcattgggtatgcaa

SEQ ID NO: 156247 - DNA, 122 bp, Homo sapiens
atttcttgaagcagcggcgaaccacttttcctccccgacctgccggctgcagggtctccccgcccaaccctgccaggctcagacgaagcttctgctgagccgcctggacgcagcgcccctgg

SEQ ID NO: 156248 - DNA, 122 bp, Homo sapiens
aggagtgaagggctcaatattcctgccaaggaggtaggtgaacaagttaccccttagcaccggaataattatagaccccgacttcaggctgtgcctaggtccggctcaggtgtccaaagaac

SEQ ID NO: 156249 - DNA, 122 bp, Homo sapiens
tctcctcccccgctctcaaaaatggcggctctcggggcgcggaagaaagcatcgatcgttcggcgctctgcccacttggcggggcgaaactaaactcgccgaggaaagataagggggcgggg

SEQ ID NO: 156250 - DNA, 122 bp, Homo sapiens
actctggagtacagcacatcttttgtgaatcagaagaggatcaggtactgaattccctcccggtaactggagttatatagttgtcgttgtattaataacttaaagacttagaacaatgacag

SEQ ID NO: 156251 - DNA, 122 bp, Homo sapiens
cgggcacggggccccggccgggaggtgagcgcagctgtcgttcagcttgtgggtagcactcgggccgagccatgcaggcggcgcgcgtggactacatcgctccctggtgggtcgtgtggctg

SEQ ID NO: 156252 - DNA, 122 bp, Homo sapiens
ttttttttttccgggccccacccgaccctctttagaaaaactaaccttctagtgaagatgcggtgatgcttagcacactcagggatttttttcaggacccattggatcctcaaaactccccg

SEQ ID NO: 156253 - DNA, 122 bp, Homo sapiens
ctccctgtgggtgcctgggccttcctatctaggctaggctctggatgtctacaccagcctcgtaagcacaccccttcccagtgctgagaggctgtttacagcagggccgcgcatcctttctg

SEQ ID NO: 156254 - DNA, 122 bp, Homo sapiens
gacaactctgtcaactttttgcccatccgctcatggatgtccaggtacttagagacacatcggtccaggcacacagactcgcccttggagagctctgcttccttgtagtgaggaggcacaca

SEQ ID NO: 156255 - DNA, 122 bp, Homo sapiens
tgatggaagcagctgtctatatctccgtgcccagctgcggcctggcacactgagggctctcgccaagagagtggcctggtgatgcttccttttgacagcctgagggctgcctcctctggaga

SEQ ID NO: 156256 - DNA, 122 bp, Homo sapiens
tttgtcaaaggtgtgcgggatggggccgtacacacagcgcttctcccagatgataatgaacgccgtgaagccaaggaagaacatggcagcgcccacaaccgtcttccactcgttcacgcccc

SEQ ID NO: 156257 - DNA, 122 bp, Homo sapiens
gtgactggaaggtcaagtgacacttcgacagtgtcactgagggctctgctaggagctattcggtgtcataatggggacagaagctcagtcggagtgggttaaaggtaaccaggaggtgaggg

SEQ ID NO: 156258 - DNA, 122 bp, Homo sapiens
gcgcagggctgcgctggcaggactgtcactcagcctgatggaacgcctggctgaggagtacggcgcgagggtggtgcggacactgacggtgcagtaccgcatgcaccaggctatcatgcgct

SEQ ID NO: 156259 - DNA, 122 bp, Homo sapiens
tgaagctgcgggagcgaatgcagatacagaaggagatggagcggctgcgcttcctactgtcggatcagtcattgctgctgcttcctgagtaccatcagcgagtagaggtgggtggggcagtg

SEQ ID NO: 156260 - DNA, 122 bp, Homo sapiens
cacggacgtgaccttcctcctgtgctgcgtccccttcacggccctgctgtacccgctgcccggctgggtgctgggcgacttcatgtgcaagttcgtcaactacatccagcaggtgcgctccg

SEQ ID NO: 156261 - DNA, 122 bp, Homo sapiens
gaccgtacctcttctctcggggggccgacaaacaggggtgctgcgcctgcgcgtccccggcggcagcgggctgtcctctaagcgcctgtcttccggctcctctgcatgctgggatacggagt

SEQ ID NO: 156262 - DNA, 122 bp, Homo sapiens
ccgcggccccaggcgtctcacccattttctccgctggggacccgctgggctccccatccacgcctactcggtccccaccccaccagctcagtcttgactcagaaactcagggtttttacttt

SEQ ID NO: 156263 - DNA, 122 bp, Homo sapiens
agtcccaggttcccgaggcgggaaaagtcgcctcctttgtcctcacaggtcgcggagaggcggaccccctccttggaagccccttcccacgcggattgctgaggaagcctttgtgggttcgt

SEQ ID NO: 156264 - DNA, 122 bp, Homo sapiens
atagcaatccggacattctctaaaagaggaagcgaaggaaagaaaggggcttatagtgggcgaggtctataggtagtcccgagcaaattgcttatggctttggttatgactgacaactactc

SEQ ID NO: 156265 - DNA, 122 bp, Homo sapiens
agccattggccaggcccaatggttcccacctgtaatcccagaattctggaacactgaggtcggaggatcacttgaggccaggagttcaagaccagctctgacaacatagtgagacctcgtct

SEQ ID NO: 156266 - DNA, 122 bp, Homo sapiens
ccagactgcgacggatacagggagggcaagggtttccttttggcgctcccctttggaccccggagtgaaaaactctaacgtccagatcagtggagagaaacgcagatttaggaccctgagga

SEQ ID NO: 156267 - DNA, 122 bp, Homo sapiens
catccagagctccggaccccgaggggatgggacatgagccctgtgggccctgcgatgggccgtctgtcaccctgcagcatggatcctgtccactgggtctgcacccaagcactgggacacca

SEQ ID NO: 156268 - DNA, 122 bp, Homo sapiens
gtgatgtcaaaggcctgagtcatgcatgagaggcagcctggagcgagaggggactccgtccgcagcctctgcttcagccaaacattgaaacaatcgctcctgagggtgacgtgtgaacacgc

SEQ ID NO: 156269 - DNA, 122 bp, Homo sapiens
ttggggagggggcggtgacaactccgccccgcacgggggcgcctccccgcggccctggggcggggccacccctcggggtctgtgggacgcgcctgcccccaattctgccacccggcggcggt

SEQ ID NO: 156270 - DNA, 122 bp, Homo sapiens
attttatgattatcctccccaacacacacacacacacacacacacacaaacacacacacacgctacttggaaaagcccccactggtcctctaggcacataagggatgggcactcagcatctt

SEQ ID NO: 156271 - DNA, 122 bp, Homo sapiens
agccacaacttcaccaggtttaaagagaaaacccctttctctacaccgccattcccaaggcgagctcactctctggcatcaaagttccctggggtgagttttcttctaggatagtccaaggg

SEQ ID NO: 156272 - DNA, 122 bp, Homo sapiens
gatatcctgtgagagtggccccagtggatgaagacagatgctctcaaggagcgcagatgacgcgggttccgaaggactcggcacccagcccggaggccggcaacatgggcaaggggcctctc

SEQ ID NO: 156273 - DNA, 122 bp, Homo sapiens
gcgccgaggcccgcggaagcaagagacagccctgatagtcttctaaacccggtccagtttcgaggacgacgcattatagtggaatattgtcacctgcctaattgttctaagcgggcctctgc

SEQ ID NO: 156274 - DNA, 122 bp, Homo sapiens
tccccgaatgctcggggagactgatctgagtaacaataaaactccggcctcccccacagccggctctgcgtgaattactcttttcgccactgcaaatcccatcttgataaatccgctctgtc

SEQ ID NO: 156275 - DNA, 122 bp, Homo sapiens
ccacaccaaggagcgcttgccctctcactccgactttctggctgagcttcggaaggcccccgtggtggtgagaagctaagtcagccccagggccacacagagacccagagcgcttccctgct

SEQ ID NO: 156276 - DNA, 122 bp, Homo sapiens
cagctgcggtagtcactgcgcctccccgcccccactcctggatgccccccttccctctcccggccagactctgagcaggagctccgcccccagcgcgccgccccagccccggcgccttaaaa

SEQ ID NO: 156277 - DNA, 122 bp, Homo sapiens
tctcccagctccatcggctgccaacctagggccatcgtctgcctccatcacccctccgcccgcccgcctacccacccaatcccaaacgggtgctggatcaggtgctgaatccggctgcctcc

SEQ ID NO: 156278 - DNA, 122 bp, Homo sapiens
caggctcccaccgctgtcaccgccgccggcgaggagagtctggggctccagacagccgcccggtgagcccaccaaaggcgcgctcctccagtggccgggacacagcaagaaggggcttggcc

SEQ ID NO: 156279 - DNA, 122 bp, Homo sapiens
gggtctgtgagctacgggagcaggggcagtaggcaggagcctggctgttttgcacccccacgcctaagaaactcagctttttattttctcctctgtctctggttgctgttattgaaggatgg

SEQ ID NO: 156280 - DNA, 122 bp, Homo sapiens
ctgcgtgggttcgcttccccactatggagtgtacttttgttttcaataaatccctgtcttcgttcttttgttgttccattatttgctttgcctgtaatcccagtactttgggaggccgaggc

SEQ ID NO: 156281 - DNA, 122 bp, Homo sapiens
aaatgggtattaggactataattttagaaccatgttttctggttctcttgtcttgtagaacggtttagtttcaactaagagaagaaatattgtgcactgaaaatgaagagaaaatcactggc

SEQ ID NO: 156282 - DNA, 122 bp, Homo sapiens
catgcccacctgcctgaccctccactgcccctggaagcaaagtgcctatcagcagcgttgcgtcctctggggcccccggtcgggggggagggggtgtgggctaaccttggccaccaccacaa

SEQ ID NO: 156283 - DNA, 122 bp, Homo sapiens
cactccaaacagcattattcaaccccacgtgccctgggcatctgccatagcttacagcatcgtgtgcctttctgtttcttccaacgaggggcatggtgaggcggtgattctagtgttagtcc

SEQ ID NO: 156284 - DNA, 122 bp, Homo sapiens
caaactcctgtactcaaacaatcctcccaccttggccttccaaagtgctaggattacaggcgtgaaccatggtgcccggcctggtgttgatattttaaggagacataagccagaattctctt

SEQ ID NO: 156285 - DNA, 122 bp, Homo sapiens
aaacccccctaaccaaaagttataaacctgtgatcctcccagccctgcactactcctacacgtatgccatggatgggtttgtgccactgtgagacccccaaaatctctccccttatcttccc

SEQ ID NO: 156286 - DNA, 122 bp, Homo sapiens
atggggccaaggtcattcctgagcttgattttcagcaaggcagagcaggcaatttaccagcggagaactgtgctcacgggctctgtcatgaaccctgaagtggcagccctgctttatgcacg

SEQ ID NO: 156287 - DNA, 122 bp, Homo sapiens
aggggatctcgctacggcccatctccctacagtcgatcttacagctggcatcactacagccgatctccctacagggaatctcactacagggaatctcgctacaggaggtctccctacatccg

SEQ ID NO: 156288 - DNA, 122 bp, Homo sapiens
cacctcctgcttgaagtccagggcaacatagcacagcttctccttaatgtcacacgtgatcgcccgctcggccgtggtggtgaagccgtagccatgcgcagtgagatctttgtgaggtagtc

SEQ ID NO: 156289 - DNA, 122 bp, Homo sapiens
cgccgtttctacccagcttgggaagcgcaggaacaggacatacggtggtcgcgccccttccgcgaggccggggtgaaacccgcttggccctcccgccagggggcggagcttccgaaccaggc

SEQ ID NO: 156290 - DNA, 122 bp, Homo sapiens
tgtccctttcttgtttcccctgggctccttcttctcctggctgtggacaggtgcacccgtcggttttgtgcccggcatgccgtgtgcccttccaggcagcctgcccagccctggcgtgcaga

SEQ ID NO: 156291 - DNA, 122 bp, Homo sapiens
gaaggctgtgtctaggcacagggtggaagtattgtagccatgagtttcagctgagctggccggcactggcctgtccacctagaggtgatcagctgagaagactcaaaagtatctggtttttt

SEQ ID NO: 156292 - DNA, 122 bp, Homo sapiens
gcaggtgcaggaagaaaagaataatcgcacccgtttctcaggtgcttacttcaccatgtccgatccggtaagttttttatctgagcagcggcctgggtgagagcgaacatgagctttggaag

SEQ ID NO: 156293 - DNA, 122 bp, Homo sapiens
ctccccttctccattccatcccacgtgggagctggtcagcggccagggaattggcacggccgggaaggaaggcgaaggggctgcctggcaccgagaggctgcatgggcgtgtgtagcatgtg

SEQ ID NO: 156294 - DNA, 122 bp, Homo sapiens
ctgcataacaaccgtgaggatctctggaggtgggaacgatgctaactgtcctgttcttcgcgccctaagaacagggcactaagaccctgtctcaaaaaaaaagaaaaaagactaacctcctg

SEQ ID NO: 156295 - DNA, 122 bp, Homo sapiens
cttgttaggaagaaactggcgtttttttgcttgccactgtgcagggtgctcagggtggaccggaacgggtttgttgtggcttaggaaaggggacctgctcgtggaggttgtgtagaactgga

SEQ ID NO: 156296 - DNA, 122 bp, Homo sapiens
acccagcgccccctccgcagctgctggccggggtgctaagcccctcactgcctgggcggccggtctaagtgcaggggctgccaagctcacacccacccggaactcgagctggcctgcaagcg

SEQ ID NO: 156297 - DNA, 122 bp, Homo sapiens
cctggaggggagctgggtccaggcagggaactcacagcagagacgccccgagggtggggtcgggccaagagccgcagccaggggatgccctgacctgcgctggagaacgattcgcggagttc

SEQ ID NO: 156298 - DNA, 122 bp, Homo sapiens
gcgggcggggcccgaagggcgcgcagggtcctgggtcctgcagcccaggccgctcttccccgcctcccgctccccgcaggtaaatctaagtctccaccaggctgcgccggcgcctccgggtc

SEQ ID NO: 156299 - DNA, 122 bp, Homo sapiens
ttaagattctagcccagcactgcgttattaacacatcacagcaagcccagagctggcacacgcagcttttaaaccaaggcacgaatttgctggggcttctctgtagcagagcagcctgcggt

SEQ ID NO: 156300 - DNA, 122 bp, Homo sapiens
agcctgtccggtgcctcaggagctggcaaagtattggtgtccaagcctgccctgagccatcgcctcgtgcggtgcacgaatgaagtttccgagccttggcgagggcagcctttcctgggctc

SEQ ID NO: 156301 - DNA, 122 bp, Homo sapiens
cactcccttgtactttaactggttgggattcaaggggcatggagcaggagggaagagtgacggggccatgcaacgtagaaagaaccagaagtatttgtttggagttcggtcatttgtttcag

SEQ ID NO: 156302 - DNA, 122 bp, Homo sapiens
cgggagggctcggcaccgagaggtccaccgagccagaccaggcagagagagcacatggaccggcggagaccaaggtcccagagaggtggggaacaggaggcgccccctcccctgccacatga

SEQ ID NO: 156303 - DNA, 122 bp, Homo sapiens
tgtgtgtacctgcctgctgttgtcaaacacacctgtttttcctctgaactttccaggtggcgtgggcatagaaggaaggccagtggccacgagggacaatcttggtcttgggagatcctgga

SEQ ID NO: 156304 - DNA, 122 bp, Homo sapiens
tcctccgtgtggggagtgaagcaaaacttctccaggatgggcacctgctgctcctgctgccgccgcggggccgactcagtgtggagcccggagatgtggacgcctccggccactgtgaccct

SEQ ID NO: 156305 - DNA, 122 bp, Homo sapiens
tcgccttagggctggaggtgagacaagctggcggcaatactgctctttaatgcaccgagacgtttatgtatgtgcatatcaaagcacagcaccttcttcttaagcttgtttatgacacagag

SEQ ID NO: 156306 - DNA, 122 bp, Homo sapiens
gggcctgccccgccctgcgcggggataacgaaagctgagtgtttttcccttttttttgttcgtttttagtttttttttttttaagtcgttttcctgcgttgacgaggatgatctggggtttt

SEQ ID NO: 156307 - DNA, 122 bp, Homo sapiens
ctggaccagggtcggggggcgaggatgtcagggcggctctcactgcggaagctaatggagcgctaaacaatgagaaaaacaaaccatcacgggggcagcggcaggactgggtggatctttga

SEQ ID NO: 156308 - DNA, 122 bp, Homo sapiens
ttccggtgcactcctgcgcgtgtgcacctctccctgcgtgcgtgttcgcgcgtgcgtgctcgcacatgcgcgccacctccgcactgccctcgcttcctgcgcctgttcaggtcatcgcttgc

SEQ ID NO: 156309 - DNA, 122 bp, Homo sapiens
ccgggcgcggcaggtcggggtctagctgcgtgaagctgtgcagcaccaccgggcagctgtcggggacgcccacctccaggcgcacggcgtcccacacgctgcggctccgccgggagcccgga

SEQ ID NO: 156310 - DNA, 122 bp, Homo sapiens
tgagtctatccacagaccccaggttataataatataagcttgacttccttcaactccacccggttgggggcaagggtaaggcatggtacctgcagcctgactgctgttttgttttgttttgt

SEQ ID NO: 156311 - DNA, 122 bp, Homo sapiens
ggagacccaagtctttgtgtgttgctctcggtgtgtccacaagcacaatgccatagagcacggatggccaggccaatgagtgcccggccctggggcgctcgtcctcttgtgcagaccaggct

SEQ ID NO: 156312 - DNA, 122 bp, Homo sapiens
cccaccgactgccccacgcgaccccagagtgccaagggccggctccatgtctcttctccccggcgcctgcaagtcctgcgccccgtccccgctctcatgaagccgtgacagagccggccgtc

SEQ ID NO: 156313 - DNA, 122 bp, Homo sapiens
gtactagcagtgacactagccagcttcctctaggctggctctgatgttggaagacaagcacgcagatgtgtgttacttttcaagcctggacatcgtttctgaggaatttaactccacctctc

SEQ ID NO: 156314 - DNA, 122 bp, Homo sapiens
gttggacaagtttgcctggaaacaagtttgtacttacgatcacatgaccaatgttggtcccgcttgattttctatctcccagcttgaccagtgtctcagtagggttgcccagaggaggaaaa

SEQ ID NO: 156315 - DNA, 122 bp, Homo sapiens
gtggctgcagctgctccttatctcctggcttcaggacaggagcctgggattagggcagcccgggccaaggacgcgagatggcagggcaggcgggtgggcgggaggtggcagagagcggggga

SEQ ID NO: 156316 - DNA, 122 bp, Homo sapiens
ttctaggtacagttcccttgtgtttcttggggttgctgtctcccaggttgggattctttccgaacaacactgcctcaggggctgccagtctttgcttttctatgagagtcttgcatgtgatg

SEQ ID NO: 156317 - DNA, 122 bp, Homo sapiens
aacagagttgttaagcatctgtaatggtcaagggatgcactggtaagcaaagcagggcctcgggtcatgtctctgtccttctactgctcattacacctaatgggaagtgtccacctgtactg

SEQ ID NO: 156318 - DNA, 122 bp, Homo sapiens
accccttacccacccagcaacccaaagtctactctctagtccttagggaggttgtgggggcggaaagggggacggggctgaatttcttccttccccaacccccttcccttctcctccagata

SEQ ID NO: 156319 - DNA, 122 bp, Homo sapiens
aacagcacaactttgtaagacccgcgctgaaggaggcagcatttgtgtgagagcgcccggcgctgcccagaagagctggaacgcccaaggaaggccgctgctcagcgcaggacccctgggct

SEQ ID NO: 156320 - DNA, 122 bp, Homo sapiens
caatgcccaaatttggaaattctacaactaaataaccattctgcaggtttcttttccgtacggcttcactttaaaatttgaaaactcctgagatttttcaacatattaaagcgtgtcacact

SEQ ID NO: 156321 - DNA, 122 bp, Homo sapiens
tgcacatcctgcgggccagcctcctactcaggaagcagcagtggcacccaaggcctcaggcgtgtacttgagtctgacagaggcgggaagcctgggccaggtcctgggggactgaaggggaa

SEQ ID NO: 156322 - DNA, 122 bp, Homo sapiens
tatgctgttcaccagtgttctctctgtaaaggtgcaattgccttgtatccattctccctacgcctccaatctcctactccccgcaaccttctcatatcaaaaaaacagggtttttttttaat

SEQ ID NO: 156323 - DNA, 122 bp, Homo sapiens
tggatggggaaaggaagtctgtacacttgagcagccttctccctgggcttctgaggcattcgagcctcttgggcagtgaaaggagatggtagcccttgacctaggcctcgctcaagctgtgt

SEQ ID NO: 156324 - DNA, 122 bp, Homo sapiens
tttcctccttcctgcagcgtgattggcccgcggctcagggaggcgaccaatgagtgctctcgcggagagcgacggggcaggccaatatggcttcctgcacctggtgacgcttggcgaaactg

SEQ ID NO: 156325 - DNA, 122 bp, Homo sapiens
cctgtgtgattcgaaaatgttaaaagtcatataataatgtagaagacgacccttcgcgagcgaggccccccacctctggccactgagggcacttacgtaactgcggggcgggcgcaggcctc

SEQ ID NO: 156326 - DNA, 122 bp, Homo sapiens
aaacttacacgttggtctcctgtttccttaccaagcttttaccatggtaacccctggtcccgttcagccaccaccaccccacccagcacacctccaacctcagccagacaaggttgttgaca

SEQ ID NO: 156327 - DNA, 122 bp, Homo sapiens
gcatgccgcccttcagtcaggaataaggatgttgcagacactcaaacacgcactcgcccacgctcacacaaagacacacaatacccaggcatgcggtgtactcacacgctcactcaggcacg

SEQ ID NO: 156328 - DNA, 122 bp, Homo sapiens
cagccccctggaaggaggcccctggaatgctcagctcctccaggggccggagcccagggccgcaccccagccccagggccgggctcagtttcctcatttccccggcggctgctgtttctcac

SEQ ID NO: 156329 - DNA, 122 bp, Homo sapiens
ctctgcgggaaagagaaaaggacaatgagacacaggtacacctcctgggaggctcggccacggacagaaaatgaagtggagggcagagaaaagggcactggactcttactgttgtcagtgaa

SEQ ID NO: 156330 - DNA, 122 bp, Homo sapiens
cacagccaacctgtgcccgccagtcttcgatgacaaccccagcggcctggcaggcggccacgtaggaagccagagccttgcaaagaatgtcacggtccccaccacccatgcagacgtccaga

SEQ ID NO: 156331 - DNA, 122 bp, Homo sapiens
agagacatggggaccaagtgacccagaaacagtgacagacaggccgggcttggtggctcacgcctgtaatcccagcatcttgggaggccgagccgggaggatcgcttgaggccagcctcagc

SEQ ID NO: 156332 - DNA, 122 bp, Homo sapiens
gtaacggcgggaaagcgagaagaaacgggactggacctacatgcaagtgattccgcttttcgtctttggcccatagggagcgctgggcccactatggagaatcaggtgcaaacactgaccag

SEQ ID NO: 156333 - DNA, 122 bp, Homo sapiens
gccgtctggatcctttctggagcggccgtagaggagactggggtcccttagaggcctacacggcagccggtacaaatggaaggctggtagcatggtctcccgtgtggcctgcggagcagagg

SEQ ID NO: 156334 - DNA, 122 bp, Homo sapiens
gccgcgaccggttcgtgggcagccgcgtccactccccggaccagtaaacaaccccgggtccgtgaatcggctccgccagcaccagcctagaccgcttcgccggcctcccccggggcaagccg

SEQ ID NO: 156335 - DNA, 122 bp, Homo sapiens
actgggaggcttctcctgaggggggaccctgggagccgggggagaggtcacctctgtacacgccacacacaggcttctccacaagggcgctgtaattgctgaagtcctcttcggttatgaca

SEQ ID NO: 156336 - DNA, 122 bp, Homo sapiens
ggctgcgcagcctgaaggctggggctacggagaagcccactgcagtgtcactccagcccccgaaggcgtgtgcgcacacactcccgcacacacacacccgcacacacactcccgggcgcgcg

SEQ ID NO: 156337 - DNA, 122 bp, Homo sapiens
agctggtccggctctgggcgcccagcggaaccagggctgtactcacctggatgccggacccgccccctagagaccccgccccctggcgttcggctactaaagggaaggggattcccaggggg

SEQ ID NO: 156338 - DNA, 122 bp, Homo sapiens
cttggcctccccgggcctcccgtcctggcctcagcacgcccttggcctccccgggcctcccgtcctggcctcagcatgcccttggcctccccgggcctcccgtcctgggctcagcatgccct

SEQ ID NO: 156339 - DNA, 122 bp, Homo sapiens
gtaggggagggcgagctagggagacaagaggccaagtaagctacacaagccctgcatcttcgcagaccactgaaacacagccacagccatcctgatgtctgggatgacggccacctccctgg

SEQ ID NO: 156340 - DNA, 122 bp, Homo sapiens
ttctgcaccagtgcttcctacgtcccattttattgagaaggcatgcattcaaatatttcacgtaatttctaaaaatttggaaaataacggttggaaactctacatcttggtttgacggctag

SEQ ID NO: 156341 - DNA, 122 bp, Homo sapiens
tggagggcgacgtggatgacacagcatcagccattccatcgcggggtggggacacagtggcggcaggaaccgtcctcagcccctggcggccacggcagttccccgctgaagcatcctttgtg

SEQ ID NO: 156342 - DNA, 122 bp, Homo sapiens
aataggtatctatttatctatatctatacctacatctgtatctagctatctattagctcacgtgattataggggttgagaagctgcataatctgctgtctgcaagctgaagatccagaaagc

SEQ ID NO: 156343 - DNA, 122 bp, Homo sapiens
tttcagagctgaaggggactcggacggactccctcactgcacagatgaggacgcggaggccgggggaggtgagtgtcagtcccaaggttgcagacctaggacagggaccggagctgccgggc

SEQ ID NO: 156344 - DNA, 122 bp, Homo sapiens
taggcgcatttccatcgcctccatcgccgctgtagctggtggctgtcagattggacagcacggtagaggcgggtcaggaaatgcaaggagagcacttttggaagcgtctggatcctgggccc

SEQ ID NO: 156345 - DNA, 122 bp, Homo sapiens
ccccagctcaggtccttgcagggagtttacatcagtagctcctcaccttgaggagacacgcgggccttcctcccgaagcccgtttaggaggcagatggagcgactcgactcggaggacagga

SEQ ID NO: 156346 - DNA, 122 bp, Homo sapiens
ctcccagactcccgtggagtggaagcctgggggctcgctgaagaagtcacgtgactggaacgtgcttaatgcttggctgtctggtaaggaaaataaagtggtgcattttgaataaaaataaa

SEQ ID NO: 156347 - DNA, 122 bp, Homo sapiens
tcctcctgaccctacccgcaggccccgccccctctctgcccccgcgcactgccctgggcccgccccgtcttcagtccaggcccggcttccgcacggtctcccggcaacactgcggccccgcc

SEQ ID NO: 156348 - DNA, 122 bp, Homo sapiens
ccccgctcctcctcctagcccttgtttctaatcccctgtactctagctcccactcccaatcgagccacccccaaccaaccatgacaattcacagctctcatcctggagagatggtttccctc

SEQ ID NO: 156349 - DNA, 122 bp, Homo sapiens
ccatcattttgtcttttcctcagggagatattctctgacctccctgactagatcagtttccgttttacgggttttgataaacacctcctttccttcttagccctgtcatagttacaatttta

SEQ ID NO: 156350 - DNA, 122 bp, Homo sapiens
agaacagttctgtgggcagggagggctctacactatgcaccctccaaaatccccaaagctcggaccgtcctggcctgggtccccactgctgtcctgcccatgggctcccaggctgtgcttgc

SEQ ID NO: 156351 - DNA, 122 bp, Homo sapiens
gctttctgagaagagcttgtttcggggcacctgacatgggcccgcggtcttcggcattctcgcctccagacttctgcgggtggctgggaggaaatgctgtcgctgcagggcagttcctcttt

SEQ ID NO: 156352 - DNA, 122 bp, Homo sapiens
atgagtacctactccttccctcaccatgaactatttctaacagattcagagtcagaaaatcgtgttatgtgtatgttttgtttcttccaaggctcacccacaggcctcaccctcccagtctt

SEQ ID NO: 156353 - DNA, 122 bp, Homo sapiens
ctcgctgttcttcccacggagagagaggtgcaaggcttgctcagcctcacacagccaatccgtggcaaaggatggcgggaattcaggtggccccaatctcaacccatcctcttcccaccctg

SEQ ID NO: 156354 - DNA, 122 bp, Homo sapiens
ggccggggccggggccggggcccggagcggggatgggcgggcgcagccgggattagctggcgggcgagggcgcagcgcagggaggaggaggggaggcggcgccggcgcgggcggggcggagg

SEQ ID NO: 156355 - DNA, 122 bp, Homo sapiens
ccggggggcgggcgagcgcgggggcggctgcccgggggtggtgggaacaccataccttggcgcctcgtccgggacccacgaatcctgccctctgcgttagtgagaagcagtggtcagggagg

SEQ ID NO: 156356 - DNA, 122 bp, Homo sapiens
ctggggcttttttctcatctggctgctctccactgcccaagacttaccttctgcaaactccgagagctctgacccaaacctttcactcgaggtcatggctcccaaacctcccactgcttctg

SEQ ID NO: 156357 - DNA, 122 bp, Homo sapiens
ggtgcatataaacgggcggacaccgtccctggggtaagggaggcgccagcaagaacaaggcgggccaccaaccccgagcgacctcctaccggacggatccaaacccaaacattgtccattcc

SEQ ID NO: 156358 - DNA, 122 bp, Homo sapiens
gttgaccttcttcatcatgcctttacttctgcatacctgggttactcagctaaagaaatacggtagactatcactattaattattatacctctagacttttctatttgctaatcttttacat

SEQ ID NO: 156359 - DNA, 122 bp, Homo sapiens
ggagaatcaggagcaaactgctccccgcccttcccagttcaggggtgttgcttcatcgcccgactgacacgcaggccagagaagcagctgactccccgcagagctgctgccttataaggaca

SEQ ID NO: 156360 - DNA, 122 bp, Homo sapiens
cgggtcgcctcgcttcgcctggcggggcaggcgcggacctggccctcgcacgggtcggggcgtccaacttggcccgcagccgcgacccggcccctgatttatcagcttcgggcggccgcgtc

SEQ ID NO: 156361 - DNA, 122 bp, Homo sapiens
aacccttgggaaagccagtcacaaaatgggagatcaggagggaaccgtgagatccctgggcgcccaggaaggtctgactctcggtttcttactttggggtcgctttgctcttttctttctag

SEQ ID NO: 156362 - DNA, 122 bp, Homo sapiens
atatttgttagctagtgttagctatagtggggttatttttagcataaaaacaaaggtgaacggtaggtgattctatttcttattttgagaaaatactgtaagaggtaatctaacctgctaat

SEQ ID NO: 156363 - DNA, 122 bp, Homo sapiens
tgtaacgcgggttgggggagggttccctcgttttgggagaaacgctgtgctgtggtggttcggagcatagactttggaattagatcgcctgggttcattccagacgtagcctctcgttaggg

SEQ ID NO: 156364 - DNA, 122 bp, Homo sapiens
tcttgtccctgcatgcggagtcggacggcgagggcgccctgcaggtggacctaggggagccggctcccgcgccgcccgccgccgactcgcgctggggcggcctggacctgcgccgcaagatc

SEQ ID NO: 156365 - DNA, 122 bp, Homo sapiens
ggaggcagagggctgtgggtcttagcctggggcatttggcatacgcagtcccttagttcccgagtttacaagccatagccatgctgtcaaatgtgcctggtatcacccagttcagagactct

SEQ ID NO: 156366 - DNA, 122 bp, Homo sapiens
cacgtctgccagttgtagactctgtaaacaaagttccaactcgcccgctgctgccactgccgctgctattttttgaggtcaaggtgagctgcccaaactctcctaagcttttttgtatagtc

SEQ ID NO: 156367 - DNA, 122 bp, Homo sapiens
tcctcagccgcatgcagtttgggtcgaggtcgggggtccgcggccgcgtggggtctgggtcggggtctgcctggcttgggggtcctcagccgcatgcagttcgggtcgaggtctgcagctgc

SEQ ID NO: 156368 - DNA, 122 bp, Homo sapiens
tcccacactgtccaggccttaactgagagggacagaagacgctggaaggagagaaggaagcgggaagtgtgcttctcagggaggaaaccggcttgccagcaagtagattcttacgaactcca

SEQ ID NO: 156369 - DNA, 122 bp, Homo sapiens
ggcgcctgtaatcccagctacttggagactgaggcaggagaatagcttgaacctgggaggcgagggttgcaatgagctgagactgcgccgctgcacccagcctgggtgacagagcgagactc

SEQ ID NO: 156370 - DNA, 122 bp, Homo sapiens
agctcttttgcgcagccgcagaacagtaggggaaaggggtagtagagatgttgcagattgcgatgactgggatgacagtttgtatccagactttgactgaaaaggtacaggtgcagctttct

SEQ ID NO: 156371 - DNA, 122 bp, Homo sapiens
ccagcaggctgagcagcccctggctcacctcctctatgtcgcggaaggcggccatgactacgccaggctccaacccgcgcaaatttgactgtccgcggggcccgccctcttccagaagaggt

SEQ ID NO: 156372 - DNA, 122 bp, Homo sapiens
agattgatgcttttcatctaaaagcagcgctcatggcgaagaggcttaaggccacaaaaccgtgggacagcaggaggaagagaagccaggtatctccactccagctgccctgcctcagactc

SEQ ID NO: 156373 - DNA, 122 bp, Homo sapiens
tagacgaactctacgacgccggagtttgggcgcagtgaacttgagagatcgtgggggaggcgtcttcagaagaaagcccctgaccatctgcatggagcagtcctccctcggtggcggctggg

SEQ ID NO: 156374 - DNA, 122 bp, Homo sapiens
cccaccggcagcttgatgggcagagtggccatccacagggcgtctgcgcccttcctctgccgggcagcctcagcctcctcgggcacccgcacaggcaccgcgccacggtagaaggacacctg

SEQ ID NO: 156375 - DNA, 122 bp, Homo sapiens
acgtgaggcgtgggcaggtgggcggggtcggcgggtgccccctcccctcctgcctcagcccgacctgagcttgccccccagttccgctgctgtggcgtctccaactacactgactggttcga

SEQ ID NO: 156376 - DNA, 122 bp, Homo sapiens
agccccagaatgtttcctaatggatgacaaggggtggggcggggccctgcagtacttagtcgaggtacaggaggtggccctgatgccagagataaggatgaggggccgccgtgcctgcaggt

SEQ ID NO: 156377 - DNA, 122 bp, Homo sapiens
tgtatttcagtaggaaatatgcaaggaggaggagaaacaactgtcttgctgagggctagacgtgtgctctgaagaatggtgttccattttcagaagaccacatgacacacataatttctcta

SEQ ID NO: 156378 - DNA, 122 bp, Homo sapiens
ccctccctgggagtgctcggtctccaactcgggatctccaccctccaggcaccgcgggcgcggaagcaggtggtccctagcttctagatgtccccagggtatgtggatgaccctagggtctg

SEQ ID NO: 156379 - DNA, 122 bp, Homo sapiens
ctgctgctggtgttgctgctgctgctgccaacggcgacccgggctcgtcgcggtccccgccgcacagtgagtaacacatcgcgcaccgagtgactgaactaagaagagcaaaacaacatgtg

SEQ ID NO: 156380 - DNA, 122 bp, Homo sapiens
attccggcaggtgcagagtgggtgcgggtcaaggccaatgagagtgtgtgtggccaagcccgctggtttcctgaaccgaaattctccggggagggagagaagaggagggtgcgggagacgga

SEQ ID NO: 156381 - DNA, 122 bp, Homo sapiens
ccacagaaacacttccggtatctttccgcactaggcccgccccaatttgcgtgtttttaccgtgcagagggagggatttagagttagcctttgattggtcagcttgactggcgacctttccc

SEQ ID NO: 156382 - DNA, 122 bp, Homo sapiens
gaacagagtaagtttgtgcctagcattgctcaagctctgaagatgcaacgtgaagatgaccgccaggtccctgtcctcagtgctcatactcacagcctagtgtgggagacagacaacaaaca

SEQ ID NO: 156383 - DNA, 122 bp, Homo sapiens
cccccgcggagccccgaggccgcgccagctccctgtgcggcccttcgcaacgcggcgccgcgacccagcgcagcagcctggcgcccggcctgcccgcctgcctgtacttgcggcctgcgcag

SEQ ID NO: 156384 - DNA, 122 bp, Homo sapiens
aaaaaggaaagggagggagagctgtcggtgggggcgaaacactcccaacttaccctctggcggagaattgcgcgggcccgggcgggagagagggagggccggcgagagggcgggacggtctc

SEQ ID NO: 156385 - DNA, 122 bp, Homo sapiens
tgatagaacctttccgagggtgctgtgattaccgaagcagcagcagagatgcaacattgccggctctgaaggtggacgaagcggccaggagccatgggatgccagtgacctctggacgctgg

SEQ ID NO: 156386 - DNA, 122 bp, Homo sapiens
tgaagaactccatgatgaacgtggacacacacgtgtgcacagagctgaccccgaacaccacggcttggctgcacacggcaagtcacccatcgatttgttttcaacaaatacactgaaaaact

SEQ ID NO: 156387 - DNA, 122 bp, Homo sapiens
tcattgtggttttactataaaatattataaagcaaaagaaacaccaactacctacctaagcgatgaaatccaaaggtgaatcttttggttggtgattttgatgatagccacaaagcaagcag

SEQ ID NO: 156388 - DNA, 122 bp, Homo sapiens
accggtctcacctctgccagctaaaacttgcaccggatgcagatacgagttcgccatcatcgaacctagcagacccaggacgcagactgggtgttcacagaaagttgaaggtcccacttgag

SEQ ID NO: 156389 - DNA, 122 bp, Homo sapiens
ttggaggaagagattagagctagtcccataaccaggttatttgagtaggtctaacaagcccgtattaccagaaattatcatctggtcatttccagtccgagaacagaacacttggttgtcct

SEQ ID NO: 156390 - DNA, 122 bp, Homo sapiens
ctgcaaggacaggacatttaccatgggcaacattgttgatgcagtccaagtactgttcaccgttctcatcaaacatgtactgcctctgggctctcactattttgatgggatccgatgcaaag

SEQ ID NO: 156391 - DNA, 122 bp, Homo sapiens
gatgggtggatcactcgaggccatgagtttgagaccagcctggccaacatggtgaaaccccgtctctgctaaaaatacaatacaaaatgagccaggtgtggtgacaggcacctgtaatctca

SEQ ID NO: 156392 - DNA, 122 bp, Homo sapiens
ccgcggcgtgggtcctgcttctgttgcctttcctgccgctgctgctgcttgcagcccccgcgccccaccgcgcgtcctacaagccggtcatcgtggtgcatgggctcttcgacagctcgtac

SEQ ID NO: 156393 - DNA, 122 bp, Homo sapiens
cggaccgtccgaggggggcctctgggttcgaggccgcccgcaccgaccagtgctgtggctcgggcagttcaccgccctctcgggcctcagtttcccgccctggcagacctcgaggcggcctc

SEQ ID NO: 156394 - DNA, 122 bp, Homo sapiens
gaatacctctggccgctccgggccctccctgtcgctgaagcccctccttcctccgctggccgggtctgcaccgagcaaccctgcagatccagtgggccatggaaaattggattctactcacg

SEQ ID NO: 156395 - DNA, 122 bp, Homo sapiens
ctatgttaatagttcatttaattttcatcaccaccatctgtcattttaaagatgaagagacgaagtcaaagaaaagttaaacagtttgcccaagatcacacagctaataagtgcccagacaa

SEQ ID NO: 156396 - DNA, 122 bp, Homo sapiens
aggggaggacagggcgctgacaccgggaggcttgtggcgtccgggacgcctctctgagcccggttcctgcagccacccccagccagccgcacctgttgttgcacatcccggtgatggtgcgg

SEQ ID NO: 156397 - DNA, 122 bp, Homo sapiens
tcactgcagggcaactctaaagggatccctgtgtttcccagtgtacagactattagtatacgatgcatgcaaacagagaggtgctttattgaagcgggacaagacctctattcatagtaaag

SEQ ID NO: 156398 - DNA, 122 bp, Homo sapiens
aggcgggccctccagctatgctttcccatgacctaatacggagaagaggagaaggcaggacgtcaccgtccccaggccctcccaggcagccaccaccccagcctggcccgcctcaaccctgt

SEQ ID NO: 156399 - DNA, 122 bp, Homo sapiens
aatcctttatgcttactctttttttcttaaatactaacttttggagttgtatatggcatacgtttagagatactttttgcttgtaattaaagagacttgaaaattcaggattagcccagttg

SEQ ID NO: 156400 - DNA, 122 bp, Homo sapiens
gcggcagagtgagctccagggaggctgtagggctgcggcactgcctgagggtctccctgacgcaccccgggtcagggctggccccgctggcagcctgacaccggccggcccctgttcgtctg

SEQ ID NO: 156401 - DNA, 122 bp, Homo sapiens
tacctctcgaggggttgtgaggattaaatgaaatgatattatatgagatatgacttagtacggtgagtaatctcttctaatgtattggttacataaatccagatttctatggatcagatgtt

SEQ ID NO: 156402 - DNA, 122 bp, Homo sapiens
gaacacttcctgcaactcgaaatcctcaagggaaactctgtcgaatccccaccaagtgaacgatgacttgtttctacaaaggctactgatttcaggaaactaacgtataactcgtcgcctta

SEQ ID NO: 156403 - DNA, 122 bp, Homo sapiens
aggaaatccgtccctgtgcactttgccaccgacttcgtgtaaattccagtcccgaggacacgagagagacccaggcctggccccgtggacaggctcagagccagggctctcgccagacggat

SEQ ID NO: 156404 - DNA, 122 bp, Homo sapiens
gaatggcgcgcttcgctgccgccgccagagtcgaggtaacgggtggtcgtggagagggtacggtgtggccacccgtggtctcggaggacgcggggaatcctgcgggcctcgagggtctggcg

SEQ ID NO: 156405 - DNA, 122 bp, Homo sapiens
atcattaccaaatgacacatactgtgagccaggttgagacccatcttttcttagttttatcgatatctgtttacttaaccacaaagataacttttttactcccaaatttgagtgattagtaa

SEQ ID NO: 156406 - DNA, 122 bp, Homo sapiens
ttgtttttgttcctgcgctcctgtgcctgtctgctgtgctgagctgcagatgtgtcctgccgcggcttcgcaggacagggataagttgagacaggaagcaagaagccttgcctgtcaggctg

SEQ ID NO: 156407 - DNA, 122 bp, Homo sapiens
tgaggactcgacttggcgcagggccgaagcagaggtcagtaagggttttaagcaggaacacgacctgagtggggttgtctacatggtcctaaggcagaaaggcagggagcaaggaacagcct

SEQ ID NO: 156408 - DNA, 122 bp, Homo sapiens
atctagaggttaccgctccccgttcggcgtcgggagctccagggctggccgtgggtgctgcgccctgtctgttgggatcacgaagctgcacctctgggtccgctgttgtatttggaaattag

SEQ ID NO: 156409 - DNA, 122 bp, Homo sapiens
agtccccaaatggtagtcctcaaattctggccaaggccaaagcaggtgcttcacttcttccgtgcacaccctgcaagtgggctccgggtggcaggtgcagctacgccctctgccggtcgggg

SEQ ID NO: 156410 - DNA, 122 bp, Homo sapiens
cacacaaagaagtcgcccgacagtcacactctcgcagccacaacgcctcacccaggcgcacgctgtcacacacagccacccccctggacggtgagcctcagacacagatcgtcctgacggcc

SEQ ID NO: 156411 - DNA, 122 bp, Homo sapiens
ctttcctttgggtagggggacccaaaccaggatgggcagctcatttagagcccaccctgacgacaaattctatcagaggcttggccccttgctagtcctttagaaacttccagagtcctaaa

SEQ ID NO: 156412 - DNA, 122 bp, Homo sapiens
gtcggcccgcgggcacctgcggggctggggctcgaggtgaggtccccaggcgcagccggacgcgcctcccagactccctcccagtgccccggagcgcctgggactttgcgggagtcgccgcc

SEQ ID NO: 156413 - DNA, 122 bp, Homo sapiens
gggagcgggaggaagcagccagaactaccaggcggcattgcccagcttcttctgcttggccgcctcccccgccagccggccggctatttttggcatcttggcagctgagcccccctcggcat

SEQ ID NO: 156414 - DNA, 122 bp, Homo sapiens
ctgcgggcctgcctctccacggcagcagatccatatgtcagagctctttggaaactaaagcgcagggcacctccagggaataggtgttattgatagaagtggggcgggggcaggagtgaggc

SEQ ID NO: 156415 - DNA, 122 bp, Homo sapiens
tctgtattgccgtaatgctctgtctttctcctttcatgggagtgtgccgtggcatttagtcgtgagagtgggtgtgacctgtgtgcgggttttgcaggtctggaggcggctggtggaaatcc

SEQ ID NO: 156416 - DNA, 122 bp, Homo sapiens
ttgctcttattgttttctacaggagacatgggggacaaaggacagaaaggcagtgtgggtcgtcatggaaaaattggtcccattggctctaaaggtatttgcaatgcgattcttgcctcatt

SEQ ID NO: 156417 - DNA, 122 bp, Homo sapiens
taccaaattgataaacccattacttacagaaatataacttttctggactgctggagcacacgttttttaaccaagtcaaattcgatatcagagaaaacaaattgaagaaatttttcttacca

SEQ ID NO: 156418 - DNA, 122 bp, Homo sapiens
ctgcctctggggactgaagcagcccaacagggcagcccggagacgcctcggggcactgcccggggtcctcatcctggtcacctccacatgcccgtcaactccgcgcagcgttgatcttcccg

SEQ ID NO: 156419 - DNA, 122 bp, Homo sapiens
gtggcgggcgagcacctagggtcctcacctacctgggtcacagtcaggtccagggcaagccggctacgtggtttctcccctcctcagtacaggggccaggctagagaccgccgtggcttccc

SEQ ID NO: 156420 - DNA, 122 bp, Homo sapiens
tacggcaccctgctgcttgatgaggctgccctttgaagggggctcaggaggggatgggaacgggtgttcttcagcccctgcattcaattcaggctccagggctcaggctgatgggcttaggc

SEQ ID NO: 156421 - DNA, 122 bp, Homo sapiens
tttgcagaaagattcctgtgcgtttcacacggggcttgtggccggctgactcttacatcccggtttgtgagttctggatcaggaaccaccaagagcctccccggcgccagctctctgctcca

SEQ ID NO: 156422 - DNA, 122 bp, Homo sapiens
tgggggagggggcagggaggcctggtgttcggttacaggcggtgactcacggaccttgcccgcccgaggctggcaccccgcggggcagagctgcgcccgcctggggcaactccgagtccagg

SEQ ID NO: 156423 - DNA, 122 bp, Homo sapiens
gtagtccggtggagcgggggttggcgccgcccgcggacccagccggactccacttcccgtcgagccctgcgaccggcacccactccaccaggcttcgctcgcacacagacacacacacacac

SEQ ID NO: 156424 - DNA, 122 bp, Homo sapiens
cggtgccggctggaggggctgggcacctctggggcggggttctgctccacctgccctcggcgcggactgtgccctcggcgggcacgcggaccggcggggtagggctagggcccggcttctct

SEQ ID NO: 156425 - DNA, 122 bp, Homo sapiens
cacaggatgtgagagaggaactggggtctccagtcacgggagccaggagccggccagggccgcaggcaggaagggagcgaggctgaagggaacgtgagccgaccagggcccgactgagggag

SEQ ID NO: 156426 - DNA, 122 bp, Homo sapiens
gtgagcccagatccaggtgagtgaaagcccgacatggcctgcggcacactctctctcacacgccccggcggcaggtcctgaaggtggccatcctggccgagaagtacgccgtggactacagc

SEQ ID NO: 156427 - DNA, 122 bp, Homo sapiens
ctgcaccttaatctcacccagaagtggcaacaccaggaggaaggaggcagtgagtggcgtcggctggggatggcacacatctgcccataatgacaatggagacaacccagtgctccagagtc

SEQ ID NO: 156428 - DNA, 122 bp, Homo sapiens
agggcgggacgacggcagccagacctggtgacgggaatgacaatgacctccagggcctagcggggggaggggatgttttccactgcgccccccaagctcactcccccacccagcacacctat

SEQ ID NO: 156429 - DNA, 122 bp, Homo sapiens
ggttcaatggcttgcctgaagtcactcagttggtactggtggaccggggactggaacccacgtctgcctgccccagagcctattgctcacctccactacatgagattatctctttctgtggt

SEQ ID NO: 156430 - DNA, 122 bp, Homo sapiens
ggaacggttccattaaatctctcctgctcagaaccacccaatccaattcatggagcgccacgtggtctacagcacagctggttagggccagcggaggtttatttatagctgggctcctggct

SEQ ID NO: 156431 - DNA, 122 bp, Homo sapiens
gcgcagagcccaggtgcaggtgaggccactgtccagactgagaacaagaaccacccgggccgcttcagatgagcagggccagcctgggccaggaacagtgactgttaactatggattgccaa

SEQ ID NO: 156432 - DNA, 122 bp, Homo sapiens
gtggttctcttgggtgggaaacagaccccagggtggaggcagaccccagcgcacagtaggcgctttccccagctggactttcagaccgggcaatggagggtagttccaggtgctccttctgg

SEQ ID NO: 156433 - DNA, 122 bp, Homo sapiens
cccagacttctctcgcttagcaacctgggcctccttcgagcggggttggcagggagggcccggacctctcgcctgaggctcccattgcttccccgggacccttctccccgccaaaagtgacc

SEQ ID NO: 156434 - DNA, 122 bp, Homo sapiens
ccttggggtccttagtggccctgcaggtcctctggcagctctgctgaccccaccctctcccggactgcccttctgtcccagaggggtcaccctgacccggcccaccttgccactgggctttg

SEQ ID NO: 156435 - DNA, 122 bp, Homo sapiens
aggcggctagtgggaaagggggactctgggagacagtgcctaacagggccaggcccccgacggcttcctcaggaggactcacggttctgggggattccggaaccgctaccccgtcgcgagaa

SEQ ID NO: 156436 - DNA, 122 bp, Homo sapiens
agcaactaaagctggcaactgggacatcgtccggtgctgcaggtctcagccgaagggcgtcggaaactgcgctcgcatcgagcagtttccagcctcctgggtaaaggagcagtctcctccct

SEQ ID NO: 156437 - DNA, 122 bp, Homo sapiens
aagaatttctgttatccattcctattcctgcagaaccacacatacttctctagtgcacaacggatattatttttcaaggactcatataatcttggttttctcaatttggtgaacatttcaca

SEQ ID NO: 156438 - DNA, 122 bp, Homo sapiens
atgtctgcatcaaatgacactgttcattagttcctctttcttgaaactttctctccgtttcgcttccatggggctctactcagcattctgttccaattattttactctcccttttcaatact

SEQ ID NO: 156439 - DNA, 122 bp, Homo sapiens
tcatagaaggtgcgggtgtggccctggaagtggcgcaggctccgggcttgggctctctggcgaggccatcttgtaccaggagaaggtggactccaggacgcgggccgggtcccgcagggtgg

SEQ ID NO: 156440 - DNA, 122 bp, Homo sapiens
tctcattctccttaacatttttgttttcagaactaactttcagattcgaagaaacagaagcgatgctgctgactgatagaaatacaagtgggaccacgttcaccctcttgggcttctcagat

SEQ ID NO: 156441 - DNA, 122 bp, Homo sapiens
ccagccgctgatgggtttcggcgggtcccccaggagacccttcagacggctagagccgggcgcgctgcagagagcccctaattggggcaatgaatcatcgcgcgcggctccggctggacaca

SEQ ID NO: 156442 - DNA, 122 bp, Homo sapiens
ctgcccccagctgaggtgtggggcttatttttacctggtatacactcaggcagtagaacacggtgtcgtggacgagcgaacgcgccatggctggagcgctgcgcccctgcacaaactccgtg

SEQ ID NO: 156443 - DNA, 122 bp, Homo sapiens
gcgcaggaaattccaggctcagtttccagaaaaaggctctttgtccacagcgaaaaaggacgcccgggccatgccagactagaacggaagggtcagacgctcccagacttagcataaggctg

SEQ ID NO: 156444 - DNA, 122 bp, Homo sapiens
agcgctctcgagctgttctgtaaatacctggtgctaacatcccatgccgctccctcctcacgatgcacccaccgccctgagggcccgtcctaggaatggatgtggggatggtcgctttgtaa

SEQ ID NO: 156445 - DNA, 122 bp, Homo sapiens
ggggtgctagcagggtcacttggcaaggcttgtgggtacttggaatggctggtatcctctcggtggcagagtggaggcagacaggaagacaggtgtgttcctaaccaactgggagtcctggt

SEQ ID NO: 156446 - DNA, 122 bp, Homo sapiens
gggcgctgcgccccgcagagagcccggctgtgaccgtgactccattctcattatcatgaacgcaggcggaggctcggctctccggctgcccgcaacttttccaaagcctgcgcctcactgtg

SEQ ID NO: 156447 - DNA, 122 bp, Homo sapiens
ggaactcaagattgatcaagcactgttccaggcagcgaggacgcagtggcctatggaagacgctcttgcagaattcatgattgatgaagcactgttccaggcagcgagcacgcagtggccta

SEQ ID NO: 156448 - DNA, 122 bp, Homo sapiens
atgaggctcagagaggggaagcaacctgccctgcatctcacagctagaaagcagtggtgccgagaattaaacagagtctggacgtttccatgacatagggaagagatgacttccagctgaag

SEQ ID NO: 156449 - DNA, 122 bp, Homo sapiens
cagtcccaggagggctcaggagggcgggttccaggatcctcaggcccccatcaagaactgcgcctctggccacagtgctcaaggaggattgctgccctggggattcaatcagccactgccca

SEQ ID NO: 156450 - DNA, 122 bp, Homo sapiens
ggcggcggcgccggttcggggaggcagactgggagctgcgagcggcggggctgcgaggggcggagggggaggggagggagagaggagggagggcaccggggaggaaacccggagggagggtg

SEQ ID NO: 156451 - DNA, 122 bp, Homo sapiens
cgcatgaaagaggagctagaggagaaactagaggcaaagtactggaagaaagaacgagaacgatgaagaatgcagagcctctgaagagaaaccagataatacagaaagatcagggaggttac

SEQ ID NO: 156452 - DNA, 122 bp, Homo sapiens
caggcagaggaaaagaagagccgtgatgccgattcccagaaacgctccgttggagaatgccgttgagatgagtcccttcttatctgcacacggagagggcaaggtgagcatttcccatccac

SEQ ID NO: 156453 - DNA, 122 bp, Homo sapiens
cacaagtaagaaagaagagctggcattgttggatcaaacaatgcttacggagacaaatgccgcaatagaaaacctcagggtggtcagtgagactaaagagagtgtgacattgacgtggaata

SEQ ID NO: 156454 - DNA, 122 bp, Homo sapiens
actccgagccctgggctttgagtatggtaggaagtgctgacccagcccaggacctccccacgtttttgcttaactcttcatgcagaggccgggcacggtggcacactcctgtaatcccagca

SEQ ID NO: 156455 - DNA, 122 bp, Homo sapiens
aaagccgcagggctgcacttggcgagtgctagaaagacggccacgtttgggatcgtgggccggatggggcctccgtcggccaggcccagttggccttagccggctgggtcacaaaatggaag

SEQ ID NO: 156456 - DNA, 122 bp, Homo sapiens
agagagcaaacccgcactgcttggaggaggaaatcctctaattgcctccacactcctgctcgcttccatctgcttgcatttaaggaaacccaactactgggctcctcgcagctgtagagaaa

SEQ ID NO: 156457 - DNA, 122 bp, Homo sapiens
acctttttttttttttttttgacggagtctcagctgggctggtgagcagtggcgtgatctcggctctctgcaacctctgccttccggattcaagtgattctcctgcctcagcctccggagta

SEQ ID NO: 156458 - DNA, 122 bp, Homo sapiens
ctggctctctgcggagcgctggtagtgtgcaaggccagagccatggaccaggggaggcctcggcagctgattggaatagatgcattaagggatcccagggaagtagtagaacaagggcagga

SEQ ID NO: 156459 - DNA, 122 bp, Homo sapiens
gtgggtcccaagctctgtgtccagaaggagttgtcttgctccaaatatatcctctgtgggcgggcagggagccagggctgcctcccagaccctgacttcactgggccggaggcccaacctct

SEQ ID NO: 156460 - DNA, 122 bp, Homo sapiens
atggtgagtgtgtccccaggactggtagtcacctggctgtccgggtccccgccctactggcggcagcatgcctgtccccagcattacattcaactgctgctctggctctcgagaggccggct

SEQ ID NO: 156461 - DNA, 122 bp, Homo sapiens
agtagggacctcatgggggctcccttcccctatttggactccaaagtgcacaggtgcctccgctcgaccaggaaaaagaagagggaaattcatatgctctctgccctcagttcaggaatggg

SEQ ID NO: 156462 - DNA, 122 bp, Homo sapiens
aggggtgggatctgctcacccgcccgcccggccccctcctgccgcgccggggcccgcccccgacttattctggggtccccgctgctaggccttcggggagagttgatcccctgggtctcggg

SEQ ID NO: 156463 - DNA, 122 bp, Homo sapiens
tacaaatatgtttcattattgcctcctctgtaaaatgggaataactgcacagaactgctgcgtagtgatgtgtaggtgaagcttaattatgtaatgcctgaaacacaaaccatcctagatgt

SEQ ID NO: 156464 - DNA, 122 bp, Homo sapiens
ggttctgctgcccacggagggcttcccgctctgcctttcttgggcaaccttcccagttttcgacgaatgccttccgctcacaacagccctttcctggggcgtgtagggaaccgggagtgggg

SEQ ID NO: 156465 - DNA, 122 bp, Homo sapiens
gccatctgctggtttcacccagtgttttcactttatcctgtctggaccagatcctgttttcgtcagcagctgtgaccagaaaacaaatcctgctggtctcttatctcagtttattttaatcc

SEQ ID NO: 156466 - DNA, 122 bp, Homo sapiens
ccaccctctctgaacccaaggacctaaccccctaggaccccctcgccacggaggaccccccgggtctgcgtctggcccctcgctctgctccaggactgccgcgtcagaccctacagaaagcc

SEQ ID NO: 156467 - DNA, 122 bp, Homo sapiens
cttggcctggtttgtggcagcttctcggtaggtgctggcatgcttggcttgctcaaacagcgtcttcagctgctgcgctgtgttgagcaaggagttgaccatctcttctaggtacagccagc

SEQ ID NO: 156468 - DNA, 122 bp, Homo sapiens
tggagagaagaggaaagggatgcggggtagccatcctctgcccgctcacgagcacttctccgcctgccaccgtgctgcttccagcgcccatctttctctatctggagacccctcagagactc

SEQ ID NO: 156469 - DNA, 122 bp, Homo sapiens
cagctgttccctcctggagaggtgggagtcctggctggctgtggagggagggcaggtgtgcgggcacagagtgacacacggcaggtttctgctggcagggccccaccctcctgcatagctct

SEQ ID NO: 156470 - DNA, 122 bp, Homo sapiens
tgttccactgcacagcgtcttggcagtggctctacatcagcatgtgttcagctggctatacgtggctgctgtgcaatgtgcctaggtcacctaaggtcacctaagcagccctcactgatggg

SEQ ID NO: 156471 - DNA, 122 bp, Homo sapiens
agactgcgtccaggttgctggactacaccgggggcacggtcagaggtctttaggggagggcggcggtctgagagtcctgggtgccgacctgttgggacccaaattccttgtgggaacgatga

SEQ ID NO: 156472 - DNA, 122 bp, Homo sapiens
atgccagggctggttctgctggagtcctgggaactctgcgtgggagggagtttgtgactgcggcccaaaagccacctccatacagtgccgtgggatgccaggaagttgaaatcaccctcccc

SEQ ID NO: 156473 - DNA, 122 bp, Homo sapiens
cgggtgcagggtgctccatgatcacccgaggggcacggctctgagcatggaaggtaggagcgtgtgccgggtgcagggtgctgcatgctcacccgaggggcacggctctgagcatggaaggt

SEQ ID NO: 156474 - DNA, 122 bp, Homo sapiens
ccggctaccagtttactgggctaaccgcctacatgtattgaacattgagtgtgtgcctggcgctatgccgaatgccgtgtagtagctcatttaatgcgcataaggacctacgtagtgagaaa

SEQ ID NO: 156475 - DNA, 122 bp, Homo sapiens
ccgcgtccaggccgcgctgctcacaacccccgatcagcaggcggagccctggccccgctgcgaggccccaggcaggtgcgaagccagggaagtttgtttgttttgtttgggggttgaggaag

SEQ ID NO: 156476 - DNA, 122 bp, Homo sapiens
caaacggaaccttgagcccaaggaccccggaggcatcgtcgaccgcaggccgccacctcccggctggagaaggagttgcttcctgttcggggctaacccgcttgcagactgagaaatgaaaa

SEQ ID NO: 156477 - DNA, 122 bp, Homo sapiens
aggggtgcgatgatccagtcgtcccagcccatgtccttgaagttgacatgcagtgccttccgactgcagcgagccttaaggttcttgctgggtcgcttgccctggcgagtggccagtggggc

SEQ ID NO: 156478 - DNA, 122 bp, Homo sapiens
tcatttattaaaagctgctgcgtgacatttacactgagccaccagtctctgcctctaatccgggcgaaaacgattgtactgccgagttatggctgcagcgtatggggacgctgctgtccgcg

SEQ ID NO: 156479 - DNA, 122 bp, Homo sapiens
tgagaagaggaaaggagatgtccatgcaggcgcctctgcacacagaaagcactcagtaaacgctgtttccccgcttccccctatacaaaggtgaggaactctcattgttcacttggtttctg

SEQ ID NO: 156480 - DNA, 122 bp, Homo sapiens
cagggactatcttgtggattggggctagtacagaattcagactgcagccttttcccgatgcgttgacttacagaaggggcattttggagggtctgtggtcctaacctggggatagcagggag

SEQ ID NO: 156481 - DNA, 122 bp, Homo sapiens
catattctcttggaattctcacagcagttttaatccacataatttacctcctttatctctcggagacactgatgaggtccactttgtttgtttgtttttgagacagggtatcattctattgc

SEQ ID NO: 156482 - DNA, 122 bp, Homo sapiens
gcgcagccattttggcttcctgaccttgggctacggctgaccgttttttgtggtgtactccgtgccatcatgtccgtcctgacgccgctgctgctgcggggcttgacaggctcggcccggcg

SEQ ID NO: 156483 - DNA, 122 bp, Homo sapiens
caccacctacctcagccaagtcacctgtgctgaagcccgggaagctgcctggagaggggacgttcagggagcgtgtgggtgcccccgagagactccggccccgcttcaaagccaagtgcccc

SEQ ID NO: 156484 - DNA, 122 bp, Homo sapiens
aactcacttgttgaccgcgtggctcagcgcatacaaggtggctcggctgcgctgatccctcgccatgttgaagatctctcgcagctgctgtgctgagggctcggggatcagggccaccaggt

SEQ ID NO: 156485 - DNA, 122 bp, Homo sapiens
gctgttccatgcggtgttgcgcctgcgtagccggcgggctggcagtgagactgactgcgtcggggttgagactgggtggatgaggctcaccccggcggggagaagggacgaggaggggcgga

SEQ ID NO: 156486 - DNA, 122 bp, Homo sapiens
gagcagaggagtgagtgctaaaagctggagttcagcagaaccacagtgatgcctccaccccgggtaaatgcttaaccacactcctccctgtaaaaataacggtgtcattaaacatggaccgg

SEQ ID NO: 156487 - DNA, 122 bp, Homo sapiens
ctgaagaccgaggtccagggaggcgcctttccaaccgtgccagagagggcaggtcgcagacgccggggctgcggggaatagaggccctcaccgcagatgccacctgccgtgccctgctctgc

SEQ ID NO: 156488 - DNA, 122 bp, Homo sapiens
cgctgggacgtatttggatgtaaatgttttcagcacagagcagctgggagatgcggcctccgtgggagctgggagccggggccatatggcccctctcccgcctgtactgccttcgagcgggg

SEQ ID NO: 156489 - DNA, 122 bp, Homo sapiens
tatcagcaaactggaatcccagccagacttggagactggattgtcattccaggtaaaatacgtgccttttttggtgccgcccagagctatccgtggtccttaatataaggcaagggtccttg

SEQ ID NO: 156490 - DNA, 122 bp, Homo sapiens
tcgcttcccggcccgccgaggaggtggtggaggaggaggcgccgctttccccgcggcgcgcgccctcgccgttgtctgagctgtgcctggaccagtttggggaagttgtcggggctccgcgt

SEQ ID NO: 156491 - DNA, 122 bp, Homo sapiens
cgccaaggtgtgactgtcggcacggcactgccgagccgtgggagggactgggtggtgcagcggccagtggatctcagaccctgagctgagcacgactggagaggatgggtgcatccgagcgt

SEQ ID NO: 156492 - DNA, 122 bp, Homo sapiens
cggccagccatggcgccagggtagtcccgaggtggctgcctccgtggcagggtgctgccccgatctttgggctccagtcggcctggtgcagcatccatgcattcctgggaccctggccggct

SEQ ID NO: 156493 - DNA, 122 bp, Homo sapiens
cggggagccagcttgctgggagagcgggacggtccggagcaagcccagaggcagaggaggcgacagagggaaaaagggccgagctagccgctccagtgctgtacaggagccgaagggacgca

SEQ ID NO: 156494 - DNA, 122 bp, Homo sapiens
ccgtggagcggtagaaatcctccccgcagtcatagtcgtagaaatagtgctggtacgagtcgtagtccatgtccgctccctgcgggagggaaggggggacgtgctgaccgggtgccggccgg

SEQ ID NO: 156495 - DNA, 122 bp, Homo sapiens
caaatgccattccaaacttggctagctgggcctggctccaaatccagtagaaacagggaccggagaaaccccatcaaatacaagcccagacacctgtactgcccccggagatatttattttc

SEQ ID NO: 156496 - DNA, 122 bp, Homo sapiens
ccccgtcggccccacgcttcaggcgctacctggagggcatggctcctacccgtgggcactcgccttcacccttggagcccggccttccccgggcagccgggagaggttctaccacttcacga

SEQ ID NO: 156497 - DNA, 122 bp, Homo sapiens
tcccgagggttggagagcggcaaagggaggtgccgcgcctgaggtggtggcgggtggaggcggctcttccctcacggtctggccctgtcgctgccttggattcatctcacacccacgagaca

SEQ ID NO: 156498 - DNA, 122 bp, Homo sapiens
tttcccgcacaagtccccaagccttggacccccctcatcaggacctccggcacaggcgcccgtttcccgccactgccttccagtggtttggtccccgagcaggacccaaggcggggcagggg

SEQ ID NO: 156499 - DNA, 122 bp, Homo sapiens
cgaagggaatggaaaaccaaataccatacgttcttacttacaagtgcgagctaagctatgcgtacgcaaagacatacagagtagtataaggtacttcggagactcagaaagggatgagggat

SEQ ID NO: 156500 - DNA, 122 bp, Homo sapiens
gggaccctagaggaggcggggctagcaggtgacgtcagcgggcgggcccgacagaattaccgccgcggcggcgatggaaggcggacgggggagatatagtcacttccctccaggagcgaggc

SEQ ID NO: 156501 - DNA, 122 bp, Homo sapiens
cggggaggcctgccctccaggtccttcccctaaaacttggcactgccgatactcccagcccgttccttcccaagtcaggaacttgcaggggaccccttggcaattctttttctctcaagagc

SEQ ID NO: 156502 - DNA, 122 bp, Homo sapiens
tgaaagaggaaacgcaagcatggagaggcaaggttaatttgcccaaggtcacacagctggcgtgtggctaaactagccgttgcatgtaaataagactgcctgcccactcaacccaggcaatc

SEQ ID NO: 156503 - DNA, 122 bp, Homo sapiens
tagcaacacaaaacagactaatacagatgccctgaggactcaggagataatgcctgcatacgtcccagtctggctacggcaaatgctccacagatctccatagtggtgtctgtgctggtctt

SEQ ID NO: 156504 - DNA, 122 bp, Homo sapiens
aaatcaggagttctccttagcatgcagtatgaagatacaggcttgatatcatcccattcccgggtaatgctgaggggagcagagagcgtgcatttctttgaccctgagttctgacaaaactt

SEQ ID NO: 156505 - DNA, 122 bp, Homo sapiens
gcttcaaaacgagacacaggtcgggctcacgcacctgtgaacccagcactttgtggaggccgaggcgaaagcatcgcttgaagccaggagttcgagaccagcctgggcaacataggggagcc

SEQ ID NO: 156506 - DNA, 122 bp, Homo sapiens
gtcaggtgagttttttaacttctagaaatatgccacaaagtgagccaggtgtggtggctccgcctgtaatggtagcactgggaggccgaggcaggtggatcacgaggtcaggagtttgagac

SEQ ID NO: 156507 - DNA, 122 bp, Homo sapiens
tgcagcgtggcaagaaccgggcagcacctggtgtcagcggctaattgtgttttaaggtggcgtgttagaccagcgcgcgaagggcaacccgagccaccgcacttgccttgcaggcgccgcgt

SEQ ID NO: 156508 - DNA, 122 bp, Homo sapiens
catatcataactgattgcggatgtagacaagagcgtataaaccaaataggcttgaatcaacgcagtcctggattttctgttgcctctgcttgctggggcagtggaagttcttaaactccact

SEQ ID NO: 156509 - DNA, 122 bp, Homo sapiens
gatttaagataagtctaaaggcgctggctatccccttagggcccagctgtctgggcagggcgaggctgcgctggcgatcaaaccctcgaacggtcaggcgacggcgtggacacccaagacgg

SEQ ID NO: 156510 - DNA, 122 bp, Homo sapiens
aacacataccaataacatggatctacacaacacatgacaataatatggatctatacagcacgtgccaataatatggatgtacacagcacatgccaataacatggatctaaacagcacatgcc

SEQ ID NO: 156511 - DNA, 122 bp, Homo sapiens
cttgatgcggggtgcagggaagaagctgagaccacaagcttctctctcgcttgtggtatccgctatgcccagggcatagggacagagacacaggaggtcattcagaggctggggttctctgg

SEQ ID NO: 156512 - DNA, 122 bp, Homo sapiens
cactgaacatgcagagccgacaagccgactagtccaccggcagggaggcgtcacgtcctccgcttctgcaaaacacagattgccttgctggccacgagcaaacacgcagcttctccttcact

SEQ ID NO: 156513 - DNA, 122 bp, Homo sapiens
taaaaaaactttgctaacagtggacctagaccgagaaaccctaggcctgggtagtggccccggtctggcagggatcggctgtgcagggcgagtgaaaccgtgctcccgtctctgtgcgctcc

SEQ ID NO: 156514 - DNA, 122 bp, Homo sapiens
aagacatttctggtcctctaataagctggggtccagccctactgtacgctcaaaggcaggcgaccctattcccaagccccttacagctaagacttacgagggaagcgacatttacatctgca

SEQ ID NO: 156515 - DNA, 122 bp, Homo sapiens
ggcgttctcccctggcggccgctccgtgcccgtggagtgcgcacctagaatacgcgcccgcgcccacatgtgggatgctttgatggactgccgtgagcccagaccttaaacgtaaacattca

SEQ ID NO: 156516 - DNA, 122 bp, Homo sapiens
ttatttttaacagcaggaacgaatttcatatacacctccagagagcccagtgccgagttacgcttcctcgacgccacttcatgttccagtgcctcgagcgctcaggatggaggaagactcga

SEQ ID NO: 156517 - DNA, 122 bp, Homo sapiens
gtaccccttataagaatctaatgcctgatgatttgtcactgtctccctgtctcccattaccgtcacccacacttgggaccatctagttgcaggaaaacaagctcagggctcccactaattct

SEQ ID NO: 156518 - DNA, 122 bp, Homo sapiens
gattgctccgacttcaggtgacacctgtgaggtcccgtgagtccaaattgcctgtggtcacgcggctaaagagacgtcagtgcagtcagagagggactccagcttgggcccaagggactgca

SEQ ID NO: 156519 - DNA, 122 bp, Homo sapiens
gcatctgcctggcatttaggcagcagagcccctgaccgtcccccacagggctctgcctcacgtcctcatctcatttggctgtgtaaagaaatgggaaaagggaaaaggagagagcaattgag

SEQ ID NO: 156520 - DNA, 122 bp, Homo sapiens
ggacccaggagggaggcggggccgcgcctgacccagtccagcaccctggcctgccagcctcgccgcttcgccactcaccacaaaaagacccagctgcaagaggaagaataagtggctccctc

SEQ ID NO: 156521 - DNA, 122 bp, Homo sapiens
ccctgcctcccccaccgctccctgccacgactcgcgggcgctacccaggcctgcccatatcgagcccagccgagccaaacctcaccccggtacatgccgaagtagccctcggagcggacggt

SEQ ID NO: 156522 - DNA, 122 bp, Homo sapiens
cctttatctttctctttatgaccataaaacttgcccgacgaaagtctaaaatgcccaaatcgggagtcattggtggactgcaaccatcggtttctccaatgctctgtggggaaggggaaata

SEQ ID NO: 156523 - DNA, 122 bp, Homo sapiens
gccaaatgtgcgagctgggcagcccacccctttcagctgctggccggaagcggaagtgggcgtccgtcgcctcgccatctcccatagctgtcgcctgcagctgagaaagggttgctgtccca

SEQ ID NO: 156524 - DNA, 122 bp, Homo sapiens
catcatggcccgctctcgatggtcgctgtctcttcggagctgttgggtacacttcccagacggggcggccgagcagaggcgctccccacttcccagacggggtggccgggcagaggcgcacc

SEQ ID NO: 156525 - DNA, 122 bp, Homo sapiens
gaatgcccgggcacgggcgccccgagggagccgggcaccaggcggccccggccccggcgtcggcgtctcacctttccgatgctcgccccggggccgtcccacatggatttttacaacctctc

SEQ ID NO: 156526 - DNA, 122 bp, Homo sapiens
acggtgcctccatggaggcggtgtgcggtgcttgggggagggggctggtgctgggggtctcggtcctagggagcaaagaaccaggggaccctcatgccaacgccccccgagccctcactgtc

SEQ ID NO: 156527 - DNA, 122 bp, Homo sapiens
catgctgtttcctgccttccattctgggcaaccagcctgcttccttttcctaactcaacacgcagtaatcctccattttcaggggaggtcccagattttccaaactaggaggacatgattgg

SEQ ID NO: 156528 - DNA, 122 bp, Homo sapiens
gctggacagggctgagggctctgaagccgggcagtctcagggtaaccaggggctgggaatcgcggagggagcgggaggcccaccgcccgttcgcgcctcggccctcccaccactccgccgcc

SEQ ID NO: 156529 - DNA, 122 bp, Homo sapiens
ccttgtgtctgccctccgggaagtgctcaccagttgccctgctgccgccaggcccagctccggggccccatctacaggatgctgcctgggggttccagctgcctcccctgctgttttcaagc

SEQ ID NO: 156530 - DNA, 122 bp, Homo sapiens
gaactgttgcataaataaacacagagtacctgaaacaacggaggtgatcattctgcctaccgagtgttggccaggccaagcttggagtgttgctcttattcttagggagtttatttttaagt

SEQ ID NO: 156531 - DNA, 122 bp, Homo sapiens
ctggttcatttgagtagatcggagtcagatgagtacatgtttacgggaggcgcttggttacgggatccagataggaatctttatctgagctgcttgtcagtttgttcgtctgtccctaggtc

SEQ ID NO: 156532 - DNA, 122 bp, Homo sapiens
tctcctgtatacgtggagtctgatcagagggcgaagggtgatcagctccctcccaggtcccgcgcatcgccgccccctgcccggtaagctcggtccccgccctcaggccacgctctgtgccc

SEQ ID NO: 156533 - DNA, 122 bp, Homo sapiens
gcgtaggcccaggtcatgaggcccaggatgagcagggcgaaggcgatggtcagcaccctccgggccaggccggagcagcggcaggctgcaggagtgggcttgggcgcgtcctgctgggagcg

SEQ ID NO: 156534 - DNA, 122 bp, Homo sapiens
ctttactttagaatttagccctggtttgaaattttccattacatgatcttggtttatcatcgatgggaagggtagaaaacttcaaggaaaataagtgaaattttaaaagtcagcattttctt

SEQ ID NO: 156535 - DNA, 122 bp, Homo sapiens
ccccttttccgcagatggcctcgcctcctcccgggtccgcctatacttcttcatctccaacgaaggcaaccagaacctgtttgtggtccaggccagcctgtggctttacctgaaactcctgc

SEQ ID NO: 156536 - DNA, 122 bp, Homo sapiens
gtgctaacggcaggctgccggctgcctgtcccatcgcgccgaaatcattcacagtgggcgcgttgacaccacagaagtcggcaaccacgacagacgggggcgttgcttttgctttgctgatt

SEQ ID NO: 156537 - DNA, 122 bp, Homo sapiens
gtcctcaccagaagactctgtgactataaaaggagcaagacttcagcagcttgaaacggccgtctcaactgacaccatcttgctgtcacttgtgatcagcacccagcatctcccaccgaagg

SEQ ID NO: 156538 - DNA, 122 bp, Homo sapiens
caggggactctgccaggtcccatagtgtctcccttgggctttgctcacagcacgagccaccgcgcctggctgctcttctcattttgaaacaagactgcttcagctcgctgctcttgtgtgtg

SEQ ID NO: 156539 - DNA, 122 bp, Homo sapiens
gcaccagctctgatcgaccccctgtatttgatggctcaggtcaggtattactcaggtgagcgggggatcctgacagccgggtggggccttgcaaacacctgatgtagctttgtgtctgcagg

SEQ ID NO: 156540 - DNA, 122 bp, Homo sapiens
ataaaaacactcatccacatgccgacatgacacagggattttattgtgaattgtcacacacggtagttttattagtacctattcaacactaagctaatttaaaagcacttgaaaccttgggc

SEQ ID NO: 156541 - DNA, 122 bp, Homo sapiens
acttcaggaaaggcccagagcccgtgatgggcgtggggattggggtgaggacagggctgtcgtgagaacagtggctgcagatgtgagcggctggcaggaagtggccacttgaaccgcagatg

SEQ ID NO: 156542 - DNA, 122 bp, Homo sapiens
gatctaaaccgagaatcgaaactaagctggggtccatggagcctgcacccgcccgatctccgaggccccagcaggaccccgcccggccccaggagcccaccatgcctccccccgagaccccc

SEQ ID NO: 156543 - DNA, 122 bp, Homo sapiens
agggaccccggggagaacacgagggctccgacgcgggagaaggattgaagcgtgcagaggcgccccaaattgcgacaatttactgggatccttttgtggggaaaggaggcttagaggctcaa

SEQ ID NO: 156544 - DNA, 122 bp, Homo sapiens
gatcctctgtccccgctgggtcatatcagtcgggattcgagccccggtgaccaatcgacccggtttgttcggaactgacagggttgtcaagacgctgggctttccctggcaaaccaagacga

SEQ ID NO: 156545 - DNA, 122 bp, Homo sapiens
ttaccagagccgttggggccgatgatgcaggtgaacctccggaaggggccaatgacctggcggccccgccacgacttgaaattttccacaagcagcagctccaggtgggccatggcgccgcc

SEQ ID NO: 156546 - DNA, 122 bp, Homo sapiens
gtccttcctctgggactctttggccaagcccacggtgccccatgtgtaatggatgtgcagcgccaacctacctggacacaggaattggacatcttcctcatagaatatttaaaaatgatcat

SEQ ID NO: 156547 - DNA, 122 bp, Homo sapiens
catgctgagcaccgcatgttgccttgagcgccggctgcttgctcctggcgcctttcctgacgtgcagatgcccgggactccactgcaggcttcggccccccagtggaaacacaatttgtgtg

SEQ ID NO: 156548 - DNA, 122 bp, Homo sapiens
tagtacagaataatgatttctagttccactccaattctaaaattttcaaagaatggaaggcgagaaaaggaatgagcaagaaggaaaggagcaaccagtctttatgataacttaggagagct

SEQ ID NO: 156549 - DNA, 122 bp, Homo sapiens
acgaacaggagaaagacaagctctcaccttcaaaacttggtactgggagcagtgtctttacgccagcactggcggggaggagtgcccaggaatctacaaagacaaatcaagttaaacgacga

SEQ ID NO: 156550 - DNA, 122 bp, Homo sapiens
cgtctgggagtggctgagcgacgatggctcctggaccgcctatgaagccggcgtctgtgacgatctggagcagcaggtggccaggggcaaccagctcgtggacttggcccccctggggtaca

SEQ ID NO: 156551 - DNA, 122 bp, Homo sapiens
ggaaaacatttgttttacaagagaaaggaccagtgagctcattggcactttttacctctgcgtggcatagaaaagcaattcttattgttaaggaaaacagtaaacatttaaatgagacttac

SEQ ID NO: 156552 - DNA, 122 bp, Homo sapiens
cgacctttcatccgagtgcatgactgctccctgaaagggggaacaataatgttaattacccgcagattgtgtttgccccaggcttttggcattatatctagctgctcttatgtgaaatacct

SEQ ID NO: 156553 - DNA, 122 bp, Homo sapiens
gcaggtggccccaccagggaagctgctggcttctgctgataccaggggctactgggccctcggaccgatgggaggggcaagtaacgacagatggtgcacggcctggggaagttgagaactcc

SEQ ID NO: 156554 - DNA, 122 bp, Homo sapiens
ccttctggcatttgttgacaatagagccattctagatctcttttaatctagttgagtccccggagaacagttaaatagttatagtgcaggccttgcgcatgaagcaaataaagtcaatggat

SEQ ID NO: 156555 - DNA, 122 bp, Homo sapiens
aatcgggctggaggctcgctattgttcctgcatggctaagggcccagggttcgtcctaatcgagctgaacgctagttgctgggttccagggttctcttctgtgactcacggcttctagtaga

SEQ ID NO: 156556 - DNA, 122 bp, Homo sapiens
aacatgcacagtcaaaaattgtatctaccacatgccttttctcagaaagttacttgaggacgtgctctagcaaaatgagaggaaaaaacaaagaaagagaaacacaattcaagaaccaggga

SEQ ID NO: 156557 - DNA, 122 bp, Homo sapiens
gtgggcaggtagactgagggccgttggttcgaggctttgcacacggagtccccgtgaaatcgactaaaattgcttttattgtagacaggcagtcctttcaaaaaatctgccatcttctgttt

SEQ ID NO: 156558 - DNA, 122 bp, Homo sapiens
tcagaacatttcatagaaattaaattctgtaccttctaggttaacgtgctgtggtcctcacgatgtgtttggaaggctcaactggagagttattctccatcagtcctagatttctaacattt

SEQ ID NO: 156559 - DNA, 122 bp, Homo sapiens
cgtgagccacctcaccccactggctcttttacacttgatcttagatgaagggccaagaagcgatatctgtggctctttttattttatctttttattttagagatgcggtctcactccgttac

SEQ ID NO: 156560 - DNA, 122 bp, Homo sapiens
cgtgctgtctgccgtggggaagatgacttcagccacctgtggacaagcagagctggctcgcgggctgcccgaggtgagccccgcggtcctgcaatggggagccgaccagtcctctgcccaga

SEQ ID NO: 156561 - DNA, 122 bp, Homo sapiens
gctgtttttctcaccaatccatgaagtttcacagctacatccaatgaggacggcaggtagcgaggtcctatccgaagctcttcggcgtcatgagcagccaataggagttcgtgtagaagcga

SEQ ID NO: 156562 - DNA, 122 bp, Homo sapiens
gtttcacccgaggctggagtgacgccaacctgttaatgttcgttttcggattctggacttcgggttccgctgaggacggatttcggaataggcacagtggctgccccgaacccctcaaggcg

SEQ ID NO: 156563 - DNA, 122 bp, Homo sapiens
tttctacactaacctccttctgtctgttgtcaacagctgaaagagtgagccttcctaaatcgtatcatgtcccacttagatttcaaactcttcggtggctccgtatcacaaccagagtataa

SEQ ID NO: 156564 - DNA, 122 bp, Homo sapiens
caaggacgcggaggaagacagccaccgctgctgtctccagccagagcactgggagaggcgcggctccaggaaacatttcaaggaccctgggaaatgggtggagatctccgaatctaaaaaac

SEQ ID NO: 156565 - DNA, 122 bp, Homo sapiens
tgtagggggtgcaacagcgagacttccccacaacacctccaccgaaggctgggtcgtcagcgtttgagggaccctcccgccaccccgcagcctggcggggcgctttccaaatcgtcgcggca

SEQ ID NO: 156566 - DNA, 122 bp, Homo sapiens
ccaccaaatgagttacacttaaaaacagcctcctattatccattatgcataaactaatttcgagactgcccggtcttcacagccctggatattctgctctgtaattacaggccccgatgcat

SEQ ID NO: 156567 - DNA, 122 bp, Homo sapiens
ggacctaagatggctgttgtagctccatgcatcatgattaaaccagagacaggaagtgtacgatggaagaggccagaggtgatggcctcctcctctccttttgtcttattcctggagtgact

SEQ ID NO: 156568 - DNA, 122 bp, Homo sapiens
ctgggcctgaaattctcatagggcaacattcaagcataactaagtagaactaccttctctcgatgttttgatttctccacagttgcatctgacttgattcactcatttatgttcccatctgg

SEQ ID NO: 156569 - DNA, 122 bp, Homo sapiens
ccccttacagtaagggatttcagctacttgtctaaaaaaagcatactacttcagcggttccggaagagggaagagaggtaattcatattacaaattaaattaaaagttaaaatttctagtta

SEQ ID NO: 156570 - DNA, 122 bp, Homo sapiens
ccctcagactcaagtccaatacactttttactacaatgcaactgccccaaagcagttttacgttgattaagcccttatctaaaagttttgaaaactgaattaactaatcgccaagaaagcca

SEQ ID NO: 156571 - DNA, 122 bp, Homo sapiens
catcacggacgagcccgcgacgccccgccccgcgcagcgacgccccgccccgcgcagctccgcccccacgaagccccacccacacgccatcgatgggagaggccaggacgcggcgggagggg

SEQ ID NO: 156572 - DNA, 122 bp, Homo sapiens
tgtgcctcaggcttataatagggccggtgctgcctgccgaagccggcggctgagaggcagcgaactcatctttgccagtacaggagcttgtgccgtggcccacagcccacagcccacagcca

SEQ ID NO: 156573 - DNA, 122 bp, Homo sapiens
accatatcaacttccggcttgaggcacgatagcggttggcgagaggccacatttccgccacgtgacccgcgcatgcgcctgcttgctggagagcgagcgtcttttgccacgaacacctgcgg

SEQ ID NO: 156574 - DNA, 122 bp, Homo sapiens
actgggtcagaaccgaaatggaggctttggcagcgaccgcgtgtgatccacagcagacgtcggaagcaggaaggggcgtcctgcgcggtgggacccgcgcgggggcagtggcgcaggcgcca

SEQ ID NO: 156575 - DNA, 122 bp, Homo sapiens
tgggcgtggggattggggtgaggacagggctgtcgtgagaacagtggctgcagatgtgagcggctggcaggaagtggccacttgaaccgcagatgcttcctgggctggtcagggaccggggg

SEQ ID NO: 156576 - DNA, 122 bp, Homo sapiens
tgtccagagctaggcctgagggcggcttcctctcacctccaggggcagcgactccgccatcgcatccctgccgcctccgcccccactgcgcaaggctttctgggaaatgtagtctcgcctct

SEQ ID NO: 156577 - DNA, 122 bp, Homo sapiens
cgccccacccgggtttaaagtcccgcgggcgggtggtggcggagctgcgagcttgagcggcgcgaggagatgctagagggcgcagcgccgccagcaccatgcgccccccgcccgcgctggcc

SEQ ID NO: 156578 - DNA, 122 bp, Homo sapiens
agttaatgggcaaactggagaaagggcctcacctggaaactgtaggattcacattgtggacgctgtctgctaaagtgagcaccattaagaccattttctagctgcagctttcctggaaaaca

SEQ ID NO: 156579 - DNA, 122 bp, Homo sapiens
ctggagtgactgggctgagtcagaaccacatttactagtttctcagtgtttactgctagtcgtcctctttgtggtatattggtttgaaaatattaactgtagcatgttcggtatattcaccc

SEQ ID NO: 156580 - DNA, 122 bp, Homo sapiens
tgtgggaccacgtggaaggggggcttcgtgcggggcctcaccctccctttgggctccgtgcgcttcgaggcctcggggagctctgtccctggtgaccacgccgttcctgtcctccgaacagg

SEQ ID NO: 156581 - DNA, 122 bp, Homo sapiens
caccttcgcttctacccgggggctccagtgcatctggctttatctctggggtgagccatgcggccctggtcatctggacgggccactgaactccacacattcacctgttcactggctcatcc

SEQ ID NO: 156582 - DNA, 122 bp, Homo sapiens
gcccctggtaacaactggtctgtctctgtggatttgcctgctctgggcatttcatgcgaacggaatcccacactgcgtggtccttcgcgactggcttctttcactcggcgtcatgttttcag

SEQ ID NO: 156583 - DNA, 122 bp, Homo sapiens
agacattagtgacaggctggcgcggtccccgcgcccgccccgcgcccgctgcccccaccgcgctcccgggactcggcgccgcggagaacacccaccatcatggctgctccgaggcgagggcc

SEQ ID NO: 156584 - DNA, 122 bp, Homo sapiens
gggtctcatctcctgccgagtacgcaagttcaattatcggcagattaggtttctactctccgtgccccgccccgcgccatcctggggagcagcgggaataaatgatccgcccctggccagtg

SEQ ID NO: 156585 - DNA, 122 bp, Homo sapiens
tgggagaaatatcctttttatctgcagtcggcctcctgtgggcctttggagcctatttgccgggcagtggtggggataaatgagtagttttcaggctagcttcagccattcacttgtagaat

SEQ ID NO: 156586 - DNA, 122 bp, Homo sapiens
caccgggcatacttgactgacggccggtgcttcacacacacaggatgcttcacagtctaccgcaaaggacagaacgttggttgctcgagagcccgtcttaagcctcctatgagcttcaagcc

SEQ ID NO: 156587 - DNA, 122 bp, Homo sapiens
tttgtttgactttggctgagaacatgcctgttaagggactcaaaaaggttcaccgctcttcggatgtccacaaatgaccacaaaggtgctgcaaatattgactctgggtttataaaaaagtt

SEQ ID NO: 156588 - DNA, 122 bp, Homo sapiens
tctgagtcggagaagaccagcgaccaggtgggccagtggctccttgggatggcagggaagcgtggtggctgccagtgggccccagttcagctcacttctctcccccaggacttcacacctga

SEQ ID NO: 156589 - DNA, 122 bp, Homo sapiens
gtgggcggatcacctgaggtcaggagttggagaacagcgtggccaacaaggtgaaaccctcgtcggtactaaaaatagaaaaattagtgggtgtggtggtgtgcgcctgtaatcccagctac

SEQ ID NO: 156590 - DNA, 122 bp, Homo sapiens
ggaggtgtggagggagaggcgcgggcaggaagggtggcgcttgggggccagcgccagttccgggtgggcgtgggctctgtggccactcacttggagtggctggcgggcgccaccagcccggg

SEQ ID NO: 156591 - DNA, 122 bp, Homo sapiens
cttaggggccgaggcgaggtgtgggtggggcgggacgccgctgtggaggcggggcctgggcgcggacgggcgcggagcgaggcaccgcaccgccggggcggggagtgggcggggctcggggg

SEQ ID NO: 156592 - DNA, 122 bp, Homo sapiens
cgcccgtccctctcagtggcgccgctgagtgaggcggaagggccggcgggtggcgggtggcgggcggcgggcagtggccgggcgctgaggccagaggggcggagcggccgagctgctggggc

SEQ ID NO: 156593 - DNA, 122 bp, Homo sapiens
gctttgttactggagctttcttgatcttacggaaggatcagtgggaggttttcacacaaccgcagcacagccggcacccgactggcagcagttgtaagatgctgtcccagtttcagaggttt

SEQ ID NO: 156594 - DNA, 122 bp, Homo sapiens
agcactgacagatagttccattattgtaggaactgttattggacagggctgataagttaccgaaggaaaaaaaacaggtaaaagaagatatttgagatagcttagcattagcattgttacat

SEQ ID NO: 156595 - DNA, 122 bp, Homo sapiens
ctgcggggcccgacctgctgtttcccagttgctttgtcccctcctcaggttgcctggccacggcggccgccctcacctacggcctctactccttccaccggggcaacagccagcgctctcag

SEQ ID NO: 156596 - DNA, 122 bp, Homo sapiens
cctggggtcgcggcctggaggggtccgcgggggctaagccgagctgggacgggtgggggccgctggcagcccgcggctcgctctctccgtccagtctctgtctcccgctgtctctcatcagc

SEQ ID NO: 156597 - DNA, 122 bp, Homo sapiens
gaacgtaatttgaagttgggaggtggaaaactaaaggtcaaaaagggaagaaagcaaaaacgtcccttgcacacttcagcccgcagaccccaaggaggggcgcgaggtcctcagaaccggaa

SEQ ID NO: 156598 - DNA, 122 bp, Homo sapiens
gggatgctagtcacgctgtcaggcttcctgctcggaacacccagcagctgtcatgtgcaccgtggagccagggggctatgtcagctactttctttggagagtttctccccagaagagaaacc

SEQ ID NO: 156599 - DNA, 122 bp, Homo sapiens
gccggccgcgagaacctggcctccctggagcgcgagcgcgcccgggcgcactggcgggcccgcaggaagctgctggagatccagagcctgctcgacgccatcaagagtgaggtggaggcaga

SEQ ID NO: 156600 - DNA, 122 bp, Homo sapiens
cgtgagcccgagcgctactaatctttttcggcagtgcggtgcggccggtaagggagggcacgcgtgtgaggtgcgcgcatgaggtgaggtgtgcgcgcatgtgaggggaggggtgtgcgcgc

SEQ ID NO: 156601 - DNA, 122 bp, Homo sapiens
tgctgagccaaagaagctgggaggccagcagagggtgaaccagaagaggtggcctcggcccgggtcctaacttcaccaaggtcagctggacttgcctttccccagaggctagtgttcaggcc

SEQ ID NO: 156602 - DNA, 122 bp, Homo sapiens
caacattctgctcaagtatcccctccttttgtggagcacttcacatctatcatgctcattcgtaataactcagataacttaattttctttactgctgtctgtgtttccatccatcatcttcg

SEQ ID NO: 156603 - DNA, 122 bp, Homo sapiens
ctataccagcatgctggatgatctatgaagagtttatactgtgtatcacatttactgactcggtaagatcacactgtcatatcatgatgtatttattaatttctcacactcccattttgaat

SEQ ID NO: 156604 - DNA, 122 bp, Homo sapiens
ggcatgggtagatggcatgtagaggttttcaaacattttagtgacactccttcattcagacgaactcttagaagcctgttggataaagctatccagagcacaaagggccctagaaacctgag

SEQ ID NO: 156605 - DNA, 122 bp, Homo sapiens
tcagacttgctgggatggggcctgggaagctgcctgttttgcaaacgttccaggaaatgacgttcactaaaatttaaaatgtactacattcaggaaatcattctcctcacaggcagccagca

SEQ ID NO: 156606 - DNA, 122 bp, Homo sapiens
actcaccggcagggggtgggccctagggaactacccagtcaggacgggcgggggcggggccgagacaagtatccaatgagggacgcccaatcggaatccggggaactgcccaatttacagcg

SEQ ID NO: 156607 - DNA, 122 bp, Homo sapiens
aatcggctgtttggttggacagaaaatggctgcgaaggaaccagtcccagcgcggagctccgcttccaggactcggcctcccctccctccgccgcgggccgcttccctcggcgcgacaccct

SEQ ID NO: 156608 - DNA, 122 bp, Homo sapiens
gttagctgtcttgctcactggaggagcccacattattctagagctggacctaaagcaccccgtgctcacccttgttcattgtttgttcttccctggcaaagtctatcttctgattcaagttt

SEQ ID NO: 156609 - DNA, 122 bp, Homo sapiens
ggcctcaccccgacccgccggcccccgcccacccgcccctcacccccacctgccggcccccgcccagctgcccctcagcctctacaagaaggtgctgctgattgtgcatgacgccatcctgc

SEQ ID NO: 156610 - DNA, 122 bp, Homo sapiens
ccttgcggaagagcgctctgcaccgacaaacatgcccgtacatttgattggctcctgccccgctgtagccctgcccccaccttcaggacgcagatttcaaagcgcgctcagcaacctcggct

SEQ ID NO: 156611 - DNA, 122 bp, Homo sapiens
gattggcctagtctgagtcaggtgctacaaacctagagctggcaggatgggaggaaggggcggggagagttcgcttccctagaattacacagagccctaaatagaaactgggggtgggggtg

SEQ ID NO: 156612 - DNA, 122 bp, Homo sapiens
ttttgcgaagccgccgcggctgcttgcgctgcggccaggaagagagtcggggcctgaaatcgggaccccgagtagaaaggcaaccccccccaaaaggccagagcaaattcgtcttggcctca

SEQ ID NO: 156613 - DNA, 122 bp, Homo sapiens
acgcagaccgaatggcaacggcatcccctgggggagccccagaggagccgacgaacctgccgtctgcactcttgcttgtgctgtttgcctttcgaaagggctcgctgcatcgcggccagtgc

SEQ ID NO: 156614 - DNA, 122 bp, Homo sapiens
gctggctcctcacctagagccctcccttgggtcagggtggctcttctctcccatacctagcgtccggcgcttggctttgtttcccggagtgggtggcactgtttggccgccacaggcacagc

SEQ ID NO: 156615 - DNA, 122 bp, Homo sapiens
ttgaacaagtgtcttctcaggactcctctcagttcctgaatttcacaaaactgctaccgacgttttaccagttagaaaaatgtccaaaataggataacccagaattggggatggtggagggt

SEQ ID NO: 156616 - DNA, 122 bp, Homo sapiens
cggctctcgcgctccggccgactggcggccccgccggcgcctcgggccccgcgacgtcagcgctggggcggggccaggccctaagccccgccccacctcgcctctaccccgcccccggcgcc

SEQ ID NO: 156617 - DNA, 122 bp, Homo sapiens
ttcttaaaacaaacagagcgttttgctgtgtgttcctcaaagtggtcccggtgggagtggcgcctcattgtgagctgtgccttatctgatgaattaatggcaggtgaaagccttgcgcctcc

SEQ ID NO: 156618 - DNA, 122 bp, Homo sapiens
ttcactttatcactcagcacccagcccctcagagctctggactgtgagctcggagatctccgcagcaccgcaccgtctttactcaggtggtgtcctaagaccacacgtcactacagccggct

SEQ ID NO: 156619 - DNA, 122 bp, Homo sapiens
ctctcatagcttacattttgttttgtccgtgtttgtttacttttatcactcactcaacagcgagctctccataagggctggaattttattttcttattcatctttgtatcgcaagcatctaa

SEQ ID NO: 156620 - DNA, 122 bp, Homo sapiens
aagatagcttttgtgtagtgtttctccaaggcgaggtcaaattccatacacttttataaccgtagtcgatttttctttcgtgtgaatatggttttcgtgtcattagtttgcgatttgatttg

SEQ ID NO: 156621 - DNA, 122 bp, Homo sapiens
ctctgctctgatgttctagtgcaaggaatgaaatgaatgaataggtcatttggcattccgcggttatgtcagcaggcatgactgctgtcacattaactgagcaagaaagggatcttcatcac

SEQ ID NO: 156622 - DNA, 122 bp, Homo sapiens
cttgaggagatgctcccaggtggcagatttgtcctacttgatagattccaaaatggaaaacggatttttctgctgcctctggggacactgaaaaaagaacctccacatgagttcagaggcag

SEQ ID NO: 156623 - DNA, 122 bp, Homo sapiens
cgtggtcacctcctccttctctgagatcttgagcaggagccggtcgttctccagctccagcgcgcggacgcggtcgatgtagtgcgccaggcggtcgttgagctcgcgcagctcctccttct

SEQ ID NO: 156624 - DNA, 122 bp, Homo sapiens
ctcctgtagtcccaggactttgggaggccgaggtgggaagatcccttgagcccaggagttcgagacaagcctgggtaacacggggagacccgtctttagtaaataaaaataaatttattaat

SEQ ID NO: 156625 - DNA, 122 bp, Homo sapiens
ttctgtgggcatcccatctgcttgctgttcttgtgggcagtgcgtcttcaccctgccatccggttggcagttttccctacacttggagaatcagcctcattgtgccctcccactcagagatg

SEQ ID NO: 156626 - DNA, 122 bp, Homo sapiens
gcatggtgctgacacacaggctgacggctgtggtggccacgaagaggatggagaggcaagcgaagaccttcccgggcagcccggactgcgggttttccaccatctcgcgcagccggttcatg

SEQ ID NO: 156627 - DNA, 122 bp, Homo sapiens
caaaattcttccttgttagccattctgcaaaaattcattagctgaattaaccattctccacggacctcatctttattcctctcttctttcccctccccgcttctttttaacctttcagcaca

SEQ ID NO: 156628 - DNA, 122 bp, Homo sapiens
cagggcagaggcgctcctcacttggcagagggtgggattgggcagaggctcttctcacttcgcagaccttgcgggggcagggcagaggcgctcctcacttcccagacggtgggattgggcag

SEQ ID NO: 156629 - DNA, 122 bp, Homo sapiens
acaaaaagaaactacgcgcagttgttgaatagactttgcgctaggcaaagacaggttaatcgagggccgcatcgcgaaaacaagcgagtgttgtatgtttgcactgaatccaaatgtctgca

SEQ ID NO: 156630 - DNA, 122 bp, Homo sapiens
gatgatcatgtctgggaactcctatggcccaacctctttgtcctgagttctccctggagacgatgggtgtgtctggccctccacaattataacactgagcagaagaacccatcctaagcctg

SEQ ID NO: 156631 - DNA, 122 bp, Homo sapiens
gatgggttgcttttgcttctctcattttctcctgctgctgccaatgtaagaagtacctttcgcctcccaccatgattctgaggcctccccagccatgtggaactgtaagtccaattaaacct

SEQ ID NO: 156632 - DNA, 122 bp, Homo sapiens
gtccaattaaacctctttttctgcccagtttcaggtacgtctttatcagcagcatgaaaacgaactaatgcagcaatcttgcctgaccacggcctttgtagcttatatgtcttgttttaaaa

SEQ ID NO: 156633 - DNA, 122 bp, Homo sapiens
atggcacgagggagcggtggaataatcctccgtggcacgggggtgggtggaataatcctccgtggcatggggggttggtgggataatcctccatggcaaaagggagcggtggaataatcctc

SEQ ID NO: 156634 - DNA, 122 bp, Homo sapiens
cgatgctcctccttgctccccagatgctgagcctgctgctgctggcgctgcccgtcctggcgagcccggcctacgtggcccctggtgagtcccagccggggtccaccctgcccctcaccaca

SEQ ID NO: 156635 - DNA, 122 bp, Homo sapiens
agccgccccccagcaccggccctcaccgcccctgcagccgcccccagctccagccctcaccgcccctgcagccgccccccagctccggccctcaccgcccctgcagccgcccccagcacccg

SEQ ID NO: 156636 - DNA, 122 bp, Homo sapiens
cacctgaaatccccgcactttgggaggccgaggtgggtggatcatctaaggtcaggagttcgagaccagcctggccaatctggtgaaaacccgtctgtactaaaaatacaaaaattagctgg

SEQ ID NO: 156637 - DNA, 122 bp, Homo sapiens
cccagcttgtctgagcagcccttgcctgaacgggggcacctgccacctgatcgtggccaccgggaccaccgtgtgtgcctgcccaccaggcttcgctggacggctctgcaacatcggtgagt

SEQ ID NO: 156638 - DNA, 122 bp, Homo sapiens
tagattgtcagtattttcggatatgcttttttccccattttttaattgtggtaaaatatacgtaacataactttaccattttaaccattctaagtgtacagttcagtggtattaagtatgtt

SEQ ID NO: 156639 - DNA, 122 bp, Homo sapiens
cgaggacgccgcccacggcatcgccagcgaggacgccgcccagggcatcgccaacgaggacgccatccagggcatcgccaaggagtacgccgtccacggcatcgccaacgaggacgccgccc

SEQ ID NO: 156640 - DNA, 122 bp, Homo sapiens
gaccgtggcctgtttggcacaagagccccactgcctcccagttcggagcttgctggggaccggcaatctgggcggtgctggaagtgtcccctgaacctctcagttttcacccaccttctgca

SEQ ID NO: 156641 - DNA, 122 bp, Homo sapiens
ggaagcatgaggctggagagaagtgacttggtccagaccacacagcacggggcggacctgcgatgctcacggtaaaactagggcaagttactacttgactgatctgcttctgttctagaatc

SEQ ID NO: 156642 - DNA, 122 bp, Homo sapiens
tctccctgtggcatgagaagggtgggatctggcttaccaggtgagtgagcaggcgtggcccggaagtccgttcagtcctgggcgcacccacaggaactgacatccgcatgccaagcagcacc

SEQ ID NO: 156643 - DNA, 122 bp, Homo sapiens
gcagtcgcacctccttctgccaataggcatagatgagtgggttgagcagggagttgcccacgccgagcagccacaggtaccgttccagcactaggtagaggtgacactcctggcaggccacc

SEQ ID NO: 156644 - DNA, 122 bp, Homo sapiens
tggcccaggcactgatgtggtggcaatgtagcacgccaggtgggtccctgcccttccccacgctcagcctccctaccagtgcaatcagccagtcagcctctatggtctctgggaccttcttg

SEQ ID NO: 156645 - DNA, 122 bp, Homo sapiens
tttttgcaaggcccgagacggcgggccctgcgcaggccgccctattccgcgccctcagggcgtcagtatcagcctgaggctggatacccccgctgggcccggatgaccccgctgggcccgga

SEQ ID NO: 156646 - DNA, 122 bp, Homo sapiens
gagaagtactttacctccccatcgcttgccactcccatctctgtcttcttaggaatgacccgcgcaggaaaagggaaacaaacagcagcttcgcagcctccctgggcctgccagacacccga

SEQ ID NO: 156647 - DNA, 122 bp, Homo sapiens
cgcggcttttaaaactgtctgctgtgtgctgtgcacgtgctgggagcacagtagcgaagccgggacagataaagttcttctagtcactgccctcttggagtataccgttgaatccgggaagt

SEQ ID NO: 156648 - DNA, 122 bp, Homo sapiens
ttaccaggaaagcaaggagtgagatggaggctttaacagctgggtaattcatcgagttgacggcagccctgactggagtttgaggagaaatatgggcaaaaaggcaatgtcagggaagcagc

SEQ ID NO: 156649 - DNA, 122 bp, Homo sapiens
gaccgctcccctccaggccgacgggctgctccagacggagtatccaagactttctgggcacgggcgggtgttttgggagagcaggccaggctgggggtgggggtggggggtcactgcaggcg

SEQ ID NO: 156650 - DNA, 122 bp, Homo sapiens
gaccacggaccgaggagagctgggcccgccctgggcacgagggaccacggggcatcctttcggctggtgctgccaacaggcctccttccagggcagagccactctctgtgttaaatgtttgc

SEQ ID NO: 156651 - DNA, 122 bp, Homo sapiens
gcccaggcacgcgctcacccctcttggctctgccacaccccaccccacggcacccaagcacgcgctcaccccactcaggcctcaacgtccttgtttccgggacacacaagaggagatgaccg

SEQ ID NO: 156652 - DNA, 122 bp, Homo sapiens
gaaggagaaaagccaggaggggagtgcttgctgtgaaagacagggagacagagaccaagacggacaggcagacaggctggtgacccaggatgaggccggaaagagccatcaaaggaaggaga

SEQ ID NO: 156653 - DNA, 122 bp, Homo sapiens
gtggttaaggcgatggactagaaatccattggggtctccccgcgcaggttcgaatcctgccgactacgggatgttttactgagaacagttcagcgaggaaataggatctcacatttgctttc

SEQ ID NO: 156654 - DNA, 122 bp, Homo sapiens
aaagaggatgaagaatagaagggttaactcaggatacaagacataagttgtcttcagctacggaacattggttgggacaaataatgttcttatctggagaggagatagaaaacagatgaaaa

SEQ ID NO: 156655 - DNA, 122 bp, Homo sapiens
gtaatgaaaactgtcagtagtaacctccaagagctgctgtgtgctgcagatggtacggctcgctgttaccttcccagatctgtgaaggatcaaatgaacatccaaaatcaggggggccccag

SEQ ID NO: 156656 - DNA, 122 bp, Homo sapiens
tcaccccaggaaggcagcgccggcctctgggcggttctggtggaaacgggctccgccgcccgcaggaaaactcacaactaagggaccaggaaaaagcctctcagggtcgcgcgccttcagtg

SEQ ID NO: 156657 - DNA, 122 bp, Homo sapiens
gcagccgctagggattgcgggggccgcatttatccctgtgtctctcaggccccgcagagacgggggtggggtgggtgacgccagggaagcaggccccttttcccaagggaagaatccccttc

SEQ ID NO: 156658 - DNA, 122 bp, Homo sapiens
cgcggcggcggtggggacgatgtggttctttgcccgggacccggtccgggactttccgttcgagctcatcccggagcccccagagggcggcctgcccgggccctgggccctgcaccgcggcc

SEQ ID NO: 156659 - DNA, 122 bp, Homo sapiens
cttggtacccacgtatccagagcatgtcgttttgaggtatttgcccaccgttgtgaaatccgtgccacccgagagcaggtcctgatgtggggctttcagaagtgggacctggggccgtacgc

SEQ ID NO: 156660 - DNA, 122 bp, Homo sapiens
gactgatggagaggggaagttttcttagaagaaggaaccacgtacgcctaagcagaggcacgcgcaggcatagcatcttctaaggacccgaatgccaggagagatgcaggtctatatagatc

SEQ ID NO: 156661 - DNA, 122 bp, Homo sapiens
actggcgcctactaaggaccactccacccagtacaaactaaatttgagagttcatcttcacgcaaataataagaatgttaaaaatgtatatatgctccttttcaaacaaggcctaataggcc

SEQ ID NO: 156662 - DNA, 122 bp, Homo sapiens
cccgcccgtctctcgggcaacgcctcctcccccccctccccagctcccaaacggaaatagcggaacactgggccaatcgtagcgtcgtgcctttgcttggcggccaatgagagaggaagtgg

SEQ ID NO: 156663 - DNA, 122 bp, Homo sapiens
ggacttcggtgaacactgcgcatgcggtccctcccaaacgccggcaggccactgcgcatgcggcaattaagccacagcccgctcaagggaagaacataaggaggagacagagagtgcgggaa

SEQ ID NO: 156664 - DNA, 122 bp, Homo sapiens
tctacatcccagcgcagggtgaagcctgagagcccaaatggccaactccacagggctgaacgcctcagaagtcgcaggctcgttggggttgatcctggcagctgtcgtggaggtgggggcac

SEQ ID NO: 156665 - DNA, 122 bp, Homo sapiens
gttttccatgccatttgctcggtcttcagtctgcccttgcacagaggtatcttgaaggtccgtggcatggataataactaagtgttgcggtgcaagagaaagcgaaggaagaggcgagagca

SEQ ID NO: 156666 - DNA, 122 bp, Homo sapiens
ttctctcttgggatgcttgctcttgcaacctagccatcacacggtgagaaaactcaaagtcgcccaggcagagagaccacatagagagtctgtagggagaggagctaatgccctgggctgtc

SEQ ID NO: 156667 - DNA, 122 bp, Homo sapiens
ctctctaagaaccagagcttcagtgagagctttaaatcatgtatttcatgtggtgagaaacgtggcatgcgcgaacagacaccacgcgagacggaggagaaaggtggcatgcgtgaacagac

SEQ ID NO: 156668 - DNA, 122 bp, Homo sapiens
gggagtggcgcctcaaagggctgggagtgaatgactccacccagggcctggctagcagtgcgcgcccagtaattattctttcgagccattaactgagtacacacaagcgtggcccagatagt

SEQ ID NO: 156669 - DNA, 122 bp, Homo sapiens
gcagcaagattcattgcaaagagcaaaagaactaaagcttccacactggggaaggatacccgaacaagttgccactgttggctcacgcagcctgcttttattatcttatctggccccaccca

SEQ ID NO: 156670 - DNA, 122 bp, Homo sapiens
tcttggcaatatataataactggtatgcactttggtacttaagtcatgacttgtggagaacgagaagcaatgtattatagcaacggggttcatatctaacaaacaataagagtgttgaacaa

SEQ ID NO: 156671 - DNA, 122 bp, Homo sapiens
tcagtgcggggcctcattcacccagaagggcaacctgctccggcacatcaagctgcattccggggagaagcccttcaaatgccacctctgcaactacgcctgccgccggagggacgccctca

SEQ ID NO: 156672 - DNA, 122 bp, Homo sapiens
cctctttcagtacacacttagcagaggacagtcggggtttcccaactgcgacactactgacggtgaggctggatcattttctgctggggggtgtcttgtgcaccactgggtgttgagcaaca

SEQ ID NO: 156673 - DNA, 122 bp, Homo sapiens
atacttgttatgtaatactatttacgaaatggaaatgaaaaatcaaaatattttcacaagcggggcaagctgtaacctgtgctcctggatgccagctctactcaccaggagcatcaagctca

SEQ ID NO: 156674 - DNA, 122 bp, Homo sapiens
cttagccatggccgaggcaggggctgggctgagcgagaccgtcactgagacaacggttaccgtgacaaccgagcccgtgagaaaggcgggggggcggtgctgtttaggggtctgggagatac

SEQ ID NO: 156675 - DNA, 122 bp, Homo sapiens
agtgtccaccacagagagacacagacccggagtctatatcccatcagtgggaatcggagccgggtgttctacacacctgaatctcatttttctcacctataaaccaggaatgatttctacct

SEQ ID NO: 156676 - DNA, 122 bp, Homo sapiens
tgtgtcgcagcaaagaaggaggaggaggggagggactcccctcctcggtcagaccggagccggccgcaccgaaaaaggttggactcgggactccgcaggcccccccagccactccgcggggc

SEQ ID NO: 156677 - DNA, 122 bp, Homo sapiens
gctgaaaatgattagctcaagtttcttgggcaactcaaccactctgaacctctgtctcctcgtctgtaaaacgggatcaaatgggccttccctgcttaactcagggagttaggcccaaacaa

SEQ ID NO: 156678 - DNA, 122 bp, Homo sapiens
acactccaaagcctttcttgtttgtctgcatgggccatgcatgcgtgctgggccaggagccgagtttggagacggtttaagtgaaagtgtgtgcctcctcagctgattgtgcgtgagggtga

SEQ ID NO: 156679 - DNA, 122 bp, Homo sapiens
agagccatgctcgctttgatccagccactgtagggggtcacccttaaggaggaccctcgccgtgctgcccctacccctcaggggagccctagcagccccaccctctctcacccagcactgag

SEQ ID NO: 156680 - DNA, 122 bp, Homo sapiens
ttcattgagtcattcggtaattccccgtatagttactaatcactaaatgtgtgccaagtacggggctcctcacttcgtacaattacggtatattgtagacacaaagagtgtcttcatggtgg

SEQ ID NO: 156681 - DNA, 122 bp, Homo sapiens
ccctctttctgaaggatctgcaagtggatatttggacctcctttgggtcttcgttggaaacgggatttcttcgtataaatctagacagaagaattctccgaaatttctttggttgtgtgcac

SEQ ID NO: 156682 - DNA, 122 bp, Homo sapiens
cccctcagcggcgccaaggcgaggggagcgcagaaccccggctcaggacggacagacagacggccagccgcgcccaggctcgtctgcagaacccttgcactccctacccccacccacctagc

SEQ ID NO: 156683 - DNA, 122 bp, Homo sapiens
taaacagcttcgtgtctagtatgagctcagtacttgccctgtgaaaatcccagaagcccccgctgtcaatgttccccatccacaccctgcttgctcctgtgtaacagctcagatgatgaata

SEQ ID NO: 156684 - DNA, 122 bp, Homo sapiens
tcacggggcaactgtggcccacgttactgcccagacggtgccccctgtcctggaaggaggcgtcccctcacaacccctgcccaggaaggaggtgtcggggctgacagcagcacctgggaggt

SEQ ID NO: 156685 - DNA, 122 bp, Homo sapiens
ccccagccccagtcctggccctggccccgggcgccagccgggcctcgcggactcaccatgcgagcgcacgtgcctgctcaggttgctgctgttctggaagatcttgctgcagatattgcact

SEQ ID NO: 156686 - DNA, 122 bp, Homo sapiens
ttgccaggcgcccggggcaaataccggcagcggtggttgtgcggtgtcctagcaacggggcggcagcagggcacacacaccgcccaagcccggacggtggccgcgaagctagggccaccatg

SEQ ID NO: 156687 - DNA, 122 bp, Homo sapiens
aaaaattgtagcactgggcgtggtgcatgcctgtaatcccagccactcaggaggctgaggcggggaggatccattgagcccagcagtccaacctgggcaaaatagtgagagaccctgtatct

SEQ ID NO: 156688 - DNA, 122 bp, Homo sapiens
ggcagcatcctgaggcttccccagaaccaggcctctgctctggccctcttgcatctggaacgccaggtgggtttttctggcataggagcccacttgcattttcatagttttatttgataaaa

SEQ ID NO: 156689 - DNA, 122 bp, Homo sapiens
ctgccccatccgcaagtcagtgtcccccaccccctgcggggtccacagcccaggcatctccggtccagtgtttcccaaacattcgcgtgccgaattgtaaaaagtgcacgttaatgcgagcc

SEQ ID NO: 156690 - DNA, 122 bp, Homo sapiens
aggccagcatggcccacttggcaggctgaggcaggagaatcacttgggcccaggagttagcgtctagcctgtgcaacatagagagacaccatctctacaaagaaagagaatttattacattc

SEQ ID NO: 156691 - DNA, 122 bp, Homo sapiens
ccctccccccggggagcccctccgattggtctgtcttcctgccagtcaggcaggagggcgcggcgcccgccccgccccgcccccgcccccgccccgggcagatgccgggagctctcctgccg

SEQ ID NO: 156692 - DNA, 122 bp, Homo sapiens
ccagaagaaaagcacagccggagtggaactgacctccgggcctgcgcctgactctgccctcgctggcctcagtgccgcgggccagttactgaagccctgtgcttgtgtctccccgcttgtaa

SEQ ID NO: 156693 - DNA, 122 bp, Homo sapiens
ctctcggtggagagggatggctggatacttagtgacatcagccacgagccaatgggaagtcgggctcctgcacggcgcggctcggctcatgcccccgggcgcggggcacacaggccggccgg

SEQ ID NO: 156694 - DNA, 122 bp, Homo sapiens
cagtggggacccggtgagtaaatcttggcacagccacaccagggacagcagtagctgcagcgcttgcggagggtctgcgtgcaaccccttggggttgcatgccccccaccccatgctgggac

SEQ ID NO: 156695 - DNA, 122 bp, Homo sapiens
caaaatacccattccctccccttaactctaagatctcatcttccatagagacaatgtcgccgtctcactccactctggccttcttggatgttctgtgactatgccaaacatagtcccatctc

SEQ ID NO: 156696 - DNA, 122 bp, Homo sapiens
ttcccttcgtcagcagctcggtccctggagtcgcggtttgtggggaggaagatgcccgtgcgttatgggctctttctgagtgctgctcgggctagaaagcagggagtggaccctcacaaaga

SEQ ID NO: 156697 - DNA, 122 bp, Homo sapiens
actcaacagcaggtcacaggcctaggtgggtgctgaaggtcatgggaggccaggcctcctcgagcaaggtggggggtcccagggtcaggtcaggtgcagatcctgtggcagccacgtctttc

SEQ ID NO: 156698 - DNA, 122 bp, Homo sapiens
cagagggcgggcatgcagctgcaatgccgacaggagccctcgggcagtcaccgcacttggcgtacttgaaataactacttccctcgtgccttgtctcttgggggtgtgggggatcaaaagag

SEQ ID NO: 156699 - DNA, 122 bp, Homo sapiens
tgtcaatttgatccataaattcggcacaatctgaaccaaacacccagtcagtgcttccgccgaggctgacaagctgattctagaatatacatgggagagcaaagggattaaaaagccaaaat

SEQ ID NO: 156700 - DNA, 122 bp, Homo sapiens
gcagtggctggcaactccgcgcccgtccgatgtcctctctaatcccccagtgttctggcgcgtacccacagtgcccccagaccctccgctcgcccgtgcgccgaggtcgttgggttttagac

SEQ ID NO: 156701 - DNA, 122 bp, Homo sapiens
atttaatgtagatacttacgggcaaagccaggatttgaacctcattctgcctggcaccagcgtgtttggacaatctttcttcaggcatggttatactcatgacaaacatgattcatttatta

SEQ ID NO: 156702 - DNA, 122 bp, Homo sapiens
gccgggacccgcctgggatgccctggggtctgctccgctggggcgaatcctgaggcgccacgcgaggcacttggcctctcctagccccgctttcgtttttggaaactggaaactatcactta

SEQ ID NO: 156703 - DNA, 122 bp, Homo sapiens
cagacctgccttaaaagcagcttgcccgccttctctcctcccctccgggcgggccctgcacgtggccctgacagcagtaggccccacccctgctggatccagtgagctcaggtggggctggc

SEQ ID NO: 156704 - DNA, 122 bp, Homo sapiens
cctcgcagccaagctggtggccttcttctggaggacggcggacacccctagggaggaagccgggcagctggagcccgagctcgcggaaggtggctcgcgggaggcggctgggaggcgggtcc

SEQ ID NO: 156705 - DNA, 122 bp, Homo sapiens
gcactctcgcagagagcagggtcgcctggggtgggtgaaggggtctcagtcttgcactcacgtgaggacatagttgacgctgacgatacagtgtggcctggaggagcgactgttgtgcacga

SEQ ID NO: 156706 - DNA, 122 bp, Homo sapiens
cactgcctctgtcctgctgacactctgaccattttcacacagctgtctgctcccaggaggcgatgacggggccctgccgggccgtgatgcctcgttggtacttcgacctctccaagggaaag

SEQ ID NO: 156707 - DNA, 122 bp, Homo sapiens
tgtccccacgccttccctccgtcccaggccagcctgggggctgtgctccacttcccctcccgaactggactcctgtccccacgccttccctgcgtcccaggccagcctgggggccgtgctgt

SEQ ID NO: 156708 - DNA, 122 bp, Homo sapiens
ccgggagccgcatcccgcccctcccccgcaactccgcggtcctcgcgacggcgagaccagcgctctgcagttcggggcgtcttcggacggccccctgaggaaacagcctcccatcctgggat

SEQ ID NO: 156709 - DNA, 122 bp, Homo sapiens
actcttactacttacccaagtccagggagccaggacccctcccacacaagctacgtgaagcgggtgactacttatatataggcatcgaggaaccgcaggagcccagggctcatagccaggca

SEQ ID NO: 156710 - DNA, 122 bp, Homo sapiens
gacaccatgaactgagctttcctgttgaccagcatcaaagatgagctagaagtgtctatacggttttaaaccactgagatgttgaatttgtttattgccacagcataacctattctatcctg

SEQ ID NO: 156711 - DNA, 122 bp, Homo sapiens
gtcgaccctggctcagccctcggggtcaggcccaccgtccccgcctgggacctcccctgccgcagaacctcaaccccacccctaggctgcacatcccggggtcctggggccagagtactccg

SEQ ID NO: 156712 - DNA, 122 bp, Homo sapiens
ccggcgggagcaggagcgtgaggatggtggccaggggtccggggccgccgcggagcccctcgccgccttcgcagagcccctcgtcgccttcccagagcccggacagaggggcgcctccgcct

SEQ ID NO: 156713 - DNA, 122 bp, Homo sapiens
ggggagagtcttttcttttgggatgatccctcctgcacctcttcttgggctgcgctctgccggaggggcgccctgcatcaccagtgcaggcagaggggagccggcctgtggttgcggatcgg

SEQ ID NO: 156714 - DNA, 122 bp, Homo sapiens
gggctttattgtaatttgtgactgagttcttaaaattacccacttgattgcacattctggcgttttgagaacttatacaaagtgaaacaatctgggcattcccaaaggctattgtggacaaa

SEQ ID NO: 156715 - DNA, 122 bp, Homo sapiens
gcctccctgcctgcagcaccggctcgggttgggttttgctgcctgcggggcagctgccctcgccccgggagttagggtgagcccaggggactgacctgggccagctgagagtcgaggggcct

SEQ ID NO: 156716 - DNA, 122 bp, Homo sapiens
taaaacagcctataggttggcttctgagaactttatgttgctggaaaagtggtttctttacgttaaagtaaaagcttatacctgcttcttgaagttatataatcagaataatgtctgagtac

SEQ ID NO: 156717 - DNA, 122 bp, Homo sapiens
attgaaaagaaagggatcattagcacgcgaccctcgcctaggagtatataaaccgcagcacgactttcggatcacaaaggcagagaaaagaacacattgaaggcttttgctcacttttccaa

SEQ ID NO: 156718 - DNA, 122 bp, Homo sapiens
tgtcagctggagcaggccggctcggaggggcgggcccggggcctaccctcaggcagcgctcgctcgaggccagcttccgagctccaacccctgcccgaaacctcggcctcactgaaccaggt

SEQ ID NO: 156719 - DNA, 122 bp, Homo sapiens
tggatgcacccctgacttatccctttagatccagtctccaccctgctctgtgctccaagacgctgacctggatggataccgtattagactgttttcatgctgctgataaagatatacctgtg

SEQ ID NO: 156720 - DNA, 122 bp, Homo sapiens
ttctaatcaaactgctttggccaagacgtccgttttgagttgcatttgaaccctagccctcggtgggaggcacactcacttccacgttcacagttcttggaagcggtcccactgggggcggg

SEQ ID NO: 156721 - DNA, 122 bp, Homo sapiens
ttcctacaccgcgccaaggaggcaggagtgcactgggctacccgagcgaggcagagaacccgccgggatccagcgctggtttaccccacaccctcgtcgaaggggctctcgagggctcggtt

SEQ ID NO: 156722 - DNA, 122 bp, Homo sapiens
ggatcgagggtgggcctcaggtcaaggggcagtgttggctgcccttgtgagggacgggaacgtgatagaagagagctgggcaatgccggggagggatgtgtgcctccaacttcattaagtga

SEQ ID NO: 156723 - DNA, 122 bp, Homo sapiens
caaagatcccctctagacatcctgttttttggaccaaatgccaggaacataagacaggttcgatttcctcccgcgccccagcgctcccggttctagggccccgaacttcgaacctcagccct

SEQ ID NO: 156724 - DNA, 122 bp, Homo sapiens
aacatttctaaattacacagggatcagtgaagaacttactgaaattaaaaaatagtgtgacgatacagttctgtgactatcaaaacttgtgggatgcggcttacactgtaattagaagagaa

SEQ ID NO: 156725 - DNA, 122 bp, Homo sapiens
agccttcctcagagcgatgatggtgtttaggatgacatgcgctgcacagcaagtcctggccgtggcggctgccattgcagcccgtggggtcaccctggaggccgtgattgctgatgttgtgc

SEQ ID NO: 156726 - DNA, 122 bp, Homo sapiens
aagaaggagaatgtccccgtgctggtggctcatccaggtgtgggccggtgtgcggcggggcgtgggcagaggagaggcttcgggctccggtttcctctcctgtggatgcgtcgcccccgcat

SEQ ID NO: 156727 - DNA, 122 bp, Homo sapiens
ggtagtgagaggtgacagagtgctggcagccctcactcgctctcggtgcctcctcggcctcggcgcccattctggctgtgcttgagcagcccgtcagcccagcgctgcaccgtgggagccct

SEQ ID NO: 156728 - DNA, 122 bp, Homo sapiens
gtgataccctgtctaaatacatatgtgtatcagttgcttttttgcccaggtaggtgccctcggaatacccttgaacacatcttgtcttgcaagtcaccagaacagacccacactcaggcact

SEQ ID NO: 156729 - DNA, 122 bp, Homo sapiens
ttcgctgaccccttgcacttcccgggtgaggtgatgcctcgccctgctttggctcatgctcggttagctgcacctactgtcctgcatccgctgtccaacactccccagtgagatgaacccgg

SEQ ID NO: 156730 - DNA, 122 bp, Homo sapiens
gggcagccacttggctggggcgaggccacctcgctttgggtcttgtcgcgcccaggccagcgccagcccaggcttgccatggactggctcctgggcgttagatgaatgaatcgactcaaccc

SEQ ID NO: 156731 - DNA, 122 bp, Homo sapiens
cacataaatggcattcatatggcttttctccagtgcttgttctctcatgtcatctaaggtcggaagacagactgaaggccttcccacatagaaggcaagcatgtggtttctctccagtgtga

SEQ ID NO: 156732 - DNA, 122 bp, Homo sapiens
aggatcccccaggccccagaaaggctccgggcctcccctcagccccagacagaggcgggccgcccggtgatgtcacacgagctccggccccagctggcctggcccctcccgcccagcccgct

SEQ ID NO: 156733 - DNA, 122 bp, Homo sapiens
tcaagagtcactccataaatcccagggccacccactttcttaactcccatgggaatttctcgtggatgacaaatttgcttgtgcagtttctgctcttttgagagccccctcttcacttccag

SEQ ID NO: 156734 - DNA, 122 bp, Homo sapiens
gctttaccacattctctacatctatagggtttctctccagtatgaatcatttcatgttctcgaagggcgtaggaagaagctaataatttatcacttttattgcatgcatagggtttctctcc

SEQ ID NO: 156735 - DNA, 122 bp, Homo sapiens
ggaatgttatccagcctcataaaagaaggagatactgccacactgccatttgtgacattacggatgaacctggaaggcattatggtaaatggaaagagccagacagaaaaaaaataataatt

SEQ ID NO: 156736 - DNA, 122 bp, Homo sapiens
tggggtacaaccaccatgacaactgccgggagggccacgcaggtcgtggtcacctgccagcgactgtctcagactgggcagggaggctttggcatgacttaagaggaagggcagtcttgggc

SEQ ID NO: 156737 - DNA, 122 bp, Homo sapiens
cctcacttctctgcaccttgtaggcagtacgtccagtagggggagcccgccgcccaaggtcggccccttccgggcagtgaaagcaacttctagccggcctcccccttcatcggcttgggccg

SEQ ID NO: 156738 - DNA, 122 bp, Homo sapiens
caacaacaagcagaggccctcagtcttgtggctgcaagaacctgaattctgccaacaacccgagtgagcttggaagcagattcttccccaactgagccggataagaacctagtccagccaac

SEQ ID NO: 156739 - DNA, 122 bp, Homo sapiens
ccttcctcagtgaccacagctgcgctccaagctgttcctgcagccgatatcaggatgtgccgaaatgaaacggacaaggcaactgttaacattatagaccccagagttttaacacaggtcct

SEQ ID NO: 156740 - DNA, 122 bp, Homo sapiens
tgcgcggggactggggatcaaagaccacggaagaggtgaaggcagaaagcgcccgaggagcgttgcattccgcagaaccccaaccaagccggagaaatccgtgcacagaccagattaaatgt

SEQ ID NO: 156741 - DNA, 122 bp, Homo sapiens
ctgcacgccagcagcatgacgcgtgcacacttagagcgtgcgagaagtatctcaggtatccgtacacagatcttcttataatccacccgctgggcttgatatttccccacagtcccctagtc

SEQ ID NO: 156742 - DNA, 122 bp, Homo sapiens
attcctacccgctccctcgggcctgctgctccccaaagggaagtcagtgggtggcggtaccgctgcccagcgggcgaacttcctttccgcgcaactcgcccgctgcagagtctatccgctgg

SEQ ID NO: 156743 - DNA, 122 bp, Homo sapiens
attcaatgttccggcctcaggtccaagtccgcgaggatgggcgggctccacgtctgggggcgctgtgagcagggccagagcgaaacctcagtctgagtttacgaactgggaaggagcctgaa

SEQ ID NO: 156744 - DNA, 122 bp, Homo sapiens
tggggcagacagtggtcctcagcaggctccctcccggcacctctgagtcggtgttccgcccgcccgcacatagaaacggccacagtgccgcccctctgcaccgatgcggttccttcctgggc

SEQ ID NO: 156745 - DNA, 122 bp, Homo sapiens
ctagtctccccaaatgttcaggtacctcacagtatatcctaaaactgacagtaatagcctcgcagcccccaaaacttacaggaatcttaacgcttccccaactgacaggaacctcctcacgc

SEQ ID NO: 156746 - DNA, 122 bp, Homo sapiens
ctcactgacttctagaatgaagccgcggaccctcgcagtgagcgttacagttcttaaaggcggcgtgtccagagtttgttccttctgacgttcggatgtgttcggagtttctttctttaggc

SEQ ID NO: 156747 - DNA, 122 bp, Homo sapiens
gcctcctgcctgggtctctgacttcaggagggcggagggggcccgtgtcagagccttccgcgccccagcgcatcgctccctactccgcctctcgggatcctttaagaggcggggcttggctg

SEQ ID NO: 156748 - DNA, 122 bp, Homo sapiens
tcaggctaaccggtgctgcttcttgcccgcctcactcatccacccacgccggctcattggcgtctttgatctcagcttccagccccgtgctagtgactagcccccaacatagcacggcgctc

SEQ ID NO: 156749 - DNA, 122 bp, Homo sapiens
gaggaggaggcgctggaacaggaacggccggccgggaggggcgaggctgggggacagtcacgcagggctgaggcgggcgtgtggtgcgggagcgtgtgtgtgcaggaagcttgtgtgcgtgc

SEQ ID NO: 156750 - DNA, 122 bp, Homo sapiens
acgtcctcccaggcgaagaccagctcgtcctggggactcttgtcggtgagcttgagatgacggcgccacgagttgaagttggctgcgtctggctgagtgtacttggcgtcgggcgtgcggtg

SEQ ID NO: 156751 - DNA, 122 bp, Homo sapiens
cattccttcgttccttccttcgtctgctggtcgatttgttcgctcgttcattcattcattcgcacgctcattccactcctccccacctccacccaagcgtccagcccgcgcgcgccgctccc

SEQ ID NO: 156752 - DNA, 122 bp, Homo sapiens
gaacttaaagaaaaggtaagtgacttaacttgtggtttttgtagctaattcattcacttacgtgtttaaaagcattgtacagtaaaatatacaaaagttgtaaaacaagtgtctagattcat

SEQ ID NO: 156753 - DNA, 122 bp, Homo sapiens
catcgactacgcaccgcttctccagccggtgcctgagcagcccgcctttagaatcaggagcggtggcttccacggactgccgctatcggagggccctggcagcctcctcctccttccctcga

SEQ ID NO: 156754 - DNA, 122 bp, Homo sapiens
agggggtagggagtgggggtgagggggcacatgtgatctctcccaggccaatgggctaagcgggccagagtttggcagccccagcgcccatccatcaccccccaagcattagcatgacaaag

SEQ ID NO: 156755 - DNA, 122 bp, Homo sapiens
taaagtactgattggcttaggactctagaaaccacagcaggattttggtttgtgaagcagcgtagcaatggacaaagggtgaattagaagtcatgaaaagcagagacagcctgtatcccatc

SEQ ID NO: 156756 - DNA, 122 bp, Homo sapiens
ccgccctctactgtaccagggacgtctctagcagaaacttgggcattgtatctgctagaacgggtgacacatgtcctggaaatcctagtttatctaaacacaggttgagatagaaataagaa

SEQ ID NO: 156757 - DNA, 122 bp, Homo sapiens
tgtcctcaagaatccaacaagcatcttcttcatcctggtcctgcccccagctgagtccagcgttaaatgttcttaaaggacttctagggtcctgtgggctccaagcccagcctgggatggag

SEQ ID NO: 156758 - DNA, 122 bp, Homo sapiens
tcgctgtgaatgtgcacgcgtgcgcgtgtgcagatgtgcattcgcgatggagagaggaggcggttttctgagttttgcatccaatcccaagtggagcaacgtgtattttcttgggcgtttca

SEQ ID NO: 156759 - DNA, 122 bp, Homo sapiens
ccgtcagctcaaggtgcccccgtacctgggctaccgcttcctgggtgagcgcgattgtggcgccccgtgcgaaccgggccgtgccaacggcctgatgtactttaaggaggaggagaggcgct

SEQ ID NO: 156760 - DNA, 122 bp, Homo sapiens
ttagggatccagactcctgggtgcccgagaaggtctgagctaggatcaggactcctgagtcgtgaaagagctgggggtctggaaacatggctgtgcttggaaggggccagggacggtttgtc

SEQ ID NO: 156761 - DNA, 122 bp, Homo sapiens
gttgagttgaagagcacaaccatgtctgtacacaaatgtgccttgatgtagttcaggatacgaatatagtgtgccaactgaagcctaggctgcagactattattattcctaataaaatatag

SEQ ID NO: 156762 - DNA, 122 bp, Homo sapiens
ctcaaaaagttcaacacagagtttccatatgacccagcaattcccctcctaggtgtctaccgaagagaactgaaagcatgtccacacaaaagcttgtacacaaagagcagtgtcattcatcc

SEQ ID NO: 156763 - DNA, 122 bp, Homo sapiens
gcggccgccgaagaggagcccggggccaggtaggaccggaggcgggcggggcgcggcgggcgcgggcgggaggccgggcgcggggcgcggccgggaccctctccaggcgctgggcgacgccc

SEQ ID NO: 156764 - DNA, 122 bp, Homo sapiens
ccctccttgggggtgtggctcgtgtgcgtgggccacaccagtcctaggggcaggtaagtgcgcgtggcccaggaggcgtgaggctgtgctggcgaggggagggctcccggggcgcgtgggtg

SEQ ID NO: 156765 - DNA, 122 bp, Homo sapiens
tctccgccttcctcacagacagcttcggcgggcagcacagctacctgcggatctccctcccggagaagtgcaacctcagatgtcagtactgcatgccggaggaaggggtcccgctgaccccc

SEQ ID NO: 156766 - DNA, 122 bp, Homo sapiens
tcgcttcttaggagtatcctaactgccggtggggagaacttcgccctaaacctggggttccgatccaggaactggaagttgacagcttggctgcctggctcctgcatctgccttctccactc

SEQ ID NO: 156767 - DNA, 122 bp, Homo sapiens
tgtgcctctgctgggcagccatgtgccagtctgtgtacacgtctgcattaacctgtgtgacgctggtgtttgtacccaagtgaacctcacccgatggcttccatcctttccaccttcctcac

SEQ ID NO: 156768 - DNA, 122 bp, Homo sapiens
ccgaaggtggaagcaacccatgtgtccatcaacagatgaatagataagtaagatgtggtacgtgcactctgaacaagcattcatttggctgcacagggccagatcaaggtatactgtgttct

SEQ ID NO: 156769 - DNA, 122 bp, Homo sapiens
ctgggaggcctgtcatcatctgtgttacgccaggaaggccggtcatcgtctgccccacgacgagagaacctatcttcctcaggaccacgtctagggcctctgtcatcatccatgccacgccg

SEQ ID NO: 156770 - DNA, 122 bp, Homo sapiens
actgggcggtcgcgtgctggccgaggtggaggccctcaaacggggtgggcgcctgcgagacgggcagctagtgagccagagggcgatcccgccgcgcagcatccgtggggaccagattgcct

SEQ ID NO: 156771 - DNA, 122 bp, Homo sapiens
tccccctgctccccgaatcctcggcccctcccccagactctcaactcggaaatctctcgccgtcgccgccgcgcccctctcgcagcgcatcgcggcttccaactctcaaaccgttccccccc

SEQ ID NO: 156772 - DNA, 122 bp, Homo sapiens
acacagggctggcaggcgggtgaggtgggcaagtacccccggcagtcgggctccggagcccgccttcttgaccaggccgctggcagtgagccagccgggttccgtttccatcgcgggcctta

SEQ ID NO: 156773 - DNA, 122 bp, Homo sapiens
cacgcttgctctgggcctcgtcgcccacgtaggagtccttctggcccatgcccaccatgacgccctgcaggggacgacccgtcagcctcgccggcgacaccgaacccaccccgcaacgcaga

SEQ ID NO: 156774 - DNA, 122 bp, Homo sapiens
catacgcagcagtgttacagctcttttagaatttgtctagtaggctttctggctttttaccggaaagcccctcttatgatgtttgttgccaatgatagattgttttcactgtgcaaaaatta

SEQ ID NO: 156775 - DNA, 122 bp, Homo sapiens
gcctgcccatcctcgcccttcccatacgccctcggccccgcgctcaccacgttcgtgtcccgctccaccgcgggttcccagcccaggtcccggggcccgcaacagtccaggcagacgagcgc

SEQ ID NO: 156776 - DNA, 122 bp, Homo sapiens
caagcaggagggtcgacatggactgaaatcaccctctgcagctgggagggctcttctgggcgtccgggcagctgcagctgagaggactttcacaccataaggagatttctgtttttcttttt

SEQ ID NO: 156777 - DNA, 122 bp, Homo sapiens
tgcacactgcggcagcccctgtccccgcggccccgttcacggagcactcactgcacactgcggcagcccctgtcccggaggccccgttcacggagcacccactgcacactgcggcagcccct

SEQ ID NO: 156778 - DNA, 122 bp, Homo sapiens
gggggcagcccaccctgtgtaaacgtgcaacacactcgtgcgaaggttgggtactggacccggctcgatgggcctgtgccgggacactgctgtccactcaggctgaggacagagccccggcc

SEQ ID NO: 156779 - DNA, 122 bp, Homo sapiens
cctgcaaccttctgaggtttaactgaatcactgtgacttcctccctggtctgtttgttgacgtttccctctaagaatgtcagcaccagaaaaaggtcttagaggccgggcgcagtggctcac

SEQ ID NO: 156780 - DNA, 122 bp, Homo sapiens
tggagggagttctttttttcttcttccatctcatctactcaataacggagccgctgcagccgctgcacgctgcacacacacggcacagtccctgggtccgggagccagagcagcgccactcg

SEQ ID NO: 156781 - DNA, 122 bp, Homo sapiens
gagtgtctaaaattaggtttcctattttgtaagagatagggttcctcatctctccagctccgatcacagtgctcatagctaatggctgctcaataaataataattcaatacaggaatgaaag

SEQ ID NO: 156782 - DNA, 122 bp, Homo sapiens
gcccacagtgcgagttgctataggcaaccagccagggtggccagctccttcccgtttgcccgtgatgttctggttttgggaccaaagcatcctaggcctccagcccactgcagtgaccgaat

SEQ ID NO: 156783 - DNA, 122 bp, Homo sapiens
tttagagaaaggtagagaatgctaggtctcaccatattttccccccgcagcactacaggacgtcgggactgggcatttccttccaacatggccgccactgcctctccgcagccactcgccac

SEQ ID NO: 156784 - DNA, 122 bp, Homo sapiens
acggggccggaagaaaggagctcacacccagagcccagccctaggtgagcaggaagtgtccgtgaggggaggaggcccgagctcaaggagtaatgaggaagcgggagaggaaaggctgggct

SEQ ID NO: 156785 - DNA, 122 bp, Homo sapiens
ccccgcccggacccgggggagggaggccggaaggtgtggccaggccagggcgcgcatccgcgagggcagaagcccttctgtccgcctgcagaggccaggtgaccccttagccttggggtggg

SEQ ID NO: 156786 - DNA, 122 bp, Homo sapiens
tattacctgtctacccagagagagctcctcacgccatgaatagtccacctgtgagacatccgagctgcagctgggcaggagccaagcatcttcttttcaaatgcacatggccctagtgccct

SEQ ID NO: 156787 - DNA, 122 bp, Homo sapiens
tgaggaaatgactcacaattggaccattcccatgctgaaattccacaagaatcttgttatcgcctgcacattgcttaggcaaacataattctagacaaaaatggaaccccagaaatctcagt

SEQ ID NO: 156788 - DNA, 122 bp, Homo sapiens
gagtctgaggcttctaggcctgcgctgttcataccttgaccccaccccagcccccatgttcgcaagcctgtgtcccctggagcctcttgtcacagaggaccctctcctgtggagtcccaggg

SEQ ID NO: 156789 - DNA, 122 bp, Homo sapiens
gtgggcaacacaacgggggaagcacagactccactcgggggtgccaggcctttgcctcgccgggccgtctgctgccagggtaactgggtggtcacccgccctctgccccccggggtgtgtat

SEQ ID NO: 156790 - DNA, 122 bp, Homo sapiens
ctgtcctgggaccagacaccttccgtggaggggttgtcagggcaatgactgggagagatccgtagttgggaggattttttcttccccagggcactgggctagtgacctttgcctcttgagac

SEQ ID NO: 156791 - DNA, 122 bp, Homo sapiens
ttgtgggttagactggtggtggagaaatggggatgacaaataatgggaaagccataagcgcgtgacttttgtaaaattctagggcacttaaagggtgccgttctgctctgaaattctacgaa

SEQ ID NO: 156792 - DNA, 122 bp, Homo sapiens
aagaaacccgaagggagatctgggcattgcaggagcacaaatggatgagaaatgtgagaccgggtgagatgcaagctatgcgtagctgctcaaatattaatcaacaatatattttaatgaca

SEQ ID NO: 156793 - DNA, 122 bp, Homo sapiens
acagacgcagcccagggcctgggtggggaggcttttagtagttactggttggccgagcaacggccacttgggggaagacgatgaccagtgcggccttcacaagactgcccagaggtgccagc

SEQ ID NO: 156794 - DNA, 122 bp, Homo sapiens
gacgagcgaaaaaccagcaccgcccaacgaacgaccaaaccgctctgcgctccaagcccccgcgtcgcctccgtttttataggcacgcttcacgctgcgtctctgcgtcatagaacccttat

SEQ ID NO: 156795 - DNA, 122 bp, Homo sapiens
gacgccgctacgcttcggggcggggcccgtctttccatcctgctagtggggaaactgaggcgcggggctggcggcgtccgtgcggggggcgtgaggacgtgcagggaagcggccgctgcggc

SEQ ID NO: 156796 - DNA, 122 bp, Homo sapiens
ccgagcgctcgctgggaaggcctgctggcgccacggagggcagagggcagggaaagcacgcgagctggaagcccaagcactcagtcaccacaggccttggcagcccgcccggccctctgctg

SEQ ID NO: 156797 - DNA, 122 bp, Homo sapiens
gtttagctcagacaccctgcaaggacaccctaacccatctcgggcccgccttccctgtcgcgccattgggcttcgccggtccaaaacacagacccattggtcatcccggctgccgctcagac

SEQ ID NO: 156798 - DNA, 122 bp, Homo sapiens
gtactgacagctgctttagctgccgtttagtgagcgcttatccagtgggtgaccctgttccggggctcactgtgccttcattctaacacctaatcccagggtcattattatgttttattatt

SEQ ID NO: 156799 - DNA, 122 bp, Homo sapiens
ctaaaatgaccaggatttcagcagcttctacatttcttcatgtcaatcaaagcttaggcacgtgggttacttcactgttctctgtaccctttccaaataaaacccggggccgcctgtgtacc

SEQ ID NO: 156800 - DNA, 122 bp, Homo sapiens
gtgaacaaggatggccgctatgtgtgtgcgctgtgccacaagaccttcaagacggtgagccggcgtgcggggagccagtgtgtgggtggcaggccccctcctgttcccccaggagggccctg

SEQ ID NO: 156801 - DNA, 122 bp, Homo sapiens
gatggtcatgtagcggtgcacaatggatgaaggctgctctcgacatagagggttggaggccgggcagagacagcggctagagaccccgaggtgggggacacaaatgagctccttgcccgtcc

SEQ ID NO: 156802 - DNA, 122 bp, Homo sapiens
attgcctttgttctgttcgccgctggttttaaaccagcttgctgtgtgcatctcagacgtcggttggtacgtcctccgctgttcttcaggaaagcgatagcctcacctatttgaaacaagcc

SEQ ID NO: 156803 - DNA, 122 bp, Homo sapiens
ccatccatgttgttgcaaatgacagaatctctttctttatatggctgaatagtactccaccgtgtatatgtaccacatttttcttatccatttatcggttgatggacaacttaggttgattc

SEQ ID NO: 156804 - DNA, 122 bp, Homo sapiens
ccgcgggacccggacggaggtagaggccagggcagcgcgtccgggagcggagtccgcgcccgccgccgccatgccggacagctgggacaaggatgtgtaccctgagcccccgcgccgcacgc

SEQ ID NO: 156805 - DNA, 122 bp, Homo sapiens
ggtctcactatgttgcccaggctggtttggaactcctgggcccaagtgatccactcctctcggcctctcaaagtgttgggattacaggcgttagccaccgctcccggcctgttagtgttttt

SEQ ID NO: 156806 - DNA, 122 bp, Homo sapiens
gccgcgccgcccccgccgcccgcgctccgccctgggcccggcccgtctcggcgcccccgccgctctggccccaggcgcacccgcgccccgctcacctgacatctcgtcctcattctccatct

SEQ ID NO: 156807 - DNA, 122 bp, Homo sapiens
gacccagaatcaggtcagaggactgactccaaatactgtaatgtgcttggatgctggtaccggtatcaagaggctcagaggaacattggatgtgtctgtccctagtaatgacagcacagtca

SEQ ID NO: 156808 - DNA, 122 bp, Homo sapiens
tgcatgcggtactacggcatctgcgtcaaggacagcttcctgggggcagcactgggcggtcgcgtgctggccgaggtggaggccctcaaacggggtgggcgcctgcgagacgggcagctagt

SEQ ID NO: 156809 - DNA, 122 bp, Homo sapiens
tggtggtcagcctcacgctctcatattccatgtgatgatgcaattttgccaatcaaaggtcgcagcagcaggactcccctgacgtataggagaagtagccagagctcttcatcccctgccag

SEQ ID NO: 156810 - DNA, 122 bp, Homo sapiens
catggggcctgtcctccagttcctcatccaactcgcttggaaagagtcctttgcaaccctcgtcttcctcctcctcttcttcctcctcctcttcttcctcctcctcctccgcctcttcctcc

SEQ ID NO: 156811 - DNA, 122 bp, Homo sapiens
catgcagagtgggctgaccatggggctgccagcaatgacatgatcgtgggtcctgacactcgttctcatagttttagctctaatttgggtcttgttgtggtaacaaaagttgaagcccatgt

SEQ ID NO: 156812 - DNA, 122 bp, Homo sapiens
tcactgttgtatctgcctggggcagagtctggcagtagtaaatgcacaataaatccgaggcggaatcaatgagtcttggctctaggggcagacaagtaactggaatctgggcaggtggtttc

SEQ ID NO: 156813 - DNA, 122 bp, Homo sapiens
ggaagtgatttgagggtctttgttccaagaaaggcggtgctgggcccggggactggaactcggtaggcgaggatcccctttgacgcccccctacagtttcccttcaaacacgtaggtctcag

SEQ ID NO: 156814 - DNA, 122 bp, Homo sapiens
gccaatcagtagcatgggacaaagtaagtaaaggcatgaagaaacaaacaagcaaattcacgaaaacagaagtgcttaaattaaccaagtgacagtttgtgcatcagtctcacaatggctgt

SEQ ID NO: 156815 - DNA, 122 bp, Homo sapiens
gcaggtcacttccagttatgggacttccgcccactgtgagcttccccctctgaatgcaaccgggttgtccaccccttcctccaggctgcgggaaaacggcatgagcccacaccttcatccct

SEQ ID NO: 156816 - DNA, 122 bp, Homo sapiens
gattgctccagttgccagggaaaccaaccggcggcgccagaaggtgacgccatcgatgtgcgcccgcctcccagccccgccccgcccgggccggtcccgggaagggtcaaatgttctcttgc

SEQ ID NO: 156817 - DNA, 122 bp, Homo sapiens
tttgtgtcttcgcacacaggtagaacaaacaccaacactgttcttcccctccatcactgacgggaatggcaaccccagatccagctgggacttaccttgcactattaggtgaacccgggacg

SEQ ID NO: 156818 - DNA, 122 bp, Homo sapiens
cagtagatgaataatttaatggtaaatgaagcagactttttaatgttgatgctattaaggcgaaggttcatcatagaattcaaggaggtgggaagacaaggttcttctttgtttggaggcca

SEQ ID NO: 156819 - DNA, 122 bp, Homo sapiens
gctgtgagctgcactctcacctgccagctgtgttgttagcggcaagttgctcaatctcaccgacattccatttcctctgctacaaaacggggatcatttctacctgtcagagcacttggcac

SEQ ID NO: 156820 - DNA, 122 bp, Homo sapiens
gccccgaacccctgaaaagtcccagagaaggtaagctgggcgtccagagtccctcccaggcgccgccgcagcgtcccgcccagcctcgcggggcacgccgggaggcggagttctcggtcgtg

SEQ ID NO: 156821 - DNA, 122 bp, Homo sapiens
cttcaacatcactttcttgtctggaagaggaggataagagcagttcctactccacagaaacgtcgtgagatacccaaatcacacagtgactgaaatctagtaagtgccaaatatgctaggta

SEQ ID NO: 156822 - DNA, 122 bp, Homo sapiens
ggtctttcttgctggacggaggcacaggtgccagaatctatcttttgccctacagtgtcccggcacagcctagatctatggaccccttcaccgggtgctttatcccccaccccccagaactc

SEQ ID NO: 156823 - DNA, 122 bp, Homo sapiens
tagaagaattaagagtcacattggtatacgctgaaatagtaagggaatatagcatactggcggggcaccaataatatctgctacaggtggctttggtttaccacaagctcatgtcactgaaa

SEQ ID NO: 156824 - DNA, 122 bp, Homo sapiens
aatcacagatattttcatatcacattacagttgatgcagatctcagaatatggctattctcgtcactaatttgaaattgtccttgttgttatcgggcccacctcaagtcttgtcattacatt

SEQ ID NO: 156825 - DNA, 122 bp, Homo sapiens
ccctcggcccccaggggccagcaaggggggccggactcctccacagcagggaggccgggccggcatgggccgagcatcgcgcagctgggagggcagccccggggagcagcctcgaggaggag

SEQ ID NO: 156826 - DNA, 122 bp, Homo sapiens
gagaggcccacagcccctttccccacgctcctcctgggttagagggatgccaggtaggggcggtcaccagaggccccttttctctactctcggcgccgggttccagcccccgttggggcggg

SEQ ID NO: 156827 - DNA, 122 bp, Homo sapiens
agctgagagcgtccccaaatgctgagcagagccggctggcctgggtggggcttttatacccgccacatcctccctaggcgaggcgaggcccgccccgccccgccccgcctcccccttacacg

SEQ ID NO: 156828 - DNA, 122 bp, Homo sapiens
gggcggggaagaggaggcaaggtgagcagagaagccccctgcgtatccggactgccagatcgcgcttttgccggactcctgccccctccctgctcaggtgggcgcgcccggtctccagctca

SEQ ID NO: 156829 - DNA, 122 bp, Homo sapiens
cgcgccgcctcccagtccccgccccatccagccccgccgctctggtcccgggataggtggcgcctggggctggggcgcatccacggccacccccaccccggacatcggccactgttggcatt

SEQ ID NO: 156830 - DNA, 122 bp, Homo sapiens
aaagtgctgagattacaggtatgagccactgtactcggccagaagtcacttcttttgcttcgtttcctcactctgcccacccactatgcagatagtatgcacacacacacatgcatgcacac

SEQ ID NO: 156831 - DNA, 122 bp, Homo sapiens
tcgtgaaacgccgcacgggggaggggtgagaagggccgagaaacgcggaggtggtgtgaacgaatggaacagcagccgctgtgtcactgagtattacatcacacccagcctacacacgcacg

SEQ ID NO: 156832 - DNA, 122 bp, Homo sapiens
ctagagctctgcaccttcagcctcctgtctgattctcgccgggatcagcctccgcgcagccgcccaggttccttgcagggtggaccgtcccgtgtcccagcaccgggccctgcccacggcgt

SEQ ID NO: 156833 - DNA, 122 bp, Homo sapiens
tgcgtggtcttttcagtgaacagaggggcctggatggcgcctggattcccgcgatcattgcgctgggaatggaaaagggctgggactcgctagaagtcgttctgacctagcagcggctaaaa

SEQ ID NO: 156834 - DNA, 122 bp, Homo sapiens
ccctttttcttatcctggtagcaggctatggaactcagtcaactccccagggatatggctcgactggcggctatggcagtagccagagctcccaatcgtcttacgggcagcagtcctcctac

SEQ ID NO: 156835 - DNA, 122 bp, Homo sapiens
acttgtgggccgagaaactgtggcaccctaatgagctagggctagacgcttcgaccaccacgccaagtgattctgaagatctctaattctgtcaaggcgagagcgctccaacacgtgttcat

SEQ ID NO: 156836 - DNA, 122 bp, Homo sapiens
ttggaaggaataaagtgacattcctggttcacctcctgactgctagaggtaggtgccacacgtgtaaccacatacatcatatcccacattcagaccaagcaagcccaaggagggatggggtg

SEQ ID NO: 156837 - DNA, 122 bp, Homo sapiens
caccgagaacccctgaacgactactcccggggctccacatctgggaggaccagacggaaacggcagcagctttgctgacacaactgtgccagccaccacggtgtcatcctgagccacttctc

SEQ ID NO: 156838 - DNA, 122 bp, Homo sapiens
gcactgctaggggcacagctggtttggcaagaaaaacgggggccctgtcagttgccaggacgctagggggcaaggtctacaggcggggctcctggaaataaagactccgagaggcggtgcgg

SEQ ID NO: 156839 - DNA, 122 bp, Homo sapiens
gagcggaccaagaagacgggaacagcacggggccctgggagctgcaaatgcccacgataccgtgagagatggagaaaggtatgacaggaggagcagaccaagaagacgggaacagcacgggg

SEQ ID NO: 156840 - DNA, 122 bp, Homo sapiens
gactgggcgcttaccctaccccgacaccaggaggatgccagtctacgcctcgaaacctcgcgcccagacaacatctccacgagactccctatgggggtgcgtgtgcactgatctgtgacagc

SEQ ID NO: 156841 - DNA, 122 bp, Homo sapiens
ccgaccagcttcccggctcggccccgcccggtccgctgcgcccgcgcccgtccccgcccccggctccctgacgcccccggcctggagacgcaacccgacgcgcacaaccccagaccctgcgc

SEQ ID NO: 156842 - DNA, 122 bp, Homo sapiens
gttagtaaggggcaggactaggactcaaagccaagtttatgaccaaattctggtgcactacgttctcctgcttctggagaagataatgatgctgaagattctacttttggtgtaaaggagta

SEQ ID NO: 156843 - DNA, 122 bp, Homo sapiens
gctgctgctcctcctcctcgtgctccttctcgccgcctacttcttcaggtaggagtgtcccggggcactgacttgccccaaccagctcagaggaggaaatgagccttctgatgctgtgggcg

SEQ ID NO: 156844 - DNA, 122 bp, Homo sapiens
acatctgcacatacagagggtttcattgtaatcataaaaattgttttgcatttatttcatcgttagttaaaaagagactgtattggcaaaataatactttaaatcggaaagcattactgcat

SEQ ID NO: 156845 - DNA, 122 bp, Homo sapiens
cgaagaagacctgggagtccgccggggaacagagtcgcgggagagagacccaggacgacacgccaagacgggggtgggggcatattaggagggaagtgggcagagacccagagggaggacag

SEQ ID NO: 156846 - DNA, 122 bp, Homo sapiens
tgggtggctgcaccagaagtcctggctcctcccgggctgaactcgaacctggctcggatgcggcggcggcggccctgtcaagccccgcgcaccctccccagcagcctccctatcaagcgtgc

SEQ ID NO: 156847 - DNA, 122 bp, Homo sapiens
ctgaaggtaaatttaacatttccaactccggaggaacgcgagcggtagacgccaagcatccgcccactgtcctctcgtgactcgggctactttgacgcaccgggatgcggctcacctgacat

SEQ ID NO: 156848 - DNA, 122 bp, Homo sapiens
ctggaaacacattggggatggctgctgcctcaccagagagacctggaaggatcttgagaacgcccagttctccgaaatccaaatggaacgacagccccctcccttgaagtggctacctgttg

SEQ ID NO: 156849 - DNA, 122 bp, Homo sapiens
gctctgggagacctggaagagaataagagcgtctcaggagcgctgagctggtgctggcttcgcgagccacgccacgaagccaggtaaacacaattgctgctgttctcattttataggtggga

SEQ ID NO: 156850 - DNA, 122 bp, Homo sapiens
ctctctgcgtactgattggaacatccgcgaaatgatacgcctctctgcaatgctattggtcgaaatgcatgtcaatctcccagcgtctttatccgtgttccttgactctgggcaacttaaaa

SEQ ID NO: 156851 - DNA, 122 bp, Homo sapiens
gggtgggtccatagacagcagggagccaggggatctgtgggcaggtggcaggcggcctggcgggcccgcgggtgatgggcttggcctgatgctgtgtgtggctgcagggccgaggccgttcg

SEQ ID NO: 156852 - DNA, 122 bp, Homo sapiens
aaggagaatgtcctcacagtgacatctggtcatctctggatttccttcatgagttggggacgagcacactaaggcacgagtcaccagcgaacacgctcggcacgatgaagtcgtcagttttc

SEQ ID NO: 156853 - DNA, 122 bp, Homo sapiens
tagaccagagcgaattcatcctgaagaactcagagaaagccggtgcaggaagtgggttcccgctctccctgcacaggcacagtgatgctgccagagctctcccagaaagaccaggaggcttg

SEQ ID NO: 156854 - DNA, 122 bp, Homo sapiens
gcggaacttgaaccgtgtccctcctaaacctgccccttgtccgccgcaacgcgccctcgacgcgcacaaaaccctcactttgctactgaggaaagttattcaatggccagagacaccctgcg

SEQ ID NO: 156855 - DNA, 122 bp, Homo sapiens
gcagcaaaccagacagcccagacccctcctgcccatacctataagtccccagcctgtgaacggcagtgggctctggcattaagctgcaccccccacctctgcaggtttttgcaatatacttg

SEQ ID NO: 156856 - DNA, 122 bp, Homo sapiens
acagttctgtccagtctgcttcaggaacatatgcatagctgtctaccacagcgatgtatgcggagaatgggtagcaggtgctgtactgagtgctaaacttgatggaagttaactgcaatttt

SEQ ID NO: 156857 - DNA, 122 bp, Homo sapiens
attgacatttattgagctacagctattaatatttcggtgcattgagccacgtcaatgcaccggcatggtcttagactatggatttatgtgcatttatttaatccaagtaaaccaagtactat

SEQ ID NO: 156858 - DNA, 122 bp, Homo sapiens
caagtgagcctgcggtgataattgcagtgtgattttgcagcttctttgcagggtggcatccggctctggtggtgacgttttaaagacgaagatcctgcgtgtacacggctgtgaggcagaca

SEQ ID NO: 156859 - DNA, 122 bp, Homo sapiens
acgcctgcaaatggatgattggcattaggtcagtttctaagcatttgtgctgtacacttccgtactttgtttctggtattgaaagaaaaaaggggaaaaaagtggataaatataaaacaaga

SEQ ID NO: 156860 - DNA, 122 bp, Homo sapiens
ttctcgcttggtacagaccggcttctgtgagtggcaaaaaaatggctatggcaaggttctcgtcactagtttgctccttttcaccaatcttggtcttttctattttttctcagcacatggaa

SEQ ID NO: 156861 - DNA, 122 bp, Homo sapiens
gaaaggatgtaagaagccattaccaaggtcattattatcagtccaaaaacgaggctacatcgcttcccctttttgaagcgcaaaaacccaccccagttttcgttcccttcagtcctcacttc

SEQ ID NO: 156862 - DNA, 122 bp, Homo sapiens
ttgagtgggattttgcggagtggacttttgagtagcaccaagaaaggacagccctagggccgtggaggaagtcagtgggacaggacgcctttgttcacacagaaggcttttggctttgtgta

SEQ ID NO: 156863 - DNA, 122 bp, Homo sapiens
tttttctttttttcctgaaagccagttggaaactggaaatctgctttggcgagttctcgccgctcagcaaagctcgtcagcaaagcaaaactcggccagtgcagctattttcgtaggtcggt

SEQ ID NO: 156864 - DNA, 122 bp, Homo sapiens
ccgtctgcaacgcgcacgtgctgtgcatctccagcatccccggtgagcagctggagtgggcgtttccactcgggcgccactcccttttactagcaagctaagtaaaagccctgccacacagc

SEQ ID NO: 156865 - DNA, 122 bp, Homo sapiens
aagagctgaacacgcggtttctggtgcagagcgccgagcggcctggcgcctccctgggcccgggggctctgctgcgggcggagttccatcagcaccagcacacacaccagcacacgcaccaa

SEQ ID NO: 156866 - DNA, 122 bp, Homo sapiens
gtccctcagtgtgaattgtccatgggggcgcggtggggacacacactagtgcgctggcttcgggcagctgaaggaggtagtctccgagagtttttagagtcccctccaagggaaagcttgga

SEQ ID NO: 156867 - DNA, 122 bp, Homo sapiens
atcccaatcatgctgggcaggaacaaggaaaggaaacaacccagcatatggccctgataacgtggcccacatggcttagggaaaaaggtagagaagggaaaggagcaaagcaaaaggaacag

SEQ ID NO: 156868 - DNA, 122 bp, Homo sapiens
aatgtgcactttgacatcacccacgaggcagcggggctttgagataagaggacggcctcccgcgctccggtgcctgcggccgaggaagaggacggcctcccgcgcgctgcctgctttctcag

SEQ ID NO: 156869 - DNA, 122 bp, Homo sapiens
gacctctgacccggctgtcaggtcccgcgggcacggacggcgccggggcagggatgcgcccgcagtgcgcaccgcccggcccgcgcctccagcagcctcagcgcctccacactgcgcatgcc

SEQ ID NO: 156870 - DNA, 122 bp, Homo sapiens
ggaagtcttgggctcaagagatcctcccacttcagtctccacagtagctgggattataggcgtgcctcgccatacccggcattcaacccttaaatttatttcatgacatttgatatacttta

SEQ ID NO: 156871 - DNA, 122 bp, Homo sapiens
gtaaacccatgtgtctttatggaagtaaagaattaactttagaaaacaactcaaaaggaacgtgtgcaagggaagcttgaaaattatttatcagaaagatacccaaaagccagcattacttt

SEQ ID NO: 156872 - DNA, 122 bp, Homo sapiens
catcccggggcggggcctggtccccagctgtggtcgcttcctaagcggcgggggctgagccggcggcgcccagatgcggccgcggcggcgcggagctcgggcggccgtggaggaactcagcc

SEQ ID NO: 156873 - DNA, 122 bp, Homo sapiens
cccaataaatcaaagaagggctgagaatcctgaccaccacccccagtaaggatcaagttccgctttctggaagaggcctagaggtggattgcaggacttcccagtttaaccaggtgacaaag

SEQ ID NO: 156874 - DNA, 122 bp, Homo sapiens
gaataaacagtgcctccagggcatgcacacacacgtcaaataagcagccctccttagccccgcaggcacccatgtccatggatctcagagcttctttatctggcatatgcagactggcccct

SEQ ID NO: 156875 - DNA, 122 bp, Homo sapiens
aaaaataaagtgacaaatactggtggagaccagttgttgcactgtcttctgttaaaaatacggaccaagggcatagaaagtctcctcttcagcaggtcctgcttcacaggatgtctgcccgc

SEQ ID NO: 156876 - DNA, 122 bp, Homo sapiens
acctgttgcatatgggcgctcccgctgatgcaaaacggcgttctgaacagggaaggcatgcgtgctgcgcagcagggctcccgcagcggggtgtgggttcagggtgctggacttcaaaaccg

SEQ ID NO: 156877 - DNA, 122 bp, Homo sapiens
tcctcacaacctcttccctcaaaaacagactcggcaaagttagcccggataaacctgccccgtcgccccagcgcctcgcggacgctcccctcccaccttcaggaaacgcgcctagaagaaag

SEQ ID NO: 156878 - DNA, 122 bp, Homo sapiens
aggttaaataactggcccaaggtcaaaaataattagaagtggctgaattcaaaagccgcgcgggctcatcaggctgcagttggggtaaaatttgcgttttaggcaatttttttttttttttt

SEQ ID NO: 156879 - DNA, 122 bp, Homo sapiens
cattccactgaaagacgcgtggcccttgggccctgcagctcagcgttgtccccaagaccccgcctcctttcgcaggctcctgggacacccactgggcgtgcaggtccacacgcccccatcct

SEQ ID NO: 156880 - DNA, 122 bp, Homo sapiens
tattgacctgctgctaacttacctgccagggtttttccaggaacagtcagtgttagatcacgtttacttctgccacttgccaccagccacactgccttcaccgagtccaagaccctatcacc

SEQ ID NO: 156881 - DNA, 122 bp, Homo sapiens
acagccttgatttatcagcatatgatatacataatggttgtctcagctgtccccaggcaacgctaggaccttagaacatcacaataatatttatcccattttcaagcacttgtgtttattta

SEQ ID NO: 156882 - DNA, 122 bp, Homo sapiens
ctgaggacaatgcgttccacacccgctggctggctgatgtttgattctgtaactataccacgcccagaattctctcaaaagggaataaaacacaggtcaaattcctcacccacacactccac

SEQ ID NO: 156883 - DNA, 122 bp, Homo sapiens
cagagacttgaaccggctcccccaggacctgtaccacgcccgttgcctgtgcccgcactgcgtcagcctacagacaggctcccacatggacccccggggcaactcggagctgctctaccaca

SEQ ID NO: 156884 - DNA, 122 bp, Homo sapiens
cggggcagagaagagtcggcaggcagcacgtggtgagtgcgggaaagccacaggcggctccgcacaagtggtaattaatcaatctggagaattagctcccacaaaagcaaaggaggatccaa

SEQ ID NO: 156885 - DNA, 122 bp, Homo sapiens
ccatggtctctctcagggtacattgtaccagatccacagtttgcagggctgaagccaccccgggatcatctgggcctcagttccaaaaactgtttgctactatactcaacacaccacctcgc

SEQ ID NO: 156886 - DNA, 122 bp, Homo sapiens
gagcgcaaaccccactgtgaacggcacatgcaggatctaggtggcactccgtatgagaatcgaatgcctgatgatctgaggtgggacagtttcttcccgaaactacccccgactccggtctg

SEQ ID NO: 156887 - DNA, 122 bp, Homo sapiens
agggagggcgcgggatggagggatcgcgggggtcccaggacggagaggtcgcgccgggcgcgctcggaacacgcaggaaattctccccgaggcgtgggctccgcggggcttccccgccggtt

SEQ ID NO: 156888 - DNA, 122 bp, Homo sapiens
cgctctgatgcgcccgtctctttggccgggcttgggttgcggggcaagcgttctttgtttcgctcttggttcctaaagcctcggtgaagtggggggctggctgcgacccgcaaacgtccaaa

SEQ ID NO: 156889 - DNA, 122 bp, Homo sapiens
tgctgctggctcgggctggactcgggaagccgggtgagctcggggcgctacaggcgggaccgggggcagcgaggaggccgggaggtggaggccgcgagggtcacttcttgtgtcctgcagag

SEQ ID NO: 156890 - DNA, 122 bp, Homo sapiens
ggcggcggggactccgggcggggcgcgcagtcacgggacccggcagtgcccgcgtcaccgcgtccccgccctgcctcccgctgccctggcctgccccctggtggcagcggccgcgcagttcg

SEQ ID NO: 156891 - DNA, 122 bp, Homo sapiens
aggctaggtttgtggggtaagttggtatacggttcagctagcacactggcattttctctacgttctcctacctgttctcagcaaacaaatggcaattggtcatgctctgggcaatttactga

SEQ ID NO: 156892 - DNA, 122 bp, Homo sapiens
ccactgggggtagaaatactcctgtgacattgttgttaatatccaggggcaagaggatgccgttactgcaaatagtgcagaggatgtacacccgtctatgacatagctggtaatctccagag

SEQ ID NO: 156893 - DNA, 122 bp, Homo sapiens
cgaaccccgcccgggagccagggtttgcaaggggctaaaccggctggggagcctccctctcgcgggtccagcctcggcggcccgggacgccggtaggcggggcctgagcctcgccccgcccc

SEQ ID NO: 156894 - DNA, 122 bp, Homo sapiens
ccggcccgctctggcggcactgggggctgggctgtgcggcgcattcttttaaaaatcaggcgagccccgcgggcactcgaaggcgcctcggggccccgggccgcccgccccgcccccaccgc

SEQ ID NO: 156895 - DNA, 122 bp, Homo sapiens
ctgccagtgacatcagccggctgagccgtgcaatagagagcggcatcatccctcacagaacgggggaggagcaggaggggacgacagggaggagacttgcctcccagggaaagacagcacaa

SEQ ID NO: 156896 - DNA, 122 bp, Homo sapiens
cccgtccgagggcaccaaggagcctttgcctttggcaaacatggtttgcagggaagagggcgcccagcctccccacagccgccaccgctccggctctcccgagctgcccctcgcccccggcc

SEQ ID NO: 156897 - DNA, 122 bp, Homo sapiens
cagagagcggcagccccgggggctattgtgctgcctgtgggcccccaaggggaacagatccggaaccctcctcccccaatctccttaccacccagcagggctagccgtgcctctccctggaa

SEQ ID NO: 156898 - DNA, 122 bp, Homo sapiens
ggcgcgaacgcggctccagggccgggtgacatatgtttgcgctggtggccaagatttaggcgatttttcttccacgcgttcaaagttgctcttaggtttcctccccttttaacaacagcagg

SEQ ID NO: 156899 - DNA, 122 bp, Homo sapiens
ccaagtcggacttggaaaccggccacccttccccctctggggcgggagtggccactctcccgggcgttccgaatgacctcaggagggctgcatcgctcagcataactaaggccagcattacc

SEQ ID NO: 156900 - DNA, 122 bp, Homo sapiens
gccggctagtcagtcccctgacccggaaccgcactggtgccgccgctagccggctgcccacgtgcctgcaacagtggccacgtggggccctgaggaaacgcctttacaaaggtttgtcccct

SEQ ID NO: 156901 - DNA, 122 bp, Homo sapiens
aactgcggagagttttgcgtgtgaacgtatgcacagacatctacatggaaatggctgtaacgcatccagccataaggcgtacgagggtatatatacttacagagttaagaaccactattctc

SEQ ID NO: 156902 - DNA, 122 bp, Homo sapiens
gccctccctcccgctggtcactcttctgtttctgcggctgtccctggacgctggaggtgccgggaggggaggtcgtgctccctcacagccacccctcgccccccaactcactcatgtgctta

SEQ ID NO: 156903 - DNA, 122 bp, Homo sapiens
gagactatctgaaacaaggcaggtgtgagggagtcaaaggcaggaaccccaagtctcttccgcaatgacagagcttctcagagtttcctgccatgatgtccatgagggacggccatgcatgg

SEQ ID NO: 156904 - DNA, 122 bp, Homo sapiens
acaagaacgttccctgccatcaccactaagtgttcagtggacgttttgggcttttggaaacggaagtgatttgagggtctttgttccaagaaaggcggtgctgggcccggggactggaactc

SEQ ID NO: 156905 - DNA, 122 bp, Homo sapiens
aagcgtacagtcgctgggccggggggtcggggacaatagggcgaggtcgcgaggtttggccgcactcaggacacactgggggactcttgcccgcctgctgctgctggttggggcggaagcgc

SEQ ID NO: 156906 - DNA, 122 bp, Homo sapiens
cgtggtctcggaggacgcggggaatcctgcgggcctcgagggtctggcgctcccgccagtcgcccagtcctaggcgacaggctggtttctcgggcaaccgagttgtttttatttacagggat

SEQ ID NO: 156907 - DNA, 122 bp, Homo sapiens
tcgttctcacaattaaaatgtattaaaacaaaacaaaaacaagtcatggaatctgtctcccgcttttcaaaagtgatgtgagttccctgaaacaagatcggtgagtgccacatccgccccag

SEQ ID NO: 156908 - DNA, 122 bp, Homo sapiens
aggccccagctgcacaccttctcaaactccttctcctggatgtccagcaggctctggattcgcttcatcacttctcgaaaatgctcgccctagaatggcaaaggacatgtgctcacacagtc

SEQ ID NO: 156909 - DNA, 122 bp, Homo sapiens
aaatataatgcaattttctcatttaagaactgaggcaaccgaggtcaaaagggaaatcagcgacatttctgagtttatacatgtagttaacggcggagcccagagtagaacttagaactctc

SEQ ID NO: 156910 - DNA, 122 bp, Homo sapiens
gtctgggtctagccctgtcctggggaaacaaaagggtatccacgagttgtagctaagtcacgtgggcaacactggttctttgcagcgaggcattttctgcaacacaaacaggtgagtggatt

SEQ ID NO: 156911 - DNA, 122 bp, Homo sapiens
acctgagagcaatgggataaggccaaagtcaaggtcaggctcaggggttttgagtgtatacgtggacttcctaagatacacttcgattgagttcttttattgcatcccctaggcaaatgcaa

SEQ ID NO: 156912 - DNA, 122 bp, Homo sapiens
ggagggcccggccaggagacccgctctctagagcggcgagggcaggggttgctagggcgccggggtcgaacccgcgcttcctgcaagtcttagggccgcatccctgccgaggcgggcgttgg

SEQ ID NO: 156913 - DNA, 122 bp, Homo sapiens
ttatgttcaccacaaagcaatcttactttggtgattaaacctgagagtgttaccactgctcgtatcaatgacaactaaaacatacatatggattacaatgttgtcagatgccctcttggaat

SEQ ID NO: 156914 - DNA, 122 bp, Homo sapiens
cccacactagttatttatggggaagttgtttttaccatgttgcctgtgaccactcagtaccggtacctgatgaatttgtggtaatgttgagaagttatggtgtttctgcagtttttcccagg

SEQ ID NO: 156915 - DNA, 122 bp, Homo sapiens
ggtacggtctggccgagccggggccccgacgggtgaggagtctgttggcgggcagagaggcggcctggaaggcaggggcgcggcgcgccggccgggccgggcaccaagggcactgggacgcg

SEQ ID NO: 156916 - DNA, 122 bp, Homo sapiens
ctgtcgctgcccgtaagagctcagtaaggaaaatgagggccaacccagaaaaatgaagaacgtgcctcaaaatcaggtcccaagacatatccccgcatccaatcatactgaatatttttttt

SEQ ID NO: 156917 - DNA, 122 bp, Homo sapiens
tgcgggtcgttcactcgctagcttacaggtcctctttcttcctgtagaagtcgttggcttcgtaagagcagggtctatgggaagcctcctcagcgtgggttcttggaagaggtggaggttcg

SEQ ID NO: 156918 - DNA, 122 bp, Homo sapiens
cctcatcctcttcaggcagcatttaggagaggacctctgagatcagcagaaggcctcagacggtcaccatattggtggaagcgtttgtctgatgttttaaaacgtataccaaacggggcgtc

SEQ ID NO: 156919 - DNA, 122 bp, Homo sapiens
gctgtaatcctagcattttgggcatccaaggaagatgcatcatctgagcacaggagttcacgaccaatatggggaaaccccatctctactaaacacacaaaaattagctgggtgtagttgcc

SEQ ID NO: 156920 - DNA, 122 bp, Homo sapiens
tctcacacgatcctcctgcctcgcctccgaaaactctagttttacagatatgaaccatagcgctagctcttactgtctttcttcaacacgtcctcccatccttccctcctttctccactctg

SEQ ID NO: 156921 - DNA, 122 bp, Homo sapiens
ctgaggctgccagagtggttgtgtctgttcctccggtaaggggtgattcgccgaggggcgcggaccagacagacctcgggtcaggcccgggaaccccgagaggagagcccagcccctggtgg

SEQ ID NO: 156922 - DNA, 122 bp, Homo sapiens
cgggcgtagccggcgtggggcagcagcagctggtcctgtgtgccgtcggggctgacaagacgctggacagccatcaggtagtcccggtggggtgccagcatcgggcaggggcagtggcctgg

SEQ ID NO: 156923 - DNA, 122 bp, Homo sapiens
cgagcaggagatggccatggtggcctccagctcctccctagagaagagctacgagctgcccgatggccaggtcatcaccatcagcaacgagtggttccgctgccccgaggcgctcttccagc

SEQ ID NO: 156924 - DNA, 122 bp, Homo sapiens
agcacatctgaaatgtttccagtctgagggtcacagtataacaaggacaaactctaactccgatcagaatgtgctcagaggagagaaaccaggaggttgaggcatttggcaaatctatgtta

SEQ ID NO: 156925 - DNA, 122 bp, Homo sapiens
ttctccctgctaagtggctctgagcccgggctatgagtgtgggacaagctgtcacacccccggggtcatcgtggggcaaggccatttcctggctttgcggggttcgtcttttggctttcgtg

SEQ ID NO: 156926 - DNA, 122 bp, Homo sapiens
tttctctgagatcctcctctagcaatgggctgacagtgctacttggaggcactgcagttgcgtcttttgatcttccatgcatccttctaaaggaggtactgtgttttaggaagatcccaaag

SEQ ID NO: 156927 - DNA, 122 bp, Homo sapiens
gtcagcactacttgcagagtaatcactaccacagaataagaacatcagacgtgctgaattcgtgaattcaacaaatacctgttgaacatgtactgtgtgcaagaaggcactgttctagtgct

SEQ ID NO: 156928 - DNA, 122 bp, Homo sapiens
ggaagcacgtgtcgctgtcgccacacgggccgggcccccacctgtctacctcacacctggcgctccggtcccaggcgcagcaccagctccacgcggccatgtttgccgcacccccgacactg

SEQ ID NO: 156929 - DNA, 122 bp, Homo sapiens
tctgacggggaaaggactgcgcccttttgctcctggttccagggagtcctgggcatcctgcggtgtcgagcaatagcctggcttcagagctgagagtgcctggggccacaggaaaggcagga

SEQ ID NO: 156930 - DNA, 122 bp, Homo sapiens
ggagacctagcggaaaccttcaggtcacccagggaactgctcctctctctggtcctgcagcggcgaggcggggtagggggtggggggggtgggccgtgagagcgccgagacgcgcggggcgc

SEQ ID NO: 156931 - DNA, 122 bp, Homo sapiens
gagggaattcgcagagcatctggcgggcaccgaggtctgggaacaggcctggaggcagctcggttcgtggagagagcgggctgcccgtgggccccaccctgtagggccccccagtagatctg

SEQ ID NO: 156932 - DNA, 122 bp, Homo sapiens
ctggccttcgcggaacagcgggcaagcaagaaggatgagcacgcagagctgattgtcctgcgcagaggagactacgacgcacccacccaccaggttcaggtgaggcaggaggtgtctgcact

SEQ ID NO: 156933 - DNA, 122 bp, Homo sapiens
cagggtgagtttctcacaatgtagcaatttctctttaaatctcttaactctctctacctgcgagtcggggctgtgacagggcgcaaaagcgaggggggagtgggggttggcggcgagggtgt

SEQ ID NO: 156934 - DNA, 122 bp, Homo sapiens
tgtttcagtactggtcgtggcctctagcaatacaagttttggtcatgggatggcataccacgaaaccttgtattacctgagcctggatcacaagtgacaagggatggattcaaacacatgtg

SEQ ID NO: 156935 - DNA, 122 bp, Homo sapiens
tgtatgacgggggagaggccttaacattcgcggtcttacctggttccccgcgtgcagagccggcttggtgcctggcaggggctgcaggtgtttcaaacatgacttcgcagcgagactcttgg

SEQ ID NO: 156936 - DNA, 122 bp, Homo sapiens
gcaaagacgcctgcgatttcctttggtctacagttctgtcctagacttcgttcggctgatcgatgaaggagacaagctggcccacggggaggtcaatacaatcgatgcggacctcgacgaaa

SEQ ID NO: 156937 - DNA, 122 bp, Homo sapiens
ttgcaggcagcttttgagaactgcatcggggttaaacggcagagatcctgacgacctgggcgaccgtccctgcgcagcccggcgggaggctgcgcccagaatcctgggctttgggcctctgg

SEQ ID NO: 156938 - DNA, 122 bp, Homo sapiens
cctcatagcgccgaaacggaagcagaggttatctctggactcctggaggcctggggactccgggaggggagggggcgtgtggtcccgccggcatctcgggccggcaccaggctggggagcgt

SEQ ID NO: 156939 - DNA, 122 bp, Homo sapiens
cttctccattaagacctcaagatgtttggtgaagtgagcagtttgttctccgaccaaacacgcattgattgagcacttggtgtgtgcctagcactgtgcttggctgtgcgtgattgctgcct

SEQ ID NO: 156940 - DNA, 122 bp, Homo sapiens
ttttccaaagttaaaatgctttctcatcagggttcttattacaacctgcatgcatcctcccgataaccccagttgcattgtttttatcacagtgcctagcacatggtacttaagagttgtgt

SEQ ID NO: 156941 - DNA, 122 bp, Homo sapiens
ctttttctcttattggacaacttgaatcgtcatttgccgttccgattggtcatccgtgatcgtccggatttttccaattggcgaagctgccaggggaattttttttttttttttttcccagg

SEQ ID NO: 156942 - DNA, 122 bp, Homo sapiens
ccgtcgcgggcttctggtccaatcaccatggtctccccgcccacccccattgctccgccccgggggtcattcattggccaatcattgtacgaagctcccacaccagctttctcggttggacc

SEQ ID NO: 156943 - DNA, 122 bp, Homo sapiens
taggaggggcggaggctgagcgggcgaggcccaggcgcgcatgctcgggcgggtaaaatccgcgccggggacagtcagggatgctcccaggcccttcgctcttgctttcagctagtcattgt

SEQ ID NO: 156944 - DNA, 122 bp, Homo sapiens
agagacaagaaaagctaccacggtggctcagtgaaatttagaccttcaagtcctgcattccgattcttcatcctacactttccttgtcaataccctaactctcacataaaagatctaataaa

SEQ ID NO: 156945 - DNA, 122 bp, Homo sapiens
ccttttatttttacctgccacccagcatctcccccacctgccccttctgggtgacacagccggtaaacggaatcacgtatggttctttctgtgggtctgtggcacagcaggaagagcccggt

SEQ ID NO: 156946 - DNA, 122 bp, Homo sapiens
tgttctagtccgaggggcggcgaagcctctaggccggaggctacaggcgggcgccgctgccgacctccaggagaattttaagggctctccgagcataacgcttccctgcccaccaccccgct

SEQ ID NO: 156947 - DNA, 122 bp, Homo sapiens
gtgtcagtgtgtgagtttgtgtgtgaatgtgtgagtgtatttcagttgtatatgtaagtgcgttgtgtgaatttgagtgtttcaatgtgtgaatgtgtatgtgtgtttgtatcagtgtgtgt

SEQ ID NO: 156948 - DNA, 122 bp, Homo sapiens
gtggaatttgaaggctgggatttgaacccaagtcttctgggaggtgagtcagacgccttgcgctcttcccccactgtgcctggagaacgttgctacctagggtccatgctgacaagtttata

SEQ ID NO: 156949 - DNA, 122 bp, Homo sapiens
gaccccagtcctccgggctaagcaggttgtcggtgaagaaacgcgtcgggtcagcaatctcgctgagcagcatcagctccgccatctttcccccccaccccccaaccaggagacggttccca

SEQ ID NO: 156950 - DNA, 122 bp, Homo sapiens
accccggaggccacaaacggtacaggaacacagccaggagtcacgctgcacacccccacccgtacctgaggcagactgggattgaaattttatttttaaaaggtaaagctgttttattaaac

SEQ ID NO: 156951 - DNA, 122 bp, Homo sapiens
cttgagtgggtggtttatgactgctccatcttcatgttcttccagccttttttggttccccgaaatttcctgtcaggaaatttaccaacgcggaaatttacccacttctgtcagaaaactga

SEQ ID NO: 156952 - DNA, 122 bp, Homo sapiens
ccgcccggcgtgctgacgtcacggcgctgccccagggtgtgctgggcaggtcgcggggagcgctgggaaatggagtccattagcagaagtggcccttggccacttccaggagtcgctgtgcc

SEQ ID NO: 156953 - DNA, 122 bp, Homo sapiens
aagaggtactgtttacggagcgttcagccgtgagcccaggcgcaggcgcggagctaaacccggaggtgaagcaactacagctggggccacgcccacagactccgggctgtcggggcgggcgg

SEQ ID NO: 156954 - DNA, 122 bp, Homo sapiens
ctgcagccacacgcacctcctggttgcccctcagatgtcttggttctgtctgtctgatgtcgccagcctccacccggggcctgtgagctgtgcatgtcttcaagctctttgttactattcct

SEQ ID NO: 156955 - DNA, 122 bp, Homo sapiens
aggatttttttttttttttgagtcagaatctcagtcagtcacccagcctggagtgcatggcgcaatggctcgctgcaacctctgcctcccgggttcaagtgattctcctgcctcagtctccc

SEQ ID NO: 156956 - DNA, 122 bp, Homo sapiens
ccaggggaaacaagggacagagtggagtgtttgggagaagggatgcttaggtagattgcacgtgtggccaaaggtacatatgagaagggtgaatggcggacagcagaaacgttgcagccgat

SEQ ID NO: 156957 - DNA, 122 bp, Homo sapiens
gccccacccagccgggaaagcctgaggtccttgctcagtgactggactcacgggcttctccggtggtggagggcctggcccgggcgtaaatgtctgaggggcttactggacggcctgggagt

SEQ ID NO: 156958 - DNA, 122 bp, Homo sapiens
ttgggggatccaaactttaataacttttttcgtttttttgcgtcctcgacggcgtagaggcgggcgtttcgatctgcgcttggcgtcccccgctaatttcttgtttgttttctttccctcgg

SEQ ID NO: 156959 - DNA, 122 bp, Homo sapiens
aactaaaaggccagcggatggcctggtttgctgcggcggggaaacagtcacttcctggtgcgcaaggcgcctctactcccgccgcacgcgcagccaacccttggcaagcgcggcgggacacg

SEQ ID NO: 156960 - DNA, 122 bp, Homo sapiens
ggggaaaggaggggtttggttttgcagatgctggacctgggtgtctctgagaggtccagacggaaaggcacgtggcgggtggatttaggaggctgcagttcatggagaggtccaggcagcag

SEQ ID NO: 156961 - DNA, 122 bp, Homo sapiens
tgtcagtcatccttagaaggtttgggacctcgccccaactaatctgactttcgcctccaccggggccaccaaccccatctacaggagccctggggtcgcaaccgtaatggctggcctgtgag

SEQ ID NO: 156962 - DNA, 122 bp, Homo sapiens
tctgccccactcccacatggtggcatcacgcactgtcttaagtcttaagccagacttcaacgccttcttcacttcccataaaaccatcccagaggaacgcggggagcagcgtcctgcctggg

SEQ ID NO: 156963 - DNA, 122 bp, Homo sapiens
attccagctctggtctttctggctgggagccagttgaagagaaagtctgggtctgtgtcccgctgaccctgtatgcaaattcagcctattcatggcttgtaacaaatttactaagttgcaac

SEQ ID NO: 156964 - DNA, 122 bp, Homo sapiens
aggggggtgttgttgggagtggcaccacccccatctctccctgctcttcacagagaattccgtctaccaggaacggcaggaatgctatgcgttcaatgggactcagcgcgttgtggacgggc

SEQ ID NO: 156965 - DNA, 122 bp, Homo sapiens
tacgggataatagcttatctcataaggcctcagctttctttaataatttctagaagcagacgttattgtgtcatgcacactcagtgttgcaaattaatggtctggtgatctgggtggcatgg

SEQ ID NO: 156966 - DNA, 122 bp, Homo sapiens
aggcaataaggctagagaagtttgtaagaaacactatgccttggtaaaaacaaaacacaacgaaaaggctagaagagtttaataaggacagtgtggagtcagtcgctcaataactttttact

SEQ ID NO: 156967 - DNA, 122 bp, Homo sapiens
caaaaattgagtagtttaaaataagtatctatttattatctcacagttctgtaggttggacgtctggacacacttgactgggttctctgctgagaatctcacaggctgaaatccaagtatag

SEQ ID NO: 156968 - DNA, 122 bp, Homo sapiens
tggacccggaggcgacaaaccttggcaaaagtgcaggtttccgagagccgctggtacctgcggctgtggtcgccgaggggacacatgaggatgtcgtgggcctcacagatctccttgctgaa

SEQ ID NO: 156969 - DNA, 122 bp, Homo sapiens
cggtgagtgttacagctcttaaggcgggcgtctggagttgttccttcctccctgtgggctcgcgggctcgctggctttaggagttaagccgcagaccttcgccgtgagtgttacagctcata

SEQ ID NO: 156970 - DNA, 122 bp, Homo sapiens
ccggcccccaccttgccacctcccgccactcgcacccgtgtggacggaggcggccagcatcggcaggctgtgcctgaggtgctgtggtcttcacccagcgccttcacacagacgactcctcg

SEQ ID NO: 156971 - DNA, 122 bp, Homo sapiens
tttgagaagcggaccagcagagtctgggcctgcataagaatctgtcttgattacagaggccgaggagttaacacccagaggggaggtcatactgctggctggcttacctatagggagaggct

SEQ ID NO: 156972 - DNA, 122 bp, Homo sapiens
caaaaaggttggggatcactggtctaggagacataaataaataaaacagacaagtccgggcgcggtggctcacacctgtaatcccagcactttgggaagccgaggtgggcagatcacgaggt

SEQ ID NO: 156973 - DNA, 122 bp, Homo sapiens
gggccggcattcacacctcgggtacgttccgttggggccgggttggggtaggcggaggatcgggggtcctggactgggccatctgactccaagctgctctcctgcaggctccctcagctccc

SEQ ID NO: 156974 - DNA, 122 bp, Homo sapiens
agttttagaggagcaaaatgaaagatagcaaatttctcagctcaccagttcctaaagttgcgagtgcatccagatgattcagtgcagctcagtatgttccactctgggccacaagggaaagc

SEQ ID NO: 156975 - DNA, 122 bp, Homo sapiens
gtcctctcacccccaggacacattctggaaatataggagggcacagtggcctcctccctccggcttccagccctagttgagcacagcccttccgctggcgcgttgacctcaggcaccgcgca

SEQ ID NO: 156976 - DNA, 122 bp, Homo sapiens
agtgtcgtcacgggagggggcgggcccagagcgtgtcagtgcagccgaatcaaaacaagccggagacccgccttttccctccggctcgggagcgtctcgcttgcgccccgggcccgcggcgc

SEQ ID NO: 156977 - DNA, 122 bp, Homo sapiens
ggtccccccgcctcggcctgccaaagtgctggaattaccggcgtgagccaccgcgcccggcgctattattattaataactaagggaagcccagggaaaactcagcagaaatcaaggactctc

SEQ ID NO: 156978 - DNA, 122 bp, Homo sapiens
tgaggctcaggcaggagaatcgcttgaacctgggaggcggaggttgcagtgagccgagatcgcgccactgcactccaacctgggcaacgagcaacaggccatctcaaaaaataaaaatcagt

SEQ ID NO: 156979 - DNA, 122 bp, Homo sapiens
actctggacctgcccaccccagggacctggaccctgagaggcccaaacaggctgttgccacggacccctggctgaggctgctttcctgctggggactgtggccagagcccgtcctcctggct

SEQ ID NO: 156980 - DNA, 122 bp, Homo sapiens
tcaggagccaggttggagggactggaaagtcgggtgcggggaggctgaaagtgcatagagcgactttaagcagtgatggctggtggctgccccccgttggcccagcttggtggtctgcgggt

SEQ ID NO: 156981 - DNA, 122 bp, Homo sapiens
tgcacgccgcgcgccgcccgaagcccgcctccggctggaagctgctctctcgcctctggccgccggcgtagtacccgggcgagtggtcgctgggtaggtaatcgctctgtgaatattcctcg

SEQ ID NO: 156982 - DNA, 122 bp, Homo sapiens
tgtccatgtcaatctgtcatgattttaccctcataaaggcaaaatcaaaaatgattaacacggcttttctttcagcaggataatggcagtacttccacaaaatgaagcactgtaattgcaac

SEQ ID NO: 156983 - DNA, 122 bp, Homo sapiens
aaccagcctggccaacatagcgaaaacccatctctacaaaaaacaatagaattagctggccgggcgtgggggctcacgcctgtaatcccagcactttgggagaccgaggtgggacggttgga

SEQ ID NO: 156984 - DNA, 122 bp, Homo sapiens
ataatgacgacgtgattatgtatttatctcccctcaccagagctctggagggcaggaatccgagtaccacaatacaggatgcagagcaggcctaaaatatttatgggaaggatgggagccgg

SEQ ID NO: 156985 - DNA, 122 bp, Homo sapiens
tatcatataaaggaggacctgcagacccatgccgtggccagaggggctgggcatggccctcgcttcactttcccagaatgaattcatcatcctggcagtaaaagagaaaacaagaggtgggg

SEQ ID NO: 156986 - DNA, 122 bp, Homo sapiens
aggaggcaggaagagaaggaagaagctgcttcccctctcagcactttccaccccccaccccggcccctacctcaggcccctggggcccagcgaacaggatgaatgtgggggcagggaagaca

SEQ ID NO: 156987 - DNA, 122 bp, Homo sapiens
aaagaaaacccgccctgggaccttggctccatccctgagggccaggggaaccggcagcctcgagactgatccctcgccctggagatttttccaatcaggcaactctgaggacaactgcgacc

SEQ ID NO: 156988 - DNA, 122 bp, Homo sapiens
cgcgtgccgaggcgctgggcggcggctgtgtgagttggtggcccagacgaacagcttgtgcgagactctgggcatttcggtttctagatacaagatttgcttaaatgtcacagtccaaagaa

SEQ ID NO: 156989 - DNA, 122 bp, Homo sapiens
ttcctcacagcccagctccaggtcccaggagcaagtgctcaggagaacccaggagacagccgtgccggtgacccagcctggagtcgcccattccgcccccaccaaaggaccctgcacccagc

SEQ ID NO: 156990 - DNA, 122 bp, Homo sapiens
cacggagatcgcggtggccgtggacagcgccttcccactgctgcacgcgctggctgaccacgacgtggtccccgaggacaagtttcaggtgggctccccgcccgccccccgctgcccccagg

SEQ ID NO: 156991 - DNA, 122 bp, Homo sapiens
tccagtgactcttcctggtggcacccccacctctcgaccgctttgacgtcgagaataccccgggcctgactcagttcttgatggtgcttccttgaggatggtggcccgctgaactcatcctt

SEQ ID NO: 156992 - DNA, 122 bp, Homo sapiens
gattgagttcatcccccacaccccactctacccagtgctattatttgctgataggaggagcgttatactgactatgattggtctgtagcaattagctcaaattctcctctggcaggctggac

SEQ ID NO: 156993 - DNA, 122 bp, Homo sapiens
gcgcgcgaggcggcgcgggagcgcgcggagcgggtgcgcagaagactggaggaggcggagcgccacaaggagtacttggtgaggaagagtcctggaatggggctggacccagggtggggtgg

SEQ ID NO: 156994 - DNA, 122 bp, Homo sapiens
ggcatgccagggccaagtgccacttgctgctgctgttgttgctgaggagacagtaaagttcgactctggtttaaaaggcccatctgctgctgttgctgctgctgttgaaactgctgctgttg

SEQ ID NO: 156995 - DNA, 122 bp, Homo sapiens
cgggataagactggcaggactaagatgccagccaggctccgccccggaggcttggaagtgcgggacaccgagagcagggatgccgggacagccggcccgatccccggtgcggaaccaattgt

SEQ ID NO: 156996 - DNA, 122 bp, Homo sapiens
acaacaggaccagtcccctatcagggccaccactctaccgggctggggaggaaagcccttcgcagtcctgcgggaacaggaggcactcccacattgctccacttctctgtattccagtttaa

SEQ ID NO: 156997 - DNA, 122 bp, Homo sapiens
taattgctcataatgtaagttagttcaaaaataggtatgatgtgtacacacaccgctcttcgctcggaagcctctcttctgaaaagtaagggatgcagatgcggccaaagttgtttttccaa

SEQ ID NO: 156998 - DNA, 122 bp, Homo sapiens
ggtggggatgggggtggatccagaacccaggaggcggggccgaggaggtgccgggccccgcggaggcggagtgggacaaatccataacccaggaagcaaatctgtgtcgaagcctgggggcg

SEQ ID NO: 156999 - DNA, 122 bp, Homo sapiens
cccccccatcatccattcaacagagttcttcatggcccaggactggggcccatgtctgcccgtcccaggtggggcgtctggggtggggcccagtgagggcacctgggggaggtgcgcagagt

SEQ ID NO: 157000 - DNA, 122 bp, Homo sapiens
cgccactcattcagccctaccgggggcgctgtggcagccggcattggttgccgtgccctccgcttgtctcgctcagctctcgagccacacgccctgggctccgcccactccctgacaacatc

SEQ ID NO: 157001 - DNA, 122 bp, Homo sapiens
ttttctttaaaacatttttgcgggcctgaggtacagaatacaccatgcctgctgggcaagcgggctccggttccaggaaatccttcggtccccagcaaactaggccagttagttgttctgtt

SEQ ID NO: 157002 - DNA, 122 bp, Homo sapiens
cctttacatcaggtggagtaaaagaacaggtgtgtgaaagaaacagaatcaatcattaagcgatacttaaaccagtgcagattagttttaatgtaaatgttataataataatgctagtcagc

SEQ ID NO: 157003 - DNA, 122 bp, Homo sapiens
cactcagctaaggccaccacggtatatccacaaagccgtggtagcaggcgacatcaaggccggtctagccattgtggtcagtctcctgcgccttctcagcgcccaccccccgccgcaccaac

SEQ ID NO: 157004 - DNA, 122 bp, Homo sapiens
gctggtgccccttctatagtacaagggctggcagtgctccttctatagcacaagggctggcggtgccccttctacagcacaagggctggcggcagctgctgacttcaggcttccactcactc

SEQ ID NO: 157005 - DNA, 122 bp, Homo sapiens
catgaagatttagatttacatgttttcctaaattccctgtatgcaccagattattcatctcgtttagatatggtaagagcaaattcaaagtcacctcaccagagatcatgtcagctaagtgt

SEQ ID NO: 157006 - DNA, 122 bp, Homo sapiens
cattgttcttgatgaacaaaattcttagggcgtgaagagccgatgctttaattaaccccccgggagcgtctcaggcctccccccgggagcgtctcaggccccgtttacgctgagtgtctggg

SEQ ID NO: 157007 - DNA, 122 bp, Homo sapiens
tcagggaaagcttcctctttttgtgcacttgtttgtcctaaggccgttacaagtattgttcgttcattctgcaaatatttgttgaccgcctatgtgccaggccaacaaagtccctgccctcc

SEQ ID NO: 157008 - DNA, 122 bp, Homo sapiens
ctggcattctctgactgtcccctcccacttgcaggtcatttgcccaggcattggctatttcgagagctgtctgtctggagacatagggaacttagctgttaatggagggacaaatgccagcc

SEQ ID NO: 157009 - DNA, 122 bp, Homo sapiens
tttttcccggctgaaagcagagctttctctccctcttgcactccgggagtgtgtggctttcgactgcaagaccctgttgtacagacccaggcagcgcgaagcgccacccgctcatgagggac

SEQ ID NO: 157010 - DNA, 122 bp, Homo sapiens
gcatcttctggagacattgagcaactgggcgagtccactgcagatggaggcaagacctcccggcacaaagtgccagactgtgtgttgctgaagagccaatggcagcccgagtgaccagggct

SEQ ID NO: 157011 - DNA, 122 bp, Homo sapiens
tctcttttctcaggtgtcttccatttacaccaaggggatattctgagtgtcataattccccgggcaagggcgaaacttaacctctctccacatggaaccttcctggggtttgtgaaactgtg

SEQ ID NO: 157012 - DNA, 122 bp, Homo sapiens
tgctttattccagagcagtgccctaatgaccctgtctattcattcctgctatctgaatcccgtcttctgcttttcctttgagtcagtaagccatcccacatctcttccccagatttatgttt

SEQ ID NO: 157013 - DNA, 122 bp, Homo sapiens
tagtttccatcagatactcagcgggttctgtgacccaaataacaattgttctaggccgggcgtggtgtctcacgcctgtcatcctagcactttgggaggccttggcaatacagtgaaaatcc

SEQ ID NO: 157014 - DNA, 122 bp, Homo sapiens
cgtggcccagttcggaaacaatgcttggtgggaacctgcaatcttggctgccggaaccttcggggaggattaacgccggcgcaccgtgcggccggggcggggcgccgcccaaactcaggccc

SEQ ID NO: 157015 - DNA, 122 bp, Homo sapiens
tcttactccgtgggaaaatggccctgagcccgactggcttgaggcttagacaggtgaccccgcgaagcgggtgggcaggcgcggccgaggggcgggaggcgggcagcctccgtgattggccg

SEQ ID NO: 157016 - DNA, 122 bp, Homo sapiens
tgtcatctgcccacttgggcctcccaaagtgctgggattacaggcgtgagccactgcgaccggcccaaagttaaccttctgtcgaacggtttatatctggaaaggtgggtgaggaaagggtg

SEQ ID NO: 157017 - DNA, 122 bp, Homo sapiens
cttgtatgtagcggccccaagtgtcccgggagctggtggggcgcttgggctgtatgagcccggccgccaggaggctggggctgcgtcaggagctgtccgtggtgcttaagcggcgtctgctc

SEQ ID NO: 157018 - DNA, 122 bp, Homo sapiens
acaataccattcctatcctcacagggcttgcgctctagcagaggtcattattggcataatcgcatcagcaaatgtaaaattgctctgagagcttacaaaagtgtttgacctgttcacaaaga

SEQ ID NO: 157019 - DNA, 122 bp, Homo sapiens
ctccatagatccagatttattcctccccctcccaggagctcactgtggtgctctgctttccgagagtttatgtgtaacttcctttgctgtggaggccaggctctaggttaacttctggaagt

SEQ ID NO: 157020 - DNA, 122 bp, Homo sapiens
cgcagccttggaaacgcgattagattatcccggctgggaacggcagcctggcgggggccgcgcgggggaagcgcgccgcttcttgtaaacggttccccgaagggcgctgggccaggggcctg

SEQ ID NO: 157021 - DNA, 122 bp, Homo sapiens
cccccttggctattaatgcctacgcgaaatcctgcacactacagaagtagcagcagggcgcgttaggaagtcaatagagattcagggccgtggcctggacccacagagaggaacaatcgcct

SEQ ID NO: 157022 - DNA, 122 bp, Homo sapiens
tcccttggctaaggtgagaggtgggcttggaaagaggttgggtggtgggacccctgaggccgatgggtctgctccctgtctgctggttccccaggctacgccttggggcttgtctgaagttt

SEQ ID NO: 157023 - DNA, 122 bp, Homo sapiens
tgaaggaagcacaagcccagtcagggaaaggagctcatccaaggaggttcgcaatgggagcgccaggctgcaggtccaaatcctggattcccaccactctggggtgatctctcgctccccga

SEQ ID NO: 157024 - DNA, 122 bp, Homo sapiens
ttccttaccttttaagtgactcagcagtttggggcctggtattgcctcacctcttctcgccgcgagcattgacagaagatctagttgagtcctactttgaaaggagtattgcttctgactgt

SEQ ID NO: 157025 - DNA, 122 bp, Homo sapiens
cgcccccaggccgtcaggcccagccccctttcgtcagaccccgcccccagccctgctgagcgaccccgccagtcgggtccatcctgcagtaaatgcacaacccggacggaagtgcctctccg

SEQ ID NO: 157026 - DNA, 122 bp, Homo sapiens
catgtagggtgtgagggtgtgtgctcagcgggcacaggtgctgacggggctgttccacctcggagcgcgtgggccgggaacacagctgtttctcaaatcatccgccacttgcttctaaacct

SEQ ID NO: 157027 - DNA, 122 bp, Homo sapiens
aaacgggatcgcaacttgcggtggttcgcccgcctgcagctcttatacagcagcccgtgccgtgcgccctgcttgctgcagcccgccctgtgtaactcatccagcctcccctcccccagggt

SEQ ID NO: 157028 - DNA, 122 bp, Homo sapiens
cacgacctgccagtctgcctgctccccctaggggttttgagcagcggcgcaccaaaaaagcgagccacacccccatagcacggcctgcaagggggatacgggaacttttcccgttttagctc

SEQ ID NO: 157029 - DNA, 122 bp, Homo sapiens
gaagcgctccacggagccgatctaggggcaggtgagggagcttcaggtccagggtcatgacggagcagagagccgcgcaggggggacggctcccgctggccatcagggttaccatggcgacg

SEQ ID NO: 157030 - DNA, 122 bp, Homo sapiens
ctatgcagcccttcagtacatatcagagcaagctgaactccgcaggttttgaggggctgccgttgtgtaatgagcgttagagataagataggtcagtcaaagctgggatagtcaggagtgac

SEQ ID NO: 157031 - DNA, 122 bp, Homo sapiens
acagcacccaggagggcgccggacagctcactagggcccaggcacagcaggcagggagggcgccggacagctcactagggcccaggcacagcaggcagggagggggctggacactcactggg

SEQ ID NO: 157032 - DNA, 122 bp, Homo sapiens
cgcctgcctccgagggtggccggggcgctgagtaactcgggaggtttggcccgtgtctggcgtagtgattcattgaagctcagagcctccaggggaaactccacactccctctcaccggagc

SEQ ID NO: 157033 - DNA, 122 bp, Homo sapiens
gactattctggtccctggcacattagagatgacgactgtgcaagctgcacctttggctggcgcctggcaaatgcttcatggccctgtcccttgtgcttttctccctgttagctttcaactgt

SEQ ID NO: 157034 - DNA, 122 bp, Homo sapiens
cccagcgacttgtcgactctggtgtgagtctggcaggaggtaacccagtcccggggagggcggaggctgggcgggcgagttcccctttccccagctgggccgctgcccacccggggagcggc

SEQ ID NO: 157035 - DNA, 122 bp, Homo sapiens
cctaactgtaagctctaggacctgccattcctccctggtcttccagcaattggccattgccgcccctcctcacaggccccctcctccacacttggcttctctggggccttctacactcagct

SEQ ID NO: 157036 - DNA, 122 bp, Homo sapiens
ttgtgggtaaagagagctcaccaaattcagcctccagcagcacacacagctcagtagcagcgccccgcccagatgtttatattttcctccatcggccccgccccccgaccatgaggggctct

SEQ ID NO: 157037 - DNA, 122 bp, Homo sapiens
tccacctccattccacattttgatgcctgctaggttgagaatgactgttgtaatgagtaacgattaatgaagggaatggattctatccctcataaatgttacagagtaaagatagttgagaa

SEQ ID NO: 157038 - DNA, 122 bp, Homo sapiens
gcctgcgcctacctggaggcggggccggctctgacgtcacccagagccaatgggagtgctcggccctgagggttgggggcctcagagtgcaccgcgctgtggcccttgtggggctgcccttg

SEQ ID NO: 157039 - DNA, 122 bp, Homo sapiens
agcaggagggtcacccagagcttcgaggcatttctacagcacctgacagaggtcatgcagcgccctgtggtcaagctgtacgctacggacggaaggagggtgagcgttctgggggctcctcg

SEQ ID NO: 157040 - DNA, 122 bp, Homo sapiens
caaggtcctctcagccgggcctctcacccaccccgctggccgcagccggaggctgccacgcggacaccgtctcaagcctctgagcattgctctgagcctctgcctgcaatgtccttcctctg

SEQ ID NO: 157041 - DNA, 122 bp, Homo sapiens
tagaatcagaaagaaaaaatgggaaatgcacgctcacggtagaggaaatgggagaagttgcggaagtctgaaaaaggcagggacatataccatgaagccagcctcattcgtagtttcacttc

SEQ ID NO: 157042 - DNA, 122 bp, Homo sapiens
tcctgcctggctctgggaatggccactgtccagaaagccccgcggccgtccatgctcgctcgctcagtcaggcccttgtggggatattgcagaacgagtccgagttactatccctttaaata

SEQ ID NO: 157043 - DNA, 122 bp, Homo sapiens
ggaattcagctgcctaaagcagcttgtgaggttcctcttccctatgcaacattgcctctacgtgttttctggtgttaatgcagtttaagatagagaaatctttttccactaatttttatttc

SEQ ID NO: 157044 - DNA, 122 bp, Homo sapiens
cttacctgtgcttgaaccgcaccatggctgcctccgcgctctccggtccggcgtgcaaaccggatgtgaattctgtccgctgccaatgggaagcttgcttccgcagcctttcagccattcag

SEQ ID NO: 157045 - DNA, 122 bp, Homo sapiens
attaacaacatgcagtctatcccaatgcaattatcaaccatgagaataaacatttacatgcgagaatatttatgtaaaaggaaagccattatgacactatttttttttttttgagacggaat

SEQ ID NO: 157046 - DNA, 122 bp, Homo sapiens
ccgcccgcctcagtggccgggcgggggtcggcccgcgctctgagtgccgccgccacagttcgcagttgtgactctgtaggcggaagcatagggacaagcctgagcgtcacaggctccccaca

SEQ ID NO: 157047 - DNA, 122 bp, Homo sapiens
cctttccaccccgtgggagggcttggggtcgccctctggggcctgaacggctcctgctgtcggcgccctggagggcccgcccacttcccgacaggccgcgcgcgtcacctcagccttcgctc

SEQ ID NO: 157048 - DNA, 122 bp, Homo sapiens
ggcgcagtctaatatcctagccagtttgtttgggtccttattttgccttcctccttcatccgccccttctttctcttcatcaggttggttcagattcattcctggcttctccatttatttca

SEQ ID NO: 157049 - DNA, 122 bp, Homo sapiens
aaggctaatttctgccaaattaaagatgtaatgaactcagttcctgctttcccaaaaacacgaaagcagaattccttttcactgaaaaaaataaacagttttccatgcaagggcagtttgct

SEQ ID NO: 157050 - DNA, 122 bp, Homo sapiens
aatgcacgcttctggtgtgagaatgaggctgtgtgtgacgtgtgaatgctcggccccggccggccgcagccaggtccctgcggtgggtcctcaggcccggagaccagggatggcgcccacag

SEQ ID NO: 157051 - DNA, 122 bp, Homo sapiens
tccagatggcgggtcttctcccggcttcacggagggagtttcttgggctttgcagagtctcggagagggtgccgggggatggggagtgagagacccccagggacttggtagtgatcttattc

SEQ ID NO: 157052 - DNA, 122 bp, Homo sapiens
ctccaccagcctgtgcctttgagtgtcagagtacgttttttggcaaaggacaactcctgacgctccctctccctcttccatacacaaagcatgcgttttccacaggtctgatgtgctgtgga

SEQ ID NO: 157053 - DNA, 122 bp, Homo sapiens
ccccatagcgcatgcgctctagccctccccacgcagccagcccggggcccacgtgacccgcgttcctgcaaagaaggtgctggaaagggactcggggggtccacccactctatgcccccgca

SEQ ID NO: 157054 - DNA, 122 bp, Homo sapiens
agccacaggcccctttccagtgggatgaaaggtggggaggagccgctggtgggaatgagccgatggtgtattctcagaacacaaggggaaaagccagcgatgtgctgctgttttcagctggt

SEQ ID NO: 157055 - DNA, 122 bp, Homo sapiens
ctagtgtggtttttctctccaattgttaagctcaagggaagcaagtatcttacactctcacgtatccctcacatacagcacatggtaaaacctttttttttttgagacagagtctagctctg

SEQ ID NO: 157056 - DNA, 122 bp, Homo sapiens
agttaggttgaccaaccgttgcagccattggaaaacacttctaccagcgtttaacgaatccggttccttttagtgctcaccaaatccagcccaagaattcagggagccgtcagttcttcccg

SEQ ID NO: 157057 - DNA, 122 bp, Homo sapiens
atcttcccccgtcgaccaagtgctaaatgctcagggcctcgtggctgggacagcaacgtgcgtttccccttccaatgggcgcaagctattgagccacaaagaccaaagctggagtcgaggag

SEQ ID NO: 157058 - DNA, 122 bp, Homo sapiens
catttgctaattgaaagactgcctgaaactgaaagcaggctttgcacaccaaagccctctcgcatattgaaaacaaagggatctccagagattttaggtttacaaaggcacattcatgcttg

SEQ ID NO: 157059 - DNA, 122 bp, Homo sapiens
ccctgcttgactaaatatggtcagggagcgcagcccgagggggccacttggccagggccgcgtgtttgggatgcttggccgggtatataagaactgcaaaggtgaggccggctcctgacccg

SEQ ID NO: 157060 - DNA, 122 bp, Homo sapiens
ccggagaccggttccagtgcttttgttctttctctgcttctggaggcatgctgaagcatccgcgcatctcagactggtgctcacagacatcaggaacacatgctttttcctggttgctagga

SEQ ID NO: 157061 - DNA, 122 bp, Homo sapiens
aatcgctaccggagccgctgacggttcggacgtgcagttctccctgcttatcctgtagggcgtccaacctggtggactcatgagcaaagagatattcccattctgccgaggtctcgtaggct

SEQ ID NO: 157062 - DNA, 122 bp, Homo sapiens
tgcctgggccccgggtggagaggaaggggtcggcgccctggggcggggctgggcaggaggcgggagaacttgcactagggtcagccgggacgcccccacccataggttcgggacgctaaccg

SEQ ID NO: 157063 - DNA, 122 bp, Homo sapiens
gaaaaaatctccctcaaagctcctcgggcactagggccataggacgcgagctttacctgccgcctcagccgggttcctcggcgtttccgtcctattgtttctctcgcaccaaaatggctgcg

SEQ ID NO: 157064 - DNA, 122 bp, Homo sapiens
acccacccccatgtccagggctaccttgctgtcgtggtggatgagcttgagctcatagtccggcaggatgtccctgcggctattcacgtcctccagcgccatctccaccgcgggctggcagg

SEQ ID NO: 157065 - DNA, 122 bp, Homo sapiens
ggccggggaaggggagatgccgggtggcggaggacgagggggcggggagggagcgtggcgcgctccgggccacaaccaggccctaaggtctatttacatccgtggccgaagcactggggccg

SEQ ID NO: 157066 - DNA, 122 bp, Homo sapiens
catgccggctacccagctcccggcattgttgcacatggctttgaaacgcacggcacagctcgtgtggcccaggggcacctcctgccaccctgcctgctgcctccaccccagatgccggtcct

SEQ ID NO: 157067 - DNA, 122 bp, Homo sapiens
cgtcttcaggaattgtggcccaggcacctttagcggcctgtgttcactgctgataagcagcgtctgggagtgccatttgatgttccaggtctgaataagggccattacttaatagcatatcc

SEQ ID NO: 157068 - DNA, 122 bp, Homo sapiens
tgccacagccctgcagtcgccagggtccagctgccagtctgggcggtgccgtccatgctgcgcaacgtgccacccagctgctgcatggtcacgtccatctggagctctctagctagacaaat

SEQ ID NO: 157069 - DNA, 122 bp, Homo sapiens
agctcctggtccccgcaggacacccacaggaccctcggggagcctctccagtggcgccgtcggggagtgatcgacagtctccccagtggcactctcttgccatgggagagactcagcaaagg

SEQ ID NO: 157070 - DNA, 122 bp, Homo sapiens
taatgatttataaaaccatatagacagcgtgggcatgtgatctgtgagccgtggtccccacggaagcggtgagaacgcacctggccggctcagccacacggcacggtggcctaggccctgct

SEQ ID NO: 157071 - DNA, 122 bp, Homo sapiens
aaatgccctgcgctgtttacgcttcgttcctctctgggaacgtcacagtgcggagaggggcggggaggcggggacgtgcaaaggaacgtgacgtgacgtcagcgcgtcgccctgccgccctc

SEQ ID NO: 157072 - DNA, 122 bp, Homo sapiens
tacaacttcttaaactcactgtgtgctcaattcccagaagtaaggagggcactgcgcatgcgggaagcccaccctaagggaggaattatgggaaagaggcaagcctgtaaagcccgaggatc

SEQ ID NO: 157073 - DNA, 122 bp, Homo sapiens
tcacaacttgcattccagaattccccttccattctctcttgtgtgggaattcttctttcccggacctgctacctctctttttctttgtttgctttcatgttttagctaatgctctcatagtt

SEQ ID NO: 157074 - DNA, 122 bp, Homo sapiens
agacacttctgtttcgtggctttcgggctgcctccagcccacgcaggctcgtttagtccccgtggagtcagccccgagccttcctagtcctggaacaagggctccaggtcgcggccgcggga

SEQ ID NO: 157075 - DNA, 122 bp, Homo sapiens
ccaggtgatttgcacacaggtaaagcctgaaaagcctgcctcagaggatgtgaaagctctcgtttagttcagtgtggtcctcgggaaagctcttctgctcaccgcaagttggctggtttcca

SEQ ID NO: 157076 - DNA, 122 bp, Homo sapiens
gagttctggaacacggtgtagcactccttgggggaaccggcgtctgcaccagcccatggtcgggaggcaggggaggcctcatggctgggcatgggtggggccctccgggtggcctcccatag

SEQ ID NO: 157077 - DNA, 122 bp, Homo sapiens
tgcagcgggaagcaacggggcaggggtgaataaaggtcttcattcctcaagcaagagagacggacatctggtcctgagtccccaaactgttcatcaggtttctccgggcccactggatggtg

SEQ ID NO: 157078 - DNA, 122 bp, Homo sapiens
aggctggacgggagcagtccctgatggctgcagagccatctggcctggcttggcttggctcggcgcgccgctcgcctggcggctgggctcgctgtagttgtgctcccgctcttcccctgccc

SEQ ID NO: 157079 - DNA, 122 bp, Homo sapiens
atctgcccagagtccctgcccggggttaccttggtgctctgcttctccttcataatgatccgggacaggaggaccacccagatgggcatggtggccttgactgcaaagagagggatgggcac

SEQ ID NO: 157080 - DNA, 122 bp, Homo sapiens
actgtgggccccgaagcatacctaaaactgtgagaccactcagcacttaggtatgaatggcgccatttagggtctgaaatggtcaccattttcagaaacctgctcaacacctcttcccctgc

SEQ ID NO: 157081 - DNA, 122 bp, Homo sapiens
cagagagtccccagcagtcccccacaccagggcgcgggctggggggcccacgcgtctggccgtgatggtgatggatgcaaaccctctgcgggggcccccacagggtctctcctctttgggcg

SEQ ID NO: 157082 - DNA, 122 bp, Homo sapiens
ccttcctgacactctcctctggggctcccattagctatgtccatctcaccaccaaggactcggtggaggccatgggagcccccaggtcccatgggaccttgagccaacaggtcccctcccag

SEQ ID NO: 157083 - DNA, 122 bp, Homo sapiens
gtgcaaagcggctgctctgagccttccgtgggcagcagggcagcacagaggaggcctgagcggtggtgctggggagaggatggcgtagggcaggcctcgtggacgcagccgggggcctcacc

SEQ ID NO: 157084 - DNA, 122 bp, Homo sapiens
tggatcccgcggacgccgggacgaggggcggggcggggtggcagcctgcaggtcctccagcgctcgcccgcccaggagaagtctcagcgccgctctccgccgcaggttgggggccaggggag

SEQ ID NO: 157085 - DNA, 122 bp, Homo sapiens
aggagacgcagacctggaagggctccccctccctgacctgccacacatcgagtttgtctgcgtcgagtttggccagtctgtgagggtcaggaatagagcaggagacagcagggccacctcct

SEQ ID NO: 157086 - DNA, 122 bp, Homo sapiens
cattcctgtcggctgcaggggcaggagaggaagggacgggccgagcgggtcggggcttgccgtttgactggaattgccagaatggcggaccgagccccacgacaacctacctccctgggctc

SEQ ID NO: 157087 - DNA, 122 bp, Homo sapiens
aaggaataccgtgtgtgggagtgtgagtcttatgtgcacgaagaacaggacagttagcatcgttcccacctccagagatcctcacggtggtcatgcagcctcgtgtgctcagaacagtgtga

SEQ ID NO: 157088 - DNA, 122 bp, Homo sapiens
aagcgggtcaccaggcccaggaagccagtcaagccgtgctggtagacatgtaggaccagacggtagccgaagcccaggagagccaccacacggccccggttgatgccactctcaaacaggct

SEQ ID NO: 157089 - DNA, 122 bp, Homo sapiens
tgtttcgttttgttttgctttgttttgtttttgggacagggtctcattctgtcaaacaagcgggagtgcagtggcacaatcaccactcactgcagcctggacttttctgggctcaggtgatc

SEQ ID NO: 157090 - DNA, 122 bp, Homo sapiens
atcatcctctccacctttggatgttagggacagtatcacgggggaggtctccgcccactgcgattttgggagtcataaaatccgctcccacccaggatatttggaacaagatgactgaaggg

SEQ ID NO: 157091 - DNA, 122 bp, Homo sapiens
cctcccaagtagctggtgaggcacgtggggcagagaaaaaaaaaaaaaaaacaaaaaccgcgcgagcggagaagcagggcctgggaccccacagacgaaagtgccttcccatcagcccctgc

SEQ ID NO: 157092 - DNA, 122 bp, Homo sapiens
tctggctcctacatagttagggtgccccaaagtacccaatgacccaaagatcattctactcgatgaatgtcaatacaaaacagtggcaatcctgaagaaacatcacctgggttcaagctagc

SEQ ID NO: 157093 - DNA, 122 bp, Homo sapiens
aatttccacaagaaaggaaaaaagagagagaacactgtaagcgctgctcctgttccctggcgactctctggtgcctggcacaggacagtgacccagcaggtacctggtgcattctgagaact

SEQ ID NO: 157094 - DNA, 122 bp, Homo sapiens
agctcttgttagcaaggtctgtcctgggacatgcgtcctccgcagggcccatgtcactgccgctagcccgggaggcccctgccgactgcacctatcctgtgctgtctttaattttgatagat

SEQ ID NO: 157095 - DNA, 122 bp, Homo sapiens
gtggtcccttccttcaggggctgtggggatctcaaaagataaggcaggtctggagtcctgcgcggtacctgccgcatggcaggctctttacggacagcgcagggacgcactttgatgctgaa

SEQ ID NO: 157096 - DNA, 122 bp, Homo sapiens
atccctctcttgacctgagaaattctacctctcacttaaaagtgactgttcactgaattccgcagaatgaactaaggtggcaggcaggggccctcagagatgccataagttacaccacctga

SEQ ID NO: 157097 - DNA, 122 bp, Homo sapiens
ctgttaaataatcctctaaaatatccaagccccctgcagagccaaatcatttgtttccttcgttacccccctaattcagcctcaccaggtcaatttgtaattacagtgctaaatttttagtt

SEQ ID NO: 157098 - DNA, 122 bp, Homo sapiens
cgcctactctgtggaggtcctttgtcaccctgccctggttaaaggcagcctgagggagggcgtcctggctcctttgcagggaggagttcccgaggtttgaggggctccgctgctgagctagg

SEQ ID NO: 157099 - DNA, 122 bp, Homo sapiens
ccgccagaactgacctacccaatcaccgcaccgctgcgatcaagcggcgacacacgttgccgggtaagagtcacgctttggcaaataagcaacctgcctcatccaatcagcgtctcgcctgc

SEQ ID NO: 157100 - DNA, 122 bp, Homo sapiens
tttgtaaccccttggcccataggggctggctactgaggacaagttctgagttcgctgagacgggcaagctgtcctcatcgcggtattcatcttcatgatctttctgaacagggacagatacc

SEQ ID NO: 157101 - DNA, 122 bp, Homo sapiens
cgtactctaccagacggacgcctcgctgacgccctggaccgtgcgctgcctgcgacaggccgactgcatcctcattgtgggcctgggggaccaggagcctaccctcggccaggtcggaagcc

SEQ ID NO: 157102 - DNA, 122 bp, Homo sapiens
agcgacctgtgtagctgtcacgtgggcctctggggcagaccctggagatcgggctcgcggcgccttccatcgtggctccgcgctggggcttgcggagcacgcttcccgcccctcggagcccg

SEQ ID NO: 157103 - DNA, 122 bp, Homo sapiens
gccactgcctcccccgactctgtttctcctttgggcagaagaagcccttgtgggagcctccgtccagcctccgcggggctgcgctcgggctgggtggcgtctcctgctctttcttcggtgtt

SEQ ID NO: 157104 - DNA, 122 bp, Homo sapiens
gaggatgctcaacgtctgctcaacgccctcggggcaccccgcccagtctgcagggagtgacggcagagggaccctctccggaaagcctcgagcttttggtacctctaaaccccctaaacctc

SEQ ID NO: 157105 - DNA, 122 bp, Homo sapiens
attccccacatacgtaggccaggagcctcagcggtgccccttcaggctcatctggcaagacggtaccagcttgctcagaacaggggctggctattcatcatctcagagcatagagaccctct

SEQ ID NO: 157106 - DNA, 122 bp, Homo sapiens
gtttgaaacactggcataacccctatggggttacacatggcaatgtgcacctgaaattaccgtgacttaacaaacctagctcttttaataagaaaataattggacaagtgaataacaatatg

SEQ ID NO: 157107 - DNA, 122 bp, Homo sapiens
tttcgcctaaaggctttgatatttttcaaataaaaatttaaaagatccagtaccttctcccgaagcttcttcatagagtagtggatttttagaaaacacaaaggcctaggggtggggcgaga

SEQ ID NO: 157108 - DNA, 122 bp, Homo sapiens
gactcttggcctttttcagaaggttatactctgccatagtataaagaatcctggtgtgttcgggtgatattttcaatctaaaatctaggaggcaggtgctcacttgtcctcctccatgcttg

SEQ ID NO: 157109 - DNA, 122 bp, Homo sapiens
ggccccatcttccgccgactgtgtgtgcgcgtgtctccctctatctgtttcacacatacacgcagttttatattctcaaaagcaaggtgtttttgactaggaaggcttggataaacctaaga

SEQ ID NO: 157110 - DNA, 122 bp, Homo sapiens
acgaacgctcaacgtgggatcattgttgtaatccctcaacgtgtgctctgaatgagaagccgagtgactgaatgaatgtatgaatgaaggaacaggtcagtaactggcggttcccgaagttg

SEQ ID NO: 157111 - DNA, 122 bp, Homo sapiens
cccttcaattgacagcatatcctcattcttcttggatgtgggacaagagcttgagaactgcgaaacacaggtacaagatataacacaagcaagctggggctcagcagcagtctgagctgctg

SEQ ID NO: 157112 - DNA, 122 bp, Homo sapiens
ctggcaccctcccaagagcagggacttcctttctacagctgccgtgagaccctccgtgcccgccccctttggagaaagcccactggaaggaagaagaaaagctcccacactttcccagaatt

SEQ ID NO: 157113 - DNA, 122 bp, Homo sapiens
agcgccgcctctgctcccgggttctccgcccgccgactccttcctggccggaccccgctgcgctccaccccagtggctggaggagcagctctccagtcagcctttgcagcccctctcttttt

SEQ ID NO: 157114 - DNA, 122 bp, Homo sapiens
gtcaaagaaaggggtgacagacggcacctggaaaatcgggtcactcccgccctaatactgcgcttttccgacgggctaataaacggcgaaccaggagattatatcccacacctggctcggag

SEQ ID NO: 157115 - DNA, 122 bp, Homo sapiens
ctttgccagcacttacttgtgttgatcttctgcagggagatgtgcttttccagcagccttcgcagcttcacctcggcgccatacttgcccagggtgccattgtcagccaggatgaagtgggt

SEQ ID NO: 157116 - DNA, 122 bp, Homo sapiens
acttttctctgcattgcgatggtggttggcaggccctggggaattacggtacttcgccttcggggacgcccagctgttttggggctttctctctattgggggtaggatgtttgtggtcttga

SEQ ID NO: 157117 - DNA, 122 bp, Homo sapiens
accaggtggcggggacagggtgagcgcacagtccgggtccccgctgtaaggacctggtggcggggacagggtgagcgcacagcccacgtccccgctgtaaggaccaggtggcggggacaggg

SEQ ID NO: 157118 - DNA, 122 bp, Homo sapiens
tctgagccgcggctgcctctcccctccacagtcctccatcctggacttggctgacatcttcgtacctgccctggccccgccctccacacactgctctgctgacccatgggacatcccaggtg

SEQ ID NO: 157119 - DNA, 122 bp, Homo sapiens
cgggtcccgggcgggtatacgggcgccgctggctggtgctgctgctcttctcgctgctggcgttcgttcagggcctggtctggaacacctggggtcccatccagaactcggcgcgccaggcc

SEQ ID NO: 157120 - DNA, 122 bp, Homo sapiens
catttttttttttttttttgagaagtagtcacgctctgtcgccagcctggagtgcagtggcgcggtctcggctcactgcaacctccgcctcccgggttcaggcgattctcctgcctcagcct

SEQ ID NO: 157121 - DNA, 122 bp, Homo sapiens
catggagtccacagtgggtggaggtctcagtgccttgggctcaggggctcagcgaaaggccgcggccaggcctagatgaaggtgaggcaggtggaagcggggaccccacagctttccttgtg

SEQ ID NO: 157122 - DNA, 122 bp, Homo sapiens
agccacctgccttagcctcccaaaatgctgggattacaggcatgagccaccatgcccagacgccatgcctcttcttgtaaggacttgggtgaggcgacagagcacagctccatccctagcta

SEQ ID NO: 157123 - DNA, 122 bp, Homo sapiens
cggggtccgcagtgattgggcgtaggagcggggccgccagccagagctgggctgcagggccgcgcaggtttcacttcgctccgcgcagccgcctggtctgcagtttgttggagctctgcgtc

SEQ ID NO: 157124 - DNA, 122 bp, Homo sapiens
gttgtccgagctgaggcaagttggtccccaagttttgggaaactttctcctccacaacaccgatgctccgggcaaagaggcctgagggaaagggaagataaagcaaccagtggtctccagtc

SEQ ID NO: 157125 - DNA, 122 bp, Homo sapiens
aagaaaaaaaaatgcagataaccggtaactccacaatcacccttttaatattcagctccccgacaccagaaaagaatagcaaggaactttgcagctctcgctgacgtaactcaggcagtagc

SEQ ID NO: 157126 - DNA, 122 bp, Homo sapiens
atccactacggattacataggtaagcaatattaaagcacacacatgtacaatagcagcctcgtctcttgttagagaaatgctctcataactccctgacagcaaagaactgccagttgcttca

SEQ ID NO: 157127 - DNA, 122 bp, Homo sapiens
ggcagcacagggaagacctctgcagccctcagagctgatctgccccccttgatgggaaagcggaggcggagaaggggggtgaggtggaagagagggagggcatgtggtcgccaggcctcctc

SEQ ID NO: 157128 - DNA, 122 bp, Homo sapiens
ccggctaagtcatgtttaacagcctcagaaattatcttgtctccgcgttctttcttctgccggcgagccaggtaatggtaacagagcgaaactccccagtcggaacttctgggttgcagcag

SEQ ID NO: 157129 - DNA, 122 bp, Homo sapiens
ttactcaattgtcatccagttggggctcgatggtggtatatttataactcctgtgggctccgatgtgataatggttacttgatatgaccaggggcatgtgagcactgggatgccgcagtact

SEQ ID NO: 157130 - DNA, 122 bp, Homo sapiens
aacaaagccactgttgcctcctctccatccccaaggagaatgtgggtcagggctggaggccggctctgggaatccctgagaagggagcattattaatgtcaccaccactgtgcctgctgagc

SEQ ID NO: 157131 - DNA, 122 bp, Homo sapiens
acctcaagtgatctgcccgcctcggcctcccaaagtactgggattataggcaggagccaccgcacccagccaatgacatgaaaattgatcaaattgggaaggtagagacaacagttgaataa

SEQ ID NO: 157132 - DNA, 122 bp, Homo sapiens
acgttgcattctcagttctcaaaattccaagtagaatgcaggttacctggcaaccacacacgctcaagcctataataccctcaccaaacagggaggcctagtgtaagtctcctggccgagaa

SEQ ID NO: 157133 - DNA, 122 bp, Homo sapiens
ggtccctgacggctggggctgggcctgcgggggcggcagctggggcccctgtgcggctgccgccgccaggtccttggtggccgggtgcttaagggccgggggcccgggcgagcggccctcgg

SEQ ID NO: 157134 - DNA, 122 bp, Homo sapiens
agccacggtccaaaccactcccaccctgatcgcccccttctgctttgaaggcgctgcctacggtttgcgcaggatgtgcaagctgttccgtgcctccgaacctttgtccctgccattccttc

SEQ ID NO: 157135 - DNA, 122 bp, Homo sapiens
gggccccaaactctggtaccgggactttctgcagctggtggagccgggcggaggtggcagcgcgaactccctgcgcatgtgccgcccgcagcctgcgctgcagtcactgcccctggagtcgc

SEQ ID NO: 157136 - DNA, 122 bp, Homo sapiens
atatgggggaaaaaaaaatctctgctccctccccgtaggactccccggatggtgcgtgggcgacttcagcagcaagagaaaaagctgcgactcccccgtttaccggggacccttaccagggg

SEQ ID NO: 157137 - DNA, 122 bp, Homo sapiens
tatccacaaagcaaacagcgttatgtcaggactcatcagaaatccctaattggaaactaacgacacacccaaagaagagggtgctgtgagcaatagcatgattcccagatatcagacctcaa

SEQ ID NO: 157138 - DNA, 122 bp, Homo sapiens
aaatggaggtatattgggctgattggcagctggtaagctacctgggtgtgtaggtgtgtccgcagattggtaaattgagttaggctggcctgaagtgaagattgccaaattcaacacaagtg

SEQ ID NO: 157139 - DNA, 122 bp, Homo sapiens
catcatcgtggcggcttggcatgtatatccacaaacactccgaaagtccgcgggaaagtgcgtacgccggctcacccggcctcccttcggaggctgcagccgcggcggtcgcggcggctggc

SEQ ID NO: 157140 - DNA, 122 bp, Homo sapiens
ttgaaggcgcgcacctggatctccaacagccccgcggccacgggcgtgtaggtgacgtcgcggcccgacaggatgaccagcgagtcgccctggaccttctgcagcgagaagtaccaggcgta

SEQ ID NO: 157141 - DNA, 122 bp, Homo sapiens
ggacttgcccaaggccacacaccaaattagtgacagagctagaactagactccagttctccgacttccagctaagtctctttagcttcagcctactgcctctatagcggaaggacttgttcc

SEQ ID NO: 157142 - DNA, 122 bp, Homo sapiens
gaagagtcgggcactggcagagaccgtccagggagccgcggagcccgctcagggctaaagcggccgcatctgccgtctcagaaacggctacctgagtggttgtcacgaaacaacgaccccgg

SEQ ID NO: 157143 - DNA, 122 bp, Homo sapiens
caaaaaagcaccttgttaagaaccaacaatcaggttaacgatcacaatacctggctttaacgtcatatcactgaaaggcactgaagagggtaggaaagacagtcttgaattgcctgcacaac

SEQ ID NO: 157144 - DNA, 122 bp, Homo sapiens
tgtgcttttaaaaatcttatacacactactctctaaaacagaaaaaggaggaaagaaagtcgttagctgaagctgccaccaccatccctaaaagttacagtttggggagagggagtggatga

SEQ ID NO: 157145 - DNA, 122 bp, Homo sapiens
accatctcctaccgagccccagagctcttctctgtgcagagtcactgtgtcatcgatgagcggactgatgtctgggtgaggagcatgtgggtgggtatctgggtagggagggctgtggctct

SEQ ID NO: 157146 - DNA, 122 bp, Homo sapiens
gctgccagtgtccgggaactgggtttgcgaatcctgggagccgcgttcctgagtcttctccgctctctgccctcaaaacctcatttgtaggactgacctccggctccaccctccccacgggc

SEQ ID NO: 157147 - DNA, 122 bp, Homo sapiens
gtcactattttcatgctgctaacattgcagctgagcgattatagacagtaatcaaactctcgccaaaatcctctgaataaaagtctgaccaagaactagaaatgagaatgactctgctccat

SEQ ID NO: 157148 - DNA, 122 bp, Homo sapiens
ctttctcggagccccacattccctttaaccactcagatgtggtggtatctgatcaagtcccgcccatgctacaagccccgcctcttactcagagccctgccttccctttacccactcagatg

SEQ ID NO: 157149 - DNA, 122 bp, Homo sapiens
tgttctaagtgcacctgtgttctcctccagaactaaaccaaaaagcaaggtgaacaaaatcggtgctccttcagtttcttctttagttctgcatgttactggggactaagacaacgggtaag

SEQ ID NO: 157150 - DNA, 122 bp, Homo sapiens
aacaaattctagagtctaagcttaaagtcagtgcctgaccatcaggaaggctgaagccctcgtgccccagcagcattcctgtggtcgctggtggaattgtttattccattttggatatgaaa

SEQ ID NO: 157151 - DNA, 122 bp, Homo sapiens
accattccattttaaatcataccattctgccaccttttgatggggacaaatgtcaggacccggagcatggcacttgacctccaagtccagttttagagccagtgaacagaaacccaccctct

SEQ ID NO: 157152 - DNA, 122 bp, Homo sapiens
ggactactttgcaatcggcgcagagcgcagtgagaagagcttgaaaaaaacctctggtatcgggaagtgtagttcaacacttgaaggaaatgctttggagattgcgccacaaccagggcagc

SEQ ID NO: 157153 - DNA, 122 bp, Homo sapiens
tccaggccaggcaggctggctcctccggcaggagattcgtggcaggcggaacgtcgtcgtcgtcgttggccgtgagtgtttgcttcacacagggacctttgaattatcttgtgacaagggct

SEQ ID NO: 157154 - DNA, 122 bp, Homo sapiens
ctgcgtcacacgccgcccggcgtcagaggctcgttgcggacgctccgccctcgccgtccgcgaattggtggacgcggccgccactctgggtcgaccctgttattcattgggcaacgcgtctt

SEQ ID NO: 157155 - DNA, 122 bp, Homo sapiens
gtagacctcaccctttccagactttagagcttgtggcttgaatgttaaaggtgtgaccaccgacaccactcatgtcaatggctgaaagttgtccatttccatgactcaaagacccattggag

SEQ ID NO: 157156 - DNA, 122 bp, Homo sapiens
gaaataacttgacacacaactctgattgatgcagccacagtttacactccacacttcagacggtttgaaatggctagaattaatagcctattataagatagtaggggggtgggggagttggg

SEQ ID NO: 157157 - DNA, 122 bp, Homo sapiens
tggcagagaacccctgaaattctgtagtgtctttttactatccggtgagcaatttgatcccgatgatggaatattagccttgttagacatgcgcttctgaagacctgtgcagtagggaaagc

SEQ ID NO: 157158 - DNA, 122 bp, Homo sapiens
taagccatggagccagaagagggagctaacggctcagagctggagacccagtccacgcggcgcttacctgatggacaccgcgagggacagcacctccagcagcagggctgcactgaagaccg

SEQ ID NO: 157159 - DNA, 122 bp, Homo sapiens
ccaagcagaaggacaaagggtcaggtcacagagcagagcactgtatgatgggacagtctacgcattgtactggcgtgcctagccaagggggtgggggcagctggcatccagcctgtgcccca

SEQ ID NO: 157160 - DNA, 122 bp, Homo sapiens
gctccagccgaggaggaggtgggcccccggaagggggacttcacgcggcaggagtacgagcgccgggcccagctgaagctgatggacgacctcgataaggtgctgcggccccgggctgcggg

SEQ ID NO: 157161 - DNA, 122 bp, Homo sapiens
tgtttcctcaaacctccccaccaaaactgcccatgctgaccattttttagtaacctgttacgccaacgggaatgaagccccaggcaagaacgccaggcaaaacctgcatctgggggcctctt

SEQ ID NO: 157162 - DNA, 122 bp, Homo sapiens
gacaaatcaaaggctgtactgacataccctcaagcttccagagtaaaatttaacaaatggcgccgcttcctttaaccaaatccatgagtctcccaaacttacaaatatttatagcatactta

SEQ ID NO: 157163 - DNA, 122 bp, Homo sapiens
agaattacaactattagtagattcttagatatttgatagagaaactccaagctctccaaacgccattgcccactgcacagccctcttgtccttcctcctgtggatagagcctccatgaatcc

SEQ ID NO: 157164 - DNA, 122 bp, Homo sapiens
cagtatcctcactttacagaagaggggcttgggacctagactaagtgacttgttctaagtcgcgcaacagtgagttgctgagaggaggccagcaggcaaatttcataggtttcccaagacac

SEQ ID NO: 157165 - DNA, 122 bp, Homo sapiens
ttgatgcagttgtaagcttggggtatgaaggtttgggccacgcctgggcgcttccggctgcgccggatgctgtttcctttccgctcccaggggcgttgggaacggttgtaggacgtggctct

SEQ ID NO: 157166 - DNA, 122 bp, Homo sapiens
cagttgctatccaaacagaagtaaacagagtggaccattagcagacgccgggcgcggaggcggagccagggcgctgagggccccgcgcggcggcgggacgcccgcccgaaggggaggcgggg

SEQ ID NO: 157167 - DNA, 122 bp, Homo sapiens
ttggggctctaggaactccggtcacttaccgcccagggagccgccatcttgctaaggtttcgtaaccggaaggggccggtcttatcccacgctcctggttcagcgcgaacttattctcctgt

SEQ ID NO: 157168 - DNA, 122 bp, Homo sapiens
ctctctctcttccacctttcccaacctgtgtcaggtccttttacctggatactcatgatgcggcctcagttctcacttccattgggtgttgggttcctagatcagccaatcagtgtcgccgc

SEQ ID NO: 157169 - DNA, 122 bp, Homo sapiens
aatcggaggtatacaaggcagtgtagtatgtatgtgcgtactttttacagatgaaaaatacgagcccagggatcctacatttctgagcctgggtgtgtttctttggaggccagatcctgttc

SEQ ID NO: 157170 - DNA, 122 bp, Homo sapiens
ctcgcaccggcccatcaaggggatcctgaagaacaggacttctacgactctctatggttgcgtcggcagaagaagagctgagaaaaaatcccggaagtgggatgaaatgaacttcctggcaa

SEQ ID NO: 157171 - DNA, 122 bp, Homo sapiens
taagagaaaattaataagaaggaagtctgcaggctgaaacccttcaaattagcctggactcgcctgcatctggctcggaacagagttaatctcaggagtgagaatatagccctccggtggac

SEQ ID NO: 157172 - DNA, 122 bp, Homo sapiens
gtgatccctcggtatggatgggggatttattctaggcctccctatgaacactaaaatccacgaatgctcaagtcccttgtataaaatggcccaatatttgcatgtaacctatgtacattctc

SEQ ID NO: 157173 - DNA, 122 bp, Homo sapiens
ttgtttcaagcaaatccacttggattgagcatgaaggaaaataaaattaaaggatgatgacgaataaatggaaatgtttaaggatcactttggccagcatcttcatacttaattgttgcttt

SEQ ID NO: 157174 - DNA, 122 bp, Homo sapiens
caatgttggggacacagccaagacaggccccagtactcgggacctcagagacacagaggacgagggaggcgccccgaaggcatggcaccgggcaccaggcgacaggagttgactgggagctg

SEQ ID NO: 157175 - DNA, 122 bp, Homo sapiens
gagctggaaatgtcctcggtgatgtttcctcgtttagtttcactgtttttcatctcatttcgctttttttctgaaatgtccggaccaaatctcatggcctcgcatgttaatcttttaatagt

SEQ ID NO: 157176 - DNA, 122 bp, Homo sapiens
catccagcccacgaggtcggagcaagtgtaccgggaaagagcaggccggggaccccgggccggtgcagcttccctgcctagggctcaccccggcagcaaggaacaatgaaacacagtgcctg

SEQ ID NO: 157177 - DNA, 122 bp, Homo sapiens
tttatttctctctctgctcttttggggttcagtgttggtggaagctgctgagtgacactccggtcctttgagcctggcaagttgtggggagaaacggagggaggcggttgtggacatggcga

SEQ ID NO: 157178 - DNA, 122 bp, Homo sapiens
cagcttgaccatctctgcagagtgccccatgcagcttgaggacttcccgatggatgcgcacgcttgccctctgaaatttggcagctgtaagttattttcacaagtaagagccttggacatat

SEQ ID NO: 157179 - DNA, 122 bp, Homo sapiens
gaatctcaacatatggaaactggagagatcgtgtgtcacattcacaagaatgatttacttcgcagaggcttaagagtttccactgtgggattttgctcacagtgagctcagacgactcagag

SEQ ID NO: 157180 - DNA, 122 bp, Homo sapiens
atagtgagaccccatctctataaaaatttttagccctcactcgccgccgacgacctgtctcgctgcgtgcacgccctgccgccgccccgcagaaatgcttcggttacccacagtctttcgcc

SEQ ID NO: 157181 - DNA, 122 bp, Homo sapiens
gacccagtccatgcgtgcacagcgcaagtagcttcccaggacaccgatttcctccccggccgcagctgcttctggtcctctgcccactcccgggttctgcgccttcctgcgcccccggcctg

SEQ ID NO: 157182 - DNA, 122 bp, Homo sapiens
actgtaccaactgaagttcatctgcatcaatagcagaaacagtggttatttgctctcccacgcctagatctctgggaattgtcccttcacaatttattttctcaaacaaaggtgtgttgtca

SEQ ID NO: 157183 - DNA, 122 bp, Homo sapiens
tggagcatagtcgaaggttttattgagagggatgcatggaaaagagacaagattttgtcccgggtgatgtttactcctgctgaactttggttacattggaagcagctgtttttcttttatag

SEQ ID NO: 157184 - DNA, 122 bp, Homo sapiens
tgtagctctttttctgaaagaagtgcgggcagccataaatagcctggaggcaatgccgtgcgggtggagaggggcccgagggaacagtcaaggctgtccgggagcaggaggacagcaatggg

SEQ ID NO: 157185 - DNA, 122 bp, Homo sapiens
gggggaaccaaccagctccagccccgggtgaaaatccgcgtgcagtcaggcaagaggtgccgcaggggacatgggcgctcgaggcccaggcaccaccggggccgccctcgccctctcccgcc

SEQ ID NO: 157186 - DNA, 122 bp, Homo sapiens
tcctaaagcgcgcctcgcctcgaccgcttggccacgccccctctccctgactctgctggccgcccagcccgcgaccctctacctggtattcggtctcgaggcttgcgttggccggcgcggac

SEQ ID NO: 157187 - DNA, 122 bp, Homo sapiens
acccgaggcaaggcagccaacgacgtggagactcgcgggcccctttgcgaggttactacacgggttgcgccctccgaagtcttcggccttacttcccattagaacagagaaatgccatccac

SEQ ID NO: 157188 - DNA, 122 bp, Homo sapiens
caaatgcaaagtgttttcagatcacccagtttacatttcatggacttgacagacggaagacgaaggcccagggaagaaaagtgacttgcacaaggtcacttgagctgggctaggactgaaca

SEQ ID NO: 157189 - DNA, 122 bp, Homo sapiens
atttaaagacaagcaactcacattaaacactttttattatactttaagttctgggatacacgtgccatgatggtttgctgtacccatcaacccatcatctacattaggtatttctcctaatg

SEQ ID NO: 157190 - DNA, 122 bp, Homo sapiens
atttaaagcatagttgaaactcagcagcactgcagcacagttgaggattcaatatattaacgaatgtctattgtgtacattatattgagatatttttcccaactagcaaatcctaactaaat

SEQ ID NO: 157191 - DNA, 122 bp, Homo sapiens
ctgggggcgcagcgggacgagagatgctgctgttgttgctgctgctcctgctgctgctgccgctctcgctgctgctgctgctgctgctgctgctcctctcgctgctgctgctgctgctgtcg

SEQ ID NO: 157192 - DNA, 122 bp, Homo sapiens
gcctatgacaccgaggcagaagaatgcagtcccaactgccccaccaaaacaggatgtggtcggagcagctcctgactgtgacaccaagccgggaggctgcatcgctaatgaccacatcaaac

SEQ ID NO: 157193 - DNA, 122 bp, Homo sapiens
ttggaagcagcctgtttccgacgtctaggagcactcaaggcagaagtgggtaaggtgctccggaggccctcgtggatctgtctctgctctgtttatggcccttcggtaattcactgactgag

SEQ ID NO: 157194 - DNA, 122 bp, Homo sapiens
cgctcctctctgccctcgggacaggaggtggtcagggaaggtggtcccgtgtcctcaaggcggagtccctcgcagatggtgctgaggtggagaagctgcgctgctgctagaacagagtgggc

SEQ ID NO: 157195 - DNA, 122 bp, Homo sapiens
gaagggcggcgcgcttaggcaggcggtggcgcggctggagtgccgcggggagggctgtgccggttgctttctgcagccgcatctcggccagctctcctcgccgtccccggggcgctgtgcgt

SEQ ID NO: 157196 - DNA, 122 bp, Homo sapiens
gcgcgggagagggcggcggtggcggtgcagacctaggcgaaggcgggaagtgcgtctggccgggcagtgagagcaaagtcagcgtgcggcgagatcgacgcggggggccgagtgggaggggc

SEQ ID NO: 157197 - DNA, 122 bp, Homo sapiens
cttaggcagctggaccgatacctcctggatcagaccccacaggaagactcgcgtggggcccgatatgtgtacttcaaactctgagcggccaccctcagccaactggccagtggatgcgaatc

SEQ ID NO: 157198 - DNA, 122 bp, Homo sapiens
aggcgcggagccccacggcagccggggatccaaagacagcctccctccagttccatctgccggctcttggaaggcctggatccctgtccttcagggcccagcccaaatgccgcctcgtccat

SEQ ID NO: 157199 - DNA, 122 bp, Homo sapiens
ccgggagccccgctggaggctggcttggaccacagaggagcgaggcccgatccttactttcgatgcactcgcccttgctcttaccgggccaccctcaccctttcggaaaagaggttgaggtt

SEQ ID NO: 157200 - DNA, 122 bp, Homo sapiens
ctagtggcaccgacttgggtatgtttcttatgaatattacacgcggagcagcgtctggtccgggggtgcggtggggggtgttggggcgggcgggaggggagaccaaggcggctggggaagcg

SEQ ID NO: 157201 - DNA, 122 bp, Homo sapiens
ctgtgatccacctcctcggtctgtgatgactcctctgtctccctctctgctcccgtaccccgaagcgctgctacgattcccagggggagcgcctctcacactgtgccctgatacttctctcc

SEQ ID NO: 157202 - DNA, 122 bp, Homo sapiens
catttggagcggcgaggacggcttccgggatgtggctgggccattgtttctctctgctgccggagctccaggtctacccttcactgctctgtgtcctcagcgtgtgtggcttcgtgacctga

SEQ ID NO: 157203 - DNA, 122 bp, Homo sapiens
tccccgtcgcccgctcacctgccggggccgcgggcgccgacgctgcggttgctggccggtcgcctctacccgcgtccacgcaagccacctgcgccaccagctgccgcagaggcgtctcaacg

SEQ ID NO: 157204 - DNA, 122 bp, Homo sapiens
ctcaaagacgtcaggggctctcccaaatctctttaccctgccagaaagtcttctatagtacggcctccacttagctttcacgcctgatcttccatcgcatcctgctcataacctgccactag

SEQ ID NO: 157205 - DNA, 122 bp, Homo sapiens
acatccacagacacactcgggcacacagttcgatgacttgacagccgagcaaccatgcagcgcggcgctaattgcacaggatcccaccgccgtgctggggtaggggcgccgctcctcctgcc

SEQ ID NO: 157206 - DNA, 122 bp, Homo sapiens
ttacccagaattggagctggccattagaatcactctttacgcagtgatcttcctgatgagcgttggaggaaatatgctcatcatcgtggtcctgggactgagccgccgcctgaggactgtca

SEQ ID NO: 157207 - DNA, 122 bp, Homo sapiens
agggtggggaggaggctggacctccggagggctgcctggaggaggaggggtgcataggcacgcattgggctgcgtggccattcattcaacaggcactcattgagcacctgctgtgtgccttg

SEQ ID NO: 157208 - DNA, 122 bp, Homo sapiens
aggtctccaaagttcaaagacccacaagcaaactgctccttcacttcagcagcaagcggtcggggccgccgcagacagagggtcgattatgcaacccccataatctcgctgcagatctgcga

SEQ ID NO: 157209 - DNA, 122 bp, Homo sapiens
ggtgggtgtccaaaatctgctgcaccaggtgttctacagagaactcttctgttccattcccgcagctccacttgatgccatgaactagagaagttagggggaagtgctgtgggatccccacg

SEQ ID NO: 157210 - DNA, 122 bp, Homo sapiens
gacccgcactcccctttgcttgcgttgacttcggaacgtctcgggtttcttccacctctgcgcgaagccgctgggaacccaggagttgcgctggcagagaggggcggccccagaaaccactt

SEQ ID NO: 157211 - DNA, 122 bp, Homo sapiens
ggcggccgtccatctcccgagccaggacagcgcgcatgtgcgtccagaggggcagacccgcgctccagccagcgcgctgattggtcagctggagtgtcaatcggaatggtgaccgggcggga

SEQ ID NO: 157212 - DNA, 122 bp, Homo sapiens
ttggaagcccggaggaggggtacggaactgcccgatggggatgcgaccgcgggcgccagacgaactgtccccacattcgttggcgctggcggtggaggtggggagaagtgtgtaccaagcaa

SEQ ID NO: 157213 - DNA, 122 bp, Homo sapiens
tagccagtgtacccacttctgcgtaggccaatctgaaggccccagccttctgctcactcacgcacctgcagatgcctttgaaccacatcccagctacatgtagctgaggaatctagcactgg

SEQ ID NO: 157214 - DNA, 122 bp, Homo sapiens
cccacccctaattttatagatggggagcctgagactcaaaggaggttaaatgatttttaacggtctttccgactaaagagagaaccaatgttcaggcttacacctcctgcctgcagatactg

SEQ ID NO: 157215 - DNA, 122 bp, Homo sapiens
agctgcatcggccgttaagagttctttttacacgtccagatttttctagggaacccgaaacgaggtatgattcaggaggatgtattgaaagcccaggagccttccccttctggaacccccca

SEQ ID NO: 157216 - DNA, 122 bp, Homo sapiens
ttgagtattatgctgattacctgcatgacaaaattatctgcacaccaaacccctaaagcacgcaatttacccatgtaacaaaactgcacatggaccccttgaacctaaaataaaagttggaa

SEQ ID NO: 157217 - DNA, 122 bp, Homo sapiens
aataataagagctattttactgtgtccttgccatgaccacagactttgctcagtgctttacgtacattacctgagctaatcctaacctctctttgtgaggtagattcattatccctgtttca

SEQ ID NO: 157218 - DNA, 122 bp, Homo sapiens
tgtagggccgccgtcccacccccacctcgcccgagtccggggcggccccggtgtcccctccgagcctgctgcactccacgtccccctaccagggctccagcccccagggaaatctccgacca

SEQ ID NO: 157219 - DNA, 122 bp, Homo sapiens
ccggggacagctgccgagcccccggcaacggtgggagctgagccagcgctttgacgcccgcgtcggccaggagagtctgggggtctgctccagttccggcagaacatcctgggtggtcgtgc

SEQ ID NO: 157220 - DNA, 122 bp, Homo sapiens
gactgtggagcaaggtgctggacaggaacctgctgtgacgggacccaggcctgtccggggcgacttcgggaccggtggactggagtccccctagcgcagccaccgcgcccgatttaagagag

SEQ ID NO: 157221 - DNA, 122 bp, Homo sapiens
acccctccttcccgggcctgtccagcgccttctccctcctgctctccacggtcctacccccgcattgtcaggcattggcaacttaagcccaaacttctggaaggagaagcaagacctgtggg

SEQ ID NO: 157222 - DNA, 122 bp, Homo sapiens
gcagcagggcccgcctggctcgctgcggccgcttatcagagccggctgtggcgccggttacgtaaccgggcggctaatgctgttttacttgtcgatgaaacccaaattaaaagaggaaatta

SEQ ID NO: 157223 - DNA, 122 bp, Homo sapiens
cagccccgagccccgagccccgccccgggggcctcatcccgccccttcgcgtccgcggctcgttttcccccactgagcgcccagctcccgcagtttccccggccgtcgagcgccgtgggcgg

SEQ ID NO: 157224 - DNA, 122 bp, Homo sapiens
acctagcgtaataggcaaacaagatggaaaacctaactaggagcatgcgccggtaacaatcgctgagtcttgaccgatcccggcagccgtacttcaaccattcgtgcactgctgagtgttca

SEQ ID NO: 157225 - DNA, 122 bp, Homo sapiens
cagaccctcctggccaagcggccctcacacactagaccctgtggcttctgcacaaccttgcgcctgcctcctgccaggagacagcagtggctgcaggccaggggagcagtgagtcactcagg

SEQ ID NO: 157226 - DNA, 122 bp, Homo sapiens
cccagctctgaggggcatgagaaacgccaggccctcgggtcctccagaggctgggagagccgtggagccaccggggcaggctttcccaggagccccatgggggctgtgggccgcagcacgca

SEQ ID NO: 157227 - DNA, 122 bp, Homo sapiens
ggccccttcctggcccgcgctggaaacctggaagtctgttgctaaaatgcacgcgccgcgcggagcctacgatgacactactttccaaggcggcttttctgccttcggcactgagacacgcg

SEQ ID NO: 157228 - DNA, 122 bp, Homo sapiens
ttggacactctcaggatgcagaggagaaaaagataaaagtgggtaaatacgaaaggtagacgtggaggacagataatggatccttcacccaagaggagttcctgaacaggaaactgaagtca

SEQ ID NO: 157229 - DNA, 122 bp, Homo sapiens
gagcctcggccagggggcgtccggggaggcccgggagggtcccgggctggtgggcagggccgggggcggcggcgtgggggcggcaggggccgcggcgggctcgggcgggctcgggcgggccg

SEQ ID NO: 157230 - DNA, 122 bp, Homo sapiens
tgctgaggccaggacagggcagcctggctggggcagctgagccactgggcgtcctgtacccgggcgtgatggtgcccacagtgactcccgtttttcagaagaattggtggcctgcccgaagt

SEQ ID NO: 157231 - DNA, 122 bp, Homo sapiens
agctaccgcggccgagcgcgccggccaccgcctgcaccgcccttccgcccgccctccggacggccgcagccctgcgggtctccgctccagacccacccccgccccaccccgcgcgcctctgc

SEQ ID NO: 157232 - DNA, 122 bp, Homo sapiens
ctacaacatattgaggggggtcaactgtgtacactgagccagggcacccacccaggcaggcgcgaccatgaatgggggcgcagagggtgggggtgaggagcagccttggtgcctgaggaatg

SEQ ID NO: 157233 - DNA, 122 bp, Homo sapiens
tcctcggactgctccaggcattgtaaggctcttctgttggcccagtctgagctgctgctccgccttcgtccagcccgagagcggtttcttcaactgtggctcaggcagcactctccctccgc

SEQ ID NO: 157234 - DNA, 122 bp, Homo sapiens
ggggcccctgagagctggggtggttcagagcccgtccccactccgggagcaacgtcagggcggggcggggctggacggacaatgtgacctttgcaatgtccccgaacaagaactgcagatgg

SEQ ID NO: 157235 - DNA, 122 bp, Homo sapiens
gcggtgccgccagcaggagggaagggtgggcctcacgtggagcgggagaactgggagctgcgcgtgcgcagactggagccggttcattcataaagaaacagaaaggaacccggggtcctaaa

SEQ ID NO: 157236 - DNA, 122 bp, Homo sapiens
ctctgagctgtggggtgtccgggtgattctgaggcctgcgtccctgagctctgggctgtccgggtgattctgaggcctgcgtctctcagctgtgggctgttgaggtgattctgaggcctgcg

SEQ ID NO: 157237 - DNA, 122 bp, Homo sapiens
ggcctggacatggagagcagagccatggtagtgacagcatgtggataacacagaagacaacgtcagggacaggtggggacagcgtgggggacagggagaggtggggagattgggggacaggt

SEQ ID NO: 157238 - DNA, 122 bp, Homo sapiens
tagggcttctcgccggtgtggatgaactgatgctggagcaggtacctgcgctgggagaaacgcgcctgacactggccgcaggagaagggccgctccccggagtggacccgctggtggctggc

SEQ ID NO: 157239 - DNA, 122 bp, Homo sapiens
gacgggcattctggaggagtcgatggcccgccggggcagccgcaaatccatgtttactttcgtggagaagcccaaggtgaccccgaatccagacttgctggatctggtacagacagcggatg

SEQ ID NO: 157240 - DNA, 122 bp, Homo sapiens
aatatctcacttttccctgcaacacatccaactgcttggtcaacatcgccgatgaggtatcgcatagagatctcatgatttcttttttccagtcccatcccaatcctgctgcttcctcaaac

SEQ ID NO: 157241 - DNA, 122 bp, Homo sapiens
tagaaaacagggagatcttgaggcgtggcagttcctggtaattttacaatcggtaccggccggggaaggggctccagcaggagcacctgcggtggctaatgctagatatgaacgcttcacca

SEQ ID NO: 157242 - DNA, 122 bp, Homo sapiens
accccttccagggactgggactacggaccctggtccgaccttctcgcgggcttcccactgcgccaatcaaatcccagaaacagtgagtgctagaggcccggctgctaagcaacggcagaggg

SEQ ID NO: 157243 - DNA, 122 bp, Homo sapiens
gttcttgggcgtacctaatctgtgtgggtggaggcttatctaacatgaactgagaaagctcgtgaagtaagccgtgtgcttcttcgagatctgattcgtagattgggactgcccttccggat

SEQ ID NO: 157244 - DNA, 122 bp, Homo sapiens
gtgttgggggggcgctgccgggaacctctgtcctgtccaggaaggggagaaatctttcagcgtcctacttttacagctttggggttttgctttccccaagggtgggaggtgggagaagtggc

SEQ ID NO: 157245 - DNA, 122 bp, Homo sapiens
ggcggaggccgcgggcggggcggggcggagccgggcccagctggccgaacccggggaatgcgagcgccagcccccgccgcaggccagtcccagctggatctccggccagagcccgaggctgc

SEQ ID NO: 157246 - DNA, 122 bp, Homo sapiens
ctctaggagttcaggccaggtgcagtggctcatgcctataagcccagcactttgggaggccgaggtgagtgtatcacctgagggtgaaaccctgtctctataaaaacacaaaaattagcaga

SEQ ID NO: 157247 - DNA, 122 bp, Homo sapiens
atgacggccgagtggagtgagctgacccctgttgaaaagcctggtcctcggcttgcctgccgctcgagaatctgtttactaaacggggaggctcttttgttgcgatccatttggttttaaat

SEQ ID NO: 157248 - DNA, 122 bp, Homo sapiens
actcaacaactatttttggaatgggggtggggactcctgatttatgtaattcaggctctgcgtcgcttaccacagtgcttggcagtaggctaggctccttacatgtgatgatggttccttta

SEQ ID NO: 157249 - DNA, 122 bp, Homo sapiens
tgtgggtgtcctcatgccctcgccatagtgaaatatcacgctgtcaatggatgctaagcccggcctctcacattccagagctggaagggcccatggttagttagcccaattgtgaccctgac

SEQ ID NO: 157250 - DNA, 122 bp, Homo sapiens
cggcagggcggcctgggctttggcctccctccagttccctggaagtgggcctgtggccagcgcgggagcagcagcagaggcggaggccccagcgcgtctctctcctccccctcagcctgagc

SEQ ID NO: 157251 - DNA, 122 bp, Homo sapiens
cggaaaccacggctccctcttgcggtcccggggcaccgaggaatatggggacggtggctccgctcatccccggccaggcccgcttagcccgcgctggctccggaatggcgagggggcggtgc

SEQ ID NO: 157252 - DNA, 122 bp, Homo sapiens
agcccagtttgacgcaggccaggcatttccacttccttcccttgggatggacttcgcactcgtgtttcttccagtccttccgccggccgcttgtctgcctgagcttaaattccagtttcaca

SEQ ID NO: 157253 - DNA, 122 bp, Homo sapiens
tccttcctttcccttgtctcgtctagtgagagtactcagggggttgtgtttgtcggcctccggcagatgaatctgaaagcaaggacagtgtcttggttttttatccttaatgtctaataaaa

SEQ ID NO: 157254 - DNA, 122 bp, Homo sapiens
aattgataatggagtctacggtcaaccacggctatgagaaatggggccacagattgttaacgtttacaggagtctttttcccaagactgagagggagttttcctttgcagaaggatagcaat

SEQ ID NO: 157255 - DNA, 122 bp, Homo sapiens
cactgccatggcaacagcgtgcctctgcgtcctccatccgggcctctctaactacgagagcgacaaaaatctgcgcaggcgcatgcaatatcctcagaccaccgacccctcccggcacccat

SEQ ID NO: 157256 - DNA, 122 bp, Homo sapiens
ccaaggcgtctcccaggatcctcactagggagccgactccaggcagctggccgcagggcccgtccagagaagcacagaggttgtgcaccagggctgagatgcccaggaaggcgccagggctg

SEQ ID NO: 157257 - DNA, 122 bp, Homo sapiens
cacaggcagggtccgcccccagctgccgtcggcgtcactccacacacataggcttctgggcggtgctggaagcttctggcccctgaacgttccccccaggccccgtttcagggaaaggaaag

SEQ ID NO: 157258 - DNA, 122 bp, Homo sapiens
ccacttctgggcaggaaggcatcggcagcctcaccctcctttcactcaagcttaaaacaccgtgttctgcacagatatgaatagaaggatggcaaaacagtagcagcaaagagatgctctgg

SEQ ID NO: 157259 - DNA, 122 bp, Homo sapiens
tcggaaagagaggtcctcgcccgcgtccctgtatttcgtggttggtgttggtgcctcgatcgtgtgttcctttgaagtggaaatgcccccgttctcaacagttgagttgaacgcagggtcag

SEQ ID NO: 157260 - DNA, 122 bp, Homo sapiens
aatcacgctgtaactccataacttcatgtctcacatctcctaactctgtgtttataaaagcgacgcattcaaacctaacccagtccgctttttgcttgtgcacaaataccgtgcagtagctt

SEQ ID NO: 157261 - DNA, 122 bp, Homo sapiens
tattcaatcttacagcttttgaatggatatgatcatctgatggtgcactgtagtcttcagcgaaatcctatacacaatttcttggtccatccatgttcagtgagactatgtaaaactgttgg

SEQ ID NO: 157262 - DNA, 122 bp, Homo sapiens
atgagcaaagctgagagtggagcgcacacatacacatacgtacactcgctccgcggcgcgcgcgcttgcttagacacacatccgtgcatgcatttatcttatcaggcaccaagaatttgcaa

SEQ ID NO: 157263 - DNA, 122 bp, Homo sapiens
acccctttccatacgtacctgtcagcccctggtaaaactaggcttgataattgaatatgccgcagctctttagccagcataatctgggacatagaataggttggtgggggtgagctgccatg

SEQ ID NO: 157264 - DNA, 122 bp, Homo sapiens
aagcagggcggggagcgcgggggaggcccgggggtgaggtcctcagctcttaaagaaccccggcgcgccgcgctccccgccggcccgccgcgcgccccctgccgcgccccgcacagcgcccc

SEQ ID NO: 157265 - DNA, 122 bp, Homo sapiens
cttcattcgcggtggtctccaagtggcgataccgcgccactctgggcgatctgattggttcgtttaggcatggaaggcgggaacaaccagaaaagctgcgctctggttggagttatgtccta

SEQ ID NO: 157266 - DNA, 122 bp, Homo sapiens
ctgtgattggctgcaccgagttccttggccgcctcccccgcttgtggaaggaactgagcacgtgtttctaattgtggaaaagccgcttcggcttggcctgtccaaccgcaggcgtttccaga

SEQ ID NO: 157267 - DNA, 122 bp, Homo sapiens
gccctgtcttgggtctctggctctctggcacacagagagcgctctgcagagggcagccctcgcaggcagaccctgttccagcagggctgaggggcagccgtgtggcccagcggtcagtgcag

SEQ ID NO: 157268 - DNA, 122 bp, Homo sapiens
actggactgagcatttgccctgagctaagcagcaaacaaggcagacaggacccctgccctcgcctggtcctcatcataatccctcagccagacctcttgactgcgagtctcagatttttttg

SEQ ID NO: 157269 - DNA, 122 bp, Homo sapiens
ttaaaattctgcccttaatgtgtacacttttatagcctagaagatgaatgccgccttaaacgaatgagtcaggaagcccctttctgtccggcccctccactccccaccacacgggttgttcc

SEQ ID NO: 157270 - DNA, 122 bp, Homo sapiens
ttttgttattccaagctgatgagaaggcctgctctcccagcctccacatgccaatcagcccgtgtcaccgatataattttccacataaacacaacctttgtgcaacatctactcttgtaaat

SEQ ID NO: 157271 - DNA, 122 bp, Homo sapiens
gtcctgcccagacttttcacgcagaggtggaaagttgcagaccccgagccgggaggggcgcgagcccaccctgaagcccaggacccaggagggcgcttcctcccggaagtgacgcgagctca

SEQ ID NO: 157272 - DNA, 122 bp, Homo sapiens
gaaggagtcttgctctgtcgcccaggctggagtgcagtggcgcgatcttccaggccccaccgggccctcaggaaggccttgcctacctgctttaaggggactcctggctcagggccaggccc

SEQ ID NO: 157273 - DNA, 122 bp, Homo sapiens
cgattgtacttgaaaacttcacataacaccagcttgttagggtccttacggaaggggtcccgaaacatggcagcaggcacgagatacatgtcactgttggaaccctcagactgtaaagtact

SEQ ID NO: 157274 - DNA, 122 bp, Homo sapiens
ttgctgcggagagcgggacctgcgggctgcccggacgtcggacgccgtccggcttccatccgacagactggccccagttttatggtgccccgtggccacgaaggacaaaaggaaaggacgca

SEQ ID NO: 157275 - DNA, 122 bp, Homo sapiens
aactctccaaaaagcagctttctctgcgcgcatctgtgtgtgcggacggggcctggacttcgaaccgccggcgcggctccacgggctccctgctccggccgcccccgggatgcgtgttgtag

SEQ ID NO: 157276 - DNA, 122 bp, Homo sapiens
tctgcctgtctgttctaggcattgtaggcatcatgaagtccagcaggaaaattcttctggcggtaagacctcaaaattctctggagttgtctccctgagccaattgtaatggattctttctt

SEQ ID NO: 157277 - DNA, 122 bp, Homo sapiens
gcagggcctccaggggagatctccaccctgtgttcacagcagccttactcacggtgactgcgtgatggacgcagcctgtatccatcctcggacaaacaagtcagcaccatgtggccctccgc

SEQ ID NO: 157278 - DNA, 122 bp, Homo sapiens
aaggggcataatgatcattaaaaaataaaatgggtctcaaacagattgaccacatatgagcgataaaagtaggaagtgaacaagtctgaatccccattcacatcccattttatgtatgaagt

SEQ ID NO: 157279 - DNA, 122 bp, Homo sapiens
ccatgccaggacaacagccgccgggtagacaatgtgctaaagctgtggatcatagaggcccgggagctgccccccaagaagcggtactactgtgagctctgcctggatgacatgctgtatgc

SEQ ID NO: 157280 - DNA, 122 bp, Homo sapiens
tttgtggacgccagcatggtgtatggcagtgaggtctccctctcgctgcggctccgcaaccggaccaactacctggggctgctggccatcaaccagcgctttcaagacaacggccgggccct

SEQ ID NO: 157281 - DNA, 122 bp, Homo sapiens
ttgccgcctgcatgacatgtggaaacaccaaggtgttgcgagccgtccacagccttctctcgcgcctgatgagcattttcccaacagagccgagtatgtgacctttcccaccggtgcttttc

SEQ ID NO: 157282 - DNA, 122 bp, Homo sapiens
gccggcgagcgtggctgccgggcactggtgcagcaggtaaataccctgggccggccgccacgtcgccgaccctcccgcagctcccgccgccagggcgcgacacgccattccccctgccgcga

SEQ ID NO: 157283 - DNA, 122 bp, Homo sapiens
agcccagcccggcccggcccacccagggctaagttgggaccccccagtccctttccaggacgaatgggcccaactatgccgcctgcagcctggcccgcatcccaggccggaatcgttcatag

SEQ ID NO: 157284 - DNA, 122 bp, Homo sapiens
cagcccaagggagggctgccccctcccagggccccttcctccttggccctttgtctatcccggcccgtctgggcatcagggcaccgcccttcctgtggccccagctcccctccctgctccag

SEQ ID NO: 157285 - DNA, 122 bp, Homo sapiens
tcttttaaactgaccgcccattcagatgcctccatcacctctccttctagtgaaatggtacgaggaattatatgcaatgaccttcaaaagatactctatgaactaacaagaacaaaaatgtc

SEQ ID NO: 157286 - DNA, 122 bp, Homo sapiens
ttaacaataaagtttttctttttttgagacaaggtttcgctctgtcaccaccctggagggcggtggcacaattgtagctcactgtagactctatctcctgggctcgagccatactcccacct

SEQ ID NO: 157287 - DNA, 122 bp, Homo sapiens
tggtgaattctgcttcacaatgataggaagagccgacatcgaaggatcaaaaagcgacgtcgctatgaacgcttggccgccacaagccagttatccctgtggtaacttttctgacacctcct

SEQ ID NO: 157288 - DNA, 122 bp, Homo sapiens
atcctccccaaggaggccaaaagcaagaagaacagtgatccctcccccagatcccccacgcggatagcaatcgagaaggcagaacccaggccccctgaccaatgcccagggggcagcaaacc

SEQ ID NO: 157289 - DNA, 122 bp, Homo sapiens
actcaccgtcccccaccggccgcggacccgccgcccggcgccaccggctcctcctggtcgcggcgcaaccgctgccgccgctgtctcctcccgacgcgccagctctccctgcggggccgagc

SEQ ID NO: 157290 - DNA, 122 bp, Homo sapiens
atgcccggcccctgctcctccccaagatccttctgtctctgatctctgatctctgacctgcgttcttagctgggacgtcgagttctcccaggataattatcgaccaggtttgtaactgtccg

SEQ ID NO: 157291 - DNA, 122 bp, Homo sapiens
ttttctctatgtcttccaagtgtgtttacagccatggctcaggctcatgtgtgctcaggccgagcatcactggggagaaggtgtctcttctcctgcctcactgtttgcactgaagggagaat

SEQ ID NO: 157292 - DNA, 122 bp, Homo sapiens
catgaaatcaaacttttgtattggcatgacgtcggccctaatacctgcagcacgcagctccgttctgggcgttggagggataaattgagtgcagacccttcgacgtgctgcgctgggctcca

SEQ ID NO: 157293 - DNA, 122 bp, Homo sapiens
catgcagcatggccgtcgctagtgccagggccggaacccgggcacctggcaacgggcaaacgcccctcccccgggaagaggcctggctctaaggcagcaggttccagccaggcccatggcct

SEQ ID NO: 157294 - DNA, 122 bp, Homo sapiens
cccgccagctctgccccatgcgcatgagcggccgccgctcgccctcagccaggcccagcgcgccccgacgcgtccccacgcctgcgtgatccaccggaacccaagcccaggcaggcggtgag

SEQ ID NO: 157295 - DNA, 122 bp, Homo sapiens
cctccgcgtgtcccgctcctctcacccgctccaaaatagaagccccttcccacccactgccgcggccgctcttccaaacactgctcgcccccacgctggctcccgacaagccccggcccccg

SEQ ID NO: 157296 - DNA, 122 bp, Homo sapiens
ccgcagcagctcagagacggtgcggaccgtgtcgatcacacagcgcatgagagggaggggcggggtgagaaacccggtttgaacctcacagcaccccaccatcacctcctgccttggagccg

SEQ ID NO: 157297 - DNA, 122 bp, Homo sapiens
gtcaagattggctgcctcatgttgaggttcagagttacgactcggactggacagaggcgccggcagctgtggtgattggcggggagacctacggcgtgagcctggagtccctgcagctggcc

SEQ ID NO: 157298 - DNA, 122 bp, Homo sapiens
actgcctacccagagaccacaccatgagaagaccaagccacatggagaggccctggaggacgtgaggaggagcactgagccaggaagcaggttggagaagaagccatctttgaagaggatcc

SEQ ID NO: 157299 - DNA, 122 bp, Homo sapiens
aggatctgcgggcagctgcatttgccacccggctttattgctgctttccagcggcgaaggcgcagcagcagtaacagggaagccagagcgagcctccccggcagcggcggcggcggcggcgg

SEQ ID NO: 157300 - DNA, 122 bp, Homo sapiens
gggggctgggccccgggcgcctctggcccgtctgcctggcagtggtggggcaatgcgggccgagccactcccgggctggaccttgggctgcgtggctcttggcatctgtacttgatgctgcc

SEQ ID NO: 157301 - DNA, 122 bp, Homo sapiens
cacgttttccttgtcctctccggccggcagtgtagcagcagcaactccctacgttgaagtcgtctccctccgtccccgcccttacttccttttcccttaaggacctcgcgcgcgcttccata

SEQ ID NO: 157302 - DNA, 122 bp, Homo sapiens
cccaaaaaagcaagaattgaagtctgggctatccctggtgagatctgaacctgtagatcccgtggtcaggccatgggttgttgccttcctttgctggaggtttgatgccttatgaggggcaa

SEQ ID NO: 157303 - DNA, 122 bp, Homo sapiens
gtggcgcctggagctgactgccgggtgccacatgtgtcctgcctcaagccaagctccaggcggcacccgtgagcaggcagggatgccagtggtttctcacctgggagtttctttgcaggctc

SEQ ID NO: 157304 - DNA, 122 bp, Homo sapiens
ttcctgtggccgtcctaattatagaatctcaaagacacgcacagagctccttgaggttgtcggagttaaggctgaaagaggaggagcggcccctgtgatccccacaattttgttccctgctt

SEQ ID NO: 157305 - DNA, 122 bp, Homo sapiens
ataaataaataaagagcccgccagcagccacacagcctgatggcaaccagatggagagagcgaggcatggacagggccaggggaaggaactccctccagtggactagactgagagtgggctc

SEQ ID NO: 157306 - DNA, 122 bp, Homo sapiens
aaagaaaacagctgggctgcaggagctttgctgttttcagatctccttagccaaaaagtacgagctatatagggttttgaacataacaatagagcactaaaaatacgaatttttagtctttg

SEQ ID NO: 157307 - DNA, 122 bp, Homo sapiens
tcaagtgaaagccaaataaatgagaatatctgggcacttaccagagagtggatattttggcgggcatttttgataaaagctaaagaatcctgatatacaaacccaaggcattgctgaattta

SEQ ID NO: 157308 - DNA, 122 bp, Homo sapiens
cagattagcacagggaacagggcaagaagaatggtgaccagattagcacagggaacagggcgaggagaatggtgtccagggcacctatgaagcattgcttctactttctgagctgctggaat

SEQ ID NO: 157309 - DNA, 122 bp, Homo sapiens
taatttcaaggctgggtaatgccagcagattagagagggaaaggctccctcgggttcagccggcacattaggcacagttataaatgtcagcgctgatggctcgtcaagagccccaggatggg

SEQ ID NO: 157310 - DNA, 122 bp, Homo sapiens
acaactcacccaaatcaaaattacttcaatgactatccgtttcctacagggaaagttagacgggaaacctgatgcccagaacatttccccaaatattattgagaaaatacatattgtggcca

SEQ ID NO: 157311 - DNA, 122 bp, Homo sapiens
ctatgtggccctccaggtagcgctcgtggttgctggggtagaaggcgatgttcttgggcacgagcagggccaggtgggcagccgtagtgcagcgcacggtgtctggggaggaggagcacggc

SEQ ID NO: 157312 - DNA, 122 bp, Homo sapiens
cattgcctgccgggggaggtagagctggtgcctactgcagggagaggaggctggcagtgccggcctgggctggacccactgccatagcagttgcctacttggggtccctgggtaggatggag

SEQ ID NO: 157313 - DNA, 122 bp, Homo sapiens
cggccgcggcagccagtcaagagcctgcggatccaggagcaggtgcagcagatcctcgcccggaagggccgcagctccgtgggcaacggaaatcttcaccgaaccagcagtgttcctgagta

SEQ ID NO: 157314 - DNA, 122 bp, Homo sapiens
ccgctgcagcttctttcaagtccacatctgcgtctccgtcagtttcctctgggattccatcggtgtcggtagcccccgggtccccgggcacagcggccgtctcatccgactcccctgtctct

SEQ ID NO: 157315 - DNA, 122 bp, Homo sapiens
atcagatccaggcttcggctgacagatggtcccataaatggatgtaaaaaggggaagcttcgagccaatttcagcaaggctctgttcagttgttcttatctacatcctagaatcgggggttt

SEQ ID NO: 157316 - DNA, 122 bp, Homo sapiens
ataccttgaagtatgtgtttagtagcctcaattctccattaattaaaagtgtgggctgggcgtgggggctcatgcctgtaatcccagcactttgggaggccgaggtgggcagatcacctgag

SEQ ID NO: 157317 - DNA, 122 bp, Homo sapiens
agatgaaagtgagtgagaggatgggagagtggtagcagcaggaataggtgactgaggaatcggacagtgacactgagagagaaaaggatagagaacaatggagagatgtcagagagcgaaat

SEQ ID NO: 157318 - DNA, 122 bp, Homo sapiens
ccaaaatatatgaaaaatttgttctggagttttagccctctaaaggcctcattcattccacgtgcactgagtctgtgccaggttccttgtaagcggacaggtatagagaaatcccaaacaag

SEQ ID NO: 157319 - DNA, 122 bp, Homo sapiens
aggtgctgccaaggtggcctccggtgagctgtggacaagtcaggcctgcctgcctatcaccgccctcaggagccactcccaacccctcccagtgtcctcctctcaaagcaactttccctctt

SEQ ID NO: 157320 - DNA, 122 bp, Homo sapiens
agcccaggtgaagctgcagctggggacacgagttaatgtgagtgcgagcccagggcagagcgggcccagataaataattcatgagcgccaccggggaagaccgggcactcgtggagttcaac

SEQ ID NO: 157321 - DNA, 122 bp, Homo sapiens
acgcaaacgcctacacacccaggcagacacacccggaggcgtgggggaacatattccagacgaggtccgagagaacctgggggccagacttaccttaatctaagccaagacaccccctctac

SEQ ID NO: 157322 - DNA, 122 bp, Homo sapiens
taatttttagcaaacatagacagaaaacccagtctagctttttgtgggtggttgtacccacgagggcctctgcactctgattccaggcttttgttctgtgtcctgacctttttattgagcag

SEQ ID NO: 157323 - DNA, 122 bp, Homo sapiens
atttctctgagcctctgcttccttatctgcagagaggagggtaataaagaacctacctcacggggttgttgtgaagttagaatgaacaaatgcatgtacaccacttagcacggtgcctggca

SEQ ID NO: 157324 - DNA, 122 bp, Homo sapiens
cgggcagggctcggccacggcactctgttggagccccactgaaaactgggtttggggtgtcggagcccgtggtgcagagtcgccggccgtgtcggagggccccagcaccgctgctccactgc

SEQ ID NO: 157325 - DNA, 122 bp, Homo sapiens
atgcatcttaatgacttgctcttaccctcacgacttctcctcagtcctttggaggagcatcggcctcacagtttgaccctttgtttttatgtttaatcaccattgacaccctttttgcctgt

SEQ ID NO: 157326 - DNA, 122 bp, Homo sapiens
actttcaagctaactttatacctgcagttttcttcctgaatacttagtgacacagttctgcgttactctatgctgccactacctagtacctagaaggcctgagatttagtggcagctgataa

SEQ ID NO: 157327 - DNA, 122 bp, Homo sapiens
caacatggcgaaattctgtctctactaaaaacccaaaaattagccgggtgtggtggcacgcgcctgtaaatccaggaggcataggttgcagtgagtggagatcttgccattgcactccagcc

SEQ ID NO: 157328 - DNA, 122 bp, Homo sapiens
ccagggtcctgcctttctcactcatctcatctcctcccatcttatttcccaaattgactgcgctctaagcgccctggcctccttgcttcttttcaaaacaccaaccacattaagcttcagga

SEQ ID NO: 157329 - DNA, 122 bp, Homo sapiens
ggtaggccacgttcccccagtgtcttcatctgcagagggagaccgggagcctctgaagaccgctccagctctgcactgtgggggcggccggccagcaggcaggcaatgctctcaggccccac

SEQ ID NO: 157330 - DNA, 122 bp, Homo sapiens
tttttttagagacaaggtcttgttctgtcacccgcgctggaatgcagtgtggcacgatcacggctcactgcagcctcgaactcctgggctcaagcgatcctcctaccttggcctcaggagta

SEQ ID NO: 157331 - DNA, 122 bp, Homo sapiens
gccccaccagcgcggggcaccagcgcctcggggtccgggggaggcctctctctgcaccgccgccaccaaagccagtaagagagggcaaaaccccaaagagcactgactgggccgtcaaggaa

SEQ ID NO: 157332 - DNA, 122 bp, Homo sapiens
aacagagtaagaccctgcccccccaaaaaagtagtcctaagtaattattgatttaaaaggcggtgtaggataaaaggtaaagaaggccatttctactgtgggtgtacatggacttcaaattc

SEQ ID NO: 157333 - DNA, 122 bp, Homo sapiens
ctgggagactgcagctgaaaggtgtgggttccgggagggctgcagggggctgagcagcagcgtcagggagcagagggccgccctccctccatcttccttccttctctggaccccagagcact

SEQ ID NO: 157334 - DNA, 122 bp, Homo sapiens
atgcttttcagttttgaacataaagcagtggctctgagcgcgactcggagggcgacgccgcggccgcagccatgggtgctgggcctgcaggggcgcgggggggagggcgacgctaggacctg

SEQ ID NO: 157335 - DNA, 122 bp, Homo sapiens
agcgctgcctctcagcccaaccaagtgacagagacgagacaaccacaggaatagcagctgcggagctccatggcctccctctgccccctggtggtgagaaggagaaaagcaagagcaggtgc

SEQ ID NO: 157336 - DNA, 122 bp, Homo sapiens
gcggtctcagtggcctgaaattctgcatttctcacaagctctcagacgatgctgatgctgcgagtccatggaccgcatgtggagaagcaaaggtcctcatccccaggcccacaggtcccttg

SEQ ID NO: 157337 - DNA, 122 bp, Homo sapiens
gcacggcctacgagaggggtagtgtgggactgagccaatgcgtacggcgtgacgccatcccgctgcgaccggcgctccccggggcaggtggctgcatagtcttggcggaggtgagtctcgtg

SEQ ID NO: 157338 - DNA, 122 bp, Homo sapiens
gggggcgggaaaaagagaagagtgaaggaatgatgcatgcactttttcctcccaaccatgcgctacaaaaggaagactaaatgagccaagtaaatgctcaaagtgctgaaaagacactgatc

SEQ ID NO: 157339 - DNA, 122 bp, Homo sapiens
atttgttttggtaagaggggatttagcgtcccaattgctgcaaattgacacagttgcggacgtgcaagcgcagaagaaatttgtccttcctcaccccacagaacagaaacaactgtacactt

SEQ ID NO: 157340 - DNA, 122 bp, Homo sapiens
tttcattgagaaaacattcagtggtcaaaacaaggctgacccagcagggtaaagttctgtcgaagctcctgttcaccctttggctactgatttactaacatagccctttgtacaggcattga

SEQ ID NO: 157341 - DNA, 122 bp, Homo sapiens
aagctccctgagcatagggagcatgagcttgtctgtgattcggcaaggccttggtcactgcggcgcagacgcaggcctcacaccggccaggcctgttacacgctttgcacgctttacacttc

SEQ ID NO: 157342 - DNA, 122 bp, Homo sapiens
ttacaggagttatccaatgaagccctgagaaaaattctacgaagggatcttccagtgacccgcactcttattgactggcacaggatactctctgacttgaatctggtgatgtatcctaaatt

SEQ ID NO: 157343 - DNA, 122 bp, Homo sapiens
gaggctcctgcaaactttgagggcctgcccagaactctctccaagcccaggtggggcaaacgcttccaggtcaaatgccaaaattcctgtccccatgacatgggccttaggcagtaaaggaa

SEQ ID NO: 157344 - DNA, 122 bp, Homo sapiens
accccaaaggaggcgggacggagcgggaaagtcctgcctaccttggccttcccagccaatcgcagcatctatgcgtcagcctccggttcggttgcgctgcgcgtagtggtctgggcgacctg

SEQ ID NO: 157345 - DNA, 122 bp, Homo sapiens
gttctccactctgccctgaagagggtccaggagctcccgcgaggggcacaccctaaaaaccgaagtttgggaagtgggaaagcggctgggggtcgggggagtggcgcgggcggccggagatt

SEQ ID NO: 157346 - DNA, 122 bp, Homo sapiens
aaagaaaaccagaatatttactcataggccatgaaacaggaagtgacatgaaatttagatcgaagtgcatgatttagagtgtgtttgcttactttgggtgaaaagtttagaaacacattgaa

SEQ ID NO: 157347 - DNA, 122 bp, Homo sapiens
cagcggaagtgcgggctggagctcgctgggcattgtgggaagccccctcccctgggctggcggggggctggggcggcgcggcgcgggggtccccctggcccccgctgcgcccttgccccgcg

SEQ ID NO: 157348 - DNA, 122 bp, Homo sapiens
ttttctacccttcggcgccctgctcttcctcatgttggcatccccggccacggagaccaccgtcctcatgtcccagactgaggccgacctggccctgcggcccccgcctcctcttggcaccg

SEQ ID NO: 157349 - DNA, 122 bp, Homo sapiens
aggagctgtcccatgtgtctttaagtggtgccagggccagggtctgcaccttggtggaaacggtgtcaacgcccttgcacacaaagccaacccttccaccctctctgcttgccctcagaagt

SEQ ID NO: 157350 - DNA, 122 bp, Homo sapiens
agaagggaatctgtgaaatgggctttgaaacctgccttgcctttctccgcccggtcccagcgggggtccgatcggcatcaaggcttcacccactcccagagccttcgggatcagccccaccc

SEQ ID NO: 157351 - DNA, 122 bp, Homo sapiens
gctttcagaggaggatggaaaattccgtactcgcaccgattccacccgagagcaggtgtgcggtgtcgggaagtgattccttcccaaggtagtctgcagctggtggtgcgggcagtggggct

SEQ ID NO: 157352 - DNA, 122 bp, Homo sapiens
tttcgcgcggtcggagaatcagattgtgcccacaaggcggaaatgtacgacagcgggttccggtgaccacgaaggcggcaaaggcgacggaatggaggaggtgcctcacggtaagctcgcgg

SEQ ID NO: 157353 - DNA, 122 bp, Homo sapiens
tagcgtagggcgaagggaacaatggaagtggcgtccagtccctgagctttcctcccgcctcgggcggagttttcctcttcagccgcagccgggggctggaggaattgagggaagtaagggtt

SEQ ID NO: 157354 - DNA, 122 bp, Homo sapiens
ttatgggcaactttctgatctgtccatcagcagtctgagaaacgctggctctgaattttccgtgtcggccttttggaaacaacaagttcctcgctgtttgcaaagcttcagtgctcgggtcc

SEQ ID NO: 157355 - DNA, 122 bp, Homo sapiens
gggtggaggccgccctgagacctgcaccccggccccggccccacctgcccgccgcccgcccggccccacctcatgctgcccctgcagggcccgcaggcgctcctccatcagcccccgaagct

SEQ ID NO: 157356 - DNA, 122 bp, Homo sapiens
gctcagcgtggccatggtattcggtggtcttatgattttataggcctagccaggggtctgcgagctgcttctgtccagggccaggtagttgaagcctggggttctgagcaggcgtgggcagc

SEQ ID NO: 157357 - DNA, 122 bp, Homo sapiens
gagcgaaagccgcggagtggcttccctgtctcttggccagagagttctggccaggcagttcggctgcaactttcagatccattttctctggtggagatatttctggtgtctttttgtaggcc

SEQ ID NO: 157358 - DNA, 122 bp, Homo sapiens
gccgagcattacatcatcaccgtggtctcccattggtttacatcctgggcttcctgactccgcctcccagccttaacaatgggcctctctgctccccaggcttctgaccctggtgccagctt

SEQ ID NO: 157359 - DNA, 122 bp, Homo sapiens
tattattgtggatttgagttcgaggtgggtttttcttccacaccagactcctggaaaatccgatcgcctgtctcctctcggcctctccttgcctccctttccgcccctcgcctaatctcgca

SEQ ID NO: 157360 - DNA, 122 bp, Homo sapiens
agcagttaggtcagatctcttttgctgtgataattgtcccagttataattttttcaaagtcggtctcaggagcagaggcataggtttgatttctttcactcagtcttacatctatgaatttt

SEQ ID NO: 157361 - DNA, 122 bp, Homo sapiens
tatcttccgaaaggattgaggctctgaaaggcagagggcgcggcagggagcagatgggagcgcccggggtccctaaccacctacacctgtacctgtgacgcgtttagttaagttgcaagtca

SEQ ID NO: 157362 - DNA, 122 bp, Homo sapiens
ctcgtggacgcccacagaaatgcactcgagaggaacataaaagcatcacacttaagcgctcgaaagaaagccccacgaacccataaaggctcctccccgctccttcctcgaagctcctcctt

SEQ ID NO: 157363 - DNA, 122 bp, Homo sapiens
ttgaaatgaggaaacataaacagaaaaggctccactccagtaagctgccagagttgaagccgattggtctctgcttttccttgcctgtggcaactgacagcacctcccagcctagcaggccg

SEQ ID NO: 157364 - DNA, 122 bp, Homo sapiens
tgtgaaatttgtttatcattggaggtcaacgtttggcatcttaggattgaacaaggtgaacgactgtagtttcagaaaagaaaagggtgatattgactgatttagggataaatcaagaaatg

SEQ ID NO: 157365 - DNA, 122 bp, Homo sapiens
atgatctgtccaggtcctcaagatttgaaaagacagaaccctctctgccctcttatatgacggcatggtatctggcacaacttgggggcatgtacagaaagcaatgtccccactcaagaggc

SEQ ID NO: 157366 - DNA, 122 bp, Homo sapiens
ccccgtgacggccgggaccccaggcccgggcccagggaggagaaggagggggcgagcggccgaccctgcctgggcgccccacccaaggggggccgccacctacatctccccaccgccctccc

SEQ ID NO: 157367 - DNA, 122 bp, Homo sapiens
cgacgcaagatggcggtccggccgccgccgcgcagccggtctcctcccccgcgctctgggcgctcccgacgacccgcgccggcctcaagacccccagtccagcgcccccggagtgaggcggc

SEQ ID NO: 157368 - DNA, 122 bp, Homo sapiens
agtacacgagacaaaacggcttggagcgtccattttcacaggatgagtggtgggcgcgcgcgcgccctgggtccccctccaaaagccgcaagacgcaggcgcccaactgtccacagacgctc

SEQ ID NO: 157369 - DNA, 122 bp, Homo sapiens
atgccgtagtgggggccctgatgccggccgccatgatcgccccggtggagtgcccctctgcggctgcttcggacgcatttgcgatggctagtcccatgaatggagaagaatgcatgctggct

SEQ ID NO: 157370 - DNA, 122 bp, Homo sapiens
tcttgccgaggcgtctggagctccagacaagcaggctgggcgggcagggggcgggaggggcggcccagggacctccccacaatcccgcctccaatggggtcccccacctgaccccgggcccc

SEQ ID NO: 157371 - DNA, 122 bp, Homo sapiens
cagcggccctcccctcgctgatgcccttccgccccgctcaggtagcaggtatgtgccccgcgctgtgctaactgatctggagccgggcaccctggactctgtgcgctccgggcccttcggcc

SEQ ID NO: 157372 - DNA, 122 bp, Homo sapiens
agtcactgcgtcacggccatgctgttccttccaaacctgctcgtcaggagacagctcttgcgctgtgtaccggcactgccgcccagcaggtgaccccagcagctggtttgtccctgcctggg

SEQ ID NO: 157373 - DNA, 122 bp, Homo sapiens
tgcgtgagtctggcccagggtgcaaaagccccaaccagccatcaatctgcaccccagccacgccaccctggtgtcccagaatatacagggacatctcaggctgtgcaccatgggctggggca

SEQ ID NO: 157374 - DNA, 122 bp, Homo sapiens
gtagagcacagcatggcctaaatgccccacacccgccctgtgtgcacacccaggggaatacggatcagtgtgaaaaaacagatctgtgcaacagagacacaaaacgcaacacaaagccacag

SEQ ID NO: 157375 - DNA, 122 bp, Homo sapiens
ctccgcagaggcaacgtagattcttgtggattctttttgtttttgttttcttcgagacagcgagacgcatcttgctctgtttcccaggctggaatgcaatggcagagtagcctcgaactccc

SEQ ID NO: 157376 - DNA, 122 bp, Homo sapiens
ggttggaaagagacttagagggcatgatctcctttccagcagagtccgctggagttttcacgcgctccggtgccctgaggactgaacgcccacgatttaggtttaatcgatgtccctccctc

SEQ ID NO: 157377 - DNA, 122 bp, Homo sapiens
gtttacaggccggaagtgaggggcgggcctaagggggcgcgctccttttgaaacctgagacggagacctgcggagggcgagggctggttggaggtcgctgtcctttctgggaaccaagcagg

SEQ ID NO: 157378 - DNA, 122 bp, Homo sapiens
tgccggcccgaccggcgctctggtgacgcgcgacgtctgccttcgcccacggctcttgggcgacgacccctcccacactcgccgtgcttgttagctgcgcgccgcgcttcttgtgcgacggc

SEQ ID NO: 157379 - DNA, 122 bp, Homo sapiens
aaggccccaagccaaaccccgctactagtagaaccaacagtctaaacgaaagagccacgacgctctgcgcatgtgcgctcttcgcaagctgaaaatcttgcggggagctctttagcaagttc

SEQ ID NO: 157380 - DNA, 122 bp, Homo sapiens
tcttataaactagggtacagtgcttatgtgtagttccatttgcctttgatcttacagactcgactcatttccaaaattactcaggtcagcacctttcccccagctcccttcagaaaagttat

SEQ ID NO: 157381 - DNA, 122 bp, Homo sapiens
agtcttgcctcccttttctgcttctttttctaactgctgtttgtacccagatccccaccacgatgacttgtacctcaatgccagcagcttcctggccctgatcaatggggaaagagaccatc

SEQ ID NO: 157382 - DNA, 122 bp, Homo sapiens
actaatgtgagaaatggtagatgaaaatgtggccaagttctcgtgacacttaatttacttcggaaacataagggtttgatttgttgatgttctcaattatttataatatttgggagctttaa

SEQ ID NO: 157383 - DNA, 122 bp, Homo sapiens
ccgctcggcaaccgctgagccggcgcaagagctcaggccctcagggagcgtggccagatccggcagatgaaatccaggacacccagttcaatttgaatttcagatacacagcacacaagtac

SEQ ID NO: 157384 - DNA, 122 bp, Homo sapiens
ataacagggtcctggttaccagcctgtatttgagaagcatgtgtttcaaggaggggcatccggttgcctggcccttcctgcaggggaccaggaagcgcccttacccaggagaatgacgatgc

SEQ ID NO: 157385 - DNA, 122 bp, Homo sapiens
aactcgctggcatttcctattatttccagatatgggagagaaaaaaaaggaagcgggagccggactcctgacacagtccaagtggctgcatcttctacaggcatccatctgaaactcccatc

SEQ ID NO: 157386 - DNA, 122 bp, Homo sapiens
cgctggggacgacccgcccctctggcagcctcttgcagccggggagccgtgcccactgagcgcaaacagggagcacatctgagcacccggctgctgggggaagtgcaagcgcctctgctccc

SEQ ID NO: 157387 - DNA, 122 bp, Homo sapiens
caaggccaatggctcacactcatctgccactctcctttctatcatctgtatccagctaagcgaatagtcagcatttattatgtaacctttatgattttttttttgcctccacatgttatgtc

SEQ ID NO: 157388 - DNA, 122 bp, Homo sapiens
agccaggtggcacccagcagccaggaaacccatgagtgacagtggccaaggtggcctggtcgtctgcaattacaggaacctgcctttcaaggtgattaaaatcaggaataaggttcctttgt

SEQ ID NO: 157389 - DNA, 122 bp, Homo sapiens
tttttttttttttttgcatgtgtttcttaacagctggtaagaatatcagctgaaattattcgccacaagcacacactttctgtttgtctccagataaagggatttaaaatcccgtttgtcag

SEQ ID NO: 157390 - DNA, 122 bp, Homo sapiens
tctccccaggaggctcctaacatgaggctgggcatcagggtatgctcctcacctggttcccgggtccactaccagcacatcgtccttgagcaggttcagggcctcctgggtgctgcccttcc

SEQ ID NO: 157391 - DNA, 122 bp, Homo sapiens
agcctagaagtctgagtgtagatgtgagtctctaaggaaacagagctcccagcagtgccacgctggcagtagtgtgaatggaggaagagaaaataggtgaaaaggaaggacacggcatctgg

SEQ ID NO: 157392 - DNA, 122 bp, Homo sapiens
aaataagcctcgagcatcaagaactctgaagagaaagagaactgaattgatttctgaatgcgctaacacccagtggttctcaaagtgtggtgtggtcctggaaccctttgggagtttctgag

SEQ ID NO: 157393 - DNA, 122 bp, Homo sapiens
gggaggtgaagcagtcctccctccctccggccagccgccaccccgacctcagccagcgtgcgctccccggggacaggagggaggctgcttccaccgaggcctctgctgacagatgtccgggc

SEQ ID NO: 157394 - DNA, 122 bp, Homo sapiens
ttcccaaaggagcagaacaactttcatgggtggggcaaaaggctgggaaggaagagaattcgttttggcttgctccagcgctggaagaacactgagcaccacactctccgcaaaggcctaac

SEQ ID NO: 157395 - DNA, 122 bp, Homo sapiens
taacaccaggttcatcttgaggttgacatttctccttgacctttttgtttagtccccacccgcaaggtcgcattagctgcctgctgagtttaatcaaatctcttcctgtcctggcaatgccc

SEQ ID NO: 157396 - DNA, 122 bp, Homo sapiens
ccccccacagacccgagggaggtctgggatacggaggcagccgggctgccccaggctcagcgtcctttggtgactgcctgggggcggcccagcctctctccattgtgtgggataatttgatg

SEQ ID NO: 157397 - DNA, 122 bp, Homo sapiens
gcaagtttgggttggtacagattcaccacagcgaatctgaccacgtggtgaccacaagcacgcgcttactgcgcgcctaagttcacactccctggagaagctcctgccccaaggccgcagcc

SEQ ID NO: 157398 - DNA, 122 bp, Homo sapiens
gagacttgtgtgttcataaacaagaggtcatgtgagctgccagagccagtacatgggatacgaaggccagagcctgtttgtaaaccattaacaggaataacaagagataaacattatcagtt

SEQ ID NO: 157399 - DNA, 122 bp, Homo sapiens
ccgtgccgccccgcagccgccgccattttaagtgatctggaagcgggcggtatcgaggggcgtgcggccgccatcccgacggcgggcatggcctttggaggcggtggcgccgtcttgggact

SEQ ID NO: 157400 - DNA, 122 bp, Homo sapiens
tccgggctgccgctgactatggaaataacttcctttccttttctatttcgggcgggtggccggcggcgggggcgaggggaaggggcgggggcggcagcagaagggataaccagctgctaagt

SEQ ID NO: 157401 - DNA, 122 bp, Homo sapiens
tggtattatccttaactccatctaccagtgccctgagcacagtcaactgacaactctgggcgtggatgggaaggaggtatggactgagattgggggaagcctatggtggaggctctgaggga

SEQ ID NO: 157402 - DNA, 122 bp, Homo sapiens
ctgacaatgacaagcacctctcccagctcctccgccctggctctccatctccactaacaacgcgaaaagcctgggagggcccgctcgcctgactccaggtttaaagccccatggcaccaaac

SEQ ID NO: 157403 - DNA, 122 bp, Homo sapiens
tggcttgagatcccggataagtctctctgagcctcggtttccccttctgtcaagtagcctcgaaggtccccggcgctcggttcggtggcgagtttgaggagtgtgggggaggggaggggagg

SEQ ID NO: 157404 - DNA, 122 bp, Homo sapiens
actttaacaacctaagcctcttctccatgtgtgcacacagggtagatctctgaagggtggcgctgtaacttcgagggtaatggctgtgttgagttaaggcaggatgacagttcagcctcctc

SEQ ID NO: 157405 - DNA, 122 bp, Homo sapiens
tccatttccaacccaggtgcagggctctgataagcggtttccggacataacaatctacagcggtcttatcttgtggttcccaaggaaacaggtcccggctgcacttcgcagcccagacccga

SEQ ID NO: 157406 - DNA, 122 bp, Homo sapiens
tcccgctcgctgggccccacaggccaggagcgttgcccctttaacaagagtagcccgggtcgctcccggctccttcccgggaccgcgcgtacccgcccctccgcgcgcgctcgcgcgtcccc

SEQ ID NO: 157407 - DNA, 122 bp, Homo sapiens
gtgtggtcttgcctttggtttttccgcccaaactgccttttggctttgccgtgtggggaccgggcacctcgactgtcctctgtgtcctgtgatggggcaggttacgccatgtctgatcagta

SEQ ID NO: 157408 - DNA, 122 bp, Homo sapiens
ccctgactctgctccccattttctgcacgcctgcgcccccgctgcagcccgggacctcctcgtgggggtccacgattgtagcaccaccaggtagcggcatcccacctcttccacctcgccgc

SEQ ID NO: 157409 - DNA, 122 bp, Homo sapiens
acgtccacactcgaacagcacaagcaagagaccggctgggtgtggaatagaggcgcacatcgcgcaacgcattcacagcatgcacacgcgcgcaccccgaccccgtccctccccgcgcgccc

SEQ ID NO: 157410 - DNA, 122 bp, Homo sapiens
gcgaagcagaagccccaggcggccatgcagaaggtgccctggacgcccgcaaagccaccccggtgggccaccaggctgaaggtagtgcagccaaaggccagctgcagcacgcgggctgtgcc

SEQ ID NO: 157411 - DNA, 122 bp, Homo sapiens
tggtactcctgtccaggggccagtcctctctggtcataggctgaggcagagcttggaacccgtgctgtgaatggggggctcgccccctctgtctgtgagagagagcaccaggtggctcaggg

SEQ ID NO: 157412 - DNA, 122 bp, Homo sapiens
ttgaggggagggtctggcttctgtggagctctacgtgctggtcactatggtcgtagtaaccgttgtccttcagttacggcacagaggctcacatggaggccaatccaatggtaccatcccag

SEQ ID NO: 157413 - DNA, 122 bp, Homo sapiens
gctgccggcctcctcaaggctgtcttcgtcctcagaccggggctgccccgccgagcctggcgcggtgagcacctgcttaatggtgaccacggtgccatcctcggccaccacctccttgacca

SEQ ID NO: 157414 - DNA, 122 bp, Homo sapiens
cggagagggggaccgttcttaaaggggcgatggcgcggcctctcgggtagcgaggggcggcgccgcggccccaggacagacctgcagctgaggggagcccgccctggacgcggcagggatga

SEQ ID NO: 157415 - DNA, 122 bp, Homo sapiens
tggcgcccaccatctctgcttgctgaaaagctgcagaggccgccaggagcccacggtgagcgggtctgaggaggacgggaaacagccccgagggaggcgggtgtggctactgctggtactgg

SEQ ID NO: 157416 - DNA, 122 bp, Homo sapiens
ccttgtgtgggggctggcttcctccaggacgaccatccagagacagtcagggggatgcaacgtggctttttttttaacctatccttggaagtcacacagtgtcacttttgctgtactttatt

SEQ ID NO: 157417 - DNA, 122 bp, Homo sapiens
ctttcccaatgccagcctcgggtccgagggctctacgtgcattatctcttttagttcactcgacagccctaagagatgggcgttattattagccacggccaggattagggtgaggtcattcc

SEQ ID NO: 157418 - DNA, 122 bp, Homo sapiens
ggtcaagggatccacctgccttatcctcccaaagtgctggaattacaggcctagctatgacgcctggccaacttctactgaattttgttgttgttgttgtttgtttgtttgtttggagaccg

SEQ ID NO: 157419 - DNA, 122 bp, Homo sapiens
cagttgaataattctacttgctgctagatcaacagattttaacaaaacaatctcaatttgcgggcaataaaaaaaaattaaaaattgctggttaccaaagcaaaacaatatctccatttact

SEQ ID NO: 157420 - DNA, 122 bp, Homo sapiens
gcctccgggaccctccccgccccctcctcccccccgccggctcccccgccctctcctccgcgcccctttaagctatccagcagacggagacagagttgatccaggaggggctggcagagtgc

SEQ ID NO: 157421 - DNA, 122 bp, Homo sapiens
acgtgtccatcgcgcagagcggccgaaagaagcttcagttcgctgctggtgagggcgtttcgggggaggcacaagaagagaagagaagtgtagaggatcccaggaaagttgtaggcctggac

SEQ ID NO: 157422 - DNA, 122 bp, Homo sapiens
ataccacggctgcggctatgacagcagaaatgtgtgtgtgctcacattctggggactgggcgtccaagatcaaggtgcggtacaatcaggctcccagtgagagttcttcctggctcgtagac

SEQ ID NO: 157423 - DNA, 122 bp, Homo sapiens
ttctcacctgggccccgccgaagtcgaccgtcctttcgtagggcgcacttttcagcaatacgccttccgattggttggctcgggactgacgtctcagtcctattggttacgagagccgcggt

SEQ ID NO: 157424 - DNA, 122 bp, Homo sapiens
ctcggtgactgtccttccctaagagaaagaatttctaaccccaaacggaagaaaccacagcggcacttcccacagaaatcggagctgtgttgtgagccactagtaatccctccttagaggtg

SEQ ID NO: 157425 - DNA, 122 bp, Homo sapiens
ctctttctctttcctgtgatcacgtccccactgacgctcctgtttgtaggactaggacctcgctttccttgctgtgaacattcttctctgtctcacagactcccctggggcatggatcaggg

SEQ ID NO: 157426 - DNA, 122 bp, Homo sapiens
tgacggttctaagaagcggcggacacaaaggaaaggagaaagcaaagacgaccagggatgcgcttcttctcagaggtcggccctggagccaaagccagctgtgtggcatggtgaggagggcg

SEQ ID NO: 157427 - DNA, 122 bp, Homo sapiens
gccaaagtgaagagtgcagggggttgtagcaggcgctgctgtgggattccacaaaataggcgcgggttaggatggggaaggtaaagtgaagaaacgggccaaagcagaaaagtgggtcgacg

SEQ ID NO: 157428 - DNA, 122 bp, Homo sapiens
agtgtgatgacgctggagcgtgagtgctgccccttcctggccagcgctccaccgtccggccgccctggctgaccgcctgctctcgacaccccactcagccgacactgcacaggggtgctgag

SEQ ID NO: 157429 - DNA, 122 bp, Homo sapiens
caatgcaaagtaaaggaataaaaaatgggaaaaacataggaaagtgaaattacactacagcgtcaagaaggggcacttcctttgtagaagttaatttagattatcctgaggaattttatgtg

SEQ ID NO: 157430 - DNA, 122 bp, Homo sapiens
gaaaaggaggccagcagaagcgcacaggctaagccctgcccagcctgcagctccgcccgccgcaaaacagctcctcccaggggaaacccaaagccagccagctcctcagagacgccgcccaa

SEQ ID NO: 157431 - DNA, 122 bp, Homo sapiens
tggggtggcaggatcacctgtaggaccacagagatggtcttctcgcctgccttggctgcccgccattttcggtaagtgtctgccttgagaagattttctgcacagtgagtctggaaacaaca

SEQ ID NO: 157432 - DNA, 122 bp, Homo sapiens
ctggtacgcgcctctgtgtcggactccgcgcccgcctgcgtgggaggaagccaggactcccgggcgaccgggccattcctgtggtttgtgtcagttccacagcagcacgtgggcactttcca

SEQ ID NO: 157433 - DNA, 122 bp, Homo sapiens
tgctcacaattcttcaggaaaaattagatcctggatacgaagggaggagggctgctgctccgcttctgtccagacttccagttaaacaagttgaccactggagagatttcacttctgaggag

SEQ ID NO: 157434 - DNA, 122 bp, Homo sapiens
ccccaaaccccgccccctgcgctccgggaaagcggagccttgcggctccaccccgactcccgagagaatcccgcccccaaaagagagacccgcccttaactacgccccaccgtcgaagcccc

SEQ ID NO: 157435 - DNA, 122 bp, Homo sapiens
gcgggcggggccgggccgggctccggggcgcggcggccgctcggctccgggccgcgggagcgctccgctcgctcagcaacttgggctttgctgtgctgctttttcgcccctccgagcttttc

SEQ ID NO: 157436 - DNA, 122 bp, Homo sapiens
atttttcagaagaggaatccgaggccttgggacctacacccaccctcacacccgggcccacgctcactttaataacccggactgggcaaggactaagtccagccagagcgtcagcctcgctg

SEQ ID NO: 157437 - DNA, 122 bp, Homo sapiens
attacagacacggtggccgacgctaggcacacacaaatccgtcttaatccctcccttttgcgtggatgaaacctggtccaacattcgtaaaagcatgcaaaccacaccattgcttgggcggg

SEQ ID NO: 157438 - DNA, 122 bp, Homo sapiens
ccacactctagcaggagccctttgcttgctgccagcctgtgaattctctgtaggtacaggcgtggtgtcctaccttctaattcagtgtggcctgtgggttcgggctgtgtcacgatctctct

SEQ ID NO: 157439 - DNA, 122 bp, Homo sapiens
gtctggtatagaaggaaggatatgcgcactcgggatctgcagggcacctctcccggcttccgacctaacctaggtgctgtgggccccgggggagctgggtccttgacttccagaactcaggg

SEQ ID NO: 157440 - DNA, 122 bp, Homo sapiens
acctgtgaggtggttgtgggtcatccggccgcactccacgctgacctccctcccaccccccgcccacacttacctgtgggatggttgtgggtcatccggccgcactccacgctgacctcgat

SEQ ID NO: 157441 - DNA, 122 bp, Homo sapiens
gctgcacatgctccaggcgccccacgggctccagtctccgtccacatgctccgggatgggcgtcttgctcacgcactcccccgcgcggcaccactgaaacacagcggggagggtcggggccc

SEQ ID NO: 157442 - DNA, 122 bp, Homo sapiens
gagccccagcctctgtgccttgagggtgcctggcatcggaaatggcgcaggctgcggcagcgcaggctccctgcccccagccaccacctggtacccgctgcagtgtttccatggcaaccagg

SEQ ID NO: 157443 - DNA, 122 bp, Homo sapiens
cagctaacccatcttcttgtttttgtgtctttaactaggacttctatttggaactgagtccgacagctcaggactggctgctcaaactccacaatttaatgaaaaatctcagatgatgactc

SEQ ID NO: 157444 - DNA, 122 bp, Homo sapiens
tccatgcgcagtgggagccactttgtatcctatcaggcgaggagagggtgatgtcacctgcgagttagtaacctacgagcggctgtgaaggaaactgtttaaccggatcccattgtacccag

SEQ ID NO: 157445 - DNA, 122 bp, Homo sapiens
gggccggctcgctggtcggcggagacgggctaccaccggagtggtccggacggcggtgggcgggaggtgcgacttctgggctgagacgctcctgcttcaccaccacccccgccggcagcacc

SEQ ID NO: 157446 - DNA, 122 bp, Homo sapiens
cagcgggcgctgcgctcccagcggcaccacctgctcctccagggaacctcgtgcatctcacggatgcgggagtccactcgctttagagttctttaagcttaaaatagcacctcacaggaagg

SEQ ID NO: 157447 - DNA, 122 bp, Homo sapiens
aggcgaagcaaaagaaaggtggggccggcagggtcgtggggcgggggtggggcatgacaccgtatcccagacgcaactcgacctcgtttgcaagaaattctgtatccaactctcttcagtgc

SEQ ID NO: 157448 - DNA, 122 bp, Homo sapiens
acccccacagcatcggccttcaccaccgccgccgctgccggaagcgcccccacgtctccacgccaccaccgtgaggtcacttccggcgcgacaccttggaatccagggccgtcaattgaggg

SEQ ID NO: 157449 - DNA, 122 bp, Homo sapiens
tgcgcggctagacttacctgtccttccagatacccagacacgtctccatgcacgcacgtgcgtggctggacttacctgtccttccagacacatctccatgcacatacatgcgcagctggact

SEQ ID NO: 157450 - DNA, 122 bp, Homo sapiens
gatggatgggagtgcctgccctctgtgggcagctaggcacccttacccggccaggaggcacgtgcggcagcagaactgaatgaagagcttccgttcgcacagccggttggacttcaccatct

SEQ ID NO: 157451 - DNA, 122 bp, Homo sapiens
gcccggcccgcccagcccggcccgcaccgccccctgctctccagctctcacgccgccccccgagaaaggccctgcccctgtggcctgtccacctgccctgtgacccctacagtgtccccacg

SEQ ID NO: 157452 - DNA, 122 bp, Homo sapiens
gagcccagctgcagcagcacaacctggagatggtgggcgagggcacccggcagtgacgcccgccaccaccacgcagccgccgccgcccacgccggcctctgctgcccccttccccagccctt

SEQ ID NO: 157453 - DNA, 122 bp, Homo sapiens
gctaagtgttttgagcctctaaaaacggatgggtttataaaggtgggtatggacagaagccgaaaaacctgccaacacatcctgccccatcatgagtcttagggttaagcacccaggagtgg

SEQ ID NO: 157454 - DNA, 122 bp, Homo sapiens
agccgcgcacgggagcggaggcgagagggccgctccaagacctttgactgggctgagttccgtcccatccagcaggccctggctcaggagcgggtgggcggcgtggggcctgctgacaccca

SEQ ID NO: 157455 - DNA, 122 bp, Homo sapiens
ggaagccctccaccttatagcggtcgctggggacgtcgttggcagtggcgtccatcttggcgatgaccaggcccttttggcccttgtacttcttggccaggctgttgtacacgggctctagc

SEQ ID NO: 157456 - DNA, 122 bp, Homo sapiens
ccccaccgcagagtctgcagcagcccgccccgcccggcagcgagcggcgccttccaactccgggtaacctgccctgctctgggtttggcaggaagccaggcccaggcattttttgggggggg

SEQ ID NO: 157457 - DNA, 122 bp, Homo sapiens
ggtggaacttgggctgccccggataagccggtcctcagtcttcccatctgtgaggtaggccgggtggatcagggagcaggagggtgtcctcacaccgggtaggcttggtttgtgggcagggc

SEQ ID NO: 157458 - DNA, 122 bp, Homo sapiens
cccttcctgccaaacaccgcgtggcgcccctcccccaccaacctgtaccacagccctgggcgtggaaggtgctcctaggctctcggtctcgcagcttcctccaaatcagaagctgtggagcc

SEQ ID NO: 157459 - DNA, 122 bp, Homo sapiens
gtacaacacgccgcaagcagccctcgaggaatggaaaactctcagactgctgtgtccacacgggttaataaaaatgctgaccccagttcccaaggtccacaatgtccatggagagtaggatt

SEQ ID NO: 157460 - DNA, 122 bp, Homo sapiens
tcccccacagctgcagtcccagctgctgtcaaagagcatggcttttctgtgggatagtcacgtcgacccctgtaggaactccatttcagactctcagggggtatgactgttaggtgtttctg

SEQ ID NO: 157461 - DNA, 122 bp, Homo sapiens
gctgatgcaagcagccagcagcagttcccagcaaggaaagccacgccagagagatggctgcgtttaacttcaggacagcaggtgtaactgaaaagcggttaaagaaatatagtagctgggta

SEQ ID NO: 157462 - DNA, 122 bp, Homo sapiens
gccagcatctccgagtgctgctgctgcaggaactgtaggctcttctccaggtccaggttccgtttctgcgggtcgctctgcctgagctgcgggctctgcggcctcaaggactggacgcccac

SEQ ID NO: 157463 - DNA, 122 bp, Homo sapiens
tcagtggcacagagtgggtacttcacggagccccaagatgggaggatgagctcccagcctcgttggcccacgatgaacaccagggtcaacctaactagacagtcagagctttgttccttgag

SEQ ID NO: 157464 - DNA, 122 bp, Homo sapiens
ggggctcctcacctacgtcctggaggagctcgaaagaggtcgggctggcctgggggcccgcgggagcccgggaggcgggcccgttcgcgcgtctgggcccggggccggcggggtggggcggc

SEQ ID NO: 157465 - DNA, 122 bp, Homo sapiens
gcctcctcatatcagtggctggaagctgctggcaatctcgtgagagccccgccttgtccccgccttctgttattctaaggcctcagtgattggcctacagaagccggcagagaggcggagtc

SEQ ID NO: 157466 - DNA, 122 bp, Homo sapiens
gagcgcgagtgagccccagccatcgctgcctcccccctcctggcctgcacccctctagtccggcccccgcgcgctcagctcgccctgcgccccagcgccaacccctccttccctggctccgc

SEQ ID NO: 157467 - DNA, 122 bp, Homo sapiens
gggggagggctcgtcctgcgcccccacctcatcctggaatagagagatccgctgctcccacgacgtcagcttgggctcgcccctctgtgcccctgctccgtgcccccagtccccggaccccg

SEQ ID NO: 157468 - DNA, 122 bp, Homo sapiens
gtacgaggaccgctgagaatgaaagccgaggaggttcactctccaaggccgaacaaaacccgccctgccaatcttcccagtctctatagaggttcctcgccagatgattctgcaaatgtggc

SEQ ID NO: 157469 - DNA, 122 bp, Homo sapiens
ggccctgccatcttcactgaaagctggttcccagtctggaatgggcgagcttctcttctccggggcacagttgcttctcttcggcttcgcctccgggccttctcaagcccctttgcccgtgt

SEQ ID NO: 157470 - DNA, 122 bp, Homo sapiens
gcccagggccaaggcttggaggtgacagacagacttggggggcctggaggagctcagcaccggcgcgttggcccagaggaccggggcgggtgcatgatggtttggagtcgtttgtcaaccta

SEQ ID NO: 157471 - DNA, 122 bp, Homo sapiens
agagcgcggcggcagcggcggcctggcccttccagagggccagagccagggacatgcgggcgcccgggactccgcgttccgcgcggcccggcgcctgagcgcctccgttccccgtcccggag

SEQ ID NO: 157472 - DNA, 122 bp, Homo sapiens
ttcctcccagcccctccagtagccctaaaaacacaaaccatggctgggttctctccaattcgtgaatcactctttgctcaactaagctttttaacagttttaatggagcctatttttttgtt

SEQ ID NO: 157473 - DNA, 122 bp, Homo sapiens
ggcggagcaggactaagtggggcggcggaagggcgcaaggaggagctcttttgtttccagcgccttgcgtctcagtgcgcctgtttaaggatagcctcagagctccgcccaggctacctgct

SEQ ID NO: 157474 - DNA, 122 bp, Homo sapiens
gctggtaatagaaggtaattcagtaccagcctgggcctggccgcggtgaccgaggcgggccgcgtcgcggagacttctgggagtgcttcctcgctctccgagtgcgcaagcgcagcgcaccg

SEQ ID NO: 157475 - DNA, 122 bp, Homo sapiens
agggctccaggaactctgtggggtccagtgccacttttaggaaggcaaggggacctgggccgggggctcaccgcagatcttgaggggtgcctccagctccagaagaatgggctggctcagaa

SEQ ID NO: 157476 - DNA, 122 bp, Homo sapiens
tgtccacatttttgtccacaagtttggcgagtttgcatccgcgtctaataaagaaactaccgtttctcacgcaggcacgttctgaacgcccgagtgcgggagccacgtaagacccggctcag

SEQ ID NO: 157477 - DNA, 122 bp, Homo sapiens
cccctgcgggggaggtgcagggccagggcctcagtttcctcgcctggaaaatgggtgtcgcgatccccggatagagcggcagacggtctttggagagggctctagttggaatcggctccgat

SEQ ID NO: 157478 - DNA, 122 bp, Homo sapiens
ggaaggtgcttcagtgtttttctgcgcatgcccgagacggttacgtagttacggagcttgcgctctcagcagttgagtcccgactccaagtggcgattccgcctcagagccgtcgccttacg

SEQ ID NO: 157479 - DNA, 122 bp, Homo sapiens
agaaggtgagccctgagccctctgtgccgccagacccagccccagccctgcccccggccccggccccacccctggccccagccccactgcaggggcctggactcagggccatcccctcctct

SEQ ID NO: 157480 - DNA, 122 bp, Homo sapiens
aaaacttcatttgcattacaaataggtaacctgccatggtattttgctaccccactgacacgttgccagggaacaacagaaaaataaaaaccagtgtgtctactcacaggtgaagagcagag

SEQ ID NO: 157481 - DNA, 122 bp, Homo sapiens
gccaggagcccacagtgaaagaccatcggatggaaggcgacgcccagaactccaggagaccgctgtgggaggacgcgaggccaggtgacgaataggccaggcgtgagttcccaaacagcctc

SEQ ID NO: 157482 - DNA, 122 bp, Homo sapiens
gattctcaaagggcttcacatatatgcttgtttttatcttgccttttcatgagcaggacgcgcatcattagtctcattgtacagaagaggaatccaagacccagaaatgctaaggcaggaat

SEQ ID NO: 157483 - DNA, 122 bp, Homo sapiens
atattaattcagtttattttctcacagacactgactcagccgtgggttgtgcagcactgacgtttctaacaaaacagcatcgtgtgagctgtgatcgtcccatttctccatctctgagcagt

SEQ ID NO: 157484 - DNA, 122 bp, Homo sapiens
gactcgctgagtctcaggctcaagctttaatctctgcgaagttgggcggctccacgggctcgcccccgcccccccccgccccccaatatataaaggcatatccatagttctggtatctacca

SEQ ID NO: 157485 - DNA, 122 bp, Homo sapiens
cgccccccaggtctcagggggagctggcacaggcaagattaagtgcaggacccacggagccgggactcctgctgacccatctccaaagaggtcgagccccgcctgcaccagcgccctcgtac

SEQ ID NO: 157486 - DNA, 122 bp, Homo sapiens
ttctttattctttgccaatgggttgcagatgcccactgttttaaccaagttggtttactgcgtatgaaatgaacatttgccgattaaagcttaaatattggaagaaatttctcctggggcat

SEQ ID NO: 157487 - DNA, 122 bp, Homo sapiens
acgtagacgcacggggttttgcgtctcccaggagcgggctctcattggcagtgccacgtgcgccttgcgtgaagtccacgtgctcagcctgactgaggcgggacttcctccgtgagactgtt

SEQ ID NO: 157488 - DNA, 122 bp, Homo sapiens
ccagaccttcggacgcttctcttccaaaccgaagcctgggagcctctgggtggcctggggcgggggcagggggcgagcggggcgggccaggaggagggggcgaggccgccactcggcttccc

SEQ ID NO: 157489 - DNA, 122 bp, Homo sapiens
ggtccagccaccactctctcctcccatggtccctacagtcttcgggccgggagcagggggcgtcctgatggttgctgggtgtggactgtgaagagaagggcaacctgcacacgccaccgata

SEQ ID NO: 157490 - DNA, 122 bp, Homo sapiens
tgaacaaaatactatagcatgcatgccactgcacttgggacctcatcatgtcagttgaatcgagaaatcaccaagattatgagtgcatcctcacgtgctgcctctttcctgtgatatgtaga

SEQ ID NO: 157491 - DNA, 122 bp, Homo sapiens
ctttatgttctgtgaattttacctcattttttttagaaaaagacaataaaaagaatgttgcgtgtgctgagcaaggagtctgacagataaaagatgcctcaggaagtgtttatatgcacaaa

SEQ ID NO: 157492 - DNA, 122 bp, Homo sapiens
agaggagggggcgctggggaagcggcttctccgtctcctgctccgccccgggcttcgtggcgaggcgccgtcgccccctggtggggcctcatccattcctcgctcactcgctcgttcacctt

SEQ ID NO: 157493 - DNA, 122 bp, Homo sapiens
gcggagctgggtttgctgagtgcttccttcctcggccccacctcccgccgggcaggatgccgtttgatcattggctggtttaataaagagggcgtgtttattttgcataaatagtgggcggg

SEQ ID NO: 157494 - DNA, 122 bp, Homo sapiens
tgagcctgcactgctcatgagacaaaccatcgcaacacctccctgcagactcaaagcctgcgcaggccatggatttcctgagaatgtgtttgtcctccctggacagctcagcatcccccagg

SEQ ID NO: 157495 - DNA, 122 bp, Homo sapiens
ctaacgctgacgtcaccgggctggacagcaggctgcattctttctaagtgagggccaattcgtggctccagagaggattttccaaggaagacaaagaggaattcttggactagttgggggca

SEQ ID NO: 157496 - DNA, 122 bp, Homo sapiens
aaaaggacatacttctttgaaaatgaatcaaatgaataagaaattttgagaaattaaaatcgtgcataatgggggagaaaaaaactaagaagggctgattactgcaatagacaaagctaaaa

SEQ ID NO: 157497 - DNA, 122 bp, Homo sapiens
gcctcccgggcttgtgggctgtcctctttctctggggtcagcctgaggctggaagaggcccgtggcccaccgggcatcaggccaagcctggagctgaccagggaagggccctgccaggcctt

SEQ ID NO: 157498 - DNA, 122 bp, Homo sapiens
atggggacgcgacgccatgcagctggctgggccgagaggggcggcaggctgcaggggccccgcgcccgtgttaagaggggtctgggggccggtctggccggcctggctctcccggctcccct

SEQ ID NO: 157499 - DNA, 122 bp, Homo sapiens
cccatatctgtctgcctacctgggaccaaaactgttcctggcacatagcaggtgctcagacgacatgacaacattgcactaaacagaccaaactgatctagtctaatccaagtcactaaccc

SEQ ID NO: 157500 - DNA, 122 bp, Homo sapiens
accagcgcgtccacatcaacatctccgggctgcgctttgagacgcagctgggcaccctggcgcagttccccaacacactcctgggggaccccgccaagcgcctgcgctacttcgaccccctg

SEQ ID NO: 157501 - DNA, 122 bp, Homo sapiens
ttccaccccagcagcagctccctggagccccagcgaagacgctgccagatctgacaactccggccatttggcccggagtaactcttaattctcccacgaggctccccaggccgggggactgt

SEQ ID NO: 157502 - DNA, 122 bp, Homo sapiens
ttgcacttgtgggaagactttttggaaccacttaatctctgtggctctgtgtaagacccgcgaaataaaaagaggcagtagtactctttggaagattgttttagggattaaatgaataaaaa

SEQ ID NO: 157503 - DNA, 122 bp, Homo sapiens
aatatatgttctatatgttctataaaggactggccttaagagttacttcatttggccttgcgacaagccttcctgataggtgggaatgatggagtacaacctattttttgttgttgttgttg

SEQ ID NO: 157504 - DNA, 122 bp, Homo sapiens
ctagctttctggaggagaatgcctgagggcttgactgccccaaaaagactgggttagcctcgtctccgacaacctcagagctcctagttctccgtgatcttccctgatgcatctggtggccc

SEQ ID NO: 157505 - DNA, 122 bp, Homo sapiens
tgttgtgggaacaaggaatattggaccaaaagcaagtggttaacatgtgcaagccagcaacggtctgatcagaatgttcattatttcagtcactaaaacatggtgtggtgctgaaatctcaa

SEQ ID NO: 157506 - DNA, 122 bp, Homo sapiens
cagcgagctctcagcggggcgggcggacgcaggcagcccaggggagtggggcccgccctgcgccgccatcacccctttaagtgccaggcccgcggcgcatgcgcagtcaggccgttgtgcgc

SEQ ID NO: 157507 - DNA, 122 bp, Homo sapiens
ggactggtgatgagatggggggtgtggtcgagagtgtgggccccgtctcagagcctgatgcgcaggggtgatgcgatgcgcctcttggaggctccatcgcagggccctttgaccagctggaa

SEQ ID NO: 157508 - DNA, 122 bp, Homo sapiens
acagggtgaccatatatttagtttgctaggacagccctagtttatgcttgttgtcctggccgcctgtcttctgagcatgccctttcattctcaaacgtgcttcagttcagatgatgcatcat

SEQ ID NO: 157509 - DNA, 122 bp, Homo sapiens
ccctgttccaggccttcagtgcataaagcactcccctcctggggtctcttcagggctccccgggatgcaaatgggacagggaataggatcccaggtttgaggaaaccaaggcccagagagga

SEQ ID NO: 157510 - DNA, 122 bp, Homo sapiens
tgacttttttatttcgtctctgctgggaaatgcctgcaggaaacacccagtgacgtgacacgtttttagtaactttgtggtgacatcactgtcttctctgcttactgcagctttctgttcac

SEQ ID NO: 157511 - DNA, 122 bp, Homo sapiens
ggagggcagatgttctcaatgaacttacgcttggtatgttatcgttggtacagaccccctcggacagtaatctgtctcggatttcccaagcaaagatggacgggcactcccgcttatactgg

SEQ ID NO: 157512 - DNA, 122 bp, Homo sapiens
gggcagccaggcctccacctcaccagggggcttccggagttcagtccaggaggacttctccgcgcctggaccaaaggatcagagtggggccaaggcctgtcccttgccgcctctgccgtaaa

SEQ ID NO: 157513 - DNA, 122 bp, Homo sapiens
tcactgacttgattgtctgcctttcccaggaggacatgggctctgtcgggacattttatccgtctgtttacaacatgaaatagacacctccgaaatgtgtgtgtgttccgtaaatgaaggag

SEQ ID NO: 157514 - DNA, 122 bp, Homo sapiens
aacaagcctggaacgctccaagcccaagtgtacacttggacacatggcactctggcattccgaaaaatactcattttctttgtaaacctggcagactagccagagggtcccccccccgcccc

SEQ ID NO: 157515 - DNA, 122 bp, Homo sapiens
tgttcccacagctctggtctcactggcctagctccatcccccacttctctgtttgcacagcgttcatcctcactagactgagcttcctgagcagcccttataggtccttttcatcttgtttt

SEQ ID NO: 157516 - DNA, 122 bp, Homo sapiens
ggtcttcctggaggacatcagattgatgccgaacttggtgcagtcacctgatcggcagagcgcactacagcccggaactcctggactccagtgatccacctgccttagcctcccgagtagct

SEQ ID NO: 157517 - DNA, 122 bp, Homo sapiens
gctgtactggagaccatggcttgagagccttctaggggcataggctttcaccccactgtgcgtttgcaagtctgcagggggatccggggatgtctgtgtcccacggtggttggggtggggaa

SEQ ID NO: 157518 - DNA, 122 bp, Homo sapiens
ggagcagttacttgctagcagtcttttacagttggatcacggctgcttaagattatatcacgatagtaccaatatagataaaattaacctttttattttagggaaggttggccttgcccaag

SEQ ID NO: 157519 - DNA, 122 bp, Homo sapiens
ctctgtaaatccccgcctttggagcagggtgcggtgtctcttgaggaaggcccacacaagcgaaaacggggccccaggatggcgtgggtaggctgcagggactcagcgggacgttgaggcgg

SEQ ID NO: 157520 - DNA, 122 bp, Homo sapiens
acacacaacgcatcccacctcgccgcccactcccgccctcctccccagtccaggaaaccgcgggcctcgccgccttcgccccgggcctgtccctcccgggactcactgaggagccgccgccg

SEQ ID NO: 157521 - DNA, 122 bp, Homo sapiens
tggtgttactaggccccatgcaactcagcctccagagacctgctcttgtcaggggtctgtcgctggagtggacccaggtggccatgtccttaggacatctcttggcaccagctgtgctaggt

SEQ ID NO: 157522 - DNA, 122 bp, Homo sapiens
aaaaggcaacagggcctggttttcagtggcgatgatgattctctatgacagtcagggaaacgtggtctctgagagtgatgggcacataaagccttggtgccagagtgcatcgcatggtgtcc

SEQ ID NO: 157523 - DNA, 122 bp, Homo sapiens
caacaatgcctacgacgaggaggactgcgtggagatggtggcctcgggcggctggaacgacgtggcctgccacaccaccatgtacttcatgtgtgagtttgacaaggagaacatgtgagcct

SEQ ID NO: 157524 - DNA, 122 bp, Homo sapiens
cgcacgccccccgcacctcctcctcgcgcttgcggccccccccacccccagcccgctgcgcgcacatcaaagctcctctccgccgcgcacagtggccgcggctcactaatgggattgcaggc

SEQ ID NO: 157525 - DNA, 122 bp, Homo sapiens
atgtcatctgccagaaaggccacctgcgccagcacctcctgagaccggccttcaaagacacgacgcatgccgctctgccgtccggagcacttaatgcctagagccagcagggtcccagtggc

SEQ ID NO: 157526 - DNA, 122 bp, Homo sapiens
tttttttaaacttataaacaacagaaatttatttctcacagttccaggaggctggaagtccgagatcaaggtgcctgcatggttcagttctggtgaaggcctcttccgggctgcagactgct

SEQ ID NO: 157527 - DNA, 122 bp, Homo sapiens
gtggagactggtctgggcccaaggagttaataactcctggcactgaagaaattagaccatcgagttttacctctctcctcaccctttctgccagaatattggagacatacccctaaagctta

SEQ ID NO: 157528 - DNA, 122 bp, Homo sapiens
cttaatccagatacacatatacctaaaagcacttttgttccaaatataattattactctgcgggaaaatctggtatgaatctcttggtttggtggagttttaagcctgtctttaatttaaaa

SEQ ID NO: 157529 - DNA, 122 bp, Homo sapiens
agaaacagggttgagactaggttgctgccaagctgaaagactgagctgggaaccaatcagcgcgcagcgtgtctgtgtgtgacacacacgtaatcacagacacactcgcagcctgacttttt

SEQ ID NO: 157530 - DNA, 122 bp, Homo sapiens
caaactcctaggctcaagcaatcctcccacctcagcctccaaaaatgctgggattacaggcgtgagccaccacacctggtcggcaaaaaatcccaattgatgaaactgggggtcagagaggt

SEQ ID NO: 157531 - DNA, 122 bp, Homo sapiens
cgccctgggccttttgtaccactcgccacggaaaatggtcacacgcttttgtcctcaagccgaacactatcagaaacacggggtccctggaagccgccatcttggccattggcggtggcgca

SEQ ID NO: 157532 - DNA, 122 bp, Homo sapiens
gggtaagggcctggggccgccccagcgggcagcagccaaggtggtgggctgcggggcgcccggggcacagccgtgacctgcccacacctgcaggtgctgaggagccacgtgatggtgcgagt

SEQ ID NO: 157533 - DNA, 122 bp, Homo sapiens
tccccagtaatgaaatgatcgggcagggatacaaactcaagactttaaatctttctagaacgtcaagctgccatgtcactagaggtgtattttgggacccaaccctgggggcacacccagac

SEQ ID NO: 157534 - DNA, 122 bp, Homo sapiens
tgacctcgtgatccgcctgcctcggcctcccaaagtgctgggattacaggcgtgagccaccgtgcgcagccccttgctggatattttcatccgtgtggaaggggataaagcgtgccccatgg

SEQ ID NO: 157535 - DNA, 122 bp, Homo sapiens
ttggtaaccttgacgagggtaatttcaatcaagagctatgcacaggggccaaaatggcttcgtgctttctgatttactttatgaaatcccctatggtatgtggattattacctcacacatct

SEQ ID NO: 157536 - DNA, 122 bp, Homo sapiens
gcagacggcggcgctgccgctggagccggcgagcaaggagctggtgggtgagcggcagaacgcggtgggcgagcgcctggtgcgcctgctcgagccgttgcaggagcgccgccgcttgctgc

SEQ ID NO: 157537 - DNA, 122 bp, Homo sapiens
catgtctggagtggaagtattaaaaacgcaaagatgtcttgccttttcttaccaacctaccgccaagaacccaggagggcagcagtgggctagaaacagggtttctgtgccaaattctgaaa

SEQ ID NO: 157538 - DNA, 122 bp, Homo sapiens
gtgagacgtgcagtccccaaggagctgcagaaaagggctcttccggagtcctggggattgcgcgtttaaaggggaccctccctctccccggatcttctctgagcttggcaagttaatcggaa

SEQ ID NO: 157539 - DNA, 122 bp, Homo sapiens
cataatgtatgaaatatatgtacataatgtatgaaataatgtcggaagacaccgacacgccgcgccgccggagccccagtgcatgctggttgcgctgaaggcgaccccgccccagaatgcac

SEQ ID NO: 157540 - DNA, 122 bp, Homo sapiens
gctgcacaagaacagaccggagaaaggtcaggactctcaggccagggactgaggagccagcgataagccatggcagtaaaggctgactgaatgcccctatgaaaaggaggctggagatgggg

SEQ ID NO: 157541 - DNA, 122 bp, Homo sapiens
taacctcctaggtggattgcgcaggggcggcgatgcacgtgaccggaaaagcaactaacacgccgctcaggaaagcagcaaaggctgccgggaaatcaagcctttgccacgaagcgagatgc

SEQ ID NO: 157542 - DNA, 122 bp, Homo sapiens
gtggagacagcccttgaatgccaggagatcatgattaatggtcaaaatggccaccactgacgcatgggctggagttaagcgatggcctttggcagctgggaagggagggcctagggttagca

SEQ ID NO: 157543 - DNA, 122 bp, Homo sapiens
gctgggatggaaggagagagggtacagggtgcggggaagctcacagagccctttctgggacgaggtggactgtcaggatcttttccagcactgccacactcactgtctgtgacgtcgggcaa

SEQ ID NO: 157544 - DNA, 122 bp, Homo sapiens
tctcagggcatcctcagcccttcctgaggacctgagccgtcagcccacggtgccctccagcgtcatctcctgcttggtgagctatgctaggccccgatgctcaagataacctgtaaaggcaa

SEQ ID NO: 157545 - DNA, 122 bp, Homo sapiens
ccctgtgggagctctgcccattccagaggtgccaggccattcactaatgggggcaggagccggtgagtaaatgccagtcttgtgctgtcacaggtggacgattcagagaggtgttctagacc

SEQ ID NO: 157546 - DNA, 122 bp, Homo sapiens
gctgcttttcccaggcgtctctttcttaggagccctccagaagctcctctagccctggcccgtgccgctttggccacagctgagtcaggtgccgagtggatcactggcgaggtaaaggggat

SEQ ID NO: 157547 - DNA, 122 bp, Homo sapiens
gagatataataattgaccttattttataccagccattgttctaaatgctttacatgcttacgtaaattaatcttacaatctcatgaagacaaaatgttgtgtatttgcttattgatccccat

SEQ ID NO: 157548 - DNA, 122 bp, Homo sapiens
gacggagcgcggggacccgtgggggtgggggccaaaggcaatactcaccggttcgacagtcgccatcttagatcgatctgatcgcacaaccgctccagaagggggggtaagaggaaaaaaat

SEQ ID NO: 157549 - DNA, 122 bp, Homo sapiens
cccagcccccgcctccgctgctccgggccacgggggtcttcccgccctcgctccgcttcccgggctccgcagcaggggctcccttgggccccgacttcttccggctcttcacctcagacatg

SEQ ID NO: 157550 - DNA, 122 bp, Homo sapiens
gatgccagaagacgatagaagccggcaggggcagggagcacagggtggcacaccagggaccgcccgccccagaggagctctctcccacctccagtatttccttcaggtctcagtcgaagagt

SEQ ID NO: 157551 - DNA, 122 bp, Homo sapiens
tcttcttcccaggtctgctagggtcagagtcaatgagggcctggggttgggtggtgtgagcggaggagttcctgctgggctatggggcttatctcagatgacctcatgttggaccagcttgt

SEQ ID NO: 157552 - DNA, 122 bp, Homo sapiens
ggtgtgtgatgcggttaactacggaaagaaatagggtagcttttgggatccgaggaaaggcgtcagtgtccctcctgtcccgtggttttggatctagcgatgttaacgcacagacatgacta

SEQ ID NO: 157553 - DNA, 122 bp, Homo sapiens
gtggatgccacagataaagcagaaacgggtacgtgcccatctgtggagaattgacggggccgggggagccaccctgtgggcttttcattcttagaagagctttaacaaaggtaatcattatg

SEQ ID NO: 157554 - DNA, 122 bp, Homo sapiens
ggaggcaagtcaggtcagcattctctcggttggcaacggttccactgtacaggtgcggggcgccggggcccgcgcgcttagctcctctcggcctgctcgattttgacgtcgttagtcagcaa

SEQ ID NO: 157555 - DNA, 122 bp, Homo sapiens
caagcaggcagagacttgggagagaagaaactcggctcataggatctcggctgggacacacgcctgaggcccctgacctgatgtctggccacagactcctcagaaaggctcccgagagggtg

SEQ ID NO: 157556 - DNA, 122 bp, Homo sapiens
gggccgcccccacccctgcccaccctcccgcgggccggggcagccccccgccagccaccccgcgttcccaggaagagggaccggtcattactcattcatgtcctttcatttcatttcaatat

SEQ ID NO: 157557 - DNA, 122 bp, Homo sapiens
gtggttctgtttgattgtgagttcctagaaccttctctactctcacttctgtgcttggtccgggaccagaggtcggggccaagagatcagcttcaagggaacagaactctcctccttcttcc

SEQ ID NO: 157558 - DNA, 122 bp, Homo sapiens
tttaccatcgggtgttggctagaataaacggggaattctcctggctgccttgagctttctcgggaagacattttactggggtcgaggttaggcggcagcggagggtgggggaccttgagtca

SEQ ID NO: 157559 - DNA, 122 bp, Homo sapiens
aagcccaaaaggcaggttcatctgaccgcagctctgtgggtaaacgcctgtgcccactgtcgctgtgcagtacgataacacgacttcttttgtatgtgaaatagattcacccaccagtcaag

SEQ ID NO: 157560 - DNA, 122 bp, Homo sapiens
ctgctctcctcgacatggaccctgagacctgcccctgcccttctggtgagcccccgcccccgctcgcatcctgcgcactgcgcgcccttgtacctgcaaagaaacccacgccctgcgccttc

SEQ ID NO: 157561 - DNA, 122 bp, Homo sapiens
tggagaatttgaacgccagcaaacagaagggaattttagacagaggctgcttcagtctctcgaagaatttaaagaggacatagactataggcattttaaagatgaagaaatgacaagggagg

SEQ ID NO: 157562 - DNA, 122 bp, Homo sapiens
agcccctttgccggattgcagccaggaaaatctctgctgcccaatcccactgcagctgttcggccctgcccaccccccaacccagccctgaagccagaagtggggaggaaagaccacggctg

SEQ ID NO: 157563 - DNA, 122 bp, Homo sapiens
gtccatgctgcagctgatgagctgccccgactcatccacggtcatcctggacacctggttcgtgtggcctttcccagcgaaggagtcgttctcccccgtctctgaatcccagtaatgtaggg

SEQ ID NO: 157564 - DNA, 122 bp, Homo sapiens
tatgagagtagatctcgggctcctgaaccatcagggcctcttagtcagtaatcagggcttcgtcatcctgcttcctccagctccactccgccgtgacttttactctctagggttcttcattg

SEQ ID NO: 157565 - DNA, 122 bp, Homo sapiens
agcatacagtggtgagtacttgatagggcagagtcctacctggttggccagggaacaaaacgttgctggtctttccttcagagtggggttgttagacaactttgtctagaaacagtcactgt

SEQ ID NO: 157566 - DNA, 122 bp, Homo sapiens
gagttggcgcgcggaaggccaggggtcagctcaaccggagagagggaggaggtaggggctcgtccctatcagcggcgatacctcattgtcccaagatcctgtagcgaacgtctccgcggtct

SEQ ID NO: 157567 - DNA, 122 bp, Homo sapiens
tatatcatacatataggaaaatacccaaaacaagtatacagttcattaacacaaagcaaacgtgaataaccacattcagtaaagaaattggaacactgtcaacacttcaaagcctcctttat

SEQ ID NO: 157568 - DNA, 122 bp, Homo sapiens
cccatcgtttgggatgtgaggagcccctctgcccggccgcccagtctgggaagtgaggagcgcctcttcccggccaccatcccgtcttggaagtgaggagtgtctctgcccggccgcccatc

SEQ ID NO: 157569 - DNA, 122 bp, Homo sapiens
ctgtgtgaaactcacattctgatgctctgagattctgatgcaatcggtctatgaagctcccggaagccaggtgtgtagccccttttctagaacatgactgggataggagagtggagacaggg

SEQ ID NO: 157570 - DNA, 122 bp, Homo sapiens
gtctgggcaggatggctctctgcatctcagctactaacgcacctcgaggttcccgcccgtcgtggccccaggccacccatcctgactgggtttggcctgcctccagcacccccttcaagcac

SEQ ID NO: 157571 - DNA, 122 bp, Homo sapiens
ttctctctctctcctcccctctcatcgggtgaatagtgagctgctccggcaaaaagaaaccggaaatgctgctgcaagaggcagaaatgtaaatgtggagccaaacaataacagggctgccg

SEQ ID NO: 157572 - DNA, 122 bp, Homo sapiens
ctcggcgtctccttgtccccgcctgggtccgcggcactctccctccttccgcttgcgccgcggggtccctggctcaccccgccctgggcacagccatgggcctgttcgcgtcccctccacta

SEQ ID NO: 157573 - DNA, 122 bp, Homo sapiens
aaaacccctcaaatttagaatcaacatttttaaatatttagggccatgtaaactttcttccgtgttgtatcaccaatagagctaggtaatagggttttgttttctatgtttgaggtacgata

SEQ ID NO: 157574 - DNA, 122 bp, Homo sapiens
tccccagcctcccagcctcccgccttccccacgcacaccagctcatcctgcctaagtctgcgtggttccttctggaacacgcgtcccccaggtgtccgtgtaacgtgctcccgtgctccagc

SEQ ID NO: 157575 - DNA, 122 bp, Homo sapiens
ttctagggcagtggtgcagccatgggtttgccttgccaggccagtgtgatgagggagccacgacagggacccagctgcccctgggggtggggtgagtgagcgaggaggtgccttagcttctg

SEQ ID NO: 157576 - DNA, 122 bp, Homo sapiens
atttgacactaatgatcatgtcttttaaatattacctaactggcttttcttaacactgtacgtgacttttttgcctccttccacttttcatattacttgtaggtttctggttgacagctgag

SEQ ID NO: 157577 - DNA, 122 bp, Homo sapiens
atggaggccggcatggcggcccacgcctgttattccagcactgtgggaggccgaggcgggcggatcacaaggtcaagagatggaggccggcacggtggctcacacctgtcatcctagcactg

SEQ ID NO: 157578 - DNA, 122 bp, Homo sapiens
cacggcacctgcgccctacggcggtgccccttcgccgccgtcccctccccccacctgcggcgccgagcctgccgcgcctccagagctccgccctaccccgccccgccctttcgggcgctccc

SEQ ID NO: 157579 - DNA, 122 bp, Homo sapiens
tctatctaagtggggaaagatagcattagaagaatctctagacacctaatttagttctgccgattatcagaatgggaggtcctatataggtcatgtgactcactgttcagcaagtcctttaa

SEQ ID NO: 157580 - DNA, 122 bp, Homo sapiens
gggtgctgctcgcagacagctgcagcctggcgtcatggctcctgcactcgggtgcacggtcggcaccagaggagattaaatatgccaatgcccaggctgcgtccagccagtccagtcaggat

SEQ ID NO: 157581 - DNA, 122 bp, Homo sapiens
ccagcctccttctccgcgggtgcctcccaaaccgttctatcattctcgggttcagggaggcggaatcgtgcctgctctccggttcctttaagaggcgtcggctccacccctctcagagtcgc

SEQ ID NO: 157582 - DNA, 122 bp, Homo sapiens
gtcttggagtttggaactctaccctggtaggaaagcaccgcagcatgtggggaagcaagacgtcctggaatgaagcatgtagctctatggggggaggggggagggctgcctgaaaaccatcc

SEQ ID NO: 157583 - DNA, 122 bp, Homo sapiens
gcagccggccttctcacccaaccccagaatgaagacaggcaccctccctggtgattctcacgcacagccaggctggagaaagtggatttcgaggaatgatgctcccttgctcgtggcctgta

SEQ ID NO: 157584 - DNA, 122 bp, Homo sapiens
aggccggggaacgggctggactgagggcgggggctcgggggcagcggacgggaaacgcctcgaaagcagccagacccggcgactgaaatgaggcggaggagcttggcgaggggaggcgcagg

SEQ ID NO: 157585 - DNA, 122 bp, Homo sapiens
agtcagtctagcattctcagagagcgttataacgcctagtacagtccggggtcctgggtgcgttctgcactgagtcggcttggggcaggaagtcatttaagcgacctccttccacttgcccc

SEQ ID NO: 157586 - DNA, 122 bp, Homo sapiens
cgctccgccccccccccccccccccccgcccagcccacaatagtgcggtgggtgggcattcggcttccgtccacatcttcgctctgctggggattcaggggtcttggctgcgcggagcgtct

SEQ ID NO: 157587 - DNA, 122 bp, Homo sapiens
gagtggccccagcctggcccggcgctgctctctttatccctagggacccggtccgacccgcgtcttgctaggatttctcgatggttacttgaaagcgtgtaaaacaacaagacgcattcttt

SEQ ID NO: 157588 - DNA, 122 bp, Homo sapiens
agcagaaagaattctgttgctttcatgatttctgtgattagaccagggcacaattttgaacgttatcagacaatgtgaactaaagaggaagaaaatccattttgacagtaaagaactcttgg

SEQ ID NO: 157589 - DNA, 122 bp, Homo sapiens
tggccttgaggagaacattcagccccacacaggcagcaggcggcccggaaggcgcgcagacgctgaaccgctggccccaccgcctttggcagggagctaatgctatttgtgtatcagcccag

SEQ ID NO: 157590 - DNA, 122 bp, Homo sapiens
ttttttacagccctagtgtgcgcctgtagctcggaaaattaattgtggctatagccgcctcgatcgctgtctccccagcctcgccgcggccgctccgggacgcgcccgcccgccgcccggct

SEQ ID NO: 157591 - DNA, 122 bp, Homo sapiens
ccgggcagcagaaagacgagtgagtgacagcagacaggccaatcagaagcggccccgtctcgggcccaccccgaggcctggcccaaccgcgtcccggtagctcccggaataggagcgttgcg

SEQ ID NO: 157592 - DNA, 122 bp, Homo sapiens
tgggacgcccgcccacttgctctctcgcgccccctctgcccccggaccgagtagggagcgcggcttctgcaggggaagcttgggactgcactgctttagtgcccgccttcagcccgcagggg

SEQ ID NO: 157593 - DNA, 122 bp, Homo sapiens
cctcccgcgggtgcaggggcgcacgcccgcatcgcccacgtgacccgcgcgtgctacccgcgcctctttcccgggccctgggtgcctggagcgagccaccgttcctgcagctgttttgtggc

SEQ ID NO: 157594 - DNA, 122 bp, Homo sapiens
tccattttttctgatgttaaataaactctaagatgtacagacgtcttttatctggctctccgattaccttctgcagataaactcctagaagttactggggcaaagggagtgaacctttaatt

SEQ ID NO: 157595 - DNA, 122 bp, Homo sapiens
agaaagtcactagtaaagttgttgattgcaaagatgagttaaagacactgtgagactaagcgttacatacactgtaaaatgaaattagcagtttggactaagctatgcccctgtggcttctg

SEQ ID NO: 157596 - DNA, 122 bp, Homo sapiens
tcttctgcccggggaggaacctcttctggaaattcttcactgaccagacataatcagtgacgtcttcccaactctaggttctcctaccagcaggatccgcacgtctttcttcatgtcggcgg

SEQ ID NO: 157597 - DNA, 122 bp, Homo sapiens
tcacctgccactagacatttgggttgtttctaatctttgggaagtaaacgcattgctcaacgtattgctttttcttttatgtgactactgcctgaagtcactttcctaggaagaatggatcg

SEQ ID NO: 157598 - DNA, 122 bp, Homo sapiens
ctgtgcccctaggtttccggtcaccgggagagctgtctgtcgcgccataagctggaggtgcgcaggaggatagaaatagaaactcctcatccagccgggccagggcactgacagccacagcg

SEQ ID NO: 157599 - DNA, 122 bp, Homo sapiens
ccgtgtgtcagcacggctcatctctggggtttgtgtcaccgcaggtttagctggaggcttcgtggggacgcccgcagacttggtcaacgtcaggttggtgttcccccaccccacctgcaagg

SEQ ID NO: 157600 - DNA, 122 bp, Homo sapiens
tgcggggcaaaaagggtcttgccggcctcgctcgtgcaggggcgtatctgggcgcctgagcgcggcgtgggagccttgggagccgccgcagcagggggcacacccggaaccggcctgagcgc

SEQ ID NO: 157601 - DNA, 122 bp, Homo sapiens
gaggatgtggtgagccccggagaggagacggtggaggccctgctgggcctggtccgcagccgccactccccctgggctctgctgaacaactcgaatgcagaagacagtttcctgagagaatt

SEQ ID NO: 157602 - DNA, 122 bp, Homo sapiens
ggaagcagtcagcaaatgtgaaacaccatgaagccaggcgattggagaggtaaaaagaagcgaggactcagggaatatgggcattttaaaaataataatttaaattaaaaaaagacaaggaa

SEQ ID NO: 157603 - DNA, 122 bp, Homo sapiens
agttcagagacatcagctatgtttgctactcctctcctaactacagcagctgcagcaagccggcagggcctcagggcctggctggaccacattccagcatatcagggctctccttgacctga

SEQ ID NO: 157604 - DNA, 122 bp, Homo sapiens
aacctacattgcctaaggctggcacagagttggccccaaagtctacttagaatttgccggcggaacagcaatgaccactgggccacagcgcttaagacgcccgctgggtaccaatcctggga

SEQ ID NO: 157605 - DNA, 122 bp, Homo sapiens
cccaccacatctgaacccctgggaggagggaggagatccagggagggccgggcccacccccgcaggactctggctggcattggtcaccaaggcctccagacactccgggcaatttgggctgt

SEQ ID NO: 157606 - DNA, 122 bp, Homo sapiens
accgacttcaagaatgaagacgcggaccctcgcggtgagcgttacagttcttaaaggcagcgcgtccggagtttgttccttctgatgttcgcatgtgttcggagtttcttccttctggtggg

SEQ ID NO: 157607 - DNA, 122 bp, Homo sapiens
ggcgccggttcctgaggacacagaaagggtgtgtctggggagcaagagccgtagtttcggcgccagacaccgaggcaggagctgccgcagcagcccttggggaccccgaacctgccagtgga

SEQ ID NO: 157608 - DNA, 122 bp, Homo sapiens
ttccggtttttgttttcatttaaaaaataactgtggtaaaatatatctgtaacttaaaatcgagcatcatagccattttgaagtgcagagttctgtggcagtcagtccatctgcatgtcagg

SEQ ID NO: 157609 - DNA, 122 bp, Homo sapiens
aaggttttgtttttgtttttttttacggaaaaggttgtggttaggccccttggaaagttgcgacaaaactcgagttagacaaggaaggtcggaactaagtggccacagcaacaatgcaccag

SEQ ID NO: 157610 - DNA, 122 bp, Homo sapiens
cagtcggacgcagcccaggactgccaggggtggggattgcctgggtcccccaggaagggccgggttacgtccggaaaagtgaggcccggggttccagttaattgttaccggaagtggaggga

SEQ ID NO: 157611 - DNA, 122 bp, Homo sapiens
gggaggggaggggaggagaggagggcagaagagaaggaacgagaacaagggaaaatcccccgggaacacagaaagatagagacccaggggactcccgcagagagggcctcttgggcttcagc

SEQ ID NO: 157612 - DNA, 122 bp, Homo sapiens
cggacacctggaggcggctgtggctcctgccgcctgggtgcgcttcttgtgctggttgagcgtgctcctgacgccagcgtgtaggcttccttccatcctattgctaaatcctccttgagcaa

SEQ ID NO: 157613 - DNA, 122 bp, Homo sapiens
cacacttctttacacctcaccacctccctttgcttgttgtttagatctccaacttctgaacgaatctgtcacgctgagtaccaggcagaggtcagtgtgaaagacaagggggtcaatgacct

SEQ ID NO: 157614 - DNA, 122 bp, Homo sapiens
ctgtgaggggcgctcgcccagcagcggaaaggccattcgcgtggcgcgggagcgcgggcccggccgcctgggcgtgtccctttcgcggaactgagctcactggctcctctcttccagacgga

SEQ ID NO: 157615 - DNA, 122 bp, Homo sapiens
tgggaaagtgggggggggggccgggggacttggactcgagggcgctggagataaggagggcgcctgccacccaatgctcaaaggacccaggtgtctgggtcctcagctttgggggcctgggg

SEQ ID NO: 157616 - DNA, 122 bp, Homo sapiens
aggtggacgggggagaaaggcatcctaaccagctggttccaaacctatcaacaacaacaacgacaataacaacgcaaagtaaaacaaaacaaacaagtggtccggcggtacttcagaatcct

SEQ ID NO: 157617 - DNA, 122 bp, Homo sapiens
ctgaattttttactggaggtgccaccacaaatggtgttgttaagaactgagaatgggtgtcgttaaggactgaaagtgccaagcactgagcagctagctcctctatccatctattcatacac

SEQ ID NO: 157618 - DNA, 122 bp, Homo sapiens
aaaaaaaaaactggaaggcctgggccgtgatttgccagggccacggcgtggccaccaaagcgctccaggacgactcggcagagcgcgggcaccgtggctcaggcgcgctccccgggggcggg

SEQ ID NO: 157619 - DNA, 122 bp, Homo sapiens
acctctggagcagcagtggacaatggctgctcgcctgctcctcactcctcactagctgggcggggggcggggtttgagggggaaatgcagtctcagcagcagacggagatgaaatctgctga

SEQ ID NO: 157620 - DNA, 122 bp, Homo sapiens
atttccaatctcccaggaaagcccgttggtaaaccagaggctgtgtgcttctttgctacccggaggaacaaggtgggggtgtggagtcagtaaaaccttgacctggaattcaatagagcctg

SEQ ID NO: 157621 - DNA, 122 bp, Homo sapiens
tgagtgactgatgggggtggcgggacgtgagtggctccctagggttggcggctgggtggacgccgcgccgccttcacccgtggcctgctcggggcctgcagcagcccgtggcagccggcagg

SEQ ID NO: 157622 - DNA, 122 bp, Homo sapiens
cccgcggtcaccgctgcgactgggagcctcagagcaggtccggcccagcccgtcccgccccgtaccgtaccaggccccgcccccgcccgggccgcccccgcccccgtccccgcccccacagc

SEQ ID NO: 157623 - DNA, 122 bp, Homo sapiens
ggcacatcaagttcagatcttgactcataagatatgcttccatcatcattgctcacaacccgtcccttgcggccagtcatctgagaagccaaacaatgtcattacaatgaaggtatctgact

SEQ ID NO: 157624 - DNA, 122 bp, Homo sapiens
catatattacctgctattgtttatggataattgttttctggtataggaagaggaagtatacgaggtgctgacagtgtggattccagagtctgactaccccagttttgaactacgcctgtacc

SEQ ID NO: 157625 - DNA, 122 bp, Homo sapiens
cggagcgaccgaatgctggaaccggccggtcactcctctctggcgggaataggctctgtgcgggcctcacagcagcgtccaagccctggcctctcggcaccggggtacctgtccggcgtcca

SEQ ID NO: 157626 - DNA, 122 bp, Homo sapiens
ttccctcttgatttattaaatttgcagatatacttttaaaaaactccccgtagaaggcagcgaagaagacaaatcacaaactggtgtgaatagagccagcaaaggaggtcttatctatggga

SEQ ID NO: 157627 - DNA, 122 bp, Homo sapiens
atcttttataaaattgtgagaggtagcacaagtattaaaaggtacttaaatataaatatacggtgtaatgaaaaataacgtaaactcccatataatccaccagtagatcagaatgtagagcg

SEQ ID NO: 157628 - DNA, 122 bp, Homo sapiens
ctgaggaccccccagagtcagggagattgggaggtgagggtgctgaatggtaaagggcttcggagctaagggaaatggtcaggaccccacctgaccccaacgcccacgggccaggggcagag

SEQ ID NO: 157629 - DNA, 122 bp, Homo sapiens
ggacaggtgagcacattctggagggtagggacgtgggggacggcttcagtccaggcacagcggcaggtcccagctgccccgctttccctggcccgagaagagcagcccccagcaggctgcgg

SEQ ID NO: 157630 - DNA, 122 bp, Homo sapiens
tcagttggcatgcgatatgcttctcaggcagtaatttagagactgtcaattcctgagagccgctggggaactgagcaatcgtctgcatttcgtcgctttagcccgagctgggtctttgagct

SEQ ID NO: 157631 - DNA, 122 bp, Homo sapiens
caccgtcgtcagcgctcaccgcctatcctcagccccaaaggacaagttcttataccaccgcgccagccagctagttccaagttgcccaatcgagaaagctgctgcctgccatgcctcttccc

SEQ ID NO: 157632 - DNA, 122 bp, Homo sapiens
gggtaactccaggcaaaacagatttgtatgtgagctgtgaccaggtaggaaggccggcctcgggggtcggaacccaccatggttgctggtgtccacgttgcccattgctcgcacactcctcg

SEQ ID NO: 157633 - DNA, 122 bp, Homo sapiens
tccacttggtggcccctccgtagatctcgatgtgggattcagcccaggcgatgacattgccggacagagccttggtgctgcaggtggccaggttgtacacctccccgggggtcagcttgcgg

SEQ ID NO: 157634 - DNA, 122 bp, Homo sapiens
tccgggaccgccctttcccccgccccgctgccagtcacccccgcctgctctgcccctccgcgaaggatcccagagagcccggcgccaaccttagttgtttgtgaccaggggagcggctggaa

SEQ ID NO: 157635 - DNA, 122 bp, Homo sapiens
ttgttgatggtgactatgcctcacggtgcaggtatcacctccaccatacagaagaggccacgtgctgttccaatgagaactcaggacccagagccatcaccaggagaagcagaagctaaatg

SEQ ID NO: 157636 - DNA, 122 bp, Homo sapiens
agtcaaatctaatttgaaagttgaaggtctaaaacagataaatgcaagagctactgtgatcgaagcagacaaattgaggagagcaaaatcatttaatcaaagaggaagacgtgacccagctc

SEQ ID NO: 157637 - DNA, 122 bp, Homo sapiens
gatcagctgctccaggaagacggtcatgaagaagcccagcaggaggatggtttcggccagcgggtagtcggtgctgatgtggccgaggctcaggaccttctggagctgcagccggggacacc

SEQ ID NO: 157638 - DNA, 122 bp, Homo sapiens
ccgaagtcacatgaccgtggcacccagggaagcgaggtcacgtggctgtcgctgttgtcgcggggcctgccgggggctgtagtccttcagagtgggggaaggcgtttcggttgtggtgctgc

SEQ ID NO: 157639 - DNA, 122 bp, Homo sapiens
gtggttagcaagttcctgcttccgtcgcagcgacggcaagtttgccgcgggggaagggcacgttcctgccctgcaacccggagctgcttcccggcaacattagcgcgtccctccccgcggag

SEQ ID NO: 157640 - DNA, 122 bp, Homo sapiens
gagctcacttgctgttttcgttgaaagaccgacccttttgataaagactgctggggaaggcgacgaattcctttccccaggtcgcattctatgggcaggcaccaaggccaattgcgtttccc

SEQ ID NO: 157641 - DNA, 122 bp, Homo sapiens
cacgttccaccctgacccctctgcccccagctgatgtttgcctgggccacattttttcagcgctagcatcacccaatctttctcagtgctgtggactggccctagctccctcttctgcaacc

SEQ ID NO: 157642 - DNA, 122 bp, Homo sapiens
gcgtgcatggcgaagtccccggagaactctaccctggaggagattctggggcagtatcaacggagtctccggggtgagttgctccaaacctctgtccctagccccgaggtgcccagggccta

SEQ ID NO: 157643 - DNA, 122 bp, Homo sapiens
gcggaacccctaggacgatagaggcagggccccgggacttgcagcggtctcagctccctccgcaccagagccgtctagcgtccgggcagcgtttgttgctaagcaacgggcccgcgcaggtt

SEQ ID NO: 157644 - DNA, 122 bp, Homo sapiens
agctgatccttcccctccccaggaggccacccaggcccctctgtgtagcctgcatggcgacgaggtgtgccttgtccagtagctgcccgtggcctggctggcttgtctgtgaactgcccatc

SEQ ID NO: 157645 - DNA, 122 bp, Homo sapiens
gatgtccaggcccctccggtatgtgagttcatcactaatgacttagccgtctccaagaagcgcagcggccttctctgtggccgcgctcaagtaggtgttggcggctacgatatgaagatcgg

SEQ ID NO: 157646 - DNA, 122 bp, Homo sapiens
agatactttctttccaaatagggctgatacttgcatttgaagtggagtatttcttccttgcgtgggactgtcctatgcaatgtaggatatttagtatccccggccgttccttcctcttattg

SEQ ID NO: 157647 - DNA, 122 bp, Homo sapiens
tacccatgaccccctcctgcggcccgccgacccgctgtcgccgtcccccggctccgccgccgaccagtcccggactctatatacccgtccggcggaagcttccagagcccgccagccccctc

SEQ ID NO: 157648 - DNA, 122 bp, Homo sapiens
gttattttcgtgtttgctgtttttatttcgaatgccgctgcggggcacgttggtcctttccgcactcggggtccccggcggcctcacgcgtccgtgcagcggaggcttcctgagccccctgg

SEQ ID NO: 157649 - DNA, 122 bp, Homo sapiens
gacgggcccatttccagtcttaccagccatgtgcaaaaaccttatctcaggcctctctgccgccactcatccctgcttgtaaatgtgtcctccacacggttgtcagcaccatatttctaaaa

SEQ ID NO: 157650 - DNA, 122 bp, Homo sapiens
atggcggagcctccgccgcttcccgctccggggcgggtaagggggcgggagaggcagaggcggaggccttagagagcctcccccgccgcccggccccggcccaaaagtccgcccgcgctgtc

SEQ ID NO: 157651 - DNA, 122 bp, Homo sapiens
aaccagcaccgcccaacgaacgaccaaaccgctctgcgctccaagcccccgcgtcgcctccgtttttataggcacgcttcacgctgcgtctctgcgtcatagaacccttatttgcatacacc

SEQ ID NO: 157652 - DNA, 122 bp, Homo sapiens
gaattctggatctgtattttattgtgtattaccaattattttcctttctcttttatgtgacgggtagtattttgattatttaaaatcatctttgtagaaaaattattggcagctatgaattt

SEQ ID NO: 157653 - DNA, 122 bp, Homo sapiens
tccacttccgccacgccacgcggcaccggctccccgacggcgtgcactgggacgagcgcgcgcaccgccacctttcccagctgctgctggcccacctggcagacgcctggggcgtggacctg

SEQ ID NO: 157654 - DNA, 122 bp, Homo sapiens
ctggccaaaggagatgatgggaagcctgaggttctgatctgggataactgcagaaacccccgggtaggacttcagcgcagacgggacatttaatgatgttgagaagggcctttcctcagtta

SEQ ID NO: 157655 - DNA, 122 bp, Homo sapiens
cactgtggcctttctctaggcttattccattcactctccagaaaaccccagggtttcctccgtgttcacctcctataggctctgccttcaaagagtggatttctcaaatgttctgcaccaca

SEQ ID NO: 157656 - DNA, 122 bp, Homo sapiens
cgggctcctcgggtgccttccccaaagtcttcccagagctgccgcgggagggcggacaggcgtgctggaccctgagcatgctggaccagggcccagcagcaggccacttgggagagccagcg

SEQ ID NO: 157657 - DNA, 122 bp, Homo sapiens
tttcctccttctctataaaaaagagatagttgcctcaaaccagctggcctgagagagcctcgagagtcccagccatggtcccgtgggatggggagaatcccagcaccacagtgccatgagac

SEQ ID NO: 157658 - DNA, 122 bp, Homo sapiens
tggctcctctgaaagcaccttatccccgtcaccggctcctctaaaagcagcgtgtccccccgctaccccgtcaccacctgtgtgggagacccagtaatcgtggccacagaggtttcccgtcg

SEQ ID NO: 157659 - DNA, 122 bp, Homo sapiens
gtaaattctttggtgtactcttgagcaggctccctttcttctgtgactcagagcctggagcgttgcagccaagctcaaaagtcaggaacgggggtgtggacttttgggctatgccagtcagc

SEQ ID NO: 157660 - DNA, 122 bp, Homo sapiens
gtgctgcaaccaggtggcataacctctcacctgattccttagctctagtgaagttattttcgtgcatggatacttgttcgaattgatgtttctgcaagggatgagcgctagaaactcctgtt

SEQ ID NO: 157661 - DNA, 122 bp, Homo sapiens
atggtaaagtaggactagggtggaggagcaatgggcattctcttgggtaggaaggctgctcgtgacctgaaggtgagagccgtgcctgtcccctgctggacaaatattccatacatgggggc

SEQ ID NO: 157662 - DNA, 122 bp, Homo sapiens
gcgtgggcaccacgaagccaggggcctgggcagtctgggctggcgccggcgggggcggggcggcggcagcgggcggcggcgggggaagtgggccctcgaagcgagtctcctgcaggtaaggg

SEQ ID NO: 157663 - DNA, 122 bp, Homo sapiens
cgggtgtgccagctcattccattttagggctgagtaatactccctgctacggcgatgccacgtttgctcatccattcacccactgatggacactgggtggtttccaggtcctggggtctttt

SEQ ID NO: 157664 - DNA, 122 bp, Homo sapiens
tgtcgtcggcagctacaattagtgatggaggggcatattcaggctcaccagcctcatcctcgcccaggtgttcgggatgcaccgcagaggctgaccaggctgcacctgaggctgtccaacct

SEQ ID NO: 157665 - DNA, 122 bp, Homo sapiens
ccattatgcatatcgtgggagaggcgcgtacagggctgagacactcctcaggtcccagaacggccgccctattaatttgtctttgccctggaaatgtatagataaaaccaggaagacaaaaa

SEQ ID NO: 157666 - DNA, 122 bp, Homo sapiens
cagagtccctcggagcatctgatgaaatccatagacaattttcccagaaaaaaaaatgcacgtgcattaaatcttgggtctgtatgtgtgtgggggagcagaacagtataaccaaaaatata

SEQ ID NO: 157667 - DNA, 122 bp, Homo sapiens
ctttctttgaagaaatgggggactccactgacttctgagagaggaaacacctacgcaatccgctgacagtcttggttggcaagccacagagtgtgacacacaagatagaagagggaggcact

SEQ ID NO: 157668 - DNA, 122 bp, Homo sapiens
tagcaaatagaaaaaatccagtatcttcagaacacaagggctgatcttttgtcccctacccgcaagacattgcttggtaccaaaatagaaagttatttttttaagggggaattatgggtttt

SEQ ID NO: 157669 - DNA, 122 bp, Homo sapiens
ggcagtcctgagtcctggcggacacacttacatacttaagaaagcagacctgccattggccgtggtgatcagggtccggaggctaggggctgagaaaggcctggtgaaccaggaatatacca

SEQ ID NO: 157670 - DNA, 122 bp, Homo sapiens
tgccaagcttgtgagcaacgagacggaatccacgcccagggctttctaacggcggggccacgccctccacactccacctcggccctctgccctgcgatggtgcagagacagggtgtggtcaa

SEQ ID NO: 157671 - DNA, 122 bp, Homo sapiens
tatttgttcttgaggtgcaggcaagtttgcagtttatgttcttagtaactcattcaagtccgaaataaacatcatgcttttacaaaccttctaaaactacatactgttggtttagtgactta

SEQ ID NO: 157672 - DNA, 122 bp, Homo sapiens
caagaccagcctggccaacatatcctgtctctattaaaaatacaaaaatgaggccgggcgcggtggctcacacctgtaatcccagcactttgggaggccgaggcaggcagatcacaaggtca

SEQ ID NO: 157673 - DNA, 122 bp, Homo sapiens
cctgggcctgcttccggctggacgggcgcaccctgctgcgcgtgcgtggccccgacgcggcgcccttcctgctagggctgctgaccaatgaactgccgcttccgagtcctgcggccgcgggg

SEQ ID NO: 157674 - DNA, 122 bp, Homo sapiens
atggcacgcgaatgcgactgggcagtgctatcactcggaaaagggcctacaggtgcgaaacggcggcaagtggcttgagatgattttaatacctcgtttctcgtgaaactttcatccactag

SEQ ID NO: 157675 - DNA, 122 bp, Homo sapiens
tctactagattctcaaactatctcattacaaagaggcacattaaaaccatctctgggactcgggatgggaaacagattggtctttaaaactgtcttcaaaagatccattctcaattccctaa

SEQ ID NO: 157676 - DNA, 122 bp, Homo sapiens
tgcgggcagcggtagggcttctcgccagtgtgaacgcgcaggtgagaagtcagcgccgtgcggcgcatgaaggcccgaccacactcgggacagcggtggggccgctccccacgatggatggc

SEQ ID NO: 157677 - DNA, 122 bp, Homo sapiens
gggggtgaagccttcacacatcccagaagggcctcaagccatttagttcacctcagaagccggtagtggccacataatggtcccttctggcccccagtctggctattcttcccctcccaaac

SEQ ID NO: 157678 - DNA, 122 bp, Homo sapiens
actggccatgctcttgccacagaggcctcatccatcctcacatctccagggcctgtgcaccggaatgtttgtggatgggaagaacatctgcctaaaggccctgcacacagctgtccccaaac

SEQ ID NO: 157679 - DNA, 122 bp, Homo sapiens
ggccttgcccaccccgttagacaagttggtgggtatcctcctggggatagcagcaccagccgcttgtgtgcggatcacaggaacccacggcttacggaggcgagtgggctgatcggacttgc

SEQ ID NO: 157680 - DNA, 122 bp, Homo sapiens
agacagcgaggggattagcgggaactgtagtgaatggcagccgacgtgggcggtggcaatcggctgcccgaactcaggcctgatgtctgggttagctcaccggcagcctggttgggtaggcc

SEQ ID NO: 157681 - DNA, 122 bp, Homo sapiens
catactttgtttccccattgggaaagtaaagcaaaatattagccgcgatgcacaggagggcgagccccaccagagaatgtccgatgcatcgtgcacacttcccatagcacatggtggtctgc

SEQ ID NO: 157682 - DNA, 122 bp, Homo sapiens
gggtgtgtagtttgcttcatagtgtgtggcgatgccgctctcctagttttgacaaatgtccgggggtgacttaagaggtgaatgtgggctgccgtggggtgtaggtgggtgctctctcatgc

SEQ ID NO: 157683 - DNA, 122 bp, Homo sapiens
tttgcccaacagcacaaagcacaccccactaggagcaggctgctatttcagacacactcacgggctcacagagagaagcaggaaccttccagctccagagccagggctggctgtgtttcaga

SEQ ID NO: 157684 - DNA, 122 bp, Homo sapiens
gtcctgggacagcttctgaggagcgggtgggctagctcaggccccccagttctgctccatcgagggcgaggccgcccggccagcaagctttcacagcaactgggcagccacacaaagagccc

SEQ ID NO: 157685 - DNA, 122 bp, Homo sapiens
ctgcgtcctcgcgtcgcgtactgcttgctgggattcgtagtctcgccttggccatcagttcgcccttcccagagagctttgggaatctaagccgggactgggcggagggcggggagaaggtg

SEQ ID NO: 157686 - DNA, 122 bp, Homo sapiens
gaggttgacacccagagcctgacgtcaggataggactcttggcactccgcactgaaacaccgtgattagtcctgactagacagcaaaagtaacgccagcctaagcttgaaatgaagggtcca

SEQ ID NO: 157687 - DNA, 122 bp, Homo sapiens
ctccagcaatcctcctacccagcttcccgaatagttggaactagtaggcgcgcgccaccacggcaggctattttgtttgtttgtttgtttgtttgttttttggtagagatgaggtttcgcca

SEQ ID NO: 157688 - DNA, 122 bp, Homo sapiens
cagtgagccacctgccaagccaggtttagctgcagccaccccctctgtcctcgcagaagccgtgggctgctctattcctgttctgggccagccttattggggacttgagttggggaggcctg

SEQ ID NO: 157689 - DNA, 122 bp, Homo sapiens
cgtggccgctggtcacgaggaactgccgctgtgttttgctttgaagagccactttgttggcgcggtaatcggtgagaatgggagtggctggcagggcaggataggtggggccaggggcggag

SEQ ID NO: 157690 - DNA, 122 bp, Homo sapiens
tgctatctgggtatttatagaggtgagtttcctcttcgggtggagagcagaggggaaagccgcagtagcaagccggacactcccctctgggcgctccccaccgccagaactgacgccttcga

SEQ ID NO: 157691 - DNA, 122 bp, Homo sapiens
ttatgattcaggatacattgttcacagacaccatgctagttaatctcttctgccggccctcgtcaaggactctgagtatgatggggcccttaccgggtgttaggagggacctgctgggtgtg

SEQ ID NO: 157692 - DNA, 122 bp, Homo sapiens
tccccagtagctgggaccaaagggcatgcaccaccatgctcagttaatttttttgagtttcgtagaaacaaggtctcattatgttgcccgggctggtcttgaactcctgggctcaagtgatc

SEQ ID NO: 157693 - DNA, 122 bp, Homo sapiens
cgcacgcggcaggcgagtctattaaacagagaggctggtcccagcgcaggttgttaccaccgctgggccctcccaccacctgaccttgaagcgcactcagaggtttctctcactccacgccc

SEQ ID NO: 157694 - DNA, 122 bp, Homo sapiens
cttccagcagaatttgggatcagggtgatcaaagacaggaggcttctggggatgggtgtgcgggctgtttccagataccgggagacccagaatctggtctgtggaagcccagcttccagaaa

SEQ ID NO: 157695 - DNA, 122 bp, Homo sapiens
gtgtgaacccgaaactgccacttgctggctgaggagagccgctgcggcgttccactgtcacgtgagggggccggtcctcttcggcggcggcactcagtgagtgacgccaagtggccaatcac

SEQ ID NO: 157696 - DNA, 122 bp, Homo sapiens
ctcaacgtcctgtcctaaccaatccagatgcgccgggggtggggcctggctctcactggccggtgcagcctttgcgcgcgggtttcgttgacccgcggcgttcacgggaattgttcgcttta

SEQ ID NO: 157697 - DNA, 122 bp, Homo sapiens
accacggtgttcaactttcagcctgtcaccatgaaggattcgatgcatggccgagctctgcggctaacaaggaatttcagttgtgagctgttgggagtctgctacggaacccaggcaggttg

SEQ ID NO: 157698 - DNA, 122 bp, Homo sapiens
tggagggcggatggcgggaaggcggaaggagcaggagatggaaaagatggtgccaaactgcggctttcagaagtgcgtcactgatcccagccaatgaggtttcgcttcattgtgcgtgtgcg

SEQ ID NO: 157699 - DNA, 122 bp, Homo sapiens
tttggctgagggactggtgggcgctggaaatattagaggcgccggtgcctgtgatgtcgccgcctctgtgacgtccccgccgcgaccccacaggcagggagccgcatttaggtttcgggcgg

SEQ ID NO: 157700 - DNA, 122 bp, Homo sapiens
gggcaagtctcctggttcctgagcagctggtgctgtgtcctgggggtccgatttagatcccgggggcatgcaaaaatacagctgtgatactctacagttctgatgggaagaaaaggagcaga

SEQ ID NO: 157701 - DNA, 122 bp, Homo sapiens
tcacagagctgatgctgctgtgtaatttctcttcctctttagttattgctgctaacagcacggctagttgagaaactggaccaaagcccataaccaagaatggacaggggaaggcttccaag

SEQ ID NO: 157702 - DNA, 122 bp, Homo sapiens
gaagcaacagtggggattacacaaatccactattagcaattgtctgcagaatggtaccaacgcaagctaactgtatccaataattttacctatctcagctttgccaaggatcaaccctggtc

SEQ ID NO: 157703 - DNA, 122 bp, Homo sapiens
ttctgtggcaacagacaggctgccggttcacacttgtagtaacccagctctggttcggctcggcatcccctctccagaagcagttgcaacctcacagaccattcagagggaggcggggcctg

SEQ ID NO: 157704 - DNA, 122 bp, Homo sapiens
gtcaagcagaatatgggctgtatttattcatcctttagcccaagcccttaaaaatatagacggctaatgtcttcagtatgtatgaaatatcccatatgctcggaaacaaaaggggctctgtt

SEQ ID NO: 157705 - DNA, 122 bp, Homo sapiens
agtgggacaagaggagatgaggaaccttctggaaaccccctaaccacctgcaggaagggacgagataaataaatgcacgtctctcttcagctcactgaccatctgcctacctcccgttaatg

SEQ ID NO: 157706 - DNA, 122 bp, Homo sapiens
ctgtgtctttgtgaggcgcccgtgagattagccactgagcagaggtttaatttatgatggcgcctagtattctcgtcctgctgcctcctagaatctgctgcatcattggagttgccgagctc

SEQ ID NO: 157707 - DNA, 122 bp, Homo sapiens
acaattgaacagagagtacaaagtccccacatgcctcctgcccccacacatgcacagcctcgcccaccagcaacagcctgcaccagagtgggacatttaccagtgaacctacatggacacat

SEQ ID NO: 157708 - DNA, 122 bp, Homo sapiens
tctgggcagtgagctcagagtcagctctgtgggagttgagtgcacccaaacttctacctccgaggccctgggggcacctggcactgtcggcttcctaagcacatctgtgcacttgaccttgc

SEQ ID NO: 157709 - DNA, 122 bp, Homo sapiens
gtaaataacatctacttggccacatgacataaatgctgattatgatgatgtcattgaaaacggtaatttagccatgcaggaggctgtgagttatggtggcaagtggaggaagagagctaatc

SEQ ID NO: 157710 - DNA, 122 bp, Homo sapiens
gcctcactggctttcctgagcgagagcggaactgctgggggaaccttcgccaccctctcccgggcaactctacggggaaagcccagctgcggacaagccagacttgtggtcttctgccaggg

SEQ ID NO: 157711 - DNA, 122 bp, Homo sapiens
ctcccatctctgtcttcttaggaatgacccgcgcaggaaaagggaaacaaacagcagcttcgcagcctccctgggcctgccagacacccgattatttaattacggttttctagcttcagcac

SEQ ID NO: 157712 - DNA, 122 bp, Homo sapiens
tcagatctcccacatgaggcattttcgaccctctctccgtcttgttctccagttgcccctcgccatggcctgcagagtctcgggaaagttgccattgcccggcgtatgccacctccagccaa

SEQ ID NO: 157713 - DNA, 122 bp, Homo sapiens
ggagctggaggggtgcatttcgacctgcccaagatactttctagggctctggctggaattcgcaccaagccctcactgaaatgctgggcgaggccgatttgtccacgatgttgctccttaac

SEQ ID NO: 157714 - DNA, 122 bp, Homo sapiens
gctgatctgctggggttttttttgttgtttgtttttttgaaaaaaacaaaagggcgtggacggacaattgtcttaaaatcaactgttgtcccttagcctctagggctgagcgcagaggtggg

SEQ ID NO: 157715 - DNA, 122 bp, Homo sapiens
actttaatggttgtaattatgaattagtatccaagtcaaaaagaaagtttttaactcatacgaggtaaaagataacatgtgactactattcaacatggaagtttaaagtagaaacaattgat

SEQ ID NO: 157716 - DNA, 122 bp, Homo sapiens
ctaagaaggcgaggagaggggcgcgtggtccgggtcttcatctggccgtgctggcacccgcggcctggcccgcattcgcttccggtcttcagtctgtgctccatcaagggtgttctttcaag

SEQ ID NO: 157717 - DNA, 122 bp, Homo sapiens
cgaacggccggttccggctgaatgtcagtgctgggctgtgggccggggaggaaggcggctcgcggttcctccaccgcctccgccgccgcatcctccgcttgtgctaccgccgcgggcgctgg

SEQ ID NO: 157718 - DNA, 122 bp, Homo sapiens
cggacagcgagcggctgaggccgccagggcccaaaggacagcggcccagacaggggctggcggcccggccggccccggctcaccgactcgggcagcatccacctgccccagccaacaccctt

SEQ ID NO: 157719 - DNA, 122 bp, Homo sapiens
gagccagccagacccttactttctcttgctgtgtgaccttaggcaaggacatgccaccaccggccttagtctccctctttgtgaagtaggatgaagatccccacctgtggagcagatgtggg

SEQ ID NO: 157720 - DNA, 122 bp, Homo sapiens
ctggggcgtttagctgagccggaggccccggctcttggggacgcggtgggctggcggcgtcggatcaccccgccatccatctcaccactcccagcgctgagcccggggggcggggagagtcc

SEQ ID NO: 157721 - DNA, 122 bp, Homo sapiens
gagcgggctccctggatgcagaggcatgggttatctaggagaattcaggttgtgtttgggcgctaggttgaaggtgcgagccgttcctcctgaggtaatctcatatgtgaggcggaaatgaa

SEQ ID NO: 157722 - DNA, 122 bp, Homo sapiens
tttccacttttccaaaagacctctgtggcaggagtagtatctccttggagtctcagagcacgcagaaacgtggatccttcgcgaagtcgctctggcgagaatccctggaaagacgctctggc

SEQ ID NO: 157723 - DNA, 122 bp, Homo sapiens
ctgacatgatgctcaaatgctcactggagcatttcagattttggactaggaatgctgaatcggtaacaaatattataaaatccaaaacacttctggttccaagcattttggataaggaatac

SEQ ID NO: 157724 - DNA, 122 bp, Homo sapiens
gtgtgaaaagctggggactgaaggcctcttcggacttgcagtgtccctgtgtcgctgtgtcggtaggagtggtcacagtgatgcgagcctggcatactccctgtgagtgcctatcaggagag

SEQ ID NO: 157725 - DNA, 122 bp, Homo sapiens
ctctgcctgcagctcccgcagctcaaagggctggtacagcagcaccttctggtacagggccggcttggagcggatgtagcacctcagcgcctcgtctgtgtccgccgcctgcacggctgcct

SEQ ID NO: 157726 - DNA, 122 bp, Homo sapiens
gggccgcgtgtatcgctggatggtggacagccgcgtggcgctgcgcatccacgagcacgccgccatctacctgacagcctgcatggagagcctcttccgggacatctactcgcgggtcgtgg

SEQ ID NO: 157727 - DNA, 122 bp, Homo sapiens
actctctatcacacatggttacacaaaaaccaccagacaccctggagacaggcggttacacgtgcacagttgcagacacccacacccagccacacagccacaaagacacattcagaacggcg

SEQ ID NO: 157728 - DNA, 122 bp, Homo sapiens
agccacaattaccaaggcaattttgcaatgctgttttatttccacttatcctctggggtgcgcaggagaatattttaccttcgatcaagaggcctcgccgctgcctgcctcacagccctgca

SEQ ID NO: 157729 - DNA, 122 bp, Homo sapiens
agggaaaatgaaaacagcatgtctttttaaacattgaaaagaaatatggaggctttaaaccgcaaactgaaaaagctgagtagaacaaaggcagtggagcatacaatacaattctatttatt

SEQ ID NO: 157730 - DNA, 122 bp, Homo sapiens
actcagccccgcgttgccagggcggactgggggacagagagtgccttcctctgtggcgtgcgccggcagggctgggagtggaggccaagttcccagatgcccagggtcggaggatcgcagtg

SEQ ID NO: 157731 - DNA, 122 bp, Homo sapiens
gtgggcggtgggggagaccgactcacttgagtttcttgaaggcttcctggcctccagccacgtaattgcccccgctctggatctggtctagcttccggattcggtggccagtccgcggggtg

SEQ ID NO: 157732 - DNA, 122 bp, Homo sapiens
gcatgggctatgcaaagatgaggtttccttctcattggctctgaccagctcctgcacttccgattgcagttacgaagcacctgggctaagcccccaagggagctgccgctccacttccccac

SEQ ID NO: 157733 - DNA, 122 bp, Homo sapiens
cccccccccgccactgtggctttttgcgtctttgtgtccccgccgccctggctttttgcccgcgccaccactgctttttgcacctttaagcccccgccgccgcggctatttgccccccgccg

SEQ ID NO: 157734 - DNA, 122 bp, Homo sapiens
cccgggaggcgtgcattatttaccagggaggctgtccgtactgcgcaccagagctgacagcgctccgcggggtccctcctgtccctacagccccgccttcgcccgcggtgcggggtctggag

SEQ ID NO: 157735 - DNA, 122 bp, Homo sapiens
aagcagcggggtgctgcggcagctctccccagtgttgtaggcgctggtgctgtccttgtccgacttctcgggcagctcggagatgtcggacagctcgtgcttcttgggctcgctggccgcca

SEQ ID NO: 157736 - DNA, 122 bp, Homo sapiens
ggaggcccagcaggtgcccgcgaggcaggtgtgcagctcgccatatgctctgctgagcgtcgggtttctgccagcatctttcaatgacctaccaggtgagataaagtgagtggaaaggggcc

SEQ ID NO: 157737 - DNA, 122 bp, Homo sapiens
agacgccttcaaggccatcaagacggagaagctggaggagccgcccgaagacagcccccccgtggaagaagtcaggactgtgatcaggtttgtgaccaataaaaccgacaagcacgtcacca

SEQ ID NO: 157738 - DNA, 122 bp, Homo sapiens
agtgaaagatgcggagtttaatcctaacctagtggtgagagggtcctaaattcccttcctcgtagaatgacctgatttctgcggctctgagcttgcttgcggcagcctgtgtattaatttaa

SEQ ID NO: 157739 - DNA, 122 bp, Homo sapiens
tcagtgagtctctgtgcctgggccatcttcttacacccactttacccacctttaaaattgcgccctccttcacacttgtcaccctgtctgcttgctccctctccagagcacttcacacctaa

SEQ ID NO: 157740 - DNA, 122 bp, Homo sapiens
aggaagaggctgaagcacgcttcacttgcccgcagttttgtgagggcggggtctgtaggccggaaaggaattcttcaccccggaagtgaatgcttgtcgcatgcattaaatagcctgatttg

SEQ ID NO: 157741 - DNA, 122 bp, Homo sapiens
caataagccaagactgaagcacagaaagattggataactagtttaagatctcagtctattcgttgatagaggcaagattcaaagccaagacatttgactttagaattcccactcctaagcac

SEQ ID NO: 157742 - DNA, 122 bp, Homo sapiens
ctgctgcggctgcggccccgggatcttgagcgctctctggtatgactccgagatcggcttcgggactggctgcaactgaggctatagtcatcatcagaagatgaatatttgtgccgttttga

SEQ ID NO: 157743 - DNA, 122 bp, Homo sapiens
gccacggagctgtctccttccagtctaccggccaatgacaccatagagcctgtgactcagcggcccgactgcccggctgcactcctgagacatccccgcctgctcaggcgactcccaagacc

SEQ ID NO: 157744 - DNA, 122 bp, Homo sapiens
cgtcatcattgaccagctgcccgacctgatggggctcaaagctgtgaatgtggccaaggtcgtcggtgagtccggggggtcccaagccatggctcagccatgcagacttgcatgaggaggaa

SEQ ID NO: 157745 - DNA, 122 bp, Homo sapiens
gctgttctgccaaaccatgagaagcagctatgctagctgtagaaagcacaaaagtctggccggccctgactgccaggtgacctcagacagagtgaccattactgattcctgttcagacacca

SEQ ID NO: 157746 - DNA, 122 bp, Homo sapiens
actcaaaaagggcttctgagttccagaaagtcctcgtcatgaaacattccacctacagcacgtgtgtgcgacacacaccagactctgatgccagtgtaagccaaggctgtgattggctaatc

SEQ ID NO: 157747 - DNA, 122 bp, Homo sapiens
ttctaaatctcacgcctccattcagcaaccctggctgggcgtgggctccctgcaaggcggcggtggacggcccgcagtcgggccgataaggaaacctgctaccattccttggcttcctgggt

SEQ ID NO: 157748 - DNA, 122 bp, Homo sapiens
aatggaagcgagtatcttcagacggtgggcaggacgtatcctaagatacccaatggtggtcgagaatagttgagcactttactagtcaagccgcggagtgggcggggccccctgcccagact

SEQ ID NO: 157749 - DNA, 122 bp, Homo sapiens
gccaggagtacccaagccctggcagcaaacacccagcctactgctcacccagttaaaggacggacccctgggtgacagcaggccccggggctcagtacaccggacccttaggccacctcaac

SEQ ID NO: 157750 - DNA, 122 bp, Homo sapiens
atgagtttgccgaaggaagtccacagaggatgagcatggctgctgctgtggcctgggtgacgggatccctgctccgaggtggtgccattgaaactgagatctgagggaggaggagacctagg

SEQ ID NO: 157751 - DNA, 122 bp, Homo sapiens
ccgagctgtggccggcgtggatgaggggcaggcgaggcagggccgcccctccagtattgccgcccctcccgccccagggcagggctgggagggtacagcccgggggcgggctcgggtcgcct

SEQ ID NO: 157752 - DNA, 122 bp, Homo sapiens
ccaggctgtcctggaaagaaaacctcagaagtgtgggacaaacacagggcaccatctccccgtgtcctaggaagctctccacatcgggcccctcccacccatcctgccacccactccaggag

SEQ ID NO: 157753 - DNA, 122 bp, Homo sapiens
caaatgcagcgcgctttacggcggcgcgtccttttaccgcggtgtggccggctcgcttgtcgctcgcacttttgccctattggctctgcggctccgctcgccgcactttacggcagtgtggc

SEQ ID NO: 157754 - DNA, 122 bp, Homo sapiens
aagaaattgcagcatgtatataaagtggaatattattcagtcataaacagagaatcctgccgtttgtcacaagatagatgaaactggagaatattatgctaagtgaaataagccagacacag

SEQ ID NO: 157755 - DNA, 122 bp, Homo sapiens
gcgcccaggaagaggcagatgaggagaacgcagcaggtggccctctggatgcgagtgaaacggctacgaggcggccggtcccatatggagagccagatgtgcttgtcaaagaagccacgctg

SEQ ID NO: 157756 - DNA, 122 bp, Homo sapiens
cgaagcgcactgggctggccattggctgcgtgggtctcggctgaagtcaggtattggctgcgtgggcctcagctggggtcatctattggatgcgtggggcagggaagatgtcccctggggcc

SEQ ID NO: 157757 - DNA, 122 bp, Homo sapiens
ggtgctgtatggcaacagtcattcctcagcagagtggagagggagacacatgttctgccgcgcccatgttcagtctgttctgtgggcagagttgtaggaacacacttagcccaaatcgatgc

SEQ ID NO: 157758 - DNA, 122 bp, Homo sapiens
ccagaagtggaaagaacaggccttggctctcacccagttaacaagcgtttatccagcgcacgtgttgcggtcggaccccatgcgaaggagctaaggacacaaaggtgagcagcagagacgcg

SEQ ID NO: 157759 - DNA, 122 bp, Homo sapiens
tctggaaggtcagcctaggggccgtcggcccctgcagaccctgtgcccagcccagcatcccggggagctccctccacatgctcatctcacgaggttcctgctgcactcagagtggaggatgg

SEQ ID NO: 157760 - DNA, 122 bp, Homo sapiens
ccaaggagttttacattttaaaataatcaagcgtgcctactgcttgccaggccctgctctcgccttcactcgcattattcaattaatcgacacaggcctgtgcagtgcgtcttaatgacaag

SEQ ID NO: 157761 - DNA, 122 bp, Homo sapiens
ctgtctctagttgtctagtacctggccccaaggcagaagaatagtagcctggagtgtaagcgtatgataagggaggtggtgggagtgtgagttctggactagttagtttgcatatgaaaggc

SEQ ID NO: 157762 - DNA, 122 bp, Homo sapiens
cagaacttttatttgtatgaggttttctcttctcaagtctgctgtttcaagaacaagtttcgaagaatgtaccatgtaatgttttagctggcctaaaattgtctaaagttttggtagaatca

SEQ ID NO: 157763 - DNA, 122 bp, Homo sapiens
ggggcgggtggccctccggggcctctcgctccgaggccccagaagcgcccagaggcctcccgagaacttggatgtaaagggctgccctcctgccccagaatgggctggcctgacaagttgat

SEQ ID NO: 157764 - DNA, 122 bp, Homo sapiens
gaactgtgagtgtggacatcgtgtggggagacgaggccacctgatggagagcctggagcccgccctttaagggaacaaggcgcttttttcaccctttttttcgtgtgtctcagacagctggc

SEQ ID NO: 157765 - DNA, 122 bp, Homo sapiens
cggggctccccccagggggcgccaggccccgcctccacctttctctgccttctcttcagtcgctcagtaaatgcccagtgtactcggtgggccaggcgctgtgctggatctattcaaacata

SEQ ID NO: 157766 - DNA, 122 bp, Homo sapiens
aaggcgaaagaccccacattactttgttttcctgtgtctgaggccgtgggtgtggcctcccgtggcttggcctggggctcccaagccaggccctcctggtgggcacactggccctgagactt

SEQ ID NO: 157767 - DNA, 122 bp, Homo sapiens
tctcagaggagcatgtgctgccacttctcccggcgtggactggctggatcacgtggttggcgtctgaatttttcagaaacggccaaactgttttccggcatggctgtgccattgtgcctccc

SEQ ID NO: 157768 - DNA, 122 bp, Homo sapiens
gtatacaggcaacgaatagcatgataaatggaatggaacctcacatctcaatactaatgtcgaatgtaaatggcctaaatgctccactgaaaaaatacggaattgcagaatggataagaatt

SEQ ID NO: 157769 - DNA, 122 bp, Homo sapiens
cacgtcgggaagatgaaggcagaggacggggggatgtttctacaaaccaagggacaccgacgccgcccacagtcaccaggggccgggggacacatgggccggattctccctcggagcctcag

SEQ ID NO: 157770 - DNA, 122 bp, Homo sapiens
cctcccacctctttctcactccctcccaggaggagcccagctgcgggtgggcggggctggcggggagcggctcaccacatcctcctcttcctccccactctgcacatgcggctgggtggcag

SEQ ID NO: 157771 - DNA, 122 bp, Homo sapiens
tgagcccttccctcctgacccccagtttatcctggtttcccatccttggggctccagattcgttttatttccattcatcctgctggttacttaactaaagactgcagctgatcagtcagccc

SEQ ID NO: 157772 - DNA, 122 bp, Homo sapiens
ggcgaggcttcttgcagcgcgaatccgtccatcaacacgcaaaggcctaggattcgtaggcgccccaggtgggcggtaccaggactctccaggggtacccgactagtgggtgctaagtttct

SEQ ID NO: 157773 - DNA, 122 bp, Homo sapiens
aaggtatttgcgcacccagcagcactgagtgtgtagcgtgtgttttccttgatttagccccgtgtttggctttagagtttaagaaaatgaagcacagaaatggaaattttgttgttaaagat

SEQ ID NO: 157774 - DNA, 122 bp, Homo sapiens
taccgggcgcccgccgtccgtgcctcgccagcgctccccccaggcggcctgccgcggcgtcgagcggcaggaagcagccacgctcaaaccggtttcagctgctccagaccaaactgccaggc

SEQ ID NO: 157775 - DNA, 122 bp, Homo sapiens
tgggagcccctgggtatcagatacaaaaggcattttcggccgggtttggccgagaccgggcgctgcccgtggtgaggggaagggtgaacatctggaggggaggagcagggggctgggccact

SEQ ID NO: 157776 - DNA, 122 bp, Homo sapiens
cgttatataaatgccaagttactcagggacgcacacgtgagaaggctggggcccgacacacgcggtgtagtgccgaagtcaccggtgtggcgcgcctgggggacacgccgaagcccatttcc

SEQ ID NO: 157777 - DNA, 122 bp, Homo sapiens
aattcagaaggaaccttttgcggcaggagaatgggggtgttgataaagctgacggcacgtcgcttccggccccgccctcagcagacagcggagctctcactccacccggcactgcgaccact

SEQ ID NO: 157778 - DNA, 122 bp, Homo sapiens
gaaggcgctgacctacgacgagaagcggggtgcctgcagcgtgggcaccaacgtcagggacgccgcctgctacgtgtgctgggccttcgcgcgtgcctatgagcctcaggagctgaagccct

SEQ ID NO: 157779 - DNA, 122 bp, Homo sapiens
cccgtcaggaaccacgaaggcggaggaccggggcatgctgctgaaaaccttcaacgagcccggctctgagtacttcatcttcctgctcagcacccgggctggggggctcggcctgaacctcc

SEQ ID NO: 157780 - DNA, 122 bp, Homo sapiens
tgtctcatcttcctgctctaaccccctcccatcccactgaggaagcgcgatgggagagggcggttgctctctgagccccaggggcagcagagtcattaaagactctgatgggggtggggcgg

SEQ ID NO: 157781 - DNA, 122 bp, Homo sapiens
ggcccaggtcggctcatgaacccgctgcaggccggcggaggcccgcttcagcagcggctgcgtgccaccccacagagcggccaccagcaccagagccaacacctgccctgaatgcagacgag

SEQ ID NO: 157782 - DNA, 122 bp, Homo sapiens
gaccagcctggagacaatgtggcaaaatggggcgcttcatccagtctgtctaagccctgtcgacttggggaggtgatttctttcctggttctatatgtgaagcaaaataaatgttttaaaat

SEQ ID NO: 157783 - DNA, 122 bp, Homo sapiens
actcagtgtgtgggtgtcccttcctgcttccccttcaggtcttggtttgttctgaagggacgttttatagtcactatccacatgccagtgtgaaatgggcatctatgacgtggtcagggtgt

SEQ ID NO: 157784 - DNA, 122 bp, Homo sapiens
gacctgcagcccctcctcaccctcggacagagtaaattcacgccatgcaggtttgccggacgagtccgagtggcccaggcattgtactaggacggacgtagctttttctacggccaaatggt

SEQ ID NO: 157785 - DNA, 122 bp, Homo sapiens
ttggcacctgcagtcatcaggaggtagacgcgtgttttctggacactcttgtggattggacggatggcttcatctgtgccatatcactagaggcacagcctaggcactggggctaccagctc

SEQ ID NO: 157786 - DNA, 122 bp, Homo sapiens
ctccttgctgccccgctgctttgtgaccccgcacctcctcatatagccgcctcaggaagtcgatctcctgggtcagggcctccacgttggcctctaggtctgatttgcgcaggtaggcacag

SEQ ID NO: 157787 - DNA, 122 bp, Homo sapiens
acagttcataaaggcggtgtggacccagagtgagcagcagccaagatttaccgggaagagcgaaataacaaagctaccacagcatggaaggggacccaagtgggttgccagctgctggcttg

SEQ ID NO: 157788 - DNA, 122 bp, Homo sapiens
acaatattcttcagtctaataaaatcagttaactgttcagtttcattttattgtagtttacgaagttatatgctaatggcactggagaatggagaggtctataagggcctcaggctcatcct

SEQ ID NO: 157789 - DNA, 122 bp, Homo sapiens
tgtgcagtcagcagaagagatccacattctatatctttgcagggaggtcgactagaagggcgcctgctatcaatcaccccgactctgggattgcaagaggacattcagtctggtactctctc

SEQ ID NO: 157790 - DNA, 122 bp, Homo sapiens
taccgctgtgctcctggcccttgcagccgtgctctgggagctgggggtgcggagtgccagcgtctgacagcgacagggcagggctccgggcctctgcctcgctgagcaggccgaactccatg

SEQ ID NO: 157791 - DNA, 122 bp, Homo sapiens
ccctctgccatgggggcctgtggttcagctgccaggcgggaactgaagagcagccccgggcgctgcagcttcctgtcctgcccatcacggtcagggacgccggtgtccgttccttctactcc

SEQ ID NO: 157792 - DNA, 122 bp, Homo sapiens
tcccccggagtgtcctgcaacagacggctgtgctggatcaggcctgggagcagctggggccggggggcctcaagtgtgtgggactcggggctggggtgacctgctcacccgcaccagcagcc

SEQ ID NO: 157793 - DNA, 122 bp, Homo sapiens
gccagattctgtcaatggatcgatccccccgatattgatggaaacccctgagtgcacgcccgtgctgggcgcaggggaaacagcgacgcacgggacaaaacaagcttgcagaacagcagggg

SEQ ID NO: 157794 - DNA, 122 bp, Homo sapiens
aaaattacgttgaatatttatcttcctttcaggacacattatcatgctcgtcgtggccgacgtctccaggcttgaggtgggagaagcgatggtgcgacctcagactgatccctctacttcat

SEQ ID NO: 157795 - DNA, 122 bp, Homo sapiens
gaattccccctgcaagtccgaagacttttcctcctctgagctcccgccctctctgcagaccgtgctacctcctgttgcgcaatgattgggtcctgaattttatgtaaatcatatttatgaac

SEQ ID NO: 157796 - DNA, 122 bp, Homo sapiens
gccttctagaagtgaaccaagggacttgggatttaaaaagtgtttctcagatgatcccatcgctttcaaagattcgtatggcagtcatggggactagtccactaaattcctgaagatacaga

SEQ ID NO: 157797 - DNA, 122 bp, Homo sapiens
gcatcaggctccgcccactcagaccccatccccgaacgtgggccccgccccctccccggtcgggcccctcctacctgtagccgatgtctccccagccttgcgtgtcctggtggtagcgctgc

SEQ ID NO: 157798 - DNA, 122 bp, Homo sapiens
ggactctctccagggacaaatgccccgcagctgagagaggccgcccagctatccagcggccgcgcagccagccaagatttcaacacaggtctgccctatttggtcaccatccccgacagtgc

SEQ ID NO: 157799 - DNA, 122 bp, Homo sapiens
tatttttagcagagacatggtttcactatattggccaggctggtctcaaactcctgacctcggttgatcactcacctcggcttccaaagtgctggggaaattgattttctatagcattatgt

SEQ ID NO: 157800 - DNA, 122 bp, Homo sapiens
tacatgtcagcggggcgaggtagctcgcgcctgtaatcccagcactttaagaggcctaggcggatacatcacttgaggaaaggagtttgagaccaacctagctaacatggtgaaactccatc

SEQ ID NO: 157801 - DNA, 122 bp, Homo sapiens
atgtgtgagggcagcaaagagtgctatgtgtccagcagagggccctgcccggcctgtggccggaggctgggagggagggcaggcgagtgatgccagacgcctgactggaggcggatccagcc

SEQ ID NO: 157802 - DNA, 122 bp, Homo sapiens
aagaggagaatggggcctgcagcgggtgtgagcagcccagagggtggggctggattatcccgaaggtaaggggagaatctggggctgcaagggcagacagagaatcaacatcaggaaggaag

SEQ ID NO: 157803 - DNA, 122 bp, Homo sapiens
atcatcattaatattttcataacacccttgacagtttgcaaaggactttctttaaacttacgaggtaaatgtttactctttccctttaaagatgaggaaactgaggctcagagaggttatgt

SEQ ID NO: 157804 - DNA, 122 bp, Homo sapiens
gcccagggctggaaaggtggggctggggcccgctcctgccggcaggccggcttcctgggacgcctcttcctggccacccaccaggccccggcccagcgggggccgcacgtccggccgcgtca

SEQ ID NO: 157805 - DNA, 122 bp, Homo sapiens
ccctgggacctctcgggggtgtgggtggaagtgcacctaggcaggtgttagtgtaaggcacgaatgcatgcaagcatctgcatagaaatgcacagtctaaccaccctgtgagtgcccggggt

SEQ ID NO: 157806 - DNA, 122 bp, Homo sapiens
catggcactccccagggtccgggagggacttgcagatcccaaggctacctggtgcgtccccgtgccccgtgggccgccaggtcatagtgccccctgtgtgcattcccctagtgcaccgcagg

SEQ ID NO: 157807 - DNA, 122 bp, Homo sapiens
tgaatggggccgcctgcttttgtcctttcccacaagtcccttcagaaagatccctttaaacgcccggtacccgctgatggatccgttttcaaacggcgcggggacggcagtgccggaggccg

SEQ ID NO: 157808 - DNA, 122 bp, Homo sapiens
gaaaagaggtcagggaactggcgctgaaagggctgtactgaggatgggggccctgctccccgcaactcagataccctagaagcatccactcagagtttagggttccgagaatccatcagtcc

SEQ ID NO: 157809 - DNA, 122 bp, Homo sapiens
cccttggtttcctgagccactgtcatttaccgaaagtcagggccctgcgggagctgggggcggggaggcgggcaaggaggggcagaaagttccggaagcctctgcatcagccgccccgttca

SEQ ID NO: 157810 - DNA, 122 bp, Homo sapiens
cagccctccaagaaaggagaggccctgagttgggctattttggtatctggggtgggcacccgcagggctaaggttaccttggtatgttaagggctccctggggcaggactatataaccccag

SEQ ID NO: 157811 - DNA, 122 bp, Homo sapiens
ttaacatatgccaggcactttttatctactgtttcctttaatccctctacttccttataacgtattaccacccctattttatagacaaggaaactgaagttcagagagatttcgtgatttgc

SEQ ID NO: 157812 - DNA, 122 bp, Homo sapiens
ctatccctttaaatacaggcgtttcggcctagctgccgccggtccaatccgcagcgcttccgtgccccactttcccgcgtcagcctggctccggcctccaccagggggtgctagtgagatcc

SEQ ID NO: 157813 - DNA, 122 bp, Homo sapiens
gacctattttcttgctatgtgattattgtcctgtatctttaattacatcttattgacacccgtggcaatctcaataattagaaaacatagctttttagcttttaccatttgcttattatatt

SEQ ID NO: 157814 - DNA, 122 bp, Homo sapiens
ttaatgaaaactaccagtatagcatattcttgagtaggattcacatttaactgctggcaccgtaatttgtaactctttgatttagaatgtacatacttctcatgttttaagtaataaagttt

SEQ ID NO: 157815 - DNA, 122 bp, Homo sapiens
gcctgtggtgggaggggtgagcacctcctgcctcaacttgcatttccttcccagcaggcccgggctctcctgcctctgacttcaagtccttggtacgtatgaaattcctgcctctcctctgg

SEQ ID NO: 157816 - DNA, 122 bp, Homo sapiens
tcggcctgaaggtttctccgtacatggtgaactgtagcctacatggaggtgcaaacagaccgtcacctactctcatgccaatcactgagctttggccagtcgcaggtggtcaactgttcaaa

SEQ ID NO: 157817 - DNA, 122 bp, Homo sapiens
ttaagtgggtttaggcacctggagactcacttcacagtccatgtgcaccagtggtaatggcggcagcagtggaggtgccaggtgctgagctgagcaagcatctcctgagcatcggccccttc

SEQ ID NO: 157818 - DNA, 122 bp, Homo sapiens
ccactggagtaatatatctctagcatattatgaataatatcacaggttgcacacctactgcgatattaggagtaaaatctccctcggatattataaataatatcacagtgtgtactcccact

SEQ ID NO: 157819 - DNA, 122 bp, Homo sapiens
cggcgtccagcgaaatgcctcccccaccccacccagttgttgggcctctggggtagaaaacgaactaggggattgggattcactggtgtactcaacagatgcatatgaggcccttgtcgcag

SEQ ID NO: 157820 - DNA, 122 bp, Homo sapiens
atttacctgactgaaaggagaaggagaaaaggaataaagcagaaagcttcagttttcattcgattattctctccgctgtggtttgactagagatggcgtaaaaagataaggcaaaactttga

SEQ ID NO: 157821 - DNA, 122 bp, Homo sapiens
ttttcggtctgctctttcctcttctcagagtttttatccaaatagtccctgtccttctttcggaagaagggctctctgtagtctcgcttctcccgggcccggctgtcccgcctcctctcctt

SEQ ID NO: 157822 - DNA, 122 bp, Homo sapiens
gcctctccgggtcgatgccgttttctctccaggttgaaggtggaggagaggcactgtgaccggagggcccagcgctaagatgcagagcagagaactgagcagctgagccaagagagcctcgc

SEQ ID NO: 157823 - DNA, 122 bp, Homo sapiens
ttaccggcacccggccaccgcggcagacgcttgctcctgccacgccccccccccctcccccgcatcacgtgtctgcactcgctttcctcggattcccggatgtgggtgagttcatttgctcg

SEQ ID NO: 157824 - DNA, 122 bp, Homo sapiens
ccccctagcttgctgggtgcagggctgctggtctcatcctcagaggattcagctttaccccgataccataggccaaagctggagagagacagccagaggcactttgagccaggaagccagag

SEQ ID NO: 157825 - DNA, 122 bp, Homo sapiens
tcaaacgcagggcgtcgagcccacacgcctagagacgcggccaggcacccccgccctcctcgccgcgcagtcgcgcacagtgagcaacagtccagcaccaacccggcttaactgcgcctgcg

SEQ ID NO: 157826 - DNA, 122 bp, Homo sapiens
ctgggctgccaccttagcgcctcgcgaggggcggaggggcccggggaacgagtcccggagcgaacccagccagcctctggattcccacggcccagggctccgccggacattcctaccgccct

SEQ ID NO: 157827 - DNA, 122 bp, Homo sapiens
gcacacacacatacgtgcgcaccactgtgtacatcagcagtgagcacacacgtatgtgtgcgccactgtgtacgtgagcagtgggcacacacacgtacgtgcgcgccactgtgtacacgagc

SEQ ID NO: 157828 - DNA, 122 bp, Homo sapiens
caacatctgcgccggcttcacctttcatctgaccacagggtgaaggtactgggcgtgggtcggtttctgtgaacagctctgcctgtgtggacagagccatttgcgaatctacacctttcagc

SEQ ID NO: 157829 - DNA, 122 bp, Homo sapiens
ctttccgaccctgcgccaccaatcccctgcctacatccggaaggggcatggacctgcgcccgggagatcgaatattttccatgatcaaacgctgttcattggctttccctcctccgctaagg

SEQ ID NO: 157830 - DNA, 122 bp, Homo sapiens
cattgctctcatctcagctcagcgtgaaaacacatgtgtgcacacacgcacatgcagccccgctgagctgggtggtgaaaagaccctaattagttctgattccttaaggcatgtattttaaa

SEQ ID NO: 157831 - DNA, 122 bp, Homo sapiens
cttacgacagtcgctcatgcagtgccaggtacgctgactcagcagcccgcctcccagagccggtacccaggcccacgtggtaggagcagcagatatttttatcatcatcaggctgcttccgt

SEQ ID NO: 157832 - DNA, 122 bp, Homo sapiens
tcctcggagacacctccctcagaccagaagcttccagaaggcctgggcagctctgtgtttcggctgggcatggcacactggagccccccgaggccagagggtggtgcgttcaggtagcaaag

SEQ ID NO: 157833 - DNA, 122 bp, Homo sapiens
tccgggcccgggcagcgaggggagtgcgcaggggagggcagccccgtgggtctgatctggcgaagtccggcagcggccgcggcggcaggaggaggaggagaaagggagggaaagggggaggg

SEQ ID NO: 157834 - DNA, 122 bp, Homo sapiens
ctcgttccccacaagtcctgtcccaagcctggtggggcccagttccttcccggccgggggcgccagctcccgccttgccctgcagctcagcatcccaagggcggcatggctcagacgccccg

SEQ ID NO: 157835 - DNA, 122 bp, Homo sapiens
gcggcggatggagtccctgagctggggaggactgtgcagctccctcggtgacgctgagcccgtctgggcattcatgcgatacgcagcgctctttactgcgggtcccatctacaataatgttt

SEQ ID NO: 157836 - DNA, 122 bp, Homo sapiens
ccatgcccgaggtgggctcgtccagtatcagcacctggagggagagacacagtctcgcgacgctggtagagccacaccccgggcccaggctggccttgcggtaggccccatcgaggggttcg

SEQ ID NO: 157837 - DNA, 122 bp, Homo sapiens
gcggcctctgggaaagatgggtccctcttcatccccaccatcagcccctggcacatgggacgcgctgagtggtggctgcgggaatgaatgagtgataagcggcgcgtacccgcgggcttgca

SEQ ID NO: 157838 - DNA, 122 bp, Homo sapiens
ctcacaactctaagggggtccgcgtgagagcgtcgtgatcgattgagcaagcagcgggtacgtgactgggggatgcatacaccggtaattagaagggaacagaacaggacagggatcttcac

SEQ ID NO: 157839 - DNA, 122 bp, Homo sapiens
ctgttgagaggtggagggcaggacctgcagggcgggaggccggtgctcctgggaggctgccgtgtggataagagtcgggggccaagtctcccgctggagcagcatggaaggctgggccggac

SEQ ID NO: 157840 - DNA, 122 bp, Homo sapiens
ctggtgccgaaacatctttccactgctgtgattttgttttctggtcagagtaataatgctcgttgtaaaataaataaataaataatacataaaaaggaaaaggaaaattcagagaaaatgaa

SEQ ID NO: 157841 - DNA, 122 bp, Homo sapiens
ggactgcaggggtggggatgggaaaggttggagctggttctggagctgagtccggggccccgtccctccccagccacaggcagctcacctggaaggtgccgaggctctcctccaggtcggcg

SEQ ID NO: 157842 - DNA, 122 bp, Homo sapiens
ctcccaactaagtctcctcactagtctccacgacttcaaatccctgattccacagcctcccgctcctgccagctctgaacctgagactggtacaactggtcttacagaaggaagtgaaattc

SEQ ID NO: 157843 - DNA, 122 bp, Homo sapiens
gtcatggcagagtggcaagccacagcttgatggaagcattacaaaagagagtgggaatcacgtgtgctaatctaaatcaacccacctcaggactgaggactttctatattcctccggcagtg

SEQ ID NO: 157844 - DNA, 122 bp, Homo sapiens
ctcttgtgcagattaactgtttctcttttgagaaacaggttgtggtttgccactaccatgcgatagagaatgaacaactaatcatgggacatgaagtaactaaggcagatctgagtaatttg

SEQ ID NO: 157845 - DNA, 122 bp, Homo sapiens
tatgattcttaattgaaacatataatttgcttaattacgtgaataatgaaatgtaaaatccgggtccataagcctttatttcatacagtcctaggattaagctgtttaactgcttggatccc

SEQ ID NO: 157846 - DNA, 122 bp, Homo sapiens
taattcccattcaaggagtgtttgccaaagatgaacctcctggtgtggggcaatgagacacgggatgcgctcataccttgtccactttccccctggtactgcattcacaggatagcctaacc

SEQ ID NO: 157847 - DNA, 122 bp, Homo sapiens
tatttatagtagcctcgggtagtctggtctgggctttctcattgggtacaagtaaaggaacgaaatagccaatgaaaaggtagacttttaagtgtcgtttacattggcatttgtgacgacac

SEQ ID NO: 157848 - DNA, 122 bp, Homo sapiens
cccgagactccgtgggggccgctcgagtgacaggtgccaccgtcccctcaccgccgctggcgcccgcactccctcccggggagccaggcgctcggaaatttctggagcaacgacctgactcg

SEQ ID NO: 157849 - DNA, 122 bp, Homo sapiens
ggaacaaccaacaggccccacacacatataaaacccagcactgcagatattaaatcctaacgctacaaaataatctctcttgactttatgtacttcaaccagggcacactggaacaaggatt

SEQ ID NO: 157850 - DNA, 122 bp, Homo sapiens
gccttcgaggggctggtcctcggggggtggatgcagctttgcggggctggctccacgtcgcgccgcggcggtttgggctggggagcagccctgcagggaggcgccgccgggtgggccgcgga

SEQ ID NO: 157851 - DNA, 122 bp, Homo sapiens
acagacccagtcgtttagtctaacgcttctggaactccactgaagcgttttgcattgtttcgtttggagccttcaaatccgagtgtgtggcaggagataataatcctagcagaagctgttta

SEQ ID NO: 157852 - DNA, 122 bp, Homo sapiens
tttggacccacctacaagtatgacgttggctcagccgcctacgatacaagcgacaaatgccgcacccccgcctggacagacagggtgctgtggtggaggaagaaacatccctttgataaaac

SEQ ID NO: 157853 - DNA, 122 bp, Homo sapiens
gtctattgatggcagtgctcatattctttccatggtgaaccaactgccactctcgaacagcggattaatgtggaagaacaggcaaggagttgggagtagctatacttgtctctgaaggaagc

SEQ ID NO: 157854 - DNA, 122 bp, Homo sapiens
aagtcctcatctgggctgccctggccatcctgaggcccagctgacctgatgcttgaacagcgatacatactcctgggctccctcctcactgtgtgggtcaggcattaggcagtagtcccgca

SEQ ID NO: 157855 - DNA, 122 bp, Homo sapiens
gttcctcgttcctgggaccgtccctagtgtggataaaagccaacttcccacagtctttgtcggtcttttcaacttttctctgctctcgctcaactcccagagggccgggtggcgccggccag

SEQ ID NO: 157856 - DNA, 122 bp, Homo sapiens
ggccccagcagggggacccggagcagcgacagaggcaccaaggcccaggcaggcggggctcggtgggccggaggaggggcggtggagtccacaccgccaggtccctgcctcgctcaggatga

SEQ ID NO: 157857 - DNA, 122 bp, Homo sapiens
ttagcacccggaacagcagctgcggagggtgtactgggtcccccagcagtgccagcccaccggcattgcgtttgatttctcaccaggccttagctgccttcccgcggggcagggctccggac

SEQ ID NO: 157858 - DNA, 122 bp, Homo sapiens
ggggcaggagaaaccaggctgccttcccttcccggggtccctggggcatctgggtgtgtccgcgagggtcgggggagtgtgctggaaagttgtcgtgattggcatcgttgggggtgagaaga

SEQ ID NO: 157859 - DNA, 122 bp, Homo sapiens
acctcaagtgatccgcccgccttggcctcccaaagtgctgggattacaggcgtgagccaccggccataaaccatgattttatttaccagttctattgctcatgggcatttgggtatgaatgt

SEQ ID NO: 157860 - DNA, 122 bp, Homo sapiens
agtgtctgcactgcccagaccccacactcatctgagtcctttcccacacttcctccccgccgtcttgcttgcttctgaaagtcagcaggcaccacgaggaaggggatttctctgtcagccta

SEQ ID NO: 157861 - DNA, 122 bp, Homo sapiens
gagggagccgtgagtgtcgggaagggtgggcctggggtcacggagcgctttctggaaagccgtggtgaagcatcacccggtaccagccgcctcgctagctcttgccatagcagcagcgtgaa

SEQ ID NO: 157862 - DNA, 122 bp, Homo sapiens
gcctcggggcctgacccaaagtccccaggcaggacaaggtcaccagcaggaggcaggggacgaacttcatggcgatactccgataaacttgcttgcaactctgcaccaggagagagaacaca

SEQ ID NO: 157863 - DNA, 122 bp, Homo sapiens
cacctcttggaagttttactgtcgcttttgctttcctttcactttcataaatcttgccgccgcacactcttggggtccgcacgtttctctaattcagctgtaacactcgccgctgcagtcca

SEQ ID NO: 157864 - DNA, 122 bp, Homo sapiens
tgtccgggtccctggaccccgcaggaatcaaggggaaccgagagaggacggaggagaacgcgagaggccggatccacccctacagatgaagatccaaagtgagtcaagtcctccgcgacccg

SEQ ID NO: 157865 - DNA, 122 bp, Homo sapiens
aaccgctacgatggcatctacaaggtgagtgccccttgaggaggccgggggctctgtccccgccggggctgcctctgatggagctgacgctgatgcccgctctctgcaggttgtgaaatact

SEQ ID NO: 157866 - DNA, 122 bp, Homo sapiens
acggggaggtgctgaaatagtcctggcgtgctgattcaagctttgattggcagagccacccggtgactgacagggggtctccatggcgcccgcgccgccaatccgcccaccccaatagcgga

SEQ ID NO: 157867 - DNA, 122 bp, Homo sapiens
acctcccggggtaattagatggtggcacagatagcctgtcttcctgccttccctcctgcccggcagagggagggagagagggggaccagccggtccagccccctgcgccagccccgtggggg

SEQ ID NO: 157868 - DNA, 122 bp, Homo sapiens
cagacgcgccccacctgggccaagcggctcccgcccggccgagggatgccagggtctccgcgccaggagaccagcgaccccaggcagcccaccaggcccgctccccagacccttacctcctg

SEQ ID NO: 157869 - DNA, 122 bp, Homo sapiens
gacccaggccagctgggcccctctccagctcctgaccagcagccccggatccctgggtggcgtgcagctgaccttccggaccgccactcagaataagcaagaaagcctgccgacccgcctga

SEQ ID NO: 157870 - DNA, 122 bp, Homo sapiens
cccgcacaggcagtgccacggtctaggcggggcaggcccctgccccattcacggaccccgcgcctgcctgcagcaccctcacacgggtgcgaggtccgtgccaatgagtggcggctggaggg

SEQ ID NO: 157871 - DNA, 122 bp, Homo sapiens
cccctcccacggcagcttcgcacggccagcagcgcccccacagctccgtgtcttcccgcgcggctccacaaaaaaaccctaccttccgccatgtctggcccggcactgcctgcaacctcgcg

SEQ ID NO: 157872 - DNA, 122 bp, Homo sapiens
tatgacaaccaccgtcgcaggcaccaccttctggtgtccctggaggagtttcagagtgtccggaagcaaatccgcttgaagaaaacggatactaattattcctgttccagagcttttctctg

SEQ ID NO: 157873 - DNA, 122 bp, Homo sapiens
aatttgatccccaatgtggtagtgctgggaggtgaggcctagtgggaagtacttgggtcacgggggcagagctctcctgaatgacttgcttcagttctcatagtaatgagtgagtttctgct

SEQ ID NO: 157874 - DNA, 122 bp, Homo sapiens
agggggccggggactagggatcctgaccacaatgactgtcctgctacatgaagtgccccacgaggtcggagactttgccatcttggtccagtctggctgcagcaaaaagcaggttggtgatg

SEQ ID NO: 157875 - DNA, 122 bp, Homo sapiens
cactcacagtctgcttgcgacggtaatggagagtgaaaagctccagggcaggtgccctgacgtgcacaccgtgcccagcacacgcatgtgagaacatgcagagcccgctcccaaggggtctg

SEQ ID NO: 157876 - DNA, 122 bp, Homo sapiens
ctccctttgagacaagaggcggacctggacgccccgctcaaagatggcggctgactgagccgctttcaatttatttagcttttgacaataattccgtctaacccatcaggcccctagaaggg

SEQ ID NO: 157877 - DNA, 122 bp, Homo sapiens
agacgcccagaggaagccaaactcaagagtgagctccagccgtctacggtgaaaacaagccggagctgtgtcccacaggtgtctgtgtgtggggtgcacctgttctgggctgcggggcacaa

SEQ ID NO: 157878 - DNA, 122 bp, Homo sapiens
gcgaaccctggtcctcggaaaatcgacataataatccctgacgtttgctcttcagtctcgcggcatttaaggtatctccgagcccctttgggaagagcaggaaccccagacaactctttcaa

SEQ ID NO: 157879 - DNA, 122 bp, Homo sapiens
aagaatgctgtcatggaactttttgacaaacattgttgagaatatccatagggcaaactccgtacagagagcttgttggaatgaagggtaccagcattttccgtttgatggatagtaccaaa

SEQ ID NO: 157880 - DNA, 122 bp, Homo sapiens
ggggcttcacactttaagccactttagaaatatcgaggagaggcgatcccgccctggaaacgcccgggcgccgcacacacattgctgcagtactgaacacttgtgattctccatctccgcac

SEQ ID NO: 157881 - DNA, 122 bp, Homo sapiens
ggactcccgtggggagggggtctttcaaacagcagggaagtgcgtggcctcgtggggcagcgctgaggcacctcccacaggagccgggagtgagggctggaggggtccgcatccaggaaggg

SEQ ID NO: 157882 - DNA, 122 bp, Homo sapiens
aatggcatcttctcagatttctccttcccggactctttaaacaggcttccagagtgccatcggcatgacttgcgagctccattctcttggataatcaaattggaaattaactatgtagggaa

SEQ ID NO: 157883 - DNA, 122 bp, Homo sapiens
gtggaggaggtgcgcgcaatccgcttcaaccaggagcaggagtcagaggtgttgaacaggcgctcgtcgacgagcgggtcgttggagactacgtcatccaaggacatccgccagatgtctca

SEQ ID NO: 157884 - DNA, 122 bp, Homo sapiens
ggtccctaaagaatcaacaccctagaccaggcatggccaggctggtgtgaagcccttccacgtccgtagcacacccctgactccctagcaacagaactcacaatcctggggcctggcgggca

SEQ ID NO: 157885 - DNA, 122 bp, Homo sapiens
cactcttctggagagcattgtagccactcttctctgggctgacctgctcatgcagtcccccgcttttttaactgcacatataaatcatccagttatagtatgatttaaataagattttgctt

SEQ ID NO: 157886 - DNA, 122 bp, Homo sapiens
aagggttattccctgcattggacattagccatttactttgtgcttagccagatgcaagtacgcacaacacgcacgtgtctgggtctcgaggcagagattgttgttactcagcccctgctgat

SEQ ID NO: 157887 - DNA, 122 bp, Homo sapiens
cttatctgctgcattgaggtggtgggtggggagggggctggagaaggagtcctcaggccccggatgttgaacagagcaaataaattccagaggcacctggcaacccttggattcatgggaat

SEQ ID NO: 157888 - DNA, 122 bp, Homo sapiens
cccagctgggagctacaaggacagtaagacaatgagcaggaacagtgggaaccctcgggacgcagaagttcagggcaaatgcctaggcacaccctggctggtctggggaaagctgcctagag

SEQ ID NO: 157889 - DNA, 122 bp, Homo sapiens
cgcccccggggcctacgcgcgcctggggagggcgcgggaacctgggaatgcccaaaagcgcgaaggaaagcgggcacgggagcccagagcccttaagactctcctgaggtcctgggcgcgac

SEQ ID NO: 157890 - DNA, 122 bp, Homo sapiens
gacagactgagtgcctgggggagcacccttgaggctgatcttcggcccagctcttctagtcggtctacaggctttgctggctgggctccctgtgaagacaagtgcccctttatgcctgttcc

SEQ ID NO: 157891 - DNA, 122 bp, Homo sapiens
gactgaggaagaatttaagaaattcattagtgataaagatgcctctatagtaggttttttcgatgattcattcagtgaagctcactccgagttcctaaaagcagccagcaacttgagggata

SEQ ID NO: 157892 - DNA, 122 bp, Homo sapiens
ccccacgcagggcagacttcaggaaggacttcccgccctggttcggcacgagagctttatcgctcgggccaggcggaggccgggcggccccgtggcttccggaggcgcccgggcgggatgag

SEQ ID NO: 157893 - DNA, 122 bp, Homo sapiens
cctgtcatggtaatctggtagaccatttctatcacgaacaactctcatggctgaggcccccggttgtgtgtgttgtgtgcgtgtgtatttggagaaagaccattcactgaaaggaacggggc

SEQ ID NO: 157894 - DNA, 122 bp, Homo sapiens
agccaggcgggagcccaacttcctctaccttggcccgggaggagggctttctgccgagggcgcgccgagccgggtcccgccgggccaggggcggggcgcggaggctgggccctccccagtcc

SEQ ID NO: 157895 - DNA, 122 bp, Homo sapiens
agcaaagtgaggggtggtgatggaggtcatccgacccatcccgccgcctctccgcagtggcgcaagcgccccaaaatctccggagagggaactgactgacccactaggttccgccgtgtcta

SEQ ID NO: 157896 - DNA, 122 bp, Homo sapiens
tgcacgggtggggacgctggtcgctgccgggggcaagtctgccgactccagaaagaaaggcgaaagaatgtgtgtagacccgggcatccttggtcgtcagcatgtttgctttatttaattac

SEQ ID NO: 157897 - DNA, 122 bp, Homo sapiens
cacccaacctccctggccacctgcctagatgtcccatcctttagatctctgcttattcaccgccaacctccaccctctaggcagccttccctagtgctttagtctacggagagaaatggaag

SEQ ID NO: 157898 - DNA, 122 bp, Homo sapiens
ttccccccgcggattttggttcttcgctgtttccctttggggtgcccttcgcggtttctgcgtttcccccgcgttgccagcagccactcgcgccgcgcccctagcccagaaccgcccctccc

SEQ ID NO: 157899 - DNA, 122 bp, Homo sapiens
tcctggccaggggtggagcggccgcggggcgggggtgagcagccatgcgtggagctgggccggggccggggccggggccgggagcggtgggccgggcttcgggacgcgctggccgttcgggg

SEQ ID NO: 157900 - DNA, 122 bp, Homo sapiens
ctaatgagaggagtcatagaagcaaggggtccttcctgtgtaccagtacctttgtcatgacgatgtagcattggtaaatgacatgcatggctgcttctgacacggacactgtatatattctg

SEQ ID NO: 157901 - DNA, 122 bp, Homo sapiens
gcacttgatagagcttctgttggccaaaggtctgctgcatcagtccagaggcaggctgctcgtgactggaggcagtctcctgcatgggaccaatcagaagcttcacccggttgcctgggaca

SEQ ID NO: 157902 - DNA, 122 bp, Homo sapiens
tgcccacttcctggaagtttggaggcacgggaactacattgcccaaaaggcgcagcgccgcgaggcggcgatccctgaccaatgaaaagaggtctgcccgagcgtgcgacacgcaatgggcg

SEQ ID NO: 157903 - DNA, 122 bp, Homo sapiens
aataatttgagctttttctggtgctttgtggaagatgagcaaatctacaccgattccattcgtgtcttaattgttcacatgtgaaagaccaggaaaactttatctgtataatagtgtataat

SEQ ID NO: 157904 - DNA, 122 bp, Homo sapiens
tgtccctcgcgccacagaagaggccggagggggaccggcctgacgcgggtgggcaaagagcgggcagagaactcaccagcagctgcagaaaacacagccgagttgctagctaaggggaaaca

SEQ ID NO: 157905 - DNA, 122 bp, Homo sapiens
ccatggggggatgctggagcccagcagccaaacgggcgggagggtcgtgtctcagaacggcgggagtggtcccacggctcagcgggcatcccctgccatcatgtggggccacgggtaccagg

SEQ ID NO: 157906 - DNA, 122 bp, Homo sapiens
ggcaggagaatggggaagcagtggccggacgccgaaggcctggtggcagatggcgtggagcgcacgcccgcgggcctgggcctaggagctcgtgctagcggggccggagggggatgggaagg

SEQ ID NO: 157907 - DNA, 122 bp, Homo sapiens
gctgcgggcggagatgctgcgtcatggtgccaacatggacgccggccttttgtcctccttcgcgttgccagcgcaggcgcgccccggagccccgagaagccggcttcggggtgcggaatcct

SEQ ID NO: 157908 - DNA, 122 bp, Homo sapiens
ccgtgcaaactttctggcccgtggtggctttggggagcgtcccagtagcctggagtggcccgcagaggcgccgggccgacccctgtccctgccgcccgccgcccagtccctctcccagagcc

SEQ ID NO: 157909 - DNA, 122 bp, Homo sapiens
aacttccagataatcccactaagaattccaagcaggtctcattgcttcttggaaagtagccggcagaggcccacaccctgagcgtgcgagtccggttccgagtcctgagactggcagagaac

SEQ ID NO: 157910 - DNA, 122 bp, Homo sapiens
cttccagccgggtccgggttcccgccctgggctccccaaaaccgcagagccccctcccaccgcacttatcctaccgaagcgttcagacctgccgccgcttctgactcgaatccggtaacctg

SEQ ID NO: 157911 - DNA, 122 bp, Homo sapiens
tcagatcccacaccggcgtctgtgccagactccacagagagcaggggacatggctaggggcgagggtctaagtcaggacgccgggctccttgcaaatctccaatttaatgcacctggtgact

SEQ ID NO: 157912 - DNA, 122 bp, Homo sapiens
tcctactgcgcccttctttaggggtctctccctcggggtccacttggctcgaggcggcagcgagcccagcagctgagtggccggcggcacacgacccagagggaaggagaggcctgcacccc

SEQ ID NO: 157913 - DNA, 122 bp, Homo sapiens
ggtggagcccctgcaacctgcctagcggggcgtttgcgtgtctgggggtgtcgggacacgcgcaggacacacacagtcccactttcctagtctcgcacttacctcaaggctgtcaactttta

SEQ ID NO: 157914 - DNA, 122 bp, Homo sapiens
ccccgagtatccggcccggggcagagatgcgcgtgcgcggagggggtgccgcggagcccgcgtgagcagacaaattaccgcggacctgagaggacccgtccacgccggcccagagggaggag

SEQ ID NO: 157915 - DNA, 122 bp, Homo sapiens
gtcccacagcccaggacagcttcagctcttatttgccatctgctgctgctaggtgttagacgctggactgagcatgctgcacacatcatctctgctgttttccttttttttttttttttttg

SEQ ID NO: 157916 - DNA, 122 bp, Homo sapiens
ttccgcttggtccttcctggaaaggcttcagaaggctggggctcagattgtcagtgctgacgctcctacacattttgcggggaagtggaggaggctgctccgagctagcctgagccctgctt

SEQ ID NO: 157917 - DNA, 122 bp, Homo sapiens
ggcagcttccccagcagtagccacagtctttgtcacatactttatcatgaggcattcacccgcttctgaggctgcctttgttgaacaatgctggcagaaagtgcttcttaggatgagccccc

SEQ ID NO: 157918 - DNA, 122 bp, Homo sapiens
tccactttgaaacagagaggcactattgtaggttaaggtcaggaggactctgacatcacacggcctaattttgaatccctgttacaccacttacctgcagcaaccacttagatctgtgacca

SEQ ID NO: 157919 - DNA, 122 bp, Homo sapiens
cggacagccacgcccactcaagaaatttccgaaacagaaagtttgtctgcaacagcgcgccgtactgacgtagcagtgcgcaggcgcagtcccggctcctggcggcgtgttcctcttttcct

SEQ ID NO: 157920 - DNA, 122 bp, Homo sapiens
tggagtatggatgtcttttttttctcagaaaagtggcaactttggtggcagcctagaccgcgaggaagtggaatcttccttaaaggtgaaacataagttgagaagtagtgcttggttattaa

SEQ ID NO: 157921 - DNA, 122 bp, Homo sapiens
cagtacagctgcggtaagccctttgctgggtgaggggcatggtgtggcaggcaggtgacccggagcccactcggcccggactttgctgctgccttggggcgtgcacctggggacagtgccta

SEQ ID NO: 157922 - DNA, 122 bp, Homo sapiens
agtccaggcatggaggaataccaagtgctcacaaactagccagggccacagccagacaatcgccctcctgggtgacagtggaccccctctcccggctgctttcgatgcaccacagatgaagc

SEQ ID NO: 157923 - DNA, 122 bp, Homo sapiens
cacaggagccctcgcccacgagacgcccccattcgctgggcctccactcaatgcaaaccccgcccactggccccatgcccaacgtaagcctcgcccaccataccccgctcagcgcaatcccc

SEQ ID NO: 157924 - DNA, 122 bp, Homo sapiens
ttggtctaacaaagccactcagcttaaatgcagactccatctgttcttccaagccttctgcggatgataggggaggaagagcaatagccgttctagactacacagattgcagttaagtgttg

SEQ ID NO: 157925 - DNA, 122 bp, Homo sapiens
accagatgacagcaactcatgcgtgttaaactcttcgtaaaacaatgttagctgtacccccgccccccccccaaaaaaaacacttcttgtaaccaaattctgtaattatgttccaaccttgt

SEQ ID NO: 157926 - DNA, 122 bp, Homo sapiens
gcatcttgaggaagctgccaaaggagattcacattgagtcagtggacggggagaggccgacgaaccctccatctgggggggcatgatctcatcagctgccagcacggcagatctgcggaagc

SEQ ID NO: 157927 - DNA, 122 bp, Homo sapiens
gtccatgtcaagagactaggctgggagttttaatatcaatgccgactgagaaacaaaatacggaaatgtcaagggctggtataaaaataatctctaatagcacaaaatcctcctgaagggaa

SEQ ID NO: 157928 - DNA, 122 bp, Homo sapiens
ggccgggcggggttgattctcgagtggaggggcgtgtcgtacgttggcccggaactgggtcgggcaatttccacttactggttccaaatgaatgtgaaaattcaaatgggcttaagtaaaaa

SEQ ID NO: 157929 - DNA, 122 bp, Homo sapiens
ctgcacccggctttctccttccaccagcgggtcaccctgagggaacacttggagaggctccgcgccgcgctccgcgggggccccgaggacgcggaggtggaggtagagccgtgcaagtttgc

SEQ ID NO: 157930 - DNA, 122 bp, Homo sapiens
ggcgggtcgcagcatttccaacgccccctggggctagtccattactgctcgagccagggccgccaagggcacctactccagcccaggtccgagagcgcggcatgcctcccggccgggagcca

SEQ ID NO: 157931 - DNA, 122 bp, Homo sapiens
ctcgtcatccccgcggggtgatgcgcgcagaggggaccgcggggggcacggggaaccaggcgcgggcgaggagagcccgcaccggggtcggcgcggtcgggggcttccttccgtcgctcctc

SEQ ID NO: 157932 - DNA, 122 bp, Homo sapiens
gtgcctgtctccatcatgggagatgcacagtggacacgctgtggcctgtgctgtctgtgacggcagcagcacctcctgcaggtgtggggagagccctctctctgttctcacgcgtcgggctg

SEQ ID NO: 157933 - DNA, 122 bp, Homo sapiens
gtaaggggcgtgtgcgcggaggctcttcatcccttccggagatgccgcggccgaccagcgcgctttggttcagcaagcacagaaggtgcaagccgaacaaggccattcagaaatgaggtgga

SEQ ID NO: 157934 - DNA, 122 bp, Homo sapiens
atcctaaaaaattggtagggagcgcttattaaatgcaggccggtggtgcgccgccatccacggccccaccccccgccgcctccacatgtcgctgtctgccccgggcaccctgcaggctccgg

SEQ ID NO: 157935 - DNA, 122 bp, Homo sapiens
agaaaaacaaccattgaaatttaaacagtattcactcatgtttgactaattaggaatccacgctttagttagctcattttattgtttaaaaagctttgagtggtaatgtgttttatgtctct

SEQ ID NO: 157936 - DNA, 122 bp, Homo sapiens
aaacaccttcccattctcttagacaaaacctcctaactaaccaagccccgaatggccaggcgccttgcccacttcttcatctcttctcactactcagaccaattctgttctgctctctctgc

SEQ ID NO: 157937 - DNA, 122 bp, Homo sapiens
agttgctttccagctggggccttgctggggaccatcgatggtatgtgtgcaggcactggccggcatgcacccgggcatgtatgcatatgtgtgttattgaacccgcgtctgcttaggtccgt

SEQ ID NO: 157938 - DNA, 122 bp, Homo sapiens
cttccttctctgattggccagggcccctgctcatcagtcgtgatgcacaaggtctcttaccgaggccccgccttcttccgagaggcccgaaaacaattttaagatggcggccgcggcggtag

SEQ ID NO: 157939 - DNA, 122 bp, Homo sapiens
acgctgcacagaacgggcctggacagcctgtgcctggtaaataagccgacaggagatgctcgctccagccccccagggccacgcgcacagctgtcagaggtcaggagaaccgaaacacctct

SEQ ID NO: 157940 - DNA, 122 bp, Homo sapiens
cacatctgtcactcagggcctgagggggcgggttgttaaacgttatccaatcagggacgccgggctgggaacggtccaatcaggcacccagctggagcggacatgacgtcttccgggaggcg

SEQ ID NO: 157941 - DNA, 122 bp, Homo sapiens
ctgagctccgagtgtgaatccctgggaaaagctgaatccagaggtggggtcacagagagccgcaggcccgaccgggatgagaagtcctaatcggcgttctaggggcgttctaaaagaaggaa

SEQ ID NO: 157942 - DNA, 122 bp, Homo sapiens
atagcacgttgggacctctcaaggccgggccgggcactgcactctccaggcagggccgggcgagtgcggcaaccaccgtcactctccaaaggcttccgtgccccctggggcagctgagcggg

SEQ ID NO: 157943 - DNA, 122 bp, Homo sapiens
gctctacaaatattaccagctgcagagtgaggacacttgcatttctctttaggttgtggacgaagtgtttatttatcatgcctgaacctgctaagtccgctcctgctccaaaaaagggctcc

SEQ ID NO: 157944 - DNA, 122 bp, Homo sapiens
tttaagtagactgttacatacacatattacgcataggaacagacctgttttgtatatgtgcgatatatttataaagtgtgtgcctttgaaagcattaaaaataatctcggctgtcaaactct

SEQ ID NO: 157945 - DNA, 122 bp, Homo sapiens
catggcacagaggcaggagaaggtgccaggcctgttcacacaggtacccccattgaagcacggggctggagagaggaggctgtgagggtttgggttccttgcctgtaacctggcctgtgacc

SEQ ID NO: 157946 - DNA, 122 bp, Homo sapiens
ggaaggtggcctggacccggctgtacaggctgaaggatttcagctccagccagacgaacccgaagcggtcctcatcgaagaggatgaagaccccgggggtgcgttcagggctggtgaagccg

SEQ ID NO: 157947 - DNA, 122 bp, Homo sapiens
actgccggccggtagcagccggaagtgccagaccggaggtgcgtcattcaccggcgacgccgatacggttcctccaccgaggcccatgcgaagctttccactatggcttccagcactgtccc

SEQ ID NO: 157948 - DNA, 122 bp, Homo sapiens
ttattctagtaattattgggttcccccttgctcacatggttactcacacttgaaagtttgcggtaacaagaaggagccttggcaggaagtttgtttgttccatgactgcttttactgtcaca

SEQ ID NO: 157949 - DNA, 122 bp, Homo sapiens
caggaaggaattgggcaagggcatcctaactctggatagcccttcacagaaaacactcagcggaggggttgggtggggcagggggtggggagcagcaggagaggaataaggcctcccttctc

SEQ ID NO: 157950 - DNA, 122 bp, Homo sapiens
ttgttttttgagaaggagtttcgctcttgttgcctaggctggagagcaatggtgcgatcccggcttactgcaacctctgcctcccgggttcaagtgattctcctgcctcagcctcctgagta

SEQ ID NO: 157951 - DNA, 122 bp, Homo sapiens
gattggtagcagatctccggaatgtgcaaagttttttagttgtcgttgttgttgttgtttcgagactgtcgcccaggctgaatgcaatggcacgatcacggctcactgcagcctctacttcc

SEQ ID NO: 157952 - DNA, 122 bp, Homo sapiens
agcgggtagggagtgtagccagaaaaagaactgagaagcttgagacggctgaggccccatcgcctctggaaagcaggggaattttgccctcagggtcgccttaatcaccctgttcactgcct

SEQ ID NO: 157953 - DNA, 122 bp, Homo sapiens
ccctaaactagaagagctagtcagcctctgccaggaactagcttgaatccacaaatgccacgcttgtcaggcccatcctggctttgcatccccactctctctccaccctcaagcctgccttt

SEQ ID NO: 157954 - DNA, 122 bp, Homo sapiens
agctaggtgctggagaggggccctcatctggttgtcctgtatcctaacatcagcccattgcgacttaaggaatgtttggagaagttttgtagggcacactaccagggcagacagctcgaaac

SEQ ID NO: 157955 - DNA, 122 bp, Homo sapiens
ggggagggggctggattcagtagagggcaaggggcactcacatccccggcgcgccactcgcggggctcctttctgcacgtgccccgggcctctcccgctcgctcaacctgtctgcggagggc

SEQ ID NO: 157956 - DNA, 122 bp, Homo sapiens
taaagagaaagttgagcatattaaatacctacattaaaagtatatacacacttggcctcacgagaatgacatttaatcacactgccacacttttaacacatgccgatttccactcccctctg

SEQ ID NO: 157957 - DNA, 122 bp, Homo sapiens
ggttatgaggctggtagggtgtgagctctgggcagccagccaaccctgatactggccatacgggaggggaaggcctttgggggaggggaggggagagagggaaattgagtccctgattctac

SEQ ID NO: 157958 - DNA, 122 bp, Homo sapiens
ggggtggtgccgtgcctgtctcttaatgaagtccagggcttcctatggagagagccacaccgtcgtcctccagcctcaggccgacctcctcatgcctcccacggtccccgtccccacacgtc

SEQ ID NO: 157959 - DNA, 122 bp, Homo sapiens
tgcgaactagacccatttcatagtcaaatgtggctggctagtgcccactgtattagacagcgagggtggaagccacccgctcatatcataggaagaaacaggcctagagaagtgaggtaagg

SEQ ID NO: 157960 - DNA, 122 bp, Homo sapiens
cagacggggaaacggaggctggggaataccgggcctagccgacgggggcggggcgcagggcgcgcacgctgcgtctcgggcccgggggcgcgcacgccgagcggctgaccgggggcgaggcc

SEQ ID NO: 157961 - DNA, 122 bp, Homo sapiens
agctgcgcagcgcgtagatggctccggtagctgggtccaccgagacataagtggacacggcgcccccggcgcggcccacctcggcctccagcagccggtaggtgacctggccgttgcggccc

SEQ ID NO: 157962 - DNA, 122 bp, Homo sapiens
tgagatggcatttttcacttcctttagtcagggaaaatgttcctgcctccagctttgactcgagatttcagcacagtaagagcattctcagttcatgaagttgaagttagtcactgtcttca

SEQ ID NO: 157963 - DNA, 122 bp, Homo sapiens
cagagcctgggaagccgtcgccccgccccgtccccgcccccgcgcgcagcgggcccggggcgctgagacccgcgtagagcaaagcgcaaggtcccagcgccccttggatcctcggtggcagg

SEQ ID NO: 157964 - DNA, 122 bp, Homo sapiens
gttcctcccaaatggtaacagtgcaacactggccaagctgattcagacagcacagcttcccggtgtctgcagggctggaccaaagagaagagtcttccgcgggtgctagaaaagcgaagcac

SEQ ID NO: 157965 - DNA, 122 bp, Homo sapiens
tattacctgggggtgggtctgctgctgccctggggagtagccgaattgctgctgggaccccgcgggggacctggagtaggagccagggtagccgccaggggacggagacccgaaccggcccc

SEQ ID NO: 157966 - DNA, 122 bp, Homo sapiens
ctgtcctcttccccaccccagggttggccaaaagcacaacttaaagccactgatggacaacgccctgtttcttgtcttgcagccgtctccaacctggacatagagagtaagctgagtgtgta

SEQ ID NO: 157967 - DNA, 122 bp, Homo sapiens
tctgctggactcgagtctagttctaggactagaagcccaggtgggggtcccaaggagcatcggcagggccttgcagggcaactgcctcaagggaggccaccccgggccttcagctagagggg

SEQ ID NO: 157968 - DNA, 122 bp, Homo sapiens
ctccttaggtacagaaacgtcccggttctaaggaatagaatgtgctcatcatgcaacgaacggccatgtgaagagaaggtgagcagtcggcatcacctggaagaagtcagctgaggacaggg

SEQ ID NO: 157969 - DNA, 122 bp, Homo sapiens
gatcctccccaagatccactgaaaacctttccagttggtccaacttaagctgccattgtgcggggtcctgaaaaaactgaagttcagtagatagactttgtttagaagagaaaaagttcagt

SEQ ID NO: 157970 - DNA, 122 bp, Homo sapiens
cggccagcgcacagccccacagcagggcgaagcaggcgcgggctgcctggagctccatgccgcgcttctcgctctcggtccgatccccccgagcccggctcccgcacacccgcacgcctgca

SEQ ID NO: 157971 - DNA, 122 bp, Homo sapiens
ggctggccttgggcagagggaaatgctttgtgtactttctctgggaagcagcagccccagcgcggcctcggcgtcctctgccgccaactgctccgtgaccgctgggcgtgtgtgcggggaca

SEQ ID NO: 157972 - DNA, 122 bp, Homo sapiens
ccaccagggggcgcccgcccggcgcggggctaaggctgctttcttctccgggacacgacgcggacaggctgggttaccttccaaaacgtgtgtgcattaggccggctggtttaaaatgaata

SEQ ID NO: 157973 - DNA, 122 bp, Homo sapiens
gccgcccgcggattggcgaggcacggcgggggcgggctcgcgcatgctcttaagtggcagcggcggggacggggtcagtgccaagatgtcgacggcggcggttccggagctgaagcagatca

SEQ ID NO: 157974 - DNA, 122 bp, Homo sapiens
gcaatttctgtgaataccaattgtacaggtggatttttaaataatagatttagggccgggcgcagtgactcacacctgtaataccatcactttgggaggccgaagcgggtggatcacctgag

SEQ ID NO: 157975 - DNA, 122 bp, Homo sapiens
tctgttaaagaacagatcaatgcttcaagaaaccctgttattcagacatatgggcctagacgctagccttgcaccagtgcacttttgatattaatgtttaatttacagaactaatgttatcc

SEQ ID NO: 157976 - DNA, 122 bp, Homo sapiens
ccgacgccctgctgctcctactggtcagtggggactggaacaccacagccggtcgggtcacgcacttcgtcttccttcactcgcggaggctccggcactgacctgtgacccctcccgcaacc

SEQ ID NO: 157977 - DNA, 122 bp, Homo sapiens
gcatgtggattcatgtttaatacattagtatacacacatatatttccaagttctgtcctccgaaggcctagaagcaatgacaagcagaagcaaggagcacacccagcatccagttttttgtt

SEQ ID NO: 157978 - DNA, 122 bp, Homo sapiens
cctgcattgccaaggccttataggcacgggctgggcgggggtgggcagtccgccagccagcggcattctgcagggctctgtgcaagcgtcagcccaggacgggcacctgccccaccctgcct

SEQ ID NO: 157979 - DNA, 122 bp, Homo sapiens
tccaagcctagttggcaagtgtcggagccgggactacaaactagacctcccagagtgccacgctcagaacgcagcaatgcaagaggcccagctgatgcccacagcccaggtggggaggagag

SEQ ID NO: 157980 - DNA, 122 bp, Homo sapiens
gggagagagcttcctggtggaggacgcatcctacagtgggggcaagggtgctctgaggtccggtgaaggcagggactaggctgcccaggccctgcctgcttggctggggctgggggctgctg

SEQ ID NO: 157981 - DNA, 122 bp, Homo sapiens
ccgacggccccagctggacctggacatcctcagcagcctcatcgacttgtgtgacagccccgtgtcccctgccgaggccagccgcactcctggacgggccgagggagccggccgtcctcccc

SEQ ID NO: 157982 - DNA, 122 bp, Homo sapiens
ttggatccgaggcagacgaggaagctgagaaaaccctggcgttgaccccgtggacctgggcgccccgggaaggccagcgcttggtccaggcaggcggggcctgtgcggtgaccaccctggtc

SEQ ID NO: 157983 - DNA, 122 bp, Homo sapiens
tgtcagcttttcttttgcatttttgaagctctgttattgggcatataaacatttatggttcgtgtgtcttcctgatgaattgaccattttatcattatgaaatgtctttattgctgataata

SEQ ID NO: 157984 - DNA, 122 bp, Homo sapiens
gtggcgggggctcaggaaggagggtggccctaccccagcgggctcggctcggggcctccgcggcagttcggggtccttcacccgccggctccaggtaggctactcctcaggtaagccccgcc

SEQ ID NO: 157985 - DNA, 122 bp, Homo sapiens
ggcggggggaggcgcaggaagcggggggccggccagaaacgggctggggagggggggccccgcagcccccctgggccatgctgactcccggggcctgacccccccgggccagccccccctcc

SEQ ID NO: 157986 - DNA, 122 bp, Homo sapiens
gagtggctcccaggtggctgtccccaagggccacgttgaggcaaaacagtctggggtgctcgagacctggctcactttgcgaagtctcacgctgtaaaatgtcgagcgtgaggcaatgcagt

SEQ ID NO: 157987 - DNA, 122 bp, Homo sapiens
gaaccggcggcggcgcccagcccggggtcctcaaggaggccccgcccactggccggaacccgagcccgcccctctcaagggactctccccgggcccggccattggtccggtatggaagcggg

SEQ ID NO: 157988 - DNA, 122 bp, Homo sapiens
tcctgactggcagagtccgggagtggagaaacactctctggtcgggcgtgcctgggctttcggcccaggcccgtcctgtgtcaagaccctaagagcccgggtcccacaggtaccctaaaatt

SEQ ID NO: 157989 - DNA, 122 bp, Homo sapiens
cgtcaggtaatacgcccacctgggcctcccaaagtgctgggattatggcataagccaccacgcccagccagaaaagtttaaataacaaagaaaatgtgatattcaaagatttgaaagaatta

SEQ ID NO: 157990 - DNA, 122 bp, Homo sapiens
gccacactccacagcagcaaggctgcgcagcagagccagcgctacgctgggttatctgcccggattaatcttttcctctccgttatttcatcactcagcttaactggtggttgccccaggac

SEQ ID NO: 157991 - DNA, 122 bp, Homo sapiens
gagctaggggcccggagcttgggggcgcgtaggcggccgtacctggccagacgcggggggcggtgcctcagctccctgagtccccacaaacctagagggtcgacctcctcgccagcttctat

SEQ ID NO: 157992 - DNA, 122 bp, Homo sapiens
tttcttttctttccttctttctctttttttttctttcttcttttttttgaaacagagactcgctctgttgcccaggctggagttcagtggctcgatctcggctcactgcaacctctgcctcc

SEQ ID NO: 157993 - DNA, 122 bp, Homo sapiens
tgagctatggaccccaggggtccttctctggcaaagcacccatgtttgtgaggtgggcaccgcttagcaaggcaggtggctggctagtcaggtaggttttccctggctgctccagaaggtga

SEQ ID NO: 157994 - DNA, 122 bp, Homo sapiens
ccagagcagaggaggagtaaccttccccataaacaagatgtgttccccccactaagaaagcgggtggagggtggaggagccaaaacacatcccagccccggggccccaccggagcgaagcgg

SEQ ID NO: 157995 - DNA, 122 bp, Homo sapiens
cactagagggcagaagcagttaagacaacaatacccaggactagccagatcccgaattaccggctttgcaagagaggatggtggaaagggttgaaaaaaaaaccccagttattctatatctc

SEQ ID NO: 157996 - DNA, 122 bp, Homo sapiens
gaacattttgtatgtcccaaatgctcctcaaacagggcaagtcacaaattcttgttttagcggccaatggttctcttaatatttggtctcgtgccatgtgactaaaatagtgggttggtcaa

SEQ ID NO: 157997 - DNA, 122 bp, Homo sapiens
agcccgacgcagggccccttggctcggattacgggaagaggagccttcactggcccccctcggaatttcaaacctcgctgggactgtatcacacagccagacaggcctctggagctgagaat

SEQ ID NO: 157998 - DNA, 122 bp, Homo sapiens
taggcgggacgcaccggttgctgggaggccggcagctgaggttccttgggaaggaagtcacgtggctgcggccgcgcttccctccgagcccccgcctcttctcctgctccccgagccccgcc

SEQ ID NO: 157999 - DNA, 122 bp, Homo sapiens
tagaagcggagcggccctgggcatggtctgcgagctaggggtgcggggccgccggcgggccgcagccaggtgcccctcgctgctcttggctcttgcactctcgccaagccccgtgagcagcg

SEQ ID NO: 158000 - DNA, 122 bp, Homo sapiens
actccggaaacggaaccgtcggcgcccgagcggggggtggggggggagggagggcggagccggcgaggcacagcttcccattggacgcccgccctcctgcggtcctgcccccggccgcgcgc

SEQ ID NO: 158001 - DNA, 122 bp, Homo sapiens
aactgtgcccaccagctccccatcgcagaggccatgctgacctacaagcagaagaggtaacgcggtgggcccaggcaccataccacaggctgccgccagccaccaaccctccgtgggcctcc

SEQ ID NO: 158002 - DNA, 122 bp, Homo sapiens
cccctccccctcgctccctccagccaccaaagtatctgaacccagaactcacaacaggaacgtgtactcaacaggaacgtgtactcaattagcttttgtgggaaagggttgaagattcttgg

SEQ ID NO: 158003 - DNA, 122 bp, Homo sapiens
cgcccttgggccccgcccccgagccgacaggaacgagcgtcattgcgaggcggcctcgcgcgcagcttccttggggccagggaccccagtggggccggtacatctccccgccccggcctctg

SEQ ID NO: 158004 - DNA, 122 bp, Homo sapiens
catccaggaaaaagcaccccatattctctaaacaagccagctgctcctttgaactcctgacggcatcacaccctcccactcccatccagttgctcagcggtgagctggctgccagctgctgg

SEQ ID NO: 158005 - DNA, 122 bp, Homo sapiens
actagtggatggggaaactgaggtacagagaagctgagtgacttacccgaggtcactaagcgtttagggggagtcagttggggtagcctggctacaacctctacgcgagttacttccctgag

SEQ ID NO: 158006 - DNA, 122 bp, Homo sapiens
agacagaactgaagtggtcacagtttacacataatcatcggtgtacattccaagagctaccggtgttttgggccaggggcgtggtggctcaggcctttaatctcagtactttgggagactga

SEQ ID NO: 158007 - DNA, 122 bp, Homo sapiens
tgctcccaacttggatctgtcccgctcgaggacgcagagctgtgtctggagcgcggtcaccgccctctacagctggcttccccaacccggttccccctcccttcccctccgccctcgctccc

SEQ ID NO: 158008 - DNA, 122 bp, Homo sapiens
gaaaacgccgccacaagtttcttgctgtttctggagagacctctcagagcgcatgctcttcggatagtcggtctgtagcgccattttcgtatggaagggactgcactctgattaggtacagc

SEQ ID NO: 158009 - DNA, 122 bp, Homo sapiens
cggcggcggccgagcccttcctcaactcagcgatgacatccctttccgagtcaactggcccggcaccgagttctctctggtcagtgccctcactaaccccgcagccacccctcctcctgaca

SEQ ID NO: 158010 - DNA, 122 bp, Homo sapiens
gcacccaggcctccagcctgtggtacagaatgcacctgtgtgggaatgcatgtgagtgcccgagtctgtgaacattcagcctgctgtgcaggcctcatgagttctgtttggctacctgggct

SEQ ID NO: 158011 - DNA, 122 bp, Homo sapiens
ttcacaattcagaagctaaaacgagaaactaagaataacaaaaggcaaccttgcatccggcggaacctgcaggcacgggccattcttcccgcgacccagggctctgccggaccgcttccccc

SEQ ID NO: 158012 - DNA, 122 bp, Homo sapiens
ctgcaatctagccacaaaacctatccccagtgaatagaaagccttagggatgtagaaatccgttcttctcccaatgggtgtggtaatcctggcccaaaaactcatccaaactcacatgttgt

SEQ ID NO: 158013 - DNA, 122 bp, Homo sapiens
ggctggtggcaggcgactaggagactagggtggtggcggtgggggtgccagcggctgagccggagccggagccggaggcgggggaggggaagagggcggccggggctgcgagcgcgcaaggc

SEQ ID NO: 158014 - DNA, 122 bp, Homo sapiens
ggctctgctatggggcaggaggccagggcggacccagggctcatggaggtagcacctggccggcaggccatggtttctcaggccagtcaaggccctgccagctgcagggctgggcaggagct

SEQ ID NO: 158015 - DNA, 122 bp, Homo sapiens
cccgattgactggcctgcttggcaaggcaagtagcggcggcgcttcaaggtgggtgttcacgttttggccgtgaaagtcgggcttgggcagcgtggcgtcgggggcgagtgtggtgtccccg

SEQ ID NO: 158016 - DNA, 122 bp, Homo sapiens
cttcagccatgtggagaaaggagcattccaggcagagggaccagtctgagcaaaggcattcgggtgtaaaattattgcctaggattggagtgaaggatatgtagcgctactgacaagagact

SEQ ID NO: 158017 - DNA, 122 bp, Homo sapiens
aaaagcagatgaatgcttcttcacctcaagtttaaaagtctccttacgatggccgggcgccgtggctcaggcctgtaatcccggcactttgggaagccaaggcaggcagatcgcttgagctc

SEQ ID NO: 158018 - DNA, 122 bp, Homo sapiens
cagtgtgctgtgggggggagcaggcctctgctacccatgagtcagccctgaggctctggccgccttcctccagggtatcttccaatcttgctctacacccgttagggagtggctgggaggaa

SEQ ID NO: 158019 - DNA, 122 bp, Homo sapiens
agaatgccttaacctcctgggaatgcggcccagtaggtctcagcttcattttaccctgcccgtatttaagatagggttgctctggttcaaacacctctgacacgtggactctttggagctcg

SEQ ID NO: 158020 - DNA, 122 bp, Homo sapiens
gtggtgtgtgtgtgtcggggacaggggtggtgctaatgagggaggaaagtatgtttgaaccgagccttgaaggaaataatgtccgagtttagaggccaacacacttcagcaaaagcattgtc

SEQ ID NO: 158021 - DNA, 122 bp, Homo sapiens
ccaccggccaactccactatggggtccaaggaggaactgtagctgcccccgtgtcacccccgccatcactgctggacaggagccacccccttgggtaccagagggagctgtgcattgtgaat

SEQ ID NO: 158022 - DNA, 122 bp, Homo sapiens
gtggccaccttccttccctcaaggggctcccctcccgtgcatggacattttttaaaccaccgattccaagaggatgaggagtgttttctaaaatgcagtaggcttggggagtcggagagttg

SEQ ID NO: 158023 - DNA, 122 bp, Homo sapiens
tctaaaggaaaatgttatagtcacccgtggtttccttcttgcctggacactccattgtcccgggctgaaaagggtagcagtacagtgcatataatgtcaagttgtgggaggagtgtggcaga

SEQ ID NO: 158024 - DNA, 122 bp, Homo sapiens
cacgagcccctcgaggggtgagcggcccgggcctcctggcgttctggccggctagccaagcgctggactacatttcccagaggcacggcgtccggagcgctggactacatttcccagaggca

SEQ ID NO: 158025 - DNA, 122 bp, Homo sapiens
cagagtttggacgcgccgccctttacagcccccgccccggggccgggcgagctgagggggcgcggggcgtctgtgttcccagctgatcacagaacaggccgatatcgcattgacccggggag

SEQ ID NO: 158026 - DNA, 122 bp, Homo sapiens
ccatggttacaccactgcattccagcctgggtgacagagtgagaccctgtctcaaaaaaacgtggggcctcataggatcagaaaccacggtggagcagactatgaaggagaaatatgatggt

SEQ ID NO: 158027 - DNA, 122 bp, Homo sapiens
aaaaaaaaaaaaaggaagaagccgagcatcacaaattctgaaataagaagtctccaaacacgcgggcaatcagttgcacacagtacccccagaaatgtgcgtatggcctcttctaagatggg

SEQ ID NO: 158028 - DNA, 122 bp, Homo sapiens
gtgcagcagatcccagtgggccccggctagtcctagtctgaatgactcattccttgtttccgtccactgtggtctgagtgccttggcccaggggcccccaagaggttgtaacacaggctggc

SEQ ID NO: 158029 - DNA, 122 bp, Homo sapiens
gggctggccgaggccggagccggctccctgtgcttgcagggaggtgtggagggagaggcacgggcaggagccagggctgcaagcagcgcttgcaggccagcccaagttctgggtgggcgtcg

SEQ ID NO: 158030 - DNA, 122 bp, Homo sapiens
atttatacacatgtattggcttccttttacactattaggcggtcaagaagcagatcgagacggcggtcacattctaagtctaggagtcggcgacgatccaaaagcccaaggcggagaagatc

SEQ ID NO: 158031 - DNA, 122 bp, Homo sapiens
ggaaggaaggaaggaaggaaggaagaggatatggagtgattcacattcatgtggaatcaacgacacatttatttattgtttgcctcagggctattgtaacacctgtgccctctatagtatag

SEQ ID NO: 158032 - DNA, 122 bp, Homo sapiens
catatgaactggacagtgtggaatgagcagacctgtagcacgggaagcagctaaactggacggtgtggaacgggcggacctgtagcacgggaagctgctacaggcactgggaggagaatggg

SEQ ID NO: 158033 - DNA, 122 bp, Homo sapiens
ggtgcccccgccaccggggcggggcggggcgaggtcctagctagctgggttagtaagcggcgcgagcgtgcgagtttctgacgcgcccgcgtcgtcccagctccctggactaccagtattgt

SEQ ID NO: 158034 - DNA, 122 bp, Homo sapiens
atttcactctgatttggtgcaaaaagaatacacacacacacacacacacacacacacacacgagtactgatgaaactgacatgagtccaaggatagcatctggatgtcaaagccctaagctc

SEQ ID NO: 158035 - DNA, 122 bp, Homo sapiens
tgctgattggtgtgtttacaatcttctagctagacagaaaatttctccaagtcccccactcgacacaggaagtccagctggcttcacctctccttatcatgtgtcctccacttaaaattctt

SEQ ID NO: 158036 - DNA, 122 bp, Homo sapiens
tcctttcccgccctaaactcccgaggtcccgcccccgaccgtgggctaaggtccggcccccgtatttccgggcgagaagtgaccacgtggttgtcgcctataacaatccggccctgctccca

SEQ ID NO: 158037 - DNA, 122 bp, Homo sapiens
ggaagggggaggggattacctgctggtcggccgcggaggggcggggctccgaggaggtggcgggccctgccggcacggggagggggcgccggaagagccttgaccctctgacctggagaccc

SEQ ID NO: 158038 - DNA, 122 bp, Homo sapiens
ccgccctcacctgcagagaaacgcgctccttggcggacactgggggaggagaggaagaagcgcggctaacttattccgagaatgccgaggagttgtcgtttttagctttgtgtttacttttt

SEQ ID NO: 158039 - DNA, 122 bp, Homo sapiens
actccctgcctctgggttctctcggcggttgacaccctcttgtgtgcctgctttatgagccgaaccacagagatttaaagtttccttggtagaaaaaaaaactgagctctctgcatccaagt

SEQ ID NO: 158040 - DNA, 122 bp, Homo sapiens
cgccctagagggtgtggtgtttctgtggggctggctgatcccaggtcagtggctgcattccgccccggccatgtgacccctagtctctttcgtccagttgggccgattctgcaggcaaagcc

SEQ ID NO: 158041 - DNA, 122 bp, Homo sapiens
ctgcctacagctccacacaaaggcgcgtgggtgccggctggaccctgctccaaagttgagcggagagataagaaagagccgagcgggagaggacccagcgtcgcgggagatactcacagggt

SEQ ID NO: 158042 - DNA, 122 bp, Homo sapiens
ctgcctctcccgctgggggccgccgcgctgtctgcgggctactagcgccgggcccctccgcgtcgccacgcctgcccttcacagccttggcccataaggtcaccgaggggcgggaggcgccg

SEQ ID NO: 158043 - DNA, 122 bp, Homo sapiens
tggcaactgcagtccccgggaggcggctggagctccagaaaagggagctggccggggcgacgccctcccattggctgaggggcccgcaaattaccctagccgcgcggcccggcccgctgcta

SEQ ID NO: 158044 - DNA, 122 bp, Homo sapiens
aacagtcatcggagactttcactcaatacaaagttctaccagacctatgcaaatagtaatcgcattttctagaaagagttctaaagtaagtcacacacacaaacctcagtagtagcacaaaa

SEQ ID NO: 158045 - DNA, 122 bp, Homo sapiens
ctccccacgaggcggcccagacaggccggctacgccgcccgcgcgctcgctggctctccccggactgagcctaattgatccagacttcctcggaaaatgcccgaggaacaggactcctccgg

SEQ ID NO: 158046 - DNA, 122 bp, Homo sapiens
aacaaaagattagcacccctatctacgagggttttaggagctctgcgtcagaaactcaggcgtagagaccagatacatatttcttactatatcatcagaccacgtctttaaagcccgttttc

SEQ ID NO: 158047 - DNA, 122 bp, Homo sapiens
tacacacagatactccccagcatggatgtcccgcaggacagtgggaagcccgctcaggagcgtgcattctggggcgccaccccatgcgtgccctggaacctcatctgctaagtaccagaggc

SEQ ID NO: 158048 - DNA, 122 bp, Homo sapiens
ctcctcccctgggtggtgggggacagggcctgggaggcacggtcacgccgagtttgagcacgtgaccttccaagagcttgagagtcccctagagagcaggccccaccccaatccatcccgcc

SEQ ID NO: 158049 - DNA, 122 bp, Homo sapiens
gcaggtggagccgaaagtgtggctctcaattttttcccctgaggatgaatcttggaacaacgtagtgggtgaaaagcagagcgatgggggatacgaattagtgtggaagagaatctaattac

SEQ ID NO: 158050 - DNA, 122 bp, Homo sapiens
cccttctgacttccttctttcccttcattgtcaggcctctgaaggacattatcttcttttcgtatttatctgactttttcccagaaacaaggctccttcaagcctctcacctcttgtcccat

SEQ ID NO: 158051 - DNA, 122 bp, Homo sapiens
gcccccgcggggaccgtcgccagcccgcatctctagcgagaggaggttccacagcgcgcccggcagccccgccaccgtcagcacctgcgcctcgggcgggctttccccacctctgggaggca

SEQ ID NO: 158052 - DNA, 122 bp, Homo sapiens
aggaatctgttgtagaagagttgctgccgggacctgctggtgaattggctccaccggatccggctccgcagaaagctcactgcttcctgtggctcctggatttccaagcctctggggtttcc

SEQ ID NO: 158053 - DNA, 122 bp, Homo sapiens
cttcaaacagttcaacatcttctgtcatatgctggagtcagccctcactcaggtagggcccgggttggcgggttggggtgggaggggggttctgtcttccaggttccaggggggttgatgcc

SEQ ID NO: 158054 - DNA, 122 bp, Homo sapiens
atactgtttctttaaggaagggcatgttacctataataccaaaccacaaaaggatagctgcggttttgggcgaggagagctcagagagtttcttgcatatggccctgtgatggcggccatgg

SEQ ID NO: 158055 - DNA, 122 bp, Homo sapiens
cggctaacgaattaagctccaaaccaccaaagggtagatgcaaatctcccacactccttccggggtgaggagataaggatcaaccagactatcagcccacaactcaggagggtcatacctta

SEQ ID NO: 158056 - DNA, 122 bp, Homo sapiens
ctctcctgtgaccggggctttcgattgattggaaggaggtcggtgcaatgcctgccaagccgtcgttggtctggaactgcctactgcaggcgtaagttgtgtgtgtgcatatgctgatgtat

SEQ ID NO: 158057 - DNA, 122 bp, Homo sapiens
gcggcagttatgggtgaagcctgagggggcggggcctgatcggggcggggtcttcgggggcggagtcggctggggatggagccgctcgggccgagccctccaccgcccaccatcaccgagtc

SEQ ID NO: 158058 - DNA, 122 bp, Homo sapiens
agccggcagcgcaagccgcctctagtccgggacaacaatagtagcactgattcttttaaacgtaattaatgtttaaaattaacaaataaaaatggtatctattctcacgcgtgctgagcgct

SEQ ID NO: 158059 - DNA, 122 bp, Homo sapiens
tgtgagagtgggggagatggaagagtgagatgatagaggttgagagagacagttggtgaacgagtcaggaaagtgctagttcagaggcagaaaaacccagcttggttcagcaaaaaaggcca

SEQ ID NO: 158060 - DNA, 122 bp, Homo sapiens
cttaatgacccagtgatgggaaaagggacccagccctcaaaggcagggctgacagctgagcgctctcaaccacgcacccaaattagaagctgctgggtcggcagaaaggctaaagggaggcg

SEQ ID NO: 158061 - DNA, 122 bp, Homo sapiens
ctcgcacccccacctctggacttgcctttccttctcttctccgcgtgtggagggagccagcgcttaggccggagcgagcctgggggccgcccgccgtgaagacatcgcggggaccgattcac

SEQ ID NO: 158062 - DNA, 122 bp, Homo sapiens
caccagggctcctcacgtggcaacccgaaataatcgcccaggccagggtttccagaacaacgttcattttccgtaattttctcattttcaataaaggcataatctttaaatgtgaaattgaa

SEQ ID NO: 158063 - DNA, 122 bp, Homo sapiens
gtcacagccacagaaattacaggagttaagaaagtgcatcatctccttccttggagaacacggagggatggtgacttgcagtatggtctggttctcaagctcacagtgcacctcttttcctc

SEQ ID NO: 158064 - DNA, 122 bp, Homo sapiens
attttacttgctcagggtctcagggtctgattcccaggttcttcagtgctgtgcagatgccgaactaaggagggggctgaagcttggagaatgggggtgggcggacagccgtggacaatggg

SEQ ID NO: 158065 - DNA, 122 bp, Homo sapiens
atgaataagagttcatcaaaccttttctatatgtattttgctttcctaaggaaagcagttcgggaaagagtttttctttcctttttagtcatttttctaaagttacaaaatgtgtcaggtac

SEQ ID NO: 158066 - DNA, 122 bp, Homo sapiens
gcaccgcctgttccaccgggaccggggcggccagcgggatagactcccccatgcgagctgcgccccagctcgacccacgtggctctcctcggcctcgcacttccgggttctgagggaacggg

SEQ ID NO: 158067 - DNA, 122 bp, Homo sapiens
cagcaaccctgtggcaacgcggatcagccttgcttttctacagcacagctgggcaaacatcggcgctggtgctagcatttccggttccttgcgcgtgttcattcatgccatcttctgcacat

SEQ ID NO: 158068 - DNA, 122 bp, Homo sapiens
agtaataaggttctcactatccctagaagcaatgctgtcaattttagaaccttggggaaacgttttactctatagtctgttatctctctgtaattccctcatggtgaaaacagcatattttt

SEQ ID NO: 158069 - DNA, 122 bp, Homo sapiens
ggacaagctgcgagataaggactcatcgagggaaggggagggcgcccctccctcaggagccgggagacctgcctaacctaggtcggaagcccacaaccctgagtacaaggtggacgctgtgt

SEQ ID NO: 158070 - DNA, 122 bp, Homo sapiens
gagcgggcggcgaaggccggcgcggcgagcagcaaccatgtcggtgttcgggaagctgttcggggctggagggggtaaggccggcaagggcggcccgaccccccaggaggccatccagcggc

SEQ ID NO: 158071 - DNA, 122 bp, Homo sapiens
ccacttccggatctcactttcattgcttccaagtaccgggaggtgctttgcttcttcaaccgaacttgaccacaatgggaggaggcgtggcaaccaatgggcgcatgagttagctggatgcg

SEQ ID NO: 158072 - DNA, 122 bp, Homo sapiens
gtcgcagcaaggcttcccctctaccctctctgggcctctcacaaacgctgagccccgccccgctgaggcctgtctgcagaatccacagcaaccagcaccatgcccatgacactggggtactg

SEQ ID NO: 158073 - DNA, 122 bp, Homo sapiens
cctgtggcaaagcctaggagagttgctggggaacagtctcccctggccggggtctctgcccgccaccccctcccaggctccccccccacccggcgggctgcccggcggaggcgacagattga

SEQ ID NO: 158074 - DNA, 122 bp, Homo sapiens
agcctcgggcctcccagcctggtcccgtgaaatacacctcaatgtcctctgcaggagatgcggtggcagtgtgggtcagtgtgtctaaccctccatggtctccccctcaacttctgatgctt

SEQ ID NO: 158075 - DNA, 122 bp, Homo sapiens
cgcctctcccggcaccgccctgagcggacgcgcctgtcattctcgcgggcggcggggggccgggtccctcccgagagctggctccgctttgcctccttggcgaccccttattttcagtaacc

SEQ ID NO: 158076 - DNA, 122 bp, Homo sapiens
aagaaacagtaagctctgtaggtatccaaaggcctgacagcaaacgctctgctaagttagcgctgccgtctcctggggtcaatgcactcgagtggcgtttcctgggctaactctactgtaag

SEQ ID NO: 158077 - DNA, 122 bp, Homo sapiens
gctgagtagaacttcccagcattcctctttcctcaattatggttcacttcttaaagagaccgaggctcaatagtgaaaaggtggagatggcgttagaaggcgctgtaagtgctctatagcat

SEQ ID NO: 158078 - DNA, 122 bp, Homo sapiens
atatgcccaacacttaacaaataatgctggaaaggaggatagagatcatggtggaaaagacgatagagaccacgcttggccaaacccgggtcagataccctgctggctgtcctccacttgcc

SEQ ID NO: 158079 - DNA, 122 bp, Homo sapiens
ccacagagcagggaggggggcaatgaataggtgcaggacttgggtgccccggagctgcaccggctggcccttaaacagccaggcacttcctgtggcatggccctgtccaggtgcaggagagg

SEQ ID NO: 158080 - DNA, 122 bp, Homo sapiens
cttctggcagggccctgtcacccggtcctggggcacctccccacaggctgttccctgtgccggcagctgggactggaccttccgtgcacagccagcccatttcccttggccgtcctccctct

SEQ ID NO: 158081 - DNA, 122 bp, Homo sapiens
ccgcagtccgtgccgaggctcccgcccgagtgcgcgcgggccggcggtggcgtgtgcgcacgtcatatgggccgccggcctcccattggttgcggccgcctcaccagaccgcgtgcggacgg

SEQ ID NO: 158082 - DNA, 122 bp, Homo sapiens
gtgcaccgcacgggcttgcagaaagcagccccagcccggagtaaggcgttcggaaaagcgcgctctgctccgtccccggacgctccctcttcctgatatccttgcagctctctggttggggt

SEQ ID NO: 158083 - DNA, 122 bp, Homo sapiens
aggcaggcaggccgtggcaagtgttctggagtcttttccttgggtgcgcagctggaaggccgggactcggggaggagagcggggaggcggccgtgctctggagccaggctgacaggccctgt

SEQ ID NO: 158084 - DNA, 122 bp, Homo sapiens
ccagggtccttgctgagaggacccagccgatactcgggcctctgtgttatggctgagggacgtaagacaccaaggaggaagtgactgccaagatctcagctggatggaagcatagttgggac

SEQ ID NO: 158085 - DNA, 122 bp, Homo sapiens
tgcggcagagaaccgaaggtgcagcgccacagcccaggggacggtgtgtctgggagaagacgctgcccctgcgtcgggacccgccagcgcgcgggcaccgcggggcccgggacgacgccccc

SEQ ID NO: 158086 - DNA, 122 bp, Homo sapiens
aaatgtagaaaagcaacaattataaataacaagagtccctcgggtagaccgcctgactctcggatcaactgaggttccacccagagcacgcccgccttcagtgagccgcaacccctatccct

SEQ ID NO: 158087 - DNA, 122 bp, Homo sapiens
ggcatcaggatccggtgcttctataccttgttcagaggtcccagtgttctcagtggtttccgctaaacaatccacagtgggatttttccttgggacatctgcttttctttctctctcgctct

SEQ ID NO: 158088 - DNA, 122 bp, Homo sapiens
gtaagcttcctgaggaatgtggaactgtgagtctattaaacttctttcctttataaattacgcggtctcaggtatttcttcatagcgttgtgagaacggactaatacaattactttctccaa

SEQ ID NO: 158089 - DNA, 122 bp, Homo sapiens
acgagcaacggaagaaaccggcttccaggcctgagggggccggtgaaccagggcaacccccgggcaggcagaggcagaatgtgcctgagcgccatctgccgctcatccccaggtcccacgca

SEQ ID NO: 158090 - DNA, 122 bp, Homo sapiens
gcatccgggcagacaaagccagaaaagcctagaacaggatgcagagtggtaacattagagcgcaccttgtcatgctggccactgggtggcaggggccggtttcagcgaaggtactcacaccc

SEQ ID NO: 158091 - DNA, 122 bp, Homo sapiens
agcctgggctgcccggcaccaagctgtatgggcccgagggcctggagctggtgcgcttcccgccggccgacgccatccccagcgagcgacagaggcaggtgacgcggaagctgttcgggcac

SEQ ID NO: 158092 - DNA, 122 bp, Homo sapiens
ggtatcaaggaagctggcccaaggccacacaaaagacggaactagtaacatgatccagagcggtggtaagggaggagagaaggcctcaaactatgggcaactgaaccccacaggtaggcatc

SEQ ID NO: 158093 - DNA, 122 bp, Homo sapiens
tctcttgcgaaagaaaaagcctctgggcattggcttctccgtcaggcggtggcctcatagcgctcagtgattctcgccaggttatgaaaggccgttttagaaagctggccctcacccaccct

SEQ ID NO: 158094 - DNA, 122 bp, Homo sapiens
actgaagctgcgcttataagagccacttccagagttcgtgcaaagggtcctataaaggcacgcagggacacaccgcttggagtcacagttttcatcacagagtcactagtcactacacgtcg

SEQ ID NO: 158095 - DNA, 122 bp, Homo sapiens
ctaagcagtcaagtggaggagggttccaatctgatggcggagggcccaagctcagcctaacgaggaggccaggcccaccaaggggcccctggaggacttgtttcccttgtcccttgtggttt

SEQ ID NO: 158096 - DNA, 122 bp, Homo sapiens
ccgcttctccgctcgcagtctggttcctcccctgccgccccgcccatcacggcagggtcacggtagcgcgcacgcgcagcaccccatttaagtttctcgtctttgcagtggctttgcttaga

SEQ ID NO: 158097 - DNA, 122 bp, Homo sapiens
tagcaagctgagagctgctctgtctttgacagaacacagctctttgctgctaaatttacccgccacgggagtcattatgacccttacggtcccccgagaggaggaatggagacttttctgaa

SEQ ID NO: 158098 - DNA, 122 bp, Homo sapiens
ggcgccgtgtttgtggggtgggagctaggcgggcgccgtttatgtggggtgggcgctcggcgggcactgtgtgtgtggcacggccactgcttagggccccctggagctgcggggcacacggc

SEQ ID NO: 158099 - DNA, 122 bp, Homo sapiens
cactgacctgggcaactcgctgaccacgcggcctgtcacacttgtggagggggaggagtgcgggcaggtcctgaatgtgactgtcaccaccaggacctactgtgagagaagcagcgtggcgg

SEQ ID NO: 158100 - DNA, 122 bp, Homo sapiens
cgattgcgcagccgcagcagccccgcgcggaagacgctaccctcctctcccccgaagaggcggggcttcgaacgaacctggaaatggccgaggggtctcgacttcctcaccccaggcatcag

SEQ ID NO: 158101 - DNA, 122 bp, Homo sapiens
taagcagtttttcaaagaaggtgtcttgggccaggctcaatggctcatgcctctaatctccgcattttgggaggtcgaggaaggaggatcacttgaagccaggagtccaagaccagcctagg

SEQ ID NO: 158102 - DNA, 122 bp, Homo sapiens
gagtgcatctcttccctcgtttttttggttatctaagatttttcttcttcacattttaaacgtgcttatgatgtaagtcacagcttattataaatcttgccatttcatttatttttatttta

SEQ ID NO: 158103 - DNA, 122 bp, Homo sapiens
ccgccctgcctcttccccgtcgtgctcccgccctgcctcttccccgtcgccccagccccacgtcacacactggcctgtttgtccctgcagtgtgcgtggtgcatggggaggccccgccctac

SEQ ID NO: 158104 - DNA, 122 bp, Homo sapiens
tatcgtaggcagtgtaccgtggccgtgccgtcagagtgtgcgtgtgcgtgtgtgccgtgtcgaggctgtgtagagtgcattgtacagcatattttcatgaataaaattgttttaaatatttc

SEQ ID NO: 158105 - DNA, 122 bp, Homo sapiens
tagcttttcaggaacaatgtgaagatacattagaattgccacatccatatcttcaaaacacgcaacctctgcaccctaataactgcttacggtataatcagtatgatgatgagattgagggg

SEQ ID NO: 158106 - DNA, 122 bp, Homo sapiens
tccctggcctcaccgtgtctccgcctgacgcgaaggagatggacggcatgtggtggttggcgatgacctgtggcggcaggaggcacacgcggtcatgggggccccgcttcgagggcaggggg

SEQ ID NO: 158107 - DNA, 122 bp, Homo sapiens
tttgcagggagtgcacaaacgtcgctcaggtggaagcaggggcagggctgtgctttggcacggagggcctcgggcttttacgagacccctactgctggcccccccatgcgccatcacacgct

SEQ ID NO: 158108 - DNA, 122 bp, Homo sapiens
ttctacacttaatactatgtgcggcaccgacaggactagagtagctcaagttacccacttcgattaattttttaaaatttcttttggttctaataacttgattaaataaatataaatttatg

SEQ ID NO: 158109 - DNA, 122 bp, Homo sapiens
tcccctcctgggttcaagcgattctcctacctcagcctcccgagtagatgggattacaggcgctcgccacccacccccggctgatctggacctcctgacctcaggtgttccaatcacctcgg

SEQ ID NO: 158110 - DNA, 122 bp, Homo sapiens
acggcgccccacagcggccaaaccgcgctgcgtcactccgcgccggtcccccggccagggcggggcttgccagggaccctcttggtgccccagtcggcccattcccagattcttcctaacct

SEQ ID NO: 158111 - DNA, 122 bp, Homo sapiens
attttaatgttctgggtgacatataccacgtaggtgggcctgcaatggttgtgtctgcatcgaacatgtagagactatttttcttgtcatgattctctaaacaatacaatcaaacaactatt

SEQ ID NO: 158112 - DNA, 122 bp, Homo sapiens
aacctgcaactgtccctcccctttcctactgcccagggacagctcttgtctcaaagtagtcgttggaaaggagggaaactgaaagaagctcctctccttgccctcaggatccatgcacccct

SEQ ID NO: 158113 - DNA, 122 bp, Homo sapiens
cacgtggctcataaacgcataaccaaacattaggaccagacttcagtcctttcctcccttcgggaacccctcggcctctagggatggagctgaacaattggtcagacgtgtcagataacacg

SEQ ID NO: 158114 - DNA, 122 bp, Homo sapiens
gcacgggatccaaggtgccgcgcggaggaggcgggctgctcgcagtgccggggtcagaggcgccgccaccggcggcctctgcgcgcgcggggaggaaagggttaagctgcccgagcccgggg

SEQ ID NO: 158115 - DNA, 122 bp, Homo sapiens
cagaaattttcatatataattactcaccagttctactatcagaattatagttttactgtgcggcattttgttaaagtaaaaaacaaacacatcacttaaaaatttcacatcttttacattat

SEQ ID NO: 158116 - DNA, 122 bp, Homo sapiens
ctgagccagggatgtgacttcctttttggtgtcctgcagtgcctagcatcttcaagctttcgggtgccactgaattccccggtgccagccagggaagctgcttgtggtgcgtctggtccagc

SEQ ID NO: 158117 - DNA, 122 bp, Homo sapiens
cttgggtccctgtgcccatggggacataggtgtgtccctggagggtcgcttaccatttcccggcctcaggattatcaatgcagagaaatctgaattcaatgaggatcaagccgcctgtggga

SEQ ID NO: 158118 - DNA, 122 bp, Homo sapiens
atgggccccgagctgaggctcccgcagccagggtctgcgcgtggtccccacctccttgcgcgctccgtctccagcacagcagaggtggacgcccctcgcggctggctccccagcgtccctgt

SEQ ID NO: 158119 - DNA, 122 bp, Homo sapiens
gggactccgtgagaactgagctgtgaaaacgtgttggaggcacagtacccacctctgccgcgtctgaacccagatttgccaggaaggctcttgctttctcaatctctgttccccggtcatca

SEQ ID NO: 158120 - DNA, 122 bp, Homo sapiens
cctgcctgccccctaccccaggttgggcgccgctaaggtaacgcacgcccgagactgagccgcagtggccccagacatactggaggggaagcaggccatgccccccacctcgagtggggccc

SEQ ID NO: 158121 - DNA, 122 bp, Homo sapiens
cttcaatggagggaagattgctgagaggcgcccttggtgacacttcatccaatcagatgtcgagttggaatgtgacgtagagccatgcgaccataccaaagtgccccccacttccctggtcc

SEQ ID NO: 158122 - DNA, 122 bp, Homo sapiens
tgtgaccgccccccccgccccgcccttggtcccttggggccgggtagctgcctgaaggggcggggccattctctcagatataaggcttggaagccagcagctgcgactcccgagaccccccc

SEQ ID NO: 158123 - DNA, 122 bp, Homo sapiens
aagaccaagattgactaatgatgagtctgcatcaagaactaggcatttcttctgagttgacggactctttaggaaaggagaatctaagtgaagcactgattttagctctgagaacaaacaaa

SEQ ID NO: 158124 - DNA, 122 bp, Homo sapiens
atttatgcatattaaagaaggtttggggtacattctgcccttgtgttagcctacagaggacgtattgtgattctcgccaccattgaatttaattttgtcaagattcacagtcaatacttata

SEQ ID NO: 158125 - DNA, 122 bp, Homo sapiens
agggggcggggcggcgggaagggaacgtccgggcgagcacggcggcggcgccggccccagcgttgtgtgggcatggttgcctttaagtcctggaattttggaagattttttttttttttttt

SEQ ID NO: 158126 - DNA, 122 bp, Homo sapiens
tgtgcccttcgtctgttccttttattgccgggcagggttgcacccacatgtgcaagccagcgacggaccccaggttcacccgttcaccggtcagtgggcatatgggttgtttcagtttgggg

SEQ ID NO: 158127 - DNA, 122 bp, Homo sapiens
tcagtttggattctctctattgcaccattctctctaaaacaagccagagttcttcagacccgtatttctttttgtatagtatacacaaaggcatagcttagattcagctgtccctggagttg

SEQ ID NO: 158128 - DNA, 122 bp, Homo sapiens
tgggcgtggtggcatgcgcgcctgtattctcagctacttgggaagctgagccatgagaatcgcttgaacccgggaggcggaagtagtgagccacctggatcacaccactgcactccagcagc

SEQ ID NO: 158129 - DNA, 122 bp, Homo sapiens
cgtcgcctcctaggccaggtgggctcccagatggtgggacctggccaggggcatggcgaacgaaacacgaccctctggactgacctcttgcccacggttgtccttggtcgggtgggggcagc

SEQ ID NO: 158130 - DNA, 122 bp, Homo sapiens
gaaatggcccgatgacaaaggaaatgtgatcccccttctctgccaaggtttcagagaggacggacgtgaggaggaggaggggcgcagggcgcgcgcggagctcggatagcattgcacgacgg

SEQ ID NO: 158131 - DNA, 122 bp, Homo sapiens
agcccgtggcttgttcctctgctgcagggacagcaacactgtgctgaagagtgagaaacacgatggatgcttctgctgttccctcgaacacaagccccagcaggaagaacatccccacgcag

SEQ ID NO: 158132 - DNA, 122 bp, Homo sapiens
tccccctcccctccggtcctgtctccagcgggagcgcgagacgctggtcaggctccgcggcgcagctcgaaaaggaataatcgcccccgattgactgaaattcctccggagccggcgccgcg

SEQ ID NO: 158133 - DNA, 122 bp, Homo sapiens
tggataaagggctgccctcccggggcagggcccctggagggccggaggggtggtgaacgccgtcgtggtgatggtgagggccttagcgaccaccacccgagtgaggccccctcaccttcagg

SEQ ID NO: 158134 - DNA, 122 bp, Homo sapiens
ggatccaggcccctggacaggctgcctaatcctctggcctcccacagggcatgggggctccgggcaggagcagggacaagtagagacaagcaggagaggaatgagtcacagccctttgagtt

SEQ ID NO: 158135 - DNA, 122 bp, Homo sapiens
cgctgtccctgcagctccgtcgggtgatatcacaggtgtgctgccagacctcacccctgccgttgccgtggaggcatcagggagacaggggcagcttgcgtggccggtcgccctgcatgggt

SEQ ID NO: 158136 - DNA, 122 bp, Homo sapiens
agctcctacctggcaatacctcctgtaccccagagagctgcagagaacttcatgtgcatccgaaaccagaatgtgttgtttcctgaccccaggccctcatctcaccccaaaacccaaataaa

SEQ ID NO: 158137 - DNA, 122 bp, Homo sapiens
cataggccacctccctcagagtcaccgctgaggttaagatgcagtggccctgcggcggctcggtgtggagctgtcactgtgccagagctcatgggcagaccctgctccgttggtgggggatg

SEQ ID NO: 158138 - DNA, 122 bp, Homo sapiens
actgagagcgagcagaactccaattccaccaatgggagttctagctcagggggcagctctcggccccagatagctcaaatgtcactttatgaacgacaagcagtgcaggtgagactcagctc

SEQ ID NO: 158139 - DNA, 122 bp, Homo sapiens
ctacactcctggaaaacccgcagtggatttcaccaacttcaggatcggagcccaggcaggcgaacgtaccttattgcgcatgctcgctagcccctcccgctcggagcggaagggggagcgct

SEQ ID NO: 158140 - DNA, 122 bp, Homo sapiens
taaagcgctgactgtaaatgctttatttctttgattagtaccactagtctatgtgggcagcggcattcctccctggagcactcagctaggcggttccgtccaggagcttgaaagcatcccag

SEQ ID NO: 158141 - DNA, 122 bp, Homo sapiens
gtgtcctactggatcttaaattctacaaggaacagcattgccacattgcaagggggtagacgcttatactccaggtatgtctcaaataggaataaattaaaatggaggctcttttcccgggt

SEQ ID NO: 158142 - DNA, 122 bp, Homo sapiens
ccttggcaaaatcccagggctttttttggggtcagtaggattctggccacctctccagtccgcccccaaaagccagactccacattcgcaggcagtaggttgggatttggaaaggtgcctcc

SEQ ID NO: 158143 - DNA, 122 bp, Homo sapiens
ctcccaggttcaagcgattctcctgcctcagcctcccgagtagctgggactacaggcgagcgccagcacgccaagctaattttattttcagtagagatgggggtttcaccatgttggccagg

SEQ ID NO: 158144 - DNA, 122 bp, Homo sapiens
ctggtgcctccttccttagacgagctaaggtcaagacttctgctgctgcggaggagcccgcgcaccaggccggggtggactgcgcctgcgcatcgggcccgcctggttcttaggaactacga

SEQ ID NO: 158145 - DNA, 122 bp, Homo sapiens
cctttgagctggcgccgcgcgtcccagccttgcgcacccgcacccagctcccttggccgccgggccctcctgggactcacctgccctgggactgaagcgggggccaccccgagcccgggggt

SEQ ID NO: 158146 - DNA, 122 bp, Homo sapiens
ctatcataaagatagcaaattttatattaattaagtgctttgaagggtatattcattccacgatgcacctttttggagtgctattcacctggagatttcctgtaatttgagacattattctg

SEQ ID NO: 158147 - DNA, 122 bp, Homo sapiens
aaggcgccggggaagagggactggtgagtgcggaggggctcgcgtgctggcaagactggccgtggggaggcggcgcaggacgaagggccgctgtccccgcgctccttccagggcccagctgg

SEQ ID NO: 158148 - DNA, 122 bp, Homo sapiens
ccttggcggccccttcggcggagctgaccttcctcttgggtatcctggcggcaggcagggcgcgtgccgggtgcctgcgggccgtggcgcgccgagagcctccgcgaaactgggctgcctgg

SEQ ID NO: 158149 - DNA, 122 bp, Homo sapiens
ggctggacagctgggtttgctggggtatttttaaatgcattaatgcaggctccaatcactcggccatgcttgacctatttttggctcaggccgaccattgttctatttctgtgcctgtgggc

SEQ ID NO: 158150 - DNA, 122 bp, Homo sapiens
ttgcctggacttgcaggttggagctcggagccctcccccagagcagcggccaggagcttccgcctccccttcgcctgatgaatttgcgaagggacaccctgcggtcgccgggatgccccagc

SEQ ID NO: 158151 - DNA, 122 bp, Homo sapiens
ctgcatgcaggcccctccatgctgcaagaggtggcgggctctggggccgcatcgcacccccgattcgtgtcctccagcctgtttcctcgccttaggtgggacgcgatcacccgcctgcgggg

SEQ ID NO: 158152 - DNA, 122 bp, Homo sapiens
cttcttacctctgcgtgcatgggcacgtgtgcattgctcagtccgcaggaggtctcactccgcaggaaacgctctcctcccgcataagtctgtacttccatcccctcatctgtggtagtagt

SEQ ID NO: 158153 - DNA, 122 bp, Homo sapiens
ggaggcggatgttgcagtgagcccagatcatgccactgcactccagcctgggcgacagagcgagactgtatcaaaacaatcaagcaaaaatggttgttgtcaacacagtgggtaacatctga

SEQ ID NO: 158154 - DNA, 122 bp, Homo sapiens
gcaggagggccccacaggtgggggctcctgactgctccactttcccacagcagacctttgcgcgtttctcccaggagcccgcagctcgtgggggcagtccccggccagcacgggggagcgct

SEQ ID NO: 158155 - DNA, 122 bp, Homo sapiens
agcacccagagaagggaaatgacttgcgtaggccactgcggctacttagtggcagactcacgttcagaaatctttgtcttgctaaagggttcttgctacaactcttgctaaagatttctttt

SEQ ID NO: 158156 - DNA, 122 bp, Homo sapiens
tgtgatccgcctgcctcggcctcccaaagtgctgggattataggcgtgagccaccgtgcccggcctggcaagcttcttcttgaagaaggatgaacagttctcagcaaagaggagtcatcatt

SEQ ID NO: 158157 - DNA, 122 bp, Homo sapiens
ttgccttcttactatgactgcgtgtcaagcggcgtggaaaccttgggacagtcttcccttcgcatagccgtgcgctactgtacacacatggcctgacgcttgggcggagagagtactggtca

SEQ ID NO: 158158 - DNA, 122 bp, Homo sapiens
cggagagggggagggcgcagggcaggaatggaggcgaggcctggcctcaggagccgggggcggcgggttcagggcgcgatcctctctgggggaatccgcgggtggcccgggagaggccggga

SEQ ID NO: 158159 - DNA, 122 bp, Homo sapiens
agaaaggacccttagagaactgtggaatatcaggctgtagaggtaacctggggatcggaacgccaggataacacaaatcctttattttgcattttccaatggcgagcgagtgctttggcttt

SEQ ID NO: 158160 - DNA, 122 bp, Homo sapiens
agtgatcctcccgccttggcctcccaaagtgctgggattacaggcgcgagccaccgagcgcggcccatacgggaaaacgtcaaagcctgacaggtgtgacaaataatgggcccctaggcagg

SEQ ID NO: 158161 - DNA, 122 bp, Homo sapiens
aaaggccgtcagagcaccgcgcagctgagctccaacaaatcctctctctatgtccatctgcgatgcagggaatcctactttcccaagaagtttccgtggacaaattttgagttagaaagtaa

SEQ ID NO: 158162 - DNA, 122 bp, Homo sapiens
ccctccctccctcacacaccaagagcgcggcctcagactccccaggagccgggcaactttcgaaactttagttcctggaacctgggagccctgggcctgtgcacgttctcaaggggctacgg

SEQ ID NO: 158163 - DNA, 122 bp, Homo sapiens
gcttgtcttttaattttcttaatggtgtttcttttgaagagcaaaagttttgaattttgacgaagtctcatttactgctttttaagtggatactgcttttggagttatgtttaagaaatctt

SEQ ID NO: 158164 - DNA, 122 bp, Homo sapiens
agcgttttcatgtggtacaggatggacacgtctgagggcagcatgctgtgtgacgcaaggcggtccagcagctcctcagcggcatctgcgagggcagctgaagctgcatctctggagacacc

SEQ ID NO: 158165 - DNA, 122 bp, Homo sapiens
cgttacaaaagcaaagtctcaaagatgacgtttttcttgggttctgccttctctgcactgcgaaatgtcatgagtaaagaaatttaagaattaagcactgagaacgtgttcagtcatggctt

SEQ ID NO: 158166 - DNA, 122 bp, Homo sapiens
aacaggaagtcttttgtggtgttctcaaaatcacatcacgtaggcagctgctcctacacacggctctgaacaagtcgtctcactggattttgcatgacagtattagttatcataaggacagg

SEQ ID NO: 158167 - DNA, 122 bp, Homo sapiens
tccagaacatttccatcatctcaaaaagaaatcttatacccattagtagtcaccacgacccgcacatcccccaccttcccagcccacggcaaccactaatctactttttatctctatggatt

SEQ ID NO: 158168 - DNA, 122 bp, Homo sapiens
ttgcaagacagtttcacgagatcacgtttatgaaattttcctaggtctgtgtgtgctatacggatgcgcaccatcaccatcaccgcgcagtgggtctcctgttagaggagccggtcacgcac

SEQ ID NO: 158169 - DNA, 122 bp, Homo sapiens
gcaagtatgaattggttcaattggtgaatgtttccccagactgcatttgtttcttatggacgggtgctgtgttcctgtccatgcctcatggctttcagggtttgctaattagtgctttccta

SEQ ID NO: 158170 - DNA, 122 bp, Homo sapiens
ggacaggggcggggtatgggcggggccgtatgcaagggcggttgctagccccgggactcgcggcctggaccgggactgggacggctgcagcccccgggcctggactgcactgactgtgccag

SEQ ID NO: 158171 - DNA, 122 bp, Homo sapiens
cagggcacaggcaaggaataaccggatgagcagcatgttctgcacagagctagtgttgaccgtgattctcgagggaaggttagagtccgtaggaactgccatatattattggcttctgaaaa

SEQ ID NO: 158172 - DNA, 122 bp, Homo sapiens
gactgggattaagactgtcgtttggggtttgagagttgcagctttgcttttccccaagtgcgttttaatcatatactgttgataggttgggtaactcggggactgcttactaccagcagtcc

SEQ ID NO: 158173 - DNA, 122 bp, Homo sapiens
agtgtatttcatctatatcatgaccccaaggctctgccttatcatttcaacacatacttgcgggcttctccagagtttattgtatttgatacaatactatacaaagttattccccttagatc

SEQ ID NO: 158174 - DNA, 122 bp, Homo sapiens
cggagcccatctttggccaggagggggcagcagaggcccggcgtagccccgcgcttctcacgcctcaccagcaaccgcaggaacccactttctaagacaggagaacaatcattaatttatac

SEQ ID NO: 158175 - DNA, 122 bp, Homo sapiens
tttatagaggagcgcccaatcctgaggtgcgggggaggcagggttgagggaattactccccgctgtccaatgagaaggaagtggagatgatgggctggacctcaagccaatagtagagcagc

SEQ ID NO: 158176 - DNA, 122 bp, Homo sapiens
caccggtgatatcttggaactcggccccggttgttcgctaaggaggacttggcttgggggcgggagggtgctccagagttcctgggggtccaccgcactccccatccgaggctcctcgcgag

SEQ ID NO: 158177 - DNA, 122 bp, Homo sapiens
gtggtaagagagaccctcccctgccctcagttgctcacaccttctagtgtcagttccctgcgggacttggagcaaaactgagcactctggcaaagctaaaaataatcagtccattagtatca

SEQ ID NO: 158178 - DNA, 122 bp, Homo sapiens
tcaagtatgcacactccctcccccaccctccagatgaggaggtctccttccagaggcttccgctctcagctggtctcacatctcgcaggctcttcaatgcggaggccaagttatttataaaa

SEQ ID NO: 158179 - DNA, 122 bp, Homo sapiens
aaagtctgaggttaccaggcgttgaggaagagaccgatgccttcctaacagaatggctgtcgtctcaaagtctgaggttaccaggcattgaagaagagaccgatgccttcctaacagaatgg

SEQ ID NO: 158180 - DNA, 122 bp, Homo sapiens
tttgtgtcacaatgagggctccccctgaagaggtggctgccccaagtcactctgggctcacggtggatgcatggtggacagcggccgcacggtggcctttgtgatggactctggggcagaca

SEQ ID NO: 158181 - DNA, 122 bp, Homo sapiens
gaggcatgtgatcgatgcatcgtaactgttgagcaaatgaatgctgagctgtgatggcaccgacgtgtccggggagaggacgcacccggctgtgtggacatgtgcccagggcccaggacagc

SEQ ID NO: 158182 - DNA, 122 bp, Homo sapiens
gtcaggaggctcatctttcctgagggtgtccttccctccctgcagtacagcagatggaaacgcatttatcggagacataaaggacaaggtgactgcatggaagcagtaccggaaagcagcta

SEQ ID NO: 158183 - DNA, 122 bp, Homo sapiens
cggcgccgcttccttcttcctgcggaagcgcctgcgcccaggtgagagcccaggtgtgtgcgtcttaaaggggaggcggccaggtgagcagcgctgtcggccaacttgaagatggctgcggg

SEQ ID NO: 158184 - DNA, 122 bp, Homo sapiens
cagcctcaattccttctcccacataatggggcggctgaaagtacctaccttaacttgtcacgatgattacatagaatgaatttgcaaaatgctgggtatagattaagtactctgttaacagt

SEQ ID NO: 158185 - DNA, 122 bp, Homo sapiens
ggcgtctgcaggtacagagtggggtgctggggcaggcccgcactgggcttcatccccactcgggacaggcagtggctccattgacccggatgagctgcgcactgtgctgcagtcgtgtctgc

SEQ ID NO: 158186 - DNA, 122 bp, Homo sapiens
tgaaacagccaactgtttacacaacacatctgtgacatctgactctggcaccagtggcgccgcagctttcagctctgaggccccacgggctgcagccctcagctttgggagggcccagatca

SEQ ID NO: 158187 - DNA, 122 bp, Homo sapiens
caggaaatggagatctgatctggcccaagatgatgcagttgccctcatgagtgtgggagccggaggagctgcccaagagcccaccgtcaccagcaagggggagtgtgattcaacgggaggcc

SEQ ID NO: 158188 - DNA, 122 bp, Homo sapiens
attcccacggaggggagcaggtatttccagatgtgcatgccggagagtcggccgggaggacgcactttccagatgtggggatgtgtgtgcctgtctcaaccccaacaggcccaacaggggct

SEQ ID NO: 158189 - DNA, 122 bp, Homo sapiens
ttgggcttcccatgtttggggggagctccaagttcatggtctcgacccagcttcaggaatcgtctgtcacctttcttatcctgccagtcggtgaggatctgaaatttacagaaagtgtcact

SEQ ID NO: 158190 - DNA, 122 bp, Homo sapiens
tgctcccggagcacattgccgaatcttgttctccttagatatgcaaatattgcttcctgtcgagaaggactgggaggccttccgctttagaggcagcgcttatagcgctagctggtcgtgga

SEQ ID NO: 158191 - DNA, 122 bp, Homo sapiens
gcgcgggcggagtcgggggaccgccaggaagggaggcgggaagggtcccgggagcggcggcgaggggtcgcccacactcacctgcacgcccaggtgcgccagccgggcctcgagctcaggct

SEQ ID NO: 158192 - DNA, 122 bp, Homo sapiens
gctaacggaggctcagagaggggcggccacctggtccaggtcacacagctgggaaatagccgtcgcgccctggaacctctgctcaggctagtccctccaccgacctggaaggccgtgcggac

SEQ ID NO: 158193 - DNA, 122 bp, Homo sapiens
agcaatccacctgccacagcctcccgaagtgctgggattacaggcgtgagctactgtgcccggccaaagggttcccccagctttgagggtacaatgagagagcttgctggttgtctggctcc

SEQ ID NO: 158194 - DNA, 122 bp, Homo sapiens
tcccgggccctgggggttcaggggcgctagctgggctgggggacgctggctgggggttaccgagcccagggcgccttgcacttgacgctggaagcgccctcggctatctttcctcaccgctt

SEQ ID NO: 158195 - DNA, 122 bp, Homo sapiens
attttatctggacaaataccagtagactttcgtattatgacccacttctgttaccggggtcgccggtcgcggccccacgcccgagtttctgaagccaccggagcgctgggcgccacagttcc

SEQ ID NO: 158196 - DNA, 122 bp, Homo sapiens
cagccccgcctgggagtaacgccctccaaactgggatcactaaccacgcacctgggagcacgtgcacgtgctggtgcccgtccgcgtgcgtgggggccctgcccagcagctcccggaagcag

SEQ ID NO: 158197 - DNA, 122 bp, Homo sapiens
agtaaaccacaaaagacatcattttttcatgagggccctttggtgagcttttttacataccgaagtgttttcttgccttttagaatatttccaacaatcaccttggtttggagggggccaga

SEQ ID NO: 158198 - DNA, 122 bp, Homo sapiens
catactgaggacaaagtgccaccctagagaccacaggaaaagggctactgctgaaagtgccgttggttttgatgaaacagctattgttgtttcaacaattttgacagttaacacattccaga

SEQ ID NO: 158199 - DNA, 122 bp, Homo sapiens
actagttaatgttaagaactgtcctttatacagagattctgatctttttagtgtttggtacgatatatgattccttttatgaaatgaaggttacagtacatgggagggtgcttgtgtgtatt

SEQ ID NO: 158200 - DNA, 122 bp, Homo sapiens
gcaggccggacactcactccacggagagcaggccggacactcactccacgaagagcaagccggacactcactctactggacactcactctaccacagtacaggccaggcctctacaacagga

SEQ ID NO: 158201 - DNA, 122 bp, Homo sapiens
cggtctgcagctgtccccgttctttcagggacatggcagccaaaagagcagtcgtttttccgctcttatttttgtgtgtgtgctgtggtcaactgttaactccccaaattggggagggttgt

SEQ ID NO: 158202 - DNA, 122 bp, Homo sapiens
ctctattaccgggcatcttggcagcatttcccgggaacctgcacctgctctggggctcatcggtatatgtgctggaaatgcgtgtgaatgttcagcgtggcgggggtgggagcccatggatg

SEQ ID NO: 158203 - DNA, 122 bp, Homo sapiens
gttgcagggcggcggcacaggggtgtggggcgccgtgttgggagtactgagcggccccggcgcgctgctgttgcggcgcagctgtcgactcggtcgcgcggagggaattgagcgacggtttt

SEQ ID NO: 158204 - DNA, 122 bp, Homo sapiens
tcacatcaccaatggggtcccttgacctagttcccccacaggctctttgggccacataagcgtgtgaccccactcattggcactttcatccctcctttctgggagtctggtccaggggttgg

SEQ ID NO: 158205 - DNA, 122 bp, Homo sapiens
agcctgctgctgcagaggaaagccagcgggctccacgaggctgaccaaaatgcagccacgcggctgatcagacatgccatcgggaacaatgagtatggggagatggaggcagagcggctggc

SEQ ID NO: 158206 - DNA, 122 bp, Homo sapiens
gacacctattacctaggctcctgggggaagtgacagcccgtggatctggcctacgcctctcgggcctctgtggcctcagagcgtctgggccacactgtctgggaagaggtaggtggcagggt

SEQ ID NO: 158207 - DNA, 122 bp, Homo sapiens
atctgtttaagaacctttgagatccttggcttttatataacaaaaaagtaagctgaggctcggggagaagggaacgcctgggtagcctagctgtcctggcttcctactttgtacagatttaa

SEQ ID NO: 158208 - DNA, 122 bp, Homo sapiens
ctggcccagctggtcagcgacgggagccccatggtccggaaggtgcgtgaacccccagcccggcagcagcagggcacccaggctggaccccgtgacacctggggccaagcccgcatggccct

SEQ ID NO: 158209 - DNA, 122 bp, Homo sapiens
tggccaatagaaagcctcagtggccttggcggggctggcccggagagcagatgggaggtgcggcgacagtgtttgacgagagccgaaggaggctgtgggaggtgttggcggcggcggcgcgg

SEQ ID NO: 158210 - DNA, 122 bp, Homo sapiens
gcccctaggaggggccccgccggctgagaacgcacccctgggcctccatgcctacaggatcgcaggccaagccttttggaaagacatgcgctaatgcttgcaggaaataaaaggggtttggt

SEQ ID NO: 158211 - DNA, 122 bp, Homo sapiens
ggcagaggtggtggccggggtttgtctgtattgccagatctcgaggagattccaccagaccgaggattcagatagtcactataaggacgaacaaattcaaatgcagtgggctgagtgggctg

SEQ ID NO: 158212 - DNA, 122 bp, Homo sapiens
tgatccacccacctcagtctcccaaagtactaggttacaggcgtgagccaccgcgcccggcggaagaacaatttatgtgttaaatgtggctgggctgcaccttgtggagcgtgggagtggct

SEQ ID NO: 158213 - DNA, 122 bp, Homo sapiens
gtgctgcgtctcgacggacagcgggctgctggtgggacggtgggtgccggagcagagcagcgccgtggtcctggcggtcctgcactttcccttcatccccatccaggtcaagcagctcctgg

SEQ ID NO: 158214 - DNA, 122 bp, Homo sapiens
tcggacttgttcattttttcctagctagacaaagttatgggattcctagcagcccccaggcgcgcggccagagtggccccgcgcttgcgctgggacggagcgacacgctgtgtgtgtcctcg

SEQ ID NO: 158215 - DNA, 122 bp, Homo sapiens
ggggagacccacggctgagtggtctgacctgcacctaccctgtgttcagcctaaggagcccgcagtccccggggggatggatacgcctggccctgagtctttgctgtcggttctcctgggcc

SEQ ID NO: 158216 - DNA, 122 bp, Homo sapiens
taccagagaattggcaagaaacctgacagctggggcttaggattccctgcgccagacctccgagctacaccagagggcgtactttccttactcggcctcggccacatccgggttccaccgca

SEQ ID NO: 158217 - DNA, 122 bp, Homo sapiens
ttaccaaaaggttttccggcttgaggtcccggtggacaatgctcttgtcgtgcatgtggacgagggctttgcataagtccatgatcatgagggcagcatcgggctccgggaacttcacactt

SEQ ID NO: 158218 - DNA, 122 bp, Homo sapiens
tggctcccgtgtttctcagctgtggacatgccacaggacaggacccacgagtgagtgtttcgggggcagaagaggtaaagaacagaggccggagatgcagacagaccgaggtgcaaagtggc

SEQ ID NO: 158219 - DNA, 122 bp, Homo sapiens
ggataacacagagggctgctgcgaggggaccttggagctggcagagacatttcctgtctgcggaggatcttgactttggagcatccggccgtcgccgcgagcggccgaacactttcctgcgt

SEQ ID NO: 158220 - DNA, 122 bp, Homo sapiens
tctggttgagtgtctttatttcttgcagcttttccctaaacttctgggcttcgccctcctcgttggcaaagcttcgaactgtaggcatggccgacagagcctcaatggccacctggctggac

SEQ ID NO: 158221 - DNA, 122 bp, Homo sapiens
ggcaggagagagggaggagccatggcaacaggtgccaaaataatcacctcaccaagtctgcgctgcgccctgctggcagcgcgcttgcgcaggccgagctgcccgccatgattggcccgccc

SEQ ID NO: 158222 - DNA, 122 bp, Homo sapiens
aagagaaggcaggcacaggaaatagaacacaacactgactttaatggggcagccctgagccgtaaccttcaaaccttccgcctcagtaccccgtgcgcgaggagggaggggcgactgctacg

SEQ ID NO: 158223 - DNA, 122 bp, Homo sapiens
gcgaaggtgagaagggtgagcggcgtctagacggcgctgtccacccagcggcaataaaatcggatgtttccgcacacagcaccgtcacaggctatcaccgtttaacacggcaactcttaaaa

SEQ ID NO: 158224 - DNA, 122 bp, Homo sapiens
cccctagggtgtgtccttgctaacatgtgcagagctgttgctgccacatctgtgtgcaaccggcagggacggcaagagagaaaggccagggtggctaacttccttttaagcatgtggggctg

SEQ ID NO: 158225 - DNA, 122 bp, Homo sapiens
ttaccctgcagagtgagcagtcttcctcctggggcctccagggtgcagccctgatcctgccggaggggaggagcccaggcatctgtgcatgaacactccctcaccagatggcctttgagcac

SEQ ID NO: 158226 - DNA, 122 bp, Homo sapiens
cccggccaaatatttgtattcttgtgcaccggaggatggttttcccccactgactccaaacgtcttccttgcatttgctgtgtacaattcagtgatttgggtctctcatccatttatacttt

SEQ ID NO: 158227 - DNA, 122 bp, Homo sapiens
ggctgggggctggaggcgggggtgggggtctgagctgcgtcctgggctcgaggcgtcccccggggagtcgcctcttagcggtgcgtccgggctagcggcgaggggccgccccaagtcttccc

SEQ ID NO: 158228 - DNA, 122 bp, Homo sapiens
tccttggggtacagcatcccgccttgcagtgccagcacacagcaacagcggcccaaacgccgtgcaggccacacctgtccactaggtcacgctttccactccactgcttggccaccgtctgc

SEQ ID NO: 158229 - DNA, 122 bp, Homo sapiens
aggaggggcgggaactgcttaggttcctctcagacctccggtattctcccagctccactgcgttcgttctgtggtgagcccttgctgtatgcccggactgcagccatgagtgtggacgctat

SEQ ID NO: 158230 - DNA, 122 bp, Homo sapiens
ctccccttgggccgggcacggagtaggcacctggcgggctccccaggtggcagacgctgtcgctgcgcacacctggcctctgtgccgcctgctccctgctcgtcctcccctccccaccctca

SEQ ID NO: 158231 - DNA, 122 bp, Homo sapiens
tccttgcttcctctcgcgccgagcctggaaaagcgaggtgcagggtagaatctcccgggccgcctccgtgtcccggacgttggcccagctctgagtcgcggcgctcggccctggggtgcggc

SEQ ID NO: 158232 - DNA, 122 bp, Homo sapiens
gtatcgaactcctgacctagatccgcccgtctcagtctcccacagtgctgggattacaggcgttgtgtcatcgcgccccactggctaaagtttttttaaagttccctaaacaactctaatga

SEQ ID NO: 158233 - DNA, 122 bp, Homo sapiens
gaacgaaccaatgggtcccaggcagggcatggacgcgccaatgggagtgtctacaaagcccgggaacactttgccacgctgtctagaaggcctggcgggaggctcgcgcctatgaaatccca

SEQ ID NO: 158234 - DNA, 122 bp, Homo sapiens
accgaggagagggctctgccgcccccacttgccctgggtgtcgagagcccactccagacgcggctcttctgaggctcaattcaagccacccaggcctgaatccagggtgctctctctaagtc

SEQ ID NO: 158235 - DNA, 122 bp, Homo sapiens
ccttatcccttctctctcccagctgaagcggacgagtcggcgggggcgtggggggtgagacgcgggtgctagggtctccggcacctgggagatccccttcctccccgcgtggaagagccaag

SEQ ID NO: 158236 - DNA, 122 bp, Homo sapiens
ccggcgccgccacgtggaggtgtaggtccggcctggcgcggacaccttcgtgagtgggcccggcaggaagaagagtgtggtgctataggaccttgtaactcaagctaagttttgagtttttc

SEQ ID NO: 158237 - DNA, 122 bp, Homo sapiens
tgagaaatttcactgagtgtgggtgcgtcttcagccagcgagggccttcagccagcgaggcggagaagcctctttacagacacaagtatctttcctttcccatttgtctctgggtggttgga

SEQ ID NO: 158238 - DNA, 122 bp, Homo sapiens
cacaggcgccaacatacagagtttccaagcgcggtaaggcaggacaacaacgcgcgggagcggaggccgtggcgtctaccctcaagcgggagcttccgccctttcttcatcaccgctcacct

SEQ ID NO: 158239 - DNA, 122 bp, Homo sapiens
ctggatcctgcgcaccgaataggctctggcgttgcagcgggtcgtagccgtagaaattgccggggtccccgtggcacgccacggcgcacgggttctgctggtagggagccgtggacagcgac

SEQ ID NO: 158240 - DNA, 122 bp, Homo sapiens
ctcagcagcgggtgggtgagggtctaaaggcggcaattccgggccgggtgcggtggctcacgcctgtaatcccagcactttggtaggccgaggcgggcggatcacctgagatcaagagctcg

SEQ ID NO: 158241 - DNA, 122 bp, Homo sapiens
caacccccgcggccacccggggaactgcagcgccgtcaggccccccgccgcgcctgcgcacgcagaccacccggcctggcagcaccgagcgagcgtgccccctgctggtcagtcctgcgcac

SEQ ID NO: 158242 - DNA, 122 bp, Homo sapiens
tcctacgtagtatgaagcagcagctgaccaaaaaggaccagaagcattgatggcagctggcgagtctctatacctggcaaatccagtgacaaatcccagctgctctcagcagaaacaactgg

SEQ ID NO: 158243 - DNA, 122 bp, Homo sapiens
cctatgaaagaaaccctgagaatctcagaatctaaagggactgcaggagataaatgtcctcgtttttcacatagggtcaatgaggcccaaaagtgacttgcttaaagtcactatgcatcagt

SEQ ID NO: 158244 - DNA, 122 bp, Homo sapiens
atttgagtgcatccacgttaactttgtcttgtattctggaaataaggaatggccctacagcgaggaggagccacctcttcaaggtccaacagagatatacaaatggcatagtaaagaaatga

SEQ ID NO: 158245 - DNA, 122 bp, Homo sapiens
tgttgtaggtgtctctgggttttgtttggcccttagcttcatgactaattgcaccttcttcgaactcttggtatgcttggaaacctgccagagtgttttactggcttcatcaagattcttcc

SEQ ID NO: 158246 - DNA, 122 bp, Homo sapiens
gacagagtgagactccctctcaacaaataaataaacaaataaaagcagtgtgttagggtgcgagaacccgggtcggggacgcgggtgagccgcgcggtaatcgccctgtcctgccaccagct

SEQ ID NO: 158247 - DNA, 122 bp, Homo sapiens
accagaaggaagaatctccaaacacatccgaatatcagaaggaagaaactctggacacgccgcctttaagaactgtaacactcaccgcgagggtccgcggctttctcgaagttagtgagacc

SEQ ID NO: 158248 - DNA, 122 bp, Homo sapiens
gagatgcagctcactcccgtcccagaacagtccccccaccggaagcccccaccacctcagcggaaacaggcagccggacagaaagcaggttttcatgccaataatttattgaacggaggtct

SEQ ID NO: 158249 - DNA, 122 bp, Homo sapiens
caggtggcgctggacgcgcaacggacaaggaggcggggcctgcagctggcttggaggctccgcgctctggaggctcaggcgccgcgtggggcccgcacctctgggcagcagcggcagccgag

SEQ ID NO: 158250 - DNA, 122 bp, Homo sapiens
ccagactccagtcgcgcttctcgcccggcgccgccggaaagcagcctctccaacgcctgccggaaagcagcccggcccggcattttacgacgttcgcagcgctacccttttccgctccacgg

SEQ ID NO: 158251 - DNA, 122 bp, Homo sapiens
ccctgcaccacggtccgcctggatcctgcacacccagcccggtggctcctgcccactcagcggggccctgacgccctacatctcctctgtgagcaaaagctctcttgttgttagagagactt

SEQ ID NO: 158252 - DNA, 122 bp, Homo sapiens
acccgaacgcgcgctccaggccctcgaacaaggcctctggctgccagagcgagtgaggggcgcagaggcggcagagagcggagagccccggtgtctccgcgagggcggcggcggccagcaga

SEQ ID NO: 158253 - DNA, 122 bp, Homo sapiens
ggtaggcctaagggaaacatgctcagtaaatcgaaaaatctcggattacacataaaccaccggccccggcaggttagacttggtggacacgggagccagcagcgtgtcaggtgctcgttgac

SEQ ID NO: 158254 - DNA, 122 bp, Homo sapiens
ctcaggtgatccgcccaccttggactcccaaagtgctgggattacaggtgtgagtaaccacgcctggctgagaaagccattttcaatacagagtgtaaaattagatagcctctattaattaa

SEQ ID NO: 158255 - DNA, 122 bp, Homo sapiens
tagcattgctcacttagagctgggaggaaaaaaatcagccagaatcagcattatcaactccgttgcaagaaggaattacaagacacatgatttgaaaagtgtaaatgtaaaaatatcaattg

SEQ ID NO: 158256 - DNA, 122 bp, Homo sapiens
aggtggtggggatggtggggacagggtgagcacacagtccgggtccccgctgtaaggacccggtggcggggacagggtgagcacacagtccaggtccccgctgtaaggacccggtggcgggg

SEQ ID NO: 158257 - DNA, 122 bp, Homo sapiens
tggttggtgtgaaatgtaatttgacttaaactgtctaaggctgtgaaagtgtacaatattcggaagggtggggggcattaccccttgtgggagccatatttttctagaaggcattttgatca

SEQ ID NO: 158258 - DNA, 122 bp, Homo sapiens
ggctgatccctgccctgcaggaacccggtttctcgccagcgaactgctctcagaggctaccgagcgttcccgcctcgccgcaggaactcttctagctcgccctcgggctctggggaccgctc

SEQ ID NO: 158259 - DNA, 122 bp, Homo sapiens
agaaggaaattcaggaggcccacccaatccagagcccaaaagccaatacagaatcaagtgcggatttcatcttaaaatatctggatcaggcagtcaaactgaaataatgacgtgcatgacaa

SEQ ID NO: 158260 - DNA, 122 bp, Homo sapiens
tgtttgggagactagagacagttatgagcaaagattaagcagcaggtaggtctggttaaacggtcaagacctggaaactaaagttcagaattcagtaacagctttttaactttgcatttcca

SEQ ID NO: 158261 - DNA, 122 bp, Homo sapiens
accttgtgatccgcctgcctcggcctcccaaagtgctgggattacagacatgagccaccacgcccagccaagcctgttttatagatggcaaagctcagacagaagatgtccagtgatttccc

SEQ ID NO: 158262 - DNA, 122 bp, Homo sapiens
cagaggcgcagctcggcacaggctgaaccaggcgcgaaggacggcgaggcgcccgcaccacgtctgaattgattaaaagggaagccgaaaggcacggggctcccatggggaccccaacgcag

SEQ ID NO: 158263 - DNA, 122 bp, Homo sapiens
ggcagccgaacagaccatggctcagtgaagcagtccctacaagcccacgatgcaaatttccgcaaggaagagctggcagggcagtgtgcagatgggatgggagggaagaggggagggagcca

SEQ ID NO: 158264 - DNA, 122 bp, Homo sapiens
aggttcctggcccccagtggcaacggtgagagcagtggcccagaaggccagtaccgggaacgacgatggcgggcacaagggtgggcttgcagcagctgctgctggtgctcccacaggctgcg

SEQ ID NO: 158265 - DNA, 122 bp, Homo sapiens
tgttgggaactcagaggtcaccaggtcccccctccccaccccctgcaggaattctggagacgcctgggcgatcatcagtcccccacccacgcttgggctgttcccagcgcggggaagttccc

SEQ ID NO: 158266 - DNA, 122 bp, Homo sapiens
ccgctggcctttgagagagtctcactctccagctagctctttgtgtagtgtccagggccccggcagtcaggatagagcgagcaaaagaagatggacagtggacagggcgcagtggctcacgc

SEQ ID NO: 158267 - DNA, 122 bp, Homo sapiens
attggtcctgcttcctggggagcggcccggctacctgcggtggtcctgctgcctggggagcggcccagctgcctactgtggtcctgcttcctggggagcggcccggctacctgccgtggtcc

SEQ ID NO: 158268 - DNA, 122 bp, Homo sapiens
ctgcacgtcgtcgatgaagtgcctctcggagtcgtacttgaccaaggaggtgtacctgggcgggagacataagaggccgcgtgaagccgctcctctgagccgggggcttggggtccccactg

SEQ ID NO: 158269 - DNA, 122 bp, Homo sapiens
cgctgcgctccagggccgacgacggagaggctgggaggcgctcaggacgggaatccacctcgcaggtgaggactttaaaaagcgcggggcgggaggaggggtcaggaaagggttttatgcgg

SEQ ID NO: 158270 - DNA, 122 bp, Homo sapiens
taggaggcggcagcctgggctccctgttgcggggcggagtctgtggtgggacatccgagacgaagccactttactcattaggtgtaaacggcccagcgctggggcctacggacttctcagga

SEQ ID NO: 158271 - DNA, 122 bp, Homo sapiens
cttgaactcctgacctcgtgatccatccgcctcggcctcccaaagtgctgggattacaggcgtgagccactgcgcctggccaaatacagcattttataatatatttttataaacaaatacac

SEQ ID NO: 158272 - DNA, 122 bp, Homo sapiens
gggcaggggtccgagaggcccggggctgcgggcgggcgggcggttatcctccagagatcgcgcatcagcacagaacatctggactgatgttcttttaccgcgctgtccacaggcttaactca

SEQ ID NO: 158273 - DNA, 122 bp, Homo sapiens
cttggttattacacacacgtttggagcccagtgtgcagacccgcagcgcagaggaggcggcggaacaccccgggttggtcgggtttccaagggctgacccgagctccagcactttttccgcg

SEQ ID NO: 158274 - DNA, 122 bp, Homo sapiens
ccgtggccctctccttggctcccggtcaccgtcctcacaccccctggccccagttactgacggaagccatgtgcagctgccataatgtgtataaaagaatctctccctggcgttggtttctt

SEQ ID NO: 158275 - DNA, 122 bp, Homo sapiens
cattcactcattttaccctcaagagtttcccgggaggtggacagaggctgaagaactctgcgtgtgacagacggacactgagggccctgcggcccccgccagcccttaccaaaaccctccaa

SEQ ID NO: 158276 - DNA, 122 bp, Homo sapiens
tcctgccagcttctcaggaaagcccaaccttggagggacccttcctctgcgaggaggcggcgagtgagcgtgggtgtgtgtgcgtgctcaccacacagttggcatcctgtggggcagctcag

SEQ ID NO: 158277 - DNA, 122 bp, Homo sapiens
actgggtggagggggacgaggcagaggggtcggccgcggaggggcaggcggtgcccggctcgcggaggtaaggctgcctcccgggcctggtggaggggtgatagagagaccccgggcccgag

SEQ ID NO: 158278 - DNA, 122 bp, Homo sapiens
gaagagaaagggaaggagagtctccatcctcccacgtggggacacgtctgctgaaggatgcggggttgaatccccttcagcctctcgtgaatttctgtcttagggaaggagaatctccatcc

SEQ ID NO: 158279 - DNA, 122 bp, Homo sapiens
tcggagcctagtcgggggtgatgtggcttcaagggggttgggtcaaggctgagctctggccggtgcctggtagtgctgcaggctggccctgggactcgctggctttgggcaaaggggccagc

SEQ ID NO: 158280 - DNA, 122 bp, Homo sapiens
ccccgagggcctcctcagcagccagtatagacagagaccgagcagcaggaaatccattagcgagaatctttccagagagactggagaatgtccattggaagcgctcggtcagaaatctacat

SEQ ID NO: 158281 - DNA, 122 bp, Homo sapiens
cgaagggcgattaacattcgctcgacaaaaccctgtcccgggccatttgggagttgcacgcgttcacacccggggctcagcccggtgcgccttcacgcgcagcctttttgtttatgcggcta

SEQ ID NO: 158282 - DNA, 122 bp, Homo sapiens
gtagaagcgagtggcctcgaaggctacgggacgagggtggcgggtgaccaagtgcaggcgcgacgggtcagggaccgggccgggccgggggtgcgggcgcgcgggcctaccgggttcgtagt

SEQ ID NO: 158283 - DNA, 122 bp, Homo sapiens
gcatgtccatgcctgcgttacaggataaacacatttacccagcaccgactgtgtgcctggcggccggggctccacaccctgagatctctccctccctggtgggcaagaaagacaatgagcag

SEQ ID NO: 158284 - DNA, 122 bp, Homo sapiens
aatgcttacagctcctgaagccccagtgggcgtgtgtgacgggggctctttcagttttgccgtctgtaggcggcttgtgttcatcagctctattagaccttctgcctcatcacaagcacaga

SEQ ID NO: 158285 - DNA, 122 bp, Homo sapiens
cattccctgttgctgcttggacaaaatctctactgttagagatctgtggactgctacagccggaagggactttaaagatgtacagtagaaacgcccattttgcagaggagaaaactaaagcc

SEQ ID NO: 158286 - DNA, 122 bp, Homo sapiens
ggtcgggggccagggagaggcctagttgcgtcgaggggggcaagcgcctggaggacccggcgcccgctccaggccctgcccctccaagtcccccgccccgcgccaggccccgcctctccagg

SEQ ID NO: 158287 - DNA, 122 bp, Homo sapiens
ggaggctgagacaccagaatcgcttgaacccaggatgcggagcttgcagtgagccaagatcgtggcactgtactccagcctgggcaacggaatgaaactccatctcagaaaaaaaaaatttt

SEQ ID NO: 158288 - DNA, 122 bp, Homo sapiens
cggccccaccatcgcaggtgcgagggaggctggcccccagcatggcaggtgcgagggaggcggccccaccatcacaggtgcgagggaggccggcccccagcatggtaggtgcgaaggaggtg

SEQ ID NO: 158289 - DNA, 122 bp, Homo sapiens
aattgaattcctgggggttgatttctcatggtaccttccacctctttgtgcctgcacctgcgtgtgtttattgctctactttactgccggtggctgctcttgtgtctgcattgcaatggccc

SEQ ID NO: 158290 - DNA, 122 bp, Homo sapiens
caccagtctggagccctcccagccacggaactgcctggcacttggatgtgggggttcctgcgtcccagcctcacaagaactgtgagaaatccatttctgttgttaaaaccacccaggccatt

SEQ ID NO: 158291 - DNA, 122 bp, Homo sapiens
ggacctacacacaaaagtgctcccggccttaccaaacaacgcagacccggggtcacgcctcgtcctgtttcaacaacaacacccaagggcttccctggagcccagggcgtgggagggagact

SEQ ID NO: 158292 - DNA, 122 bp, Homo sapiens
cttttattttccattccctggtgtcttcgtcccctcccagccagggtcatggctctcagacggatggccacagtgctggtgaaagacagagggattatttcatacactagggcactagctgt

SEQ ID NO: 158293 - DNA, 122 bp, Homo sapiens
gaacccgggaggcagaggctgcagtgagccgagatggcgccaccgcactccagtctggtccgtctcaaaaaaaaaaaaaaaaaaaaaaaaaaaaaaagtagactaaatagcttttgcaaagc

SEQ ID NO: 158294 - DNA, 122 bp, Homo sapiens
ttcatccccagaatacagttaaagtagaagcaccttgacattttctaggatttaaaatgccgtttcttttctgttattctctccacttctggcaccatcctatagccctaaatatacagttc

SEQ ID NO: 158295 - DNA, 122 bp, Homo sapiens
gcgcgtctgagcgccagttgtattctgcctgctgcaccatgcaaatgcgctccttcagcccgcagacactcctctgcggccgggtttcttcttaccccctttgcacaggtgtgaaaaccgag

SEQ ID NO: 158296 - DNA, 122 bp, Homo sapiens
attaaaacaacgcatttgaaaaaaagaaaaacaagcaagtttctgagctcaccctatacccgctgaacagaatgactgcggtggcgccccagaacctctcacaggcctctcagctgctgcta

SEQ ID NO: 158297 - DNA, 122 bp, Homo sapiens
aaatcaatcaggtgcaaagggttatttacacaactgatagcttcctgcctcagatagtcacggcttcttttaaggttgctgaagcaaacactttgcttaatatttgaacctagagaagttga

SEQ ID NO: 158298 - DNA, 122 bp, Homo sapiens
gggtggggggcgtctggcctgggggagcggctcctgccggccgcgtcctcggccctcgtgcgtgagcagccccagaacttggcggggccctgcctgactccccgtggcagcgctgggcaaag

SEQ ID NO: 158299 - DNA, 122 bp, Homo sapiens
caccttttatctacttctttctctaatcctggtttctgtggggtttgtggtcacagtgttcggagtaatcatattcaaagtttacaagtggaagcagtctagagacctataccgagccccgg

SEQ ID NO: 158300 - DNA, 122 bp, Homo sapiens
tgtgcgctaaggccaggtgagctcgttggccctggggaagggaggccaagccgccgcccacgggttctggcctggggcaaacccaactgagaactttgggcttgcctcgttctggaagcttt

SEQ ID NO: 158301 - DNA, 122 bp, Homo sapiens
cacttcccgaggaggaagtggtgccggaatttcccccaggtgtggcctcaggtataagagcggctgctgccaggtgcatggccaggtgcacctgtgggattgccgccaggtgtgcaggccgc

SEQ ID NO: 158302 - DNA, 122 bp, Homo sapiens
ttctacacattttaattggagggctttcaaatattctagacttagaatgcatattaacctcgtgtcttctcccctacagaccacatttgggtagtttttccatgctcttgattcttttgttt

SEQ ID NO: 158303 - DNA, 122 bp, Homo sapiens
gtctcacccaccctctccacccacctcccttccctcttcacaccctgggcccctggccggcgctaggcacagccatttgcacacagagaagaaataggaggcttggtggtctgggagcccgg

SEQ ID NO: 158304 - DNA, 122 bp, Homo sapiens
cgtgatccactcgtcttggcctcccaaagtgctgggattacaggtgtgagccactgcgcccggccccccaaaaaaatgttttttatatcagctgagcgtagttgcttgtgcctatagtctca

SEQ ID NO: 158305 - DNA, 122 bp, Homo sapiens
cgcccgcggggacgtgcaagaccccccggcccacgcccccacggacactggggagacatccggggagcactgctaagccatccacctgtcagcctcaagtccaggaggaaattctgtgatag

SEQ ID NO: 158306 - DNA, 122 bp, Homo sapiens
cagttgacaatttgatctccagaggaatagatagatacagacggctttataaggtcaatgcggcaagaaaggtgtaaacctgtaaaggttggtaccattaaagcaaaaccaaaagttgagaa

SEQ ID NO: 158307 - DNA, 122 bp, Homo sapiens
tttgttttttggcctcatatataatctaacctggagaatgttctgtgtgcagttgagaagcgtgtgtattcttctactgttggatggatgttaggttcatttgatctagagtatagtttaaa

SEQ ID NO: 158308 - DNA, 122 bp, Homo sapiens
catgcttcgaagttcactgtgggaagggacaggtccccagagagaggtgagacggtgcaacgcgagggtgagttcggagtcatcctccagatgtccacaaaggctcgagaggccctgctgtg

SEQ ID NO: 158309 - DNA, 122 bp, Homo sapiens
actgccatctgggagacccggctaaaggcccaaccctggctcttcgacgcccccaagttccgcctgcactcagccaccctggcgcctattggctctcgggggccacagctgctcctgcgcct

SEQ ID NO: 158310 - DNA, 122 bp, Homo sapiens
aaccacttcaacaaacataacatgtggcaaccaatcaatctgggtcacaaaaagccaatccgtatattgtaaagccttacacagtattaggttccaaagtgttggcgcagatgaaatggctg

SEQ ID NO: 158311 - DNA, 122 bp, Homo sapiens
ggccttactccagagcgcagtgattagcatatggcgggggcaacctgagcaaagcgcatgcgcgcagggactgcagactgacgcgaagtgggtagccttgtcttcgtaggggatcagtttgc

SEQ ID NO: 158312 - DNA, 122 bp, Homo sapiens
tttgagtgtgtgcttggccctgcgactgcccccgaaccccgcgtcccgttgcggggagctcgcctgtgccccacggtttctgctcagcaagtgttggctctgtaaaccgatgacttagggtt

SEQ ID NO: 158313 - DNA, 122 bp, Homo sapiens
tcctgggacccttggggcagggagggaaccccttcgtagaacaccccgctctgagaaacacggaagatgcattatgtgatttcacactcagaacacttctaggtgatgggttaaaagccgca

SEQ ID NO: 158314 - DNA, 122 bp, Homo sapiens
tggtgctgggcggggcgtcagggggcggggcttcgcgtcgggggcggaacccagtgagcccgcgcagggggctcggcgctcggaatgcccatcgagggccgggactgtaactcccggacgtg

SEQ ID NO: 158315 - DNA, 122 bp, Homo sapiens
actattatagtaccgtgtgttaactgttactgaagagatccacacaggctgctgagcagccgcaaagattatggcgaatttacactctacatgagaagactggacatatacagaaaaagata

SEQ ID NO: 158316 - DNA, 122 bp, Homo sapiens
tgtggctgtgaagggagaagaaggggccctgaggcttaagacgctggtaaagatgggaaacgtattctcccctggagcccccagaagggcccaggcctgcccacagctcgatggtgagccct

SEQ ID NO: 158317 - DNA, 122 bp, Homo sapiens
gctgggagtcattgattcctttccactgtgctggtctgtccggctcagtgcctctcaggccggccttgggactcccttgctattgtgtgagaacttttcgaaagctcaggaacaacacttgt

SEQ ID NO: 158318 - DNA, 122 bp, Homo sapiens
ccggcaatcggcacgggcaggatcggaggactcgcggaggaggaagccagtgccggcccgcggggtgcacgcccagccagcccccaggcccagccctgcctctggccggacccaccacactt

SEQ ID NO: 158319 - DNA, 122 bp, Homo sapiens
cttgccagaagcaggatcttagccctctccagcttcctttgcagttgcttcagattgagtcgaaatcttcggtcactaggacttgaagcttctcttctagttctgagttcttctgcttccgg

SEQ ID NO: 158320 - DNA, 122 bp, Homo sapiens
gcaaaagtttttgaacagccaacagccttccagaaaggctgtatcaattataaacagcagcgtatttgtgtgtccctacttcaccatacccctagcaactctatgaattattattattgtta

SEQ ID NO: 158321 - DNA, 122 bp, Homo sapiens
tctctactcaccagcccggctgggggaacggtgttgtcacggcaaagagcgggtagccctcgcccctggtccgggggatcttcaacaccgggaagccgcagctccgggcggggagaataata

SEQ ID NO: 158322 - DNA, 122 bp, Homo sapiens
tcctgacctcaagtgatccgcccgcctcggcctgggatcacaggcgtgtgccaccgcgcccggcctagaggcaattttctatttctgacttgttaggctagtcagagcgagacgtctttaca

SEQ ID NO: 158323 - DNA, 122 bp, Homo sapiens
ggggagagctcccctcaccccactgaggtcactgtgcccagaggcagagcttcctgggcacgccaactcctgcatgaggcaggtggtacctggagccagaccatgggtctggggccctgacc

SEQ ID NO: 158324 - DNA, 122 bp, Homo sapiens
gtggcctccactctttgttacctaacagttgtcagagaaccatcaaagggagggaacaggcgcccttctcagaaccatcacaggaaaagcagacattctctggctgctgcagatccccccgg

SEQ ID NO: 158325 - DNA, 122 bp, Homo sapiens
tggtagggggaggagtttgagttaaatcgcatcgcggttgacagaacaaaacaggagctacgagtcaggatttctgctcccactcccttgcaagtttccttccaaatcctgagggagagata

SEQ ID NO: 158326 - DNA, 122 bp, Homo sapiens
gctgtctgtataactaataaactatctgactgcatttgggcctgcttactccttactaggcgagtgtctgtggaagtcttgcaagccatcccgaaaggtgtagtagtaatacttgtggccct

SEQ ID NO: 158327 - DNA, 122 bp, Homo sapiens
cgcttgctcttggaatccttccagtatatcaacttggtaaatatagagtaaggagaaatacgccactgattacagtgccacagacagcacttggctgtccagggtgcacctggggcaggaga

SEQ ID NO: 158328 - DNA, 122 bp, Homo sapiens
accggaggcgtggggcacacagaagagaggcttcgccatggggcagcccgaggcacatggcgaggccagggccagacctgcaggcccccgacaccccgacagggattctgacgcctcggttt

SEQ ID NO: 158329 - DNA, 122 bp, Homo sapiens
aagccccataccacttggtcccggcaggagtatgacagatgcttcgtaatgcagtctgctcgaggcatgggctgcagcccggtccctgcgtcctacagagacaccgtccacgcggtgcccgg

SEQ ID NO: 158330 - DNA, 122 bp, Homo sapiens
gccatggaccccgcgtcgtccggcccgtccaaggccaagaagaccaacgccggcatccggcgcccggagaagccgccctattcctacatcgcgctcatcgtcatggccatccagagttcacc

SEQ ID NO: 158331 - DNA, 122 bp, Homo sapiens
gccggggaaggtggggcacccccagggggctgccaggagctcgggggcctctccaggaggcgcgtcggggtcgctgcgggccgggaacgtccggcctcgggcctcctcagggcaggcaccgg

SEQ ID NO: 158332 - DNA, 122 bp, Homo sapiens
tatacgtacacatgtgtttataattttctgcatatctgtaggtacagtcatatacgtgcacgtacagtatgtgtgtaaaaatgcgtgcacacacccacttagcaactggggaatcagttgtg

SEQ ID NO: 158333 - DNA, 122 bp, Homo sapiens
gaagttgactctcgtctggctcctccggggtgggggcagggcgcgtgcgtgaggccacgtcgttcctagagccaccccccatgagccttgacagccaggtcccctaggggacccgccgccca

SEQ ID NO: 158334 - DNA, 122 bp, Homo sapiens
atcttctggctgctacttcatttttgagttttattttgacataaaagaggcactgctccacgcttcagtttttgttttcttcttttttctccactttaatctacattctccttctgcctctt

SEQ ID NO: 158335 - DNA, 122 bp, Homo sapiens
catagtctctgcacacgtttatgataaagaatactgtatttggccgggagcggtggctcacgcctgtaatcccagcactcggggacgccgagacagggcgatcgcctgagctcaggagttcg

SEQ ID NO: 158336 - DNA, 122 bp, Homo sapiens
ccatcagaatgtctagccctgaaaagaaaaccaggccgcacttcccagacagggggaacacgctcccttgcacttccacgcatggtgctaaccctttggagacaacctgatcagttcttttt

SEQ ID NO: 158337 - DNA, 122 bp, Homo sapiens
acacaggccctgcccgtaaggagtttgtactctagttgagaaggcacgatagagaggcgtcgggaatgacataagcaagccccggacctgagcagcgatgggagggtgtcttgcagtccgtt

SEQ ID NO: 158338 - DNA, 122 bp, Homo sapiens
gcccctctggggaggcagcctggcatctcacaggcggccggggctcccgggaagcagagacgggctgtgccagggctcctaggcccaggcctggacccagtgccgtgccagccaccacccca

SEQ ID NO: 158339 - DNA, 122 bp, Homo sapiens
cccaggcctgccaggcctagcatgtcctgcctcctcccctagcttcatctgtggctacttcgccttcactcttcagctattgtaggaccatttaggggactgtgtcccctaaaaagatatgt

SEQ ID NO: 158340 - DNA, 122 bp, Homo sapiens
gcacataaacgctgtcaccttggtatccacctgccggcattagcattcccaccaggttctcggccccctgctgtggggctaccacagtcagtgtggcattggctgccggaaggccctgggtg

SEQ ID NO: 158341 - DNA, 122 bp, Homo sapiens
cggcctggcggtgggggtggaccttcctggggtggagcccgcggctgtgggagcagggcccgccggggctcgggcagggcggtgggaaggcggggccttctgagtgggggcggggactgctg

SEQ ID NO: 158342 - DNA, 122 bp, Homo sapiens
tgcaagtgttcaaatgtggaatgggcttgctcggaaggtactgtcaagacagagaccatccgagggcttttattgcaagtgtcgagacacattgctggtgtttctccttagaacgtcctcca

SEQ ID NO: 158343 - DNA, 122 bp, Homo sapiens
tccttttggggaaacctacaggttggtggggttctctacactcacttttcagtgactcagcgctggacatttggtcggttggtgcatgagaagctgagctttaagagcatttaacattcttg

SEQ ID NO: 158344 - DNA, 122 bp, Homo sapiens
tgctgctcgcggatccggcgccagccaggcgggaggaggctgagggggggtaaagggaggcgggaaggggggacaggaaaccgctagccggtgatttaaatttcaggaaatatgagtctttc

SEQ ID NO: 158345 - DNA, 122 bp, Homo sapiens
cgtgccccaccccagatcctggccaaggagaccaacaggtctgtgccgaggaggctgacccggagctggagcccgcgtcggggggagagcaggagccgcggccccagcaagcccaggtaggc

SEQ ID NO: 158346 - DNA, 122 bp, Homo sapiens
ggggtctccgcggcctccccagccacagtccccgcccgctccgcgccctccccgcggggtcgatggctgggggacccggctccggcccaagccaatcagtccttcctgagcagcgtgaggtg

SEQ ID NO: 158347 - DNA, 122 bp, Homo sapiens
agcctgcaagcatgtccccggggaatggcagctgggctgacccagacaggagacagggaacggagccgtctgaggccagcttataaaaccatgccggcctgacctcagcatggtccccgagg

SEQ ID NO: 158348 - DNA, 122 bp, Homo sapiens
gcgggttagtggtggtggtagtgggttgggacgagcgcgtcttccgcagtcccagtccagcgtggcgggggagcgcctcacgccccgggtcgctgccgcggcttcttgcccttttgtctctg

SEQ ID NO: 158349 - DNA, 122 bp, Homo sapiens
ggaactcattcggggacgtccgggggtcgggaggaggtggcggcgagcggagtgggctcccgtttgctgccgccagggcctgggagattgttccgctttctgcagtctgagcgtcggccgct

SEQ ID NO: 158350 - DNA, 122 bp, Homo sapiens
aagccccacaggccagctcaactatccaattctagcttgttaagaaacccctggcccctgcgtaacgagccctgttcctcttttctgtcccgcagtctccaacctgtcccagtatttcagcc

SEQ ID NO: 158351 - DNA, 122 bp, Homo sapiens
gaggtgtggagggagaggcgtgggcgggaaccagggctgcgcccagcgcttgctgaccagcgcgagttccgggtgggcgtgggctcggcggaccccgcactcggagcagccggccggcccca

SEQ ID NO: 158352 - DNA, 122 bp, Homo sapiens
agacctgtcggccgtgaggacgatcagcagctggggcacaccttctgttatcctgcttcccgcagagctgaccaggatgttcctcaggacaaactccagggcggccccggtgttgggggtcg

SEQ ID NO: 158353 - DNA, 122 bp, Homo sapiens
gccctggggctccggaaagcagaccacgctttatgggacacgtgcaaacaggaacaggggcgaatccgaggtggagaccatgtgaccacgcgtggcactggcgtatcccacagcagatggtg

SEQ ID NO: 158354 - DNA, 122 bp, Homo sapiens
gggtgctgacgtgctgctttcccacaggtcccattctgtcacacagactccaggagaaggcggcggcggggggcgctgggccccctctgcgagaccaggcctgtagcagacgcctcacctgc

SEQ ID NO: 158355 - DNA, 122 bp, Homo sapiens
aaatatttgttaaatgtgcatgtactgagctaccgatatctactatatctgtgtatacagcgatagctatcaaaaggagagacgtcctctaaatctttgataaaagtatgtcaaaatggaac

SEQ ID NO: 158356 - DNA, 122 bp, Homo sapiens
ctgtccagatccagggctcacgagaaaaacgaggacgcaggagagccacacgccaggacgcgtgtaaggccccaacccggccccagcctgggccctagacccctaagaactacaaatcccag

SEQ ID NO: 158357 - DNA, 122 bp, Homo sapiens
tgaccgctgccaactgcagctcgcgctgcctcctgctcgcgccgtgccactaaggtagtccgcctttctatgagccctccccaagattagctgggtgcggggtggtgggagccgttctttgg

SEQ ID NO: 158358 - DNA, 122 bp, Homo sapiens
gcccagctccccgttgtacaccccaggcccaccttgatcttggagccggcggtgctggggcgccccttcttgtctccatccagcttctcggggaagagcatccggaggaaggccctgggtag

SEQ ID NO: 158359 - DNA, 122 bp, Homo sapiens
gaaaattgcctctgaataatgaatgatgaaagcctgacgccgtgcccctcctggcccatacgccttgccagggcggcaggattgtcacaccgttttaggactctgtgccactttgagagact

SEQ ID NO: 158360 - DNA, 122 bp, Homo sapiens
ctcgcccgcaccgcccccagagccctccatgcgacgccgccagctgcctcgccccgccgccgggtcacctgtcccagaacccagggccgccgcccttctcgcgagactgccgggcctgagat

SEQ ID NO: 158361 - DNA, 122 bp, Homo sapiens
gaccggcgtggaaggcaggggctgcaggtactcggggtgcaaaatgtggccagttcgtgccgtcagcatcttcagcaccttgattggcaggcggttggcctggcgcagggggtcagaggggg

SEQ ID NO: 158362 - DNA, 122 bp, Homo sapiens
aggccgccacacgccttgcgcgcttattggacattgcccacgccgttctgcaggagggcccgcccttgtttgtctgagacactccttataggtggtcgctttctgccagtctttccgtcgac

SEQ ID NO: 158363 - DNA, 122 bp, Homo sapiens
ggcccaaagaggcagggatccttgaaaggggaggtcgaggcactggggtaaggaaaaaaacgacgaggcagagcagaggccttggcccctggcccccgccacccacaacatgccacgcatgc

SEQ ID NO: 158364 - DNA, 122 bp, Homo sapiens
ggggttctgcaggcagaagggtgggaacgcaaggcaggtgccacgctcaggccaggagcccgtgccaccatcccagcctgtcctggtgagccctgcccagccccttacccgagtggcctggc

SEQ ID NO: 158365 - DNA, 122 bp, Homo sapiens
gtggagaaggggtagacctatcaagtccttagatctcattgccattgatcctattgataacgtaaaaccgtaagatgctttcacaaaaactgcagtcctgacttaaacatagttttcagatc

SEQ ID NO: 158366 - DNA, 122 bp, Homo sapiens
acgtccataacgctccggatgtcctgagtggagagagttgtgtttattcaccatgtcatacgcgcatatagggaacctctatttaggagctggtggcctgcactcagcaccgcacagataaa

SEQ ID NO: 158367 - DNA, 122 bp, Homo sapiens
tgcagtgtttgctgccggcaggatgagcccagttcccaggccagcaccagaagaaggcagcgcatgggagctcacggacaaggcccaggaccggtgtcctgaggggcagggcctgggtagga

SEQ ID NO: 158368 - DNA, 122 bp, Homo sapiens
ggctcacgctgcgcacaagtaaggaagccgtttctcagagattatgtgaattgctctcagcgcagttttagtcctgaggatggaagaccaggctcgtgtgtcttgtgttgtcttcgtctgtg

SEQ ID NO: 158369 - DNA, 122 bp, Homo sapiens
ccttagctaggaaagggaaatcccccaatctcttacacttcctgggtgaggcgatgcccccgcctgcttcagctcgccctccttggactgcacccactgtccaaccagtcccagtgagatga

SEQ ID NO: 158370 - DNA, 122 bp, Homo sapiens
ttgcagcaaaccacttcaagagggagggaataaagcctgcgcttgtttctctaccttaggcgaaggtgacattttggaatttaacttcatagggatttaaaagaaattctaaactgtcacct

SEQ ID NO: 158371 - DNA, 122 bp, Homo sapiens
ctcccggtatcaccttcgaacgcgctggccggccccctcctagcctggtgcagtcggctccgcttctactcagtctcgggtcctcctgggccaacgcagaccctggtgcctccttccttaga

SEQ ID NO: 158372 - DNA, 122 bp, Homo sapiens
taatttatgtcacaacgtaaccaaaatggagtggggagggccctaaggaagcagctgtcacgcatttctgaaatgccagagaggctcgctattaccttgtaaacagagcttattccgggcat

SEQ ID NO: 158373 - DNA, 122 bp, Homo sapiens
tttttgatgaaaatgaactatccctgggttgtggtttgcatagatttgcaggagaccagccgagatagcagatgaatgtagtggctgagacctaattctctgattggccaaggtacaagata

SEQ ID NO: 158374 - DNA, 122 bp, Homo sapiens
tataggaccccggccattggctggcgacgccggtgtgtcaggggtgtgtgggcaggacctcggggcggggcctggggcccagcctgtcctgggcggcgctctgcggggagggggtgagggga

SEQ ID NO: 158375 - DNA, 122 bp, Homo sapiens
tggccctcaccccatcctgcacgtccggcacgcggggcatggcgtcatacagcgacgagacgtaggtgatgatggacttctcgtcgggctgagggacatccacgtctgcagggaagggcagc

SEQ ID NO: 158376 - DNA, 122 bp, Homo sapiens
ggtgccaggctgggcggaagcggcgctttcctctatgttgcaaatcaagggacccctcttcgcttcccgcaagcgggcaacggggtgcaccggtagccggaaaggggcgcccgcccggagcc

SEQ ID NO: 158377 - DNA, 122 bp, Homo sapiens
tatctgcccaggccagtaaataattctagtatctaaatagtctaaattatctgaacaaaacggaatattattaccttttaaaaagaacagctttattttctatttatttttttcatagaaca

SEQ ID NO: 158378 - DNA, 122 bp, Homo sapiens
aatactagggcagcaatcagctcagtttgacagcactcaaataactctgagccactgccacgtaggaaggcagaagtggtcccaggtttcacacagcctgcaaagcaaatgggatgagagca

SEQ ID NO: 158379 - DNA, 122 bp, Homo sapiens
gcagggtgagactggggaccaagtgagcccaagggctaagatgcgactctgctgggctcccgggagcctggggggtgcccatcccccaccacttgacggtagtcgggggtgtgggcggggtg

SEQ ID NO: 158380 - DNA, 122 bp, Homo sapiens
tctcggctcactacaacctccattcctgagttcaagcgattctcctgcctcagttccccccgccaccccaagtaggtggaactacaggcccacaccaccatgcccggctaatttttgtgtct

SEQ ID NO: 158381 - DNA, 122 bp, Homo sapiens
ggcccgcctcgcgactcaaacactctgcagggaccctcctaagatcaaattggttccccccgctgtcctaagccagaggcttactttcagatcgcatgaacgcattcctggacaccagccac

SEQ ID NO: 158382 - DNA, 122 bp, Homo sapiens
taatcctgctaaaaactccactgtctcagcccacataaatgaagccttcacttcctacttcggaaaactgactccatttcttcggagttggtgtttctgggtggcctacctcacactttgta

SEQ ID NO: 158383 - DNA, 122 bp, Homo sapiens
aggaatcactgcaaagtctgtgtccttcccactctgagtaggacttgaaccagggatgtccgatgctgatgcttgtgtcctgaccactaccttgcagcgtcctcacccacacccaccccagg

SEQ ID NO: 158384 - DNA, 122 bp, Homo sapiens
cgtgctgttcagggtgacagagcgctggcggctgccgcccctggggacccctgtcccgcccgccctctactgccaggccacgatgaggctgcctggcttggagctcagccaccgccaggcca

SEQ ID NO: 158385 - DNA, 122 bp, Homo sapiens
tgaggaaggagaaagccttctgggggtaggaccctcttctgatcagccttctcccaccaccgccaggatcctattccaagccattaccccacggtttacagaggcactgccatagtctcctc

SEQ ID NO: 158386 - DNA, 122 bp, Homo sapiens
ggggcggctggggaggcgaggggcgggccggggcggagaccgggaggcttctcctcaggccgcacctggccgagtcgactgatccgctggcgaaccaagtagatgttgggcgccatactgcg

SEQ ID NO: 158387 - DNA, 122 bp, Homo sapiens
ggcaacagcggtgcggacagagggtgcggggcagaggcacggctggtccaggagggagctcggtgcagatgcagctgccttacacactggacccccaggcagcagaggtggaggcctcccct

SEQ ID NO: 158388 - DNA, 122 bp, Homo sapiens
tctccctccacccagtctcagctgcaaaggcccgctctgcgaggagagcgggtgagggggcggacacgctcacacacacagacaataactgccatggaaactaaccaacaaaaagaagattt

SEQ ID NO: 158389 - DNA, 122 bp, Homo sapiens
cggcctcactcgagcaggccccgccctcccagaggcagttagtccaagtcacgtgatcgtcgactcagctgaccctgcgggaccggaaaaagaaattcccgggccctggcttcttggcgcga

SEQ ID NO: 158390 - DNA, 122 bp, Homo sapiens
ttatcagactcaaagtcagtcatgctgcagctgagaaaccctgctctatgttaaattcagcgatccccagaaagcctggcactaggcttccctggccagtgactggctttctggtgtgtaga

SEQ ID NO: 158391 - DNA, 122 bp, Homo sapiens
cagctgtcgctgttcgggaaggcctggtcactggagcagtccttcttttgctgagagcctcgcgcagcagcggtaacggcggtcggctggcgccccctgccccgcttttcgcggccgccatc

SEQ ID NO: 158392 - DNA, 122 bp, Homo sapiens
ggcctcttctctccatgagatgaagaaccgttgctagatgccaagcaattcaagtgctaacgtcttcaaaatgcccactacttcccttctcccaggcctctgcttatatggttccctttggc

SEQ ID NO: 158393 - DNA, 122 bp, Homo sapiens
cttctgcctccctcagaagcctgggctgcacagcttgggctgctagctggcgcggggccacgcgcctgtctgtactgcccagccgccgggagtgccagtcacccagtgctctgctctcctcc

SEQ ID NO: 158394 - DNA, 122 bp, Homo sapiens
caggtcggagtggctccccgcggcctaaaggcccggtcggccgagtctgaacagcagctccgcatcctccaagcagaggccctgaagtgactgcattttgagtctctgaaatttggaagaaa

SEQ ID NO: 158395 - DNA, 122 bp, Homo sapiens
ctctgcgtccccacctgatgacaagctccggggagcaggagtgctggccaagcccacgcacggaccaagcccacgtcagactccgccagaaaggcaagaagggcctccgcatggcgtgacgg

SEQ ID NO: 158396 - DNA, 122 bp, Homo sapiens
tcagtaaataatgtcctcgaccttcccccaaaagcccagaggctgcctcctgtgagtaaccgatgaaacccgaggcgctcctgtagctcctgggctgatccctctccaggagatgacttgga

SEQ ID NO: 158397 - DNA, 122 bp, Homo sapiens
cgggctcaagccatcattccgcctcgcttcccaagtagatgggacttgcccggcccgaagcggaactactgagtttccttattttggaggcagtaatcaaataaaaaataccaaaaccttaa

SEQ ID NO: 158398 - DNA, 122 bp, Homo sapiens
tgagctctggacctgcctcctaaacatagggctgcctgcttcgttcatttccacacaccacgtgcctaggcccagctggggctggcatacaaattgggtggcccggctctgagctgctgctg

SEQ ID NO: 158399 - DNA, 122 bp, Homo sapiens
ctgtccggtgccgcagtgagttgggtggcggtgatttgttcgcgggcgcaggctgggaggcggggttcctgactcactgcggcactggcagggctggtgacagcaccacccccgcgccgcct

SEQ ID NO: 158400 - DNA, 122 bp, Homo sapiens
ctcccaggttcaagcgattctactgtctcatcctcccaagtagctgggattacaggcatgcgccaccatgcctggctgttttttgtgtgtttattagagacagagtttcaccatgttggttg

SEQ ID NO: 158401 - DNA, 122 bp, Homo sapiens
ggtccgcagcgcaccggcctcgcggcccaggatgaagcaggcgcgagcctcgagcagcagcgggcggcactcgccgcaggcctgcagcagctcgtccgcctccaccttctccaggaagtaag

SEQ ID NO: 158402 - DNA, 122 bp, Homo sapiens
tcccgagacgggacaggcgagcggtggccgcgccacccggtcccagctgccctggacacccgcaggtcatcgcgcagcatcagaacctgctactggccaacaccacctccgccttcccctac

SEQ ID NO: 158403 - DNA, 122 bp, Homo sapiens
ctgagggcttgggggcagctcatcagtcttccgcaatgggcctgctcgctgtgagatcttcgctgtcttgtggctgagctggagactcaagctagagtgcaggagggaccacccgcgtccga

SEQ ID NO: 158404 - DNA, 122 bp, Homo sapiens
tccttcacccccaccctggtgtcctctcctgaaggacagacggtcacattccaaaatgggcgagtcttctaccgtgtctgttcaactgagaagaaaacgtagcatggtcagaataaggcatg

SEQ ID NO: 158405 - DNA, 122 bp, Homo sapiens
cttgaactcctgacctcatgatccacccacctcggcctcccaaagtgctgggattacaggcgtgagccacggtgcctggccttttccagcctatttttaaacactgccaatcgtataattag

SEQ ID NO: 158406 - DNA, 122 bp, Homo sapiens
agggaccaccgcggccaagatggaggtgggtggccgggggtcagcacagtgtcgagggcccgactccccacggaattgagtctcggggagggtggggacgagggcagggtggggtgagcggg

SEQ ID NO: 158407 - DNA, 122 bp, Homo sapiens
gcgagggggagtgcgtgcctccctgctggtggcccgagggtctgcaggtgagccttgcctcgcggcccgcgcaagttaaaataaatgcacatggggaaaatgtcaaacagtacaaaaataga

SEQ ID NO: 158408 - DNA, 122 bp, Homo sapiens
gctggtgacagaggctaacttcagagaaaagctagccccgggtgggaggcaggatcctcgcgcggatagcaaggtattcgcaccctcggtctgcactgcgcagtcgggcgccagaaaccctc

SEQ ID NO: 158409 - DNA, 122 bp, Homo sapiens
ccagtcagcgattagaggccgagtcttcggccacccaaaggcggagtaagaaaccagaagcggatctgattggttgctggaagacgccgcgcccacctcacagaaggacgaaccagtgagct

SEQ ID NO: 158410 - DNA, 122 bp, Homo sapiens
ggacacctgagcgactttccgggccagaggccccaaggtgcatcggggcagagccggaagcggacgctgaaaactggcggctccttaatggttccggcggcagggaccgcagcgacgccctc

SEQ ID NO: 158411 - DNA, 122 bp, Homo sapiens
acatgactaaagagttcttcctctccacaaaacatacatccacaccaaagaattaggacgcggcaagaacacaagaactctgaagctcttactgtataaactgcagtccttccttaatgttc

SEQ ID NO: 158412 - DNA, 122 bp, Homo sapiens
tataccaagccaccagctcaggtcatttatatgcttaatttagtgataaaagtcaataagcggaatcacagggttcttccctctttctatttcttttgaccacatttttctacagtaattgg

SEQ ID NO: 158413 - DNA, 122 bp, Homo sapiens
ctgcccaggtaacccagacccactgttctggaaagaggcccggagggctcccagggtacccgcaacccacaccgtgagctcaggaaaaggacgcagggaggccccggccagatggctggaag

SEQ ID NO: 158414 - DNA, 122 bp, Homo sapiens
ggaggctgaggcaggagaatggcttgaacccgggaggcggaggttgcagtaagcagagatcgtgccattgcagtacagcctgggcgacagagagagtctccgtcaaaaaagaaaaagaagag

SEQ ID NO: 158415 - DNA, 122 bp, Homo sapiens
atctcctgtcatgtcaagagacgctgatttcaaagaaacgtacgtttcgcagaatcaatacgctgtggggcctcagaaagctgaggcagacacacggccccgacccgtgcacgtgggagccc

SEQ ID NO: 158416 - DNA, 122 bp, Homo sapiens
taactaaataaggctacaacctcacatggggactggcgccaggctgacacttggagtaagcgaagtgggagggaagaagaaaaacaacacagggacagtgataaatgacaacagttctgcct

SEQ ID NO: 158417 - DNA, 122 bp, Homo sapiens
ctcacagggaaggaaatgtaaagagattgttaaatggctgagaccttaggtgtgtgtccacggtgggaaactggctagaaattaaggcccacctgagcactggcagtgacaccaggtgtcac

SEQ ID NO: 158418 - DNA, 122 bp, Homo sapiens
aaattttagagatgggggtctcactgtgtcacccagactaaactgggctgtgctcctatgcgtaccctagtagctgggacttcaggtgaatattaacccatgcataggcaaggagagaggaa

SEQ ID NO: 158419 - DNA, 122 bp, Homo sapiens
gcgcctgctgtgtgcctggctggattcagtgccagggtggggcgaaggcgctgaggtctccgagtgctctttcaggtccaactccagaatcgcccagccccacgcaatccagggccagaggt

SEQ ID NO: 158420 - DNA, 122 bp, Homo sapiens
gcccatttccgttggagggttgggactgtaagagcttgatgccacctctgtcacacatctcgccctgaagcaaacagggattcacactgctttagtaatgttgactcccaagaacccaagaa

SEQ ID NO: 158421 - DNA, 122 bp, Homo sapiens
tgcatctccccaatgactaatgaacatcttttcatgtgctacttgccatctgtacatggtcgtcagtaaaatgtctgttcatgtcttttgcctactttctaactagactcctttgaaaattt

SEQ ID NO: 158422 - DNA, 122 bp, Homo sapiens
ctgacttcattccagcattgttctctgcattctagccacaatgtcaactttcaggtcatgcgacctccagcctcagggcctttacatatgctgaaataccccgctgggcatacacttcattc

SEQ ID NO: 158423 - DNA, 122 bp, Homo sapiens
gaggaaataactgcagatgtggtgaattagagaattagaatgagaagtggagcctgtagacgtgaagcaattgctgcagtctcatgatcaaacttgaatgaatgaggagtcacttcttatga

SEQ ID NO: 158424 - DNA, 122 bp, Homo sapiens
aaaccggccgcgcccccgcccggctcccggcctcacccgcccgccgggcgcggcctccggcggctcaaccccagccgcggcctccgcgccgcctccatccaagcccgcgccgggcggaagtg

SEQ ID NO: 158425 - DNA, 122 bp, Homo sapiens
atcaggtgcccggccaggggtgcccaaagtgctggtgtgggtgacagatggcggctccagcgaccctgtgggcccccccatgcaggagctcaaggacctgggcgtcaccgtgttcattgtca

SEQ ID NO: 158426 - DNA, 122 bp, Homo sapiens
caacacacaattaagagaaaagcagagaataagggactgtatattaatgaatatcttcttcgcaggaaatcatgctgtttatttaagtgttaatattaatcctcatgggagataagactgcc

SEQ ID NO: 158427 - DNA, 122 bp, Homo sapiens
ctccaaagaggtcgcgccttctctgtggtggttctcagggatccgccccagctccttctccgttcccagccccacacactgggatcaccaggcacccaagatcccacctctcaggtggtatc

SEQ ID NO: 158428 - DNA, 122 bp, Homo sapiens
agggggaaggaggctgggcaccctgccacgaggctggttcttgtggtcctgggcaccatccggtcactttaaagtagcaggtgtccccgatggtacacgcgtgccttgtcagggtgcactgt

SEQ ID NO: 158429 - DNA, 122 bp, Homo sapiens
cagcgcagcgggaggaagcgagaggtgctgccctccccccggagttggaagcgcgttacccgggtccaaaatgcccaagaagaagccgacgcccatccagctgaacccggcccccgacggct

SEQ ID NO: 158430 - DNA, 122 bp, Homo sapiens
tcacagaccagaaggggcacctacagagagcaggacctcaggaatggaactagaacactgcgctgccagcacttcccctcttctctttgtctcatttctgtttgcctgcatttggcctccct

SEQ ID NO: 158431 - DNA, 122 bp, Homo sapiens
ccttcttcctgagacagtggaaacaatgccagctctgtggcttctgccctggggatgggccgggttggggggtgggttggtgaggctttgggtgccactgcctgtgggttgctggcttaaag

SEQ ID NO: 158432 - DNA, 122 bp, Homo sapiens
ttttttccaactccacatgcctgtctagacttcaagctttattacgaataaagagaaaatcggctggatggcataaaaaatatttcaggcagattaacacatgatttacctcttcttgaaca

SEQ ID NO: 158433 - DNA, 122 bp, Homo sapiens
gagcgctcacaaccactgagacgcagtgaagcacccaccataaaatcccaggaggccgaccgccggttcagactttttcttttctttaatccccgtccaagggatccgccctcaccccccac

SEQ ID NO: 158434 - DNA, 122 bp, Homo sapiens
ccttttcactattattattttaaactttgatgggctgctgacgtcagcaaatatgcttgacgcctgtaaagcaaataagccacatcacaagcagaaagcctgtgggattttctggtgcccta

SEQ ID NO: 158435 - DNA, 122 bp, Homo sapiens
aagaccccacgcagccacccactgctaaggacgtggagaatggctagagaggcccgataccggccccaggtcacacatgagtcgggacttggtcgtgtgtccctcgctaggatgcaaactat

SEQ ID NO: 158436 - DNA, 122 bp, Homo sapiens
cgctgcgcatgctcgggggaggcggattccgggtccggagttggaggctttgggcggccgcggcgtagcgcgcggtgccggggccggcggggaggcgcgcgcttagggcgcggcgccggcga

SEQ ID NO: 158437 - DNA, 122 bp, Homo sapiens
cattttttttgttttttgtttgttgttttctttcacttttttttccagcacagctcacctcgcaccaacccccaacacactgaactcacagctggaggcattgtgctcactcctccccagag

SEQ ID NO: 158438 - DNA, 122 bp, Homo sapiens
ggtgtgtgggctttgctgtttcgtgtttgaaggagatcatgaaagggtgtgcctggctcacgcggctccatactattgcccagtgttttccgagcatctccatccttggccgcgagtgtcac

SEQ ID NO: 158439 - DNA, 122 bp, Homo sapiens
cgttacccgcgccctgcaggagatacccacccatccagatctcccagtaacttcctcagccggcccaactccagggcctgggctggcaggctgctgagatcaagcccccagaccctggtcgg

SEQ ID NO: 158440 - DNA, 122 bp, Homo sapiens
cggcggcggaggagtggggggcggcgaggcagagacgatgtcggagccgagccccgagagcgccagccaggccggggaggacgaagacgaggaggaggacgacgaggaggaggaagatgaga

SEQ ID NO: 158441 - DNA, 122 bp, Homo sapiens
gcagcagaacagggtgtttttagtcgtggtgccctctgtgtggcacctgccaacgccccgcgtgtgtgagtggcgatctgcgtctgtgggtgacgcgcatcacggggtgtggagaggtgcac

SEQ ID NO: 158442 - DNA, 122 bp, Homo sapiens
tatagagaagcagttgacatttataaatagtaagtagtggcataaagacttttctctttacgtagtgcaacatgaacagaaatctccgcaagaagtacctgaagatgggtcttaatattttt

SEQ ID NO: 158443 - DNA, 122 bp, Homo sapiens
caccgggcccggagagcgcccccacccccacttccacccaactggtgtagcccataccaccgagtggtgaaatcatcagagctccctagtagatttcgttcttgaacttctcggccttggaa

SEQ ID NO: 158444 - DNA, 122 bp, Homo sapiens
tggaccccaaggccttccaataccgtccttcctgtgcttgaaagcgtgggtagatctttccggtcactgaggcctgctaaagtccttcacaggcagtgaaagattcaacctaaatctagcag

SEQ ID NO: 158445 - DNA, 122 bp, Homo sapiens
cgcacagctccgccaactcgcctcgagacgcagacaactttctcacttccgcccttgggccgcgtcactgcccggtccccgcggcaaccgctcctggggccaccacccccgggcccgccccc

SEQ ID NO: 158446 - DNA, 122 bp, Homo sapiens
agactcttgcgcaagggagaggcgggcatttctcaaacccgaccaaaccagaaaagggaacgtcagccttccaaactcctggggaagggtcttgcctttgtgtggcctgagaactcccactg

SEQ ID NO: 158447 - DNA, 122 bp, Homo sapiens
agcaggattgaagggttcagaatagcttttcctcaggtcaagagggtatgctcttcgctccggaagtcccaccatgctgaaccctatgttggttaggaggacagcatactccaggcgggcaa

SEQ ID NO: 158448 - DNA, 122 bp, Homo sapiens
ctggagtggccacttgctggacaagtgtctgcaggaaggttttttaacctctcagtacctcggtttcctcctttataaactggagatgaatttataaactggagctgggtgtggtaacaagc

SEQ ID NO: 158449 - DNA, 122 bp, Homo sapiens
ctgagcaccccgccccttcccgccgctgaggatttactcgtctcttggcaaccattcacccgaagagccaatcagagggcagccctcgccccgcccctgccgtcagggccgggcggaagggt

SEQ ID NO: 158450 - DNA, 122 bp, Homo sapiens
ggggggcgggccctgggcccggacagaggggtccagcctccacagcgagcctgagagggccggcctcgggcctgcgccggggacagagagtccgcaggcagaattctggacagacggacaga

SEQ ID NO: 158451 - DNA, 122 bp, Homo sapiens
ccctcactctctctggacctcagagccggttctctccttcctcctcccgcgctttccgtccggggatcgcaacctccagcccgtgggcaacgcgttcagcccaagaccccacagtttttccc

SEQ ID NO: 158452 - DNA, 122 bp, Homo sapiens
attttacctggcctcctgtccaggctacatctgagaccatgcaggagctgtggagattaacggtaaaaggaacagcacattcaagactcttctaggaggtggggcaagatagccaaatagaa

SEQ ID NO: 158453 - DNA, 122 bp, Homo sapiens
taaaagctctccaggtgattctcatgcatacctccagttaaaaccactgctttaagtggccgcaatatgtatttctcgcaatcagtaagacaatttcaatatattttctcttgattatagaa

SEQ ID NO: 158454 - DNA, 122 bp, Homo sapiens
gagaaagcgaggttttaaaaacacactaatggatagccattatgccgtggggagttcccccggagagcagaaaaatacgagctggggaagtcgggggtgggagtgagtggggagcggagcac

SEQ ID NO: 158455 - DNA, 122 bp, Homo sapiens
cccgcggcccagggcccgcgcgggcctcgctggcctcgcgcccgcgccaatgggcgcccgcggagccctcgccccgcccccggcccgcccccgcaacccgagccaagagcggggcggggggt

SEQ ID NO: 158456 - DNA, 122 bp, Homo sapiens
gcagtggctgcaggccaggggagcagtgagtcactcagggcgggatgggtgaggggcgtccgccggtgaggaaaagctcagctgccggagcccaggggctggccctgcgtccagaggctggc

SEQ ID NO: 158457 - DNA, 122 bp, Homo sapiens
gaatgtgggcccggggttcgggtggtgcgctcaggcaaggtcttcggcttccctagggagcgcttgccgcgcctcgcggcatcctaggtctctggcccaggtgcggcgaccccagggcctgt

SEQ ID NO: 158458 - DNA, 122 bp, Homo sapiens
ttacaaaccatcaaataggaaattggtaaaggtggtgaaaaaggagcagctagtattctccgttgacctgcacaccatgtttcagcaggcggcaaggatttacagcagaaccaaactctttt

SEQ ID NO: 158459 - DNA, 122 bp, Homo sapiens
ccgggcaagaactcaggacggtgaatggctctcagatgctcctggtgttgctggtgctctcgtggctgccgcatgggggcgccctgtctctggccgaggcgagccgcgcaagtttcccggga

SEQ ID NO: 158460 - DNA, 122 bp, Homo sapiens
gcgcggttggcagtggtctgttatccgctcctttctccaggcctcctctccgggattaagcgcctcaggacccgtccgccaggccacagcctgggctcaacctctcccagacttcctggact

SEQ ID NO: 158461 - DNA, 122 bp, Homo sapiens
taaactgaatgggcctgggggtcacaccgcaagggggcgcagcttctgtttgggtaacttcgggacgattttttatttatttattttttttgagacggagtcttgctctgtaatggcgaaat

SEQ ID NO: 158462 - DNA, 122 bp, Homo sapiens
cttcatcaaggtacatatgataccaaaatggaatagcagtcagtcttccagatttacaaacgtatacctatgaaaataaagaaattaggaaaatatcagagtgcatagagtagacttagata

SEQ ID NO: 158463 - DNA, 122 bp, Homo sapiens
cgtagaacctgaaatccgtagtaaacacccctccagcgctttggttcagctcagctccagcgaatgttaggatgtgaggcttcgtgttacagtagaaaggagcgcactcataggcatacaga

SEQ ID NO: 158464 - DNA, 122 bp, Homo sapiens
tctgcagcgccaaggcagacacaccagctctgcggcaccgaggcagacacaccagctctgcggtgccgaggcagagcctgcgccctctgatgctctgtgtcgtgttttttcccacttcgcca

SEQ ID NO: 158465 - DNA, 122 bp, Homo sapiens
catgcagccagcccaaggctcttagttgcacacacacgcacactcacaagctcacagtgacgaatgcttggtgcttgctgggaggtcaacactaagaatctttcttgggaaggcagcatgtc

SEQ ID NO: 158466 - DNA, 122 bp, Homo sapiens
gtggcgcgcgcctgtcgtcccagcgacttgggaggttgaggcaggagaatcgcttgaacccgggaggtggaggttatggtgagccaagatcccccccagctgcactccagcttggcgacaga

SEQ ID NO: 158467 - DNA, 122 bp, Homo sapiens
agaagaggaacgagtttggctacgtgaccggcaggccctggaggctgagccaggcccagccgggaaaacaacctgctggaggccgcctgggcagggccaggagggtgggcaccagggtggag

SEQ ID NO: 158468 - DNA, 122 bp, Homo sapiens
cgagtgaacctgcggaccctgctccgctactacaaccagagcgaggcgggtgagtgaccccggcccggggcgcagatcacttactccccgctccatgcctcacggacggccctggtcccctg

SEQ ID NO: 158469 - DNA, 122 bp, Homo sapiens
gccggggccatctgggttgagagagcggcgattgcggccgctgctgaggcggagactccccgccgccgcttcctccacccccagtccgccggcctcgcggcgctgagggcgggagcgcgcag

SEQ ID NO: 158470 - DNA, 122 bp, Homo sapiens
atgttggtcaacctgaacgcggggaaggctgtcaggatagccagtccttgagacccctaccgaccccattccactctctatcctattcctttcctcctccccgcgtgtttaacttccaccca

SEQ ID NO: 158471 - DNA, 122 bp, Homo sapiens
tggatgtcttcgtgaagaaccctcaaaagtgcaacgaactcctccctgccagagggcggccgcgcgctctgagtacagcttcccgcggagccggccaggtcctccagggcaccgagaaagcc

SEQ ID NO: 158472 - DNA, 122 bp, Homo sapiens
tctccccgctgaatgatgctagcgatttgcttcacctcgtcccgctcaatgtagacccgccggaagacagcaaaagagctcagctcttgctcacagggccccttgatcttatgcattggaca

SEQ ID NO: 158473 - DNA, 122 bp, Homo sapiens
gttcccattccctctgctcccattgttctgttttgtgataaatgctttgcttgaagtatacgtaatgtacatgcagaaaaatgcacgaatcataagtatacagcccagcgagttttccccaa

SEQ ID NO: 158474 - DNA, 122 bp, Homo sapiens
actagacaggaaggccaggcaatgcttaggcaactaaaatgaggttgggggtaatgctaacgtcaccctcacagggatggccacggggactgttattcgcaagctggttttctagacctgtt

SEQ ID NO: 158475 - DNA, 122 bp, Homo sapiens
cgcgcgtcccccgcgccgccgccgccgcgagtccagctcgcaggaggaggaggtcatcgacggcttcgccatcgccagcttcagcaccctggaggccctggaggtaggtggacgggtgcggc

SEQ ID NO: 158476 - DNA, 122 bp, Homo sapiens
gaaatctgtacatcaaatagatatctgcatttccatgtttgttgcagcactgatcacactcgtcaatatttggaagcaacctaaatgtccatcaacagatgattggataaagaaaatatggt

SEQ ID NO: 158477 - DNA, 122 bp, Homo sapiens
gccctcggttgtgtgggcaggtttctccttttcattttttcaccttgtaaaactgtgaaacgttttttgaaatagtctcttctgcatctgtgttgttcatgtcttcctatgcttatagtctt

SEQ ID NO: 158478 - DNA, 122 bp, Homo sapiens
gaggagttggctgcctgcccttcacaacttgttaaagtgaacacttagactctaggggggcgagagggttgattctcgctccgtgatcctccccactgattgttttaggtgctgggatgtca

SEQ ID NO: 158479 - DNA, 122 bp, Homo sapiens
gtcgaccaatggcagggcgctgttgagtgcagcggggcggggccgggcgcgggggtggggcgagcggcgggcggggcggggcggccggccggggggtgggaggagaggggcggggcgggccg

SEQ ID NO: 158480 - DNA, 122 bp, Homo sapiens
ccaccgctaccacaaggacccccggggctgcagcctcctctttctgtctctgatcagagccgacaccagacgtgattagcaggcgcagcaaattcaatttgttaaatgaaattgtattttgc

SEQ ID NO: 158481 - DNA, 122 bp, Homo sapiens
ggtgctcggtgcctccttagacacagcgtggctgccagagcctgggggtcgaaggccatgcgccacagggagggagggagggcgggtggggcttgggaggacccgacagaaaccccgttgac

SEQ ID NO: 158482 - DNA, 122 bp, Homo sapiens
agaaacggctgctgggcagctgatgggcaggagcttaccaggctggcttgctctgagctgcggttactgtgtccaggccccgggttctcaggtgagtcagggatgcactggcttcccagtcg

SEQ ID NO: 158483 - DNA, 122 bp, Homo sapiens
tagtggaccagacagactggtccaggcctccccgccggccccccttccggtccccgtggacgccagcctctctgagcctcggatgtttgtgctcggcaccaggctggaaggctatttactta

SEQ ID NO: 158484 - DNA, 122 bp, Homo sapiens
agattcgtttcagttttgtaatcagaaagttgcttctctcagttccgcaactttccctttcggcaggcctgcatcaagtgccctctgtaacccaggaaggagacggttcagggtgggaaacc

SEQ ID NO: 158485 - DNA, 122 bp, Homo sapiens
tactcctgtatttagtactttgtttttagtgtcctgttctgttaaccctcttcctagtaccgtatttttagtactgctatactcagttgcctgtctgtagtacccctgtacgtagtactctt

SEQ ID NO: 158486 - DNA, 122 bp, Homo sapiens
cagagaaagctctgaccccaagagaaaccgacatcatacacacacacacacacacacacacgcagggcagaggaatatgtggtttctcaaacggattcctaaaacatacatatatatataat

SEQ ID NO: 158487 - DNA, 122 bp, Homo sapiens
ggattcatggtgaattgggtctaacgagtataacacggccggccgaaggcatgaagctcacgctaccctttcagggcggagaagttcccaggaggaagaatggagaaaaagatcgcagttag

SEQ ID NO: 158488 - DNA, 122 bp, Homo sapiens
gatctacacccgcgtggcgagctatgcggcctggatcgacagcgtcctggcctagggtgccggggcctgaaggtcagggtcacccaagcaacaaagtcccgagcaatgaagtcatccactcc

SEQ ID NO: 158489 - DNA, 122 bp, Homo sapiens
cggagcagagaggggctgaatagagccaatgagataaccgaaatgggacacgtgctgaagcggggcagaaggactcgctgcgtccggccctctggcgtgcgccccgggttcgatgggagtcc

SEQ ID NO: 158490 - DNA, 122 bp, Homo sapiens
cagagtccaggcgggatttgaagctgttcagagtgggatcagcttcgcataatgggggctcggaggaagatgggagggtgtcaggcaattcccggctttaggcagcgctcggcggtggatat

SEQ ID NO: 158491 - DNA, 122 bp, Homo sapiens
gctgggaaatccctatttgccaataagccctggcgagcccccattcctttccactgggagcgaggtggcactgctgctgtcacattgcatgtactgctcagctactccttccgctcagctca

SEQ ID NO: 158492 - DNA, 122 bp, Homo sapiens
tggcaggccgggcactttgctacttgcagacggagaggaacacactctgaaacttctgggcgccttctggggcctgggcttttatacagcctggctcggatgcacccaggtcactgctttgc

SEQ ID NO: 158493 - DNA, 122 bp, Homo sapiens
cggctgcgattcttcagggccgcggatgcggcggtgatccccaggcatggcggttcttggcgtgcgaaccccttccgcccaacgccctgccgcatccactggttcttccgttgtttaaagac

SEQ ID NO: 158494 - DNA, 122 bp, Homo sapiens
tcggagccggggtaggggctgagttcctagcggatctagggtagctgggtaggcccagcccgacgcccgcctcgtctcccacggagtcaccggcccgctcctcgctgtgcggtggggtggta

SEQ ID NO: 158495 - DNA, 122 bp, Homo sapiens
ggagcggaggccctccctcaggaggggcgcgggcgtggagggcgtgggcagggggcggggcgagccccgcagactgagtgctccggggagctgtcagtgtcaggctctgggagagaggaagt

SEQ ID NO: 158496 - DNA, 122 bp, Homo sapiens
taattcatggtggaggcaaggcaggcttgctttctctggcattcctctaggcttctcactcgccagcttttggctgcttctgttatctaggccaagcagagtcaatgaccctgagatgtgga

SEQ ID NO: 158497 - DNA, 122 bp, Homo sapiens
ttctggttgttagtccacgtgtcccgatttggggtttccaaaatacacgcccactggaaccgggccaggggagccagcctggccaagggctcccccagcccggccaagggctcccccagccc

SEQ ID NO: 158498 - DNA, 122 bp, Homo sapiens
tctgcggtacagcaggaagaactgggcgaggagcgtgaggaaggaacccagcacggccgacgccaggatcatgagcagcagccccatcccgccaccgcctccgcccgggcccctactcccgc

SEQ ID NO: 158499 - DNA, 122 bp, Homo sapiens
gaagcaggaagacagctggctggaggacacatacgccggaagattgagagggaggccgtacgggtactacatagcagacacgtcagactgggacactgcctgtttacagaggactataaaac

SEQ ID NO: 158500 - DNA, 122 bp, Homo sapiens
gggaggcggaggttgcagcgagcagagatcgtgccactgcactccagtctggagacagagcgagactccgtctcaaaaaacaaaacaacaaaaacaaaaaaaacccaaacgattcaatctgc

SEQ ID NO: 158501 - DNA, 122 bp, Homo sapiens
gaccgtcacccgctgcatcagcagctctgcttttcaagctgtgctcctccactgcaccagcgccctttgggctggaagttggcacccagagtcctcggctggacacggacacctctccaaag

SEQ ID NO: 158502 - DNA, 122 bp, Homo sapiens
aggacctagtgaaaaacgtggctgccctactactttgctaagaacaagaaccacacagtccggcacccccaccccaggggccgcatcccacaccccaggacccctgttcccagttctctcca

SEQ ID NO: 158503 - DNA, 122 bp, Homo sapiens
acgagagcgacccagactggtgcaagacggcgtcgggccacatcaagcggccgatgaacgcgttcatggtatggtccaagatcgaacgcaggaagatcatggagcagtctccggacatgcac

SEQ ID NO: 158504 - DNA, 122 bp, Homo sapiens
gtctgctccggggaccaccgcgggacctcagtttcctcatcagagtcggggagggcagctcgggctctccctcactgtcctgtgtgctgggtacctgtggggctcaggtcgcagcctctcac

SEQ ID NO: 158505 - DNA, 122 bp, Homo sapiens
cattcagtgctactttgtttcatagtcgtatccctggagttacttagagttggtcgctttcgcctctggtatcgtgcatatgatggaaaagttttaatctcctgacacttgtgatgtcttca

SEQ ID NO: 158506 - DNA, 122 bp, Homo sapiens
ttaaggataacattaaaatgtaaagttcagagaaggtctataaatcaccataaaccttcacgttctctttcttctttcctttactatagatttctgtgcctaattcgttacattcaatgaga

SEQ ID NO: 158507 - DNA, 122 bp, Homo sapiens
actgtggataaaatgtaactcacttgaatcagagcttccatatggtaaaagattatagtgcgtagccttctgcattttattaagtagtcaaggtgagaaggttatttaggcatttgagtatt

SEQ ID NO: 158508 - DNA, 122 bp, Homo sapiens
gttactatgggtcgacatatagccttgtataacatgtacggtaactgacacattatatctcgtacactgatacaaagaagtggttttgaaataatactgagaagtggaatactgaattttgt

SEQ ID NO: 158509 - DNA, 122 bp, Homo sapiens
tttggtgccgtaacccgctgctgcttccctcgccagtaaaccacgggtttctcgataaaccggtgcagaccccaacagcctcctaagcgtgagaatgtgggtagggcccccgtggccccttc

SEQ ID NO: 158510 - DNA, 122 bp, Homo sapiens
ctccccagtggactctttttccattcattcagctatgattgctacttcctaagtgtacctcgaaacctcccccttctctccatgtccaccagaatgatcctggcccaggctctcacccttta

SEQ ID NO: 158511 - DNA, 122 bp, Homo sapiens
gggggctgcgggcccaggggccgccaccaaggctgtgacgaaggtgaggggccgggaggccggcactcggggcccgggccgcgcgccggcgccccatgtgcccgcccccgcctgccggggaa

SEQ ID NO: 158512 - DNA, 122 bp, Homo sapiens
cgtctgggaagaccagaaactggaaatccaaggaaatctggatttcaaaatactatcccacggcctccagcactttgaaaatgtaccagacattctatttgggcaccggaaagtcccccgga

SEQ ID NO: 158513 - DNA, 122 bp, Homo sapiens
gggctcgcggcagagaacgcggtgggttcgtgaggggcgggcgtatgcagggacagagttcggagctgtctctgcagtgtgtctgtgtgactcgcgatgctttgcgtttcttcctttcagca

SEQ ID NO: 158514 - DNA, 122 bp, Homo sapiens
gggacggagcggcctgggattccgcccacccccttcccgccgtcagcgattcctcctcctcggagggtctggggacttctcccagaagccgccacctcgcgccaggacaccgggagttccgc

SEQ ID NO: 158515 - DNA, 122 bp, Homo sapiens
ctaggcaaatatacagaagcacacaggacaaatccattcattctccagctcctacacgcccgggaagcagttttactttacagcaagttcaagagtcgcaccgcagatgctgtaaaaacgaa

SEQ ID NO: 158516 - DNA, 122 bp, Homo sapiens
ttggatccgagagcccatggtccagctggaccacccagcctgctcaggacacccgcctcgcgagtggagcgctaggattcaggtccagatctgactgggaagcttccgcagggaattccgcc

SEQ ID NO: 158517 - DNA, 122 bp, Homo sapiens
agtgactgcaaattgtggcttcatcttactgccctgcctctacaggtctccccagtgctgcgagacttcctggagcggatgctggtgcgggacccccaagagagagccacagcccaggagct

SEQ ID NO: 158518 - DNA, 122 bp, Homo sapiens
gcttggaccacccaggccgaagtggatgggcatctggagaaacgcgcaaacaatggagaacgttagagtcctgcatttccaagccagtgattctgtccctaggcttagctgggactttgaga

SEQ ID NO: 158519 - DNA, 122 bp, Homo sapiens
actcagcggaaggtcctcggggctcatacacgcggtggcacgtggcaggatttccttcctcgctaaggccttattctctttacgcatcatctgtcaatggacacctgggacattattcggtt

SEQ ID NO: 158520 - DNA, 122 bp, Homo sapiens
agcgcagccccctgattcagggcagccaattccatcgatctcccaaggactgaaaagtgccggcgcatggcgcgggaagggcaagcagctccacctgcagcaccagtgcgaaatccactggg

SEQ ID NO: 158521 - DNA, 122 bp, Homo sapiens
taagagacaacggttgcccgtcgacagagggaagatgagtggtcaactgcgaggaaaccacgtaaagggtgtaagagacaacggttgcccatcgacagagggaagatgagtggtcaactgcg

SEQ ID NO: 158522 - DNA, 122 bp, Homo sapiens
gtgatgaaagctatgggtggtctccaaatacatactcccagtgccctgaggtcacccggacgtgtacccagtgccaagcaagcctctttctcgaggtcgatttagtacgtgtttcttgcttt

SEQ ID NO: 158523 - DNA, 122 bp, Homo sapiens
gggacgcgcacgaccagggcgcccaggacgagggcgctggaggagactccgggcagggaccggggtcccaggggcccgggccggggctcaacacccacccgatggggtgcgggcccgacggg

SEQ ID NO: 158524 - DNA, 122 bp, Homo sapiens
gaatgaatgaatgaatgaatccccctgcccgtaaataacagaagagctgcgtcccggtgccgggggttggagcggaaggaggggcaggggagagggagggagggatggatggatgagtgagt

SEQ ID NO: 158525 - DNA, 122 bp, Homo sapiens
ccttggtgccttctctgcaatgttctgaggtccccccgcccgtggcacgtgccgctgcagcgttgcttttgctgtgaggccgacttcctgggataagggcatgtggctctggcgtggcggga

SEQ ID NO: 158526 - DNA, 122 bp, Homo sapiens
taagaataaggtcagtagtgtcattaggcccatgttacagatgagaaaactaaggctcaccgagaagaagtgataacagccaggatttaaagtctcatctgaaagacacttaaacccaagct

SEQ ID NO: 158527 - DNA, 122 bp, Homo sapiens
agctccaagtgtgcgtggccaagaagctgactcccgaagggggtcttgagaggggtcctgcgaacccctcctctcccctggagacccgtccgggggcggggcctttcccagcctctgctcac

SEQ ID NO: 158528 - DNA, 122 bp, Homo sapiens
caaactaattataggttcacagaaagttgcaaagatgaacaggaaattccatgtagccttcgctcagtttctcccagtggtaacatcttgcaaaactctaggatactgtcacaactaagaaa

SEQ ID NO: 158529 - DNA, 122 bp, Homo sapiens
tcgtccgccaggcccagaccgctggataggaggctcttggccgggccgggggctgggggccgggatggcagagggggccctagctgcgccccgccgcgctgggccctcgtctccgggtgctc

SEQ ID NO: 158530 - DNA, 122 bp, Homo sapiens
cgtggtggcccttagcacggttgtgcagctgtaggagagcctggtaccagctgtcttgctcggcctcgctgtccgccgcgatggcaaagtgctcgtcccgggtgtagagagccaccaggtgc

SEQ ID NO: 158531 - DNA, 122 bp, Homo sapiens
gagaacctctcttggcctcatgaaagaagttttatcagtggcttctaacactgataaagacgtatttttcaggctcaatttaaatgcctttgctatacatggcatactagccttaatatatg

SEQ ID NO: 158532 - DNA, 122 bp, Homo sapiens
tccagatgcccccatgagtccagaactgcctaagcctcaccttcctgaccagttggtaatcgtcaacgaaacggaagcagactctaagcccagcaagaacgtggccaggagcgcagccgtgg

SEQ ID NO: 158533 - DNA, 122 bp, Homo sapiens
agggagagcaatgcaggtgggaggtgtgggggagccagcctccccgcccggccgcacgcccgtcactgctcgtctgacacactttgctgcgaggccgtgtcgtccaggcccatgtcctcctg

SEQ ID NO: 158534 - DNA, 122 bp, Homo sapiens
tcctggccgggccccctcggcagcgcacggaaaggagctccccggtgggagaggatcggccgccccaagcctcccaccggggaggctgaggctgtgcccagataaataaggccgctttgcag

SEQ ID NO: 158535 - DNA, 122 bp, Homo sapiens
cccccgccccgccccagggcctccaggaagcagcctgcaaactcggcgacccctgggagccgtggtctgtcccagcactttgtttcggaggtaggcgcactggccgcccacttcctgaattg

SEQ ID NO: 158536 - DNA, 122 bp, Homo sapiens
tcctcctgcaagggaataggatgtggtttcctggagcttggatagaaagaacaggaagggcgttttcatatgcccggcattaaggctttgaagttcttaaaaccccttctagggtgaaaccg

SEQ ID NO: 158537 - DNA, 122 bp, Homo sapiens
tgactttgaaggactgataatattatggggcaggcagactctcactatcttaaggtggttcgcctgagccttcttaaagtggtaccccaggccgggcgcggtggctcacgcctgtaatccca

SEQ ID NO: 158538 - DNA, 122 bp, Homo sapiens
tttataaatttattttgaaatgaataaaccagaggagctgcagttttgtttttgaccacacgatggagcctttgcctcttaaatgggaaacgtttgcccatctttcatggaaagccaaaagg

SEQ ID NO: 158539 - DNA, 122 bp, Homo sapiens
agcgccgaccatgtcttcatttgcttccacaagaaccacgaggacagagccgccttgctccggaccttcagcttttggggctttgagattgtgagaccccttgtccccaagagacccgacac

SEQ ID NO: 158540 - DNA, 122 bp, Homo sapiens
taaagggcgcgcttccttccctgaggactgtggcgtgcggggagacaaagcgagaaaccgcgagcaggcccacagccaagatccacaggctcatgccccctagtgctgccccgcctctgcca

SEQ ID NO: 158541 - DNA, 122 bp, Homo sapiens
caacaggcaaggggaagtcacgaacaccgcacagtcctgcaagcttcttagagtccttgtcgtcacgaacaccgcacagtcctgcaagcttcttagagtccttgtcgtcacgaacaccgcac

SEQ ID NO: 158542 - DNA, 122 bp, Homo sapiens
agggtctgtctggtagcaacacccaatggcaggctgtgattgccatgttttttcagactccgactggattccttagggaaatcccgtaccctttgaaagcaggatgcggccacgccccccgg

SEQ ID NO: 158543 - DNA, 122 bp, Homo sapiens
gattctctttttcaaaattatacaagttaattcaaaatggcattctgaaaactcaccgcccgccaatccatcaatcccaggtatagcataatacatgctatgtattaactgaatttaatgtt

SEQ ID NO: 158544 - DNA, 122 bp, Homo sapiens
gttttaaaagagataaaattgccatccttggtttttcacagctaaagggtttgactatttcgaatttcaggttgaaaaagtcgcactgagatgtcctgccagcaaaaccagcagcagtgcca

SEQ ID NO: 158545 - DNA, 122 bp, Homo sapiens
tggtaccctggctctaagagggatgcattagactaaacgggatcgcaacttgcggtggttcgcccgcctgcagctcttatacagcagcccgtgccgtgcgccctgcttgctgcagcccgccc

SEQ ID NO: 158546 - DNA, 122 bp, Homo sapiens
gtaggcctctcctcccatgcttccagcttcagtgaaagacaccagcatcaacttaggacccgggacctgcgtgtcaccctcgactgaattattggagtgttctcaggagggagactaggtaa

SEQ ID NO: 158547 - DNA, 122 bp, Homo sapiens
attaatattttcagaccacagttgacctcaggtaacagggaccatggaaattgaaaacaacggatgaaggggaactatgatatctgtctcacagaattgctagaaaggtgagaaatgtaccc

SEQ ID NO: 158548 - DNA, 122 bp, Homo sapiens
gacgtatgaaaaagcccagggcagggaatcggggtgcattcttccccacctagagctctacgagtgcccaccttgactcagaaggcttctcgttagccttggtcttattctcagcccttccc

SEQ ID NO: 158549 - DNA, 122 bp, Homo sapiens
aatactatatggttagtgtggggttgggtgaggaaagacttaggatagtggttctccagacgtgatcacaggccagcagcatggacttcgaaaggaaatttgttagaactgcagctactcag

SEQ ID NO: 158550 - DNA, 122 bp, Homo sapiens
tctcgctcgttggctctacctccctcctctctgttttctcctcactctcctgccccacctcgacatccacagcgaggcaatgaagaagcccctgccaaggaggagcccgcttctcagtggga

SEQ ID NO: 158551 - DNA, 122 bp, Homo sapiens
ggcagccgcactgacctgttttgagtaaagactccacgcggggaccaggcgtaccggcgccgccaccgacttacaccgccaccgccaaattgcagcaaggggccgggcgcgcccaccccccc

SEQ ID NO: 158552 - DNA, 122 bp, Homo sapiens
ggggcgcggccgggggcggggacgctagggggtgcggccggggcgggctgcagggggaggcgcggggcgaggtccgggaagcgaccgcggccaggggctagggttcccgggcgggggtcgcg

SEQ ID NO: 158553 - DNA, 122 bp, Homo sapiens
attcatttaaactgcccaatgacacactgaggttgtattacagtatccctgtttgacagacgaggaaaatgaagctacaaatgattaaataaaatctgccaggctgggcggggtgcggtggc

SEQ ID NO: 158554 - DNA, 122 bp, Homo sapiens
ctaggccactaaagccactcccacttggcctttacgctgtgtcacggagcctaagccttgcgacccagtctagaccttagatcctggggatgcagttcagagagtcagtcacttggtgagtt

SEQ ID NO: 158555 - DNA, 122 bp, Homo sapiens
aggtggaatctccctttataatgaggagtactttcttctgatgcaaaagattatgagcctcgactaagctgtgttgctgaaagaagccgtgtaatctctgtttgaatttgaaagaagggtgt

SEQ ID NO: 158556 - DNA, 122 bp, Homo sapiens
ccgccgcctgagggaagccaacgggatgttgttacggaaccagcggatccagagcaaccccggaagtgaaagggaactgggggaaaggaggaaaagacggtgacaacattgacgaaagtccg

SEQ ID NO: 158557 - DNA, 122 bp, Homo sapiens
gatgtgttttcaaggtggtttccaatttggcagttcagtcgtgctggggagctatgaaagcgggtacacaatgctgcccagtgttagctcaattaaggggtaaagaagctggaatatttatc

SEQ ID NO: 158558 - DNA, 122 bp, Homo sapiens
ttgggcgctcatcgtgtcaaaccctgtgttgagggctccattcctcaaggtccattttaccggcgaggaagccccggctccgggaggggaggagcgcgcccaaggtcaccagccagttgagt

SEQ ID NO: 158559 - DNA, 122 bp, Homo sapiens
aaaggccaaagtttcatatctgcttgtacaacaggatcattaaatttcctgccgatcagacgtttagcatcaaaaacagtgttctggggattcattgctacctggttcttggccgcatcccc

SEQ ID NO: 158560 - DNA, 122 bp, Homo sapiens
gctgaaggatcaactgcagttcttaataactgcacagcctttcttctatctcaaggacagcgaggtgattttattcctccagttatatttagaagaccactttacagacattttgagaagga

SEQ ID NO: 158561 - DNA, 122 bp, Homo sapiens
tctctggctttcctatagctccttaccgccacagtccacccctgccaagtccacatctgtcgcccagaagtgttgccttgcttctttaggctgcagttcaagttctctgcttccattttcct

SEQ ID NO: 158562 - DNA, 122 bp, Homo sapiens
gctcgcccgcgccccgcgtggcagaaaggagttcctcagctgctgtatctggtgggaaagcgaatgctttagcgaaaataacaggcatcccataaatacatagactagaaataagttttggt

SEQ ID NO: 158563 - DNA, 122 bp, Homo sapiens
ggggtcccacgaggaggaggtgagagtccctgcgctgagctgggggaggccccgggctcccgccccagcctcgaagccccgccccaggctggatttgaattgcttgtggctccgcccacagc

SEQ ID NO: 158564 - DNA, 122 bp, Homo sapiens
actgtcttccaggttccggattcgggcctgagcctggccctcgggtgactgggggtccttcgaggtggggtcttcggatggctctggcactgcagctgccccatccattagccaacgttccc

SEQ ID NO: 158565 - DNA, 122 bp, Homo sapiens
ctggtgccatgttctaagcaaacaagctaaaggggccacattgttatattttctagaaaccgtaagcattaagagggccatacttcttcatattatgcctccaaataatacaacaatgcaat

SEQ ID NO: 158566 - DNA, 122 bp, Homo sapiens
aaagagagtcgaagacgccctgtcaagatgccactcacctaaacgccaggaacatctccccgactaaggacaggccgacccccagcaggaccagcgccacgagcttccccatggtctcgggg

SEQ ID NO: 158567 - DNA, 122 bp, Homo sapiens
cgcactgctcacacagtgcaaccacaccatcatcaccgtgggcaccttcggggtctgggccgcgtacctcgcgggcggggacactgtctacctggccaacttcaccctgcccaactcccctt

SEQ ID NO: 158568 - DNA, 122 bp, Homo sapiens
tccccgggccctacaggaacacaagagtgagtcctggagcctctggagtccgcccctcaccgatgtgtgttctggggcaggtcacttcctctttctgtgcctcagtttccttatctgtaaaa

SEQ ID NO: 158569 - DNA, 122 bp, Homo sapiens
ccttctccacacaaggaactgttggtgcccatttattactcacctgggaaaggacctgatcgttgccattggcagcatggttcaatggctgcaaatggatctgatggagagcgtgtggcttt

SEQ ID NO: 158570 - DNA, 122 bp, Homo sapiens
cttagcaaaccacttagcttctccaagctagctaagctaccggtaaaacgggatgagcaccgcttactcagagcagcgggagcgggtctggggaaaggagctatactcggtaaatggggaag

SEQ ID NO: 158571 - DNA, 122 bp, Homo sapiens
ttatgaccgaatggctccatggccattaggagaggggaatgtatgggcttcagttgctgccgagtaattatgtgcttaaaaggaagcgtggctgagcatctccctagtaaaaaagagagaag

SEQ ID NO: 158572 - DNA, 122 bp, Homo sapiens
cctgcagggggcggaagggaatccactccatacacagtcgctctgagatttgcttcagggcggagatctgaattcctgagattccgatggggccatgtgggcgtggtctcggagaggagata

SEQ ID NO: 158573 - DNA, 122 bp, Homo sapiens
acagtctttaagacacagattcaaacttccattcacaaaatattttttgagctgctaccacgtagaagccactgctgtagacactggggacagtgaagtgaaccaaacagacaaaattaact

SEQ ID NO: 158574 - DNA, 122 bp, Homo sapiens
atggacaaagaaattcacctcatagatctacatagaactatactgatcattccttttccacgctcagcccagtatctctgaagcataatgcttcaggtatcagtgacagggataagcttcca

SEQ ID NO: 158575 - DNA, 122 bp, Homo sapiens
ctggctccgcggcccccttctctgcaccaccacctccagcgatgagctcagagcggctggcgcagcagttgctgacaattcaaaacttctgccgcctctcctgggatgccagtgggtgactc

SEQ ID NO: 158576 - DNA, 122 bp, Homo sapiens
gaccccaggtcactgcgttctggagcttatcaacacagtggataattaaaatcataaacacggctgggtgtggtggctcatggctgtaatcccagcactttgggaggccaaggtggatggat

SEQ ID NO: 158577 - DNA, 122 bp, Homo sapiens
ctgtttctccttacagagggccaagatgggtcgccgagctcaacaggagtcagcgcaggccgagaatcacctcaatggcaagaattcctctttgactctgactggagaggtgggtgctaaaa

SEQ ID NO: 158578 - DNA, 122 bp, Homo sapiens
gcatcgtcacgtgctctgtctgcgccccgagtggcctcttctcctcctccacagacacctcggggaggggtcatccttcagacacgctgagcctaggctgcccgcccttccgcagccccgcc

SEQ ID NO: 158579 - DNA, 122 bp, Homo sapiens
gggcatgcccttagaggctgccacgtgggggcagctcggcacttcaagcgcccacccgcacgcagccccagacccacaggccgaagcaataaccagccagataaagtttcttctccaaggcc

SEQ ID NO: 158580 - DNA, 122 bp, Homo sapiens
ggacaaggtgctgtcggacatgaagagacacaagaagctggaggagcagatccttcgtaccgggagggacctcttcagcctggactcggaggaccccagccccgccagccccccactccgat

SEQ ID NO: 158581 - DNA, 122 bp, Homo sapiens
tactgttgcgactggcatccgcatccggcagatgtagatggaaccaaagtccagaagttacgcgtcacccttgctctacagccaaacatgcaggactctagtaacccgcgaaatgatgggat

SEQ ID NO: 158582 - DNA, 122 bp, Homo sapiens
tcggtctccgtggccctagaggtaggtgctattactgttcctactttacaaccaacgcgccgggatcgaggaacgagatctctgcctctgtctcccaggtgctccaccaccatacgccgggt

SEQ ID NO: 158583 - DNA, 122 bp, Homo sapiens
ggctgcggagctcgtggatgccgtgtgcgaactggcacttgtccccgtacttacaggcaccgttttcctcaaaggggcggcacagctccgtcttgtagcggctggagttgacctggccgccc

SEQ ID NO: 158584 - DNA, 122 bp, Homo sapiens
catttaaaatgtacagtttggccaggcactgtggctcacacctgtaatcccaacactttgcgaggctgaggtgggcaggtgtcttgagctcaagagttcgagaccagcctgggcaatatggc

SEQ ID NO: 158585 - DNA, 122 bp, Homo sapiens
tggacgaactgtcgtcgttaaaggagaagtgaatgcaaatgccaaaaggtcagtatccttcggtaccagtcacagtgcagatacttccgtgcctgttaccgccttccacccgtgaacggtcc

SEQ ID NO: 158586 - DNA, 122 bp, Homo sapiens
ccggcagggcattctctgggcaaacaagcccacagccataaatggtggcctttgcacacccggaatcgctgcctcatggtgtttggatcactgacccggtttgtttatttattgagagtatt

SEQ ID NO: 158587 - DNA, 122 bp, Homo sapiens
aatgtgctgggtgcagctttgggtaatacatatgccgaaccttctctttaagggtccacgcgcagcctcgggtgtgaatgaaggagaagagatcgtgtaccacacatgatgcttacggagca

SEQ ID NO: 158588 - DNA, 122 bp, Homo sapiens
ccagggggtgactgagttcatttacatgttgtgccaaagggcagctgcttgctgccttgtcgtcacaagattctgtggagaatcctgatagtccatttaccagaataggagcctggaaaaca

SEQ ID NO: 158589 - DNA, 122 bp, Homo sapiens
cggagagcggctgccctcccctcccctgtcccccctcccctcgcggcgctcccgtgtgtgcgggtgtgtgagtgcgtgtgtctccctcgctcactctcgcacacgttccggcactagtgcag

SEQ ID NO: 158590 - DNA, 122 bp, Homo sapiens
ctagaaggaagataaaatgagacaggcaagtatgagaggcgcgaattcctgagtggatgacgtaggtctctgagaggtgacttttgagcccgtatctacatggtaagtgcctcgcagtgacc

SEQ ID NO: 158591 - DNA, 122 bp, Homo sapiens
gacgccccacgcagggtaaaccccgccctccgggcaccgcccagagcaaaccgcgttcgtcgcaggcctcgcccacaggacgcctcacgcagcataaaccccgcccactgggccccgcccag

SEQ ID NO: 158592 - DNA, 122 bp, Homo sapiens
aatcgccccaaagtcacaccaaataaacacagcaaaagctcccagccgcttctctggctgcgaatgaaaagcgctgcctcctggctcccgggcctgacggacagggggcctttctgctcagc

SEQ ID NO: 158593 - DNA, 122 bp, Homo sapiens
ggagtgggatggtgagagacttcatcaccctactcagaatggcatgtaatttaaaactcacgcatgaattatttatttctggaattttccatttaatattttagagtcacatttgacctcca

SEQ ID NO: 158594 - DNA, 122 bp, Homo sapiens
ccgcgaggctggaattttctacgggtaccttccaaggaagctctggggggcggggacggtcgggcgcggcccgccgggtctcaaggctgaggctaaggctccggctccagctccgcccgccc

SEQ ID NO: 158595 - DNA, 122 bp, Homo sapiens
atgttattgtcccggaggactgtctccaccaggacatcagtccagacgctgtgactgtcccggttgaaattctctcaactgatgccagaacccacagcctggataacaggtcccaggactct

SEQ ID NO: 158596 - DNA, 122 bp, Homo sapiens
aagcagttactgggatgtcctgactaatcgaagatgctgccgcgcgcgtgggtcgctctgcgcaagggcctcttcgaaaacccgactaggcgcaactcagcgttcagcagggccgggagcgc

SEQ ID NO: 158597 - DNA, 122 bp, Homo sapiens
ggtaagattgagcggcgcatagcgacgcatttgtacaccttgagcattatgaggttctagcgtgaccggacaagcccatgcctctaatccacttgtttccttgtgttggcgtaataagagtt

SEQ ID NO: 158598 - DNA, 122 bp, Homo sapiens
cctcggctctcccgccccacctccgccccgcagccaagacccgcgccgtggcgggcccgacggccaaggaaagcccaccagccctccgcaccgtgggcgacgggccaagacccggccctaaa

SEQ ID NO: 158599 - DNA, 122 bp, Homo sapiens
cacccacggtcgtgcgggaattgcgcacctcagggactcgcagcactagcctcacagcaccgcgtggagttgcttgttcttttacataggaggtcacattctcttcgtgtaatgccaccaat

SEQ ID NO: 158600 - DNA, 122 bp, Homo sapiens
ctccatcactcctgtccccaggtttgagaattttctagaatggctcattcctcaggaaagcgctttacttacagtcacagtttatcttaaaggatacagtttaagagcagccaaatggaaga

SEQ ID NO: 158601 - DNA, 122 bp, Homo sapiens
ctcgggaagtgcaaggggtcagggagttccctttcctagtcaaagaaaggggtgacagaccgcacctggaaaatcgggtcactcccacgctaatactgcgcttttccaacgggcttaaaaaa

SEQ ID NO: 158602 - DNA, 122 bp, Homo sapiens
tggtcagctcttcatcttccatggccccctcttctaatcggatgtcaggcagagaaaagtcgaggtcatcgtcttcctgaagggccttggagaaaccgctgcccccgtaacactgactcagt

SEQ ID NO: 158603 - DNA, 122 bp, Homo sapiens
aggaaggacccagggtccaaacatggcccgaggctggccgagagcacaacagccggcgggcgctgacgggcacggagcgcacgggaccgcggaggaacccgcgcgcgcccccgcctcgcgcc

SEQ ID NO: 158604 - DNA, 122 bp, Homo sapiens
gaagagaagagaagagaaaaaagaaaaaaagaaaagaaaagaagaaaagaaaagaagttccgagagagtaagtgacatcgtcattgtccagtctgggttagtaacagagctcaaatgacaac

SEQ ID NO: 158605 - DNA, 122 bp, Homo sapiens
ctccactgctagcactgcagtgttgctttaaagcagccttgcagagagccaaccagaccacgtgctccaaatccaaaagcagtttacaaccaggaaagcaataacagattgcctttcctttc

SEQ ID NO: 158606 - DNA, 122 bp, Homo sapiens
atcgtacatttgcacccagagctactaaacgctcagtgaccccagagaccattaatttcccggagtgaaggggatgggggtagagctaattggaatttttattatccaggactcatcctaag

SEQ ID NO: 158607 - DNA, 122 bp, Homo sapiens
attattacccagccaagagctaagagcatagcactcattcctggggcccgtttctcgaagcgcagctgcacaggcttagggtagggtggggctgagggtctctgctttttcggtgcagctgc

SEQ ID NO: 158608 - DNA, 122 bp, Homo sapiens
aagcgggaggagtcggcgaatacgcccggccgcctgcggcccggcttccggtcccgtctccgccggcagcgtcctctgctggacacctccgggaacgcctcacccggcctgggcgcctgcgc

SEQ ID NO: 158609 - DNA, 122 bp, Homo sapiens
gccacaggaaagtctaccttccggccccagctgggtctctcagatcctcctagacacctccggatgcccagaacacagagccacagaccctagatcccaaggccagggagctgggggctgag

SEQ ID NO: 158610 - DNA, 122 bp, Homo sapiens
acccagcaatttcaccccaagtcctgtcagaggcaactcacacatatgtgccctcacccacgtgggaatgttcatggcagctttacacatgcaaaggcctaaaacaggaattaatcaaacac

SEQ ID NO: 158611 - DNA, 122 bp, Homo sapiens
ggcggctcagtattaaagatcagcaagctgaatggtggtgcttgcacaaaagccctcgaacgtctgggtgaggagcagctcattcatctggatctccagccacccaaggggagaggccgcgg

SEQ ID NO: 158612 - DNA, 122 bp, Homo sapiens
aaatggagcgatttaggtgaccaaatattacatacataaatagccacatgaagttttagacgtttggacttgaagcctcaaagatcaaccaaccagtccccttatttagtaaataaggaaat

SEQ ID NO: 158613 - DNA, 122 bp, Homo sapiens
ctattttccatttttgtgagataaaattagcatatacaaaatgcacagattttccaggtacggttagagggtttcaggcaaatgtgcacatacttgtctacagcagctaagtgagggtgagg

SEQ ID NO: 158614 - DNA, 122 bp, Homo sapiens
cccctcccgctcccattctctgccgggctttgatctttgcttaacaacagtaacgtcacacggactacaggggagttttgttgaagttgcaaagtcctggagcctccagagggctgtcggcg

SEQ ID NO: 158615 - DNA, 122 bp, Homo sapiens
caggtggtggccgaggcccagacccgggtcagccagctgggcctgcaagttgagggcctgcggcggcgcctggaagagctgcagcaggtaggcggggctccggtggggggccccgggcgtgc

SEQ ID NO: 158616 - DNA, 122 bp, Homo sapiens
caatgtttatctgagccaatccaaccagcacgagcctgtgattcctcagacacaattgctcgggatgatgctaaggtgggtatttgtggttataacggaggatcccgtgaaaagaaaaatgt

SEQ ID NO: 158617 - DNA, 122 bp, Homo sapiens
aagcaggggaatgaggtgaaagcgaagcacgaaacatcgcgagaggctactggactctcgcgacgatttctgggattgcccctccccccttccccaagtgccgtttcggtttaatctagtgt

SEQ ID NO: 158618 - DNA, 122 bp, Homo sapiens
gggctcccgaggttcggcttcacccagcagtaaaacgcatgcgcaaagcttcggtcaatgcgggctgtccatttctcaccgccgactccctacatcaactacgcatgcgttgcctgcctttc

SEQ ID NO: 158619 - DNA, 122 bp, Homo sapiens
ctcggcccagccagagtctggctctttccagaatgtgcagggtggggtgctgggaggactcgctgcacggaaccaggacccaggggccaaaagcttaggatatatcaaaccctctaggtggg

SEQ ID NO: 158620 - DNA, 122 bp, Homo sapiens
tgccatttgatggaattccctattttagacagcaaaacaaaatctatgaaactactgatgcgtgttttttactttagatatattccatgataatacaaaacaccgacaaaaatttcttaaaa

SEQ ID NO: 158621 - DNA, 122 bp, Homo sapiens
agtgactactactctttctcctgagtggataggtggccctgaaaagggccgttggttttgcggtagtgtactgtagaggtaagctcagccgccgaagccataaagagtgcgtccctggcgct

SEQ ID NO: 158622 - DNA, 122 bp, Homo sapiens
gctagaaaaccccctacacccatggcagctgggggcagggcccagcctgtcccagggacacgaagaaggtcagcacagttagggttgggctaagcattggccttcactgtgtggggcccaga

SEQ ID NO: 158623 - DNA, 122 bp, Homo sapiens
gagatccctggagatggcagggaacccatggacacatgtggcatgggctcctttgggtgccggtggatcccttcatacggtatgtgttcatttctcaaaagaccctaatgttcttcctttac

SEQ ID NO: 158624 - DNA, 122 bp, Homo sapiens
aaaagagagtttattttcttttcttctaataatgatcattcttatttttcatgtttcagccgaccccacttgggcagtgtcccagatttcaggttccccatggcagacggccacacagactc

SEQ ID NO: 158625 - DNA, 122 bp, Homo sapiens
gcccagaggacgggctgctgccctggggctgcctgaggagggtccgcagaagttccctctcgagcgggaggaggggatttgcatattcacttagaaggatgaagcgctgcggggaaccttcc

SEQ ID NO: 158626 - DNA, 122 bp, Homo sapiens
agggaaggccagattatttttattgagcacttccagtgagccaggtattttgctagacagcgaagttgtcacgagttctcatttaacattttgaaataatttcaaacctaatgagaaatctc

SEQ ID NO: 158627 - DNA, 122 bp, Homo sapiens
ctcataaggaagtacagatgtttttcttcttgtgatgttacaggttgggccccaggcagacgattcacagtaggtcctaattctcccactatttacccggcaggtaatagttctctctcatg

SEQ ID NO: 158628 - DNA, 122 bp, Homo sapiens
cgggactcagagcccttcctcaagtctcattggtcaagttgaacgaacaagtgtcgctggcgagccggagagagagagagagcgagagcgagagagcgagcgagagagagcgagagagcgag

SEQ ID NO: 158629 - DNA, 122 bp, Homo sapiens
ccttcactgcactctttgtctgacaccacgaaaagaccgaagatcaaagaggcccccgagcgggacagaaaaaggggtggggcggcgggcgcgataagtagctcggaaaactccaccctaaa

SEQ ID NO: 158630 - DNA, 122 bp, Homo sapiens
tttttttttttttttttgagatggagcctcgctctgtccctaggttggagtgcagtggcgcgatctcggctcactgcaagctccacctcctgggttcacgccattctcctgcctcagcctcc

SEQ ID NO: 158631 - DNA, 122 bp, Homo sapiens
catgcactggacgagggccgaaactcctgtctgctatcgagccctggtgctatgtggccccggagccacagcacaatcatctcagtggcgaagcacaccacttgattctatttttttttaac

SEQ ID NO: 158632 - DNA, 122 bp, Homo sapiens
gctccaccagcgtgaagctgtcgagcaggtccaagcacgtgcccaggaagcatccggccgcgcggtgccgctggggctgcagcagcaggggtcctgccgatcccgggggcgcgcccgcctcg

SEQ ID NO: 158633 - DNA, 122 bp, Homo sapiens
gatgcatgtcaatttagatgagtaatcactcttcaaaatactgtcagaatggtcttttcccgggaaaatgctgcatgattttgaaacatgtggtacacgatgaattgaatatggcaagttgc

SEQ ID NO: 158634 - DNA, 122 bp, Homo sapiens
gaagaattaaaatgaaaattccagtctcctgcctcctggcccagggctcttttcctgatacgcaagtcccttccctcccatgtccttgctttcttgcttattctccaggacatcctgccagg

SEQ ID NO: 158635 - DNA, 122 bp, Homo sapiens
atttccctacactagtggttttcaaagcatggtctcaaatgtcacctgggaatatagacacgcaatgctcaggccccacctcagtcctattgagttagaaactctggtgtgaggcccagcag

SEQ ID NO: 158636 - DNA, 122 bp, Homo sapiens
tgagagaactacatgcaggaggcggggtccagggcgagggatctacgcagcttgcggtggcgaaggcggctttagtggcagcatgaagcgcaccccgactgccgaggaacgagagcgcgaag

SEQ ID NO: 158637 - DNA, 122 bp, Homo sapiens
ttagaaggtaaattttcctgcaaaaatccatcaaaatgaagggttctctccattgcagttcgtaagtaatactgacaggcctgagagcagaaatcagagtctgatgaaagaccaatgttttg

SEQ ID NO: 158638 - DNA, 122 bp, Homo sapiens
ctttcttaaacgacattctttggaactgtctttcatagtcaggcgacccgccagccaggccgccaggtaggtggaagggcggcttcgggaactagatccggctggttctctgctaacatgtg

SEQ ID NO: 158639 - DNA, 122 bp, Homo sapiens
aacgaagcccccctcctctccgccgcggccctggagccgcctcatttaccgcccaggccgcgaaactaggactctggccgctgtctaattccatacccttgcagtcgttggtccctgaagtt

SEQ ID NO: 158640 - DNA, 122 bp, Homo sapiens
gcctaggcggcagcggagtcccgaaccgcgtttctcccgcccaaaccctgccggggccgccgcccacctcgtgtgaccgcaagaggggtaaagtgaagttccagcgctgtcctaaattcaac

SEQ ID NO: 158641 - DNA, 122 bp, Homo sapiens
ttctataaaagcgcctgtcgcgcgaccgccattacaacaaaaactggcggcgaggaactgcggagaactgttgccctgcaccgcttcattttgtgcagcctgaaaggggcaatcacataagg

SEQ ID NO: 158642 - DNA, 122 bp, Homo sapiens
cggaggagggccgaaacccaaggtccaggtccagggcccgcccccgcgcgcccgcgttggcgcccgcgcgctccctccgcaggggttagcaagattgcgctcattctcgccccggctgctcc

SEQ ID NO: 158643 - DNA, 122 bp, Homo sapiens
ttgtgcagccttgggagccctgaaaggccacagcccgaggacaggacggcagcccaggaacgcgctgtgagtggctcctgcgctcaaatcctgggacttcccctaccactgcactcgtgacg

SEQ ID NO: 158644 - DNA, 122 bp, Homo sapiens
ctcggggaatagccaggacagattggcggagaagcgcagcggcgccatgcctggggaggccgggccgggcggagtccgcgggatccaaaggcggcgggcggcgggcggcgggcggcgggcgg

SEQ ID NO: 158645 - DNA, 122 bp, Homo sapiens
ctcgtggctgctgctcaggaagggcggcacttccctggggacgtggggaattgggtaccacggtggcagcttgctgtaccagggcagatcgtagagaggctccctctgtaggcccagacccg

SEQ ID NO: 158646 - DNA, 122 bp, Homo sapiens
tgggacggttgtaggcctgggttccatgtcttttgaggcattgtgacagagagccagcaccgaggggaaggaccagcccctccctgtggccacaggaaggaactcagtcagacagaggaggt

SEQ ID NO: 158647 - DNA, 122 bp, Homo sapiens
ccgttcccgtcttccaacacactcgccaagacctaagtatacttgttgccctctcctgcccgctccggtttctagtttcagcatcaaacagtttggaggtacagagagaaaatgcagaagta

SEQ ID NO: 158648 - DNA, 122 bp, Homo sapiens
tggagggcatgggtatggctgtgggatggctgtggggatggcagaggggctgccagttcccgcccccgctcactggccccttacccgccctcggcacgtgacctcctccccctgcatgaggc

SEQ ID NO: 158649 - DNA, 122 bp, Homo sapiens
atttttgtgttctctaccactatcaagaaaaggaaaaaagatgtgtttgtgtagcggggacgcagcttgacacccatttcctttggctcgcatcgcggtcgcagagcccaatcgcggggaaa

SEQ ID NO: 158650 - DNA, 122 bp, Homo sapiens
gttcctgcactctcggtcgctgccctgcggggccgtccgactccggactcctgctgtggccgaggtgaggctgccgtcggccacactttgctacttctgccgctgtcgcctcggcttgggag

SEQ ID NO: 158651 - DNA, 122 bp, Homo sapiens
ctcattgaggtgtcagtgatagataaggcttaatgtatgacctcattccccaaacactatcggcttgtcagtgagatttacatttaatagaggattaaagccttaagccaaaggaatgaatc

SEQ ID NO: 158652 - DNA, 122 bp, Homo sapiens
cccgccgttcttcttccggaagtcgttggccgttaccatagtgactgcaggcgtccggagcgctgagcagaggtgggtgtgggaaaacgccccggactgagagctcccggcaccgacaaata

SEQ ID NO: 158653 - DNA, 122 bp, Homo sapiens
acccaatcggcttttttaaaagatcgcccagggcccttgtcctgagagctgggagctggtcggagtgacagagaagccatggaagcagcagtgaaagaggaaataaggtaaaggccaagtgc

SEQ ID NO: 158654 - DNA, 122 bp, Homo sapiens
tgagactctgcagacagaaacccatggccaaagaggcactgagaggcactgtttggtcctcgtgagaagcctcagtgggttggcttttatccccatactccctcatgctctcgtagggctgg

SEQ ID NO: 158655 - DNA, 122 bp, Homo sapiens
gggaccaccttccgtggtctttcctgactcccactaaggtctggagggagatccaggcagcgatctgccccctccagcttcgcggcagcctcctatttcgtggacaaggaggcccgaggcag

SEQ ID NO: 158656 - DNA, 122 bp, Homo sapiens
acctaacgcggctgctgattggttctcggggcgcggtgtgcgctctcccgtgacgggagtcgggtgggggcggggaggctgacccaagccacccgcctgcaaatggcgtctgggggccagga

SEQ ID NO: 158657 - DNA, 122 bp, Homo sapiens
agttacctgattgaaacacgaatctgatcactgaaagccttcctgcatccgtctgctgcacgcaggaggcagctcggcctccttccccagtggcctcccagccctacctctagaatttcctg

SEQ ID NO: 158658 - DNA, 122 bp, Homo sapiens
cgctcaggggcgtggcatgggtgggtcgtgagttgggcggggcccacagggcgtgcgcgacgcagcggcgcggcgcgtggcgtaaggggcgtggcgccagtgggcgtggcgtggcgcagtgc

SEQ ID NO: 158659 - DNA, 122 bp, Homo sapiens
ctcagcctgtggatcagggcaccataacctcagaacagtgccaagttgaatgtgtactctcgtttgacagtacctgctaccaggtagtaagattagaaataagaaaatagaacgtgggtttt

SEQ ID NO: 158660 - DNA, 122 bp, Homo sapiens
cccttttaagccctgaaagaccagataaatctcaggtgaacctagagaaacagggagcttcgtatactcaaaagtctatacattacgtattattgaacggcgacctgcggccgcccctgctg

SEQ ID NO: 158661 - DNA, 122 bp, Homo sapiens
gcggaggtgggcccgggattggacttgcggacggggcgggaaggtgtggtccacctttctcggtgccggtgcctcgtttcgggctcgaagagccccaggtcctctgcagagggacgtggccg

SEQ ID NO: 158662 - DNA, 122 bp, Homo sapiens
aacaatcaggggtctgggattgtgagacttctttcaatctgaacttctagagaaaaaacacggatactgtgaccaccagttttttacttacacgacgatacttgctgtcctaatctcatata

SEQ ID NO: 158663 - DNA, 122 bp, Homo sapiens
tggataatgggagggtggatgataaggtttagggatgatattgacattcaagttctgattcgattagagaaagagtgaatatagtatttgtggccaaacgatagtcgattgaattaaagttt

SEQ ID NO: 158664 - DNA, 122 bp, Homo sapiens
ccactagggagttctctgctagaaattacggagtctgtggaagtccccagactgtgcccccgccgcccgccgcccatctccctggtcctctaaccacaacagcccagaagaaaccctgactg

SEQ ID NO: 158665 - DNA, 122 bp, Homo sapiens
caacccaccttgcaaaagaaccacgcgaaaacggaagggaagccatagattgggtgttcccgttgccctctgggaaatgtagtttaagcctaaagctccatgaccgcggtggcttgtgggaa

SEQ ID NO: 158666 - DNA, 122 bp, Homo sapiens
gagagctgatggtgggggatcccgctccctcccgcgtcagtctggccggctccgtcctcccgtaggctccgctgtagctagcaatgtgacaccaggacgcactcgctctcgcgcgctctccc

SEQ ID NO: 158667 - DNA, 122 bp, Homo sapiens
tgtctcatcggcgtacctccgagaacacactgggttctcttggctttgtgctgggagtcccgtcatttgataactgacattgataactcgcgtaggcacccgagactctacttcactggctg

SEQ ID NO: 158668 - DNA, 122 bp, Homo sapiens
gtgaccctgcctacttcagcctgtttccctgcccataaaatgcactaatgctggggaagccgcgctgggaggtgggtcctgaagctttatccaatcagtggcgctggcgcgggaaccgccca

SEQ ID NO: 158669 - DNA, 122 bp, Homo sapiens
accctggggaggtgctgtccctctgagaggagggaggcgtggttctcgggggcggggcagcggcgtccacaccccccagcccagcagcccgctaggatggggcgagcccgcgcgcccacggt

SEQ ID NO: 158670 - DNA, 122 bp, Homo sapiens
ctgtttgtgttataactcttagtcctgccatttggcaggtcctgagttcttgtcccaaatcgaggaagaatgaggtacacagacaattggaggatgagcaaggcaaagaggtgctttattga

SEQ ID NO: 158671 - DNA, 122 bp, Homo sapiens
atacttccgggccttgtcttgattgtgatttctacctgatcaaagttccctaagagtcctcgtaaccccccaccccaacaatgagtctttgcgaggaggtggatcgcgaggcagccgggtga

SEQ ID NO: 158672 - DNA, 122 bp, Homo sapiens
ttccaggccccaggacaactttggtggctgggccccagcagcaaccttgtgtctattacacgagtcgccagtttcaagactgccaaagcagcactcattttctccttcctatttcaagtcct

SEQ ID NO: 158673 - DNA, 122 bp, Homo sapiens
gcccacccaagtagtatcttatcccttctctccttttcatcccagcctgtgcccactgatcgcttggttaccggtcccattatccactccagctcctggtacttctcttctgggtacagctg

SEQ ID NO: 158674 - DNA, 122 bp, Homo sapiens
ccagtcctggtctcaggccatgcccacaggccaacgcatccctggagcctccacttcttacggagagtttcaactcacagttatcttcccatgtctgccagaggcattgcaagactccctgt

SEQ ID NO: 158675 - DNA, 122 bp, Homo sapiens
gtagctgggattacaggcgcgtgccaccacaccggctagttttcctatttttagtagagacgggatttcaccatgttggccaggctgatctcgacctcctgacctcaggtgatccacccacc

SEQ ID NO: 158676 - DNA, 122 bp, Homo sapiens
agacacggggcgagtaggcgcctgggttcggccgagggtgaggggaagggcctgcggggccgcgccagcagctgcttctccagatgacgcttctggatgaccaggacggcctcgggggtgag

SEQ ID NO: 158677 - DNA, 122 bp, Homo sapiens
gcttatacttgctgggaagggaaccttggacacaccttccgaacttaaacacagacccttcgcatgatgccttttactcttccttattcacccagcacacagatgtctcaattctttcatat

SEQ ID NO: 158678 - DNA, 122 bp, Homo sapiens
ccttgtggtatgctggaaattttccattcatctggtgatgtgatcacttggccgtgtgcacgtgtaaaagttcaagctatatgcttaatatttgtgcacgtcggtgcgtgtaagcaatatct

SEQ ID NO: 158679 - DNA, 122 bp, Homo sapiens
gactgaaccagcattcggttacatcccctgaggcggatgacacttgtgtgatcctgtaaccgatttcttgttagaatgttggcatctttcacccagtcgttttcttgtaattttatttattt

SEQ ID NO: 158680 - DNA, 122 bp, Homo sapiens
tcctcagagtgcagaggctgtctctccatttctgcatctgtttgatgtttactgaacatccgctgagccccaggtcttgttcttgggggcgggtgcaacagtgcataacatggacatgaccc

SEQ ID NO: 158681 - DNA, 122 bp, Homo sapiens
gccacattgaggccagcattgctggtggtcagggcaggaggccttggcgtgactggaggccggacagacaagcgccagcgtgctccaacacatagggccaccaggggcctcagccccaggag

SEQ ID NO: 158682 - DNA, 122 bp, Homo sapiens
gaagggaagacaggcgagaatttccaggtccgtggggatcccacgtcccaggggcagaagcgccggggacctgggaagtgcagacttaatccaaggcagagcaaaactcacgcgccgtggta

SEQ ID NO: 158683 - DNA, 122 bp, Homo sapiens
acacacaggcaaaaactgttaatgataaaagtgggatggctgggaaacaaagcctgagggcgagcattttgtctgttttgtttgttgctgtttccccagcatgccaaaatagtgcctgacac

SEQ ID NO: 158684 - DNA, 122 bp, Homo sapiens
agaacagtgcagcaactccgaaatgtttttagtataaagtcctcttattaatgatagcaacggcatctacatatgtttgaaaacgatgccatattgatgctggagatatattgtcgttttca

SEQ ID NO: 158685 - DNA, 122 bp, Homo sapiens
ctctttcactctctgtctgtccaatgcaggcggctgtaagttgggaagctcattaattagcgggccgggggtaggaggagccggctggaattagcctgcctaatgcgcctgtcagtccgggc

SEQ ID NO: 158686 - DNA, 122 bp, Homo sapiens
tccccagcctcctgtgcacctgctcttgggctgcaagtctgtgctgcggggaggcccgagcgctccctgccacccacaccttgcactgcagggagcttcctgttgggtctcacagagcattt

SEQ ID NO: 158687 - DNA, 122 bp, Homo sapiens
ctctcactttggccccagtggctcccgaaactacacctggctgcagggagcagggctgtccgggattctccagagcgcttcgccgcctgccacacacggggtgtcccggcgaccgcctgacc

SEQ ID NO: 158688 - DNA, 122 bp, Homo sapiens
tagagatgagcagaggcgggagggctcaacagcctgtaccgggataactcaccatgcaggcggcctgcaccgcctcagacacgttaccagcattaggctcgcaccagaaaacgtggcactca

SEQ ID NO: 158689 - DNA, 122 bp, Homo sapiens
aagctcaggagggtcgcaaaggtggcgggagtcacccggcacgcactctggggtggggggcggcgagcagctgagacgccggcgcctgcggcagcgggacccaccagctgacagggagggag

SEQ ID NO: 158690 - DNA, 122 bp, Homo sapiens
ggggcggcgctcttcgggaaggctcgggcagcacaggagcccatggcgggctgcaggtcccgagcgctgccccatggggaggcagctaaggcccggcaagaaatcgagtgcagtgccggtgg

SEQ ID NO: 158691 - DNA, 122 bp, Homo sapiens
tgagaggctcctgaccaagggacctgagggatttcggtggtttctttcacctaaggcaatcggattggctgacatagctaagctaagtaaaaataacccttttcacataaataagcagttac

SEQ ID NO: 158692 - DNA, 122 bp, Homo sapiens
catctgagctgcaagagtcagccccaaattgtgtcctttcattttagggttcggcaaaaacggggagcaaaataggtgaaagtcgccccggaacttattgctgtgcggtgagctggaggggt

SEQ ID NO: 158693 - DNA, 122 bp, Homo sapiens
attgtcattcttccttgattatattctgcttaaaccctaccaccctgcacctcaaggaagcgtttaggatggcgactttgttccaggagttgtggcctttcatgaggatgctgggggcggca

SEQ ID NO: 158694 - DNA, 122 bp, Homo sapiens
cccgtcagtacactgtacccagggcgcccacaccccgcctttagttaacgcccctcagtacgctatacccagggcgtccccaccgcgcctttagtgaacacccctcactacgctctacccag

SEQ ID NO: 158695 - DNA, 122 bp, Homo sapiens
ggcagaagggcattggcccaggagtggggtcgctgaggcaggagatggcccaggagtgggcggctctgaggcaggggctaccaccggcctggagtggggggcccacaggcggggggacgggc

SEQ ID NO: 158696 - DNA, 122 bp, Homo sapiens
cagggtaatcaaggtttttcttgttagcatgtggagacttaagcatgattatatgttaaacgcctggcacatacagggtgaaaatatttataagtgaaatgaggagtgtgaaggtggtgagt

SEQ ID NO: 158697 - DNA, 122 bp, Homo sapiens
ctccctgcccagcggagagccccggggggcgagggaggggcctctctcctagctccagaccgttttcccacagcgttccccacttggggccaaaaataaacaagccgcgtccgatttgcaaa

SEQ ID NO: 158698 - DNA, 122 bp, Homo sapiens
gggagcgcagtcccgggcgcaacctcgcggaacgcgcggcccccgccccccgccccgcgccgctcgtccccgtcagccccgccccggcgctcttctcgccgaccaatcaggaggcgcgaccg

SEQ ID NO: 158699 - DNA, 122 bp, Homo sapiens
actttggcatcacttcagataacctgatgcctgcattggtccatcatgactggaggcattcgtttgtaataataaataaagtctgatggtagtccttgaggatgccagttgctttttaccct

SEQ ID NO: 158700 - DNA, 122 bp, Homo sapiens
ttcgcatggctgaggaggcctcacaatcatggtggaaagtgaaagacacatcttccatggcggcagacaagagggaatctgagggaagcaaaaggggaagccacccccatgattcaattatc

SEQ ID NO: 158701 - DNA, 122 bp, Homo sapiens
tcgaaatgccacagctgaacttgggcaagctcctaactccactaagtacagaagtggagccgtacagccatgaatgtcaggcatgttgtggggactagttgtattagttttctattgccacc

SEQ ID NO: 158702 - DNA, 122 bp, Homo sapiens
cagtacacctggagaatcaagatgggagggctccatgctgggcccctgggagccttggtgcggtgctagaggggtgagcagcataccacccggtctggattcatctcctaattgtgtgcccc

SEQ ID NO: 158703 - DNA, 122 bp, Homo sapiens
tctgactgactccttcccagatcttctcggcttagcggctgaagactgacgctgcccgatcgcctcagaagccccctagaccatcaccgacgctgagcttcgggtaactctcacagtggaag

SEQ ID NO: 158704 - DNA, 122 bp, Homo sapiens
tttttttgccacacgtatcattcttttaagaaacatacacaacccagggagaaagcccggcgcctgcccgggagcccagccgcagcctctgcgtcccgcccctcctccccaacgcgcgccgg

SEQ ID NO: 158705 - DNA, 122 bp, Homo sapiens
ttcactccggtaaaaatatattattattcccattttgaagatgaggaaaatcgaggcccacgaagagtgggacaggagagggcttaatttcaagatctctggacagaaaggtcaaactcaat

SEQ ID NO: 158706 - DNA, 122 bp, Homo sapiens
ggacccaacaactccggtacctacccgagaagcaaaaccacctgtccagacagactcatgcgtgaacgttcacaccagcttcgctcagaacagccaaggtttgggaacaacccgaatgtcca

SEQ ID NO: 158707 - DNA, 122 bp, Homo sapiens
caaataatgaaaaatatgggtcctttcagcatacagatgacttagtggtaatagtcccttcgaaccttgagtgcttgcttataaagtcaaggcccagccaatccagcagccacttcactgag

SEQ ID NO: 158708 - DNA, 122 bp, Homo sapiens
gacattgttgaacccatgcctgatgccacattagctcaggactacctacatggacatgtacgtgaaatactaccctacttcccccttatttaagccttttttatggcgggcttcatgtcaat

SEQ ID NO: 158709 - DNA, 122 bp, Homo sapiens
aagcccaggtcccacctctgccccttcagaggccaaggccactgcagagtccagagcagccggaggactacatttcccagagtcccccaagcccagggatgagccattggccgatttaaata

SEQ ID NO: 158710 - DNA, 122 bp, Homo sapiens
accggaggtttctcacaggtggcagagctcggccgccgtcttgttctggcagctccatgacgtcaaagttgaagtgggagaagaagaagacccaatgcccggggagaagtacggtgagcctg

SEQ ID NO: 158711 - DNA, 122 bp, Homo sapiens
ctggcccctcccttcccctggcctgagcgcccctgcggcctcccgctcctcctgagaaggcgacaatctctttgcaccttagtgtttcgaggacagaaagggcagaagggtcacttcggagc

SEQ ID NO: 158712 - DNA, 122 bp, Homo sapiens
accccaggggaccggctgaacgagcgcgtggcctaccaccggctggccgccctgcaacaccgactgggccatggcgagctggcagagcacttctacctcaaggccctgtcgctctgcaactc

SEQ ID NO: 158713 - DNA, 122 bp, Homo sapiens
aatcatttgtgcaggtgctttattggcactgccatagccagagctagcctctagtaccatcgctctccttcttgacctctgagtacacactcattgttagatagaaggaccgtctatcccta

SEQ ID NO: 158714 - DNA, 122 bp, Homo sapiens
tgagctcatgagctcacacccgtggacgcccgtcctggacatgcgggactgtgcccgtgccgggcactcacggccacctctgcccgcaggcacgctacaccccaactgccaagacagcagcg

SEQ ID NO: 158715 - DNA, 122 bp, Homo sapiens
acgggggggacctgatgtaccacatccaggacaaaggccgctttgaactctaccgtgccacgtacgtaagggccatggtggggaagggcccagtgtggaggaagggctactggctcagagcc

SEQ ID NO: 158716 - DNA, 122 bp, Homo sapiens
gaagccacagggtcaggcgtgactcggggttcgcttgccccaacactccggggatttaggcgagaaccgcgtgaggagccggtgctgaggatgtgggtcccaaagcgaaggcctgggctgcc

SEQ ID NO: 158717 - DNA, 122 bp, Homo sapiens
gcggctgcaactcatgctcaggacccagcccagcttgttgtgtagcacctgcttgaggcccggcggcagcggcagaccctccagcgtgtctcccgagtctggccgcagctggcgcaggcggt

SEQ ID NO: 158718 - DNA, 122 bp, Homo sapiens
tctgggaggagctaacaaatggaatttgaataataatgaggcgactgaacaatttaattacggaaggtagctctagagactccaataaaacggctgaaagcctttatctacaaaaatgtggc

SEQ ID NO: 158719 - DNA, 122 bp, Homo sapiens
gccgctcaccttcactcgcgtgtacagccgggacgcagacatcgtcatccagtttggtgtcgcgggtgagaacgtgaggagggaaaatccaagagacctgggcggggtcagggaagggagga

SEQ ID NO: 158720 - DNA, 122 bp, Homo sapiens
tgcccctttgcttccggctgctgtttgccaagatgtcccagagacattctattccggccccgtacccccacccccgcacttcagtcctctactaaagagcaggcaggtgtgacagtgctgtg

SEQ ID NO: 158721 - DNA, 122 bp, Homo sapiens
aaggccaatagatagctccctttcctttccacagctttgggagcttgggctaccctgtaacgtctaaatgcctgtgcagtgtgggcctgtgaagctggcagggtgggcagtgtaaatgccca

SEQ ID NO: 158722 - DNA, 122 bp, Homo sapiens
aagtagaacctggccggggatgcccaggtggaggagaacgcagttccagctcctgggagtcgggcccagaactgtcccctgggaatcctcactgggctcttctgactttctctgttgggtct

SEQ ID NO: 158723 - DNA, 122 bp, Homo sapiens
ggactggggaactcaataccccctctgcttacccaggcaggaccgtagcacccacatccccgcaagttttcaaaacggaaggggcctggtgcatgtgtgatctcccagcacatggttgtggg

SEQ ID NO: 158724 - DNA, 122 bp, Homo sapiens
ggcgtcggggtgtaagcagccagcgagtaaggcgaatgctcagaccgtgctaggcagcttcgcagcccggctggctggtggggctgcctgcacgagagcagcccgctccccagcaccgccga

SEQ ID NO: 158725 - DNA, 122 bp, Homo sapiens
acggtcattggcagaggaatccgatattcctttataatcatcttggagtccaagccttcccgtcgatggggaactgcaagttgggacttctaggcaaggttccttaaataaccatgacaaaa

SEQ ID NO: 158726 - DNA, 122 bp, Homo sapiens
acaatggctgcagcctgcgggcaaggtgcttgccttttctttctaagagcagttctcaaacgccagcagggctggttcaaacacagatggctgagcttccaggctggagtttctcattcact

SEQ ID NO: 158727 - DNA, 122 bp, Homo sapiens
caagcccgcaccaccaagtccagctaatttatttttatttttatttttatttttagagaccgggtctggctatgtcctgcaggctagtagtctcaaactcccggcctcaagcgatactcccc

SEQ ID NO: 158728 - DNA, 122 bp, Homo sapiens
ctgcggatttctgaggcacaattgtgtgacacaggaagcccaagtgttggccatcctcaacgaaggcagctgccgggctccggtttgcttcagcaaaccctcacccctcgccttcaaccagg

SEQ ID NO: 158729 - DNA, 122 bp, Homo sapiens
agggacataagaagttagggccaaaatagggagagagtagaacagtgaaaacttctcccacgcctacccccaagtccatgaaagtgcaagtgaccccacagttcctctgtctcccagtggaa

SEQ ID NO: 158730 - DNA, 122 bp, Homo sapiens
gtgcctgtacttctgtctttatttacctgcttattgatgaggaaactcaccaaggtgagacgcccagtctgcttggacggccccatcctttttccccgggtcagtgcccagcggccacgtgg

SEQ ID NO: 158731 - DNA, 122 bp, Homo sapiens
taggtgcctccaccagagcttctgtcgctctgtaacctgcactgtgacctacactagtcgcgggagccacgcagaggacgccggaacaccctggaagccgagaaatggtgtgtgtgaggggg

SEQ ID NO: 158732 - DNA, 122 bp, Homo sapiens
ccctttctcttcactgttttctctggtttgattggttctttcatctagaaacaatgtcctcgttggtagattagtagctgttaatctcagctgaatggaatttcagcttataagaagtgggc

SEQ ID NO: 158733 - DNA, 122 bp, Homo sapiens
gccagcggggctgagcgcggccagggtctgaacccagatttcccagactagctaccactccgcttgcccacgccccgggagctcgcggcgcctggcggtcagcgaccagacgtccggggccg

SEQ ID NO: 158734 - DNA, 122 bp, Homo sapiens
tggtgatagcaggtgaggatcccctaaaatacccctaggctacagccaactgtgtagatacgtgtctatacctgtgcatgtgtgtgttggaaaaggtgcatgtgtgcacggaagtgtttgca

SEQ ID NO: 158735 - DNA, 122 bp, Homo sapiens
ggccaccctagagcacagccttggagcccctctccgcacacgtgggtgtgctgcctgtctcgggttagccatggcccatgaagctatctctgactcctgagcagccagacgtggggtggggt

SEQ ID NO: 158736 - DNA, 122 bp, Homo sapiens
tttctctgcatatcaccatcattgtcctggtctttgtctctagtactgaacctggagagccgccctgcattacttccgctggcttccagttcctgttgctggacaccccggctcagctctgg

SEQ ID NO: 158737 - DNA, 122 bp, Homo sapiens
ctcaaactcctgacctcaggtgatccacctgcctcggcctcaaagtgctgggattacaggcgtaagccatttcacctggcctgtgaaaagcatttgaatgtgataaatggtgcttcagtttt

SEQ ID NO: 158738 - DNA, 122 bp, Homo sapiens
taccgatctccactcggccttcacgtcccatctcagaaaacgagggatgcccggtttaaacgttcccgtacacagcgcacacttcctgtggatcgaggtcacccctcagcagcgcctcccgg

SEQ ID NO: 158739 - DNA, 122 bp, Homo sapiens
tgcacggcacacatgtaacatgcacagaatggtggccgggaccaagtgagatttaatcaacgctgcttccctcccccacttttctcagcacacagagaaggaagcactcaggacgttgttga

SEQ ID NO: 158740 - DNA, 122 bp, Homo sapiens
ttgctttctaccgggctctctcagttgtcttgtgaacacacacacacaggtttcatctgccgggggtgtgtgagtggcttgggcctgctgcagtccctagggtacatacacatggccttcag

SEQ ID NO: 158741 - DNA, 122 bp, Homo sapiens
ggcgggggctgcggtgttaccggtgaagaagccgaaaatggagcacgtccaggctgaccacgagcttttcctccaggcctttgagagtgagtgtgtgcgaggctttgagggcaggaagaccc

SEQ ID NO: 158742 - DNA, 122 bp, Homo sapiens
ccggccgaaccccgccccgcccaggccccgcccccagccccccaggtgaccgcggctgggcggagacccgcatctgtagggtgcagggctgtcccggagccttctgcccccgccctctctag

SEQ ID NO: 158743 - DNA, 122 bp, Homo sapiens
atgagatatttttaagtaagaaaagtagggctcacaaaagagtgtgaagtgtgtacaatacgattccatgtaaataaaacaattgtaaataaacccttgtgtatgtatgtacaagaatatat

SEQ ID NO: 158744 - DNA, 122 bp, Homo sapiens
aactttgcatcttgggcttactttgggagtacgtgtcctgacaccagcttgtgtatggctcgcaataagtgtcggagctgtgagaagctttcttcaagctggttccttgactcctccacaca

SEQ ID NO: 158745 - DNA, 122 bp, Homo sapiens
ctttttgcttcgaaggacgagtttttcctgaattcacaatacttttgcattgaagatgtccggtccctttaaggtcttgggtgacgtaatgactagccccgccccctctcttctcgcttctc

SEQ ID NO: 158746 - DNA, 122 bp, Homo sapiens
actgtggggccggagcccgaagcactcgccctgactcctgcacctgccagtctgcatgctcgcattcttgtcaggggtttgagcaatggtgactgaacaggcgagtcacacccctgttgcac

SEQ ID NO: 158747 - DNA, 122 bp, Homo sapiens
aactgcaggcagctaggctgggtttgtgcccaccctcctgggcctggcagtgggaggtgccgtggttcaagacagagccaaacttcccctgtttcagaatgtggggggtggagggtccttta

SEQ ID NO: 158748 - DNA, 122 bp, Homo sapiens
aaacccgcgcagagcgagatggaggcaacgagaggcagcctagaacgtctccaacttttgcgaaacacagacgcctacgtttgagccctcaaatccttccctccgttatctgcgccatttcc

SEQ ID NO: 158749 - DNA, 122 bp, Homo sapiens
ggaggtggcagagctggcccagcgacctgagtcttcctgaccccagccttccaggtgaagcgtgccaccctgctcacctcccactgccaagttcactgccagctcaaggctcacagcctgtg

SEQ ID NO: 158750 - DNA, 122 bp, Homo sapiens
actgagccagatgccggaagcggaattacgtaatgtggcgcggaaaaggacgggtcggaccgtaccaaattcggaagcgggggatgacctgtgtgattgatcgctagttcttctagggccat

SEQ ID NO: 158751 - DNA, 122 bp, Homo sapiens
cacattctaaggaaagaaacaccaggaaggtgtggccttaggcaggccccttttccttttcggatcactgcctgcctgtcactgatttctgtcctaaccccacactaatagctgctatatat

SEQ ID NO: 158752 - DNA, 122 bp, Homo sapiens
acttgggcgatgggcgggtacaaaagttccctgtggcagctacttgctccctttgtgagccgtgcgctttggcgtctccacttgggcgcattactcagagccctctaagcgcgattgtttct

SEQ ID NO: 158753 - DNA, 122 bp, Homo sapiens
tcagcacactctagtggttctgaaccacctggtgtccctatcgccccctggtgtcctgagcgccccctggtctcctgaaaaccccctagtggttctgagccccctggggtcctaatctcccc

SEQ ID NO: 158754 - DNA, 122 bp, Homo sapiens
gctcattgggatcggaatgttgtcggttgagaaattcagctactgctttggcaggaaattcggtttcgcacacgtacccaaagtccctggctaggtggacagcttctcctggcaagagggga

SEQ ID NO: 158755 - DNA, 122 bp, Homo sapiens
cgggtgccgcagtgccccagcgggagggtctacgtgctgaagttcaaggcagggtccaagcggcttttcttctggatgcaggtatggggcaggccttggggttgtgcctttttgttgccctg

SEQ ID NO: 158756 - DNA, 122 bp, Homo sapiens
ctatttatttgatttactcctgtctttggcttcggtgtcatattgttggtgttttatggccggctcaggcctgcagtgggcggcgctgcgtgcgcccgcacgtttctcttgcaggcgcggcc

SEQ ID NO: 158757 - DNA, 122 bp, Homo sapiens
taaacatttacataaggcaggaggttcaacacttggagagtgtaatcaaggcagtagtaacgcagtgctcctctctttgacttgaatgacttcctccccattagggtcattattgttttgca

SEQ ID NO: 158758 - DNA, 122 bp, Homo sapiens
ggaggaagctgaagccgcgcgggagctgggcagaggcaggataagaactgcggatgaggccgagcgcagctcttaccctccccttaccctccgctccccgcgacgcccgtcccccagagctg

SEQ ID NO: 158759 - DNA, 122 bp, Homo sapiens
gcagttacagtcagagcttcttctctgcatgggagtgaggcttggtccttcccccaaacacggggacagtgatctctccagaagtggagatgacaccattcctcctctaacatggtccaatc

SEQ ID NO: 158760 - DNA, 122 bp, Homo sapiens
tgtggaggacaggtctgccagggtgtccgtgggctgctgtctcaccggtggcctcttagtcgcggagagcagaacccggcagcttcaggggcagcctgggggtgggtgttacctgctgtatg

SEQ ID NO: 158761 - DNA, 122 bp, Homo sapiens
tagactgctttttaagttcagcaattacagcatcaacagctaacatcacacctagttcaacgatatatgtcattacaatgtttatttctctcatggcttctatgtcaagtagaaatcttgag

SEQ ID NO: 158762 - DNA, 122 bp, Homo sapiens
tagggagcctgcccttgcttctgctgccctcagtgtggagatgctgaataacaaagaccccgtgcagggactgtgctggtggatgggtagctgtcaagttgactgagtcacaaggtgcccag

SEQ ID NO: 158763 - DNA, 122 bp, Homo sapiens
gggtggatctggaggcatcctcagaactgagaaaggagaggaaaacaccaaaacaggccacggcataaattaacattggggacatgccacactcagagaatggataaaatttccgtagttgg

SEQ ID NO: 158764 - DNA, 122 bp, Homo sapiens
accaaaatgcaagcttaaagcaaagtttattgaagcacaataatacactctgagggacagcgggcttatttctgcgaagtgaactcagcacttctttacagagctcaaggtgcttttatggg

SEQ ID NO: 158765 - DNA, 122 bp, Homo sapiens
atgcccaatacttcctgagaaaagttatcagttaactgacgtcatctagcttgcagtctgcgtcattaagtttgacagaggtatgaaaatgaaacatagatgtatgctagagccccggttgt

SEQ ID NO: 158766 - DNA, 122 bp, Homo sapiens
atcaacgcaatgtgtatcatctatgcttttcagttttgaacataaagcagtggctctgagcgcgactcggagggcgacgccgcggccgcagccatgggtgctgggcctgcaggggcgcgggg

SEQ ID NO: 158767 - DNA, 122 bp, Homo sapiens
cccctccccaccccagggtgacgcgcagccggagtggaagcagttttggcgggcgagcagcgccttgcaggaaactgactcatcactactccctccagcggtccgaggctctgcccacgcac

SEQ ID NO: 158768 - DNA, 122 bp, Homo sapiens
agaattaatttgtcttccacatcaccctcaaccaaccccacaccaaagtgttgactcagccgttctgaagcccggattcccagctgcaaaatccccagttaaatttctagacaaaataactt

SEQ ID NO: 158769 - DNA, 122 bp, Homo sapiens
cttttgagggagtttccatagtaacgtgtccttccagtcgcctagcctgaagggaagccccggagctccagcttcaaggctcagctctcccagatgcaagtatctttacctccagccagctc

SEQ ID NO: 158770 - DNA, 122 bp, Homo sapiens
gccgcagcgctgaagccaggaggagctggatggggacacctggtggcagccatgtggggacgttgggagccctcgccctccagcctcccttcctgtcgctttgcaaatgctaatcctaaacc

SEQ ID NO: 158771 - DNA, 122 bp, Homo sapiens
ctagtgttggttttcattccagagaagtagctgatatgggaatgcagaggatatgggctccggccaaaccacaggactggggccagccttgtttcccagatgcgtgctacagagactgtccc

SEQ ID NO: 158772 - DNA, 122 bp, Homo sapiens
ttcgggggttgaagccggaagtggcgcacagccctagcagcaacaacagttttccacgtgcgcgtagggcgccgggatcacgtggggaggcagaagccaatggggaagcgtttcgtgtaggt

SEQ ID NO: 158773 - DNA, 122 bp, Homo sapiens
ccctcccggagttgagaccttgcttcattttccttggttgttgctgctgtcacgtcttcccgccacgcccactttcctgccggcgcccagtgagcgttgagggagagtgatttgcagccggt

SEQ ID NO: 158774 - DNA, 122 bp, Homo sapiens
gaattaaggttacagtcttttcatgaaggcttggaaagagggtctatttgcttgctcatccgatctgtctggcactgacatgaaataataatgggtatggagggagaaaaaaaggctctcct

SEQ ID NO: 158775 - DNA, 122 bp, Homo sapiens
tggaagtggctgggcccttccctgggaggcctgggctggtttccagcatggcaagtgcagcgctgccaggccagccccgagacaggcccagacacacagcacagactgcagggaacagaggc

SEQ ID NO: 158776 - DNA, 122 bp, Homo sapiens
atacgtacctgcctttgagtgaaccttcaatgccaactaggaagggcgcttccaaaacgacgttatttgtaactcctaggaagacaaacacgggtcagaacccatactctgcgggccttgaa

SEQ ID NO: 158777 - DNA, 122 bp, Homo sapiens
caggcgcctttacccggttctttttcagtttaggccaaaatgcccacagggtggtggcgacgggggcggggcttggtgggcgggactgactaaggggcggggccagggtctcacaccctgca

SEQ ID NO: 158778 - DNA, 122 bp, Homo sapiens
ccccctcttactactgttgcaccggggactgggcttcaatcagtagcagcaggggatgcgcgctcagacccagcagtcggctctgcccgcctcgccgggctgcaccgagtccgcgggtctct

SEQ ID NO: 158779 - DNA, 122 bp, Homo sapiens
ccggcgatttggtagttctgaatcccaggagatctgcggggggagccttgggctaggccccgtcacgggagagcctcgtgttgtcgcagaccggacttgctcagccctgggacctggggccc

SEQ ID NO: 158780 - DNA, 122 bp, Homo sapiens
cacacccccattttacagatgatgaaaaggaggtgcagggagtggtgcagctgcttcaggcgtacacagataggaagtgacaaggctgggactctgcagcctgagtgtgtcatcacgaccca

SEQ ID NO: 158781 - DNA, 122 bp, Homo sapiens
atgacctgcagtcttaaagagctgttgattgcacctggggctcccgtggccggcgcccatcgagcagcccatcctggctgttcccttgttcagctgattttcttttttatcttgacatttgc

SEQ ID NO: 158782 - DNA, 122 bp, Homo sapiens
ggaaattgatgtgggatttgagagtcttggctcgggcgtggacatcagccgcctcccctccggtctctttcactctccgaaaccttcctcgggaaccgctgtcctccctgcctggcggcccc

SEQ ID NO: 158783 - DNA, 122 bp, Homo sapiens
ccaaacttgggagagcgagggtcacgcggcgctggggcccgggtgtgtggcgggggagggcggcggggggcgggagggcgcaggaggggggctcggtgcgggtccgcccggggccgcgtcct

SEQ ID NO: 158784 - DNA, 122 bp, Homo sapiens
cacaaagaggttcttcttagtggagggagagcagatgtagggcatcctaccgagaatttccggaaccacgtgcgagatgatgccagtcatgaacgtctccgcgcttcctttcgctttggaaa

SEQ ID NO: 158785 - DNA, 122 bp, Homo sapiens
ccatatttatcgtatgggcagcccaagtcgcgacaccgcatcacccacgcatacacaaaacgcccatcgagagcgatgaataacaaaaaaggaaatgcaaagaaaaacatcatgactcccag

SEQ ID NO: 158786 - DNA, 122 bp, Homo sapiens
cccgccttgacttgtgaccctaggccctttggggcgcctctgacccagctagccagatcccggacccaaaccatgttccctgtgaaggtgaaagtggagaaatcaggtgaggaccctgacgt

SEQ ID NO: 158787 - DNA, 122 bp, Homo sapiens
actctcactgttcttactgaattttagcagatattcttgaatagatgttgctgaattttccgtatgcccttaggaccatttccagagacctgaagtgttttcccatccctcaacccccctaa

SEQ ID NO: 158788 - DNA, 122 bp, Homo sapiens
gtgggccagagcctggcctcggctggcagttgcctgggagctgactgacacatcagccagcgctgccacaggctcgcacatagtgagggcgtgcttctgtgcgtcccatggaagtccatggc

SEQ ID NO: 158789 - DNA, 122 bp, Homo sapiens
ctaacttcaagaatgaagccacggacccttgccgtgagtgttacagctcttaaggtggtgcgtctggagtttgttccttctgacgttcggatgtgttcagtttcttccttctggtgggttcg

SEQ ID NO: 158790 - DNA, 122 bp, Homo sapiens
gggaagggggatcctcggagaccttcctcaacctcagcagggacacccggactctggctgcgcccgctggggacccacaacaggcccacatgtcccagaagtttctgctgtgtgctgatctg

SEQ ID NO: 158791 - DNA, 122 bp, Homo sapiens
ctgaaacacgaggcacctaatatggggggggggggggggttaaagccaattatgggtattcggactcgaaatagtttctaacaaggcgttttggggttgggggatgctctccccacgagatt

SEQ ID NO: 158792 - DNA, 122 bp, Homo sapiens
agagaagcatagctctggagacggcactctgtactgtctttcaccctaaattttcaaacccgttccaaactggcctcgttgccctctacaccggtgtgcaggatcacctctctcctgtgtcc

SEQ ID NO: 158793 - DNA, 122 bp, Homo sapiens
tcttgaataatcggaacccctctgccagattgtcgaatgtcaacttattttctggtactgcgtctacatccacttcttcatcatctggcactgattcgaaagcactcatctccatcaagtgg

SEQ ID NO: 158794 - DNA, 122 bp, Homo sapiens
aggcctgcttgggttttacacgagtgttgcgcctttacccgggtctctgtcagtgggtcccgcctgacccgtgggtgtgcatgggtccccgtcgtaggcaggcgttctgccctggccaggcg

SEQ ID NO: 158795 - DNA, 122 bp, Homo sapiens
tagaccctttcataattttctgactaagtaggagaattgagggcataccaatatacaacccgaatcagctgtgcgtctggggcattcaggtttccctgggatttaggactcttaaccaaatc

SEQ ID NO: 158796 - DNA, 122 bp, Homo sapiens
tgttgaaagaatgggtgtccgcgtgagccaaggagtactaaggaatgtgagtaaccgccccggccaaaaatattcgtttccagcacaagggcatgtaccggggtttatgctgcaggtccttg

SEQ ID NO: 158797 - DNA, 122 bp, Homo sapiens
cccgctagagctcggggacagggaccccatcccggtgcctagagcgtctcccttagtcggcgtgggccagcgccagttacctcacgagcactgaactagcgcctgcgcccttctatacttct

SEQ ID NO: 158798 - DNA, 122 bp, Homo sapiens
ggagggagggaaactccgaggggggaaggggaggggggaagatggagaaaccgtctccgccgcctctaccgccgcggccgcttctctgttacccgggaaatcccgcccactcccccgacccc

SEQ ID NO: 158799 - DNA, 122 bp, Homo sapiens
tcaaactcccgaccttaggtgatcacccgccttggcctctcaaagtactgggattacaggcgtgagccattgcgcccgtcctaaaattttcttgtagtgggaaaatggggtggcgaggctgg

SEQ ID NO: 158800 - DNA, 122 bp, Homo sapiens
ccagattttcatgttatgtcaaatgcctatttgaaatactttcctaaaaatctgttttgacggtgtaactctgtaacctttgaaaactttgggagttgtcaggagttggcctgttcatagaa

SEQ ID NO: 158801 - DNA, 122 bp, Homo sapiens
tttcgttagtctgttctctagggtcagggctctttcctgggtgacagcccagccttgagccgtagcactctaaagaggaagagcccagcttccacagaagaaatcaagaactgcaacccagc

SEQ ID NO: 158802 - DNA, 122 bp, Homo sapiens
aataagttgccttttccaaatcacttaactggcaggattctttctgtcatggattttttccgttttcttttttaataactactaactgcaattcattcccctactgaagaattttcagtttt

SEQ ID NO: 158803 - DNA, 122 bp, Homo sapiens
tccctttctctcttcagtcttcccccaagtccctcattctgacattctcgctcgtcctcgcgcgaggtcaaatacccagctttattcctgcccatggagcccgaacaaagttttgggtcacg

SEQ ID NO: 158804 - DNA, 122 bp, Homo sapiens
aagtttgaacttttcgtttcctgtcccttccctggaagctgggggtcctgactgcagccccggacactgggtgattgcattgactgcctgaggccccctgggatctcctgccctccgggtgc

SEQ ID NO: 158805 - DNA, 122 bp, Homo sapiens
tgcggtgagtgtccaaaaaatgggcggggtggggattttaggcaggggagccccctccctcgcgcagccagaggcctcgggctggcgggggcgcatgcgcagagagccctcgcggccccttt

SEQ ID NO: 158806 - DNA, 122 bp, Homo sapiens
atgagagcaagcatactggtccgccagggtcttgggcgggcgcccagggccctgagaaaccggctagccaggcttttcttatatgggggcggggacggctggggagctcccagccaactctg

SEQ ID NO: 158807 - DNA, 122 bp, Homo sapiens
ggggacgctggcccgcctgctccgggtgttcgggcctgggccgcggcgcgcgcgggctcgcgtctggccagttctgggtgtctctggcggcctttgtgtctctgctcctgtgtcggccttga

SEQ ID NO: 158808 - DNA, 122 bp, Homo sapiens
gaggagagggcagggccctctggtggccatcacggggcactgcacgggcagagggcgcgccgcctcaggggacaactgccgtctccaggggcctcagctcccacacccggcggccggagagt

SEQ ID NO: 158809 - DNA, 122 bp, Homo sapiens
gccagtagccttctctcattgcatgctcattacaatctgagcagggagctataccaatcacgtcggtggggaagctagcacagagaggtgacaagccttgtccaacacccctagctggtaag

SEQ ID NO: 158810 - DNA, 122 bp, Homo sapiens
cacagttctttgccggtgccaaatttaggacgcgctgtacttgtaggtgagaggttttggcgggaaggaccccgggtgggcggagaacgccggggcggggaaggagatcgcaggccgcatcc

SEQ ID NO: 158811 - DNA, 122 bp, Homo sapiens
caaacctgtgacagcccctcctagataacaatgtaaaatgcaaaggaattacagaagaggcgttgggggatatcacctcttgtagtagatgggttgatcacgcccaggcattcactgaaggg

SEQ ID NO: 158812 - DNA, 122 bp, Homo sapiens
gcgcggcagccgcccctgcccagctcccctgctcagctcccctgctcagctccccggttgcgctctaagtacccgcaccggggcgacacactcccaccccgcaggggaccaagcaaaagtct

SEQ ID NO: 158813 - DNA, 122 bp, Homo sapiens
gattcaaatacagtccagacattgcatttagctgttatttgccctaagtttcacttacatcgtaacagttttccctcctttttattaatgtctttcatttgttggtgaaaccttgtgacatt

SEQ ID NO: 158814 - DNA, 122 bp, Homo sapiens
ccagggaaaccctggccagaggcagaggccgggggcagaaagaggatgtggcacccagcgcgtggccaccatagagtctgtaaaagagatcataggggctttctgagaaaagtaccctgaga

SEQ ID NO: 158815 - DNA, 122 bp, Homo sapiens
ccccattcgtaaaggggagcctctaggacatccctaactaggcttcagggtccagggaaacgccctccccagtatggcgggccacattgaaatgtaaaaaccaggcctgggcgctgtggcca

SEQ ID NO: 158816 - DNA, 122 bp, Homo sapiens
cccatcactcctcatcgtccgcctccccagccagactaaggtggcacctcgccctgtccccgctgcctggagttcagggcagggcacccccagcaggcacagggaccaagagcagtgggctg

SEQ ID NO: 158817 - DNA, 122 bp, Homo sapiens
gagcagatcggagggaggctgagtgagagatgaggcagtgctcacatcctcagtgaagaccggaggaaggtgagggttaacccctgattttcatgcagaataaactgctgcttgaagatcag

SEQ ID NO: 158818 - DNA, 122 bp, Homo sapiens
tctgaggaagaccgctgcttctactgccacgagcaacgggaggattccagccatccgggtcgattagaccaatgccgatgaatggcagcctgatgccaggaagggcacactggaggaattaa

SEQ ID NO: 158819 - DNA, 122 bp, Homo sapiens
ggggggcagacttagtgaagcagagaggagggccgggaccaacagggcgcctgccctggtcgccccatacccagaatgcggccaggctgcagggaaggccgccactgggcttccccggctca

SEQ ID NO: 158820 - DNA, 122 bp, Homo sapiens
gcacttgggctcactttgtcctacagtctgggaaagcctgtctgcacgaagcatgaaaaacgtattaaaacgcagtggcccagcgggggagcgtgaatgagagctcgcattggtaagcttct

SEQ ID NO: 158821 - DNA, 122 bp, Homo sapiens
agcatcgaaagggctcagagtcagcggggtaatctgaggatgagtcctcctgcagaggagcggaacaccagacgctctgcaaagcccgcggtgtccgagccaggcggggagagggtgaggga

SEQ ID NO: 158822 - DNA, 122 bp, Homo sapiens
gcggggtaagtgtcccagcactgtgtgtggtgtctgtggcaagccttttgcttgcaagagcgcgttggaaatccactaccgcagccatactaaggagcggccattcgtctgcgcgctctgca

SEQ ID NO: 158823 - DNA, 122 bp, Homo sapiens
aggtgatccgcctgcctgggcctcctaaagtgctgggattacaggcatgagctaccgggccggcggtaaagtaggctttatacagaagatacatttcatccatttagcttagtagcatgtaa

SEQ ID NO: 158824 - DNA, 122 bp, Homo sapiens
cgacttagcacgaagagtgcgatggaagggctgcttttggcaaaccgtctcaaccccgggcgacggcgggcacgggaggtcagggagcgctggaggaaacctgcactggggtagaaatggct

SEQ ID NO: 158825 - DNA, 122 bp, Homo sapiens
aaaatgtatacttgcatgtggtgtgaggtaggggtctgatcttgtttccagatgcctagccgtttgcccaggttctgtttattatataggtagacctggttttaaatttccattctgcccct

SEQ ID NO: 158826 - DNA, 122 bp, Homo sapiens
agtgaggagggctgtctcctttttggtgttagctgtgttgatgtaaaagagcgccctgctcgtccgcttgctgcagccgcccggtctgcagggtccgcggcggcggggagggattctggcgt

SEQ ID NO: 158827 - DNA, 122 bp, Homo sapiens
ggttctgtagcacagcgcgcttgagtgactaaaaacctgggttgggtgcaggtccgattacgcagcagaggttgatgtcatgggcagatttggaagacttgaggggttctttgtaagccccg

SEQ ID NO: 158828 - DNA, 122 bp, Homo sapiens
cctggaggatggcttgggctgttctgtcctacagacctgtggctctcagcatccattctacgcctcacatgggcagccctgctgaagaaaatcaccaaactgtgtgttgatgccaccatcca

SEQ ID NO: 158829 - DNA, 122 bp, Homo sapiens
gaaataacatggttaatcatttgtacaatgctcttattagtaagaggaatcgagcaagcgcggagatggtggacttttctattcggagctatttcaacattaccatctggaatcctactatt

SEQ ID NO: 158830 - DNA, 122 bp, Homo sapiens
ctgagacagacctgagcttgaacctggctctgatacttcctagctgcgtgaccttgggctcggctgcgtgaccttgggctcggctgcgagaccttgggctcgttgcttctcctcccagagcc

SEQ ID NO: 158831 - DNA, 122 bp, Homo sapiens
ttttgaaaagaaaattgaaaagttcttttgagcaacttccaccaaattctgcccgggccccgtccctaggtctctggaacgttctgtgggtgaaagcgagttactttgaatcgaggagaagc

SEQ ID NO: 158832 - DNA, 122 bp, Homo sapiens
atccattcaatcagagtggggctttagtgtcaacccatctgctctgcatggctcaggtcacgtggcccttctccccacctcctccccagtccccgtccaccctcccacctctctcttgccgc

SEQ ID NO: 158833 - DNA, 122 bp, Homo sapiens
ttgtgcagagtcctcacggcgtttctcccacagtgctgctttcaaaatggaagaagatgacgcgcccatcaagcgctgccccaagtgcaaagtctacatcgagcgagacgaaggctgcgcgc

SEQ ID NO: 158834 - DNA, 122 bp, Homo sapiens
cactgtggcgcgccgcttccggtctgcagccttgtagtggggctggagcagagcctgccgcgaacccccggagcccacgatccctcgtgccatccctcgaatccaccagcacgagcgtccca

SEQ ID NO: 158835 - DNA, 122 bp, Homo sapiens
gaagccagaagatgtttaatctcaagggtaaacgtttcctgtgctgctcgataaaccgcacgtgttcaaagaggagcaggcaacacaatgcaaggaggaggacggcgtctacacgggagtaa

SEQ ID NO: 158836 - DNA, 122 bp, Homo sapiens
gatcctaaaagagacagttttcaagtggaattaaaatagacagaattcatggccaggtgccgtcactgacacttgtaatcccagcactttgggaggctgagacagtggattacttgagccca

SEQ ID NO: 158837 - DNA, 122 bp, Homo sapiens
ggctgggggcgtctgtcacctgggtcctgaatcagggatctaagcgatgtggactcaggccgctggaatgcctgggttcaccggcagctcagttcatatttcttgttctaatgactcccctc

SEQ ID NO: 158838 - DNA, 122 bp, Homo sapiens
agactgtggcagagattttaaaattttctttagcctttcattgtctctatgctctttaaacgtagcctgtttctttcttgaattgccagagttttttttttttttaaatgtgctttaagggt

SEQ ID NO: 158839 - DNA, 122 bp, Homo sapiens
ccgaccgcgccgcctagctccgcgcccgggccgcgttcttttcccacggctggcacccttcgacaacttctgattggcccagcccgccagccgctctttttgattggcggctcccgtccccc

SEQ ID NO: 158840 - DNA, 122 bp, Homo sapiens
cgaaccttctcggagtattccaaggatggaatactctcacttgagcgctgccgagggtgccgcttgaggaaaacgtgagtttgtgaaggtgagcagtctgggtcggtagcgaaagcggagac

SEQ ID NO: 158841 - DNA, 122 bp, Homo sapiens
cccaggtgatccacacagctgggcctcccaaagtgctgggattacagtcttgagccaccgcgcccagcctaaaaagtagttttctaatgtaactatataagtagctaggtaatttattaaaa

SEQ ID NO: 158842 - DNA, 122 bp, Homo sapiens
cccagggctccctccatcggctctgaaaagtgagccgccgcctgcaatgcccgcaccagccgcagcagagccccaggctacacaaggcgccctgcaaactgggttttgggggaacaaaccaa

SEQ ID NO: 158843 - DNA, 122 bp, Homo sapiens
ggagggggcaaccgcgctccgctccacccgtcgccagaggctccacgcgcgggacagacccggctgctgcagcctgtgctggtctctgtgcaccgggacccttccctgcaggatctcaaggc

SEQ ID NO: 158844 - DNA, 122 bp, Homo sapiens
ctgtgtgctgcgcatgccctgcagttaccccagagctttatgtcacaacattgaggctggcggagaaagaccggccccttcaccccaccttagacttcctggaagggccgcccgggtccaca

SEQ ID NO: 158845 - DNA, 122 bp, Homo sapiens
agctttggttaacatcaacgaagctcagttctagcttcacaatccaggaataatcctatgcggctggtagttcttgggatatattgcagtgtaagtggggaggtggtaaagagactgcactg

SEQ ID NO: 158846 - DNA, 122 bp, Homo sapiens
tgcccgatcagatggaaaagaacgttttagattgaagttttaagacgactctcccgatgccgcttgaactgggtacaggtgtgtgtaaaaacagggtcacaggctcagtgcattcagtgatg

SEQ ID NO: 158847 - DNA, 122 bp, Homo sapiens
gtcaccttcacacctggccacttgcccctagatctgctggaccctgaaacacactcctcccgttactggctggttgtgggtgtcgtggtgtcacagcccctggagaaaatcccccaaccccc

SEQ ID NO: 158848 - DNA, 122 bp, Homo sapiens
tggcccgcttgccccgcctggcccgctccccctacccctgcgccagcgagtcggggccctcggggctacctggacgctcggccaggacctcagtgagtccagaacatactgagggaaagggc

SEQ ID NO: 158849 - DNA, 122 bp, Homo sapiens
agggcttagattccagattgacactgggctctctaaagcctgctcctcaatctactgatccggtccagcttaagatccagtagaaagaaaacatagcctgcccggaccgtaacctttttgtt

SEQ ID NO: 158850 - DNA, 122 bp, Homo sapiens
aatataaataacgagccctgttcatagaaaagcgtgccagaatttcattgattaacatcccgtgccacagcctctctttgaaattaaaaacactttcaatgacactgaaaagacattgcaca

SEQ ID NO: 158851 - DNA, 122 bp, Homo sapiens
tctggttgggccaggcaaattcttgggtcaggtggcaaaggggtctttggcagcaagtgtcgtttctcgcatatccccagagccctcttaggtgggggagtgcccgcagaggcctcccaaag

SEQ ID NO: 158852 - DNA, 122 bp, Homo sapiens
cacgatcatgtggaggagctggcatgtggacgtcgtgatgtggccatcccgccacaagcacggcaagaaccactgtgtacaagatcatgtggaggatctggcatgtagacgtcgtgatgtgg

SEQ ID NO: 158853 - DNA, 122 bp, Homo sapiens
cggggccgggatgcagggcgcgcggacagaaacgagacagacagctcaggcccagcagcacgcaagctcccgcgccttccgcgactgccacacgcgcggcgcgcgcgcaccctactttttct

SEQ ID NO: 158854 - DNA, 122 bp, Homo sapiens
aggctatgtttcctccattgaattgcttttatgcctttgtcaaaaccagttggacatattcgtgtgatcctatttccagtttctgtattctgttccattgatctatgtgtttattcctctac

SEQ ID NO: 158855 - DNA, 122 bp, Homo sapiens
gctcgcggtggggtccggcgggcgcggcttcggcgggcggcagccgctgcagacgagctgcgggttggttttttggtctccacctgcagcccccccaagtctgcactgtcacattttgccag

SEQ ID NO: 158856 - DNA, 122 bp, Homo sapiens
aaaaatccacaacctgtgggtgcagcaatagacacaggcacctcacttcctctgagcctccgctttctcatctggaaaaccggagctaattgttgtagtttctttgtctgagaatggttagt

SEQ ID NO: 158857 - DNA, 122 bp, Homo sapiens
gaaggcaggcaggtacaagcaaggagtcggctctacgcgcagagccccaggggagcggcccgtgctgggcatggcagtcccagcagtgcatttgtctagctgccggccgcgggtccggggcc

SEQ ID NO: 158858 - DNA, 122 bp, Homo sapiens
tggggcccccgggaacccgcgcgccgaggccggctaagtttggcagactctctgagctctcggaattcgactgcctccattgttgctccttctggcacccacagaccgtaacgtggccgtaa

SEQ ID NO: 158859 - DNA, 122 bp, Homo sapiens
gctggtgccctctgcagccaaggcgctcagcccgcctggaggggcgcagtctcggctcagcgctgaccgctcggcccaccgaggcgcagctctgaaaatgcaccacagtggcgaagcggcga

SEQ ID NO: 158860 - DNA, 122 bp, Homo sapiens
cggggctgatgggaggtaacctctgggtcctgacagggaaaaggcaagcacttccggctccgggtccttaaaaaaaagacatgtcaaagaaagagtgctgcagaaatgccgaatttaactgt

SEQ ID NO: 158861 - DNA, 122 bp, Homo sapiens
gagccgagggcccagccaaaccctgcgggaggcaattcctgggtacccttcccatattttcggtctttgggctgcgccgtggtaacctcagagcctggttgcgtgctcaccagcgacaagtg

SEQ ID NO: 158862 - DNA, 122 bp, Homo sapiens
gagaggtacgtttcttgtccctagggaggtaggctcgaccaggagggacctggttcatttcggccaggctgtcacggcttccagagcacctcgccgctgtttccgtccctcaacagaccggc

SEQ ID NO: 158863 - DNA, 122 bp, Homo sapiens
cgacactcaccgtccacactcggagacgagaaccaccacccactgagcgccgacactcaccgtccacactcggagacgagaaccaacacccaccgagcgccgacactcaccgtccacactcg

SEQ ID NO: 158864 - DNA, 122 bp, Homo sapiens
aaccttgaaaattcaagtagcagcaagagtttgttgaaagtaacttccaccaaatggaaccgattacaaatgtactacagagtgtcaaataaccagagatgtaaatacagatgcagacacag

SEQ ID NO: 158865 - DNA, 122 bp, Homo sapiens
actctttatccccctactccacgcctagactccaagtcacaaggcaaagactgaaaggggcgagaggctgtaggtactactctaagtagaggtaccaagcacgactccatcaccttagaggg

SEQ ID NO: 158866 - DNA, 122 bp, Homo sapiens
gatctcaagtacattctctccctgacttcctcattttgctgcttttaacaagctgtggaccgagaactgagataatgcaacttgtaagaatgtgtccaagagaaagcaaacagtttctcagt

SEQ ID NO: 158867 - DNA, 122 bp, Homo sapiens
gcctgacccctcgtcctagaagacgcttcccgacctcgggaaagtagatgtggagggtggcgccttgcgtaaccctcgccctgtccctcccactccctgggggggctgttccacagtgactg

SEQ ID NO: 158868 - DNA, 122 bp, Homo sapiens
tgaccttgtgatctacccgcctcagcctcccaaaatgctgggattacaggcgtgagccaccgcccccggccagctattgacttattttaggaactgtttgagtttttcctcgtttctgtcat

SEQ ID NO: 158869 - DNA, 122 bp, Homo sapiens
aggagaacgctgaggtcggtcggaccaacggacgcgctgaccgctgccaactgcagctcgcgctgcctcctgctcgcgccgtgccactaaggtagtccgcctttctatgagccctccccaag

SEQ ID NO: 158870 - DNA, 122 bp, Homo sapiens
ggccgtgctcgcccacagacttacctccaaaatgtctttgagtgtgttcacataggtacacgcatcacgtgtggactcgcgcagccatgcactgcttacacactcaaatataggaacaccca

SEQ ID NO: 158871 - DNA, 122 bp, Homo sapiens
aggagagaccgaaataacggggtgaggggacaccccctccaaatggggtgtgtcggcattcgcctttctgcaagagaggcgagaggctataggggatgaagtggagcaagaagagagaacag

SEQ ID NO: 158872 - DNA, 122 bp, Homo sapiens
gagtttgggggaatgtagtcgccagagctctgcgttgtcttccggctttgggcgtggccacgatgcactctgggagtcgtagtaggggaagaacgtcctccgctcttttgcgcacggtcgct

SEQ ID NO: 158873 - DNA, 122 bp, Homo sapiens
acattactaagtaacaggaaaggctaagatttggagccttcctccggttcagatctatcccgggagtaatggaagatgcttgcctgttgacaatttttttttattaaaaatcccacccagga

SEQ ID NO: 158874 - DNA, 122 bp, Homo sapiens
gctctgtcaccaggcgctgcagctgctggccgagctctgtgcccgtggggccctggagcacgacagctgccaggatttcatttaccacctgcgggaccgtgccagaccccggctccgcgacc

SEQ ID NO: 158875 - DNA, 122 bp, Homo sapiens
gtgttcggagtttcttctttccggtgggttcgtgctctcgctggctcagaagtcaagctgcggacctttgtggtgagtgttacagctcttatggcggcgcgtctggagttgttcgttcctcc

SEQ ID NO: 158876 - DNA, 122 bp, Homo sapiens
gtagaaggacagccccttcacaccgaactgaatagagctatggacaactgtaacagtctccgaatgtctcccgtgaaagggatgcaagagaagggagagctggatgaacttggggataaatg

SEQ ID NO: 158877 - DNA, 122 bp, Homo sapiens
agttgacgcttacacctggcagccttgctgaattctgtgtgcgtgaaggtccgattccaccgcgagtcacgatagaaaacccactctgtggagagaccagagatgaccgccgcgcacacctc

SEQ ID NO: 158878 - DNA, 122 bp, Homo sapiens
gccgcttcggccgagcaggccggctctaatgcagtcgctctgggcgccccaaagagaaagcgaagccagttccacccctgcccaaggagggtctgagactgagcccttgacacgagaacagt

SEQ ID NO: 158879 - DNA, 122 bp, Homo sapiens
agggcacaataaatcaagctagtatctggaactgtttgagtcttgacctgtgtgggaaggcggtccagtgcactgaatataggctagacagtttccatggatacctcacactacttgatgtg

SEQ ID NO: 158880 - DNA, 122 bp, Homo sapiens
gctaacggaaaccgaggcacgtggactgcaattatgcattttcattggtcctcaggatcacgcgacaggaagtattgcgtaaccggttgactgccacatgcgcattggcttccagggccgga

SEQ ID NO: 158881 - DNA, 122 bp, Homo sapiens
ccatatcagaataaggacccctcaaagctggacccaaattacctagggcaagcagagctgcgggaaaaggtaggggtttctggggagccactgcttggctagcggcgccattacctacatga

SEQ ID NO: 158882 - DNA, 122 bp, Homo sapiens
gagtggatgccgtcgcatcgttcctggccagttcttagctgtggatcccaaagggcgagccgttatgattagtaagtgatttactctacttgctgtatatgcctagtttaggataacaatgc

SEQ ID NO: 158883 - DNA, 122 bp, Homo sapiens
caggaagaagttgttctgggtgcggaggctcgagtcggccacgaaggcgagcatgaccagcgcgttgcccagcaccgtggccacgatgagcagcgccatgagcgcggccagcaccgcggtcc

SEQ ID NO: 158884 - DNA, 122 bp, Homo sapiens
gataggctctctgggtttcctggagacccgcgttgagcggtgctgctccggagtggaagccgggagtttagcaccacgactctggcgctgccccttccttgcttggtgaacttgggtgccgt

SEQ ID NO: 158885 - DNA, 122 bp, Homo sapiens
cgcgcggcgctgcactgcgctcgccggccctggccgtctcgcccgctccagacccgcttccggcagccgcgtcaccacgccccgccctaagcctgcgcagcctcagttgcgcgccgagagct

SEQ ID NO: 158886 - DNA, 122 bp, Homo sapiens
ttccacatgttaaatatataataaccaaaactttactaacatacgaatgaagaaaacatgcgcagcatgtatgcatggcaggtagtgaggaaatctggccagctgactggttcctttaccaa

SEQ ID NO: 158887 - DNA, 122 bp, Homo sapiens
aggtctcactggcagtcatgctgtggtgcttggtaatttccaggttcacagcagagttcacgggtcctccctcggctggggagcgggtctctggctggtgtctgcctgcccgtcggcatcgg

SEQ ID NO: 158888 - DNA, 122 bp, Homo sapiens
acaaataattacagacatttgtaggttatgtaagaaactttaagataccaggatggctttcgataaaataccattgaggctacatgtccattgcacgtccatatccttagtactttcctgag

SEQ ID NO: 158889 - DNA, 122 bp, Homo sapiens
gccagttaaagaagcagttgaggaaaaccagcccggagcagccggcccagaccacgaggacgacgatgaaggagacaccagcatcatagatgagctgacaggcaccgcggggacggggtggg

SEQ ID NO: 158890 - DNA, 122 bp, Homo sapiens
gaagatttggataacccacgtgcactggggccaagagataaggggcatcaggtgtccagacgtgatggagggatgggagggagaggtaggtgaacagggagtgctcagagctaggtgagata

SEQ ID NO: 158891 - DNA, 122 bp, Homo sapiens
aatgcgcgtagcattgctcgctgtgccgtactgagatgctggaagcgctctaattacgcccggtacaacgctcagctcaggctctgcagcaaacctggccagaaacagaccctctgcctctc

SEQ ID NO: 158892 - DNA, 122 bp, Homo sapiens
cccagcccagcattttgtctttttcccctttgtccagcagtataactcacgctgcccctccgggctgagaggagtgtagacctcacctgctgagcacaactctggcgggcctgtgctctgga

SEQ ID NO: 158893 - DNA, 122 bp, Homo sapiens
tccctagggtgtctttgtaatcgttggcactgccccggctcctgccctccccgcctctcacgctgcacactccagagatgcagttgctgctgttggccacatagccaccgctgaccatgctg

SEQ ID NO: 158894 - DNA, 122 bp, Homo sapiens
caccttatctgacgccccttagttaccacctggaaaagtagcagatagtggtgctgaatccgtaccttcctcgggccgctcgctctccaacagcgccaccacctcggtgccctcctcgccgg

SEQ ID NO: 158895 - DNA, 122 bp, Homo sapiens
ccagtttctttcatttgacatgcaaagatcttttttcttggctcatcccagagaagtggccgggcaagtgttctcctgagaaaatgttgatgactctggcacacagaccacatacaatttgc

SEQ ID NO: 158896 - DNA, 122 bp, Homo sapiens
agtgaaattgactggctgattccatctctccatcctttcaaactcgtgctaatgagcaggcgaatcacaaacagggaaaagagggaagaggcaggatgctcggataatcccccaactggaac

SEQ ID NO: 158897 - DNA, 122 bp, Homo sapiens
agccagtcaaaattccaaaaacaatccaaataacttccaacatactagcggtcaaactaccgaataaacttgatgcagaccagtattcccaagttgcaatagtatccaatgactttgctgaa

SEQ ID NO: 158898 - DNA, 122 bp, Homo sapiens
agacaggagggtggtggcagcaacactgcagctgcttctggatgctgctggggtgctctccggagcgggtgtgaacagcgcacttcaacatgagcaggcgcctggctccggtgtgtcctcac

SEQ ID NO: 158899 - DNA, 122 bp, Homo sapiens
ctgaaacaatctcggagacggattttggaaactcctctcggtgcatatcctaaggctgcacgactagctgcgtgtgaaacgccaagcgtaccctactcggccactcggggtgtgctccagct

SEQ ID NO: 158900 - DNA, 122 bp, Homo sapiens
caggatattcaacagaacattcagcacatatccttaactgctcttagaaattggttctgccgatatattagctattcagagaaagtgcttttaagttcattgttgaacatagtgatgtagtg

SEQ ID NO: 158901 - DNA, 122 bp, Homo sapiens
tggagtgatattcaggcagctgggtagaaagtggcaagtgagaggcacacaccaaataaacgctgctcattatgactatacccctcactcccaaccttcctgccagagatgagcacatcttc

SEQ ID NO: 158902 - DNA, 122 bp, Homo sapiens
ctccatcgagaccgagaccaccatcggctacgggcaccgcgtcatcaccgaccagtgccccgagggcatcgtgctgctgctgctgcaggccatcctgggctccatggtgaacgccttcatgg

SEQ ID NO: 158903 - DNA, 122 bp, Homo sapiens
cggtgacactagcggcgtcaggcaggagtttgacttcctcagcctatcatggcacgttgccgaggcttcagcgccttacaggacctcgctccaggctcttctggctccaatcaaaagcaggg

SEQ ID NO: 158904 - DNA, 122 bp, Homo sapiens
gaaggattagaaaccaagtgatcagacagtttgctctgtggccccccagcttcctctcgccgtaaggacgtggctcctcagtaccagaaaaacattgctgaatgaataatgctgtgggtatg

SEQ ID NO: 158905 - DNA, 122 bp, Homo sapiens
acgccgctaagaaagtcaaacccgaagttctcccaccctccgcagaacacccgatactcacgttcgccctcttggccgcttgcatcgccatcttggcgggctgatgaagttaccgtagcaga

SEQ ID NO: 158906 - DNA, 122 bp, Homo sapiens
tgaaaggggagacacagaaagccggggcatgtggctaggcacagacgcccgcccgcccctcgtgcttggcccaggctcagccctggggaccgccttaacagcagtccttccggcttggccag

SEQ ID NO: 158907 - DNA, 122 bp, Homo sapiens
agagattcaagtatttcccagatcgagtggaacccggtagttggaaaactgagctgaaaacgcctctccaaatactacagcgatctatcagtcttacccctaccccaactcccttcctttcc

SEQ ID NO: 158908 - DNA, 122 bp, Homo sapiens
gtttccctctagagcaaaggacaagttggttttatttacattataatgtaaatgatggctcgctctggggcaaacgtagggcaggtttattgctagttataaaagatttaggattcctcaac

SEQ ID NO: 158909 - DNA, 122 bp, Homo sapiens
tcagcttgtcactgttttttaatcactgtttcacaccgttgtttgtaaggtgtcaagcgacggactgggtgcaaaggcatcaattgtgattcgcagcctagttggagaagctatggagtgca

SEQ ID NO: 158910 - DNA, 122 bp, Homo sapiens
cgcgcccgccgccgcctcagccttaggggagaccactacgcctcgtgcccgcgcacgccgcgccgctctcctcggcgcccccgccccgcctgctcctcgcagccccgcccatgtgcctttct

SEQ ID NO: 158911 - DNA, 122 bp, Homo sapiens
gcttggagcttcagaggactgctgactgtcataaaactctgtgtgtcaccagctgggggtcggggatttaaagatgtcagggggacctggcctctcagatgggataaagatcagaaggaaag

SEQ ID NO: 158912 - DNA, 122 bp, Homo sapiens
aaagtggtcttccccttcctggaccgtcatggtgcatttcagcaagtggggaaaggacagcggtgcttggcggagccctgggaagatacagccttggacagctctctggccaggaagggcag

SEQ ID NO: 158913 - DNA, 122 bp, Homo sapiens
tagacccggcccagcccgcgcccgccgtccgcagctcccagcgtgccccgcgccaggggccgtcttccggcggaagttgtctcttcgccgccgccgcagcctctgccccactcgtgagggat

SEQ ID NO: 158914 - DNA, 122 bp, Homo sapiens
acaccgtgcagttgcaaacacggggcaggaaagactccggcgaccctcattacactgtgccgggaggcatggccagagctccgtcagttcatgcgtcgcttaaacctagaggtgggtgcgat

SEQ ID NO: 158915 - DNA, 122 bp, Homo sapiens
cacctgtgtcctcagaagtccttgctcaagattgagaggattctaaatgctcacagatggcgcgctccctctctgtctctctcttcctctctctctcacacacacacacacacacacacaca

SEQ ID NO: 158916 - DNA, 122 bp, Homo sapiens
actactacacatgtaactccccaaatgacttcagttaactgggccttgaatcacaaggatcgtctttcatttttcaggcatgtactgagtgcttcaggttgaagaataggccatgagaatgg

SEQ ID NO: 158917 - DNA, 122 bp, Homo sapiens
gcagcagcagctggcgccgctctcgcagtccctacagccctgtgctcaggtgagttctgccgttctgcctgtgtgtgccttggctgcgctggccagatccccaggaggaagggaaagtggtg

SEQ ID NO: 158918 - DNA, 122 bp, Homo sapiens
tcttcagctgtatcttgaaagctttcctgtttccgaagcttgcttgcattaaacatgaggcgccgctaagtgctgttgccaccagggactgcaggccgctctgcagccctggatgggctcag

SEQ ID NO: 158919 - DNA, 122 bp, Homo sapiens
ggaagagaaagagagaaaggaagagagaggaaggaaggaaggaagaaaaaagaaagaaagcgagaaagaaagaaagaataaagtgagagagagacatatgaaagaaagaaagaaagaaaaag

SEQ ID NO: 158920 - DNA, 122 bp, Homo sapiens
ttgtgtcctttctctaggttatacttaacactcttctcgccttatatagcaaggtctggtcgttaatgttaacagaaatctaacaacagggaaggctgccagatagcattaatcaggccagt

SEQ ID NO: 158921 - DNA, 122 bp, Homo sapiens
gcagcagaagggtcaaagccagaggcatggcggggcctttgtgacgtcacagagagaacccggcccgccccgcctcccaggcgagggcgcggtcaggaggcccagggagcatcacggtgtta

SEQ ID NO: 158922 - DNA, 122 bp, Homo sapiens
acagatgtgtttggtggagctcatttaggcacagggaagcagcttttttcatgattcctacggatatgtcaccatgtgtgtaagctctgtcattcctcgttgtttcttttgttgtcttacag

SEQ ID NO: 158923 - DNA, 122 bp, Homo sapiens
acacagacacgtccctgttgacctgatgctaccactctcgtcatctcagggactgtctggcgcccccctcccccggcctgggggcttgtcagccccgtgcagcgacgatctacgcacacgcg

SEQ ID NO: 158924 - DNA, 122 bp, Homo sapiens
cccgcgcgcacacgcccgtgcccacgtgtgcacgctcacacccttgcacacacccaggcgcgcgctggcacacttacccggagaacttcgcacacacacgcactcgcaaacacgcgggctcc

SEQ ID NO: 158925 - DNA, 122 bp, Homo sapiens
gtatgggaaaccccaacccctatatattgtaaatagatgggctgggctaaacattgttgccgtttcatacttctaccaactcagcttttacacaataaagctctactgtctctggtttgctt

SEQ ID NO: 158926 - DNA, 122 bp, Homo sapiens
cctgcacctgctctcgcggtctcgggagccccgccctgcctgtcacgtcagtgtcccggccgtgttcatcctgaagctccacagccgcagccacccatggcagtggggagccaactgcagta

SEQ ID NO: 158927 - DNA, 122 bp, Homo sapiens
ggagccattctttaggaaaccttggacgttatgggaaaagcaaacgaaactgctcaggcacgttggcctcacctcctctaacccagcatatctatacctatgttcttcctgccattttattg

SEQ ID NO: 158928 - DNA, 122 bp, Homo sapiens
tttgtgtatgtgacaatgtatattcttcaacatcgtagactcgattttgggtgctcccatcgggactgtgtgtacctgtcctggaactcaagtgcacccttggctcataatccattgctctt

SEQ ID NO: 158929 - DNA, 122 bp, Homo sapiens
gccaagattcccaccctccttgcccacccacaggagtgaggagagggcagggagcactggcgctttagtacacaggccagccaggctgactgcagaaggccttgggaggccgggggagctgg

SEQ ID NO: 158930 - DNA, 122 bp, Homo sapiens
ttctgtgtgccaaggactttatgtgctttgcgtcatttaattttgaaaacagttatcttccgccatagataactactatggttatcttctgcctctcacagatgaagaaactaaggcaccga

SEQ ID NO: 158931 - DNA, 122 bp, Homo sapiens
ccctgtgtgatgaaatgtgcctctcgccttacccgtgtgagaatacctgtggtgtggcagcgagtattttggtgagcacctgcagtgtagtggtttatactaaggaatacacacaaattaca

SEQ ID NO: 158932 - DNA, 122 bp, Homo sapiens
cgtgccccccaggcatccaggaaactgcagggcaggcgcaggctggccacgggcccggggcggctcagtcagggcctgccctagaccagccccagcacgcgctgcgcacatgccaccgcggc

SEQ ID NO: 158933 - DNA, 122 bp, Homo sapiens
ctatacccgggagctgaggggcatgcagaccttgaaatcccggcaccgctccctccaccccgagtaaattcagacatcctttgagagtctgggagtcgctttctgcgtgttaaaatcgcttg

SEQ ID NO: 158934 - DNA, 122 bp, Homo sapiens
gattttttcatatgtggaaatctattacatgtaatacaaaacaaacatgtagtttgaaggcggtcagatttctttgagaaatctttgtagagttaattttatggaaattaaaatcagaatta

SEQ ID NO: 158935 - DNA, 122 bp, Homo sapiens
ctctcccagcggagagggtctcccaggaagcaggggcgaggagccctcgaaggtctcgggcggcagcggctctcggcgcagagggcggagggtacgaccgcgacacaggcggggcggcagct

SEQ ID NO: 158936 - DNA, 122 bp, Homo sapiens
tgctgaatattttaaactcctttcaaagcagtaggtgtattccctcccgcagtaacaaaacgatattcatctttacacaaggtgctctggcgtttataatttggtatccaacacccggccga

SEQ ID NO: 158937 - DNA, 122 bp, Homo sapiens
cacaggggttctgtggcctggcgtgctgccagtccagagatcccaaaaaaacctgtgtcccggctgctgtccttggccctgctctgacccctgctctccccgctgcttttcagaattgctgc

SEQ ID NO: 158938 - DNA, 122 bp, Homo sapiens
gacgggggaacctggggatgcatctagagtgtgacggtgactgggaaacctggggatgcacgtagagtgtgatggtgactgggggaacctggggatgcatgtagagtgtgacggtgactggg

SEQ ID NO: 158939 - DNA, 122 bp, Homo sapiens
cacacctgggcaagacccctgtccaacccaaacaggctgttcctgcagaaggaactcgcccggaaagatgcatctcccaaggctgacaggaccactcccgcctgtgtctggacatcctcagc

SEQ ID NO: 158940 - DNA, 122 bp, Homo sapiens
gtgaacatctgttttcatttcccctgggtgcacaccgggaagcgggatcgccggatcatacggtgactctatgttgagcattttgaggaaccgccaggctgtttccagcggtggctgcgcca

SEQ ID NO: 158941 - DNA, 122 bp, Homo sapiens
gggcggggagggcggcgcagggcagcgggtgcggtgacacctgtgggcacaggtgagcggcgggagggctacgcggcccgggggcggggcggccgggacccggggcctggaagccggggcga

SEQ ID NO: 158942 - DNA, 122 bp, Homo sapiens
tgggatttgtgcccttatagaaagggacacaacatgagatgatcttgctctgggccatgccgggaggaagggagaaggtggctgtcaacgagccaggaagcggcactcctgacactggatct

SEQ ID NO: 158943 - DNA, 122 bp, Homo sapiens
tcactaaccaagcatctttaatccaagccaaattacagaactctctaacttagaggtgatcgtccatacggcagatcattacaacatgaaaaacgtaagctaagatgttgaacacagccaga

SEQ ID NO: 158944 - DNA, 122 bp, Homo sapiens
ctaactgtaatgtattctaaaaaaattcagcacagacagtgcgatgtaagtgtttcttaacgctgtctgtaccccaagagtgtcagtgcctttatcaggaatttatgccccaacacctcagt

SEQ ID NO: 158945 - DNA, 122 bp, Homo sapiens
cctcagggttggcccagctgctctacggacggaccccagttggggaactcatcaaatcatcgcaaaatcacaactctctgaatttgagctcaatctctgtaggatgggtgcaacaacgtggg

SEQ ID NO: 158946 - DNA, 122 bp, Homo sapiens
gattgattagtcatgatccccgcagttttaacagggactcattcaattgggaaggtggagcgctggggagcagattagcatacgcttgtttactcatcttctgagggattttttccccctct

SEQ ID NO: 158947 - DNA, 122 bp, Homo sapiens
gcccaggagcgggcaagccgggagcgcgctccgaaaagtttaggcgccccggcgcatggccgccccagccctggaccagtccccaccgcccacagtccccaacggcgccggccccggccccc

SEQ ID NO: 158948 - DNA, 122 bp, Homo sapiens
ctcggtgttctcgagttcccaggagctgggtgcggcgctagcgcagctggtggcccagcgcgcagcatgctgcctggcaggggcccgcgcccgtttcgcgctcggcctgtcgggcgggagcc

SEQ ID NO: 158949 - DNA, 122 bp, Homo sapiens
ggaggtggccatgggctctggctgcgcccgagctaggctggggctgcttagctggcttgccgcttcctcaggctccgaggacgcgctggcctcgtctatttcggtgaaattggcgctggagc

SEQ ID NO: 158950 - DNA, 122 bp, Homo sapiens
cccagcagccacgccagtgctagtgaacatggaggaagcagatgtgcccagggcaggtctcggccttggggtttttttagggagggaatagaatgggaaggcctgagtgatctcccacatgg

SEQ ID NO: 158951 - DNA, 122 bp, Homo sapiens
acgccattctcctgcctcagcctcccgagtagctgggattacgggcgcccgccaccacgccgggctaattttttgtattttttagtggagacggggtttcaacatgttagccaggatggtct

SEQ ID NO: 158952 - DNA, 122 bp, Homo sapiens
gcgagcccagcgcgccgggggtcgagggggctggggatccaggtgctcccggggccggcgcggcccgactggggtccccgaccttccgtgccgctccttgccggctcctgcccccgtctcct

SEQ ID NO: 158953 - DNA, 122 bp, Homo sapiens
cggtgcctctggcttcccctccctgccgccagcgcacacgttgcaaacatctgccccggccggctgctgggggtcccctcctggagttccctgctgctgacaggaaccagtgcgccttttat

SEQ ID NO: 158954 - DNA, 122 bp, Homo sapiens
tgtcctgccctgccctgccctgcgcgcgcaccgcactcacacgtacacccggtcctcgcacgcgcacacacgcacactgttccccgccgctctaccctctagactgcaagggaaacggctcc

SEQ ID NO: 158955 - DNA, 122 bp, Homo sapiens
gagcgggtgtagactggggagcaccgggggccaagatttgggagctgcggccagacggggcggggatggcggccgactggagacgaggggctgtcgggttcccggggacggggcagagcggg

SEQ ID NO: 158956 - DNA, 122 bp, Homo sapiens
caactggggtgctgagttaaaagggcagatttctaggcttaactcctgccttcctgaatccgaacttctcacgcaggcgctggataactacattcgtgtgcagatctaaaattgagagctac

SEQ ID NO: 158957 - DNA, 122 bp, Homo sapiens
gggcgcgtcttttaggcttgcctctgaggtccgctgtccccgcatgagcggacggcagagcgcgcctgcctgggagcccaggaggctgccgggccagggaccccgggaaccccgggaacccc

SEQ ID NO: 158958 - DNA, 122 bp, Homo sapiens
ctccctccctgtccctctgggcctcgggccaacttggcctatccccagccctggtatgagcgggacagagctgccctcacggaagcagctctgagggcagtgcctcagctcctcccgcctta

SEQ ID NO: 158959 - DNA, 122 bp, Homo sapiens
agcgccgagagcagcgcgagcgctgtgaagatgcgaggaggtggaacaatgaatttatagcggcatgccatcctgcaatggcaatttcaacagttcgtcactgcacgctgcctcttaaaggg

SEQ ID NO: 158960 - DNA, 122 bp, Homo sapiens
ggtcctccgcagccctgccagccttggggacaataagccacatgcagtgggaaggcttggcgccctgccctctgctgaggggtcctgacagctgggccagggcagcaggggagcaacagcgg

SEQ ID NO: 158961 - DNA, 122 bp, Homo sapiens
ctttcccggggtgaaaactttgctcggagctggcggcagctcgcggacgttattggccggcgccccgcccggcggccccgccccccgcccccgcgctcccctccgcccctcactcccagcgc

SEQ ID NO: 158962 - DNA, 122 bp, Homo sapiens
cgggagatcaggaaaggtcgcgtcgcgcgcctcctcccggcctttgggggggtccgtccgcgtgccgtgcccccacctgttagctcctctgctcgccgcccgccgctcccgctctgctacac

SEQ ID NO: 158963 - DNA, 122 bp, Homo sapiens
aaagcacgttctagggtggggtgcatccttaccacatcagtcagatgtcaaaaggcagcacgtaaattgaataagggaaggaaaatgccgggcggcctcattcacgtccggcatgttccgct

SEQ ID NO: 158964 - DNA, 122 bp, Homo sapiens
ctctttttctcagtgtatgtttgctataatggcaatgatacagcatttccatataagtttcgggatatggaatgttccccaccccagaaagtccctacatcagcaagccctgattccacccc

SEQ ID NO: 158965 - DNA, 122 bp, Homo sapiens
ctcgggacctgcagcccaccatgcctgagactcccccgactccgtgggctcctgtgcggccggagcctctccaatgagcgccgccccgtgctccacgcgcccagtcccatccaccacccaag

SEQ ID NO: 158966 - DNA, 122 bp, Homo sapiens
actattaaataaaaaatcataaatggaatcattgtaaggaaccacctctattagtatccccgttaataagtaagaagctacctcatccacaatcatattagtagtagctggtaagcaagggt

SEQ ID NO: 158967 - DNA, 122 bp, Homo sapiens
aaccctatgcattaattcattcaacaaatatttactgagtgcctactagaactcaggcaccgtccaaagccctgggaacataacagtaaacaaaaaccaaatgcttattatggtcaagtggt

SEQ ID NO: 158968 - DNA, 122 bp, Homo sapiens
agtaccagaagtctttggaaggcagcagcatgacgaaagtcaccacgaagtctgcataggcgaccagaagccacgtcatgacagcacagatcatgccgcagccgtcacggatgaaccagacc

SEQ ID NO: 158969 - DNA, 122 bp, Homo sapiens
tcaccaggtgacttccaggcagtgtgcagaaggaaccgtcccattatttggcacgtgggccgtttcctccacccgaggtccagggctccgtcttcacagtctgtcctcagcacacagtaggc

SEQ ID NO: 158970 - DNA, 122 bp, Homo sapiens
gaaggacccctaaaatcgcctttggcgtgtgcagctcgagcgttacaacgatgcaaagtgcggtctttggaggatgcgggagtcggtaacccctcaattcactctcgccgttccttctctcc

SEQ ID NO: 158971 - DNA, 122 bp, Homo sapiens
ttgggaaattgaggatgctttccttcacctgggtaattcccccctggttagagacactctcggttagtcctctgcattagcctttaggagggaggagctgtgcatggagggtttgtggaaaa

SEQ ID NO: 158972 - DNA, 122 bp, Homo sapiens
ccctcctaccgaatatagtgcgagcctcaatggtgggtctgtcctggggcctgggcagggcgccgggtctccggactcaggcaagcaccttctcctaaccgcaagcgaagcgaggaggagcg

SEQ ID NO: 158973 - DNA, 122 bp, Homo sapiens
ggaaaggaaccgatctcacgcaccttccataaggtccacagatatccgtagaaggagacgcgaagccccgcccaccccaccggaaacgcatttgcgtcacgtccgccccgcccgctgccact

SEQ ID NO: 158974 - DNA, 122 bp, Homo sapiens
cagcgaggaccgctccaaaggtggtgcctcagcagcaattcttttctgctcggctgtcctcgagcagccccgcccgccccgggccctccggctccccagacggcacttagcatcccgctctc

SEQ ID NO: 158975 - DNA, 122 bp, Homo sapiens
ccactctgcctctggagtctctgcagttcctcctctttaaatttcagggcaactgccagccggtgccagcgtgccttccaatattcagccatctcctcatgaagcctgggatgtgattcttg

SEQ ID NO: 158976 - DNA, 122 bp, Homo sapiens
ggaactctccctgcagcccctggcagctcctggcgactcacttcaccgcccggagaattccgtgcagggctccagcggtgagcagagttggaaacggcccatccccagtttccaaagaggcc

SEQ ID NO: 158977 - DNA, 122 bp, Homo sapiens
tcaccgcgagggtccgcgacttcattcttgaggtcagtgagaccaagaacccaccaattccggacacaaaagaatccagacccaaggccacatactgcatgactcaggtcagaggcgtggga

SEQ ID NO: 158978 - DNA, 122 bp, Homo sapiens
cctgcctacctttctttctcagtttttttttttttaatttaatttttttttggcaggggacggggaaggggcagaagcaagtggttcatcttctgctgcttctacattgctggtgttctcca

SEQ ID NO: 158979 - DNA, 122 bp, Homo sapiens
acagggactgactgaggcttgtccctttttctagagaaaatgcaggaagctgctttgggtcgtttatttactaagagacagcaagaaggggtgttacacatgcagggagcggagcgtctggg

SEQ ID NO: 158980 - DNA, 122 bp, Homo sapiens
aaacgttatccaatcagggacgccgggctgggaacggtccaatcaggcacccagctggagcggacatgacgtcttccgggaggcggcggggtctttgtctcgctgcagcgggtgctgcaggt

SEQ ID NO: 158981 - DNA, 122 bp, Homo sapiens
aattggaggcctccagactaagcatttagacacttgaggggaatattgacaactgggcctcgggaagattattctggaagatatctttacaattacaagattggagcctttgggagagggat

SEQ ID NO: 158982 - DNA, 122 bp, Homo sapiens
ggggagggagctctttctctggccctgcagtcacctgaggttgttaccattatgaacggccgctgggacccccgcatgtgcatgtactcccccagagtgtccgggggccccagccaagggac

SEQ ID NO: 158983 - DNA, 122 bp, Homo sapiens
ggaccggatagtcaagttcgtagctgtgggctcccccttgttgctgatgtccctggcattcgcccaggagttctcctctggtaagttgcttccaagacccagtgcgcaagagagactccccc

SEQ ID NO: 158984 - DNA, 122 bp, Homo sapiens
gggagctgtcgggagtggcgggaaatggggggcatcaccatgcctgccgtcgggttcctgcgctgacacctggtctgtgcacctgtgttgctcacagttgaaaactggacacttttgtatgt

SEQ ID NO: 158985 - DNA, 122 bp, Homo sapiens
caaaagcagaggtcaggttggaggccttcacgccagaactgaagctggtgggagcagcaccggagctttccaacctgacttgcatattagaattatttagagagtcttcattactggccttg

SEQ ID NO: 158986 - DNA, 122 bp, Homo sapiens
ccgccacggatgcagcactagaggccggggtctgagctctccgctttcccacagcctctgcggccctccaagcggagcttcttacggcagagtccatctcttttggcccatgaattaaagcc

SEQ ID NO: 158987 - DNA, 122 bp, Homo sapiens
ttgtccggggtgagctggtcgaaggtcttagagtcctccttgcccaggaaggcctcatggcggtaccggaagctccggttgacctctggaagccgctcgcccagctccgagtcaggccgcac

SEQ ID NO: 158988 - DNA, 122 bp, Homo sapiens
ccgcccctcggcgttgcgcaaactctgttgctacctaagtcttttcctcctcccacctcccgtagctgtcaaaatccggagtccagacttccttatggccaggacagctccacgcatgctca

SEQ ID NO: 158989 - DNA, 122 bp, Homo sapiens
tctctgaacctccaaacacacagtgttccctaaacatcagacattcatgtgccacccccgcgtagggacttttttatagagattacccaggcgacagccgtctagccccgggcctgtcactt

SEQ ID NO: 158990 - DNA, 122 bp, Homo sapiens
gccaagcggtggggtccgggcctgcaggcgcgacctgaggccgccagggaggctgggtggcgagggcggggcggctgccgacttagccggcctgactggtcgggcttccggggtcccgctgc

SEQ ID NO: 158991 - DNA, 122 bp, Homo sapiens
gccttagggtgcggggcaggcttaagggcttcagcctccggggaggtgcagaaggcagggcggcttgtggctccggacggaatgaaactcttagggaagaggacagagaccaggaggagcga

SEQ ID NO: 158992 - DNA, 122 bp, Homo sapiens
agaggaagggaagtcggcgtgagcaggcggcgtgcgggaagcgggggcggtgctgcagaccggcagcacagacactccgccggcttcgccctcctcagcgggagccgagcggagccgccatt

SEQ ID NO: 158993 - DNA, 122 bp, Homo sapiens
gtttgggaggctaaagggagccgaggcaggtggcagctgctgtgctgggaaggctgcgtgcgcggggcatcctctcttggcccgggtgggcggacgcaggggtccctggaggacgggactgg

SEQ ID NO: 158994 - DNA, 122 bp, Homo sapiens
gttagtcatgtgaggcgcttaggttaaaactacattcactataactcagtaaaggagtcccgccgactctccgacccatgcagaaataggcctagagagtcacatctctcagttcagaaatc

SEQ ID NO: 158995 - DNA, 122 bp, Homo sapiens
aatataaatatataaatacatgtgccttgacttctaacccagataatgtgtgattgagcccggtaaatgtagtagtagtcttggctgctgcagaagggcaggctgcaaattaaacactgtca

SEQ ID NO: 158996 - DNA, 122 bp, Homo sapiens
gaaaatgacacagtcatttgaattaactcttcaaaaatacttggccaggcacagggctcacgcctgtaatcctagcactttgggaggccgaggagggcagattgactgagctcaggagttcg

SEQ ID NO: 158997 - DNA, 122 bp, Homo sapiens
cagcggcgggagtggcagccggggaagggactccccactcacccgcgtccgcccgccgagcgcagctccccaaggcccagcgcgcctgcccttcccggaaaacagcagcgcctgaaacgccg

SEQ ID NO: 158998 - DNA, 122 bp, Homo sapiens
caccctcatcctgagagtccggccagtgcctgcatcagtcccaaccacacagctcccacccggggtctccctggcacttgcactgatctgataaggtctggagtcagggaggctgtgcctgc

SEQ ID NO: 158999 - DNA, 122 bp, Homo sapiens
ccattgctgtgtccgagatggatgacggcattgtaagggttctgactcataacatcgagccgcccagctcgagcattcagagctgccacaatcttccccactgacacatccaggtaggttag

SEQ ID NO: 159000 - DNA, 122 bp, Homo sapiens
aataacagtttctgttgctgactcctcctcaactgcatccacttcctcaggataatcaatcgggaaaggttattaaatcacaccgggctcactgttcccatcattaacatgttttaaatcag

SEQ ID NO: 159001 - DNA, 122 bp, Homo sapiens
gggtaatgaaggagggtgccagccgtaggagatcccttgtctccctggtctggagggctgcgggactgtagagggcatgagctcaggagctcaggccagctcatggtgcaaggcctctggaa

SEQ ID NO: 159002 - DNA, 122 bp, Homo sapiens
cctcaaggcgtgagtcaccaagggcaagtcccgtgacttggtcctcagggtctccggcctcggcacattaatcttcagacccggctttttcgacgccgagctgccgcccagccccaatggca

SEQ ID NO: 159003 - DNA, 122 bp, Homo sapiens
atttaagcagtgcctcgggatttgagttgcctgtgaaacgcagcagccttctgccgaggacgcagaaacccccgcctctcatccagggctgacagggcacgggccgcgagccgcggcggggc

SEQ ID NO: 159004 - DNA, 122 bp, Homo sapiens
gacggatggggtttttcaaaacgtcgctgcaaccagatgcaaggctgcagctttgcttaccgcagcgtgctgcagttgtgtttatttcagggacagacacaaggggaagcagcagccagagc

SEQ ID NO: 159005 - DNA, 122 bp, Homo sapiens
ggtgggtggggcggcgttcaaggtgaggtgcgcggtgcgctgggggcggagacgttttgccgtcccggccggctcgggggcgggggcagcgggtggcgtcgaaagagagcgccggctgccag

SEQ ID NO: 159006 - DNA, 122 bp, Homo sapiens
caggtcttgagagaacatcccttttaaggtcagaacaaaggtatttcataggtcccaggtcgtgtcccgagggcgcccacccaaacatgagctggagcaaaaagaaagggatgggggacttg

SEQ ID NO: 159007 - DNA, 122 bp, Homo sapiens
gcggccggagcccgcctacctcggccccctcagcttcccgggctggcaggcggctagaggcgtctgaggaaggtgcctaagtcctgggtcagatagtcatccctctgggacgccgccgccgc

SEQ ID NO: 159008 - DNA, 122 bp, Homo sapiens
gtatcccagtgaactgaatgagctgctcccagacagttagaatcgcagccggggcccaggcggctgactgcacagtgaggagccaggccggacaggccccaggcgcccccgcccagccctgg

SEQ ID NO: 159009 - DNA, 122 bp, Homo sapiens
tcgtccatcacccgctcctcggagccggtgcagcacgaggaggtgaggcgaggcaggccacgggcaggaacaggagagcctggtgttttccttgcactctcgtggacagctgtgtgttcagg

SEQ ID NO: 159010 - DNA, 122 bp, Homo sapiens
tccgaacacagttccgtatccacaaacagactttaaaaccagcatataaaacggaaatggcgggtagggggtggccgttcagggtaggtgcttaacttgctaatcatgggcgcagaaatatt

SEQ ID NO: 159011 - DNA, 122 bp, Homo sapiens
ggatggcgagcggcgtgatgaggctgctgagctccggaccgaaggcgaaggcgttgttggcgcacgaggccgacgagcaggccgcgcacggggcccccggcgccagcaggtcctcggcgccc

SEQ ID NO: 159012 - DNA, 122 bp, Homo sapiens
ccagaccccgcggcctgctgctgtctgccccgctcccggctcgggcacagacagcggctgcggcctcgccagggacttggagccaggagggccgacccgagtttccaacttctagtttgatt

SEQ ID NO: 159013 - DNA, 122 bp, Homo sapiens
cacacgacgtcttaagagaaacctaaaaccacggagctaggtgagcattacgtggcaacacgctggcgagtgggatgggtgaccatgcgcacactatgaaaaaaaaaacagcgatggaagat

SEQ ID NO: 159014 - DNA, 122 bp, Homo sapiens
aaaataactctttagactatttttatgcttgtggattttgttgtcatttttaatatttctcgagtgttttctgtatattttgtactgtgcttagtagatcatttctttcagagtaaccaagg

SEQ ID NO: 159015 - DNA, 122 bp, Homo sapiens
ccagcatcgaccaggccgatttccagggcttcacctacgtgaaccccgacttcgtgcacccggatgcccgcagccccaccagcccagtgcctgtgcccgtcatgtaatctcacccgccgcca

SEQ ID NO: 159016 - DNA, 122 bp, Homo sapiens
gccggcgtctctggttttggtctggccgtgggccagcaggcagcggacagcacagcacgacgggcttggagagctggcagggcgctgcgacagaaagaggacgccggtcagggtgctggggg

SEQ ID NO: 159017 - DNA, 122 bp, Homo sapiens
aaggcaaacaaagagttaagaaaggcaggaaggactaacccagccaaccaagtgcaaagccgaatgccccagggaaacaggaaaggggccccagttctagggctacagggaacgagaggtgg

SEQ ID NO: 159018 - DNA, 122 bp, Homo sapiens
ctgacataaagaggctgggatttggggctgcagtgctaggttttaatcctggctctaatacgtagcatctgtgtgattttggacacgtcactaacctctctaagcctccacatccatacctg

SEQ ID NO: 159019 - DNA, 122 bp, Homo sapiens
ctttctctttctctatcacgtcctctatctcgctctctgtctcgtctgttatctctagggcggtctcgctctcgttcccggtctctttcacggggtctacttctccggccactgacaacagc

SEQ ID NO: 159020 - DNA, 122 bp, Homo sapiens
ggtaatcttcgagagctcgaagggccgagttgggccaggacgatttccgagcagagccctcggctcggatgctcgttagggatgttagtggttattggaagcggcgcggagaatggcgtgtt

SEQ ID NO: 159021 - DNA, 122 bp, Homo sapiens
agacgtcaccgaggatccagaagggccctgcaggcggagggacatccagggcctggaaaccggacaagcagaggcggacgccatttcgagtagtctgcaaggcaacaagacgacaactgggt

SEQ ID NO: 159022 - DNA, 122 bp, Homo sapiens
gggcagatacattccagctccaccacttactggcaatgcaacatttttgagttgttctttcggtagaacaggacagatactactttggagagttggtttaatgaaacaatgtatgaggagtg

SEQ ID NO: 159023 - DNA, 122 bp, Homo sapiens
gcaacaagatggaaaggcctcttgagaaaacattacaactgggagataattaatatctaacgtttctaagcagaattttaaagcctcaccttcccttccctcgatctgtttaggaggaaaaa

SEQ ID NO: 159024 - DNA, 122 bp, Homo sapiens
aaataacactttggcctttatggaaatgtatcagatgttccaggagtgggtctccctgctcgcgcttgctcactggtgctcttacttttgcttcatgttcactcactctgtcctgacttgtg

SEQ ID NO: 159025 - DNA, 122 bp, Homo sapiens
gtggcctccagcttctcctgctccccagctgcccggtactcccgggcgagatcccgcactcgccgcttatatttgagctcctgccgctcgtgccggctcagctccacgtccccaaaaaggaa

SEQ ID NO: 159026 - DNA, 122 bp, Homo sapiens
gtacttacaatattctgaggattatggcctccaagagtcattcatggctttgcacatgaccgtctgttaccagtgagtccttgtgtggacagagcatccgcagcaggacagaacataaacgg

SEQ ID NO: 159027 - DNA, 122 bp, Homo sapiens
aatagagtggcctgtgagctcttacttcctggatcggttcctgatcccctctctgctgtccgccagccccctgcctgtcaccctttggtggcatcttagtccaacagccagttccatcccct

SEQ ID NO: 159028 - DNA, 122 bp, Homo sapiens
ccgcttgccgtcgccgccggcgcacgggccattgggaagaggaggtggcctgcggcccctcggagtcccaccaggctcggtcgccatcttgcgactggacagaaagggtaatccctcttttt

SEQ ID NO: 159029 - DNA, 122 bp, Homo sapiens
ggccctcttttctccctctccctacttccactgatccctttttggcacaaccatttgtcacggctcctgagggagaggttgggcctgtctccaaataatctaccaaatccagatgcaaatct

SEQ ID NO: 159030 - DNA, 122 bp, Homo sapiens
aaaagagttactagtgattgagttcaatcacatggccaatgatttaatcaaccatgcctacgtaataagctctttttgtttgttttttgagatggagtctcactccttttgcccaggatgga

SEQ ID NO: 159031 - DNA, 122 bp, Homo sapiens
atgagaatggtaaggacaaggaaatttatacgcgaagcctggaagcgcccccgcccccgacgcactcccgcgggtcccacgcgtgctttcgccgcctttgtccacaaggtggcagcctttga

SEQ ID NO: 159032 - DNA, 122 bp, Homo sapiens
cccacagcacagcggcgggctgaagtgctccttgagtgcggtcagagcggacaccgaggccgaggaggcgctgagagcgagcgagggctgctagcacattgtcacctctcaataagccactc

SEQ ID NO: 159033 - DNA, 122 bp, Homo sapiens
cggctgctcccggagggctcacaaaggcggtggccgcccgagtggccttctccatccaggcgttcgcgtcctcctccccaccttctctcccgaaggcgaaaatggcagggccaggcgagaac

SEQ ID NO: 159034 - DNA, 122 bp, Homo sapiens
aatgagaatttgcctccaagcaggatgcccactgtcttcttctcaatgtttttaaacacccggcatctgaagtgctggaagatgttttccacaatgaattccagctgcatctggtgtttctg

SEQ ID NO: 159035 - DNA, 122 bp, Homo sapiens
tgggcgaccaccgctggctagtccgttagaggcgtgcgggcttcggaggcgtgcgggcttcgggtgccatggggactcctcccggcctgcagaccgactgcgaggcgctgctcagccgcttc

SEQ ID NO: 159036 - DNA, 122 bp, Homo sapiens
gggcttgaggaggagcagctggggctggcggactcaccgcagcctctgcggggcctgtgacgtgcgggccaggcccccgagggccttatcggccccagaggcgcttgctgtcgggccgggcg

SEQ ID NO: 159037 - DNA, 122 bp, Homo sapiens
ccgggttccggagctaggagagctgttgatcctgcgagtattgtctgggtcccggcagggcgcccgggagtactgagtggggcctaatggggtgtcgaactcccccaccccagccctcttcc

SEQ ID NO: 159038 - DNA, 122 bp, Homo sapiens
ctccaccacgataaaggcgaaatggcactgaccatgcggagccagcgccggaaaagatggcgattgtgcgctgacgtcacttccgctccgagcctcgggccgggcggggctcctgggttcga

SEQ ID NO: 159039 - DNA, 122 bp, Homo sapiens
tttgtatttggtaacaatcttctttcaccattccagagctcatatcgctctaaggaacaccggagtgctgtactgctccagctcaagtcagcctgggaaagagaaagggacaaggcctggga

SEQ ID NO: 159040 - DNA, 122 bp, Homo sapiens
tttttcggatctcccaggatgcttcctggtggagtgggcagcgaggtttccagccgggctcgccccgcctccagaacctcgggccacagtgctttaacgacgtcgtcgttccgcttgatgcg

SEQ ID NO: 159041 - DNA, 122 bp, Homo sapiens
gtgctggacagctccggaacccgcgcgccccctgccaaataaagcgtggagacccggactcgggctctctgggaccagcatacagcagaaggcaaggggaactgagccagggcgtctgttca

SEQ ID NO: 159042 - DNA, 122 bp, Homo sapiens
aatgcaaacggcggtccctgctgttcccatcaaattaattaaccgcgcgctattgatggccgctcaaggctgacgcaggcggcccaccctgcggcctcctccatggacacgaggacacaggg

SEQ ID NO: 159043 - DNA, 122 bp, Homo sapiens
acacacagacgtggtggtgtgctcgcctctggaggaaggctgcccgccgctcggggccgtcggtggcttcggagctgtggcagctctcttagggccagctccatcccctctccccggccctg

SEQ ID NO: 159044 - DNA, 122 bp, Homo sapiens
gagggggttccgggagggtgctgtgctgcatggccctcgacacagatgtgcactcgcatgcgcttggcaaaggtgctccccgcactggacgtgcatttgtttttcctccaggactgtgttct

SEQ ID NO: 159045 - DNA, 122 bp, Homo sapiens
tttgcgcccaccgcgctgtagctggtcctgacacttgcaaaatggtcagtggctcctgctcggccaggctgagtgtgtgcgtgtgtgtgagcaagggagcgagggtgtgcggtgtgcagggg

SEQ ID NO: 159046 - DNA, 122 bp, Homo sapiens
gcggcggaaggactgagcctcactgcaacgttaaagagtccttctttgttcagccccagtcggggacgcagggcgcggtgttcctccgcgctcgccgcgcagtccctgcccccccgcggctt

SEQ ID NO: 159047 - DNA, 122 bp, Homo sapiens
gggtgaggccaagagcgtgcatgccatgcccgggttcatctggctcatccggagcctgtacgagatgcaggaggagcggctggctcggaaggctgcacgtggcctgaatgttgggcacctca

SEQ ID NO: 159048 - DNA, 122 bp, Homo sapiens
ctcaaactgcttcccgccccctcctcccaactgcggagctccgccaagcgtctcttctcgcgagcctccaagtcccctcggggctctcgaatctccagagactgtgaaagcctcgcaactcc

SEQ ID NO: 159049 - DNA, 122 bp, Homo sapiens
ccagcagtgagctgctcccccactccattcatctcccggttcctcgcattcatcccccaccgaacccacccacaaaatgctgaatcggtgggtgagatccccatagcaacggctccgatgcc

SEQ ID NO: 159050 - DNA, 122 bp, Homo sapiens
cgccgcttcctccttaccgttctccccaaccatccagatgttgtctcaaatatgcatgagcgccacctctacctcccaaacgctggtaccaactcctagcaactttgcgttgttaaatatgc

SEQ ID NO: 159051 - DNA, 122 bp, Homo sapiens
tcctttctctgctttcgagggcatttccaggaagcccccgtccggctgtatgggttttcccgtcggccactgcctcattgctttctctcctgagaaatgcccaggacttcttggtattaaga

SEQ ID NO: 159052 - DNA, 122 bp, Homo sapiens
ctgactaaaggcctggtggctatgtctgtggtggtggttttgaagaagtgtattcttctacgggctgctacatagacttggccttgaaggatgaagagcacagagaagtaaaactggtgagg

SEQ ID NO: 159053 - DNA, 122 bp, Homo sapiens
tggaaggatttgctttccaccacgggacaaaaacaagccccttgtcctcctcatcttgtccgtgtggctggacgacacccgctcttgtgtacagtggaacacaagtcatctacgcttttctg

SEQ ID NO: 159054 - DNA, 122 bp, Homo sapiens
cgcgggcgggacacgggcgcggggcgcaggcgggctcctccggcgcgtgcggacgctgagcgtggcctgtccctcaggtctggatgctggtagccggcttcctgctggcgctgccgccgagc

SEQ ID NO: 159055 - DNA, 122 bp, Homo sapiens
gggggtactgggaggaatcgatgggggtatggggtcaaagacgaggagggggcagggacgcggggacagacactccaagtctggaaagtttgggcacagaaggtggagttggaggcagcggc

SEQ ID NO: 159056 - DNA, 122 bp, Homo sapiens
cacagcggtctacaccgggagaaagtcgccgtgagaaccgtggcaccgcaggaggctgtgcgtgtttgcttttgttgatctgtttaactgcagcccgatttatgtttctggatcctggaatt

SEQ ID NO: 159057 - DNA, 122 bp, Homo sapiens
agcacagacaggtttcaatggaacgcaaacacccacctgcccccgacatctgcagaggtgcgcctgtgccatggtgacgtccgaggtatcagaacgagaccccataaaaataaatatgttac

SEQ ID NO: 159058 - DNA, 122 bp, Homo sapiens
ggcactacaggcacccgtgggggcgaggacgcctagaggtgacaggtgtggacgcagagccggggcgaacccgccgctgctcccgcccctgcacgaggggcagtggtcctgcttctgggagg

SEQ ID NO: 159059 - DNA, 122 bp, Homo sapiens
cagggcgccctgccaggccggggacctccgggacctgatcagcacgtaccttacccgcgccgaggtgccggaacacgccgccccagccaacttcacatgtcccagcactacaggagcagccc

SEQ ID NO: 159060 - DNA, 122 bp, Homo sapiens
agtcaagcggctgctctacagaacggctagaagcgagacttcgtctcccaggagacatctcgccgtgcaaaatggcacgccacgaggtggagtacctgcccgacgagaaacaagaggcggga

SEQ ID NO: 159061 - DNA, 122 bp, Homo sapiens
aacatgccgctgattttccctattatcacccaaacacgatttcacacaaagcaatcaccacgcagaagtctatgaaaatgtgtttgttgaggagtcactcgccccagtaatagtcctcattt

SEQ ID NO: 159062 - DNA, 122 bp, Homo sapiens
cccgcagagatcgcgtttccgccgccgccagattccagcttccgccccgcagcccagccccgcctctcccggtcttatctcggagcattctgggctttgcttgttcagtgcagcggactggt

SEQ ID NO: 159063 - DNA, 122 bp, Homo sapiens
ggggacgctcacgctccacgctgtggccacactcttacgcgcctttgttcaaatggtccgcggtaatcacccctccagctcaccttctcaaaaaggggacgtggatgaggctctcatgatta

SEQ ID NO: 159064 - DNA, 122 bp, Homo sapiens
gatgggggctggggcggtggcaccgtcttcgtcgtcgaggtagaccctatggagccacaccgccctgccgggttctctgggtgcaataaataccagtcacagtttgggagggggccgtgtgc

SEQ ID NO: 159065 - DNA, 122 bp, Homo sapiens
tcggggtatctcttggacaggccggctttgtctccagccgaggtcagcagcagtcagatgcgggatgaatgcctggcccaggcggcccccactcaccgcccgagggctctggaactctcttt

SEQ ID NO: 159066 - DNA, 122 bp, Homo sapiens
ccccaagtgaccgcccatcaccagctttccctgtgaagcctctgagaggagcacaaaagacggctggcatccaaagccaatttcacaccacacctccattacactgtcagtcaagaaaggac

SEQ ID NO: 159067 - DNA, 122 bp, Homo sapiens
aagagcgggccgtctcccgggcagtgctggcggcctctcatcgatctcgggtctaaggtccggccgggtcatcattcctgccatttccacagcattcgaggtaccacatcaccccctgcctc

SEQ ID NO: 159068 - DNA, 122 bp, Homo sapiens
cctcagaggagtggcagcttaattattcaccaactcgggatgtcagaatgtgatctggggcgtaaccagatccggcagggaaggcatcctgtgccgggcaggctcgtgtgacctgcccttca

SEQ ID NO: 159069 - DNA, 122 bp, Homo sapiens
aaaaacagacggttccaaattcatttccgcatttgagtctagagtcagcaagatcttggccgcccgcctgcgcctcggagcagcccacgagcccgtgaaggcgcgtggggaaggggggcctg

SEQ ID NO: 159070 - DNA, 122 bp, Homo sapiens
ctgcagcccgtagttgtggatgatggagtcgatgtgcgtgagcgtgcggtagagcacgcccgccgcctcgcgctgctccgagcccagcagcgccagcgacaccagcagcttgctgcgcacca

SEQ ID NO: 159071 - DNA, 122 bp, Homo sapiens
ataaaagccgaaacatgcgtatatacaaaatgaaatatgaatgtgagcttagaggctacacgtggtctctcggatactagaactatctttcttgccttggaccagctaacgtgccttggttg

SEQ ID NO: 159072 - DNA, 122 bp, Homo sapiens
gcttcctttcaacggccaggtaacctagggggctggtgcctgttaaagaggagggcttgccgcggggaactgcagctttgtgctcttcaatgcccagccctgaaatggagttagaacaggca

SEQ ID NO: 159073 - DNA, 122 bp, Homo sapiens
tagcattcagctccgcgagtacggcgcggaggtcaatggtgctaaagcggctcttcatggcgaggcccgagggtcactaccgcaagttcctctactgcccggccggactcgacgccacttct

SEQ ID NO: 159074 - DNA, 122 bp, Homo sapiens
ttaataaaaaacaaatgggaaatgaataagcacatacacagataggtagctgatgctcagcgaggttaagcaacttgtccaactattgaatggtaaggtcaagggtcacacccacagccaga

SEQ ID NO: 159075 - DNA, 122 bp, Homo sapiens
ggctgatatgacagcttagaacagctgcggaccccaggtctgctctgggcttcagtcagtcgctagtaaactgttccatgtggtattcccatgagtgtggaatatgtttcctctagatccta

SEQ ID NO: 159076 - DNA, 122 bp, Homo sapiens
ctcccttaccccagacaacagctcttgggaccccaccagcaccggcaaggtggacaccatcgtcccaattttgcagatgaggaaactcaggctgagggccggcacacagctctccagagctg

SEQ ID NO: 159077 - DNA, 122 bp, Homo sapiens
caaggttggaatgccatgaagaattatgccctgggcggctttacaatggataggccaatacgtcgccacggcttttaagactgggaaacggggcaccaggctgggctttagaaatcgctgga

SEQ ID NO: 159078 - DNA, 122 bp, Homo sapiens
agggggctggcattctctgtctataagtaacactggttcctcttcagagcctcagctcagcggagctgccgtttgctggtgaagcccgtgacgtgcaaagcatcctgcctataggatttgag

SEQ ID NO: 159079 - DNA, 122 bp, Homo sapiens
gcgagtgtgcaccgagaccccaagggcgtggggtctccgcgcccgggctctatctgtccccgaccacccccgagccctccccgggctcaccatgccgcggtacagctcctccaggcgcccgt

SEQ ID NO: 159080 - DNA, 122 bp, Homo sapiens
ggcgagcgtggccagggcttccagggaggcctggagcctacagtcaggggtcctgggctgcggggggctgggggagaggccgaggacccctcgagccccagctgagtccaggttgggtgaac

SEQ ID NO: 159081 - DNA, 122 bp, Homo sapiens
agaactaagcagaggccaatccaccctggctttgttccaggccagctaacttcttcatgtcgtatgggtctaccccctacgtatctgtccctaccattatgctagtgtgtccccccatttgt

SEQ ID NO: 159082 - DNA, 122 bp, Homo sapiens
tcaccttccgccagtggcgggccctgtgataaccacttggcatgtataattccatgagcccgttgccacaaccctgtaaggtggtgccttggtcattcccttttgccaatgaggaagcaggc

SEQ ID NO: 159083 - DNA, 122 bp, Homo sapiens
cgatgcccgtgtgcgcagccccgcgagtctcaggtcagaagaccactaatttcgcggccgcgttccacgaagctaaggggcaaaaaaccagctttcttgggacaaagcgtccccccagcagc

SEQ ID NO: 159084 - DNA, 122 bp, Homo sapiens
gcggctcactaggtggggtaggctgggagtcccgccactgcgctgcctccgtggcgggggcggccgggctaggctgggatcgccgctgctgcaggggccgccactgcagcccacactctaat

SEQ ID NO: 159085 - DNA, 122 bp, Homo sapiens
tccacactcggttcatttcccgaaaactgacagttttccacgtgcacagtaatttgagatcgttgtttcaggctgaggaaagcccacaggccgttgtctggggtgggggtaggagggtattg

SEQ ID NO: 159086 - DNA, 122 bp, Homo sapiens
aagcggctcccgcgaccggggccaaaaagtgcacactacatttcccacaagtcctcgcgccgctcccttagaaagtacacgctacatttcccacaagccctcgcgccgctccctgagaaagt

SEQ ID NO: 159087 - DNA, 122 bp, Homo sapiens
ctggaaggcccggggaaaagccaaggcataggccacaaaggctgcccgctcgcctggatgcggctcctgcacccccagccccaggtgggcacacacctgctccagccacacctgggctttgg

SEQ ID NO: 159088 - DNA, 122 bp, Homo sapiens
gcgaccatcatggcgctcgcgccgggctgcgctccccgcgcgcctgccccgcgctccggccgcggccccggagcctcggacgcgcatttcacaaacattctcgccctctcccgagcgcccgc

SEQ ID NO: 159089 - DNA, 122 bp, Homo sapiens
tggggggatgaggaggcagacagtaagcatttacaacgcgcagctgtaatcccagcactgcgggaggccgaggtgggagactcgctccaggccaggaatttgagactagcctgagcaacaca

SEQ ID NO: 159090 - DNA, 122 bp, Homo sapiens
caatcagcaggatgtgggtggggccaaataagggactaaaagcaggccaccagagcaggccgctgcagcttgctcgggttctctctctgctctgtggaaacgttgttgtttagctctttgca

SEQ ID NO: 159091 - DNA, 122 bp, Homo sapiens
gtttggatcccaaagaaatgtcttgctccgacttacaagcggcgcgatgggaaactgaagcgtctttgggaagttgttctgactagactgaagaagtgtctgtcttactgtggtctgaaccc

SEQ ID NO: 159092 - DNA, 122 bp, Homo sapiens
gaggagcgtctctgaccggccgccccatctgagaagtgaggagcccctccgcccggcagccgccccccgtctgggaattggggagcccctccacccggcagccgccccatccgggagctggg

SEQ ID NO: 159093 - DNA, 122 bp, Homo sapiens
tcagcagtgtgagatgggtgttctaattgcacctgtggataaaggctgcactcctttggacgcgtgcacccaaacccagaagcccgtccctgacccctgctgacacaggtgatcccttcctc

SEQ ID NO: 159094 - DNA, 122 bp, Homo sapiens
gcgctggccatcatcctccacctgctctacctgctggagaaagtggagtgcacccccagccgggagcacctgaagcaccagaccatctaccgcctgctcaagtgcgcacccaggggcaagaa

SEQ ID NO: 159095 - DNA, 122 bp, Homo sapiens
cagagcaaaaggggaagggaagaggcagtcagaggacgagtgcttccgctgcggtgatggcgggcagctggtgctgtgtgaccgcaagttctgcaccaaggcctaccacctgtcctgcctgg

SEQ ID NO: 159096 - DNA, 122 bp, Homo sapiens
gccgcctcttagcgggtgaccttggcccacggccctctcctcatctgcctcgcccagtcacgtctcctcttaagcatccttgccgtctgtctcctggcatttggatgggcctctctgaacgc

SEQ ID NO: 159097 - DNA, 122 bp, Homo sapiens
cacggggccctccagacctctcggaacgatcgggattccacagagccccggtgccgccgtcgggggcaattgtcccactgttgccagtggaggatgcacttggagtgccttttcccaccttg

SEQ ID NO: 159098 - DNA, 122 bp, Homo sapiens
cgagaatgagacgagagaacccatttccacaaccattttaatctgcgcatcggtcccagacgtagggattcctcgtctcatcttggaaacattgccagcagtggttctgatttggaagcctg

SEQ ID NO: 159099 - DNA, 122 bp, Homo sapiens
gcccaggcgcccccagctggaggtggggataatggcattctacaacatggtttatcacctcgcccgccagggcagcaaccagcccccgcctcgccaacccagctgccccaggctggaggcga

SEQ ID NO: 159100 - DNA, 122 bp, Homo sapiens
aaattccctcacgctgtagcacagtgtacttggctacttcaaccagaaattgtaaactggcggtctgtaggccaatttgaccacacatttattttgtttggctaatatggtggtttttgaga

SEQ ID NO: 159101 - DNA, 122 bp, Homo sapiens
ctgtttttgttggcacataaagaagtaattctagttctttcgccttttttggaagaggttcgtgtgtttcaaaacagaaaattatatgaaataaataattcgtaggcagagaactgaaaaca

SEQ ID NO: 159102 - DNA, 122 bp, Homo sapiens
caaggtccagcttatcagccacggagcctgaggccataaagatgctgggcaggagctccacgctgggataagtggggtggttatttcaaaatcgtcccaagtgacaagctctaggacgtgct

SEQ ID NO: 159103 - DNA, 122 bp, Homo sapiens
tgaggaagaagacaagctttcgctgcgcaagtagatccagggagcgtgcagccgggtggacgttctccccctcaggtctgcgcgcagtggttgcgcctgtccccgagcctgcgcagtcggcg

SEQ ID NO: 159104 - DNA, 122 bp, Homo sapiens
tggggctccccaggggcagggtgtctgggatccactggggcgcactggagcccagagccccggcgcccccccccccccccagctcctacaagaccctgggtggaagtggagcggagaagctc

SEQ ID NO: 159105 - DNA, 122 bp, Homo sapiens
attcattataatccggtgaaatcgtaattatttagccttattttacagatgaggacactgcgtaccaacaagtaacctcactaagaatttcgtcatggaggagaagggaacctgtattcaaa

SEQ ID NO: 159106 - DNA, 122 bp, Homo sapiens
gagggaaactctggaggacaatcccaaggggcctctcagcagttcacaggggctctaaaacgctaaggggaggaagagcagtgttaacatcagccttcacctggagaaggcagcacaaagaa

SEQ ID NO: 159107 - DNA, 122 bp, Homo sapiens
acgagggaaaacttgatatgcacgtcatttcccagttccaggcaatgacctggggcagagcgggtggggagcaggtctcccggagccatctggaatatgccgatgagtgagctgtgcattag

SEQ ID NO: 159108 - DNA, 122 bp, Homo sapiens
gactttttaaccttctgtttcatagattcggtgctagttgatgaactcagtaaatacttccggggctatttgtttgccagtcattggtgctaagggttaaggatgtaacagtgaaaaacagc

SEQ ID NO: 159109 - DNA, 122 bp, Homo sapiens
ttatcaccccgagaaatgggagcgcctggctgcttggatttagcctgcagctggggtccccggtggtgtgtgcagggcggccttgagcctccaagggtgcatccacaaactgcccttccccg

SEQ ID NO: 159110 - DNA, 122 bp, Homo sapiens
atcccgcatccgaggctgcgagcggccacatccgtagggcatggtgctgtcatagccgcccgccccctgcatgcccatcacgccgtagtcgggagccatggactgggagaagagggacggag

SEQ ID NO: 159111 - DNA, 122 bp, Homo sapiens
gcggagctcagagaccgggttcccgctgcgcgtgatcgggccgtggtggttgtgtgcccacgtttagcagcgtgctggggtgctgtataaattctaaaatgccactttttggagggcatgcg

SEQ ID NO: 159112 - DNA, 122 bp, Homo sapiens
gctcgaacgaaatcatgtattttgtgtggtgatttcaatttaataatatctgttctgccgcggtgggaaataaagtatctgtctttgctttagatgctaagtcgttgttgatggtggtatta

SEQ ID NO: 159113 - DNA, 122 bp, Homo sapiens
ttttgtttgtttgtttgagacacaatctcactttattgtccaggctggagtgcagtggcgcgatgtcggttcactgcaacctctaccgcccaggttcgagcaattttcctgtctcagcctcc

SEQ ID NO: 159114 - DNA, 122 bp, Homo sapiens
caggcaggtcagccagagggctttgtgcaggggctgcggatttgtgcatcactgcagatacgggaaggggcagggccctggctgtccggacgtgtgtgagcacatgtgggcccaggcagatc

SEQ ID NO: 159115 - DNA, 122 bp, Homo sapiens
tgctgatgatctggcacttgggattttattgatgtttacgcagcagtctaacaccaaccacgctttgaaatgtgtacagacagtgagctggtaagaaaacagtaattatgctagtgggcctt

SEQ ID NO: 159116 - DNA, 122 bp, Homo sapiens
cctgttaagtgaaaatgcacttacctttacccagttgaatacagatgtacttgcctttgacgtctgcctccctaagtatggttacagtttgtcactccggttctggagggccaccctgtccc

SEQ ID NO: 159117 - DNA, 122 bp, Homo sapiens
tcagtaggcacgggaggcagagcccagggaggccaggcagcaggatggcaggcagacaggcggcagcaggggacaggcggcaaggccagaggaggtgagggcctggggggcggaacttagcc

SEQ ID NO: 159118 - DNA, 122 bp, Homo sapiens
gctccccggttgccacgggaacttctcagatgccgaggagggtgaccccgagcgacactacgaagacccctacagctatgaccaggaggtggccgaggtggaagcagcaacagccctggggg

SEQ ID NO: 159119 - DNA, 122 bp, Homo sapiens
ggagtagttaaaaataagaagtgttgggggaaatcctcctccttccaagcacagctcacacggcagagcctcctcagagttgcggctgcggatgcaatgacttagccaggttaacgccgatc

SEQ ID NO: 159120 - DNA, 122 bp, Homo sapiens
cgtcggcagatctgcagatctgccggactgcgggtcggggcgtggcaggggcctagtccccgccccggccgtcagcctgtcgcctctggctcgggccgggcgacgagaccctccctcagcac

SEQ ID NO: 159121 - DNA, 122 bp, Homo sapiens
aaataccggcactgccagtaaactcacctttgggactggaacaagacttcaggtcacgctcggtaggtaacagaaaccgtgaggtaacttaactgtgtgttcctttaaaacaggggatactg

SEQ ID NO: 159122 - DNA, 122 bp, Homo sapiens
atgcccctgccttggctgccccaccctgtggcttatgatgctgctgctctcctggcccctcgtgcagtgccagtgggactaaggttttcattcatcaccaacttcctgagattttagtccta

SEQ ID NO: 159123 - DNA, 122 bp, Homo sapiens
tgatctttcatttcagaataccaggagcgatatggttctcgccccgtctgggctgactaccgccgcaaccacaagggtggtgtacccccacagcggactcggaagacatgtattgtgagttt

SEQ ID NO: 159124 - DNA, 122 bp, Homo sapiens
ttatgggggtcttaaaatgtaagtgaatgtccttatccggggtgactcaaaagcttaagtcgggaagcccaacgtgactaaaaccaataggtgattgttcggggccgactgtgtgcgggtgt

SEQ ID NO: 159125 - DNA, 122 bp, Homo sapiens
acaagcactgcaattccctgatagtccagctcgagcttgtccaactcgctgcccacgggccgcatgtgacccaggacagcttcaaatgcggcccaatacatatacgtaaactttcttaaaac

SEQ ID NO: 159126 - DNA, 122 bp, Homo sapiens
gcttcacagccagttcagctccacgttgattgctgagtcgtggaaacgtgcaaggggtcccggagagtcaactgtttaccaactggcttgggagtattcaaatgtgtaacaacggaacgctg

SEQ ID NO: 159127 - DNA, 122 bp, Homo sapiens
cagtgagtttggaaaataaaatcctgaatggtcccaacctttgatgactctctatcaaagcggagagttgtagtttctttgccttctaggatgggagcatttggcacctgcatgtgtttcgt

SEQ ID NO: 159128 - DNA, 122 bp, Homo sapiens
gggatgcggggtccggggatcccttgtccccttaccagggccagctctttgcctgctgtgcgctccatggccggcgcccgtccctctcagtggcgccgctgagtgaggcggaagggccggcg

SEQ ID NO: 159129 - DNA, 122 bp, Homo sapiens
aagggttttgcctcacttaatgggaaataatcagacataggctgaacactgccatcatcccgcccaacgaatattcaaagcaagacccaaaaggatcaagctgtttctaagtaaattaacta

SEQ ID NO: 159130 - DNA, 122 bp, Homo sapiens
tttgtgtatcacagtttcacttacatgtggtcaactatgttctgaaaatattaaatagaacgttccagaaataatgcaatttttaaattgtgctgtgttctgagcagcatgatgaaatctca

SEQ ID NO: 159131 - DNA, 122 bp, Homo sapiens
tctataaggtgagagtagacccacagaatagctccaggaagcatggtagcttgagatcatcgcacaagctaattctgggaaggtatccaagaatcagaaaattccactcttcagagaagtta

SEQ ID NO: 159132 - DNA, 122 bp, Homo sapiens
gctcggtaactgggtttccaagagccctgcagggacaccccctcttgggaactcacacagcgcagccaggtcgctaagcctttgaggggcccttgttgcctcctgggtgtgcgtgcgacccg

SEQ ID NO: 159133 - DNA, 122 bp, Homo sapiens
ccgccaaatgatgtcccaagcagcagagcatcctttcaactctgggccacaccgaaagctcgccttccatgtcagttgatacataggtcagagcagtattccaaaatgcggagtatgttgtc

SEQ ID NO: 159134 - DNA, 122 bp, Homo sapiens
ctccctgttcagctctcctctcctctcctctcttctccttggagcctactgataaattgacgccaggagcctgagcttcttagcaataaataagctccaaatatagaagaggggggaaaata

SEQ ID NO: 159135 - DNA, 122 bp, Homo sapiens
gcaggaagaagccatatgctgcttcgtgatccatgtcactctgcatgaaggagataaccccgatgccctatgccaggaggccattgtggaaccaggagaagaaagctgtctcgtgcgccttt

SEQ ID NO: 159136 - DNA, 122 bp, Homo sapiens
catcgagggaaggggagggcgcccctccctcaggagccgggagacctgcctaacctaggtcggaagcccacaaccctgagtacaaggtggacgctgtgtatacaacttagcaccttaagatg

SEQ ID NO: 159137 - DNA, 122 bp, Homo sapiens
cgtcgggcgcctgctgggcttgattggaggacgggctccctctgggctgcaagagtgccccggctaggtgccgcaaagtcccgcagccagtgccattgagaggtgaagcctgctgggcttct

SEQ ID NO: 159138 - DNA, 122 bp, Homo sapiens
ggcccgcagcggagtgcccagacttggcagggtcagagccccccagcgggatccagagcccgccgccgaggccccttttgggatttctcaggctcggcagcctcagcgcaggcaggggcggg

SEQ ID NO: 159139 - DNA, 122 bp, Homo sapiens
taagatctatgcacctgaggattgaagtgcttctctctctcaaagcccctatgctactttcggtccccaccatacaattacatttcctcaaaattcctgctccgctgttcctcagctttcaa

SEQ ID NO: 159140 - DNA, 122 bp, Homo sapiens
gagaggctgggaggataaaagcgaggatgggctctagtcacttctcttttttctcctttccggccgctcttcttcccgctttagaaggggtgaagcctctttcttccacctccgggagccat

SEQ ID NO: 159141 - DNA, 122 bp, Homo sapiens
ttcggctcttgccttcttccttcattcctccctctggtatttccctgtgtctgttattcccgtctttatgtccatgtgtacacaatatttagctagaacttacaagtgagattatgtgatat

SEQ ID NO: 159142 - DNA, 122 bp, Homo sapiens
gcaggaggcggccgccgggggaccccacttgtgtgcagcctagacgctggttcagggagtcgtacatggaagccttgcggaaccccatgcccctgggcagctctgaggaggccctcggggac

SEQ ID NO: 159143 - DNA, 122 bp, Homo sapiens
tcccaccgggaccccggggacaacaccaccccccagccccggcggtggcgtcgggggagccgcctggaggagtcgtctcaactccatccgcaacagcttcctgggctcccctcgctttcacc

SEQ ID NO: 159144 - DNA, 122 bp, Homo sapiens
agcgattctcctgtctcagcctcccaagtagctgggattacaggccaccaccatcatgcccggctaatttttgtatattggtagagacggagtttcactatgttgggcaggctggtcttgaa

SEQ ID NO: 159145 - DNA, 122 bp, Homo sapiens
ggcgccaggcacctgtcgtctggggaacagtgcaggcggggaccttcccccgggagctagcggggccactgggctgagacgggggatggatcagattccagagagtcccaggcgggcgggag

SEQ ID NO: 159146 - DNA, 122 bp, Homo sapiens
actaaagcccggctagcagagctgggaggcaaaccagaccgtcagcaccagggcggcccacgcctgcttccgcccattggctgcccgcgtttcaagacccgcccccatattggagagcttct

SEQ ID NO: 159147 - DNA, 122 bp, Homo sapiens
tctaccccgcgtgctcgctttcgcttggggtggaaagcggggttcaggggctcttttcagcggactgagaaatcgcagaggccgtgggtaaggattcaagcttgaggaaacactgggggccg

SEQ ID NO: 159148 - DNA, 122 bp, Homo sapiens
tggtcaaatatacataacgtacagcgtatcacggtaaccactctcgggcgtagtcagcggcgttcagcacagtcgcattcgtgcagccgtcaccaccatccacctgcagagcatcttcatct

SEQ ID NO: 159149 - DNA, 122 bp, Homo sapiens
gaaccccggactgaacttcacctttgtctttactcccttttagggtcaaatccagggctccgttactgggtcctggagcccaagtcctctgggttagaacggagtttcccataaggagaagg

SEQ ID NO: 159150 - DNA, 122 bp, Homo sapiens
taaaatcaaaggagccttgacggtttgaccttcgttaggactcgcagggccagcttcagacgtggaagtatcggactccggggtggggctccaaagtggcagccaaaggagatttggccgcc

SEQ ID NO: 159151 - DNA, 122 bp, Homo sapiens
acagagcgactgaagttacaatccagcattttgtgaatctctgccttaggccagccagggcggagagggattaaaacaagctccgaagtgtgtattacaacacagttgagataggacaaaag

SEQ ID NO: 159152 - DNA, 122 bp, Homo sapiens
cgcactccagtggcccagacctggctgaggcagctcccgtggtagatcaagcctcacaggcggctggaagagccagttctgggctgggcctgtgggaacaggcgtctgttagtcagggtttc

SEQ ID NO: 159153 - DNA, 122 bp, Homo sapiens
acgcgcaggccgcctgctggggggccggggcgtccaggcagcggggccttgggggacgctcggtgactcggagccgggatggagggcttgtgccccatccccagggcactgcgcagcgggag

SEQ ID NO: 159154 - DNA, 122 bp, Homo sapiens
tgggaagcctcacacacactctcatcatgctctgctatgaaacatagcttaaccaagaatcgtatatccagcaaagctcatgttcaatacaaaacaaaaatttaatttttctgttatgctga

SEQ ID NO: 159155 - DNA, 122 bp, Homo sapiens
gttggaaaggaaggaggagagaggcagagagagagagagagagagagagagagagagaagcgcgagagcggccctgtaattgagcagaaaggaaagggagaaaaatgaatcccaaactttgg

SEQ ID NO: 159156 - DNA, 122 bp, Homo sapiens
taaccgccagtggtgtttccacaccgtgcccgtgaggaggccacgccaggcccctgcgtccgagctgggggtggggaagctgtgtctcaacaagcctctctatgggattctggcgcctgctc

SEQ ID NO: 159157 - DNA, 122 bp, Homo sapiens
gtttctctggctcttctttttagtaggcaaaagggggaaagaaggaatttgcatggaatgcggcaaacatcccgtcagagggcatttctggaggtgcctctaattgtggcctccagttgcta

SEQ ID NO: 159158 - DNA, 122 bp, Homo sapiens
ttacttaactgagttagaggttttcaactttggacctcaacaaacacattgtttctatcacggtgttcccaatgactcacgaggtcagatagtacttcctgattactcaccaaaccacctta

SEQ ID NO: 159159 - DNA, 122 bp, Homo sapiens
cccactggggaatccttggagtcctggggacacgtggctggccccaggctgtgtagacaacggaggaggagccctccaccccgcatccccagtccctgagcacgttctgtgcagcctgggct

SEQ ID NO: 159160 - DNA, 122 bp, Homo sapiens
tgtctgtggttcattttcttcaggtgtatggagaaaacaccatggaaacagggaacctcacgtgggtatcagactttgtcttcctggggctctcgcagactcgggagctccagcgtttcctg

SEQ ID NO: 159161 - DNA, 122 bp, Homo sapiens
ccgatcgcgtgctctgccatgacgcgctgcccctggacgcacaggcctcccactggcaaccggccttcacctgcctggcgctgttgggctgtttcctgcccctgctggccatgctgctgtgc

SEQ ID NO: 159162 - DNA, 122 bp, Homo sapiens
gcccaagttctagtcccacttgctttgtcacccactgcctgtttatggcagcttcctctccggtcttcagtgtcctcattgagccaatgaatacagcatcgctcctctaatcacatatattc

SEQ ID NO: 159163 - DNA, 122 bp, Homo sapiens
ttgtctggcgggaaagtccttggccagcgagaggacactgcgggtgagctgccaaggacacgcaggcctctgtagctcctctgtttgaggttaggatttctccggaaggcgtggtatcactg

SEQ ID NO: 159164 - DNA, 122 bp, Homo sapiens
gcagtccactgcagaatttggaatggcaactctccacctggagccactgctatcacattccgtatattcaaagtgataatctttctgcaaacaatcacaaaaacaagcctttgttagagcca

SEQ ID NO: 159165 - DNA, 122 bp, Homo sapiens
ctgacaccagggcgacttgagaattgagcccagggaagctgcagtgtggtgcagcagatgcgtactggtggttgccatggagatcgctaatactgctgaaacccaaagaaagggcatttgcc

SEQ ID NO: 159166 - DNA, 122 bp, Homo sapiens
agttagtgagatcagggctcgccccgcgtgctggagttagtgagatcagggctcgccccgcgtgctggtgttagtgagatcagggctcgccccacatgctggtgttagtgagatcagatatt

SEQ ID NO: 159167 - DNA, 122 bp, Homo sapiens
ggtgaccaaggtggtggcggtggacgcagattcgggacacaacgcttggctgtcctaccacgtgctgcaggccatcgagcccgggcttttcagcctggggctgcacacgggaacctgctggt

SEQ ID NO: 159168 - DNA, 122 bp, Homo sapiens
agcaggaggtgaaacacacaaagtaatcattaggcttcctgaagtcccaaggaccttctacgtcagtggcagaggtgggaggtgggctggcgaggtggggcagtctaggaactgcgctggtg

SEQ ID NO: 159169 - DNA, 122 bp, Homo sapiens
gcacgaccggggacagaaggaagacactgcggtcgcaaagccctggccgtgcaaaggccccgtggtcagccaggagcccaggcgtcccctgctctagcgaggtttccttccgaacgtcccgt

SEQ ID NO: 159170 - DNA, 122 bp, Homo sapiens
gaccaggtaggcggttcccaacagcccatccaccccagaacctgcaggccaggtaggagacggtccccaacagcccgccagccccagaaactgcaggccaggtaggcgaggttcccgacagc

SEQ ID NO: 159171 - DNA, 122 bp, Homo sapiens
ctttcacgtgcagctgcacggcactgagcgtctggcccgccgagttgcgcgcggcgcagacgtagagcccacgatccttggcctggcagtaaagcaccttgagcacgaagccgccgtcgcgg

SEQ ID NO: 159172 - DNA, 122 bp, Homo sapiens
taatttagccaagggcccttgcagagaaatttaagcctccaagcaggtggcaggccttgacgtcctagattcttgtgaggaaggcctgccctgttccactgccttggagtccccccgaccga

SEQ ID NO: 159173 - DNA, 122 bp, Homo sapiens
cacggggagacaaggcctgggcttgttctgcctgcattagcatggagggtgggaagaggccgggggaaggcaacgcacaccaacacctactccgggcagagttgttttagcggagccgggcc

SEQ ID NO: 159174 - DNA, 122 bp, Homo sapiens
aagaagaatcagtttatgttcttcctggagttctccatcatgtttcagtctggagtacttcgtttcgttttctgtgaatctgtcactaaatcatcttcaaatcctctgcagagactgaatcc

SEQ ID NO: 159175 - DNA, 122 bp, Homo sapiens
aaggcgctggctgcttctgtcaactggccggccattggcagccttctcgggtgcctgatccggcccagcatggcctcggaggagctgctgctcgaggtgcagcacgaacgcctggagctcac

SEQ ID NO: 159176 - DNA, 122 bp, Homo sapiens
gaggaggataggggtcagagtcctacagcagtgcctggggtttaaaagtggagagaaaggcgcggagctgagcgaagactacacgttttagagcttggtttgaccccattatgtacaggcag

SEQ ID NO: 159177 - DNA, 122 bp, Homo sapiens
ggggggagcgggacgtccttagctctgggtgtttggtggggagccggacgtccttagctccgggtgttggagggtgttggaggggggagcgggacgtccttagctccgtgtgtgggggtggg

SEQ ID NO: 159178 - DNA, 122 bp, Homo sapiens
tacaacaaaggcgtttcttgactacttgaataataaccatccttttatatttgcaaaatacgttgtcctcacccaatcaaatgccagcctgtagtccttgtcataggcatattcaatgtcca

SEQ ID NO: 159179 - DNA, 122 bp, Homo sapiens
ctttgcaggagttcatggttttgctgaagcgaatgtcaacatcatcacaatataaggaggcgtcggacctgagaggggaggaaggatgcagaggtgatgtgggtctaaaggcatctgaatgg

SEQ ID NO: 159180 - DNA, 122 bp, Homo sapiens
gcccggggaggagcccagtcaggcgacctgtcaccagtaaccacagctgaggcccgcccgcgccccgcccccggctccggaaagccagctccagccctctcaggcccagaagcctgcagtct

SEQ ID NO: 159181 - DNA, 122 bp, Homo sapiens
aaatctgacatgagcatcttcagggcaaggaccatcttttagtgagagactgtattcgtccgttttcacactgctataaagaactacccgagaccggtaatttataaaggacagaggtttaa

SEQ ID NO: 159182 - DNA, 122 bp, Homo sapiens
gccccctcccctgaccccctccctgaggggatttttgaggagggccgagcttgtggccagcgggcaccctcctccccccggcaggggctgggccaagatataaatagggttggcggctgcag

SEQ ID NO: 159183 - DNA, 122 bp, Homo sapiens
gtttctgggaagcttcctatagatttttcctctcctggtttgagtacaggcatgaatgcacgcacacatgtacacgcacgcacacacagatccacacgcatgcgcacacacatgtatgcaca

SEQ ID NO: 159184 - DNA, 122 bp, Homo sapiens
ctcccatctttaacagggaagggagagtggagggcatctcaaaaagatcattcctctccacgttaactgctgtgttgggagggaagccgtgcatctggtttctttatttgggctccactttc

SEQ ID NO: 159185 - DNA, 122 bp, Homo sapiens
acccaagtagatgaggaaactaaggctcagagaggttaagtaacttgccaaaggtcagaccgctagttagtgactaagcagtggtttaaacccagaaacaactggttccacaggcattttgt

SEQ ID NO: 159186 - DNA, 122 bp, Homo sapiens
ttctgtggggcaaaaatcaaaacgcgcaatagaaaaaaaaagttaacacaatctgggctacggcagaagccagagaatatattcatataattgaaaagttctaagtgtttcataattgacct

SEQ ID NO: 159187 - DNA, 122 bp, Homo sapiens
acatgcatgcgaatcacctggcaatctttttaaagtacagataatgtctcagtagtctgacgttgggattgtgattctgcatttctaacaagcttccaggtgatgtcacactttgagtagca

SEQ ID NO: 159188 - DNA, 122 bp, Homo sapiens
ggttcagagccagccttcaggccatgcaggcctcctggatgtgcttactaactctgggctcgctgttctctgagctggctgggagttcccctctgcacccccgtttcctcccctgtaaggtg

SEQ ID NO: 159189 - DNA, 122 bp, Homo sapiens
tcctgcagcaggttccaccctcttgcgggcgagcgctggctaccattggactgtccggcgcgaggggaagggtgatctataaatagggaatgggtacacgtgacagtttggcagctgctcct

SEQ ID NO: 159190 - DNA, 122 bp, Homo sapiens
gggaagctggaatggcaagggaaagggggctggctgggaaaaggggtgggattttagaatcgtgcctgtgtggctctgcctcccgatgtgggagagagttaagggcttccagcggcatgagt

SEQ ID NO: 159191 - DNA, 122 bp, Homo sapiens
gggagtggtgaatggctttactacaaacgtgtacatttattacccggcctgtgagcacaacggcttggggctcccttggaggagaccggccctgcttaaaccagcacagggaaatgtcttgc

SEQ ID NO: 159192 - DNA, 122 bp, Homo sapiens
tggatggcattcaggtgagcgcccgcgcccacgggacacagcccacgcccacagcccctgcggtgaagagagcctgaggccttaggctgctcctgagtctcagtgtggccatgcagtccctc

SEQ ID NO: 159193 - DNA, 122 bp, Homo sapiens
ttgcccacgtcctcccagccctgcacaaggaccggccccgttttgactttgccaatttggcggtggctgccacgcaagaggatccgcctaagatgggagacctgagcaagctgagcccagga

SEQ ID NO: 159194 - DNA, 122 bp, Homo sapiens
aacgctttctgaaaactaatactttgctcacttaagatttccagggacagtgccttggcccgtgtttgttggcttgttttgtttcgttcgtgtttttcctttttcttatgtatttcttttta

SEQ ID NO: 159195 - DNA, 122 bp, Homo sapiens
gccgccccacagcccgagccggagagggagcgcgagccgcgccggccccggtcgggcctccgaaaccatgaactttctgctgtcttgggtgcattggagccttgccttgctgctctacctcc

SEQ ID NO: 159196 - DNA, 122 bp, Homo sapiens
ggaggtgccgcctgggctgctccgaccctccccgcggcctcggcatcttctcccagcctccgatggactcagagcccagcgtgtcagagccgggggcgcttttcacccaaacctgtgcccca

SEQ ID NO: 159197 - DNA, 122 bp, Homo sapiens
aacacatttcccggacttaaggcccttcctcccaaattccagcccacccaggattcagcacgcaagtggaggccatcactgaacctctgaagctcatcctgccccaggacgatgggaagatc

SEQ ID NO: 159198 - DNA, 122 bp, Homo sapiens
gtactcctcctctctgatggagctgaagtcccgcaggaggctctgcaccaccgagtaccgcgactgcgagaacgaggtcctcagagactcgatccagatgtgcagcttccaggggactcctg

SEQ ID NO: 159199 - DNA, 122 bp, Homo sapiens
ccgcccgccctgcggtgtgtgccacggaggccgctgggtgggggcgtccaaatgtggaagcgttcctccagcatgcgtggatatcctgaggactcacggacaccgattccctcttccgggcc

SEQ ID NO: 159200 - DNA, 122 bp, Homo sapiens
gcggaaaatctactgcgtggcttgtcaggaactcgactcagacgtggataaagataatcccggtaagagtaaaaaataatccgggagaggggccggatatgcttaggggggaagcgtggtta

SEQ ID NO: 159201 - DNA, 122 bp, Homo sapiens
gtggtcgatgggactgggcactgtggagtagggggtggtgctcgtcggggaggctccggccgcacaggagcccatggagtgggtgggaggctcaggtatggcgggctgcaggtccctgagcc

SEQ ID NO: 159202 - DNA, 122 bp, Homo sapiens
gaaccggagatctgagttgaaccagtgctgggaaccatggcactgccttcgccgagccgccgcgtgcctctcttttcacctctctggcctgcatattcttttagcaaacttggggattatac

SEQ ID NO: 159203 - DNA, 122 bp, Homo sapiens
tgcctcaccatgcagcccccgaggtagagcctggacggcgccgaggagcgcagagcggcgcgcagcccgcccgccccagacggccgtctggcctcgcgcctgcctgttccctccagcccgga

SEQ ID NO: 159204 - DNA, 122 bp, Homo sapiens
gaggctgtagtcacgtggtggatgaggctggggtcatcttgaaagctctggcacctgggccgggaagactcaagaagctggggataggaacaactggggctccttaggtatctgtctactta

SEQ ID NO: 159205 - DNA, 122 bp, Homo sapiens
cggggaatgctggaggctggtcccggttatccgaggccttcccctgcagtctccgctttccgacaggtctccgctgggtctgccccatgacccgggccatttcaccctcccatcccttcctt

SEQ ID NO: 159206 - DNA, 122 bp, Homo sapiens
gttacttgtcctgggaacggcggtgggtgtcccaggaggcggacttccggtgcactcctgcgcgtgtgcacctctccctgcgtgcgtgttcgcgcgtgcgtgctcgcacatgcgcgccacct

SEQ ID NO: 159207 - DNA, 122 bp, Homo sapiens
ggccagagggggctccagcctggtgctcgaatgccagggtccgctagtggctgctgctcacgcccctccccacccccagtcctcctggctgacaaggagggtgggccgccggcagtggacga

SEQ ID NO: 159208 - DNA, 122 bp, Homo sapiens
tcgaataacagctaaacgaatcgaataacagcttttgtacatcaacatcaagaaggaatacgcctgagagagatcagagtatatagatgaatatgaacaagaatggaacattcacttgtcaa

SEQ ID NO: 159209 - DNA, 122 bp, Homo sapiens
taatttaggatgtggatttttgtgttttcaggtttgttacatgtttccagcaagtacaagcgttcctctggaggtatatgttttcagggttctttggtctacacaaaaagtgagagagctat

SEQ ID NO: 159210 - DNA, 122 bp, Homo sapiens
cagcatggatatcttttctaagatctcacagacacgcccagaaatccctgggagaactcacgtgacaggaagcacatttgccctattggtcatctctagtgagttcagcagagttgccaaac

SEQ ID NO: 159211 - DNA, 122 bp, Homo sapiens
gcctcgccagccctctctgggcgccccctgctgccgggcgccccctgctgccggccgccccgggtcggggtgccgtgagccttctcgcctttgtaccaggagacctttcagcgccgggccca

SEQ ID NO: 159212 - DNA, 122 bp, Homo sapiens
atctgaggctagagttatatttgcaggacagtctataatttctgaattgctgaaaattagcgtattaacgatatcagaagctccggaaaggagggagaggagactgttgcctgctatttggt

SEQ ID NO: 159213 - DNA, 122 bp, Homo sapiens
gtgcccgggccatggcggccagggctggagaaaggaacgaaggcaaggagggaagtgacccggggcccccttaccttgtccttggggccgaggttctgcaacacctctttgccggtggcgct

SEQ ID NO: 159214 - DNA, 122 bp, Homo sapiens
tcactggttgacaaaaatcacattgattagtgattggccagatattgttaagctatagaacgtgagtaacagtatcctgtgtggattaggttaatttatagctacctgtgacaatagcaagc

SEQ ID NO: 159215 - DNA, 122 bp, Homo sapiens
gcaagtctttgttctcccgatttaggagtatttgtgactatttcttgtcctgtgaagcagcgttgcttcctgcctattttaagttaatgttttagactttaaggtcaaagcttaaagttgtg

SEQ ID NO: 159216 - DNA, 122 bp, Homo sapiens
cacagctctggagagcactcttttcttctggtccattattttccctgaagagacccctgacgcctaaaggtaaggcaggagcactttctgcttattcccatcccagcttcttcccatggcta

SEQ ID NO: 159217 - DNA, 122 bp, Homo sapiens
cctttgtgcactgcaggtagacaagctccagcagagagtggccagatgtggtgcctggagcgactccgcttgggtcctgagtgccttcggcggagcggagactggcttctcccgggtcgggc

SEQ ID NO: 159218 - DNA, 122 bp, Homo sapiens
cccggtcaggtccagcacttgggagctgactgtgctggaggtgacaggctttgcggggtccgcctgtgtgcaggagtcgcaaggtcgctgagcaggacccaaaggtggagttgtcagtggga

SEQ ID NO: 159219 - DNA, 122 bp, Homo sapiens
cctgtttcccaacccacaaggacaagtacatggttttctctcttatcaattccagccccgcgcaaccaagtgaaagcaaatgcactggaccgcttcggaattaaaatgaattgctaaaacca

SEQ ID NO: 159220 - DNA, 122 bp, Homo sapiens
tgtccccttcgcaagcgggggaggccctcgcacatccacacacccgaggtagccttgcggcgggacttgggaggcagggcccgctgggagctctgctctcaggaatccccagcaaatggttt

SEQ ID NO: 159221 - DNA, 122 bp, Homo sapiens
gggcgcggaggccgccccagcgctccatgtcgttgccgcagaggggcaggggacgcgtcccggccccacctacccatgtcaattacgccaagttggtgcggactggaaccgcgtcccgggcg

SEQ ID NO: 159222 - DNA, 122 bp, Homo sapiens
gtgagtgagtccacagcccgcgccccagcgctgccacctccattgcttctgagctgagtccgggcttggcatccccgctggtagctgctgccagagaaaccgtgtgcccaaagcttagtgag

SEQ ID NO: 159223 - DNA, 122 bp, Homo sapiens
ccgagccgagaggacccgagtggggccgaggccagtagccccggggccctgagcagaggccgtagcttgcgccgcacccgcggccaggcggagccaaagatgccggcctctgctgcgcggcc

SEQ ID NO: 159224 - DNA, 122 bp, Homo sapiens
ccttcgaccgtgggcagaggagcaggtgggcgccgagccctagctgagggtggggggtcgcggaggagaggaactggaaaatgggaaataggtgtctgctgacctagagttcttcggctttg

SEQ ID NO: 159225 - DNA, 122 bp, Homo sapiens
gcggctcctcgggcactcctgccctccttgcaagtccccagttcgcttctccctcctcagcgcgccccaggagcagctcgcactcctggttcaggttgcagctgcccttctccaccacacgg

SEQ ID NO: 159226 - DNA, 122 bp, Homo sapiens
tgtccatcacagatctcagggctctcattggccatcgtatggcaggggtggagctcaccacgcttcgtccgcgtgctccccacgtgaaggcacccgccctgcgcgtgtgaaagggcgagagc

SEQ ID NO: 159227 - DNA, 122 bp, Homo sapiens
catcgccaagcacctgacctatgagaacgtggagcgctggctgaaggagctgcgggaccacgcagacagcaacatcgtcatcatgctggtgggcaacaagagtgacctgcgccacctgcggg

SEQ ID NO: 159228 - DNA, 122 bp, Homo sapiens
acagcctcatcccatccaccagcatttaattgctggtcagatccctagtggaaggtttctcgtttttgctttttttgtttttgtttttgttttgcagtggtggtaggcaatgttagttgaat

SEQ ID NO: 159229 - DNA, 122 bp, Homo sapiens
aggagcgaccggcgggttctggggttcgtttgcttgggttcctgcacccgcttgctcttacgctcccccatgcgaggagtggccagtgacgggctgagtgaaacgagccactccagttcctg

SEQ ID NO: 159230 - DNA, 122 bp, Homo sapiens
tagtaaagtcaggaaccaggacaaaccagcacaggctgaggtaatacattcctgccaattcgcatatgaataaggagagttgccctggagcagaaagcttgagttaggcttatgcttaggca

SEQ ID NO: 159231 - DNA, 122 bp, Homo sapiens
ggagccgagataacttgtcactcagcgccctgcctccgcgctccacctcccggagaggggcggggccaggcgagcctcacccacggcctctcgtagctcacgccccctctcccggagcctgg

SEQ ID NO: 159232 - DNA, 122 bp, Homo sapiens
ccagctgtggccgggggcccggctccatgtgtcccgtgtctgtgtgctgtgctgccgcgccgtgtctgatgtgtcagtgctccggccgccgctgtccctttcatcaaagccttaacctttgc

SEQ ID NO: 159233 - DNA, 122 bp, Homo sapiens
gtggtggtcgggacgaggaccccagctgggtgggggagtcacccttcccaggaccgaggccgccctccgcatccctcctcactgctcccgggagcgcagcctcccctggatctcaggttcca

SEQ ID NO: 159234 - DNA, 122 bp, Homo sapiens
ttgtcctggctgccagggcagagagcaggctgcaaagtagaagtgcttatataagctcctcggtgcagctccttgtccagtccctgctgttggcccagggatggtcagctggccaaaggcca

SEQ ID NO: 159235 - DNA, 122 bp, Homo sapiens
tggagtcgggagtgaggagttgaggaaggagcgctcgagtttccgagggacattggaacgcgcagctgtccatcacgcgctcatctgcatattcgggggcccgcccctcccctgctccgccc

SEQ ID NO: 159236 - DNA, 122 bp, Homo sapiens
ttggccgattcaaatgaattctttcattcctattggctctctggagtgccaagcaccatgcggcattacgatgggctgtggcggccacggctcagcctaagcccgcccccttcctggactgg

SEQ ID NO: 159237 - DNA, 122 bp, Homo sapiens
gaatgtctctgggagacccgagagactcacagttatgaaacaggaccatggttctttggccgggcgcgggggctcacgcctgtaatcccagcactgtgggaagccgaggcgtgcctatcacc

SEQ ID NO: 159238 - DNA, 122 bp, Homo sapiens
actgtcgcactctgctactcaagtgggtttccccagcccgtccagagaggtactggtgtgcgggagaggccagcaagacaaccagggacagctactccgcccagggccggcagccgccccgc

SEQ ID NO: 159239 - DNA, 122 bp, Homo sapiens
gccggcggcgagagcagggattgtcagcaactcgggctgcagaagcagcagcaacggcggcggcggcagtggtagccgcctccagggcaccggaaccctgatcccggagctgctgaaaagtt

SEQ ID NO: 159240 - DNA, 122 bp, Homo sapiens
acagaagcttccctcctgcgggcagccacgccctcgcccacagcgtccgtacctgcttcccggcccagagcacgggctggactgtggcagaagaggtgccactgaccaccccactctgtcct

SEQ ID NO: 159241 - DNA, 122 bp, Homo sapiens
acagcagacagggactgcagcggcgccacctgtggcgtcctctgcagaaaggacctgccccgctgacctgttgaccgttgcccaggcatcctggcggcacaccccattggactgttcagagc

SEQ ID NO: 159242 - DNA, 122 bp, Homo sapiens
ttgatgaaataaaaggattttatttatgattcatgtaggaatatgaggttatttttattccgtcagtacactaataatcagacgagggctcgggaaatgaggagcccactgacagggaaggt

SEQ ID NO: 159243 - DNA, 122 bp, Homo sapiens
agaggctgccgggagacgtagtcttgtaacgctctctcgccggacattcctaatggttagcgcccagcctgtgaagagtcgggggtcggggagggggtctcgctaagaaggaggtttgcaga

SEQ ID NO: 159244 - DNA, 122 bp, Homo sapiens
gcgcgaatcccgaacgccgtgagaaacctcaggctcgggcggcagcgcgggagtctggggcgctggaggccggcgccggctgcggaggaggagcgccctctagcggcaggtccgcccaggga

SEQ ID NO: 159245 - DNA, 122 bp, Homo sapiens
gagagggaggaggaagatgtatcttctgtgtccccagaaacccgcaggcaccggtcccagcgatcccaggaagtgaatagctagtttgttttgggtagctaagaacactgcccactcaacca

SEQ ID NO: 159246 - DNA, 122 bp, Homo sapiens
aagaatgagttactaaatgtgttttaaaatgcaaaaatgtgtacccggtgcttgtcctggcgctgttcagaacaggaagaaccggaaacaacctgaatattcacaggaggcaaacgatccgt

SEQ ID NO: 159247 - DNA, 122 bp, Homo sapiens
ctgattacagtcaggcgccaggtaacgacggggtgacgctctgagaaacgtgcccttaggcggctttgttgtgttgtcttcatttgtacaaatttaagggatgcaagcacagttgtgtgacc

SEQ ID NO: 159248 - DNA, 122 bp, Homo sapiens
tgagctcgaacggaggccatccgtgtaaagggccagattctgtcaatggatcgatccccccgatattgatggaaacccctgagtgcacgcccgtgctgggcgcaggggaaacagcgacgcac

SEQ ID NO: 159249 - DNA, 122 bp, Homo sapiens
ggggggggggggggcgcgtccccggcgggtccctatcggtccctgtcggtccgtccgccccgcgccgcccccgctgggcactgggcatgccccaggcgtttctatataaagcggcgccgctt

SEQ ID NO: 159250 - DNA, 122 bp, Homo sapiens
ggtgtaagcctcagtttcctcaaatgcagaagaggatggataggaattcaagagatccttcgaagttgagagcgaaggaaatcccagaattttcaagggattcagagaagtaggggactagg

SEQ ID NO: 159251 - DNA, 122 bp, Homo sapiens
cgctgagaaactggaaacgagggagggtcgaagttaaaccctttttagtggcggtgcatgcgccccacatggtcttcccggcttgggaaaggaatgagaagctttcatgattctctcgcgag

SEQ ID NO: 159252 - DNA, 122 bp, Homo sapiens
tcctgtccttgggctccaagccacccccaccttccctgcaccccatttcctgagcagaggcgtttgtgcagactcagctcccgcacccaccagggtagcctcagttttcccaaggcctgggc

SEQ ID NO: 159253 - DNA, 122 bp, Homo sapiens
tgctaactcagcaagcgcgattacagtgctccaacttaataagttgataaaaagctgtcccgtggccagttcacaatggaactaaatagtttcgttccgagatgcctggggagtttctctgg

SEQ ID NO: 159254 - DNA, 122 bp, Homo sapiens
agaaagaacactggctttgtggcttttccaatctcacatgcagttcttcaccgtgctacacgtgggaaacgccgtgctgtgaacttcacgcccaccacaggccacgcctcgcgtctccactg

SEQ ID NO: 159255 - DNA, 122 bp, Homo sapiens
gccgcggcccccctggcgcaggagtgagaggtcggggagcctagagccagagggccgcagcgagagctggagccgccttcaagggatgccctcgccctcccgcaggcgccggcgcccggccc

SEQ ID NO: 159256 - DNA, 122 bp, Homo sapiens
gcccgcttcacacagccaagaaaatgttgctccatccctcaagcctcagaccaacgtttgcgctgatcaaggagggagagtctctgcactaccatcagcctgagtatttatgctctgcagag

SEQ ID NO: 159257 - DNA, 122 bp, Homo sapiens
agtcccgacgtggaactcagcagcggaggctggacgcttgcatggcgcttgaggcaagttcggggctcattttggaagttttctttctagcacagacatccaactctgctcctatgccagtc

SEQ ID NO: 159258 - DNA, 122 bp, Homo sapiens
gctcctggcacgggttctctgcagagagcaggagctgctgggtgggtgtctgggggcacccgcccccaacccggcccggtgcacccccaggccctgccttatgaacatacctcgggagccgg

SEQ ID NO: 159259 - DNA, 122 bp, Homo sapiens
gcccgcgggctcctgatctgtccaggcccctaaactatcacaaggaggatatttgatgaccgtctttcttccctcgctctctcccaacaaagggtaactgacctctcgcgtgacctggccag

SEQ ID NO: 159260 - DNA, 122 bp, Homo sapiens
tatatagtcttacttaaagtaacattttctatagggtaaatttctggaccaattttgacccggtcatctctctgtaaccacactgtttaagtagtggtggtttgaaattaaatatagcatct

SEQ ID NO: 159261 - DNA, 122 bp, Homo sapiens
gccgtgacttcctggccgcggtgcttaccaggtatgggccttcggaaggttgtctgtgttcgcgtctatcaggtggatggtgaacagccggggccctgccgcgcctgtagaaccttacaaga

SEQ ID NO: 159262 - DNA, 122 bp, Homo sapiens
ctagcttcgctaggaatgtgatagagaatttcccctgtaggttcttcgtatggtgcgctccgctggatcacgtgagccagttccaaaatggcggcaggggtggccgggtggggggttgaggc

SEQ ID NO: 159263 - DNA, 122 bp, Homo sapiens
cagctgaagcgccatgtctgtctatagctgacccataaaatgacagttttgtctaaaagccgttttccaggccacaccctcatcagtagctcattgttccacgggcaccgaccatgtttctg

SEQ ID NO: 159264 - DNA, 122 bp, Homo sapiens
tgaaacaaactaggcaggaaaacgggcactgacgggcagtgaattctcttgctcggaatgcggctgctggcggcctgaggacacacccagcgtcaacaacctctgtcctcaagactctccca

SEQ ID NO: 159265 - DNA, 122 bp, Homo sapiens
atgactgttggaaggaaaaacatgaaaaaaaagttctgtcccagcagctgctgtgaatcacgaagtgagccagaaaagcttgaaaaacatcacccttaagtcatggatgaaacttcttagaa

SEQ ID NO: 159266 - DNA, 122 bp, Homo sapiens
tggggtgtgctccagtagcaggtgcgcgtgccacctgtgccgtgggttggaggggtggaacgtgtacgtcctggctgcccccgagctctggggaccccgaactcctggggcttctgcctgag

SEQ ID NO: 159267 - DNA, 122 bp, Homo sapiens
caacgccccccaacccagcgcctcgcttcttccctctcccctccggcctccggaatgtggcgcccagcgacacagacaagcccatcctcaaaagcaccgggtctttcaaggcaggagctctg

SEQ ID NO: 159268 - DNA, 122 bp, Homo sapiens
gaatgcctgggccagggttggtgctcagttatttcccaattgccatgattaatatttgttcggtaagaacagctccaggttcaggccggggggctccaggttcaagcgcctcttgtttactc

SEQ ID NO: 159269 - DNA, 122 bp, Homo sapiens
gatttgtccacgatgttgctccttaaccttaagttacttgcaagaggagcctgtggccctcgcgactgttaagtgcacgctcagcctcaccctgctggggaaacgacggttcctcgtaaccg

SEQ ID NO: 159270 - DNA, 122 bp, Homo sapiens
ccgcgccccttgctctgccggctcgactcttgcacggcgggcggtgaggagggggctgttcgcccagacagagggccacctcctagcccgggagcagagcagagggcctgggcctgcagcta

SEQ ID NO: 159271 - DNA, 122 bp, Homo sapiens
ccctcggcagagacaaagtggactctgtcacagccctaacaagccgaccacctgctggctcgccacttcctagccgggcctttctccctgagtgttgtgtgttagtgattctgtgactctgc

SEQ ID NO: 159272 - DNA, 122 bp, Homo sapiens
caatagcccacgttggctagtggctgccttactgggcagaccaggtctggattgtaaatacgttcagacgttccacgcaaaagcaaagttccctgcagacgctccattaagttctgggtgca

SEQ ID NO: 159273 - DNA, 122 bp, Homo sapiens
gggcggtgagcggggcgggggcgggagttaaagggcgctgcgggcggtaacgtgacaccgcgacgcccgccccctcgccccatcccccctgcaacactcccccacccccccggctcccgccc

SEQ ID NO: 159274 - DNA, 122 bp, Homo sapiens
accagaaggctcaagttgccatgacgggaggctgaaagagcaagtggatctaggacgtgtcgagtctgagacgtctgatcgacatgaaagaggtgacattgagagggcaagtgcagccagcg

SEQ ID NO: 159275 - DNA, 122 bp, Homo sapiens
ggcctccgggcagcgcgggtgctggccggacccctccctccggtgagcctctctcccaagcgccattccatagtcagccccacggcccagggtcccacctcgccctgtccagcccagcaatc

SEQ ID NO: 159276 - DNA, 122 bp, Homo sapiens
tcatctcccggcctggactcagagatgctatcagtttcattgaagtccccacagtcacctcggcttctccagcctgcaacagctacaggaaggccattagctcagccgtgtgccctccctcc

SEQ ID NO: 159277 - DNA, 122 bp, Homo sapiens
tcaaaatctgagcatttaaatccattgccaatgtttgcttaaagaacactgttttcttaacgagtcttccaaatcggtccttacaggaagaacctctgaatgctatacgcatatatggacgg

SEQ ID NO: 159278 - DNA, 122 bp, Homo sapiens
agcaacgggcgtgtgcggggacccagagctggctggggtggaaaccgcggcctactttcccgcctccagcaaactctgcaattgctgaggttgatttagcagcacccaagggatctgggtcg

SEQ ID NO: 159279 - DNA, 122 bp, Homo sapiens
ccaggcaggcagcggtaatcacagtgagcaaagttgaagactataaaagagccaggctaacgtgctgccgagcaggtgtcctggattttattgtagttgcaaatatgcttctggtgataagt

SEQ ID NO: 159280 - DNA, 122 bp, Homo sapiens
ccctgcctactgtgccctggagtggccttggacctgtgagtactgggccctcaacagccacgagggtggcatgggaggtggcctgcagtgagacagcctggcctgatcggcatccataaaag

SEQ ID NO: 159281 - DNA, 122 bp, Homo sapiens
gattcaccttccttacgctgcccccttgtcatgtatgcaatagatatcaaagagcctagccgttcggggccgctaccagtctccgcgtcttgatggtagtggtccccggggcccagctgttt

SEQ ID NO: 159282 - DNA, 122 bp, Homo sapiens
ggggtaaacccggagcaacgcggaggcggtgatctgggcaagggcgaggtcagttaaggacgcagttctggccccgccctcaaggcacgcctggccaatcaggaatcgctgattcaccaagc

SEQ ID NO: 159283 - DNA, 122 bp, Homo sapiens
gcctgaagtgatctcagggccgctttgtttcccaacccagtcgttcaggtcctccctcagcgccctttgacccatgcacatcccatggggaaagctgccagcgcgttccaggggtggggtca

SEQ ID NO: 159284 - DNA, 122 bp, Homo sapiens
gccgggagcgggcgtcttgccgaggcccgggcgggcggggagcaacggctacagacgccgcggggccaggtcgttgagggtcggcggcgggcgaggagcgcagggcgctcgggccgggggcc

SEQ ID NO: 159285 - DNA, 122 bp, Homo sapiens
ccgcggccgcaggtgccttgggagcgggcggtcctgcccccgggagctgattgggcgggacgggcttatttgcatacagggcgtcaccctggaggcggcgatgggcgtgcacttgggcgtgg

SEQ ID NO: 159286 - DNA, 122 bp, Homo sapiens
ccacctgatgcctggagtatgagcagccccagggctgtcccagagacaggcccctctacccgacgccgtcacccaccagcacagggaagcccatgaggcagtcgtagatgaagactatggtg

SEQ ID NO: 159287 - DNA, 122 bp, Homo sapiens
caggactgggtgttcctgacaagattttgtttcctctcggattacggccgactggacttccgtttccgctaccctgaggtgagtctcccccaacactcgccatgctgaggctgggtacttcc

SEQ ID NO: 159288 - DNA, 122 bp, Homo sapiens
cataaggttgagtattgtaatcactatttggcagataaaagccctaggttcagagaggtacgtgatttatcttgactgaagctttgaatgtagctcctcattttctaaacgagttctgtcaa

SEQ ID NO: 159289 - DNA, 122 bp, Homo sapiens
cttgctacctgggtgagagtgctgtctgaatgcaatgcacctgggcaaggattctgagagcgagagcttcatcttcgtgtaggacagagcgtctttctgtcctcctatcatccattccacaa

SEQ ID NO: 159290 - DNA, 122 bp, Homo sapiens
gacctttactctgtctgaccccaatatcaggatgagcttgctttttccctcagcaagctgcgtctgggagccctggaaggctccagaagcctccgggtctgaggaggcttctaaaagggcct

SEQ ID NO: 159291 - DNA, 122 bp, Homo sapiens
gaggggcagccggggctgaggaggcaacagtgccagctgtgtgagcaatttggagaatggcgtggccaggaaagggtattgatgactgccaatctgggctgtggacctcctggaaatgggct

SEQ ID NO: 159292 - DNA, 122 bp, Homo sapiens
gtggcctggggggctgtacttgagactcattttgtccaaggactataatattgcatgccccgacacctgtggggcacagaacatgctaaaggggacactggtgatcctcatctctgtcccca

SEQ ID NO: 159293 - DNA, 122 bp, Homo sapiens
ggagaaccgtggtctttcctgtcctgttctccagattgccctcttagtggcaggtcatggcgctctgtccctgcagacaggacagccgctgagatggacacaaaccgtctcgtgtgggtccc

SEQ ID NO: 159294 - DNA, 122 bp, Homo sapiens
ctccgcctgcgtgcctggcctcgtcaacaacacccattagtctcccgtctcccggggcggcgggggactcccaaccacgcgcccagggcccttgcccaggtactggggccccgggagccacg

SEQ ID NO: 159295 - DNA, 122 bp, Homo sapiens
ctacaaccactagcacggctgacgatggccctttctgcggagaccgagtcacacatctaccgagctctgcgtactgcttctggcgctgccgcccaccttgtggccctgggctttaccatctt

SEQ ID NO: 159296 - DNA, 122 bp, Homo sapiens
cctcttgcttttagtatcataccctgagagccagcttccttgttgctccccagaggccctcgcttaggccccgtgggccacctgctccgaccttcttagccctcaacctgatttgaatctca

SEQ ID NO: 159297 - DNA, 122 bp, Homo sapiens
gatttcgacaatagaaagtgtacttatcaggccggggaggacttcaccaacaaggggcaccggggcgggtcgccagtgcacaggggcgaggtcttccttggacccaggcaaaggccgcgggg

SEQ ID NO: 159298 - DNA, 122 bp, Homo sapiens
tggctttgagtgtgatccagcatgcgtaagcagctgacctgctttatatagagtggtggacgctcccggtctccctccttgacccccaggcagagcttccttcaggaggctggcactctgat

SEQ ID NO: 159299 - DNA, 122 bp, Homo sapiens
ggcgcagccgtccgaggctcacgcccggcagctgctgctggaggagtgggggccgctgagcgggggcctggagctgccccagcgcctcacctggaagctgctcctgttgcggcggccgctct

SEQ ID NO: 159300 - DNA, 122 bp, Homo sapiens
catcctgtcctgccaggacacactcactgcggcacagcccagcaggcggggtgatgctgacgcagccccggcctattctcattctcccggaaacccagcacccgagtgaaagtgcagttgcc

SEQ ID NO: 159301 - DNA, 122 bp, Homo sapiens
aaatgttattataaggaaacatctgcgtgtaaatgaagacacgatgagttatgtgctgtgcgcggcctcggtgggtaggggctggtctccactcttcatggcattctgctggcggcagttaa

SEQ ID NO: 159302 - DNA, 122 bp, Homo sapiens
gcggggcccggcgcctgttcgccgtgttagtggccaatcggcagccaggcagggtgggcgcgcgtagggggcggggccgggcgcgcggcagggcgcgagagcgcacccgcggcggcggtggc

SEQ ID NO: 159303 - DNA, 122 bp, Homo sapiens
cagggccaaggggtatctcaccagctgggaggccggcgtgcctgacctggccacacagagcgagcctcagaagcgagggggaaggagggcaggccttggggaggggtccaggaaggtcgaga

SEQ ID NO: 159304 - DNA, 122 bp, Homo sapiens
cactgacttcaagaatgtagccgccgaccctcgcggtgagtgttacagctcttaaggtggcgggtctggagtttgttccttctgatgttcggatgtgttcggagttttttccttctagtggg

SEQ ID NO: 159305 - DNA, 122 bp, Homo sapiens
tgtttactatcaagactgcgctgtgcgagcgcctctgggatacgtagtccagctcttccccggccagcagtctcccacagccaaggaccaaggcttgagactacgaacccacaatccatttc

SEQ ID NO: 159306 - DNA, 122 bp, Homo sapiens
tcatatctaaggcatacacacacaagcctcacttccttctttttctccctgactctcttacgagagctcctaaactcataagcatttctcttaagggaatgtccttggaactccagcagtat

SEQ ID NO: 159307 - DNA, 122 bp, Homo sapiens
cagctgggttagagagatcgctacatgccagcctggcctgagtcttttctgtctcccagccgttaaaggttttaggaccaggcaggcaccccgtgcaggatttggctctctacttccgctcg

SEQ ID NO: 159308 - DNA, 122 bp, Homo sapiens
aagctacacaaaaaggttggggagccaggacccggcaagcaaggagagaaaagtttcatgcgttgagctggagtctgaagcaaggacctaacggacacagggaaacgtcacaggaaagggag

SEQ ID NO: 159309 - DNA, 122 bp, Homo sapiens
ctggatgatgtgtgcacatttcttaccacgattcctctgcacaccaggtccagggactgccgcgctagggacggcacagctgaactgtgcaggcagcgaaggggcctcacggggaccgctca

SEQ ID NO: 159310 - DNA, 122 bp, Homo sapiens
gtgcaggagagaggtggcacatggtctggtcaagtcctcacacacttgctgcccagcccacggagagacactggtctggatcgggtcggtggagtgggggacttacatccgtgatggccttc

SEQ ID NO: 159311 - DNA, 122 bp, Homo sapiens
agctccggccgcgccatggacggcaacgacaacgtgaccctgctcttcgcccctctgctgcgggacaactacaccctggcgcccaatgccagcagcctgggccccggcacggacctcgccct

SEQ ID NO: 159312 - DNA, 122 bp, Homo sapiens
ctaggtctaacatccctcggaagttcgtgcagcggcctcgctgaaaatggctttacagcccggcagaaccctccgactccgcagcaggacctgcggagcctctccgccctcggtaccggcgg

SEQ ID NO: 159313 - DNA, 122 bp, Homo sapiens
gcaccttcagctcggtctcccgcgagtggggggcatcggccagctcctcggctgacagcgcgctgtccaggtccccatagagcgagcggtacttcagcagctcctccttcatgctgtcattc

SEQ ID NO: 159314 - DNA, 122 bp, Homo sapiens
agctctagagatctgagctgcatcactatgctttcaaaggaagatgcaaacccctaaggccggaacatgtcaagataaattttctctgctttgaaaagagaaacagtttctcttttcagtga

SEQ ID NO: 159315 - DNA, 122 bp, Homo sapiens
aatcacaaaagcgaacaaaaacaaaacaaaaagttgatggggctttattacaagtccatgcgaggcattagggcaaaatggtgtgcttgctgctctccaaacgcccctctcctcctcctcgc

SEQ ID NO: 159316 - DNA, 122 bp, Homo sapiens
tggctgagaagttccgccacgccctgtgcaacttgctctgtggcaaaaggctcaagggcccgccccccagcttcgaagggaaaaccaacgagagctcgctgagtgccaagtcagagctgtga

SEQ ID NO: 159317 - DNA, 122 bp, Homo sapiens
ctatttaatttgattctcagtctccagagggatataatagggaaacacagtttacgttgacggccacctagaatagattctgattacataaattaggtaacttaaaactcaatctgagcaga

SEQ ID NO: 159318 - DNA, 122 bp, Homo sapiens
gtggggaaggcggtgccgaggagttgggaaattaatcacctccagaaagcagagggagcgcgccccgcaagaacccgagtggaaacaaccgaagaccagaaagggagcaggaaggacggctg

SEQ ID NO: 159319 - DNA, 122 bp, Homo sapiens
caaagctgcccagcccaggaggagggaggctgaggaaatcccctcccagctgggctgggccggcctgcttggcagtcttgctcctgggctggccctggatgaatgagtcctcctcttcgcct

SEQ ID NO: 159320 - DNA, 122 bp, Homo sapiens
tgcccagctccagtggaggccacggatgcagggggcgacgcgctggctgagaaggaagtgcgctccctgagccagctcaagagttactgcaggagcctgcctgccgggagagccatttggag

SEQ ID NO: 159321 - DNA, 122 bp, Homo sapiens
actcggtagttacctcggccgcactccgaatgcacctacgccaactgccacttccggagccgctcaagctcccgccagagccgccggcaggcatgctcctattggacagaagccctacgctg

SEQ ID NO: 159322 - DNA, 122 bp, Homo sapiens
cacttgcgcccggtcctctgggctgtagccagcaggagatgtccggtcggcgcctgcgtccgccgctcgcgccgccgggtgttgccccttccggggccgcggctccctgtggggtgggtccg

SEQ ID NO: 159323 - DNA, 122 bp, Homo sapiens
agcaatgtcttaagacacaaagaactgaaaaactgccctacggtgtgtgaaaaactgccccgtggcgtgtgagaaactgccccgcggcgtgtgagaaactgcccctcggcgtgtgagaaact

SEQ ID NO: 159324 - DNA, 122 bp, Homo sapiens
gcgacccccgccgccaacactcccgcggaggacgcaggaccccgcgagcccagcgctgtccgcccgccttgctcactgctgcctacccagggcgggcccagtgccagcttccgggagcttgg

SEQ ID NO: 159325 - DNA, 122 bp, Homo sapiens
tgagaggtgtccggctggtagaaggaattctgcatgcccccgatgctggctggagaaatccggtgtatgttgtcaactatccgaaagataacaaaagaaaaatgggtgagacagaagcttca

SEQ ID NO: 159326 - DNA, 122 bp, Homo sapiens
cgggctgggcgggggtgggcagtccgccagccagcggcattctgcagggctctgtgcaagcgtcagcccaggacgggcacctgccccaccctgcctggcccacgcccaccagcctggctgtc

SEQ ID NO: 159327 - DNA, 122 bp, Homo sapiens
aagaaggtgatattgtgacccaccataatatcaggcagttaccatacgagaaatcaaggtcgttgggacggaagtaaccttatctgcttttccccataagagcagggtccttgcagccaaaa

SEQ ID NO: 159328 - DNA, 122 bp, Homo sapiens
acccactcagggcggaggtctgcgtcatgtgaccctccccttcttggctccgcctcctaccgcagtgcttgacgggaggcggagcggggaacgaggccgtcggccattttgtgtctgcttcc

SEQ ID NO: 159329 - DNA, 122 bp, Homo sapiens
gaggctgtttcttttcctctctctaactaaaacttgtaatttgaaaacattaaactgcaacgaccttgggaagaagataaaccattccagcctaaacttaaagcccgaaccggggtgggggt

SEQ ID NO: 159330 - DNA, 122 bp, Homo sapiens
ccacatgaacacacacacacactctgaaatacatcatgtgcacatgtaaacgcttgcacacggatgtacctgaagcacctgcacccacacagacacacgtgtacacacaccatcccccgggt

SEQ ID NO: 159331 - DNA, 122 bp, Homo sapiens
cccaagctcatctcgaattcctggactcaagccatcctcctgcaatcccaaagtgactcacgcctggcctggtcttcagctcatgaacaaagaggacagacacagtatcttgcaaaaggttg

SEQ ID NO: 159332 - DNA, 122 bp, Homo sapiens
cccttgtctcatctagaagacataaggacaggccaggcccagtcagggatccgcacagggcgggcagccagggaagcaaggtggtcacgcacgccgttgggaaggcccagctccctagcccc

SEQ ID NO: 159333 - DNA, 122 bp, Homo sapiens
tccttttttccgtggtgacctcctctccaggctctgcttggtgggcttctggtgtggccgcgccctgtgtgtgtctctctctgtgtcctgccagtggttttaccctatggtaggttacgtca

SEQ ID NO: 159334 - DNA, 122 bp, Homo sapiens
tggcctgcaagatggaatcagtggtcctgccactgctagagtgaatggtaaaacccaggccgaggcagtggctgaggcagaactgaaaacagaatcagtgacccaggccaaagctggtgatg

SEQ ID NO: 159335 - DNA, 122 bp, Homo sapiens
tgtcatggtaaccagtggcgggaggcgggtgaggagcggggtcccgtcgggccgggtgggcgccagctccctcccaggactggttcattggtagattccacttggggggtgcattccgccaa

SEQ ID NO: 159336 - DNA, 122 bp, Homo sapiens
ggccagccccgcagggagactaccagggctggcggtagctgggcgtggtcgggtcgggggcggctgtgggcggccggcaggcagcgcgcggggcagccctcggcagacggccaatggcggcg

SEQ ID NO: 159337 - DNA, 122 bp, Homo sapiens
gacgtggagcatttacagccaggggcaaagtcctcccctgatttaaacccaggcagcctgcgctgcagccggttcctggtgtccccacttcgcctccctcctgctgcccccaagacatgcag

SEQ ID NO: 159338 - DNA, 122 bp, Homo sapiens
tggtgtgtagtgaacgtgcagtcccaggagacatagttgtaatcttttaaagattgtggccgggcgcggcggttcacgcctgtaatcccagcactttggaggacgaggcgggcggatcacct

SEQ ID NO: 159339 - DNA, 122 bp, Homo sapiens
ccttattgagcaccgaggtaaactgaggctcagagcagggaggtgcctagagccaggcctcgcagctagcggagagcgggccgtgcgtagcggatcgagtctgtcccggaagggtccggagt

SEQ ID NO: 159340 - DNA, 122 bp, Homo sapiens
tacccaggacactctccctagctgtccgcggagaagccggcctcgtctgccccaggcacccgagtccctggctcggagctcagtcaggttcaggtgtttatccaggcgccgcccaagtccaa

SEQ ID NO: 159341 - DNA, 122 bp, Homo sapiens
tctactttgcctgattactggtgagtagttatctagcatctgcttctacatccccaaagtcgaatttacaacctcttaagccaggacatcgtgcatagggcaatactaacaatttagaaaat

SEQ ID NO: 159342 - DNA, 122 bp, Homo sapiens
caaacgagggaagatttgaggcagagagagaaggcagagaggagggcggtctgagccggacgcaccctggaactgagacagcctggtcccaagcctctggagctggtgcaaaggcggtaaca

SEQ ID NO: 159343 - DNA, 122 bp, Homo sapiens
ttatgtgattcttgtaggagtggtccctgagattagttggaaaggccctttatcaaggatcggagcgctatccaaactcttggttcacaggaataataagtgtaaaagcatgtaacatccct

SEQ ID NO: 159344 - DNA, 122 bp, Homo sapiens
cagcccagaagctgagaagccttccggccgatctgtggccctgaggtcgcccttggagggcgagtgagaaccccccaggcgttccggaggtggcccccagcccgaacccggcgcccgccccg

SEQ ID NO: 159345 - DNA, 122 bp, Homo sapiens
atctggcccctttgatggctctttggaaagccagattccatgccctgcgggaaggttcctcggttgagtccagagtggaagaggatgcaaataagatatgtccaataaaaaaagctttgaac

SEQ ID NO: 159346 - DNA, 122 bp, Homo sapiens
acacggcagggagggggaagggagctcaactccacacacaatgggaaaaattgtcggcgacgcagcccttcaggagacgggacttctgaatgagcgagattgcagagccagcgcttcccctc

SEQ ID NO: 159347 - DNA, 122 bp, Homo sapiens
aaaaggcaggacgattgatcagccaggacctaccccgtgcctacgctgtgctgggtaccacggggtatagagaggcaaaacctcatcccagtcccggagacctatttgctttgtgccctgca

SEQ ID NO: 159348 - DNA, 122 bp, Homo sapiens
ttcagtttcccctctatgagagcccgcgggtctccacctgagagaatgcaggtgctcccgcgccgggagtgggcgggcagaagagcgggcggggggcggtccggatgcctcgtcccgccccg

SEQ ID NO: 159349 - DNA, 122 bp, Homo sapiens
cagcaggaaaaatattttctctatcttcccaagtctacacaaagcctgtcactaagctgtcgctcaataaatctttgataagtacatcaattcccagtgttccccctactggattgaatttc

SEQ ID NO: 159350 - DNA, 122 bp, Homo sapiens
ggaaccaggaagaggatggctccctggagaggagcgatgacagctttgcagtgctggggccggggaagggccagtgagggggtggtggagaaggcacagtgggtggtgaaggttgggtcatt

SEQ ID NO: 159351 - DNA, 122 bp, Homo sapiens
ggtccgctctcggcgcccgaccccgcagcccgggcagcgcgagtgctccccactgcgatgcgcctggaggctccttgacttgccctcacacttaatcctgtgcaaactttttaccccgcctg

SEQ ID NO: 159352 - DNA, 122 bp, Homo sapiens
gactgggctgagatcagtgtctcccttgaagggttattgtaaggatgaaaaaagataatgcgtttaaagcacttggtgtagtaggtggtctttttaaaagtgtgaataaatactagttctta

SEQ ID NO: 159353 - DNA, 122 bp, Homo sapiens
gctgggtctgggtgtaggctgggaagcaggctggggtgtagactgcgaaggcggccctgccgggacttctttccagtccccggcgacctcttcgaattctctgctatctctggggagcctcg

SEQ ID NO: 159354 - DNA, 122 bp, Homo sapiens
ctcggcgctggggcctgcctgctgcggtcctggaagcccgtctgatgctgaggagacccgcgaggccccctgccaggacatcacctgcctggaggccacacttcagtagccgtcgtcctcat

SEQ ID NO: 159355 - DNA, 122 bp, Homo sapiens
tcggcagaccgggcggaaagcagccgagcggccatggagctgtgcgggctggggctgccccggccgcccatgctgctggcgctgctgttggcgacactgctggcggcgatgttggcgctgct

SEQ ID NO: 159356 - DNA, 122 bp, Homo sapiens
ctggtgtgaggcccaaggcatctaggaggattggctaaattaaaatctccccaggtgattcgaatatgcagctaggactgagatctactaagctgatcagttgctcaggagagcaccccaga

SEQ ID NO: 159357 - DNA, 122 bp, Homo sapiens
cctccaacacctccgtggcttcccgggatcaagtatcgcacctaaaaggagcgcagagagcgtgcaactggcgggagaggcgtgaccagagtggaaccaaaagtgggtggcctgggaaccta

SEQ ID NO: 159358 - DNA, 122 bp, Homo sapiens
cagctccgctctccccacagctctccgtggctgcaggttgaggtcgaactgcaagcgccacggaccctgcctgctgtttactgcgttttcactggagactccagcaaatgtcctggagagga

SEQ ID NO: 159359 - DNA, 122 bp, Homo sapiens
cccgacccattcacggcccctcccgcagcccctttcttcgggccctttgtggcctcaccgcggctgcctggctgctctggctgaggatagccatgagtgtttgtccccagagccggcctttg

SEQ ID NO: 159360 - DNA, 122 bp, Homo sapiens
cgttcccggcaggcgtctttattgtgttgattacgtagatggcgtagatgacgtagatgacgttcagcaccacaaacgaagagccgaggcacagagtggggccttggattcatgagatgggg

SEQ ID NO: 159361 - DNA, 122 bp, Homo sapiens
caccgcctcccctgtcccctcccgggcatcctgggtgggggcgggtgccagggcaggtagcgcccgccgcggctgggccccggcgagtgcctaaatataatctgcgggcgggggaggccgcc

SEQ ID NO: 159362 - DNA, 122 bp, Homo sapiens
ttgaaagtgcttcagttcacttaccttggccatgcctcctgcctgtgcggtgttcagtcccgcgtgaccagtcatttgcggggaaacctgcgttagggtctcagccagcacgctgctcgagg

SEQ ID NO: 159363 - DNA, 122 bp, Homo sapiens
gagagctagggagtagcaatgccggactggttttatctccagactcagaggaagcagtggcgggctttctccttgaaaagacagggtctgcgactaggcctctcccgcccaacacaggcctc

SEQ ID NO: 159364 - DNA, 122 bp, Homo sapiens
tctctacaaaaattaaaaaattacccgggcatggtcacacatgcctttagtcttagctaccgggcattgggggggccgaggtgagaggaccacttgagcctgggagatcaagactgcactga

SEQ ID NO: 159365 - DNA, 122 bp, Homo sapiens
ccagcactcacctccctcaggtcaggtcttgcttccagcctgtgtttcctgcaaaggaaacggataaaaaggggaggtctctggcccttggtacgctaggtggagagacagctttcccgccc

SEQ ID NO: 159366 - DNA, 122 bp, Homo sapiens
ctctctgcttggcctctttttcctcctggtctacttggtgagttcctgcctgtcttctgacgttcatcaggcatcactttttcttttctgcttttattttagagatgaggtctcactctgtt

SEQ ID NO: 159367 - DNA, 122 bp, Homo sapiens
acactcggagcgccccgagcggcgcagatagggacgttggggctgtgccccgcggcgcggcgcctgccactgcgcaggcgcctcaggaagagctcggcatcgcccctcttcctccaggtccc

SEQ ID NO: 159368 - DNA, 122 bp, Homo sapiens
cgaggcgtccagcacgcgccgcgggggcagcctgggccagaccgctaggagcggccccgccgctctggagcccggcccttccgagagcctcactgcctccagccctctcaagttaaacgaac

SEQ ID NO: 159369 - DNA, 122 bp, Homo sapiens
gggaccagagagcaagagaaggtggagagactgcgggcagaagcagctcccattcctgcacgcactctgtgaggaacacagggccaggggcagagtccacagagtcccagaaacagcctctc

SEQ ID NO: 159370 - DNA, 122 bp, Homo sapiens
gcccgggcggatttcccgggctgggtggccggggcgtgggggggttcccggagacaaatgcgctgcttcctgcgcctcggaggcggtggcagagcggaaaccagccctccccttcccggggg

SEQ ID NO: 159371 - DNA, 122 bp, Homo sapiens
cacccccaataaagcctcttctttcagggcactgcagcctgtttttttctgggtcctcttcgtctggggtggggcgggagcacggcgggccgagggaggcccgagaaaaccccaagaggtgc

SEQ ID NO: 159372 - DNA, 122 bp, Homo sapiens
agccagctttcggagagaatgtgggcctctttctcatcttagcatgcttgtcctttagggcggggtgacccccagggtggagcagcagggcttgtggcatggactagatgggcaggattttc

SEQ ID NO: 159373 - DNA, 122 bp, Homo sapiens
catcctgggtcaccggggactcgcctttctgcggagtggctcccgcacagcgtctctgctcggctctttccgctgcagtgtgctgttgttcccggactggcctctcccatgttatgaggacc

SEQ ID NO: 159374 - DNA, 122 bp, Homo sapiens
cctaaagacattggctgccagtttggcactctgagtcacctcaaaatgctatgtgaccttcgttccaaataatcatcttgctgatcattctaattttcttaagtgcttactatatgtctgca

SEQ ID NO: 159375 - DNA, 122 bp, Homo sapiens
ctgagtgccccgtccaggagccttactattggtctcatgcagcgagatgggcagttctgccgtgcaatcccagctcgcagttcttgctccgcgtgtactcacgggaggactcgcaggcgtta

SEQ ID NO: 159376 - DNA, 122 bp, Homo sapiens
atccggaagccggttcatggtggcctgcagcggcctacaccgtccacaagcaatttgcagcgtctctgtttacactgcaagtccagtccctaaagcgcccctgacgccacttccgcctgaac

SEQ ID NO: 159377 - DNA, 122 bp, Homo sapiens
cgacgatgtcaaactcaatctggccctcacctgggacagcttctctgggagccctatgcacgttgaggcctcggtagctctgaaataaatgcaggaaggggctgggaggctggggtagccca

SEQ ID NO: 159378 - DNA, 122 bp, Homo sapiens
caagacagagtcttgctctgtcacctggttggagcgcagcggagtgatctcagcacactgcgacctctgcctccctggttcaagcaattctcctgtctcagcttcccaagtagctggcatta

SEQ ID NO: 159379 - DNA, 122 bp, Homo sapiens
ctttccactataaatttcctgaactcatatagcatgtttaacccatacatgtaatagtaacgtccttcagggtatacaccatatgagtaggtcacatttaatctacattctaaactattgct

SEQ ID NO: 159380 - DNA, 122 bp, Homo sapiens
cgcaggggaggccaggctctggcatttcccaggaatgtaaaccccggtttcagctttccccgtggctcccctccgccaaatcttaaatcctcttgttaagacgcgctccgcccctgtgtcct

SEQ ID NO: 159381 - DNA, 122 bp, Homo sapiens
agcatggtgtccatgcaggatgacgccttcccggcctgcaaggtggagttctagccccatcgccgacacgccccccactcagcccagcccgcctgtccctagattcagccacatcagaaata

SEQ ID NO: 159382 - DNA, 122 bp, Homo sapiens
catgggtgagcacacctggtctgttcatctgggctgtccccacctctgggctgctgcaaacgttccggtgcaagcacacccaggtccccgtttcccgctctcccgggtctacatgcagatgt

SEQ ID NO: 159383 - DNA, 122 bp, Homo sapiens
ccaaagtccgcggccccaagttctccttggcgcagctcggccctcagtcccccgcggccccgagttctccttggcgcagctcggtcctcagtccccttcagccgtaagatggcggctgggct

SEQ ID NO: 159384 - DNA, 122 bp, Homo sapiens
tgatcaggtgggactcataccagagatgcaaggatagttcaatatacacaattcaataaacgtgacacatcacataaacagaattaaggataaaaatggtatgattatctcaacagatgccg

SEQ ID NO: 159385 - DNA, 122 bp, Homo sapiens
gcgcggcagtggcctcgcagggcgctgggtccctctccccagctctcctccccctggccccgtcgccccgccctcgccgggctgggctgcggggtcaggggccgagcggagaggggtgagta

SEQ ID NO: 159386 - DNA, 122 bp, Homo sapiens
ggagtttccgtgctcccattgggcccacagatgttaatcagagcagccggcgctcagctccgccctctcgggacgccccgcccctcctcccatcctccctgcccgcgcgcagtgactgcagg

SEQ ID NO: 159387 - DNA, 122 bp, Homo sapiens
gctcggctggcaggagctgggccgggtcgggaggctgtgctggctgcactggccctgcggcgggccccagagcccagtgccggcaccttccaggagatgcgggccctggccctggacctggg

SEQ ID NO: 159388 - DNA, 122 bp, Homo sapiens
cgaggtcctggctcctccctggcgtttgggccgtcactttcccaggtccgagagtgtcgacgctccttttgtcgaccgaggatgtggacgctcccccaggatgcggccaggcagcgccacct

SEQ ID NO: 159389 - DNA, 122 bp, Homo sapiens
caacgtccccgagtttgctcaggagctctatgaagcacaagtccctgagaacaaccccctcggctctctggttattaccgtctcagccagagatttagatgcaggatcgtttgggaaggtat

SEQ ID NO: 159390 - DNA, 122 bp, Homo sapiens
ggggttgggactgccacacagcttttgcagtggggttggggagcatgattcagcccatgacgtccactgccaccttccagtggctcctctcctcagagaataaaatccacatcccatggtct

SEQ ID NO: 159391 - DNA, 122 bp, Homo sapiens
aagatctagattacgggaggagatgccgtccttacctggagctgagtccatttatagagccgagtgaaatacaggggtagcggaagcagcaggaaaagacctgtgagctcgctgggtcccct

SEQ ID NO: 159392 - DNA, 122 bp, Homo sapiens
tcaccttacggcagagcagggaactcagctttagattctccctgtactggaaagggatgtcgcaaggttggggacgaaacctctgagtttgcgaccgtagctgtcgctttccggccaacaca

SEQ ID NO: 159393 - DNA, 122 bp, Homo sapiens
cttcggccccagcccctgccaggatggggcgctgtgcccggcctcggagccgctggcaggcgtcccccacccacagtccgcacagccgaggcatccccagtgtggagggagagccccgctgt

SEQ ID NO: 159394 - DNA, 122 bp, Homo sapiens
ccatcaaagtcacagagtggccttgtctcatattgtgttttgatattaccgatgttcaaccgaacaccaaggcctagctgacaacgccagtctctgctgcttttcctttgcttaataacaac

SEQ ID NO: 159395 - DNA, 122 bp, Homo sapiens
aggcccaggcagtgccatgctgcgtgcatgggaaggggtggagggccctcgggaccgcaccgggctgtgctcatagctggacggccccacttctctatgctgatgagtttatagccatgatg

SEQ ID NO: 159396 - DNA, 122 bp, Homo sapiens
ccaaagtccacggcccaggctgccaggcggttcctggaagagtctctggacggccggaatcggcgcctgggtacaggactcctgattggaacacgattagaagagggaaacgcaccttgttc

SEQ ID NO: 159397 - DNA, 122 bp, Homo sapiens
ccctgcacacaataggagcttaacatatgaaagtgacttcccaatttcagcaaaaaccttcgccgattcagaagaaagctttcccaccagaatcccctctccaacgttctagcttcgacgct

SEQ ID NO: 159398 - DNA, 122 bp, Homo sapiens
tgcacttattccattaaagcacactgcttccaaggccttgagtagtcctctacctgccaacgggtacagagagcttaaaacaaaaacaagggggaggggcaggggaaaaaggccagcaacaa

SEQ ID NO: 159399 - DNA, 122 bp, Homo sapiens
gatttttggtcctttggttggtctgacagtcttcatttctaacaagcttccaggtggtgccgacgtcactggtccgcatgcttcgttttgagtaggaatattctagaggatgtaggacttga

SEQ ID NO: 159400 - DNA, 122 bp, Homo sapiens
ctcccccgcgacccggccgcgcgcgaccaagtgctcagcgcagcgctccccctgccgccccgccccgcccccagccccgcccccagcgtcccgcgcccgcccctcgtgttcattggcagccc

SEQ ID NO: 159401 - DNA, 122 bp, Homo sapiens
ctaatttatgcggggaatttttcagacgtttttcctctgggctcccttccctgctgtcctcgcgcctttcttcctcagtacattaagagattctgatgtgcctgcagcaacatccgccagtg

SEQ ID NO: 159402 - DNA, 122 bp, Homo sapiens
agactggggggcctgggggcgtccatctccatgctcctgggctcagccctgctccagctgcgtggtggtagatgccctgggaatccctgtgccagcctgagttctcaggaccagggatcagg

SEQ ID NO: 159403 - DNA, 122 bp, Homo sapiens
gccaggaagaacccctcaggcagggactgcacgtcagcgtgagtcatgctctcagaaacacgcatgcgtgcgtcatgctctcagaaacacgcatgcgtgcgtcatgctctcagaaacacgca

SEQ ID NO: 159404 - DNA, 122 bp, Homo sapiens
tcagaaactctgagggtgggtccaggaatctgcatttaaacaagctcctccaggtaattccgatccacagcaaattagaccctttacctggcattcaataatctgacccctccctgacccca

SEQ ID NO: 159405 - DNA, 122 bp, Homo sapiens
gagccagagatggggaaggtctaccgggctgaccgcaagtcagtgcaaaggatcaaggctcgggacatcgtccctggggacatcgtggaggtggctggtgagtgacagggacggctggtcca

SEQ ID NO: 159406 - DNA, 122 bp, Homo sapiens
ttattcatgacatcgttgcgacctttccgctaatatcacagtgggtgtatgccctgggtgcgcaccctgcaatactatgcatgatatcctcccgatctttctgctaatatcacaggggcttt

SEQ ID NO: 159407 - DNA, 122 bp, Homo sapiens
tcaaattcttacaatgctctcccactaaagattggtaggtcaaggcagccacaccacactcggatgtgactcaacagtccattctgccactgcagaaccaattctgaggccaagtggtttcc

SEQ ID NO: 159408 - DNA, 122 bp, Homo sapiens
acgtctccttcaagcccacggtagcacagcagagaatatgccctaactgccgggagactgcggtagatggggaactggtggtgctgtatgacgtgaaaagagaagagaaggctggtgaactg

SEQ ID NO: 159409 - DNA, 122 bp, Homo sapiens
tggtcacccatctggagatacaacttctccataagcccctcaatcaacaagtgaaccactcgtttgtgtaccctaaacctttcaagtaaccataggcaaccctgggctgagaactcacatga

SEQ ID NO: 159410 - DNA, 122 bp, Homo sapiens
gccgcactcagtctcagcatctcaggctgagggctacactgtggagacggaggtggggtgcgtcccaatgctagtccctctctctggaacccacaggcagaggcctcaagccaactgtcctc

SEQ ID NO: 159411 - DNA, 122 bp, Homo sapiens
atctagagggatggggtgcacggagaagctcgcccctttcctaaagagacccccgtgtggcgcggcgggacgcacactcacgtgagggagatggtgaagtggaagcgctgtctcaggccccg

SEQ ID NO: 159412 - DNA, 122 bp, Homo sapiens
agacctgcccctttaaggtagtgtccctcccctaccccctccctgcaggtgacccttgcccgcctgcctgcctgcccccccagctggaaccaagaaggttgtgtcccccttcctctgggtgt

SEQ ID NO: 159413 - DNA, 122 bp, Homo sapiens
ttggtctgggatatgacctgagcgatgggatttttagaagtttcccaggtgattataatacgaagccaaggttgagaaccacaggtctacagctaatgccacagcccaaagaataagtctat

SEQ ID NO: 159414 - DNA, 122 bp, Homo sapiens
gagtggctgtgctgtccagtgtgtcttccagctctgtctttagggcctccagctcctcgccgaggtctcgcttctgcttttcagccttgttcctggcggcccgctctgagtccaggtcctcc

SEQ ID NO: 159415 - DNA, 122 bp, Homo sapiens
agtgatccacctgtcttggcctcccaaagtgttaagattacaggtgtgagccaccacacccggcctagaattccaatattctaaagcactggagtccttatgacgcaatattccagtttgca

SEQ ID NO: 159416 - DNA, 122 bp, Homo sapiens
aaaaggaaagagaatgcctgcctttgaggagctagctcacagtctggtgggaggtccacccgtctgttggaaccagtaaggttccctagaacaatacttctgcagcaaagagttgcgggggt

SEQ ID NO: 159417 - DNA, 122 bp, Homo sapiens
ctggcgctctccagcagcggtgcccctgcctgctctggtgctaggacgagggcaacgtcccgttttcaccgcatgcctagggccgcgcaggttcatgaggttcagggcctggtggcgcctct

SEQ ID NO: 159418 - DNA, 122 bp, Homo sapiens
gcacggaaggcggcccattctggacagaaaagctttcgtttgacccaaagctcccccttccggcgtgttttctagagggaattcgtgagctgagccgaggagcgagcaggcggcttctcctg

SEQ ID NO: 159419 - DNA, 122 bp, Homo sapiens
tgcccccgccacagcggctttttgtggctttttgcccccgctgccacaggttgttcccaccgcggctttttgcctccgccgccacggctttctacacccgccgccgcagctttttgcctttg

SEQ ID NO: 159420 - DNA, 122 bp, Homo sapiens
atgaaggactctcagcacagccaattacccggtgctggtaatcacccgctgacttccacccgagtccttcagaaggtaatctgcggagggcgacttgtaaacaatttggagggagaagataa

SEQ ID NO: 159421 - DNA, 122 bp, Homo sapiens
agaaacagatttctctgcagcatctgtttgtgctcataacttccaatgcaccagctgtagcgagatactgggtttggaggcaagggcgagagcgtctgtgttcggttctcactctaagtggg

SEQ ID NO: 159422 - DNA, 122 bp, Homo sapiens
gatagctgtgcaggtgccgacagatgaagctgcgccgcagagcccactgccagtcactttcgtggctatagcgccactgctccagcactggctcgggcgggggcggcgggaggggcggcagc

SEQ ID NO: 159423 - DNA, 122 bp, Homo sapiens
ctcagctgccggtcccccctttgcccgcctttgccttggggggtgccgggagaccctcatcgccctcgctgtcagagctgcagccgctgacgtcggtgatctccagctccgagtcgctgtcc

SEQ ID NO: 159424 - DNA, 122 bp, Homo sapiens
cgccgcactcacaaggtgtctagcaggagcttggcggcaccctcggaggtaagcttctgccgcttctggaacgtctcccagcgctcccgctgctcgcccaggtccaggttggacgccgagga

SEQ ID NO: 159425 - DNA, 122 bp, Homo sapiens
agaggtgtcagcggctcacaacaccttgggctgggccagagggaggcccggtccccggggcgggatcgctaacctccagggctgcgtcggtgctggcctcaaagccgtcacagaccagcacg

SEQ ID NO: 159426 - DNA, 122 bp, Homo sapiens
tggggacagcgcctgcataggggccgcggtggctcgctcccggtgttgggatccgaggagcgggcagaaccatccttacgaagagggggctgagtccagctggccgggcttggagccttgag

SEQ ID NO: 159427 - DNA, 122 bp, Homo sapiens
tgacaatgagcaggaaatagttcagtggggtctctttaaacagtaacattcctcctaaaacgggagcccaggaagggggaaggaggcagaagctcccccttccaaggcctggctttgcgctt

SEQ ID NO: 159428 - DNA, 122 bp, Homo sapiens
aagaaggcagcgtgctgtcgtgtgtgccctcagctgggaaggtgcgcatccagtgactcccgcatttcaccactctgtgcgtgtccacgaaagccccacggagactggtcttggggcggcaa

SEQ ID NO: 159429 - DNA, 122 bp, Homo sapiens
aaggtacgtcttccaacaaaggtacgtcttccaacaaaggtatgtcttccaacaaaggtacgtcttccagaaaatccacgtcttccaaccaagccatgtcttccagaaaatccacgtcttcc

SEQ ID NO: 159430 - DNA, 122 bp, Homo sapiens
gcccttagaacaagacagctgtatctctgtacaaatgcgggcggtgacgagtggggatgacgggactttctggggtgacggccactccctataccttgatggggctcgtgcaagttctttat

SEQ ID NO: 159431 - DNA, 122 bp, Homo sapiens
cgctcccagcgcgcccgccgccgccgtgcccgcccctcgcctctccggttccaaccactccggctcacccaagctgggtaccaagcggttgccccaagccctcattgtgggcgtgaagaagg

SEQ ID NO: 159432 - DNA, 122 bp, Homo sapiens
tcctattgttcatggttattttttaagtgacttgattgcttcatcactacaccatgacatcgttcccagaggagccagggacgtaaggcagacgccacagccctgataacagtgacttactg

SEQ ID NO: 159433 - DNA, 122 bp, Homo sapiens
tttgttctgctaatgaggcgattcagattgcacatccgggagtcaggggagggcagagaccgagctcaatcatgtggccaatgatttaatcaatcatgcctacagaatgagacttcaatgaa

SEQ ID NO: 159434 - DNA, 122 bp, Homo sapiens
ggcggaggaaatgtgtgagttcatgcagttattctgaggctctgcatttacccccatagtcgataccaggacaaaggggcccctggctgggctttgtctagtcagagttcaagaaaagagct

SEQ ID NO: 159435 - DNA, 122 bp, Homo sapiens
aaaagaatgcatgacacctattgtaaactggcaagttgagggggtgggatgccgctcagacgtgtactgagaaaggtgataatgaatttggcgtcagcaattcttcagaaactataagaaaa

SEQ ID NO: 159436 - DNA, 122 bp, Homo sapiens
gccagtgttcttttgctatttgcagtaaaccttgccgctggtcactttgggtccacactgcgtttatgaggtgtaacactcactgtgaaggtctgcagcttcactcctgaagccagggagag

SEQ ID NO: 159437 - DNA, 122 bp, Homo sapiens
accgttgagacctggcgcggtccaggcgttgagcaatagggctgcgcccggtgtcatgcccgccgcccaccccgccctgcctgctccacttacacggagacgagaggcagctgctggtgtgg

SEQ ID NO: 159438 - DNA, 122 bp, Homo sapiens
gaacatggctttctcctgggagaacttgcagcgcctgcttaggaagagacccaaatctcgcgagagcacgtcaaaatccctacattcttaagattaattttggggggagtctgtaagatacg

SEQ ID NO: 159439 - DNA, 122 bp, Homo sapiens
cagcctgtgtctccacatagctggtggggcctacacgcgccaactgtgctgtgcagcccccgggccttcaggacaacacagccacgcagggcatcctcaagaacatcagtgatttgtccaag

SEQ ID NO: 159440 - DNA, 122 bp, Homo sapiens
cacagaagggaagtaaaaacacagtctgatcatcttagcggaccaccagtatgtatggtccgtcgtgaacagaaacatcgtgaggcagcccgacagcaggaccactgctgcaccggcggcct

SEQ ID NO: 159441 - DNA, 122 bp, Homo sapiens
agcgaactttgtaaagaatttcacccccctcgatctttatgtccaggatcttctccacctcgaacacatcctctccgtcctcctcactgtcgccaaaggcctccgctcctctcgcggctgcg

SEQ ID NO: 159442 - DNA, 122 bp, Homo sapiens
gcaggtcccgagcctgtcccgcggggaggcggctgaggcccagcgagaatttgagggcggcgcgggcgagccggcagtgctgggggacccggcgcaccctccgcagctgctggcccgggtgc

SEQ ID NO: 159443 - DNA, 122 bp, Homo sapiens
gacccaccggactcacgcgggctctgccacgtgttgcccgcagtctcggcccgttccctccgctttggtaacgggcactgactgtccgatacctcagcgatcgtaggagagcagagacgtcc

SEQ ID NO: 159444 - DNA, 122 bp, Homo sapiens
ccccctcctgccccttcatgcatgcgcggaggccgcctgctagcaaggtaggtggctcggcggcgagagccgtcaagggcgcattggagagtgaccctcggacccggctgccgccgtcgccg

SEQ ID NO: 159445 - DNA, 122 bp, Homo sapiens
gaaacaaggttcattctgtgggataaggattggatctgatctgcggccatttactttctacgcaacctacccctgccctcactgccgacgctgcctcaatcagcttcccagggacaaacgtg

SEQ ID NO: 159446 - DNA, 122 bp, Homo sapiens
taaattcacgccatgcaggtttgccggacgagtccgagtggcccaggcattgtactaggacggacgtagctttttctacggccaaatggtaactgaccgtagaggatttcttttccttcttt

SEQ ID NO: 159447 - DNA, 122 bp, Homo sapiens
aacgtctcagctgttcaccgtcaaaaaacaaaaaagtcaatatccagatctgcaggttggcgccccactaacaatgtcctccattaagaaagaggagggcaccgggcaggcgatgccacggc

SEQ ID NO: 159448 - DNA, 122 bp, Homo sapiens
tgcccgagcctggctttcacaggtcgcaatatgacctggaccttctagaggcccaggtgtcgccatggttccctcgccggcagagacaagagcagccgctagggggcagggcgccacgagct

SEQ ID NO: 159449 - DNA, 122 bp, Homo sapiens
gtgggattttatagtgtcgaccctcttcaaaaaccacgcagcatttgcctaataagctgacgctctcttgacagctcgattgcgtgctgcctctgctcctgcataaatcatagggccctgcc

SEQ ID NO: 159450 - DNA, 122 bp, Homo sapiens
gaacccgcagacctccacggtgagtgttacagctcttaacgtggcgcgtctggagttgttcgttcctcccggtgggttcgtggtctggctggcttcaggcgtgaagctgcagaccttcgcag

SEQ ID NO: 159451 - DNA, 122 bp, Homo sapiens
cccccgggtttccaggagccccccgtataaggaccccagggactcctctccccacgcggccgggccgcccgcccggcccccagcccggagagctgccaccgaccccctcaacgtcccaagcc

SEQ ID NO: 159452 - DNA, 122 bp, Homo sapiens
ctcccccccgacatcccggaacaaataaataaataaggcgcgcgagagaggccaacacgtcgcggagggagatgttgttattttttgctgttgtgcgtccctgacgtcacatccacctgctg

SEQ ID NO: 159453 - DNA, 122 bp, Homo sapiens
agcagcccccaagcacccacgaaacaccagagcttaaactgccacaaggcagaccagagtcgccttctctctaggtactggaaccaggtttgggacatggtatggagttgttttatccagcc

SEQ ID NO: 159454 - DNA, 122 bp, Homo sapiens
agtagatgatggggttgcagccgctgacaaactgcaggtgcttggccttggtggacttctcggccacgaggaagacaacgaagctggccggcacgaaggacatggccacgatgatgaagatg

SEQ ID NO: 159455 - DNA, 122 bp, Homo sapiens
tgactctcggttgccagacatggcacagaatgttcgattttactaccagctctcacactccgcttctgtttccccttctcttacgggccgctgctcaaacctttatttatcaaatttaagtg

SEQ ID NO: 159456 - DNA, 122 bp, Homo sapiens
gttcatgccgcccccgtgccctgcacaaaaaccaccaccagcagctcacatttcacgtctcggcttttcggccatcggagtcggtttaagccagcgtttacacacctcgcctcgttctctct

SEQ ID NO: 159457 - DNA, 122 bp, Homo sapiens
gagactcaaaggggatctaacctaggggaattcccacatacacatcacttgttaggaaggcgagaaaggcaagccaagctgatgagtgaatgaggaaacgctttttaaagtgctaaataaga

SEQ ID NO: 159458 - DNA, 122 bp, Homo sapiens
gagaagcttcgagaacaagttgaagagcgactgtccttctatgagactggagagataccacgaaagaatctggatgtcatgaaggaagcaatggttcaggtcagttgggctttgctgggtgt

SEQ ID NO: 159459 - DNA, 122 bp, Homo sapiens
aggagctgagcagcaatacggggcggggtgcagctccgctttccccagagtgcgcaagtgcgctaaggcgcccgcccacgcagtgggcgggctacgggagctgcagaggccgccgccggctc

SEQ ID NO: 159460 - DNA, 122 bp, Homo sapiens
tgtgatgaatgttgggcagggatgtttggtctggtgcctagggaggcaagaactccaagacgccaggatgagaattgcgacatctgcttgttgaactaatggaccttttcttacttaaaaaa

SEQ ID NO: 159461 - DNA, 122 bp, Homo sapiens
ctgccctcaagctgctctctgtctgcaggagaatcagagaaaccatgcttacctagatcgcgcttggatcaactgagttctggaggcaggaggtggatttgacaatgttgactgcagcagtg

SEQ ID NO: 159462 - DNA, 122 bp, Homo sapiens
tgctgacatcccggttgttcttctgtgccgggggtcttcctgctgtcatgaaggacgtaccgggcttcctacagcagagccagaactccgggcccgggcagcccgctgtgtggcaccgtctg

SEQ ID NO: 159463 - DNA, 122 bp, Homo sapiens
gcgcgcggcctcttcctgtctgtaccagggcggcgcgtggtctacgccgagtgacagagacgctcaggctgtgttctcaggtgagaccgccgcggggccggggatcctagggacggttcatg

SEQ ID NO: 159464 - DNA, 122 bp, Homo sapiens
cccagccactggggacggtccacgccggatcaccagcagctcaggcttaaggccacgacgcgcaagcgcagcctgccagcctggctccctcccaaagcttgcgtgcaggttggcggcgggag

SEQ ID NO: 159465 - DNA, 122 bp, Homo sapiens
acacaactcatttgtagaggtggctgatttaattttgtcggaagccatattaactactttcgtaatacttctgtggcaatggcttttattgcatttggtagtctcagcagtgcaatgacatt

SEQ ID NO: 159466 - DNA, 122 bp, Homo sapiens
tgcaggataggactggcgacacacccgggcaacaatagctctggtggaaacagggcctggcgccctttctgatgctaatagaacagccccgggatgttccagtgtgaggcagctcctattga

SEQ ID NO: 159467 - DNA, 122 bp, Homo sapiens
ggcaccacggccccaccgggagtggaagccgccaggtgaggcaggggtggttcccttccccggggaacaatgtgcagaaggcatcggtgcctgccagagaggaagtggggaggtggggagac

SEQ ID NO: 159468 - DNA, 122 bp, Homo sapiens
agccccgtggggctgcggaggcgggacctgcaggatcctggttagggtcttgagtacacacggctcctattggcctcggcagcagatgctctctgcaagcagttgatccacacgccagtgga

SEQ ID NO: 159469 - DNA, 122 bp, Homo sapiens
actgagaattttattgtctgtttcctttgccagactgtaagttccacgagggcagggcctcgtccatttcatttaccactacatccccagtatagagcaagagcccatgaaaatgtttgttg

SEQ ID NO: 159470 - DNA, 122 bp, Homo sapiens
tgtgcctggcctgggactgaggggtccaggcgaccagagctggctgtacaggaatgtccacgagcacagcaggtgatcttgaggccttgccgtccaccgtctctcctttgtttcccagcatc

SEQ ID NO: 159471 - DNA, 122 bp, Homo sapiens
gataagaagaggaagctggcacaagtctgtctggtggagggcccagctttccctgactagcgctgagaccttaggcaagtcacttaattctctgtgctttgtttgcctcatctataaaatgg

SEQ ID NO: 159472 - DNA, 122 bp, Homo sapiens
cgggccgctgctgcggcagaggtgccctggttgggcggctgggcgcctggggttcgacgccggccgggatccctgggtgtgcgcggagatgcgcgccgcggaggcgaatggagggaggagga

SEQ ID NO: 159473 - DNA, 122 bp, Homo sapiens
gggccaggggcctcgatgacaggagcgatgagcagtttcgtgtcacctaatatagtcatacggcaaaaaaaaaaaaaaaaaaaaaaaaaaaaaaaaaaaaaaaaagccctgcccagcttttt

SEQ ID NO: 159474 - DNA, 122 bp, Homo sapiens
gctgctgggtctgtgtgggtaggccggcaggatttatttcaggtgacggaggaacatacacggaatatgaatttccgcaggagtggcgccgtgattccttccctctccctctcggccgccct

SEQ ID NO: 159475 - DNA, 122 bp, Homo sapiens
cgcaccaactccagctcctcgccgggaagacttcatcccagcaactcggaatgcttggcccgggcggcactcggcctctccgcagcagttctcgaactggcctccttgaacgtccgcttcgc

SEQ ID NO: 159476 - DNA, 122 bp, Homo sapiens
gaggaggccctccctcagagaccctacccagaggtaggggctgcagctagctgaggcttccggctccagatcctggctcatgtccctggggcctggcatggggcagcaccctggggtcctct

SEQ ID NO: 159477 - DNA, 122 bp, Homo sapiens
gaaggccgcggcctgtcagagccgaggggcccaggcgactgggggattctgaggcaacgccgagggctcggcagggccgcggacaccgccgcggcttggtttgttattgtcgactccgtctc

SEQ ID NO: 159478 - DNA, 122 bp, Homo sapiens
ggggagacaagtaatgctcatgagtcacaccacccgaaatacatgcaaagctgcctccatcgccttttgctgcggcccagattgacaagtttgtttgaaatcgcgatccatgggctttattt

SEQ ID NO: 159479 - DNA, 122 bp, Homo sapiens
atgtttgtatatattcactcaacaaccctttaatgagcctgtaaggaccagacactgtggcgctgaatcagatttaataatgagttaagacaaagcccctacctatgggctagtgtgtggtg

SEQ ID NO: 159480 - DNA, 122 bp, Homo sapiens
acctgccactgctgggaggcgcacagcagcaggagaaagtcgcctgcaggacacaggagccgccgctgtgccacacggggacccacacgaggtgggcacggcgcataaatcccacctcccac

SEQ ID NO: 159481 - DNA, 122 bp, Homo sapiens
tcctccccactggtgacttctccacctgtaggcggcggcggagcgagtaggtggcgggtgcgggtgggaggagcgggttttaaaaatccccttacacgtaagtctaaccctgccgcactgca

SEQ ID NO: 159482 - DNA, 122 bp, Homo sapiens
tcttttgtttcacagattagaaaactgtgactttttgcctctaaagttatgacatttctacgtattctactgtactcatcccatgatcatacacaaagaacttaaatgcattttttcatgct

SEQ ID NO: 159483 - DNA, 122 bp, Homo sapiens
cagtgaccacaccggtctgcagccctacttgagccgctgcaactcggcgcgcgtggacagcggctgctggatgctctatgagcagcccaactactcgggcctccagtagttcctgcgccgct

SEQ ID NO: 159484 - DNA, 122 bp, Homo sapiens
accattagggcacttgtacacccaatagtcctatcccagtccctggtagcttttttgagccgcacttttccttttcctaagtaatgtcatagaaatttggatgttacactaactggcagtgg

SEQ ID NO: 159485 - DNA, 122 bp, Homo sapiens
gcttcttcccctcagaaccagcctttccccttgcactcagcccctgggcgattctccctccggggaggaaagaagattcaactcttgattcaaatgctccggatttcactctggtttcgctg

SEQ ID NO: 159486 - DNA, 122 bp, Homo sapiens
gaaatctgaggcgcgggcgggcaccgtgccagggctgggcgggggaggggctgccaggcccgcccgtcccagcagctgccagcccgccccgagccgccagcccagatggtgcccatctgctg

SEQ ID NO: 159487 - DNA, 122 bp, Homo sapiens
gggcttacgctcgagtggcgagagatgaatcctaacgagaacccaacagtgtgtggggggcgagcgtgggagcggcaggggttagaggacacccctggagtcagggcctgccagtgaaaggg

SEQ ID NO: 159488 - DNA, 122 bp, Homo sapiens
gggaagaacgacatggctgctgcgggagcggcgggaccggagaaccaggaccggccggcacgaatcgcgactccccaggtcagctgacgctgcgtcctcagcgggctgtcaagtgcgtcagg

SEQ ID NO: 159489 - DNA, 122 bp, Homo sapiens
ggttggggaatagggttgtctttcctatgaaaatgccatctgtagaccttgtgagtcagccgtccagatgtttgcaggtgaattcctctgcttgacatcctccctgtcactttggaccctat

SEQ ID NO: 159490 - DNA, 122 bp, Homo sapiens
taggcacatgattcttcctttacaactttgttttttggtttataaaaatattgtttcttacgttttaataccttggagcatgtgaaaccaaaagaggatttaattaagaccaatttgttctc

SEQ ID NO: 159491 - DNA, 122 bp, Homo sapiens
gcgcgcgggacggggtgaggcggggaggcgcgtgcgcactggcgtgcgagactcggcgggcgctgttgagggagtcgggccgcgactgtggtcgtttttataccttcccgcgcggacgccgg

SEQ ID NO: 159492 - DNA, 122 bp, Homo sapiens
gcggccgaaggccgggccgccccgtcccgccccgtagttgctctttcggtagtggcgatgcgccctgcatgtctcctcacccgtggatcgtgacgactcgaaataacagaaacaaagtcaat

SEQ ID NO: 159493 - DNA, 122 bp, Homo sapiens
ccgccctggccccgcggaggagctgcccacctgattcccggacagacctccccaactccgcgtgagacagagaattattcagataatttaaattaaaaaacgacgtgaaaatttggaataaa

SEQ ID NO: 159494 - DNA, 122 bp, Homo sapiens
ttagggacgcaagtaggattgccccaaaaagttccactccgttcacactcagcgagggcccggcaagagccccacctttcacattcattatttcccttactaaccgaggctccgagacgcta

SEQ ID NO: 159495 - DNA, 122 bp, Homo sapiens
aagggacccagaacacaaaaacaacaaagttaagaatcattgccctaggggcagggcctccgttttcttacagatgcaagcaattaaacaccggaactcactgtagcccgagggtcctttac

SEQ ID NO: 159496 - DNA, 122 bp, Homo sapiens
agtctcactctgtcgcccagggctggagtgcagtggtgcaatcactgctcgctgcagcctcgatcccctggggtcaagcctcctcacatctcacctcgcaggtagctgagactacagatgcg

SEQ ID NO: 159497 - DNA, 122 bp, Homo sapiens
ttaggagtgtggaagtcaatcgtagaaaagttttatttatccttaaaacttattttgcctcggtaatcaaggatcacatttggctcaacaggctactggtacatttgtggcacaagagatgt

SEQ ID NO: 159498 - DNA, 122 bp, Homo sapiens
gctatacagatggtacttagaggatgtagggccctacgtattagggcttcttagttgtagcgaagagcaattggtctggtacgtttagctttttcacatttagttttgaattctgactctag

SEQ ID NO: 159499 - DNA, 122 bp, Homo sapiens
gacttaatggtaatattagtagttaatagggtcttttattagctagttacctgggaaatgcgtttgtacactgaatgagtgctgtgttttctaatgcacacattgaataaaggaaaacgtgt

SEQ ID NO: 159500 - DNA, 122 bp, Homo sapiens
tgcagtcccggataggggagtaagaaggtctgacagttaatgacacttgaggaagatgtgcgtgcctggagcttctcagcagtgggacatttgcccctagcagagggtcgagggacactggc

SEQ ID NO: 159501 - DNA, 122 bp, Homo sapiens
tcaacggccggcgtcagggcccctctgttccaactcatcccccccccgaagttaatcagccgtacttgtactttccagggcgctttagtttggaaaatacttaaaagcctcgaaaccttccg

SEQ ID NO: 159502 - DNA, 122 bp, Homo sapiens
ctgtgatctttcacatcaactcatccctcgccagagccctgcaagtgagtcttgagagcccggaagaaaagggaccacagcctctatccccagagtttagggttagggtggggtcgccatcc

SEQ ID NO: 159503 - DNA, 122 bp, Homo sapiens
ctcgtggatgcaggttcctgttttgtagtaacgcaggtggtacttgcgttctgtgtcccccgtcgtccggtgcaggtagggacacctggggagcagagaggcacgcaatgcctggttatcat

SEQ ID NO: 159504 - DNA, 122 bp, Homo sapiens
ctctgaatggttggctcttgtgtagagtgaatcaaagtcctccctagcatgggaataaatcggtactgatgagctggagtttgtggcattcacttttctttggggaagtctggggacagcct

SEQ ID NO: 159505 - DNA, 122 bp, Homo sapiens
aaagaattatagcagcccagttgttagggatacaatgaagctcggcttcccttactgaggcgttttgagtggaatgaaatgcttcatttagcatttaatgagattatagtggcagagataaa

SEQ ID NO: 159506 - DNA, 122 bp, Homo sapiens
gactcgggtgagggtggcgagtactggttccgaacgcacgcaggggagaagggagggacgcggcgctgacccttccaggtcagctggagttgacccgcccacctgggcttttcaaccccagt

SEQ ID NO: 159507 - DNA, 122 bp, Homo sapiens
ggccagccattggcagagtccgcaggctagggctgtcaatcatgctggccggcgtggccccgcctccgccggcgcggccccgcctccgccggcgcagcgtctgggacgcaaggcgccgtggg

SEQ ID NO: 159508 - DNA, 122 bp, Homo sapiens
ttgttccttctgatgttcagacacgttcagagttttttccttctggtgggttcgtggtctcgctggcttcaggagtgaagctgcggaccttcacagtgagtgttacagctcttaaggcggca

SEQ ID NO: 159509 - DNA, 122 bp, Homo sapiens
gcggggtcagccgtgtggactcacccccgactcccagtccctgtatgcaccctgcggggtcggccgtgtggattcacccccgactcccaggccctgcacaggccctggggcgtcagccatgt

SEQ ID NO: 159510 - DNA, 122 bp, Homo sapiens
actgctccgagagccacgcagagcctggccttggccttggcctcctggtgctggggctgccgccgctgcgggggttgccgctgcgccgggtgctgctggggccgaggttgaacagagacgcc

SEQ ID NO: 159511 - DNA, 122 bp, Homo sapiens
tcgtgcctggctcgctcatttcacttagcataatgtcttcaaggtgcatctgtgttgaagcgtgtgtcagaatttcccaccgtccgcattttagaggaggagacagacactgaatgattata

SEQ ID NO: 159512 - DNA, 122 bp, Homo sapiens
taagtaacttacccaaggtcacacaattagtaagtagctgagatgcgattcgaacccagacgggctagcctctttcagaccccataattttaatcactacactgtttccacaactgctgtgg

SEQ ID NO: 159513 - DNA, 122 bp, Homo sapiens
gtccctgccccagccccggaccggcgccagccccgcggcccttgcccctcctgaggcgtccgaatccccccggcccacccccaggaacggccgagctccagccctcggggcagccccagcgt

SEQ ID NO: 159514 - DNA, 122 bp, Homo sapiens
aacaaacaaacccagtccaaacaacgcctccagtaggaaaagaggaaaactgcgataacacgaccccccgagaagagacgagaccaacacgctgagactgtggggcgtcagcaaacctccaa

SEQ ID NO: 159515 - DNA, 122 bp, Homo sapiens
gcgactttggcaaagcgcagagtgaggccccaggaagggaggaggtgggacactcggtctcggcatctggctccactggaagagaggtatacccagttcccagggtcaaagtgtttgttaca

SEQ ID NO: 159516 - DNA, 122 bp, Homo sapiens
ctggagtgacggagagggaatccagctaggatgctggtagatgaccagctggagacggagcgtggcagtggtggggagggaaggggcaagtatttcatgggcttagtctagagggacttcac

SEQ ID NO: 159517 - DNA, 122 bp, Homo sapiens
ctggtaccgaaggcggaggtggagcccgagaggtaagtgcgtgtgcagaggtggcagttccgggcgccggggaggtgtagagaacagattcggaaactggggaggtctagcatgtggcgtag

SEQ ID NO: 159518 - DNA, 122 bp, Homo sapiens
ctgtattttctagatttctgtaaaattgagttacagatgaaatgccacttgagacaatctcgttaagtggggggccagaccctggcttttaaacatgaagaatttgataaacagggtcctag

SEQ ID NO: 159519 - DNA, 122 bp, Homo sapiens
cctcccgccccaccaagcaatcataccattagccacggctcagcggtggcgggaaggacccggcctgacccgggcggggggcggggcacaggctgcggctcccaccgagacccctctctccc

SEQ ID NO: 159520 - DNA, 122 bp, Homo sapiens
tgaatccgggaggtggaggttgcagtgagccgagatcacgccactgcactccagcccaggcgacagagtgagaccctatctcaacaacaaaagggtatgaagtcggatgagaaagctcacct

SEQ ID NO: 159521 - DNA, 122 bp, Homo sapiens
ctgtagtcatgctcctgggagcatgctcctgagaccatgcgaggtctcaggaaggatgtgcgcctcatatgagaaacccgtggcaggtggcattccttgcattttgcagtcagctgcatccc

SEQ ID NO: 159522 - DNA, 122 bp, Homo sapiens
gggagaccacccacccaccctttccggggactggaagagagagcgaggaagggaaccgggcgcccccactggcaccctgcaagccccgggcccgggccggatagcctcgcacaccaggcggt

SEQ ID NO: 159523 - DNA, 122 bp, Homo sapiens
attaccgaaaaacaagcaaacaaaatccaagagctgagatagcttgttctaagtcacatgcgactagtagaaaagagtaaaacttcaacccagatgtggatttcatattgaagatcttaaaa

SEQ ID NO: 159524 - DNA, 122 bp, Homo sapiens
acagcccccggggaaggtcttcatacagacttgagggtgtgcgtgctggtccctgccctccgccgcagcggggctgggactcagcagtcgggtcccggagctgcctttggtgcgcacgggcg

SEQ ID NO: 159525 - DNA, 122 bp, Homo sapiens
tagccgagttcacagaggaaaagatggagtctgtttatcaggttacctgggaaacaggggcggggcttggcgctcaagtcctgcttggacagatccctgcccatctctcattcttctctctc

SEQ ID NO: 159526 - DNA, 122 bp, Homo sapiens
cctgagccctgcctagactgtggcacgtcagcctcacggggccacccgctgccatcagcccgagtcctcctgccttcgcaaattttagctcacgtccatgcagtgccggctctgtgccaggc

SEQ ID NO: 159527 - DNA, 122 bp, Homo sapiens
cttcaggcaacagaattcagtcaccatgtatagaacagtccacacaagaaaagcagaacacgcattcatttcaaattcatacgtaacgtagatcaagatagaacatacctcataccttgggc

SEQ ID NO: 159528 - DNA, 122 bp, Homo sapiens
agaaattagtcgtggctcctttaaggggtccgcggaggcgcgcccggccttttgtttgagcggcggcgcgcgcgtcagcgtcaacgccagcgcctgcgcactgagggcggcctggtcgtcgt

SEQ ID NO: 159529 - DNA, 122 bp, Homo sapiens
ttttctcatttttattctgctcctgctggcgatggcgctggcccgggaggcctgaggaagcgagctggggagagggaagcctggcacaggtggtggcaaagggtcccctggctgccctttct

SEQ ID NO: 159530 - DNA, 122 bp, Homo sapiens
tcctctcggatccgcgacagtgcgggctcggccctgcggaggcacagctgtgaggaggggcggccccagcccaccgcattccctgaggagggtccactcgcccacagggaggggaggccagt

SEQ ID NO: 159531 - DNA, 122 bp, Homo sapiens
gctgagaaaatggtggtaattgctaacatttattgagggcctacgatgagtcaggcactacgccaagcattttgcttgccttgcctcgttttttttttgagacggagtctcgctctgtcgcc

SEQ ID NO: 159532 - DNA, 122 bp, Homo sapiens
gggtaggggcttggatgccagaacctcccaggcatccaagggctccaactccatggggatcggcccggggcctcacagcgggaacaatgaacccttgccgggctgggtgggacctgagctgg

SEQ ID NO: 159533 - DNA, 122 bp, Homo sapiens
ctctctagccgtgtgagctccatgtacaaagtggaaaagtccagccccaaacgcgccgtccgtgtccgtcaccatctgataggttaacgtcacagttgaatgcttgccgaaaactcatacgg

SEQ ID NO: 159534 - DNA, 122 bp, Homo sapiens
aaccggcaacttgcttaagcagccagtattaaaacttttgcataaggcgtggcagtggtgcgcgagagagcccgcttcttggctctaaggctgatttcaagcctccggttcagattacactt

SEQ ID NO: 159535 - DNA, 122 bp, Homo sapiens
gtcagatgcaggagactcagagcacacagcacagtgaagaaacagggtaccttggaataacgaggaccctgccaccagcaagtatttgtcagtcacctaagagaaatatattcagctgggcc

SEQ ID NO: 159536 - DNA, 122 bp, Homo sapiens
gcaggcgacccggcgtggactggtgtggatttcacctgggagagcagcggcagcctgtgtcgcttgcgcccaggctctggaggaggggcccctgcggctcccgggccaggacagaggcgccc

SEQ ID NO: 159537 - DNA, 122 bp, Homo sapiens
tataaataggctggggcagggtgctagtaactgggcggggtggggtggtgggaagtctcccgaaatcaggaggtgcgtgcctctggcttgctgtgtgaacagacacactgggtccggtgatt

SEQ ID NO: 159538 - DNA, 122 bp, Homo sapiens
tacttcaaaagtctgcttcacccccagacttctgagttctaccataccttttaaattgaacgaatagtctttgtttggcttcagctatgacgtattatttgccataggcttctattcatgac

SEQ ID NO: 159539 - DNA, 122 bp, Homo sapiens
cgctccgcagctcctgagggctttcgagcccagatggtcatctgagacgagaggtggcggcgaaggagagtctcgcctgtcacgctcccggagcaggggcttcatgaggtggccatggaaac

SEQ ID NO: 159540 - DNA, 122 bp, Homo sapiens
caccccgacgagggagaagcccccacccagaaacagccgccgccccgctcagcttcacgccgtctttccttaggaaggcttctgtctcgggggtcccctgagaccccacatttcatcaattg

SEQ ID NO: 159541 - DNA, 122 bp, Homo sapiens
ggggagagtttagaacgccgtggatatcatggaaatgtcaccgacggggagagcttagaacgccatggatatcatggaaatggcaccgacggggagagtttagaacgccgtggatatcatgg

SEQ ID NO: 159542 - DNA, 122 bp, Homo sapiens
gggcctgtgctgtgcgcgcctcgcggggcatgctgggagcagtagcatcttagctgcttccggccgctggtcgcagggctgcgggactacaatcttcgcatgaaatggaagagagggtggtg

SEQ ID NO: 159543 - DNA, 122 bp, Homo sapiens
ttggggacatctacatctgggggagaaggggatgtagcaaaacgagcttaggagtgatctcgaggtaggctgaaaccaggagggttacagagggcaaatgcacctttgtgtttcaagaagga

SEQ ID NO: 159544 - DNA, 122 bp, Homo sapiens
gcgttagtggctgcggctccgcgggactccagggcgcggctgcgaggtggcggggcgccccgcctgcagaaccctgcttgcagctcaggtttcggggtgcttgaggaggccgccacggcagc

SEQ ID NO: 159545 - DNA, 122 bp, Homo sapiens
tggctgggtttattgactgccctgtccaatccaactggcagcattaagcttttgtcccttcgtggctgcttctgaacttttccctccccgcatttgtagtggggggctggaaaggccctttc

SEQ ID NO: 159546 - DNA, 122 bp, Homo sapiens
caaagtgctgggattacaggtgtgagccatctgtgctgggccacatcattttgattttatcgagtgctttgacattgctaagggctaccctcacatgctctcattctcaaaataagatgcca

SEQ ID NO: 159547 - DNA, 122 bp, Homo sapiens
acagtttgtacagcggccggatgtaagaacctcatgtcaaccctgagtgaaggtgtaggccgggcggtcaagcacagcactctccagcagctccagcagcgtgggtaacccggtgggagcct

SEQ ID NO: 159548 - DNA, 122 bp, Homo sapiens
gccggggtaacggcgagcgcgtggggccaagaaaggtaagggccctgggcgaggaaagcgcggccctttccgagtttggtgttttgcagcgaaaggaaatctcgctcttccgaaagtcctcc

SEQ ID NO: 159549 - DNA, 122 bp, Homo sapiens
caggacagtgtcctgggactgacacaagggctcacagccagctagcactgtgggctctcacgggtcccttctgctgttttattttagtagttatttatttccattcctcacttccactgcca

SEQ ID NO: 159550 - DNA, 122 bp, Homo sapiens
tggtggggcaggctcagctcacactcagccttggcaagtagctccagaaactgctagtgacgttgtcttcaagttaaatctcaggaggaaaagaaaatacgaggacaacaaagagaggaagt

SEQ ID NO: 159551 - DNA, 122 bp, Homo sapiens
acatcaagaaaggggtcctagattggtccagtcaggtaggcgttaggtgaccaagggggtcggggacccagaggataggacccaaagacgcaagcgtcgcgcgcccaaggctcagcgcgcct

SEQ ID NO: 159552 - DNA, 122 bp, Homo sapiens
tacgcgataggcctgtgagggggcggggcccggcgcctgttcgccgtgttagtggccaatcggcagccaggcagggtgggcgcgcgtagggggcggggccgggcgcgcggcagggcgcgaga

SEQ ID NO: 159553 - DNA, 122 bp, Homo sapiens
tcctgaccttcgcattgcagagttaatccatctggtggatctggggatgctggaggaagccgttagaagcccccggcgcgtggtgaggacgcagccggagacgcaggcctctccctccagca

SEQ ID NO: 159554 - DNA, 122 bp, Homo sapiens
agcccagctcccgtggcggggcgcgcacccggcacaccgcgcctgcctgggatgcagctccgtggctaagtagggatccccagtgactggccccaaatatcccctaagactgaccctcgttc

SEQ ID NO: 159555 - DNA, 122 bp, Homo sapiens
cctctttaacattggcctttctgcttccctcatgaatattcagaaactccaagatgaaagcgtgcaataactaccaatatggatacctcgcaaagcctgacactagtttctggataaaatgc

SEQ ID NO: 159556 - DNA, 122 bp, Homo sapiens
ccggctcttagaacacccaaggaagacccctcagttcgcccctgactccaggtctcactgcgctgactccaagtgagctcaccctttgagaacacgccccaacttcccaggcctttttgctt

SEQ ID NO: 159557 - DNA, 122 bp, Homo sapiens
gagaccagaaaaagaaatttcaataacagatcagtttggggtgcatgtatgattttgcagcgtcaaattggagtaagggaagatttctgtatacttgctggagaggaggaatgtgtatagtt

SEQ ID NO: 159558 - DNA, 122 bp, Homo sapiens
tggaactcccccaactgcaggcccgagaacacggtgtgaggatcgctggctcctgcaggacgtggacgtggcaggggcctgggatctggggtctggcctggggtctggggtctggcctgggg

SEQ ID NO: 159559 - DNA, 122 bp, Homo sapiens
gattggttaagagacgccgtcactcgcggcataccgaccaaccttgggacagacaggcgccgtggggacagtggttgtttgggaaacagacacgccttctctggcaccacagcactctcggc

SEQ ID NO: 159560 - DNA, 122 bp, Homo sapiens
agtccccagaggacactaatgagcaagtgaccggtggccggcctgctcccaccctggggacgcactctgagccaggtctgggcccagcactgccatacacctgcctcccatgcccatctgcc

SEQ ID NO: 159561 - DNA, 122 bp, Homo sapiens
gacttgaaactccgcagacaaaatttagctcttttaacagattgccaatcaagaaatctacgaatccatctacaacctggaaacacccgttttgagatgtcccacctttctgggatgaatca

SEQ ID NO: 159562 - DNA, 122 bp, Homo sapiens
tccttggggcggggagccctgctctggagctacctgcccagcccagtgtcaagtcactgccgagccctgtggcagtttcggggaggaaggggcacctggaaaggcagagctgtgctggggag

SEQ ID NO: 159563 - DNA, 122 bp, Homo sapiens
cctgaaccgaggtcaccgaggccacggggccgggaggccctcagcagagcccgggggctccgcacctcaaggccggccaggaagaaacagcagcaggagcccagggcgccccggggagcccc

SEQ ID NO: 159564 - DNA, 122 bp, Homo sapiens
tttttgtttgttttcctttttgcccaatagagccctgctctactgacccttcaatgtgcccgtgtgcctaaatattcctggtcgtgtgaaaagaacccaggtattagctgaactaaggagca

SEQ ID NO: 159565 - DNA, 122 bp, Homo sapiens
gtccagatccagaggcggcggcggcggcggcagcgggagacgaaaaaatgaagagggccgcgggaaagtaggcgacagctattcaaagcttttgggggtctacctttgtattcgttgctccc

SEQ ID NO: 159566 - DNA, 122 bp, Homo sapiens
tgcagtctgccccttcctagcccctgttccctcccccaaccctatccctcctacctcacccgcagggggaaggagggaggctgacaagccttgaataaaacacaagcctccgtttctctgtg

SEQ ID NO: 159567 - DNA, 122 bp, Homo sapiens
ggctgatggctccggaaacaccaattcgctgtctccacgcatgaggagacgtgtaggggccgggttcggccctggtgaactctcacccgagcggtttctctttccgggacaacatggcgccg

SEQ ID NO: 159568 - DNA, 122 bp, Homo sapiens
cggtggcggcgtttatgtaagcgccgggcagggactggtggtggggccggagctgcgggccgtcccgggagcggagggcgcccgcggagaagcgagggtgccgcggcaccgcctcgcaccca

SEQ ID NO: 159569 - DNA, 122 bp, Homo sapiens
agattaccaggggaaactagtcactgctcccagctgtctgacatttgatcacacttagcccgaggcttaggtgagctcatttttgccctacatcctcctgccagatttacagcagtcttttg

SEQ ID NO: 159570 - DNA, 122 bp, Homo sapiens
gacggcggttgcagcagccgacctgtctcaactccaccactgtagtcagagaatcaaaagcggtctgagttgcgaggtcattggggaggcccccacccccacattaccagtgaggaaactga

SEQ ID NO: 159571 - DNA, 122 bp, Homo sapiens
gcggttccccatcccagggccaccagggcctccgggccctcccgctgcaccggcgtcatccgccatttggtgttttctcggaaaagaagctgatttttaaaagaaaatattaagacactttt

SEQ ID NO: 159572 - DNA, 122 bp, Homo sapiens
tagtagtgcacacctgtagtcccagctactcaggaggctgaagtggggggatcgcttgaacgactccagcctttgtgacaaagtgagactctgtctaaaagcaaagcaaaacaaaacaacaa

SEQ ID NO: 159573 - DNA, 122 bp, Homo sapiens
ttctttgtaatttattccttcattcttaaacttgccaatcaggcctcctgcaaattcccacggaagcagggttccctaatttaacaaaacacaaaattcaaaaagaaaaccaatcctgccat

SEQ ID NO: 159574 - DNA, 122 bp, Homo sapiens
gcgacctcgccccgccctcccgcagccggccccgccctcccgcagccggccccgccctcccgctcgcggccccgcccccaggagcttggccctccgccaaccacaccgtctggccccgcccg

SEQ ID NO: 159575 - DNA, 122 bp, Homo sapiens
gccggtggagactgagcagtcagcccgctgtaatagcgaggccgacgcgggaggtgatgccgcctggccggtcaggtgctgaggcgccgaggagaggacatggctcactggatctttttctg

SEQ ID NO: 159576 - DNA, 122 bp, Homo sapiens
ggagaagggagggtatactggaaaacgtggcccccagaaccccggatattcagttatctgcgctgggtgggtttcgggggcggtgaagtacgagggatgagcgatgacggggagggagtgtg

SEQ ID NO: 159577 - DNA, 122 bp, Homo sapiens
ggtgcgggttataatctcgtggtgcgccgtgttttaagcctgtcggaaaagcgcagtattcgggtgggagtgacccaattttccaggtgcgtccgtcacccctttctttgactaggaaaggg

SEQ ID NO: 159578 - DNA, 122 bp, Homo sapiens
gtaggtgtgcctgcacaggagacagcaccagccaagctgattgtgtatctacagcgtttccggcctcaagactatcagcgcctgctagaagtgaacagctccagagagaggccacaggagac

SEQ ID NO: 159579 - DNA, 122 bp, Homo sapiens
aaagacattttccagttatcttgcacacaagtgggcggcgggacccgttttggccgggaacgttgtcaggaacgctgtacaccacttccaggcggtcacgtccgagctgcccaggcagtcct

SEQ ID NO: 159580 - DNA, 122 bp, Homo sapiens
tagagaacagacagccccaggcacgtgtgcacgggccccgagagcgagagcgggggagagcgcggccctgtagagaacagacagccccaggcacgtgtgcacgggccctgtagagaacagac

SEQ ID NO: 159581 - DNA, 122 bp, Homo sapiens
ttgcacgaacacgcactggcatcaagcggagcccagatgccaccgagtttccccaaatcgcgtccccaggccccagatcgtggtaccccaggccccgatgtgcaagtttctcctccaccacc

SEQ ID NO: 159582 - DNA, 122 bp, Homo sapiens
accagggtgttctcgtagaaagccttggaacatgctgggcgcattaaaggggagctatctcgcatgtgcaattactcaacacatctttaaaactgtaaacacttgttcacatgtggagaagt

SEQ ID NO: 159583 - DNA, 122 bp, Homo sapiens
agatacggtgctggcaagggcactccgcggccacctgagtggcttcgcggattggctgaacgctgaggctctggccctgaaatctgtgtggctagtgtcaggtagctggagagggatggagg

SEQ ID NO: 159584 - DNA, 122 bp, Homo sapiens
tattttcctcaatctggttgtcggggcctctttggggccagccgatccagaaatccaagccgggatttagtactcaccaacagcagcgtgttcagccggggcgggggggggggcgtaagcag

SEQ ID NO: 159585 - DNA, 122 bp, Homo sapiens
cctagccagggggcgcctcctgctgagtccagcccgggactccgcccttgacctgggcctcgcccactgctgtgggcctgtcctgcccagcgcccttgtgtccttccgaggactgagccccg

SEQ ID NO: 159586 - DNA, 122 bp, Homo sapiens
tggaggcaccattaaatgagaaaggagttatcaacaaaggaacgtattattaatttgctgcgctttagctgactaatgaaggattttagctgactgatgacttagctgaaacaaatactgaa

SEQ ID NO: 159587 - DNA, 122 bp, Homo sapiens
cagctctgctgaacaagaggccttgcagcagaacgggagccagacctccagagccctgcccggccctggtgctgccccagccccctccaccactccacacggaggccctgtgggtcacatca

SEQ ID NO: 159588 - DNA, 122 bp, Homo sapiens
ctccctgcattgggagaacaaaaggagtctggggctaggaagaaaaaaaaaaatgacaagcgaagcattaaactacaaacagctctttgaagcctccctgatagaggtggttgtgtttgtgc

SEQ ID NO: 159589 - DNA, 122 bp, Homo sapiens
agaagacaacctcttcctttctggaacaaaccacagtttgaggaacacaatgacagaactcgataaaaagggaagaaaccagactgctccagtcatctgacggctcttcaatgaatctgtaa

SEQ ID NO: 159590 - DNA, 122 bp, Homo sapiens
gctgcgtgtgtgtgtgtgtgcctgcgtgtgtgtgtgcgcgtgtgtgtgtgtgtgcctgcgcgtgtatttctcgcttgctaatgattgtgtgttgatagagtgatgcagtggcctcattagcc

SEQ ID NO: 159591 - DNA, 122 bp, Homo sapiens
aaagcagcagcgtctacagtctgcctttatgtccagcgggtgaaagccagaaagcacagacggaatctagccgatagggctccatgctctgcagaaaacatcctgacccgaggcctgcaggc

SEQ ID NO: 159592 - DNA, 122 bp, Homo sapiens
catgcccggagcgcgcgctggagcggcgcgaggaggaggcgaacgtggtgctcaccgggacggtggaggagatcctcaacgtggacccggtgcagcacacgtactcctgcaaggtgcgccca

SEQ ID NO: 159593 - DNA, 122 bp, Homo sapiens
cgatcgctggaggtggggcccgcgcacgacccgcccgcccctgtcaccggcaagccggagcggcgacacctcccgtccccgccgcgcatccactagcccgccccgactctccatcgggcctg

SEQ ID NO: 159594 - DNA, 122 bp, Homo sapiens
tcgggtagagtggttatataatttaccatgtaaacttgcataaccttcaaaggccgggtgcggtggctcacatctgtaatcctagcactttgggaggccaaggctggtggatcacttgaggt

SEQ ID NO: 159595 - DNA, 122 bp, Homo sapiens
cggattttccccatttaaaccaaagaaaagagtccagtaggataggccgttaccacagagcgtttatgttattcacaatactgctctctgtaggaatttctgttagcctcgtcataaacaaa

SEQ ID NO: 159596 - DNA, 122 bp, Homo sapiens
cggattaaaagtaaccagactcgtccagaaaactgcgtccaggaaggaagtgacagaagacgaatgggaaaaggagaacagctcacagcgtttgaaacatcgcgtaaaaaagactgggggtg

SEQ ID NO: 159597 - DNA, 122 bp, Homo sapiens
gctctgttcttttatcaggggcatacagacagggtgtggcttgctggtttacagggacagcgagaagggagttctgtgggggcagagagagccctggcctctcatatttcataaaatatgaa

SEQ ID NO: 159598 - DNA, 122 bp, Homo sapiens
aagacttcctggacgaggggcagcccgggttttcctcaaggatgagctggagtcggcccccggcgcaggagcaaggtgccgggagagggccgagctgggtgagaggcctgggccagccaaca

SEQ ID NO: 159599 - DNA, 122 bp, Homo sapiens
aggatgaggcaggagaatagcttgaatccaggaggcggaggttgcagtgagccaagatcacgccattgcactccatcctgggtgacaagagcgaaacaccgtctcaaaaaaaagggggggag

SEQ ID NO: 159600 - DNA, 122 bp, Homo sapiens
attagcataccagggctgtggtgtgggcaccgccgtgtgagtgagacagcagcctcagcccgtccaggtcactgcagaagaggaaagcagcccccacaggccccacagtggtgctcgccttt

SEQ ID NO: 159601 - DNA, 122 bp, Homo sapiens
ctgccaagctttgttttagaccgagtcttgcaacaggaagacatgagcctcgctagtattcggggtgcaggctgatgggactgagatcgacgccatccacacgagcttgctgccaagctttg

SEQ ID NO: 159602 - DNA, 122 bp, Homo sapiens
ggctagaccctaggagggacttcccaaccctgacaggcggcgggcaggtgggcagggcctcgcagtccagcttccccaccttgtctgcctccacagggggactccggcagccccttggtctg

SEQ ID NO: 159603 - DNA, 122 bp, Homo sapiens
ttcagagtggcgctgggcactgagctggagcacggagcacattgtgcaaacgggcaccgtcggtctactcacctccccacgagaagaaccttgctttgctgatatttacccaatttctttag

SEQ ID NO: 159604 - DNA, 122 bp, Homo sapiens
taacacagaaagcaaccgatgaacactaaatcagtaccttttcagccacgaattccttttcgggtgtttatcctgagaaataattggagaagtgcacagatacatatgcccctggacgttca

SEQ ID NO: 159605 - DNA, 122 bp, Homo sapiens
atacaactacctggatgtttaatacacttaaggctgactgaaagtggtcaaacacaagggcgcacagtgttcaatcacatttataggaagtcatcaaacaggtaaaagtcacaaatggaaac

SEQ ID NO: 159606 - DNA, 122 bp, Homo sapiens
gaagctcgcaactccttctccttttctttctccctctctcgctctctatctcctctatcacgttctcggtctcgatctttagaccgatcttcacgatcccggtctcgatctcgatccttcct

SEQ ID NO: 159607 - DNA, 122 bp, Homo sapiens
ccagcaactgatgagaaacatcacctctgagccaatcaaaaaactaattcttccaaagagcgactcttactgtttctcatggtgagaagacaatatttgctttctctttttcctttcttccg

SEQ ID NO: 159608 - DNA, 122 bp, Homo sapiens
tttaggaaacagcactactgagagttgccagtcttcagagcagtgcaacgtgtgtgtatgcgtaagacacagatggtgaaaatatcaaatgctacagatgccaagaagggaggtgttggcac

SEQ ID NO: 159609 - DNA, 122 bp, Homo sapiens
acgggagcacctcctagtcacggagaactgcatgacccgaggcacgtggcgtgtgtggaacgaatagagaaggggctcgccgggagtggacagcaccgggagtgctccaaacgggtgagcag

SEQ ID NO: 159610 - DNA, 122 bp, Homo sapiens
tttatctgttgctaatactgtttcttcttcaacaacaagtcataccacagccaagcccgtcgctccttcatttggtgtcctttcaaatctgccattacccatttccacaacagatgcttcaa

SEQ ID NO: 159611 - DNA, 122 bp, Homo sapiens
gccaagcattcccggaatgtgcttcctgctggcgcggggcggggggcgggcggggaggcccgggcggggcggggagggcgcggggcggcgcggccggagcccggggcgcgcactcggctcgg

SEQ ID NO: 159612 - DNA, 122 bp, Homo sapiens
gaggcccgctctgtgccaccaggggacgccatgtgcacagcctgtgctgggccctgactgcggctcaggccgcgcccgcccctgccctcggcgagcggctcagattcagctggggggcgggg

SEQ ID NO: 159613 - DNA, 122 bp, Homo sapiens
ggtctcaaggaggctgtgcagaaaacagcaccagatggaagcaagagcagaaagaagtcacgtcccatctttatgacaagccacagaacaagatggtcacagttcttcatgggtaaacaaaa

SEQ ID NO: 159614 - DNA, 122 bp, Homo sapiens
ctctactctccatggggtgcctctccccgggctccaggaaggcctgcacatacggctcagcgcactcatccgtgggcaccgtgcctgctcactgaggtcccctgtgttgagaatttctaggc

SEQ ID NO: 159615 - DNA, 122 bp, Homo sapiens
aaattcaggcagacaggtagtgtaacttgccacgatgatgtgggtagtgagaaatggagccgggattagaaccctgtctgtttggctcttaaaatagactatacagcctctctgggaaaagg

SEQ ID NO: 159616 - DNA, 122 bp, Homo sapiens
tggtgttggcacctgcattatatttccagtaagaagtatgcgctgtggtctgaagataagcggtgcttccaacagggttatttactcataccaaagaacaatagtcctttgctgtacaggga

SEQ ID NO: 159617 - DNA, 122 bp, Homo sapiens
caggctcagctcccagctccccccgactgcaagcaagctctctatctccaggccctgacacgcgggcattgatgggtgcatttgttggatgaataggtctgtcctccctcagcccaggtgtg

SEQ ID NO: 159618 - DNA, 122 bp, Homo sapiens
ggcgctgcacttctacacgtttccaaaggacgctgagttgcggcgcctctggctcaagaacgtgtcgcgtgccggcgtcagtgggtgcttctccaccttccagcccaccacaggccaccgtc

SEQ ID NO: 159619 - DNA, 122 bp, Homo sapiens
ggttgctagagagaaccaaggtgacactaagaagagccctcggctgggcgcggtggctcacgtctgtaatcccagcactttgggaggccgaggtgggtggatcatgaggtcaagagatcgag

SEQ ID NO: 159620 - DNA, 122 bp, Homo sapiens
ttggaatttcaggaaccaccaaccccaggagcgcgtgaacaggctgctggcacggcgcaccgtccgctgctccgaggttcatgtcccacgctgagttgtgttcactcaagtgctgccaaagt

SEQ ID NO: 159621 - DNA, 122 bp, Homo sapiens
agcggaagtggagcgaagtgtggcgcggaagtgaggcgaaggctttccccatcgactgggcgcgccgagcggtctaagcgactgcgtctgatggggcggggagccgccgggttgagcctatc

SEQ ID NO: 159622 - DNA, 122 bp, Homo sapiens
taaaactccacatcagagagactcgtggcttcactcaaggacagcatctcctgattcctccgtcaacacctgtctggtgcaggggtggcaggaagaggcatctccactctaccttgccctga

SEQ ID NO: 159623 - DNA, 122 bp, Homo sapiens
ttgcttttttgagggaagttggtctctgtgaccagtaaacccagccccaagtttaccggccgaaggaagggaaagttaagagtgatagggcatgaagtgaaaggcttcaggtgggaagtgct

SEQ ID NO: 159624 - DNA, 122 bp, Homo sapiens
caccccgcctagcctgaggggaggaacccgccgggcctcatctagcggcccagccacctccgaagttgcagcctctgctctcagtgctccggacccgaagccgtcccttgcccctccggccg

SEQ ID NO: 159625 - DNA, 122 bp, Homo sapiens
ttatctctgcactctggatgaaatcttctgtttttaagtcttccaccttctttagctccccgttggccaactggatgatggagcctttcatgaagtagggaggcagcgtagggggagccgcc

SEQ ID NO: 159626 - DNA, 122 bp, Homo sapiens
cacaggaaacacacagaggattcccaagcaggaattcacagccggggctgtctgactccacggcccaaattcgttcccccaccgcatgatactgactcattccttctcagcatacaggataa

SEQ ID NO: 159627 - DNA, 122 bp, Homo sapiens
ggaggggacgagagccctgggcttgtggtgtccacgtggacagctaatgaggagccttgccgatgaggagcatgcgttcccgacggggcggccgaatgcggaaggagccgccattctctccg

SEQ ID NO: 159628 - DNA, 122 bp, Homo sapiens
cccgcctagccacgcccacatgcccctccccgtccacgtggacacggagcctgctggtggcgcaggttacctcccctcaggttggacctccggactcgcaggtgcactacctcaggcgcaag

SEQ ID NO: 159629 - DNA, 122 bp, Homo sapiens
cgcttggcctctcgctctcggatgagccgggcctgccgcttttccggggtttcattggcccgcttcagcctcatggcctcccgatcccgctgcagccggcgtgcccgctgctcgtctgtctc

SEQ ID NO: 159630 - DNA, 122 bp, Homo sapiens
tgtctttagggaggacagccaggaatgggaaggtcaattataagcaaagttttaattggtcggaactgattacacatgtatgtggtgagtttccagaagctgggccatccatggcgccctca

SEQ ID NO: 159631 - DNA, 122 bp, Homo sapiens
gcgtggctcacggttgtgaccaccacacaatactggaagtgactgcggcagatgatgtcccgtaggatctccacggtccggcctttcagcaggcagctcagcacaaacactgccttgggctg

SEQ ID NO: 159632 - DNA, 122 bp, Homo sapiens
aacagccaagtcgagtagttgtgtcagataccatacagcctggaaatactatctcatcctcgataaagtaactttgccccaacctctgctctaggggcaggatgggcaagtgtcccaatggc

SEQ ID NO: 159633 - DNA, 122 bp, Homo sapiens
gagaatcaaggggagactgggcgtcgaaggggggttgcgccccgggaagaatctgggcgtcgaaggggggcggagccccggggagagactgggcctccatggggggctgcgactcagaggaa

SEQ ID NO: 159634 - DNA, 122 bp, Homo sapiens
gggcggggaagggtgcagtgcaggcggctgggaaggctcatctgctcggctttatggaaacgctccactgttgggggcaaccaaccccgcgttgactcctgcgaagtgctaaaggaagcgat

SEQ ID NO: 159635 - DNA, 122 bp, Homo sapiens
tctgcacctttaaagcctattcaaggactcaaaggcatttaccttccaaagttattctatcgtagcacaaaaatcataaatgctaattaactgttccataaggaaatgtcctccatgtgaaa

SEQ ID NO: 159636 - DNA, 122 bp, Homo sapiens
ttcatcacaacacttggcttaaatataaatggcttacttccttcccttcttcagacaggccgtccctttctcctctccaagctctctttttaccttgagcatgacactgtcatgacttatgt

SEQ ID NO: 159637 - DNA, 122 bp, Homo sapiens
agaccccggggtcttcgcgtccctccgtgggaaggcgaggcagggccctgcgcagaacaccggcaggctctggggaaaggcagggattctatagtgaatcctgcaagcctgcttggggccga

SEQ ID NO: 159638 - DNA, 122 bp, Homo sapiens
gcccctctagcagcggccgacggttgggaggctgagatttgtctctgatattcaggccggcgtgtttcaaggttacttttcagtcacaaccgaggtgcccacagcatttcgtaactaaaaca

SEQ ID NO: 159639 - DNA, 122 bp, Homo sapiens
gttacccccccaggccaccgggcttgcccccactgccctctgggctcctcctactctgcccgggctaatcagcacactacctgagtcagaatgtgctctgtgatgagagaatcagagacaga

SEQ ID NO: 159640 - DNA, 122 bp, Homo sapiens
taacattacccccttcaattcacaagtgtcttgcactgtgtgtgtgtgtgtgcgcgcacacgtgcgtgtgtagcttttggttttattcttgtttgtttgttttgcaaaaatgaaataatagc

SEQ ID NO: 159641 - DNA, 122 bp, Homo sapiens
ggattcctggtgaagcgaactaaacggacaggcggcttgtaccgagttcgccttgcggagcgtgtcttccctctgctggggccccagggggcgccgcccttcttggaggaggctcccagcgc

SEQ ID NO: 159642 - DNA, 122 bp, Homo sapiens
cgtccccagttccgcttttctgacagctggtgccagctgaaggacgccgggcagagtcctcggctcttgggcccttggggtgataactggggaggcaacgtttttgtggttcccatgcgggg

SEQ ID NO: 159643 - DNA, 122 bp, Homo sapiens
ctagaggcgcgcgaagcgctgaggcgggcgtggaccgcgcgggagttaagaagcaggtcccggatcgccgtataccgccgggttttctcccaacgtcaggcccgatggctcggcttccccag

SEQ ID NO: 159644 - DNA, 122 bp, Homo sapiens
ccaggggaaagagtcaatgagcagatgctccctggtgcacatctgaaagagcctgcagcccggcagacagcctggcagatacagacacacacatgggcccccacagccttccagccacatac

SEQ ID NO: 159645 - DNA, 122 bp, Homo sapiens
aaccccagtcccggccgccgcagacactgcgctgagcttttgggtcctcgccttgcccagcgccagtgcagctgaagtgagcagctggtgggaaatgcaaatggctcctggagaaatagaag

SEQ ID NO: 159646 - DNA, 122 bp, Homo sapiens
ggacagaagaagcatgccccccaccccgggcccagggtgccccaaataagcagctaagggcggcgcacttggtttgtgagcaaccctctcgccacatcaactagtctcgctccggccgccgc

SEQ ID NO: 159647 - DNA, 122 bp, Homo sapiens
atggctgcacattgcatttgggtcaagagtggaggccgccgggaagtaggacgctattcccgagtccggtcacaagatggcggactggtccggcagaagacgagcagggacgaggaagcggg

SEQ ID NO: 159648 - DNA, 122 bp, Homo sapiens
gtgtgtgtctagtgaggaggcttgggctggggtgtcgttccagcagcgccccactaactccggagtttggcaaacaacagccgttttgtgtaactgcgcatttttctagaccagtctttatt

SEQ ID NO: 159649 - DNA, 122 bp, Homo sapiens
aatacatggcttttgggaagaggggcagggtcctgaatgtatgggtccttctcaagttcacggtcttccctggtgggtctccttgataattgtattgtgccaacatcagcataatttcagac

SEQ ID NO: 159650 - DNA, 122 bp, Homo sapiens
tctgactcctttactgaaaatgcaccttgtcgaccactcaggcgcaggcggaaggtgaagcgagtgacatcagaggtggctgctagccttcagcagaagctgaaggtgtcagattggagcta

SEQ ID NO: 159651 - DNA, 122 bp, Homo sapiens
gaagaggtaggtggaaaccagaccaggcaagggcttgtggtctattatcaactctgtcttcgaatcagtaatctctgaggatgggacctggggctctgcatttataaaaacattccagtggt

SEQ ID NO: 159652 - DNA, 122 bp, Homo sapiens
cacgcaccacacggctggaccgagcccggggcctcagtgaccgaggcggcggctgccggtcgtcctggagggagagctgcctgtgaatctattgcacagtgggtgggaccctggtctaatgg

SEQ ID NO: 159653 - DNA, 122 bp, Homo sapiens
ctggcaacggaagataaaatccccaaagccatcagagaaacataacacgttacactggaacgtcaggaatgatagtcgacttcccgtccaaaacgagggacagatggagagagggagccagg

SEQ ID NO: 159654 - DNA, 122 bp, Homo sapiens
gggctctgtccaaacgcatggagcaattcagtaaaagaaaatgggaggaattaagttcaacgacaggttttgtgaattataaagtgctttgtgctgatgtcattattattacatggtcaaca

SEQ ID NO: 159655 - DNA, 122 bp, Homo sapiens
tgacccgggagggtcccatgcggctacataaaattggcagccttagaactagtgggaaggcgggtgcgcgaagtcgaggggcggagagagggggccggaggagctgctttctgaatccaagt

SEQ ID NO: 159656 - DNA, 122 bp, Homo sapiens
tcttgtcaccgtggcagaggagcctggaggagatcccagcagtgcccccccacacacacccggagcggatcccagcagtgccccccacacacacccagagcggatcccagcagtgcccccca

SEQ ID NO: 159657 - DNA, 122 bp, Homo sapiens
gacgtcgcaacgctccgaggggcggggctgcggcgccccggacggaaagggttggctgagcgctctcccctccctcccgcggccccattgggccgctgagcgcaagccggccggcttccggg

SEQ ID NO: 159658 - DNA, 122 bp, Homo sapiens
gactataatgtgatgcgcaatcgtttgtgaatgaacaaaagtcaccggcaagcagggagacggggacagatcgctgacggcagattgagggtggcagcaaaggcccggcctccaaggataat

SEQ ID NO: 159659 - DNA, 122 bp, Homo sapiens
atggggggtgttcagccctaggctgagctgcttggagcacattcttaatacgccagccatcgctacctcagttccacagccgatgttagggaagaaagatgcggggacacggcaacaggaca

SEQ ID NO: 159660 - DNA, 122 bp, Homo sapiens
caatgggagggtctaagagccccccgatctcccctcgggaagatgagctctggcactccacgaaggacaagctggtcttggggaatttcgctggcacagagacaggaaggagaggatcttgg

SEQ ID NO: 159661 - DNA, 122 bp, Homo sapiens
gtttgtttgcggctcctcccggaaaaagccgatcagcctgagaaaccaattagaaagtgacgctgggaagccacgcccaaagagcggaaaatgccgaaggtagccgaacggaaagggtgaat

SEQ ID NO: 159662 - DNA, 122 bp, Homo sapiens
tgacgtgattggaatgtgaccccttctctcctacatgttgctgtcctggttctgaaatgacgaccttaatctctgactccatgtgtcgctgactgtgctcttgcctttgacctgatgctgga

SEQ ID NO: 159663 - DNA, 122 bp, Homo sapiens
tccaaagggaggaggagggtctagtgaggcgggtcccacccggcctttcccatcagagcccgaactcgcggttcaggttccctctaggacgcccttggccgagaggaggcctccaatggctg

SEQ ID NO: 159664 - DNA, 122 bp, Homo sapiens
cgggcgcaggtgcgcgctttctattgggtgtgggcggaacgcgagggattgcggcatcttcgggggctgcaggtgagcgcgcgcacgcgccgcggctgtggtccgctcgggtgcgcgcgcgc

SEQ ID NO: 159665 - DNA, 122 bp, Homo sapiens
cctttctggtgattgttccctatggcataagtgagccgtagtgagtgtgaaatgcatctacgtggcaggacaacacaaacaggatctatctaaaaagaagtctggaaatctcactataataa

SEQ ID NO: 159666 - DNA, 122 bp, Homo sapiens
ttgctaactaaatggagccttctagtaaccagagctgcctacagcagcaacaggctccctcgagccaggggattccttgttagtgacaaatacaaacttagaggctgtgaagacagtgcctc

SEQ ID NO: 159667 - DNA, 122 bp, Homo sapiens
ttcgtgttcatccgcctccatccgagatcgaaacgggacctcgtcggccccgtaggggcccgacaagaagagggaatccctgcagaccaacagcgggctatattgacgacggtgtctgagat

SEQ ID NO: 159668 - DNA, 122 bp, Homo sapiens
gaccgagcattaaaatttgcttccacttggacatagccaagattgctaacaggctgggaacgtgtgtgtgtgcgtgtgtgtgtgtgtgtgtgtgttgctacatactctgggatttctaattt

SEQ ID NO: 159669 - DNA, 122 bp, Homo sapiens
tgttgggcagaacaccgccctgagcaattgtgactttacccagcaacttgtttagctcctcgtcgttgcggatggccagctgcaggtgtcgggggatgatgcgggtcttcttgttgtcgcgg

SEQ ID NO: 159670 - DNA, 122 bp, Homo sapiens
aatcctcggagtctgtccaccccctctactccgccctcaagaggatttcaaagatggaggcggcggctccctaaaccacttttcgtgttcatccgcctccatccgagatcgaaacgggacct

SEQ ID NO: 159671 - DNA, 122 bp, Homo sapiens
tgccttgctaacactgccactgaacccactttctaagagaaattgcctcttcctaacctgcgttacaactcagaagtgcagatgcctctcagacatagacagtcctggggtctctccaaatt

SEQ ID NO: 159672 - DNA, 122 bp, Homo sapiens
gtttccttgggcatgtggtagcgattggtggcctccagcttctcctgctccccagctgcccggtactcccgggcgagatcccgcactcgccgcttatatttgagctcctgccgctcgtgccg

SEQ ID NO: 159673 - DNA, 122 bp, Homo sapiens
acattggaaagcaaatctttccactcgtattcctcatttcttctctctggagtcaactgtcgatactacttttattcatttctattttatccttccggagatagtctatgcatatacaagca

SEQ ID NO: 159674 - DNA, 122 bp, Homo sapiens
gcccttgagggcccctcctccagcccccattgtgcttggtggtgagaggtggccctggctcggccacacaccctcggggaggaccagcatccaagcaggtggaagggctctgagggagactg

SEQ ID NO: 159675 - DNA, 122 bp, Homo sapiens
ctccggggcggggcggggcgggaagtcgggggagcccggaggaggcggcgaagcgaggggcgcgcagctggaacccgcgtacccgcttcctggagccgagccctctttcccagcccttctct

SEQ ID NO: 159676 - DNA, 122 bp, Homo sapiens
cctcgcctctctcgcgccccgggatcccccggcccccggatagacaccctctccggcacgcggtcccctgacccgcgctcctcctggtcgcgcttcccgggacctacacgtggggtccgagg

SEQ ID NO: 159677 - DNA, 122 bp, Homo sapiens
gacacgtaaatcccgcccagaaaaaggctgctttcaagtcccttccttgtagaggtgtgacggtgaatggtactgaaagcggttttaattgcgagagagaacggaaatgagctgtaaaggct

SEQ ID NO: 159678 - DNA, 122 bp, Homo sapiens
aaaaaaaaaaaagccaggtgtggtgggtctggtggtgcgctcctgtaatcccagttagtccggaggctgaggcaggagaatcacttgaacccggaaggtggaggttgcagtgagctgagatt

SEQ ID NO: 159679 - DNA, 122 bp, Homo sapiens
ggtccgcgggtagcaatgcatggatctcgcggccgcccgcaccgtggcttctgctcccatcgcactgttgaatgtttctttctgagaaacaggatttgtcggcctttttcttcagcctctca

SEQ ID NO: 159680 - DNA, 122 bp, Homo sapiens
aaggaagcgtctccgggcccacacagcaaggcctatttacctgaggtggagggtgcggtgcggagattttaagtccgtagcgacccccgggcatcgggtgtgcgaatgggggacggcgaggc

SEQ ID NO: 159681 - DNA, 122 bp, Homo sapiens
gccgagtgatttacttacatggctggcgggcggcggccaccttccctcccgcgtcccgggcgcacacacaacttgctgtctttctcgggcgggaacatccacgggaaaccggaccgtcctgc

SEQ ID NO: 159682 - DNA, 122 bp, Homo sapiens
caaggatggggtcagctttgttcatcatctcagttcccccaccaacttttcctcccagcacgcagcctggcagtcaatgctgatttgggagaatgaacgactgattctatcggttgaacgtt

SEQ ID NO: 159683 - DNA, 122 bp, Homo sapiens
caccatgagcacatccctggggctcgtgtggctgttgaaggagcggggcatttctgctgccgtgtacgacccccagagctgggacagggccggccggggctccctcctgcactcctacacgc

SEQ ID NO: 159684 - DNA, 122 bp, Homo sapiens
ggcggcggccgcgggtggggaaatctggagctcagccgagccccggccggcggagaggaccggaaaagagaaggcgcggacgcagcggggagcggttgggcctgagccccaggtagcggcgc

SEQ ID NO: 159685 - DNA, 122 bp, Homo sapiens
ggttaactcattgaattctcataataaccttaagaggtgggtactatacagtcagccctccgaatccatgcattaaaccaactggggattgaaagtatttggaaaaaaatatggatggccgg

SEQ ID NO: 159686 - DNA, 122 bp, Homo sapiens
tcctcccatccctgggttttcctcacagctccatcctggtcctggcaccccctgcaacctcggcagccctgccccactcaggggcctccctgtcacctggtctcagctcccaccacgaggtg

SEQ ID NO: 159687 - DNA, 122 bp, Homo sapiens
tctcgttcctgatcgaacgcggtggtgagagcacacgtcctcgtctcgttcctgatcgaacgtggtggtgagagcacacgtccttgtcttgttcctgatcttaagggaacgtttgcagtctt

SEQ ID NO: 159688 - DNA, 122 bp, Homo sapiens
tgttagaatcgctggaaaggcgggcgccctttgtttcaagaccattggctattggaggggcggtacatgggaggccactggccaatgggaagcacggaagggggcaacgagggtaaagctgc

SEQ ID NO: 159689 - DNA, 122 bp, Homo sapiens
gggtttccgagagtgccaggtcgacctcctgagggaccaatgtccggccagataaagtgccgactggcatgcaaacaaatgaccagattcaacgaaagttcactcttgctctcttttgtagg

SEQ ID NO: 159690 - DNA, 122 bp, Homo sapiens
tagattgatcaaagtgtaaacaccatagggacccattctacacagagcaggactgcacagcgtcctgtccacacccagctcagcatttccacaccaagcagcaacagcaaatcacgaccact

SEQ ID NO: 159691 - DNA, 122 bp, Homo sapiens
atagtggtgctgaatccgtaccttcctcgggccgctcgctctccaacagcgccaccacctcggtgccctcctcgccggagcctcggacctcatccacgtccaccaccgtggcggcgggcgct

SEQ ID NO: 159692 - DNA, 122 bp, Homo sapiens
agggcgtgtgtgtgtgtaaattgtatacaatgaggctgtgtgcatcagtgcacctaaccacgaacctgtgtgtacagatgtgtgtgccttcctgtgtatcagacaatgaggccatgtgtctg

SEQ ID NO: 159693 - DNA, 122 bp, Homo sapiens
gttgtgccagaggttctgatgataggcttataggcggtagtttcctcagtgtccgtgggtcgcccccggtcccgggttggatgccccgcggtccagcaccgaacctttcggggtgcagagtt

SEQ ID NO: 159694 - DNA, 122 bp, Homo sapiens
gccagaatttctagtagcaacaaactatacaactaactgctctagccactaaataaggatcgtccttcactaattgccatggtatttcaacatgaataatttttttagcaaaaaattttatt

SEQ ID NO: 159695 - DNA, 122 bp, Homo sapiens
atcggagctatttcgggtttaaggcttaaaagcccaacagctcggaggagacgcttcctccggcccccggctcggaccacgcgccgcacgcggccagctctgggagctcccagttttttctg

SEQ ID NO: 159696 - DNA, 122 bp, Homo sapiens
aaccctacacttgtttctggtccagcccagcagccagagtggtgctggtttgtcacgactcgactctggttccctggaaccctgcgtctttctttctttttaaacctcgatggctttggagg

SEQ ID NO: 159697 - DNA, 122 bp, Homo sapiens
tcttggatgactgcggtcaatgttgccgctgcccccaccccagccacaagtctcggcccacgttggactgaggttgctgagatttcagattgagggttgggcttcccttaggtgcacgtgag

SEQ ID NO: 159698 - DNA, 122 bp, Homo sapiens
tgaatgcctgggctcaagcgattcccgtacttcatcctcccaagtatctgtgaccacagacgttcaccaccatgccgggctaatttttttcttccattatttgtagagaccagttctcacta

SEQ ID NO: 159699 - DNA, 122 bp, Homo sapiens
tcagggcctgccctggatcctggaggctacacagctgcccactcctcctggggaggctgccgtggaggccatggagatccctgccccggagcccgagaagacaggtacagcttcactcttgt

SEQ ID NO: 159700 - DNA, 122 bp, Homo sapiens
caaagggatctttgtcaagatcttcaatggtctcccctcctcctccccttcagtggacatcgccgttctctttctctgcatctgcctcagtactggggagattctgggactgaacctaagat

SEQ ID NO: 159701 - DNA, 122 bp, Homo sapiens
aggcctccgcgcgttgactgggtcgtcacatgatccgggagtgtggggtccaccctgcctcgtcagcactgacgctgcccccacacacaggctcaccgtttaaggatccttcccttacgggg

SEQ ID NO: 159702 - DNA, 122 bp, Homo sapiens
gctgcggtgctctgattgctccagttgccagggaaaccaaccggcggcgccagaaggtgacgccatcgatgtgcgcccgcctcccagccccgccccgcccgggccggtcccgggaagggtca

SEQ ID NO: 159703 - DNA, 122 bp, Homo sapiens
attctatctcggctgagaaccgagcaacagaccgcacaagaacggtgccttctggcctgtcgtctgccaagaaataccaggaaagctggtgtcagaaacaactacctgaactcagaaagtaa

SEQ ID NO: 159704 - DNA, 122 bp, Homo sapiens
cactgcactctgcgggcagcacttgggcggctggtccgttctctggatctcctttgtggccggcagggggcattcgcccaggctggggcctggagcgcagacggaaggaattagataatttg

SEQ ID NO: 159705 - DNA, 122 bp, Homo sapiens
gcgcgcccaaccggcgacccagacgccagcagccaggattggtcctggacgggggcagcgcggccctgattggactacatgcccacgaagccgcgcctcccgctactctccacaccccaccc

SEQ ID NO: 159706 - DNA, 122 bp, Homo sapiens
gagatacaaaggaaataaaaataattcaggccactctgaacacagagtacagggcaggggcgttctggaggaaatcaagtttaatcactccaaattccttgaaatagccctctcaaaaccac

SEQ ID NO: 159707 - DNA, 122 bp, Homo sapiens
ctagctagtttgatattgagtccttcattgtagtgaagcgtccttctcatttcaaattgtcgctttttttctcgttcttcaggtgagaggtcactatcctcctctccactgctttcttgttc

SEQ ID NO: 159708 - DNA, 122 bp, Homo sapiens
gacttcgggggcctcagcggcttagagcagcaaggtaggcatcctcaatctgctgaataccggactgccccgcaccctgctcctgctgacacctgtgggtctcacccacgactgccccgcac

SEQ ID NO: 159709 - DNA, 122 bp, Homo sapiens
cttcccccgccactgcctcactgcgcgcagggccgctcggcgcaggcgcgctgagactgccgacttgggaagcgtcccgcccgctagcccgacccctcggcctcccgccccgcccccggcgg

SEQ ID NO: 159710 - DNA, 122 bp, Homo sapiens
gagctttctccacagaagtgacttgacacaccgcgctacatctggggaggggggcgggtccgctttccgggagactcaagtctttgctatttgccttttgtttctgggatgcctttggctgc

SEQ ID NO: 159711 - DNA, 122 bp, Homo sapiens
aggggccccgaagacggtgttaccaaccgaacagctccaggcagcaggatgtacacaggacggtgcattgggaggcctgggttcaaatccagcttctgttcccactgccagcaggctatgcc

SEQ ID NO: 159712 - DNA, 122 bp, Homo sapiens
tgaggttccaggagcttaagggtctgggcccagttcaggggggttgttttcgctcctcgacgctgaatttagaaaccagaggctacaaagcgggccgagacttgggttccccaggtccttgg

SEQ ID NO: 159713 - DNA, 122 bp, Homo sapiens
agttttgtccctggtagtttgggtcagttccgcgagacccttctgaatttcctggacctacgcattggatccttaacgaactggtgatcgaattaggggaaaagaaacctcgtcggagagca

SEQ ID NO: 159714 - DNA, 122 bp, Homo sapiens
tagttttaaacgaacctatgttataattctaggtttcgaagtataaagcattccgcacgacgggggatggagaaggatgctgaagatggcgccccttctgagggagcagaggctcctccctc

SEQ ID NO: 159715 - DNA, 122 bp, Homo sapiens
cttcgggttcgttagctaacctttctacacggaaacaagtaaacagggttgttgccttggcgtttactaaattcatttacactgaaaaccacatgtatgacacagagaggttgagcgttgcc

SEQ ID NO: 159716 - DNA, 122 bp, Homo sapiens
aagtgatctgcccacctcggcctcccaaagtgctgggatacaggcgtgagccactgcgcccggccaatgcgctgggcatattgattaacctatcttagcctcagtttcttcatctgcaaaat

SEQ ID NO: 159717 - DNA, 122 bp, Homo sapiens
gtatctgcattgctaatggatgtgtcttttcctcatgcatattctttcctgagcatctaccgccaaatttacagattgcttgcttgtcaaattgggatggggtttgaggaagaggtgacaat

SEQ ID NO: 159718 - DNA, 122 bp, Homo sapiens
cggcccttcctttccagctgccccgccttggcgtggcaggatgacgagcgcagggtcagtcggggcctgcagaccgtgactccgtcacgaaccccaaattcgcttctccccaacgctcgggc

SEQ ID NO: 159719 - DNA, 122 bp, Homo sapiens
agaagggcgcctgcggctggaaggcacttccggcggaagttagagctgggagggcaagtccgggcccctctagccgccagtgtctatggccgtctcagccgacgtcgggcgcgcggctgaag

SEQ ID NO: 159720 - DNA, 122 bp, Homo sapiens
ggaggcggagcccagggaaaagtagccaattagagtgtgaggaaataaaaggggctgagccgaagtctctagagcgggttcccaggttctccaggacaggtggcgccctctttgcccttgcc

SEQ ID NO: 159721 - DNA, 122 bp, Homo sapiens
gcacgcctgcgcggccagcgctgggcgcacacccgcgcccacacagcccgaagggcgccacgcaacccgcaagaacaccagctccccgcgctcgcaggctctccgtgccggcccgcagcgca

SEQ ID NO: 159722 - DNA, 122 bp, Homo sapiens
cccctgcgatattgggcgtaacgtcatagtctcccaacgtggatattgggaataatgtcacggggctgtacaccttcttcgatattgggagtagtatcatccactcccctcgggattgtagg

SEQ ID NO: 159723 - DNA, 122 bp, Homo sapiens
tagagcttgactttgagagtacaattatacgtatttcacaaaattggaagattttactagcgtgtagcctacttgtttcatgttagaaaaccagtgccacctgtgaaatggacattgttgac

SEQ ID NO: 159724 - DNA, 122 bp, Homo sapiens
ggctgctctgggtggaggcagcaggttgcttgagcaagcaggtaccactctaagccttctcgggacagagagggggaaggtgggcttctctgagcgcctgtaggtccgctgtgccaacccac

SEQ ID NO: 159725 - DNA, 122 bp, Homo sapiens
ctctccggcaggcgtccggcgcccatggcaggggacgggtgggaaatcggtatcaggtcccggcccgctctctgggttcggcctctctgttctccgagcgtcacccctgccctccccgccgc

SEQ ID NO: 159726 - DNA, 122 bp, Homo sapiens
tcagggcctgggagaagtccctggccactgcatccaccatcgggaggaacctctgcacagcgttgggcgacagcacttctggattcagccgcaatcggttgaagcgccattcaggcccattc

SEQ ID NO: 159727 - DNA, 122 bp, Homo sapiens
tttatatttttaatttttttttcagagtataacttttgaaatggaagagataatttctgacgtgtgagaatggatgcactagagttggaagcaatatgactgaagaaggcaaaactcctccc

SEQ ID NO: 159728 - DNA, 122 bp, Homo sapiens
gctgcgggccgcacagggaggggcgggctagggggtggttcaggacggggcctcagggggcgtggcttgtagctggcctgggacttccgaaccagggccctaagtcttgggggatgccgtct

SEQ ID NO: 159729 - DNA, 122 bp, Homo sapiens
ctcctcccaggttatcaggcggatctgtggccccgcccctcagccccaccttcctcccaccgctctgtgctctgcccctggcatttcaggcttgctcagtcctgcgccccgcggctccgact

SEQ ID NO: 159730 - DNA, 122 bp, Homo sapiens
actggactttccctcctaggatgtgttagtcattcctgcttttgtccatagggtaagttacgtggcatcacggttggttagaaagagttagttactgtaatgctggcgcaatctggaaatgg

SEQ ID NO: 159731 - DNA, 122 bp, Homo sapiens
gtactgagcattttcacaaattaaaattccctttaagaagtaaaatattcagaggcgaaacgatgcataacacagcagatgaggtggttttgtatcacaaattagcaggtaaatcagaagaa

SEQ ID NO: 159732 - DNA, 122 bp, Homo sapiens
aaccggggctgcacgtggtgcttgcgggctagtgcaagttccaggtgggcccgggctccgcggacccacactcggagcggctgggcgacaccaccagccccaggcagtgaggggtttagcac

SEQ ID NO: 159733 - DNA, 122 bp, Homo sapiens
aggaaacgaattcccaaacgagcctctgggtttcagtttgaatctgggagaggcatactccggactgcggagcgcgaccggcgtgaggccgcgcgtggttcttcaatcacagcagaagacta

SEQ ID NO: 159734 - DNA, 122 bp, Homo sapiens
agcgaagtgcgagagaactcttcaggtgtcaccaaggtgggaaggtgctacgaggcgaggcgccgagcggcgacccccatcccgctcgcccggagtcaacatggccgccgcgcagggaggcg

SEQ ID NO: 159735 - DNA, 122 bp, Homo sapiens
atttctcaaggttataggttggggttcttagaactttttgtggtgtgtgttggcctagagcgactcagaagcgttagtgacttcacctaaaaaagctaacctctctgctgagcgcgaccggt

SEQ ID NO: 159736 - DNA, 122 bp, Homo sapiens
ctccgccgcccctcgatgctcctcttcatcaccttgagctcgctggggtgaggtgtggcccggcgctgtaggccctgttgtagggacaaggatgagcagcagccacagggcaggggtcaggc

SEQ ID NO: 159737 - DNA, 122 bp, Homo sapiens
gaattgttcactgtaaaattccaagaaaacctgcagactcctgcctttctgtgaagagttcgtgtccactgtcatcgtggggtgagctgtgattctgccttctgctctggcctcagtcccca

SEQ ID NO: 159738 - DNA, 122 bp, Homo sapiens
acctaccgtctctgtgactggtgcgcggccaggtcactcagggcggcggggcgaggtgtgcgggagtgggcaggacgggtgggaggaggggaggggtgggagaaggcggggctcaggtgcct

SEQ ID NO: 159739 - DNA, 122 bp, Homo sapiens
cgtggttggagcaggagggaccggagtattgggaccggagcacacggaacatcaggcccgcgcacagactgacaagagtgaacctgcccatgccgcgccgctactaccaccagagctaggcc

SEQ ID NO: 159740 - DNA, 122 bp, Homo sapiens
aactccagggactcttccggacctgcagggcaggcagagcattcggttgctaggcagctgcgcctcctgggagggtgggggaccccaggggcaggtgtctaactcactacctttttgtttag

SEQ ID NO: 159741 - DNA, 122 bp, Homo sapiens
gcctctgcctggggttgccggggcgagggctgctcgctctctcttaacaggggcagccggcggagcactatacggccactgttctccgagacacaaagagggccttgttttgggtgtggcct

SEQ ID NO: 159742 - DNA, 122 bp, Homo sapiens
gcctgaatgctcctccgggtgcgccgcggccctccgggtacgcggggctggctgggctagcgggagatttgagctgccagcccccactcgccgccctctacgcctcctccgctgggccgccg

SEQ ID NO: 159743 - DNA, 122 bp, Homo sapiens
ccgcctgctgacgtcagcgcctgcctacgccgccgttcccatggcgaccgatgcgtcccgcgctctaggcgaagaccgcggccccgtccccgcgcctccaccgccttcttccaggaggaggg

SEQ ID NO: 159744 - DNA, 122 bp, Homo sapiens
aagaccccagtaagacaatgagttcccaagacttgcccattgactttcagccctatgagacgtgaacaatgttcacatcatctcggtaaccccacacagagtatatagtttgaacattatta

SEQ ID NO: 159745 - DNA, 122 bp, Homo sapiens
cctgttgcccctactctggatttccccatctccagagggagcagatcagaggaggcgacacgggaggggtggatgaggtcacctgcccaggggggcatccgcctgccacaccccctggcccg

SEQ ID NO: 159746 - DNA, 122 bp, Homo sapiens
gacccctgcggtaacaagggcagaggcggctcctcttctatgcctgggttccacttggaacgggaaatgaggttcacagaggaaatccatttcgcacctgtccaaacctctccttgccgggc

SEQ ID NO: 159747 - DNA, 122 bp, Homo sapiens
ttgggtggggagagcactggaagggcccagaggcagcgcgaggacgtgcagcagctcacccgggtccttccctccatctgcttctccaggggcctgatggaggagttggtggggctgcgtga

SEQ ID NO: 159748 - DNA, 122 bp, Homo sapiens
tgactgtgccatccccactttcgcaagccggggcaggaccagctcccaggccgggagcctcggctgctgcctcgatctggctccctgcggtgacctgggagcccaggaacacctggccaaag

SEQ ID NO: 159749 - DNA, 122 bp, Homo sapiens
gcgcaagccgccctttatttcccagcccagctcccgccagacccagcggggaaaggtcaccgtaggcagccccctgcctgcgccctgggggtggtgataataacagctgtcaccgggggatg

SEQ ID NO: 159750 - DNA, 122 bp, Homo sapiens
ccccgcgggacgccggtgcccggtctcggtcccagcccagagccgctcgcgcctggacgccggccgccccgtcgaacctttgggtctccgagctccccgcccccgcccccaatcaggaccgg

SEQ ID NO: 159751 - DNA, 122 bp, Homo sapiens
ttattttccttttttgtgaagtctttgcttttataaagaccctgctttagtggtggctcgcggctggagtctcagctactcttcaggcagggcccgaagatcgctcgtgcccaggagttcga

SEQ ID NO: 159752 - DNA, 122 bp, Homo sapiens
gcctcgggctgggctcgggccccaggcgctgccccggctccctctctggttcctggcctccgtcctccgcagctgagccccgctcggctccaccccaggctctatcgcctgctctgtcgcct

SEQ ID NO: 159753 - DNA, 122 bp, Homo sapiens
gggaaggctcaagcctagattgctccaacagaagtcagaaacaagtgaccagaaggtgaacgttggcttgcagacaagatttcacatggaagttcttgttttcagcttctcttgaaaaatcc

SEQ ID NO: 159754 - DNA, 122 bp, Homo sapiens
gtactctaaataggaggataaggtatgaggcaaaacaaggctggagtcaaacaaaggcgccgttgcatcgcagattgcaacctgaagcggctcccggctccctggagagtaacccggagaga

SEQ ID NO: 159755 - DNA, 122 bp, Homo sapiens
tcactctttcttcactcagcccagtatctgatcacatctgtcactcagcggctggggaggcggggccttaggcattatccaatgagggacgctgggccggaaaccgtccaatcaggcacgca

SEQ ID NO: 159756 - DNA, 122 bp, Homo sapiens
tccacccacactgcacacactatcgcgctgcgcgccaggtagctggagtgtggtttgagacgtgctttaatgggtgtgtagctcacgcccaactgatggcacgtggtgggcttctgtagacg

SEQ ID NO: 159757 - DNA, 122 bp, Homo sapiens
cctttggaagtgaccggtctggttcctaagcaataaaattgaccgtggtgaaaatagtcccgtgttgctttttcttcctttcccttctcctgccacctttgaaatgctaactcaggggagcg

SEQ ID NO: 159758 - DNA, 122 bp, Homo sapiens
cctctgtcccagagatggtcaggcccagaggaaggttagtctcatgcctgctgttagaggcgcttcattgttctctttatccagggcaggaagtgtgagaccttgatgtagactcctggagg

SEQ ID NO: 159759 - DNA, 122 bp, Homo sapiens
aagcacggggagaggtttttcccccttctttgtggtgtcaccccccaaaaaaggcaaacccgagggagaaagagtaaagagtgcagcagtgtcctggtggttttgataaaagttctttttat

SEQ ID NO: 159760 - DNA, 122 bp, Homo sapiens
cagtttgggcaggaagccactttccctagaacagttcattgctgggatcctgtgaagaaccgctgtggagggcagcagctggacgagggcacaggacctcagagaacactgatgcgctccgc

SEQ ID NO: 159761 - DNA, 122 bp, Homo sapiens
cggaggagagaaagctccaggaacccgactctggcggcagcagccagagcgctgggatcccggacccagcgtccagaacttcattcaagcgcccagaccgccctccagaaaggggaagccca

SEQ ID NO: 159762 - DNA, 122 bp, Homo sapiens
ataatttttttatttctcttttgaactagttgtaacgtctcctgcgtttccgcattgattcgtgataaaatctttaacgtgtgttcattttttatgtgtatgagaggcatgattttatccac

SEQ ID NO: 159763 - DNA, 122 bp, Homo sapiens
cctcgattctcgtcccacagtgatttgcagggtgtaagcggcgaagaccctgcaatccagcgttgcttcgaacattgcaatgaaaacggttgagttgctgatgctccaaggactttaccagc

SEQ ID NO: 159764 - DNA, 122 bp, Homo sapiens
gagccccgcccaccccagggtcctccctctctacttccattcttggttccttcctacaatcgatgctaacacgccccgcctccaagatcacggaggccccgccccacggggctatgcaaatg

SEQ ID NO: 159765 - DNA, 122 bp, Homo sapiens
ggtgacttctgctttgtaaagctcagaatcagaacagggaggtctccagggtgctccttacgagctcagctgtcgttgggtcgtctccagaggcttctagcaggcgaggctgcaggcactga

SEQ ID NO: 159766 - DNA, 122 bp, Homo sapiens
atccctagctctggggtgagcgacatgcctccaaggagctgcagccaggagacagccaggcgaaggcggggctctgcctctgggctccccgaggggcggaggccggcgcgcgggtcacgtgg

SEQ ID NO: 159767 - DNA, 122 bp, Homo sapiens
tgccatggaaacttctactttgtgtaccttatcagatcacttttcacttggtccctactgcgctatggctccttgaggcagggactgtgagtcatatcactaacaattagcatggaacctgg

SEQ ID NO: 159768 - DNA, 122 bp, Homo sapiens
aggtccttgattggaactgcctcagagccaagggtccttttactcagtggcagcaacaaacgcagtctgttggctagtgatcctcctgtctcagggacacgtagtccagggagcagccaatt

SEQ ID NO: 159769 - DNA, 122 bp, Homo sapiens
ccgcctttagcgccgctccccaggctgcggccagtttggcgcttgccccgcgcgtgaccccgtgttttcccgacccgagtccctaaagctcctggtctggagcattcttgaacaggagttgg

SEQ ID NO: 159770 - DNA, 122 bp, Homo sapiens
cagaagtaggatgggaaacaagcaacagaatgtcctggtgaaagctccttctaggaaggacgccttccagagtattacttgtttcatgggcgttacctaaaactgggtataggacctggtgc

SEQ ID NO: 159771 - DNA, 122 bp, Homo sapiens
tcttcaggggagatcagtcctttctttaaggcatttatgcctagtgctccactattggaacgctaagcttgtgggatttatttatatcctactgctcaaggtcattgccaaggtctgatttt

SEQ ID NO: 159772 - DNA, 122 bp, Homo sapiens
aaatggctaagtcaatgccggtaggggtactcattcagaaacacccagtgccactctgtacgggccactaaattgggcactgcggatataaaggttcattcctcgcttactgtacccacagc

SEQ ID NO: 159773 - DNA, 122 bp, Homo sapiens
ggggtctcagattggcggggatgggcagcagcggcaggtggccttggcttttgctgcagccgtcaacgacctatcatcggggtcctgcgtaaggtccggctggctgggacttggctgtgggt

SEQ ID NO: 159774 - DNA, 122 bp, Homo sapiens
tgagaatccaattgctcggaatcggaaatccaggcgaatgagaaactgtcttgtttctctcgccacccctagctcccctgcacctttctccaaatggaacctcccagccaaagacttcaaaa

SEQ ID NO: 159775 - DNA, 122 bp, Homo sapiens
ccgtcacccccaagcaggacgacggcggctcggggctgcggccgctctcggtgcccttcccgttcttcggtgccgagcactccggactctacgtgagtaacccccgggctcgcggggcgccc

SEQ ID NO: 159776 - DNA, 122 bp, Homo sapiens
atatggatatgggggtcgtttgtataacttagctgtctgcagagcgctctgtagataccacgcacaatataaaaacgctgcaacaatggaaggaagaaaggtttgggttggaggggattggt

SEQ ID NO: 159777 - DNA, 122 bp, Homo sapiens
ggaggctgccccgtccgaatccttctcctccagggcaccgccgtccttggagggctcctccgcgtggtcttcctcatcgctgcacccctggggctgcaccatgtagacaccctcgggaggca

SEQ ID NO: 159778 - DNA, 122 bp, Homo sapiens
gtggcctctcagacaccatggcgggaagacgacagagccgtgaggagacacacaccaaaccggacacacaggcctcctgggcagcgggaaacctggagacaaggacctggtccagcagggct

SEQ ID NO: 159779 - DNA, 122 bp, Homo sapiens
gacccatgaccatgctcagaggcagccttgcagctgctgcccagtcctgtgggctgcagccgcgtctccctgagctgcctgtcaagccagtggtacatttcattccctccccattgactcac

SEQ ID NO: 159780 - DNA, 122 bp, Homo sapiens
ccacccacttccaaacagatgaattagactgacagggagcaaataggtagcaaggtttttcgtaatgatgcctgtggtagtgctttgacagcacaactcttctttggaaagggaacacaact

SEQ ID NO: 159781 - DNA, 122 bp, Homo sapiens
taaaaaaatacctccctaagtcccactggcttttcaacccactgcagtcttccccaatcacgtctccgtctcggtcttgaggaagtccaaagggatttggacaaatgcaacttcatggggta

SEQ ID NO: 159782 - DNA, 122 bp, Homo sapiens
aggaaccagcccctcgtggggagcgtgcacacggaaggggcggggaatgtgaaaaagtcacgttttcattggtggcctcttggtgttgagcccacctctgtcctcgccgcacgcttctcggg

SEQ ID NO: 159783 - DNA, 122 bp, Homo sapiens
aggaagggtcctgtccccctgccctctctggccgcctctgagctacgctaaggaggaagtcgtgcaacacaaggagctgagaggcagctgggagagcagctttattatcatggctggggata

SEQ ID NO: 159784 - DNA, 122 bp, Homo sapiens
ccccacgacgctggccaggacccggtgtgtgtccctgtagagggccaggagcccaggggccgcctccatgaggatgtgtgtgtatgccagcatgcctgtccccggctgcacatcctccctct

SEQ ID NO: 159785 - DNA, 122 bp, Homo sapiens
gcagcctgcaaaaaagcagtgctcccacttacttgaacatctcgctcctctctatggtggcgagccaaaagctgtaagcgtttgcgtagtaattgcaggtcccacggccgtgacactcgatg

SEQ ID NO: 159786 - DNA, 122 bp, Homo sapiens
actgcggtcagagggccgaggcctgggggcgagctggggtcgtgcagtacagcctctttccggcaaatcacgcgagatttcgttcacccgggctccacagggtcagtgacgcgcgagcggct

SEQ ID NO: 159787 - DNA, 122 bp, Homo sapiens
ccagcgccgggtctctcctcccgcaggcccgcggccacccgcagcggcattccccgccgccgcccccgccacctgcgcgaccgccctagccgctcgagtccgctcctcccgctcaggggcgg

SEQ ID NO: 159788 - DNA, 122 bp, Homo sapiens
aggcaaaggcaagttttcatacccaaagtcactccactgaacaatgtgctcatttaccctcgccaatttaaaattcaatgggttcttatcagttctgcctggtaaaccagaaaatgtagtta

SEQ ID NO: 159789 - DNA, 122 bp, Homo sapiens
gcaggacatgcaatggagagcgctccggatcggctcccacggtgccctgtccgccttttccgactccctgcccttcaacaggggctctgggagatcctggagccctcagttgacagaagagc

SEQ ID NO: 159790 - DNA, 122 bp, Homo sapiens
gcccagtgtcccagcgctcttcctctgacttgccgtttcccactgtctgcaattgtaactcgagtgctttgggctgccttgcggaactcagcttcatttgttaacctccctacggagctgag

SEQ ID NO: 159791 - DNA, 122 bp, Homo sapiens
ttgtatttcagcccaaagcctactggaagtgtcaagctgccagctcccctctgccctccccgttgctatggcagccatgtctctgtgtgtgaataggtgaaccaggctccaggttaggacct

SEQ ID NO: 159792 - DNA, 122 bp, Homo sapiens
ctccctcgctttccctgagcagagtcttcttacctaggtgatgagctcctacatccaaagcgagtttgcaagtgtctgcacctccaactcaatcttggacctcttccgaaccccggccatcc

SEQ ID NO: 159793 - DNA, 122 bp, Homo sapiens
tgcatcctcccccaaaaggggctttgcctgtcattctgcagttctagtgtggggtctgggcgcagttcttttccctctccagcctcggagtcttcctctgtggactgcgcagataggactgg

SEQ ID NO: 159794 - DNA, 122 bp, Homo sapiens
taacctgggctatagcagtcgcctgagcagccaatgcctcaactccagtcaaaggaagcacgtcctcacgggtgaactaggctgcgtttgggagagaaagtatttgcaggcgcatggctgcg

SEQ ID NO: 159795 - DNA, 122 bp, Homo sapiens
aaccagagacagaccacttcacccacaaatctttattgtgcccccaagcccacacctatacgagggccaggggaaggtaaggggtttggtgctttaaactatccttggaagagggctcacga

SEQ ID NO: 159796 - DNA, 122 bp, Homo sapiens
tctccaatacgcgcttgccagtcctttaagctgattgaaccacggtttgtgcccagcgcccggtggctacccaataaacgttggcccgtgctcctctcgccaaactcagccaccacatgggt

SEQ ID NO: 159797 - DNA, 122 bp, Homo sapiens
aaactcggagatgccagcaaccgcggagccccaagggggtgttacagggacaaatgttcccgccgctcgcagctcggtgaacgggagcgttaaaactcgttcttccctccattccctcctgc

SEQ ID NO: 159798 - DNA, 122 bp, Homo sapiens
gatgacgtgtcggaaactccatctcccattgggggaaacaaggaggcggggaggggggggcggggctgcccgcccgggagctaaaaatacacctcgctgctaccgcgctgttgggcgccggc

SEQ ID NO: 159799 - DNA, 122 bp, Homo sapiens
ccggccgtgaaagaccctcctgttccctgccctggagggaggagggggcttaacccccaccggggcttcccggattctcctagacctctgcccgctgaaaagcagcgggagcccgtagactg

SEQ ID NO: 159800 - DNA, 122 bp, Homo sapiens
gccggccgtgggcagttcggggcaggaccggagcggcgggtctcggcgggagtaggactgcgggcctcaggcttggcagccagggacgccagagccggggccgaagaccctaaaccaggggt

SEQ ID NO: 159801 - DNA, 122 bp, Homo sapiens
gggcggaagggggcaggatccgggggtggggtgaggtaggaccggcggtgaggccggcaccgccccaggaccctgtccgcaggagcagcacagcaggcagctgcagggcagtgggaggagct

SEQ ID NO: 159802 - DNA, 122 bp, Homo sapiens
gacaacccgggcgtcccgggcgaaggtctcgatctgccggagccactgcctttcaggcatcgctccattaaagccagggaggagagggtcattggccagcgacccgccctccttacgtccgg

SEQ ID NO: 159803 - DNA, 122 bp, Homo sapiens
gcctggcagcgaacaaggaaggtgggaggagtgaagtcagctggtggggtcctgggtttccgcttttcggttgcccttattgttctaatatccgcgtgagcacaggggagaagggtgtgggc

SEQ ID NO: 159804 - DNA, 122 bp, Homo sapiens
gaagattgcagcagctggggaatttgctcttgaaaaacttcgctgaagaatttagtacaacggtgaagcaatgttttggttttgtcactgttcaaaatttggcaggacttagaggctggaat

SEQ ID NO: 159805 - DNA, 122 bp, Homo sapiens
aacatatggggcctaccccagcagcagcaagatgaaagtcagctgatgggcaggataaagcgtgtgcatgacaggatagagttctcccattttgccaagtttctccaatgatgcttcactct

SEQ ID NO: 159806 - DNA, 122 bp, Homo sapiens
gttggaaccaggttcctcccaactacctgggaggttcctgaggtcagaggatgtgtccctcgctagacatagcttgcatatccccacactggattcaaggcttggagtctccaaggcaccca

SEQ ID NO: 159807 - DNA, 122 bp, Homo sapiens
ccttggtcccgcagagccttggtacttggacctgaaccttgctccgagagggagtcctcgcggacgtcagccaaggtgagacggcgagccctcagctctccgcccgggctttcccaaaggcg

SEQ ID NO: 159808 - DNA, 122 bp, Homo sapiens
ggctggcctctggctggttgagcacctgaggtgaggttgctccctgtttccgtgtgactacgtgttctctccttctcctccagcgtcagacgtgaggacacggccttttggaaaatgtgtct

SEQ ID NO: 159809 - DNA, 122 bp, Homo sapiens
gctcccctgcattctgctcttcaaagacacatgcagaaccttcagggtgttgaaaggggccgcaaagatcacagctctcagcgggggcgcggtcagtcggccacagcggtggagatggcgtt

SEQ ID NO: 159810 - DNA, 122 bp, Homo sapiens
tgcaacctccgcttcccgggttcaagcaattttccttcctcagctgggattagaggcacccgccaccatgcccagctaatttttttgttttttgttttttttttgagacagagtttcgcttt

SEQ ID NO: 159811 - DNA, 122 bp, Homo sapiens
taaggaagaggcacatgagagtaacaactagtgtgaagttaaaaaggacaaaaagatgaacgtgatatgaatgaaatctgagctttatcttaggagcacaacaaacttactgcgtagcccac

SEQ ID NO: 159812 - DNA, 122 bp, Homo sapiens
cggggtttgggggagtctggagtcgggagtgaggagttgaggaaggagcgctcgagtttccgagggacattggaacgcgcagctgtccatcacgcgctcatctgcatattcgggggcccgcc

SEQ ID NO: 159813 - DNA, 122 bp, Homo sapiens
gggtccgtttcagcaggaagacgggcacgcaccgagaggatggcagtgcccagaagaactcgagtcgggggcacggtggggagaaggggccgatcccctgctggcgaccgggcagagccacc

SEQ ID NO: 159814 - DNA, 122 bp, Homo sapiens
ctccgggctccccacgaccggggggacggaggaaaggaggaaggaaggaaagagagccgccgccattagcaaagcagccctgcccggctgggcccgcctgccagaccagcccggcccagccg

SEQ ID NO: 159815 - DNA, 122 bp, Homo sapiens
ctcgcgaggggccgcggggactcggcggcgccgggatcgtgggaggagacgggagggtcccgacgcccgccaccggtcacatcctcggccccaaaccccggcctggctcctaaggacctggg

SEQ ID NO: 159816 - DNA, 122 bp, Homo sapiens
agcaggggtcccggagcgcactcctggggctcagctcagcttcacttaccagggtctgctcgtactgcagcgcccgtggctccatcccttcctccgccgccgcggccgccatctccgcgcac

SEQ ID NO: 159817 - DNA, 122 bp, Homo sapiens
ccaaagacatcctgggaggtgagagatggagagagaaacagaggcttaaagatttggagtcgagacgcgtctctctaccaagaaggaagaagacggctctcactgcccccagctctaactcc

SEQ ID NO: 159818 - DNA, 122 bp, Homo sapiens
attcccatacagccgggactccgagagcagccgtgggcgacctgggggccggggactcggcggatccggcccattcatcaaaggaaggcactgggacaaagttggccccctccccttctccc

SEQ ID NO: 159819 - DNA, 122 bp, Homo sapiens
aaggctctgtgtccctgtgggtggccttgtatatttaccttgctcttttctcactatggccgtaaaatcaggcaaagggactttttagattagagaggcctaaatttgtcctgactccaaaa

SEQ ID NO: 159820 - DNA, 122 bp, Homo sapiens
gtggtcgatgggactgggcgctgtggagcaggcggtggcgcttgtcggggaggctctggccgcacaggagcccatggagtgggtgggaggctcaggcatggcgggctgcaggtcccgagccc

SEQ ID NO: 159821 - DNA, 122 bp, Homo sapiens
ttcacaaacaaaacccggatgtgacttggaaacggaaaaaaaaaaaggagcgggggtgcgcggagaacacaaagtaaaacttctgctgttcccagtcctgcagccccagcccagccgtcccc

SEQ ID NO: 159822 - DNA, 122 bp, Homo sapiens
tcttacttcatggttcatgatcttcccataggtctccacgagtgactccgcataaaacggcgtttctccatagagcatctcatacatgcagacacccagagaccaccagtcacactcaggcc

SEQ ID NO: 159823 - DNA, 122 bp, Homo sapiens
agccgtcgtagccatgggctgtgcatcatccctacacgcccgcgcctgaagatttatgcgcgctttctgacgaacagcctttgcagttgggctttgttgtggctggatgactctgagccctt

SEQ ID NO: 159824 - DNA, 122 bp, Homo sapiens
tgcgcatgtcgtggaacctactctccacgagtttttattgttgttgcttttgtaccccctcgggatccctagcggaggcagtgactctctttccccccaagacgttgttccctgtttgaagg

SEQ ID NO: 159825 - DNA, 122 bp, Homo sapiens
aagcatgagggttccatcgagcatggcagaagatatgtcaccttttatcacctagtgtcacgagttacacagcagcccttctaccatactctaatcattgaaacattcactcagattcaagg

SEQ ID NO: 159826 - DNA, 122 bp, Homo sapiens
gtgaaaacgtgctggggagtccgggcatggctcccccacaagaggccccgtgaatgtcaccggcctcgccggttctgcatcctaccttgtgtgacctcagggcgctgcactcaccccgctga

SEQ ID NO: 159827 - DNA, 122 bp, Homo sapiens
cttctctttcacaaacaatggaagcaacaagccattcaattctgagaccctcatggggcacgtacttcaggatgtctgttgaatatgatacacccgcgttttgtattttagcaacatttact

SEQ ID NO: 159828 - DNA, 122 bp, Homo sapiens
caaagcaactgtggcagcaagtgaaggaaaattcatggaccctgagttggttgtagtagacggagactctggaacccttcctgagcttcattctgactagagagtttagataaattcaatga

SEQ ID NO: 159829 - DNA, 122 bp, Homo sapiens
aggcgtgagccaccgcgctcggccgatcccgacacttttttaaaatgccgaagccggaatcgacacagcactttcaaaggttcctccatagctcccctgagatccggccagcgggaaacccc

SEQ ID NO: 159830 - DNA, 122 bp, Homo sapiens
agtgtgggatgaggcgtgctcccccacaacctccagaacagcggctgcgcctccaggcctcgggccccttcacgctggtgcggacggacgaagcccaaagcctctgctcctgggttctctct

SEQ ID NO: 159831 - DNA, 122 bp, Homo sapiens
aactgccatttactgtgacaggcaaggcttgagtgctggagcatggggaaaggacttcagcggatggcagagtataggtgggtagaacaacattctactctattttggacacagtgaatttg

SEQ ID NO: 159832 - DNA, 122 bp, Homo sapiens
ctttccagtttgtctcggtcctttggaacgtggcaaacgtggaagccgagagggctctcgcgagcgttggcagaccccgctccatagggatgggacagggcgcggtgcggaataggtggaca

SEQ ID NO: 159833 - DNA, 122 bp, Homo sapiens
aggattcctcgttggtgatgtcatacatgaggatgaagcccatagcgccccggtagtatgcggtggtgatggtccggtaccgctcttgccctgctgtgtcctagggaggaagagatgaaggt

SEQ ID NO: 159834 - DNA, 122 bp, Homo sapiens
ttccacatggcaacagaatgaaatgctcaaaaggcaaattggattctgccacaaacttaccgtttcagaggatcccaggagacacctgttggcctggcaagcccccaacatttgaaaagaaa

SEQ ID NO: 159835 - DNA, 122 bp, Homo sapiens
tgaagtggaagagggtgtgtctccgagccagcccagcatggacgggattttagacgccatcgcgaaggagggctgcagcggtttgctggaggaggtcttcctggacctggaggtgggcctgg

SEQ ID NO: 159836 - DNA, 122 bp, Homo sapiens
ctcccctcccctgctctccccagctcccttgatactgcggctacacccacctgctggtggcgatagagttaaaggccctgggctatgcagtcccagcctttagtaacaagtgcttggttctg

SEQ ID NO: 159837 - DNA, 122 bp, Homo sapiens
gtctactcttccttccctgctccttccctcttttcattccttcttttgcctcatgtgccacgaggacctttctgtagccccgtgtcagtggattttctccacatcctaaacatagacaattg

SEQ ID NO: 159838 - DNA, 122 bp, Homo sapiens
gcctggggactgcagtctctctcctgacccagctggttgcttttttcagtaagatcccagcgcctgtgtaacccactgagaaaggccttccctacccagcaccaatcagcctcccagcccag

SEQ ID NO: 159839 - DNA, 122 bp, Homo sapiens
tgtccccccaggagctggctgtggaggccatgaagaggcagtaccatgtccagttcttcacgtgccgtacctgccgccgccagctggctgggcagagcttctatcagaaggatatgcgaccc

SEQ ID NO: 159840 - DNA, 122 bp, Homo sapiens
cagcgcggaaggccgggctacctgcgcgcctggcagcgcctggcagccggctgggtggggcgcaggggagcgcagcatcctccccggctcgctagctccctttgttcatctcgctcaaccag

SEQ ID NO: 159841 - DNA, 122 bp, Homo sapiens
aataaaaaggagataaagaaacacatcccagcaatttgtttaggctttacttctgtccagcgttgattagaaaatgcatggtaccactgtctttctctgagtggctgacaattgagtaaata

SEQ ID NO: 159842 - DNA, 122 bp, Homo sapiens
atgctggaggctggagccacggcggcttgcctcgctgcggttggtggtgacatcggagaccgcagctacggtaatacaaagccgtgtcctcggctctgaggctgttcgtttgcagatacagt

SEQ ID NO: 159843 - DNA, 122 bp, Homo sapiens
ggaggaggctccgtgcggagcggacgttttgggattagagcgcgcgacccgccctcctcacgccgcccgagccccccaagctcacacctcaaacctgctcttggtcactccgttcacgtccc

SEQ ID NO: 159844 - DNA, 122 bp, Homo sapiens
tcatcaccctggccccggctggaagcagagcgtgtgtgcgagcgcgtgtatgcgtgcccgcgtgtcacactcctgctcgccgtgcacctggagagcctttgtagctcatccgacaatggagc

SEQ ID NO: 159845 - DNA, 122 bp, Homo sapiens
acacattataaagcaaccacagtgctggcaggggatagacacagatccaagccgagcccccggtggatggagatgtagcctgtgaaggggcaatgttactagatggtgggaaaagatagatt

SEQ ID NO: 159846 - DNA, 122 bp, Homo sapiens
gggcggtggagcctggcggtgccgtgtccctccctgcaggagctcaaggagtcttgcatccggaaccaggactgcgagactggctgctgccaacgtgctccagacaattgcgagtcgcactg

SEQ ID NO: 159847 - DNA, 122 bp, Homo sapiens
gtttgggactggcattatcaacaagcagttcagagagttgtggtgtgattccacatgtgccgaggagtaccatgcttggactgactacataaagatttaagtgaaagaaaatataaagtgaa

SEQ ID NO: 159848 - DNA, 122 bp, Homo sapiens
agggcatggcagagcccggggtcacacgcgtgggaacacgccgtgggtgcgctccgccgccggctgccatgtgcgtgactatgtgcgtgactacatacaaggtaacctctatatgaccattt

SEQ ID NO: 159849 - DNA, 122 bp, Homo sapiens
cactgaatttaccacttttcccaagatagttgtgcctctttttgcttctctgcttttgtacgccactgttcccaccttctgcctataatgtttctctctcccatcctctcctgacaactctt

SEQ ID NO: 159850 - DNA, 122 bp, Homo sapiens
acagtgcgctgcacccactgtcctgcgcccactgtctggcactccctagtgagatgaacccggtaccccaaatggaaatgcagaaatcacacgttttctgcgtcgctcacactgggagctgt

SEQ ID NO: 159851 - DNA, 122 bp, Homo sapiens
ccatgtggcctcggagtgggaccctgcgggtcatcaatctgtacattgcctgagagcagccgtgtatgctctggaagggacaagaccaggtacctgtcgggggatgcggccgtggtaccagg

SEQ ID NO: 159852 - DNA, 122 bp, Homo sapiens
aatcatattgttagcataaattatctggtcaaacgtgcagcaggacctacttatggttttcgacataaaaatcttaccaggcaagataccccaagaggttgttttcctgaagttggccctaa

SEQ ID NO: 159853 - DNA, 122 bp, Homo sapiens
ccaccgtgtgccagctcctttgcacacacagtctcacttatgcattacaacagggggggtcgggggtccccatcaccatgttacagattaggaaactgagggtcacagaggcccaggtctca

SEQ ID NO: 159854 - DNA, 122 bp, Homo sapiens
agttgtgccatctttttgggaacttatgtgtaatgaactggtggactttgtctactctcccggaggaaggtaatcataataattgaataaaacaccattaattggttttgtatgtagagaag

SEQ ID NO: 159855 - DNA, 122 bp, Homo sapiens
gggaggaggcgggatcaggggtgcggccgggcccagatgtggggccaccacccaggaggccggcctcaccttgatgaggacgttgtcgtagctggtgggattcatgacgtcatagcagatga

SEQ ID NO: 159856 - DNA, 122 bp, Homo sapiens
gggagctgttcgccttccagagctcatagtaggaggggcagcaaaggtgtgttcccccaccgccaccacccgtggctctgctgtggaggcagtgggcggccggcgggcagcctgggtcacag

SEQ ID NO: 159857 - DNA, 122 bp, Homo sapiens
agtttgaggcctgcccgattacccgcaagacttgggcagccccgggcgccgctccgaccacgacagggaaaggtaaagcgaactgtcctccttggggctagccaggctcccctgcgaggggg

SEQ ID NO: 159858 - DNA, 122 bp, Homo sapiens
tgtgagccaccgcacctggcctttctgttttctttacttgagttcctgtttattggctgtcggctccaggagagcagggagacggtgtctgatgtatccccagcagcctcacacacccagaa

SEQ ID NO: 159859 - DNA, 122 bp, Homo sapiens
gcattctcacccacgtcatcatcagaggcactgatgaccactatggtgctacccattggccgatcttcattcacactcactgagtagtgggcactttgaaagaccggccgatgagtgttggc

SEQ ID NO: 159860 - DNA, 122 bp, Homo sapiens
gcggacaccctgccggatccagaggggtggaagtcagcggcggtatgcgacggcggcaaacggcagtggtggacttcgagcaaaagctcagctcgaaccataacaaacacggaccagaagag

SEQ ID NO: 159861 - DNA, 122 bp, Homo sapiens
tgtatgtctgtacttcagtccatctctctctctctctctctgcatacagagggaacaacacggtatactgctcctagttctgccccctgggaggattcactattattcagtgccacccccaa

SEQ ID NO: 159862 - DNA, 122 bp, Homo sapiens
ccctccctcactcaaagatactgggccctgttccgaagggtccttcccattgccacggtgcgtattcaaaaagtctgtcaaaaatcaatgacacttgggccaggcacagtggctcatgcctg

SEQ ID NO: 159863 - DNA, 122 bp, Homo sapiens
cccacacattaagacacttcagtcagaagatctgaaagtttggcccttccaaaaactgagcgccgtgcctttaaaccactcaagtttcctaagcattagtttctttctctgtaaaagaaggc

SEQ ID NO: 159864 - DNA, 122 bp, Homo sapiens
caccccgcccgggagtccctttccgggacccgccacactatcgtgtccttttgcgcccgacggccccagagcccatctaagatgggggaaacagaggcccggagagattcttgccggaggaa

SEQ ID NO: 159865 - DNA, 122 bp, Homo sapiens
ggctgtgcagcccagactggagagcgcagggccgccaggcctctgggatctggggcaggccgggcccggtgcgctttggttcccaagtggtcctgggaactctgatggcgattgttttattt

SEQ ID NO: 159866 - DNA, 122 bp, Homo sapiens
atgctttgcaaggaaagctgcagaactcattttcatactgtaacctgatgccatgtcacccgtgacccgttcagtaggagagaatagactgtcgcttgctgtctttcgtttcaggtaaatcc

SEQ ID NO: 159867 - DNA, 122 bp, Homo sapiens
agcaggcgtcctgggccggggcaggcgattggtactaaaatggtaatttttatgttatgacggtttggaaaaaactgtcataaaaattcactctcttggttgagtcagtaatacgagggaca

SEQ ID NO: 159868 - DNA, 122 bp, Homo sapiens
ttgttaatgttcttcaccgggttttatcttactccaccgaggccactgatctttaatcatcgcattagtgtcagctgtcaaacctaagagcattatgaactaggttcttggaaaatgcaatg

SEQ ID NO: 159869 - DNA, 122 bp, Homo sapiens
gtcgatcaacttcccacaaactgaggaatgaattccacgagcctgttctgaaaatgtggacgtaagacaaacacgtgctcgtcctttaatggagttcaccagcacacttgttaaccagtcct

SEQ ID NO: 159870 - DNA, 122 bp, Homo sapiens
gctacacaatgcacatttgcaagacagtggtcaaagaaattagccaggatcctttcatctcgatccctggagttggtggaatgcaatggaagacagaggactggatctgactatggttctga

SEQ ID NO: 159871 - DNA, 122 bp, Homo sapiens
acctcatgatccgcccacctcagccttccaaagtgctgggattacaggcgtgagccaatgcgccccgcctttttatcaaatacttttaagaagtaaaaaagaatgagggctgagcaagacga

SEQ ID NO: 159872 - DNA, 122 bp, Homo sapiens
gatcccgagcggcgcctgccgcgtgtagccttctgaagtccggtggatcgaggcgaggaacggtgaacgtcctctcgtttcagctggcttttcccgagctggccccctggggagttgccagt

SEQ ID NO: 159873 - DNA, 122 bp, Homo sapiens
ttcctgggcatcgtggctgaggtgctggtgctggtcaccatcatcttcatctacgagaagcgccggaagcccgaggacgtcctggatggtgagccgtctgccctcctgcccacatgccctgc

SEQ ID NO: 159874 - DNA, 122 bp, Homo sapiens
aaaagacaggcaagcaggcagtcaggcaggcagacagacacacgacacacgtgtggaaaccgcttatcaaaacctctgccaatagtggtgccgggaagagaagaaagctacctgagcagcag

SEQ ID NO: 159875 - DNA, 122 bp, Homo sapiens
gggatgtgaggctgggcccagggatgtgaggatggtgtccacgttgcacactttcttgctcgcccatgcatcgccccagctgtgtcagtcagtgaggcctccagagcgtgaggctgctatcc

SEQ ID NO: 159876 - DNA, 122 bp, Homo sapiens
aaaaagctatctagttttgccactataactgaaggaatatggtggacaagagaagagaaacgaggtgttggtgatacatgagaaaagcaacagaggatgtcactatgcctatggaattaatg

SEQ ID NO: 159877 - DNA, 122 bp, Homo sapiens
tcggcgcggcgggcagggaggagttaactacagcggcgcctctccgctctcggctgcttgcgttccgcacacactgatcccgctcacgctttgcctctggttaaaactcaaccatcctttcc

SEQ ID NO: 159878 - DNA, 122 bp, Homo sapiens
caacctgagcaaagagcgctggaaacctattcccccctccccctacacccccccgccccccgctccactacgggaccctcggctcgaattcttttagtgcaggaccaccttaggactcagcc

SEQ ID NO: 159879 - DNA, 122 bp, Homo sapiens
aaataatatgatattattgttcacatgcccatctaggctctttgtcccagaaagaggatgcgaaggggtgatataaaatccaccttggagccatctcagggctggttgttcttgattcctct

SEQ ID NO: 159880 - DNA, 122 bp, Homo sapiens
gggaaaagggaccacaaagagggcaggaaggcctcatgccctgaaggaaccctgagcacccggtgccactcctaggactggaagctgaccctgatcaccagggtgggactggcgctgtcact

SEQ ID NO: 159881 - DNA, 122 bp, Homo sapiens
tactgggtcactcaagtctttgaccccaaatgaatttcaatgatttgacaagtgataatacgctattttcataaataaactgctaatatccagtatttgtcaaaaggaggcaactgttgtct

SEQ ID NO: 159882 - DNA, 122 bp, Homo sapiens
ctgcgttcttgtgcttcttaagctttggatgaggaagaagaatctcccactcagcgattacgaaagtgaaggaatcaagtctggcctatcatcttcagacggctgtacacattgctatattt

SEQ ID NO: 159883 - DNA, 122 bp, Homo sapiens
ctgtgatacacacagtatgtgtgtatgtgtgtatacacatgactattttgtgagatttcgcgtactagttcattagtggcgccctggaatcacagatccttcctgctgcggtgatagcatgt

SEQ ID NO: 159884 - DNA, 122 bp, Homo sapiens
acaatggcggctgcgtcggcctgagcagggcttagtttagaagtaatttcctgacgttgccgagggagccgcagtcgcctcagatccggtcggcggcggcggcggtggcggcggcggcagcg

SEQ ID NO: 159885 - DNA, 122 bp, Homo sapiens
tcaaactgtgggggcactttctgctctctggtgaaagtgccgccatcttttgagtgttaccgcttgagaagactcaacctgcggagaagataccattttgattgggtgagggggcgggtagc

SEQ ID NO: 159886 - DNA, 122 bp, Homo sapiens
tttgttttttgagacggagtcttgctctgtggcccaggctggagtgcaatggcacgatctcggctcactgccattgcagtgaatccgcctcccaggttcaagcgattctcctgcctcacctt

SEQ ID NO: 159887 - DNA, 122 bp, Homo sapiens
tctaacctaaatccagtttcccaaggagaacactggggcacaaagaagtgagaggtaactcgcccaaagttatatagctagtcagggacttcctcttcggagacaaaggaaatcagaatagt

SEQ ID NO: 159888 - DNA, 122 bp, Homo sapiens
gcagttacaagttaccactattcgcagggccaggtacctggcgctcgctgttgctgtctgcggtggctgccctgccatgacctcttgctaccaaaggctctgccattttaaagttgcctact

SEQ ID NO: 159889 - DNA, 122 bp, Homo sapiens
gcagcccaggagttcaaggctgcagtgagctatgattgtaccactgcactccagcctgagcgacagagctagactctgtctctaaaaaaagaaaatttaaaaaggaggcttggctgggtgca

SEQ ID NO: 159890 - DNA, 122 bp, Homo sapiens
ggcctactgtgggatgggactcaggcgaccagacgtgctctccgtcgcctccatcccggccgctgactccgctgtgtccccttggatccatcaccacctccaggcagccctccagcgggttc

SEQ ID NO: 159891 - DNA, 122 bp, Homo sapiens
ataccaactgtaccagattgttttgaggatttaaggagatgactacgatgcacagtgtgacgcatgatgttgctgtcatcaccccaggttccagcggcttgtttagaggctgtttcactcat

SEQ ID NO: 159892 - DNA, 122 bp, Homo sapiens
tgggtctgtgaagaactgcctcaaaaattggcacattatgagaggctataaatctgccaccgacacccaccctcccagagtgagaagtgtcttgactgttaactctctggcacttctagttt

SEQ ID NO: 159893 - DNA, 122 bp, Homo sapiens
cctgtcctgagccccccggcaagggctctgccgtgcccacgcctgccctgcctgccctgccggcccctgctgcctgtggctgtgccttaagtttgttgcacacatacaagtgctcacttttc

SEQ ID NO: 159894 - DNA, 122 bp, Homo sapiens
agcgtttgacgacacgcgtgtggacagcagtctccagagcacgtgggcctggcaggcacacggtgccccactctgtggtcaacccacacaccctgaaccggcatacttctgtctccgaaggg

SEQ ID NO: 159895 - DNA, 122 bp, Homo sapiens
ctgcaggactggcattgcactagtctgaggtggccactgcctttgatcaacctttgtgtgcgagggtctaagtagggtcgaacacagaagtgggaaggagaggggtgggccaggggctaatg

SEQ ID NO: 159896 - DNA, 122 bp, Homo sapiens
ccagagaaagtctcggactggccccacggctctcgggaaggcagggccatcggaagttatcggggcccaaagacttcctggctcgccagccccttccttccggagcctgacccgggcccggg

SEQ ID NO: 159897 - DNA, 122 bp, Homo sapiens
acccatctagtggtacctttctttgagccatctgagagacaactaatggtcacatttgttcggcactttccagtctaaaagcacttcaatgcactttctcctactcagtcttcaccccattt

SEQ ID NO: 159898 - DNA, 122 bp, Homo sapiens
ttcctgctctgccctcgagggcaccggatccccaccctcgggttaacagatccgccctcccggctgtccagcaacagagctcccggcgctccgcacccaatcacagcccggtcccgcctgca

SEQ ID NO: 159899 - DNA, 122 bp, Homo sapiens
aggcgccacggttccggaccagacctacccctcctctattctccccgccctttctcacctcggtccaaactcctcggtctgccctgtctgagaagaggagaagacaatgccgtcgggagtga

SEQ ID NO: 159900 - DNA, 122 bp, Homo sapiens
atatgttttgttgtattatatccttttttccaccctaaaaaattaaacttggagaagtttcgaggcataggtaagcttggggtcatgaattctaaatgtaattctaagtgttcaaaaatgtt

SEQ ID NO: 159901 - DNA, 122 bp, Homo sapiens
ataaatccagggggcctatgtcaacagctccatcctcctgacacaaactatacctgcattcgttctctctgggtttgggaatctaggatatgagccaacatatatgcttgtctgaaggggcc

SEQ ID NO: 159902 - DNA, 122 bp, Homo sapiens
tggggggtgggggggtgtctcagtctccccgtctgtaaaatgggattagtggattaaatccgggaaggttggacaagcacctaggacggtgcctggtgccgtgttcagcagacgtcgattcc

SEQ ID NO: 159903 - DNA, 122 bp, Homo sapiens
agggctttctgtatccctaggtttcttgccttgatgtactggagcaatcagatcacacggcggcttggagagtgagtgcaaggttttatgagtggaattagccctcagcagatgggggagcc

SEQ ID NO: 159904 - DNA, 122 bp, Homo sapiens
tgaagtcatggagtccttgcttgccttaaaataggtgcgatttgattcattcatcctccccggaagcaagatgccctgtggcttcggacacttccaggtcatgcctgctgtcttggcataaa

SEQ ID NO: 159905 - DNA, 122 bp, Homo sapiens
aaagggaaaggcaggtggggccagaccctattggccatctgaccagccttcccaagcccacgtgagcagatctagggtctcaagattacagaaggcctggggtgagggagcaagagttggaa

SEQ ID NO: 159906 - DNA, 122 bp, Homo sapiens
ttcctctggacttggaattaagagtcaccgggtctccactgttatctaaccaaagcaatacgacacaaccattcaggggactccacagggatatcactaagatttgatatattcgaaagatg

SEQ ID NO: 159907 - DNA, 122 bp, Homo sapiens
ataattttttaaaaactaagctttcatccatataattaaagaggctaattgaggaaccaacgttgtatcttggttctgtcttaacacattggtgcactgcagtgaatctctcctccgccagc

SEQ ID NO: 159908 - DNA, 122 bp, Homo sapiens
cccacagtaggtgttcaatggatgcttattaaattaaatcaccttgatttggatctctcacgctgactggaagaaagggtctgtcgcatcctcagtcccccaagatctggccttcgcacagg

SEQ ID NO: 159909 - DNA, 122 bp, Homo sapiens
cttctaagacacaggcagtatctatgcatctttgccttttaaattatctagaaacaattacgtttcttggtccttgtatcccaatgggtttgggtttttttgtttttttttagaagaaacag

SEQ ID NO: 159910 - DNA, 122 bp, Homo sapiens
gcccaggcagtacaaactccagcaagggccagggcccagcatcaggcagaggctggatcacggggcctacacggcgccaggccactcactctgctgggaagaccgggacctgcgtgtctgga

SEQ ID NO: 159911 - DNA, 122 bp, Homo sapiens
ctcaacatgctgagaagtggccggggctgggatgcgggccgcggcttcaccgtgcaactgcggcccattgctacgtgcctcgtgtgctctgccatggagcccaaatgtggcaaagtacggcc

SEQ ID NO: 159912 - DNA, 122 bp, Homo sapiens
tcttttatcagtctcttttacagctctagggatgtaccatgatccatgtgttttcaacaccgtatttgcgctgaccttatataatatgccaacgaatgaaggtttcacaatgaaggatcaaa

SEQ ID NO: 159913 - DNA, 122 bp, Homo sapiens
gaggaattatatagacgttgcatgacaaatgaagaccagtttatacattatagttatccccgaaagagtatgggctgcctcgggtggatttcatttctctgttagtgaattctaaattgatt

SEQ ID NO: 159914 - DNA, 122 bp, Homo sapiens
aagtaccctgctgcaaaacaactttgggttcaagcgacaaattttctttcacctctttgacgtcagccatatcgtttttttaaattccaatgtctctataagcatagctggaaactaataga

SEQ ID NO: 159915 - DNA, 122 bp, Homo sapiens
tggcagatctggcccagcatggccctagggggaccgagccccagggacccttcctaaggccgctgtctgtcccagctctgtgaggtgggcacagatggtctgctggccacatcgctggacgc

SEQ ID NO: 159916 - DNA, 122 bp, Homo sapiens
ccgagatgaccttggaccagagctcccttccggcctgcagagatgagcttggggcttagccgagtaaggagtgagcggcttttcagcctcagtgctgcggcagaggcggatggaggatgaac

SEQ ID NO: 159917 - DNA, 122 bp, Homo sapiens
agggtcccacgagccctgcccccacctgctgtggcagttgcagggatgcttgaaggcagtcgtccctctaatagtagagttcctggtcccaccagcctgggagagagagggagaaaggagac

SEQ ID NO: 159918 - DNA, 122 bp, Homo sapiens
cctgaacttctcttgcctacagcatctttgccctttctttctgcaggtagccctggcaggcgggcctcttgctttctgtctccacgctggttcttctacctgctctctgggccacttggtat

SEQ ID NO: 159919 - DNA, 122 bp, Homo sapiens
tctaattacgcctgatccggtatccagggaaacagctgcatcttaatcctcagggcaggacgttagtttgtcttttatctgtccacaatcggcaccggggccacgtggagccaaattgtgtt

SEQ ID NO: 159920 - DNA, 122 bp, Homo sapiens
cagggttgttgagttaggtgatttcagggctagctcgtcagccacagcgagcagggaggccgaatcagaccctctgcactgggcctgcttcgacacctggcaaaaaaaggaacttggactca

SEQ ID NO: 159921 - DNA, 122 bp, Homo sapiens
taaaaacccatctgaagtgaactttctcggtgcagtccagcagcagcacagcagtgcagccgcggctgcccagcagggcggctacgagatccccgcgcggctgcggacgctccacaacctgg

SEQ ID NO: 159922 - DNA, 122 bp, Homo sapiens
ggcttgtaataattatagatttcctctgcgatttgatcccattggttgcctcggcaacggcgtaatagctcaaccgaagcgctgtcacggtgatttagaaccagtgtgtctctcctgcagcc

SEQ ID NO: 159923 - DNA, 122 bp, Homo sapiens
tgaaatagaataggcctcctctgaacccttctggtaagcagcttaatcttgaaaaatgctcgtgatgtgacatgcggagctccaggaacttcagccgactccacggggccgcgttgccatgg

SEQ ID NO: 159924 - DNA, 122 bp, Homo sapiens
ggaggggcgccgtacgggaggttggcttgtcagcagcatagatggggtcactaaggccggcggttgggtgaccctcagcgctgggcccgaggtcgcgctagagacggaggccggggccgagg

SEQ ID NO: 159925 - DNA, 122 bp, Homo sapiens
ccccaatacccccacactcactgggacacctttctctcctgctgctccagggggaccctgcgggcctgggcgccctggcggaccaatgggtccccctgatcctgctgcacctcgttccccag

SEQ ID NO: 159926 - DNA, 122 bp, Homo sapiens
gaccaatccttaatgcatcgtgaaagactggaacacctgggtggcatatgcaagcatcatcggaattgatctcaggatcgaagcgctgaccgcagccccggttgtagcacagcaaggccatt

SEQ ID NO: 159927 - DNA, 122 bp, Homo sapiens
ccctcaagggctcagaccggagaacataaccgagtttggagccctctggcactgtctttgcgcctgacctctgctctccagggggtgacgtgagctggtgggtgctgagtcatcatgggtgg

SEQ ID NO: 159928 - DNA, 122 bp, Homo sapiens
ctagctggagatcccccaggagaacacaaacatgataattcaccagacgcctctgacacgcgccagctcggcactgtcccccatgttatttgagtccataattcatgatgtgacagcccaca

SEQ ID NO: 159929 - DNA, 122 bp, Homo sapiens
ttcaactggccttacatgtccatccagtgctcctagaccttgggcgcttcccacctgccccgtccccctagagactcagaggacccacctgggccaaggactccaaagccgcggggacaccg

SEQ ID NO: 159930 - DNA, 122 bp, Homo sapiens
tgccctcaggggccatcctcctccacccgccccccatccacgcgctgtgcctctgtcatgcgacctcgaattaagccagaggtcttgcggggatctgtccagtgtgagggccaggcccctgc

SEQ ID NO: 159931 - DNA, 122 bp, Homo sapiens
cagatgcctgccaccacgcctgactaatttttttttttgttttcgtatttttagtagagacggagattcaccatgttggcaaagctggtctcctcacctcaggtgatccacccgcctcggcc

SEQ ID NO: 159932 - DNA, 122 bp, Homo sapiens
tttttcctttgaagcccaaataacaacgtgtcacctttctcgacaaaaagccagcattggcgttgacttttctctttgggctagactcatggaaggtgccagaatcagggaactggagcttg

SEQ ID NO: 159933 - DNA, 122 bp, Homo sapiens
ggggcaggtagtcaccggcgtcacgaaacacgcgctgcacgaaaaggcacgagtcgttggcgcctccgcagcggccacagcggtcctcgagggcacccgagcccaacaacccatcacagccg

SEQ ID NO: 159934 - DNA, 122 bp, Homo sapiens
aggctagatgcagggaagagctctccttgctctatcctaggggactggagcaggctggggcggggcacctagggttcctattgttaggactggaactggagagagaagcagagtgacattga

SEQ ID NO: 159935 - DNA, 122 bp, Homo sapiens
caccacccggagcattcagaagggaccggggggcaggggctaggtcctccaagctgtcagcgttggggtggcctcttccttcttccccagcatcctgagcaccggagcgccccctccctccc

SEQ ID NO: 159936 - DNA, 122 bp, Homo sapiens
agggaaaggatgtaatccactcgatgcttcagtaagcatgactcaggccaagcctctgaacgtgttacgttatccctggagaaaggcatttaactcttacccacccccaacaatctattctg

SEQ ID NO: 159937 - DNA, 122 bp, Homo sapiens
atggggctaactgctccagggatggaggactgagggtaggagagggctcccgggagtggccgatgacagccgcctccagagtgatctccaccacaggcagcagaccacgtctgcggggggcc

SEQ ID NO: 159938 - DNA, 122 bp, Homo sapiens
cctgggcgggcgcaatggcccccctgccggctggcctgtattcactctaatctcttcagtcggcttgcagccagcacgatcttctaaaatcaaaacaaagtctgatcacgtaccttgggttg

SEQ ID NO: 159939 - DNA, 122 bp, Homo sapiens
tcccgctctgggagggcggtgtcaccccgtgccccaacccccgcgcccacctgctcccgtcgcttttgccagcgaccacacgggctttcctccaggatgtcgctctcgtcctcgctctcgtc

SEQ ID NO: 159940 - DNA, 122 bp, Homo sapiens
cgctggaatagcatgcccctgtcccatagtcccaccagttgggctggggtttgggggtagcgctgtgctggggataggccgctgcattttggggcccagggatgacctgtttttggccatga

SEQ ID NO: 159941 - DNA, 122 bp, Homo sapiens
ccgcagtcgtgggcggggattggggcttggatacgccttttgcgtctggtccccaagggacgctccccaaccctcggcgcgcgaggcgccgcgtgaggccggctttgcccctccttccctgc

SEQ ID NO: 159942 - DNA, 122 bp, Homo sapiens
gtcagggtaacctccatgtccccaaagggcaagaccggctcagaggcgaggtaggtggcacgaggccacacagctggtcagctcagccgggctgggacgcgggccccagaccgtggcccccg

SEQ ID NO: 159943 - DNA, 122 bp, Homo sapiens
tcccacgatgcacccaggttttagagcggtcagaggggcggcttccggtttaggacagcgcggctgcgcacggcgtgtggtcttattggctcgaaccgcctcgtgcgatgcgcgtcacggcg

SEQ ID NO: 159944 - DNA, 122 bp, Homo sapiens
tcctggcagcttgacctcctccaccccagggatgacgggaatcacacacagcattccaagcgacaattccacaagctgaccataggggcaggggaagcaaggaggccaccatgtttggaggg

SEQ ID NO: 159945 - DNA, 122 bp, Homo sapiens
tggcccaggaactcccagaacagaaattaatgtaacatttggttccagaaaccaaaagcacgagcaactaaagaaaaagtagatacattagacctcatcagaatgaaaacctttatgcttca

SEQ ID NO: 159946 - DNA, 122 bp, Homo sapiens
atgggtgctagaaggctacggaaccgccgaaggcccaggagaaacccggaacgtgttaaccgctccaactggagccggacgaaaaaacggccccgcctcccgcgagggcgacgcagttcgca

SEQ ID NO: 159947 - DNA, 122 bp, Homo sapiens
gactcgggagctctgatgtaaacgcgctgcctgcgaggtgcgtggactcgggagctctcacgtaaacgcgctgcctgcgaggtgcgtggactcgggagctctgaggtaaacgcgctgcctgc

SEQ ID NO: 159948 - DNA, 122 bp, Homo sapiens
gcctctgtgggagggtaggggcctaacttcgacaggtgcgccagtcaacaaaccaagctgcgttcacacggaccaatcctcctcttcccgcttttttacatttctcacttccccgactcccc

SEQ ID NO: 159949 - DNA, 122 bp, Homo sapiens
gagggctcgctgacctaccgggtgccagagaggctgcggcagggttcctgtggcgtgggtcgggcagcacaggccttggtgtgtgcgagtgccaaggagggcaccgccttcaggatggaggc

SEQ ID NO: 159950 - DNA, 122 bp, Homo sapiens
ccaccctcaggggcccagggcagacaggtggggtctgtgtgggcagcacccctaccccagcgggcagagtccccaggacgtccagggaagcttccttctcaccgtgccaggcccggtgtctg

SEQ ID NO: 159951 - DNA, 122 bp, Homo sapiens
gccttctttggggctagcctattaagcttctttaggtagggggaaatagaacaggagacgcgaaaagcagaaggtaatgaaggcagtggaatgtaccatttctgcttgccaccctccgaaac

SEQ ID NO: 159952 - DNA, 122 bp, Homo sapiens
gggtttctcctggagaatcgaggcggatttccctccccctatctgcaaagctcctggaaacgagggagccggcgtcttgctgcagggtgggccgcgcgcctgccccccactcgctaccggct

SEQ ID NO: 159953 - DNA, 122 bp, Homo sapiens
ctcccacctacaatgcatctcatatttctttgcagggctcagataatcaagaaacaatgtcgagtgatgataaaagtaaatcaaatgaccccaagactgagcccaagaactgcgatcccaag

SEQ ID NO: 159954 - DNA, 122 bp, Homo sapiens
caccccaggcttgtgggacccgcctttactgtcagtcagtgcgcatgcgtggccgggtatcggacaggaactgcaccagcgttatctcctaggaagttctttgccgttttccgcttatcagc

SEQ ID NO: 159955 - DNA, 122 bp, Homo sapiens
ctttagaaacttaaatttattgggctcccactgtgtgctagacccacataaaggttctcacgctaacactgcaaacctaggagtgtctgcattttggaaataaggaaactgaggtttagtgg

SEQ ID NO: 159956 - DNA, 122 bp, Homo sapiens
tcctgaccacctgtttggatgttaagcattatgtctgtttggtcattgtattttcttagccgtaagaggcttttactaaattgaacctgttacttagaaattagatgaaaataggaatatgc

SEQ ID NO: 159957 - DNA, 122 bp, Homo sapiens
gacctccccttggcctaggtcaggagctcagaagtgccacatggctgaggggcagcggcccgggaagggccagaggcagggccaggagagcaccatttcctgggaggctaggggcagggagg

SEQ ID NO: 159958 - DNA, 122 bp, Homo sapiens
agctttcctggaacggaatatcaccaagagtattcactttggggcttgatggttccagcccgtcttactaaaacttctaaagaaatagtttgcctgctctttcactcctccatttgtagtta

SEQ ID NO: 159959 - DNA, 122 bp, Homo sapiens
ttaacctgcagttcagtgttaagggcaacatgtgtttactgcataaaatgctggcacatacgtaccagagaactatttctgaaggctgccggggggcgggtcttgggggacaggggaggttg

SEQ ID NO: 159960 - DNA, 122 bp, Homo sapiens
accccgtggatagtaccaaaccctacatatactcatgttttctgataaccaagatggctacgagtgactaatgggtggggagtgtatacagcatgcatctgctgggcaaggggatgactcat

SEQ ID NO: 159961 - DNA, 122 bp, Homo sapiens
gaggacgagcgtggagggtctttcgggtgggggcagccccagctgtgtgccccgaggccccgggaagtggggacgggccgaggagggagccaggagcacggccttcctcctgggtgtctcca

SEQ ID NO: 159962 - DNA, 122 bp, Homo sapiens
agtctgaagcacatcactgaccacaaccaaactctcacgccatctctcaactgacatccacgaggtgtttcagattgaagctctgctacctgctgtataactcaggggaatgaagaaaggcg

SEQ ID NO: 159963 - DNA, 122 bp, Homo sapiens
cgccaggctggactgtgtctggttccccccatcgtgcctgggccctcatctctccttccccgctccgcagcagccaagattcacagtctgtctattaatgaaatgcctccccgtctctttcc

SEQ ID NO: 159964 - DNA, 122 bp, Homo sapiens
ttacataagtcaccgcccatttgctcaatggaattcctcgccgcgtccttaaaaatgaggcgtttgaaatatatttagttcctgagaccgtgtttgctctaaatggatggggggtggaggag

SEQ ID NO: 159965 - DNA, 122 bp, Homo sapiens
ccttaccgggacacttccgcggctcaaaagcccacagccaatcggagcgggcgacttcggcgtgagaccccgcccctggaggatctggcagccaaccagagtgaagacccgcgaaaccagcg

SEQ ID NO: 159966 - DNA, 122 bp, Homo sapiens
cccagccctgagcagtgtgccctgaactatatttcaacacacagcgagagctggatctctcgagcaatcccacgtcccgtgtctcggcaggcccaggacagttctgcttttaacctgtttcc

SEQ ID NO: 159967 - DNA, 122 bp, Homo sapiens
ggcccgggcaggtgctgtacatcccggggcaagggagctgggccgggcggggtacaagggcggggcgcgggggtggcgcgggccgtgtgtctgttcccaggcctctgcccctgacctctgcc

SEQ ID NO: 159968 - DNA, 122 bp, Homo sapiens
gtcagtcaaactcctccttcccaccccttgcgaggcccctccccgggccgcgcgccctggcgcgcgcacacgcgcacacactccccagtcgcctgtaccaaccaccttctcaagttgtagcg

SEQ ID NO: 159969 - DNA, 122 bp, Homo sapiens
ggctggcgtgaggtgcctctgagacttctgggcagccctgccttccctactcagtcttcccgatcttcttgccacctttctgtgtgggccagcctcccgccagggtactcagaggccgctca

SEQ ID NO: 159970 - DNA, 122 bp, Homo sapiens
cactgccctggccccagaggtgcagggttcaaaccccttctctgcagctttctagctctgcggccttatttaaatcgacctgcctccatttccacatttgtacaatgaagaagaaaataacc

SEQ ID NO: 159971 - DNA, 122 bp, Homo sapiens
cctgtcacaccatggaggcacacctctgtgaccagctcataatggatgcctctataccaccgtttcctatgcaaataggaaataataaaataataaaaatatttaaaaataataaaagctgc

SEQ ID NO: 159972 - DNA, 122 bp, Homo sapiens
gtcttaaaaccttgagcacctgtttgggaacatctgcacctcctcccttgagggagaaaacgacccagacattcgcgtcaaaggaagtgtcgtctatttccctcaacgcagggcacccgttc

SEQ ID NO: 159973 - DNA, 122 bp, Homo sapiens
ctccaacagttcaattcacctagatccccacgcctgaaattatcctagatgtcctagaggcgcctcatcattacaatggtacattattctccactcctttacatgtcacgccagctttcaaa

SEQ ID NO: 159974 - DNA, 122 bp, Homo sapiens
cgaaaccacatggaggcggctctgcaaaagctgttaaacgcacaagccaacaaagagcaacgcccagcgcgtgccaggccccgagcaggggaggcgaacgccgcgcctcccgccggcgctgc

SEQ ID NO: 159975 - DNA, 122 bp, Homo sapiens
gaggaggccaaggcaagatgctggacgggcggggaccgatggggggcagcagaccatggccgcgcacccagtgcgcccccggggcctcctcttgtcccgaggagcacccccgctcccggtgt

SEQ ID NO: 159976 - DNA, 122 bp, Homo sapiens
ggagggtcctccagcgcgggggcgggggtgtaggccccgagtgatttcctgccacagtgccggagcgggactggcgctgcctcccgggtccaggttccagccgctcccagctgttggcggcg

SEQ ID NO: 159977 - DNA, 122 bp, Homo sapiens
ccaggtatgtaaagtcattcaattcagtcatctactctgcaaagatccctgacagttgttcgactaacctcttctttagtgagaatcataataacagctaccacttactgactgcattctgt

SEQ ID NO: 159978 - DNA, 122 bp, Homo sapiens
ttcatcatggctggtagaacgcggtagggccaaggccagggccagcctgggtgtgcgcagcgcctgctctgtttccatgtggcctgtgtggtcgtagctccattgcagggctcgcagcaggc

SEQ ID NO: 159979 - DNA, 122 bp, Homo sapiens
ataagtaaccttggtcaccaacagatgtgagggcacgtgacgttcgggctgcgccctccccgccccggccctgcacacagtagggccgcaccgcgctttgcaaacaggtggactcggcagag

SEQ ID NO: 159980 - DNA, 122 bp, Homo sapiens
gcaggagggcggggagggggaggggcgaccgggccccgccccgccgggaaccgtgggatccgcaaacccagctccgccttagatccaggggtagaaacttagggtccgagagagcaactgcg

SEQ ID NO: 159981 - DNA, 122 bp, Homo sapiens
cgtgcaggcttggatgactccgggccattagggagcctccggagcaccttgatcctcagacgggcctgatgaaacgagcatctgattcagcaggcctgggttcgggcccgagaacctgcgtc

SEQ ID NO: 159982 - DNA, 122 bp, Homo sapiens
gtgtagtggctcaaacatgttggagaagcatttctgttcatagaaccatgccaagcagggcggcgggcagcaggtgaagctctgcagtgtctgacgtagctgtagtgtccacacagaggcat

SEQ ID NO: 159983 - DNA, 122 bp, Homo sapiens
gtgttcccctgtcacactaggtccagaaaaccaacacttctgactgggcatggtggctcacgcttgtaatctcagcactttgggaggccagggtgggcagatcacctgaggtcaggagttcg

SEQ ID NO: 159984 - DNA, 122 bp, Homo sapiens
cagtgttcctctggaaggctctcctccaccggaggtttctcacaggtggcagagctcggccgccgtcttgttctggcagctccatgacgtcaaagttgaagtgggagaagaagaagacccaa

SEQ ID NO: 159985 - DNA, 122 bp, Homo sapiens
cacctcccctcatctgcgcaatcctgcgagaagccttagacaggttctggctcagagaaccggagagaggcacaacgcctggcccccaggacttggccacagcgtccctgaccttgtctgct

SEQ ID NO: 159986 - DNA, 122 bp, Homo sapiens
tgaaatgagctaggtgcttttaccaaagctaaggtctgcttatgaagacgttcctcataacgctgcaatttcttagtgattaagtgatcaaaattatgtctggatgcctcccaagtacacat

SEQ ID NO: 159987 - DNA, 122 bp, Homo sapiens
tgggcaggggaacatcttagctgatcccgtcctcatccagctgataggacattgggttttcggaactggaagggaattcttagacaacagaaattcagtggccttcaaggacctgggaggta

SEQ ID NO: 159988 - DNA, 122 bp, Homo sapiens
gggatgagtaaaccctgccctggcgcagggaggttctcgggcggggccgacaggggcaggcgccagggaaggccagcacccctgtaacaagacgactgtccccgcccaccactcgggccccc

SEQ ID NO: 159989 - DNA, 122 bp, Homo sapiens
ccagagggtgaggaggggtgtggagggagaagcttgcaatggcctccagaacatttttgacgactgtagtaggaaggcagaaagaccctgattcacagcccctccaagatcacacataacag

SEQ ID NO: 159990 - DNA, 122 bp, Homo sapiens
attcatatatactctgactagacaatcttgaaaactaactgagttgaaggtctcatgctccgtgatctcaaaacatgttacaagactacagtaattaaaacagcatgacactggcttaaaga

SEQ ID NO: 159991 - DNA, 122 bp, Homo sapiens
gggtcaaagcctggtcatggcctggcacgatctgggtgtggcataggcagccagggcactcgagctgggactgtccttgccaagccagcctgctgcctggggcatagctgggggcctctgga

SEQ ID NO: 159992 - DNA, 122 bp, Homo sapiens
cggcgcgcggccccgccagctggccgtcccgcagggccccggtgcagtgcagctgcttgacgcgctccaggacgcagtcgcccaccacctcgcccaggaagttgtccaggtagcagaagccc

SEQ ID NO: 159993 - DNA, 122 bp, Homo sapiens
gtttcaagaaaaagcacccccaacttctaacttctcaattcctgcttctaaagtgacctccgcgtccctctttccgtgtctaaacgctcatgccccacgcctttgagtcctacgagcagctg

SEQ ID NO: 159994 - DNA, 122 bp, Homo sapiens
tctaactgaaaaattgaagttgcgctagctttctaccagaagggtgccaaaaccattgcacgtagatcagctgcagacaagagcagggtcaatggaaattttaaacatgtgggaccaagatt

SEQ ID NO: 159995 - DNA, 122 bp, Homo sapiens
gggagccgagcggtgaacgtgcgcggggacggggtgccgggggagggcgctggccggggtcgctccgagaggctcgggctacgagcaccggtcctgcccggggtctgtggagctggttggct

SEQ ID NO: 159996 - DNA, 122 bp, Homo sapiens
cttacctcgtccgcgctcctcactcttaggagacggtaaaggcagtagtggcggtggcggcggcggcggcttcggagaggcccgaattcaccatggctccaaaggttcagccgcgagaaggg

SEQ ID NO: 159997 - DNA, 122 bp, Homo sapiens
tgatgtgggcgctgaaatctccctgtatggtcccggggcgcgggaccacactggacccttcgcaggccttgggtagcagggcttcccccgcgggccctcgcgggccctcgcggtgcccggca

SEQ ID NO: 159998 - DNA, 122 bp, Homo sapiens
taatgccaggccctgcccccggcagaggcggaagcggagtcggcctgagaggtctctcgtcgctgcaggcgcctcagcccagccgcgtgccttggcccatggccgcctactcttaccgcccc

SEQ ID NO: 159999 - DNA, 122 bp, Homo sapiens
gatgagctctccacggcagacactgtcacctgcagcttctctcctggcacccgggccaaccggggcacatggatgcagaaagtggcaccatcaagggactgaagagcaccccgctcaggtgc

SEQ ID NO: 160000 - DNA, 122 bp, Homo sapiens
tgttcttaccccaaccgtgcaccgattaagcgtatggagttggccccacaggtgacttaccgtgtgagttccacaacaccctgggtagactctgtttaatgacaccagtctacttaccacac

SEQ ID NO: 160001 - DNA, 122 bp, Homo sapiens
ctccatgccttgttgaacatgatgatgcccctgggaatgggaggtgatggttttttacttcggccctagtacagagtatgctcttgaagctggattccatcagcaggtaagtgaacatgaca

SEQ ID NO: 160002 - DNA, 122 bp, Homo sapiens
ccgcacctacctgtacgagacctgcttccggaaagttaagttcctcagcttctcctccagcgcttcgtccttctccttctggccggcggccgcgggctcgtccagggcagcggcccccgccg

SEQ ID NO: 160003 - DNA, 122 bp, Homo sapiens
aaggataaatgagagagtgtaaaagccaaaagggaagaagttgaaaactttaagtcagtacggagaagttttagcaattggtttccttaaacgggataacaaataaaccaacacttcagctg

SEQ ID NO: 160004 - DNA, 122 bp, Homo sapiens
tgggaccaggccgaggcagccgcggcctgattgtgggtagggctactgaccggcaggtggcggagagcggttcctacctttccccaaacgcctgtcactctgcagccttgtgactgactgct

SEQ ID NO: 160005 - DNA, 122 bp, Homo sapiens
aagactgaattggttgaccaggaaggccaacccatctccttaaagggcccttcactggtgcgtgggtgaatgcggtccccggcctcctgggacctcgaggaacacaggacgcagccggtagt

SEQ ID NO: 160006 - DNA, 122 bp, Homo sapiens
ttgttccatgggtggtctccaccttccagttagaacattagaataagtactattgccgggcgtggtggatcacgcctgtaatcccagcactttgggaggcctaggtgggcggatcacaaggt

SEQ ID NO: 160007 - DNA, 122 bp, Homo sapiens
ttagcgaggactttcaggagagtgacgtcactcaacctgtagctttgattggctgggctgcgagggtggagtcgtgcagagccgctgctggcggaggtcgtggtgatctcgcttgatctttg

SEQ ID NO: 160008 - DNA, 122 bp, Homo sapiens
ctgtcaagcctcctaaaggcagctgagtgcgctggaaagcagaatggaaaattacactcacggccaccccttttaaagaaagtttatgaaactgaccagtatatgttgtggaaaagtctggg

SEQ ID NO: 160009 - DNA, 122 bp, Homo sapiens
ttcccgttctccaggtatctgcggagccactccacgcactcgccctccaggtaggctctccgctgctccgcctcacgggccgcctcccacttgcgctgggtgatctgagccgccgtgtccgc

SEQ ID NO: 160010 - DNA, 122 bp, Homo sapiens
tctgctaggtctctccgaggtcgccttctttgcgcactttggttattgatcctgctgaaccggccggagcgcagcggctgcgcttctctgggaaagaacggagtggggaggtgagtaggcta

SEQ ID NO: 160011 - DNA, 122 bp, Homo sapiens
ggaaggctggacctcaggaaagcctctagaaggagagagggacgtgatggcgtcacgtcacgccacagggatttcacctcctgcggatggtaatggcctcgccgccctcccgcccccacctg

SEQ ID NO: 160012 - DNA, 122 bp, Homo sapiens
tgtggggtcaattaagtccgatcctcaattacctccttgtttgtctctcagacccttggccgctattcagtcgccatatgtgcctcggagccaggtaccagacaaccaggaacaagcccact

SEQ ID NO: 160013 - DNA, 122 bp, Homo sapiens
cgagccaggggcggtgcaagccccgcccggccctacccagggcggctcctccctccgcagcgccgagacttttagtttcgctttcgctaaaggggccccagacccttgctgcggagcgacgg

SEQ ID NO: 160014 - DNA, 122 bp, Homo sapiens
cagatgcccaagatgctgaagcctggtcaccagccagactgaggatctgagctgggaggtcgctggccacacggagcagctccagatgcacaagtccgagtcgcggaccggtggcgtaccct

SEQ ID NO: 160015 - DNA, 122 bp, Homo sapiens
ccgtgtctctcctccgcactgggtcccggggtgcgtgtgcaggtgtgtctgtccctcctccgcgccacgtcctcactctgctgctcccccatagggaaattgtgatatctgtgatttttctc

SEQ ID NO: 160016 - DNA, 122 bp, Homo sapiens
ctgcggagaggtgaggttccggaggccctgaggtcagcgggcccccgcccgccgcgtccgcgcaccctcccgatcctaagacccgctccgtccccctcagagggcggggcggcggtccttgg

SEQ ID NO: 160017 - DNA, 122 bp, Homo sapiens
attggtctgaacccaaactctcatggactcatatctaaattctgatatgcttttcaataacgattcctcttgatgtattactccatctttacatgaaatcttattgctaatggactctagga

SEQ ID NO: 160018 - DNA, 122 bp, Homo sapiens
atagctcccctccagatggaggctcacgaagtagggtgggcgggggactccatatcccagcgtgccccgcggcgggccctaccggccgcgactccgggcttggccccggccctagctcgtcg

SEQ ID NO: 160019 - DNA, 122 bp, Homo sapiens
ggtaggcaactggttgtcatggaaatggggatcatcacagtccccttccccttcaccccacgtggctgggcagtgttaagggtggcaagatagtctctgtccccacccccttgtacttgatt

SEQ ID NO: 160020 - DNA, 122 bp, Homo sapiens
ttgttacataaagaagattcttgtattgatcaagtatgaggcttccacagtagagcataacgtgtgcgtcccctgcttgcccagcgctggcaggaaatccagactttcccaagggttctctg

SEQ ID NO: 160021 - DNA, 122 bp, Homo sapiens
cctgtactggaaccgccgggggttgcgccgcctgtcccggctattgtggtagtgtgggcacgcatagccctggcggcacaggcgtggcggcttcgggcactgctccgtcttgtagctgccca

SEQ ID NO: 160022 - DNA, 122 bp, Homo sapiens
ctggcgagcacgtctgaggctggggcctgggacagggcctccaggaagggcaggtggcgtcggagggcgttggccagggcagcaccgccctcccgactgtacctcctctcgctgccaacgct

SEQ ID NO: 160023 - DNA, 122 bp, Homo sapiens
ctgaggtcctaagcttctgaggagccatatctaatgccacagcccaggattggagataatcggccatccttgcttgttgatggaaaagaaaaaaaatactgaagaagattctttaggtattc

SEQ ID NO: 160024 - DNA, 122 bp, Homo sapiens
ccggcatctctccttttcctttcttaatatggcgatgagctcttaggccagtgtggggaccggggctgaggtgccctggacactggaggagggggagggaaggagcccctgggagcctgggg

SEQ ID NO: 160025 - DNA, 122 bp, Homo sapiens
cattgtcccccccgcccgcccccccatccccgcctcccgcgcccctcgcagcccggcacacgcgctcgggctctaggtactgggcgttttattggagattctgagttgttctgcttgtagtt

SEQ ID NO: 160026 - DNA, 122 bp, Homo sapiens
gaaactgcttctgaagctgaaactttgggcgcctaccagcgcgggcgggagcctagggggcggagggcggcttggtgcgggcctgcgggcgcccctcggcgcggacagccgggacgccgcgg

SEQ ID NO: 160027 - DNA, 122 bp, Homo sapiens
gaccttttctgtgctagcgagtctaaaggaaagaaagatttctgcaactgaaggggcagtcgggtagtattacatttaagatattaacgcccgacctggctcacaggagtgtgggaacaggg

SEQ ID NO: 160028 - DNA, 122 bp, Homo sapiens
cgattttctgtgatgcgtgggctgtcgggacatctgtcttctatacctaataaagtcgcccgacgcagaatgaactcctcggcatcgctttgaatccgggctcacatatggttgctaattag

SEQ ID NO: 160029 - DNA, 122 bp, Homo sapiens
gcatcggcccagcttggttggggaggccgtgtctgttaaaaccactcctggaatcaaagccgggtcctcctagtggtcagtaggaggtcggaggccataggcctggtctccttagacagtgc

SEQ ID NO: 160030 - DNA, 122 bp, Homo sapiens
aactaacaaatgcaatcaataccaggaacagtcacaaaggtctcactaaagtcctatatccgagagctgcgctccaagtgaaatgcaaactttcatcataaattattttgcctaatttccca

SEQ ID NO: 160031 - DNA, 122 bp, Homo sapiens
gtctctcacagccaggactgctgcggctggaattcctgacatactgtcatacctctcactcgtcaatctacactctcctcccatctacacagctctggaaattaaaaacaatccaaccatga

SEQ ID NO: 160032 - DNA, 122 bp, Homo sapiens
ttccacctgctgtgtgatgtgccggacggtctctttgtttttccgattcttccttcggcccgtgggctgccaggcatcaccagcactctgctctgagaaagagttctgtactgcaccgtcct

SEQ ID NO: 160033 - DNA, 122 bp, Homo sapiens
tgctgtaacaagcacactatttatatgccctgaccaccataggatgctagtctttgtgaccgattgctaatcttctgcactttaatttattttatataaactttacccatggttcaaagatt

SEQ ID NO: 160034 - DNA, 122 bp, Homo sapiens
agatgaagcctttcagtatcacagaatagaaactaagagggggcaagatcacatcataatcgctaacccttatgtgcaaaacagcacgattgacactttacaaggaccatttcagtcattag

SEQ ID NO: 160035 - DNA, 122 bp, Homo sapiens
gggttccggttccccacgtcctcaccgggtaactggggttccggctccccgcgtcctccccgggtaactggggctctggttccccacgtcctcaccggcacttggcactgtctagtgttttg

SEQ ID NO: 160036 - DNA, 122 bp, Homo sapiens
tcctgatgggcactgggtctctcttcctccagggaatcagggccctccaggacccaagggcgccaaaggagaagtgggcccccccggaccaccaggtgagcaactctggacatcccaggcag

SEQ ID NO: 160037 - DNA, 122 bp, Homo sapiens
gtcttctctcttgggacccgtgggtccgcccgcctcccgtttctcagacccggatcctggcgtcagggacaagctagggctagggagataggtgcacttgggagactatcacctcctcactc

SEQ ID NO: 160038 - DNA, 122 bp, Homo sapiens
cgcccctccccctctcactttcgctttccccgcctgccccaaccctcgcccccgggcgctcggccgctcccacctgtcacccccatgcagaccgaggctctgtcctggaggcggggagcggg

SEQ ID NO: 160039 - DNA, 122 bp, Homo sapiens
ccccagtcccgggggccacaggagggagcgcgtaggtagaggcggcgggtccaatctccacgccttgttccctctccgggagccggcttccctcccgcctgcctcggcctggacccggccca

SEQ ID NO: 160040 - DNA, 122 bp, Homo sapiens
gtctcccggtcctaaacgggtctggggctgtgtggcgagcccggcaaagtccacgccgcacgcgctcctgcggccgccagggcccaggccggttttgccccgccgcgggcctcgccgcgccc

SEQ ID NO: 160041 - DNA, 122 bp, Homo sapiens
gtctccctttttggattggcaattctgcagacagactgtgtgtcttactcatctgggtatcgccagggctgtgctctatacctggcacacagtagtgctggaataaataaagagctggaagc

SEQ ID NO: 160042 - DNA, 122 bp, Homo sapiens
gtctctccaacggtggtctacactcgagaaacttggcagcttttaaaaatagagcgtgtgcgagtgcagcctctctccaacagtggtctacactcgagaaacttcgcagcttttaaaaatag

SEQ ID NO: 160043 - DNA, 122 bp, Homo sapiens
acttttggatgtttgtacgcagtgctcacggggagcaagtgggcaggggacggtccagatcgatggccaccaactgagccgctgctacgtggccccctggggctccttccggtgcacccctt

SEQ ID NO: 160044 - DNA, 122 bp, Homo sapiens
aagttcggcaggaaactaaaaaggattttctccgattcaagcagaagttggcctccaagccggctgtagatgaaagcccagtccacagcctccatgcccccggcccggcccgccccgcgcgc

SEQ ID NO: 160045 - DNA, 122 bp, Homo sapiens
aagataatcacttgactcaataatgtactctggtttctaatcccagcattccacaaataccgctcatctcatggtcagcagtgatcacctgattgataaatggatacttttttcatttctta

SEQ ID NO: 160046 - DNA, 122 bp, Homo sapiens
taaaaacaaaggtaaccaaggaaaaagttttctctgaataccgagataaattagggaaatcgccagagactgtggtgctgaggaaacactactgaattataccacacagaccggagcgatgc

SEQ ID NO: 160047 - DNA, 122 bp, Homo sapiens
gtctccctctcaggaaaaaagagacaccaggaaggggctgtccaagtcacgctgggactccgaatggggccatggcacttaaccatagcttgctgggagcctctgccctgctgcctctggtg

SEQ ID NO: 160048 - DNA, 122 bp, Homo sapiens
gcagtgccacggcctcgttaatgtcgttcttggccaggcgcagggccttgcggatggtggcggggtctgagaagcccatgcacagcagcgtggtcatgtgctgctcctcctccgattccatg

SEQ ID NO: 160049 - DNA, 122 bp, Homo sapiens
ttaggtggataggtctggaaacatattagcattcccttccaagcctggctctgctggtagcgaaacagaatctttttcagcctggaaactggaaggcggttcctccctcccaaatagactcc

SEQ ID NO: 160050 - DNA, 122 bp, Homo sapiens
agggaggctctccctcatcccactgctggggacgctggactctggagtgaaaatgacccacgctctcctctgctcccgttttcaccttgggcatcattgtcatcatcattatgagcagcagc

SEQ ID NO: 160051 - DNA, 122 bp, Homo sapiens
gctactagcccagggccacaggtttccaccttgacagatataatttggtctgaggaatgacgttattaacttatggaggatacgggccatttaaagtttggttggtattctacttaaaatta

SEQ ID NO: 160052 - DNA, 122 bp, Homo sapiens
cggtggaccttccccaggctgccaccggatttgtttgctccatcatgacaaagacattaacgaatgacaaggttcttggtggtctgcagcgcagaatcgttatccctggactttcctgtccc

SEQ ID NO: 160053 - DNA, 122 bp, Homo sapiens
gcaggggcgcgggagcctgggccatctgtgcacatcattttctcttcccctgggtctgctcgcgctggatcttgagcatcccagttcctgtgtgcaaaggattgctgccgtgcccacccaag

SEQ ID NO: 160054 - DNA, 122 bp, Homo sapiens
cctagaagttaagacggaattttacattgcataaaatagactgcctttctcctgtgttgacgctatctgccgtatatttatgcttcggaagaagtccttgaaaagaaattttctctcatcaa

SEQ ID NO: 160055 - DNA, 122 bp, Homo sapiens
ttctctcacatgatggctggaccaagctttattatacttgttatactacatagactacaacgaggctatgatgcttacgttgcaagtagtgtttccaccaataatatagtttgctgtcatct

SEQ ID NO: 160056 - DNA, 122 bp, Homo sapiens
tcttcacactgtggaagtgagaaaattcagtgtgtgtgtttgtgtgtgggaaggggaggccgggaactgtgtccggttacggcgaaactggctcagcagaaacacagcagctaaaatctttg

SEQ ID NO: 160057 - DNA, 122 bp, Homo sapiens
cggcttcactcctgaagtcagtgagaccacgaacccacaggaggaacaaacaactccagacgcgccaccttaagaactgtaacactcaccgcgagagtccgtggcttcattcttgaagtcag

SEQ ID NO: 160058 - DNA, 122 bp, Homo sapiens
cacaggcaaagccacggcctgctgagtaaaaccagctgcaggcacagaaaggcaaagccacggccccactcgtgtggggtgtcagagacgccgacaagcacggtggctactgggggctgggg

SEQ ID NO: 160059 - DNA, 122 bp, Homo sapiens
tcctccttctggcgcaagtgggtttctcatgggagggtgggttcgcaccctcttccttctcgcgcgagcgggttcctgatgggagggtgggttctcgccctcctcctcctcctctttctcct

SEQ ID NO: 160060 - DNA, 122 bp, Homo sapiens
gggcggcctccaggctgccgagacctataaaggcgccaggttttctcaatgaagccgggacgcactccggagcgcactgcgtggtcgcaccctacccgggctgccttggaagtcgtccccgc

SEQ ID NO: 160061 - DNA, 122 bp, Homo sapiens
ttctctctcctccttttcatgtttatatagtttttagtttaatgacttttggaaaggaagcgaattctattttccgccaaaaggagatcatgtggaaaattgctctagaacgttcctggctg

SEQ ID NO: 160062 - DNA, 122 bp, Homo sapiens
tttgcctagagaagactcactttagtctggacatcaaaaattgcaccgtaccatgtaagtcgtccaatcagatttgtcacattttaagaatcagtagacgatacagcgaaggagtctaactc

SEQ ID NO: 160063 - DNA, 122 bp, Homo sapiens
agccgtgggcttccttcccttcctctgcaaccatgatgccctttcttattccacgacccacggacctcctgtttccaaagtcagcctcgtgagccgactgcatttaatcaacaataaagcac

SEQ ID NO: 160064 - DNA, 122 bp, Homo sapiens
tgcacctcctgtgaaagtcttgagactccagacctggagctgccaattcaggagccaaggcggatgaggtctgagtgagctgttggacagtacctaggaggccgtaggaagtggtgttgggt

SEQ ID NO: 160065 - DNA, 122 bp, Homo sapiens
gacctcaagcaatccaccacctcagcctcccaaagcgctgggattacaggagtgagccaccgcacccagcctccaccttgggaagacatgctgccagctgtctccccaggatcaccactagc

SEQ ID NO: 160066 - DNA, 122 bp, Homo sapiens
ctcctgggctgaagcaatccaccaacctcagcttcctgagtagctgggactacaggtgcacgccaccatgcccggcaaatgttaagtgttcttgtagagatggaagtctcactatgttgccc

SEQ ID NO: 160067 - DNA, 122 bp, Homo sapiens
tacagccgccgcagcgcccgcttcttgtccgtctttttcttggccgccagcttcttatcgcgctcgccagcatgcttcttggccatgggaccctcagcccctcccgggccccctggggcccc

SEQ ID NO: 160068 - DNA, 122 bp, Homo sapiens
gggctgaccaggtccactcccgcctcttctctccgagaactgaagtgcgcacctagtccgcgcgccgccttcaaatagccggcctccgccctctggccaatcaccgccaacgctccctggcg

SEQ ID NO: 160069 - DNA, 122 bp, Homo sapiens
ttcctactcgagctggacccctggtctccgaaggtgagatgcaggctctggggcgtgcagcggcccttctccaagccactctcgggctgtgctgtccaaggctgtgcgggaggagggcaggt

SEQ ID NO: 160070 - DNA, 122 bp, Homo sapiens
tggaaccagatcttaatctggcgctcggtgaggcagagcgcgtgggcgatttcaatgcggcggcgccgcgtcaggtagcggttgaagtggaactccttctccagctccagcgtctggtagcg

SEQ ID NO: 160071 - DNA, 122 bp, Homo sapiens
gatgtctaaaacagcgcggaggtcaggagaccttgtcgctgccttcacagagttgggcaacgctcccggtcctggtcagccgcgggacgcaggcgcaaatgcaggcttgggatgggggaggt

SEQ ID NO: 160072 - DNA, 122 bp, Homo sapiens
agcagcttcaaagagccaggcctgagctacaggtcaagttcattcataacccactccaggcgcacctggagagtcaagggaataactatactcattcattgctgtctgccctgtttcctggt

SEQ ID NO: 160073 - DNA, 122 bp, Homo sapiens
agggcgtggagacttattatgctagacagtgtacggcaggtgctaggagaggggtccgtccgcctccaaccgaggtgatgctacgcttgaccctcgaacaacacgggtttgaactgcacgag

SEQ ID NO: 160074 - DNA, 122 bp, Homo sapiens
tttttttcctcttagaaaataatacttgcgatgactttccttgtagctcagactttttcacgtctgttgttatctctttgggaatgctgaatacatacatttcgagaaggaaatgactgtta

SEQ ID NO: 160075 - DNA, 122 bp, Homo sapiens
agaaaccaggactcagtcctccagcgtcctagaatatggacagagtcacgggagggccctcgtcagggctgcttccctctcagagagacacagaggcgcctaacagaaaaccaggactccgt

SEQ ID NO: 160076 - DNA, 122 bp, Homo sapiens
tagaaaggaggaggatctctgtccttcctgagggagacacaaagcgggatggtaaaaattcggattgggggaaactgggttctatgggaagacactggcaggaaccctcaacaagggcttcc

SEQ ID NO: 160077 - DNA, 122 bp, Homo sapiens
cggctttggccctggtttcctcattccggctctttaggccactggcaaactgctgcaggacgctcacattgctagatgtggtggcagcggtggtggcggcggcaggtccggttccaagcatc

SEQ ID NO: 160078 - DNA, 122 bp, Homo sapiens
ccaggacagtgctgggcagagctagtgttgggcctgtgcctgggggccaccaagggggcccggagaaaagaatggaggggttttcacttcctgagcagcaggaggagccagctggggttaaa

SEQ ID NO: 160079 - DNA, 122 bp, Homo sapiens
gagaatggaatggttggaggctggagaggtgtggcttttggggagggtgttgttagaggccgcgaaagagtttgatcctcgaggtcactcgctaatctgttggcatatgtaggtgcctgtcc

SEQ ID NO: 160080 - DNA, 122 bp, Homo sapiens
gtttcttgaccttcccacagtccaccacgtacttgatgccagggatggtaagcgacgtctcggccacattggtggccacaacacacaaccgagtcccctccggtggaggcttaaagacctag

SEQ ID NO: 160081 - DNA, 122 bp, Homo sapiens
tgcgcgcctggctcccagcctcagtttccccattggtaaagcattgacggtggttgcggacggcttctgcggacagagccttgggctccgacgtctgcgcgggtaccggcagcacccccacc

SEQ ID NO: 160082 - DNA, 122 bp, Homo sapiens
gccagggtggcggccacccgcctacctcgtgaaagtcggcgtcctgcgtggctgccaggtcgaagccctgctgccagctctcgtgctgaaggacgtggcccagcagctggtaggccgtgcgc

SEQ ID NO: 160083 - DNA, 122 bp, Homo sapiens
agattacaggcgtgagccactgcgcctggcctaaaattgttttttagatggtaaattttacgtgacactagtcccctcttatccagttcatcagcagtgatggtggcatattgttagaattg

SEQ ID NO: 160084 - DNA, 122 bp, Homo sapiens
gacgtgcgtggcccacgcggctagggggacgtacccaggcgttgacgaaggcggggaaagcgtggcgattgggaaacgggagaccccacgcgggagaaaggtgggcggggaagaaatggagg

SEQ ID NO: 160085 - DNA, 122 bp, Homo sapiens
ttataacaaacagcgcacgccatcactaggaatgtgcatccagtttgctgtgtgcctgttcgtttactcaagacatttatttgatcctttgatccctgtttgcagaggtgaacaaaatacag

SEQ ID NO: 160086 - DNA, 122 bp, Homo sapiens
ctttttacctggcgcactgcaggggtccagggtgccttctgctgggtcatcgctcatctgcgcccgggggtctgtcccgctcctcaaagccaacaaagcgggtcctttgctcccacctttaa

SEQ ID NO: 160087 - DNA, 122 bp, Homo sapiens
gtctccccgttctctgggacaatgtggtccacgtgattctcaagctgaggctcgctgggccgcccacgccctgttggggtctttccgagcgaggtcctcagccgtgcatgcgttgagctttg

SEQ ID NO: 160088 - DNA, 122 bp, Homo sapiens
cccggggcgccggcgctcaggctcggggtgatccgcacggtgggagcggggcacggtgatcgcggcgcgtctggggacgcccggcctgagggaggctgcctgtcccaaggagacgcccatcg

SEQ ID NO: 160089 - DNA, 122 bp, Homo sapiens
aaggggaacggcgattcgactcgcagtgacttaagggttggcgtggtgcttgttcctgggcgtggggaggacaggaaaccgcggggtctgtgagacgccccgtggttgttgaaacgctgttg

SEQ ID NO: 160090 - DNA, 122 bp, Homo sapiens
gtggaaacatacagtacttctcttcttgtgactgctgtatttcatttaacataatggcctcgaggttcatccatgttgtggcatgtgtcaaaatttctattttttttaaagctgaataatat

SEQ ID NO: 160091 - DNA, 122 bp, Homo sapiens
gaagcgaggctcccgggtcggccgagccagcccccgctcaccctcaggttccctttagttcgctgcttgttcttcccgcccatggtcgcggttgcagctgtactctgagcactcagaccccg

SEQ ID NO: 160092 - DNA, 122 bp, Homo sapiens
ccacacagaagtcatgctcctcaccgggtaagccagccttgccagcctctggctgaattacggctgcttcccactttggccctaagagtcattttacggccaggcgcggtggctcatgcctg

SEQ ID NO: 160093 - DNA, 122 bp, Homo sapiens
ggggctgggcagttctaggagcctccactgccctgggccacccctccgccgccagagccacgatccctgcagccgcctgtggcaggtcgtcattggtgccctggtggagcagccctaggaag

SEQ ID NO: 160094 - DNA, 122 bp, Homo sapiens
tatcacattgtgcggtggggtaatcactctgttattctgccccatgcatggtaatcaattcgtttgccatttatcaaaaaaaaaaaaaaaaaaaagtcaagccctcatgaagtcaatattct

SEQ ID NO: 160095 - DNA, 122 bp, Homo sapiens
agcagccctccccagagctggtgggttcccaggagtgatgcctgtttgtcagtgaggccccgcggggatgaggacggagcattacgcagcgcactgcgcccccttgaactctgcagatgcca

SEQ ID NO: 160096 - DNA, 122 bp, Homo sapiens
gctgtgggtcaaggaatgcatgtagagatttatgaaccaagtcagggagtactggtacatcggctcgatgttggccaggtccgagatacaaaagaagatggtggcagaatgcacagccactg

SEQ ID NO: 160097 - DNA, 122 bp, Homo sapiens
aatggggtcagaagaggaataaacagacacgaagctcactggtgaatctgggctgctcaccgactgtggatgcttgttgtggagggatgggaaaagcaacgggcttggcttgtcctcctgga

SEQ ID NO: 160098 - DNA, 122 bp, Homo sapiens
ggggccagcggagcgcagggcgcaggggctggacccggcgcggagctggctgagtcggagcgcagcgtcctttgtgcccggcggccgccccgggatgcgtccgagctaggagccaggtgggg

SEQ ID NO: 160099 - DNA, 122 bp, Homo sapiens
cttgtgacagtttctccatccctcacaaggtcttggtctctctgcacaccaggatctttgcgggggtttcaggtccccctggttctgaatgagagtttcaagcctccctgctgcagcatcag

SEQ ID NO: 160100 - DNA, 122 bp, Homo sapiens
gaggagggctcttgtatttgttgccatggagacagtgaccagctggatgccctgcctctccgttcgcatgcctccctgtgggggagggggggaatcgcactgcggatgggcctagggaactt

SEQ ID NO: 160101 - DNA, 122 bp, Homo sapiens
ggggccagggccgggacgtgcagggagcggagcaggtgtttgctgaacagactagcgggccgcggccggggtttgctgtgtccctggtcgctgcagcccccgccgcgcgcggtcctgaaggg

SEQ ID NO: 160102 - DNA, 122 bp, Homo sapiens
tgtggccaaatcgcccagcaagtgaacgcacggatgaaggagcgtgcggccgctcagccacggccctccaaggtctcatcttccacaaggcctctctcagagccgaggtctcatctgcaaaa

SEQ ID NO: 160103 - DNA, 122 bp, Homo sapiens
tcccaaacaaatccagtttcataccccctctcctgacttaaactaatggttcttaactgccgtcagggtagaggctaaactcccttcttagccactcactccggctctaccttcatttctgc

SEQ ID NO: 160104 - DNA, 122 bp, Homo sapiens
cagagccctaaatagaatgtgagagttttcactctattccctctttagctctgggtcctgcgttccttagtgttattcagccaagcagaaccaacacgagatgtatatcttcatattagcct

SEQ ID NO: 160105 - DNA, 122 bp, Homo sapiens
actgtcagtgtctcctcactggtcctggtcttgccctcaaggctgcacagagctgggccccgtttctggccaaggaaggtccttcaaaatggtgcaatgtgctctcaaactccctgccccaa

SEQ ID NO: 160106 - DNA, 122 bp, Homo sapiens
agcataataaatataaatggacccagaacgcgagggggcaggggccacgtgatcgctccacgaaagccacttgtagggacctttagagagttagcaataaggctggagaaggaaaagccggc

SEQ ID NO: 160107 - DNA, 122 bp, Homo sapiens
ggcgcaggcgggagggggggtgtgggggtaggggaggccgggccgcgcgctcccggagcgcgcctccaacacctgttcctgctcccgcgctcgcgccccgcgaagccgtccgggcgcgcgcg

SEQ ID NO: 160108 - DNA, 122 bp, Homo sapiens
cgcacccccgcgttcgcagactcgcacttgcgagttcttcccttctcccgcacgcgactgcgcccagggacgcaagcccaccaccgggacaggctcacaaagctccacgcagacccacaagt

SEQ ID NO: 160109 - DNA, 122 bp, Homo sapiens
gggggtctcctggattcctcactctgggtaggctgggaagcttgaggccaaacctgctagcggggcaagggctgtcggccaacagcgttgacttggtgctactcagcccccaggtcaggctc

SEQ ID NO: 160110 - DNA, 122 bp, Homo sapiens
tctcaaaaaaaaaaaaagaaaaaaagaaaaggtaaacggcgaagccttgccgagttagggcggcaacaccaaatggggaaagcaatggatgaccctgtgtacggccagaagaggccaggact

SEQ ID NO: 160111 - DNA, 122 bp, Homo sapiens
gacaagtattgaaatcggagtgacaggcaattttgtcaccctatctttcttggaaacctacgaactgtgtctcatttctcacatttgcccttcaattctgattcttgctgcagactcagtaa

SEQ ID NO: 160112 - DNA, 122 bp, Homo sapiens
caagcctggcaggaggagcagccggagcaaatgtgtgggaagtggaggagcgagaacttccgtttactgcactcctacgactgcccaccagccattgtgcctgcgctttgtttgcacatttt

SEQ ID NO: 160113 - DNA, 122 bp, Homo sapiens
tgttccgggccaaagacctggatcccgagcccaggagccacatcgtgcgagggaaccacacgcagtcggccctgctggcaggcctgcgcaagttcgtgctctacgagctccaggtgctggcg

SEQ ID NO: 160114 - DNA, 122 bp, Homo sapiens
gcttttcatggatggtgtgactgggtctgtatccaaacccggttcggttcctggagccaacggcgtagttaacactcagcctcttgcagttaacactcagcctcttaactgggagtggccct

SEQ ID NO: 160115 - DNA, 122 bp, Homo sapiens
tgcgtctgagtgtttgctttctgggcttttcatcacctggtcctctggggatatgctgaccgaccctgtgtgcctggcaggtgtcaggcactgggggtcggggaggagagagtccaggagcg

SEQ ID NO: 160116 - DNA, 122 bp, Homo sapiens
tatcaagtgtgtaaaaatactgtgctctcttagtcttgatttatcactgccccttgtcttcgggctattaaaaggactaaggccctgtcttccataaagagcaagaacagctttgagaagcg

SEQ ID NO: 160117 - DNA, 122 bp, Homo sapiens
caggacagcgccgtggagaacctgctgctgctctccaaggccaagttggtgccctcggagcgcgaggcgtccccgagcaacagctgccaagactccacggacaccgagagcaacaacgagga

SEQ ID NO: 160118 - DNA, 122 bp, Homo sapiens
gagacggttcgccagagagtgcctgtccctggggggttgggctcgctggccttcaggccacgctgctgccctctccactgtgcagacagtaggtgtgggcaccccgggacagtcagttctgt

SEQ ID NO: 160119 - DNA, 122 bp, Homo sapiens
tattaattatttaaggtcgctagaagtccacaatatacctggaattcatctctatctctacgtaactcccagtcatctactcctctatgcccatttcctgcaaaatgaggatgacaataata

SEQ ID NO: 160120 - DNA, 122 bp, Homo sapiens
ctgataactgagctttctttagatgagagttattctcctgcttatactcagtattccctgcgaaggcatgctccattttaattattagattcacaaacaggaaggcattactttctcctgat

SEQ ID NO: 160121 - DNA, 122 bp, Homo sapiens
atcttgttcactgttcagtcaccagggcctgatggccgctcatgctcaatatagacttggcgcggagcggagtggaggaaggaaagagggcaggtgctagttggctggcctgcagttagaag

SEQ ID NO: 160122 - DNA, 122 bp, Homo sapiens
cctggctgccccgcgcctcgccggagcccgagggggcgcaggtccggggcgagggccggccgggctgtttgatggcttcactgagaagagtcaaagtgctgttggtgttgaacttgatcgcg

SEQ ID NO: 160123 - DNA, 122 bp, Homo sapiens
gggaacgaaaaggcggacgcaccctgatcatctgtcctgtgacgggctcagccattggatcgcgaatctgcgttcgcgcatgcgtggtcctagagctacggtgacacttcgcgtgcggtgta

SEQ ID NO: 160124 - DNA, 122 bp, Homo sapiens
tgaacagacagcagcctgccgggctgggagaacaaggacctggggttgtacagtctgtggcgcacagagtccctgctggaaccacaggcggtgagtcaacgggcacctccgggctaggaggt

SEQ ID NO: 160125 - DNA, 122 bp, Homo sapiens
ttcctcatttgggtgaaaacttttacagggtcctccaggcttgcatcatttgaaggctagcgtctgccactctgcttccacgcttctagttggggactacccacttaacaaagccaagttca

SEQ ID NO: 160126 - DNA, 122 bp, Homo sapiens
agccgatgcctgtcagacggagcagtttatcaccacactcagttgattaatacctgtcggcgggtgttcagacacgcggcaatgctgccctggagtcccagaggtgtctgtgcacacgggaa

SEQ ID NO: 160127 - DNA, 122 bp, Homo sapiens
ccgagccagcagtgacaacctgctggggtctgcttccacactgtggacgctttgttctttcgctctttgcaatatatcttgctactgctcactctttgggtccacgctgcttttatgagctg

SEQ ID NO: 160128 - DNA, 122 bp, Homo sapiens
cgagactcacccgactcgtggccacaccgggagaactgaagcggcagtagccggcggagacgcccgacccgaaggccggctgctagggagcagacagctgaaccgcttgccagacgccgaaa

SEQ ID NO: 160129 - DNA, 122 bp, Homo sapiens
gaaggcctcttcaggtaggtgtcatttaagctcagatctgaatggcaagtgtgggaagctcgggttgatcatatcaggcagagggaggagctgttgcaagtcttaagtggggaatgaacttt

SEQ ID NO: 160130 - DNA, 122 bp, Homo sapiens
ggcgcacacgtcactacttccgcgcgcccccattggctggtcttcacgagggcccgccctcgccgtcccagctggcctttcgggctgctacgatccagctccgtggcctaatgggagttgtg

SEQ ID NO: 160131 - DNA, 122 bp, Homo sapiens
gtgagtgaggggctcaagaaactctacaagagcaagctgctgcccttggaagagcattaccgcttccacgagttccactcgcccgccctggaggatgccgacttcgacaacaagcccatggt

SEQ ID NO: 160132 - DNA, 122 bp, Homo sapiens
tggtccggccccccgggatcccctgaggcccacgggttcctcttcgcccttgcaccgacccgcagggacatagaaccaagccccaagccggcccggctacaggaccgcctctgggtgccgca

SEQ ID NO: 160133 - DNA, 122 bp, Homo sapiens
acacattgggcagaaaatgcatttgcttagtccttccagtgtgacagttttaaatatccccgggcaacaaccacacaaaggcttctggctcatctgtgacccaacaacatgcaaaaacaaaa

SEQ ID NO: 160134 - DNA, 122 bp, Homo sapiens
ctctccggcgccgtaaggggcggggcaaagcctgaggggcggggcaatgagcgcgcgcggcgcctgacgggagagtggcggacccagaggcggagtctacaggtgggggcggggcctggaaa

SEQ ID NO: 160135 - DNA, 122 bp, Homo sapiens
agggtgggcgcggcttgacgacctcgggttcgagccaccaatgcctgaggcctgacgagccgagctgggagaaagactgcgcctggacttagctgatcttctgtttaagtaaaacattcagc

SEQ ID NO: 160136 - DNA, 122 bp, Homo sapiens
ctccggggactcccagctgatgggtaccatgactcctgaatgaggaataggcaggcgccccggggagcagggtgtggggagaggactgtatgttagccccactgccctgcccgggccgggga

SEQ ID NO: 160137 - DNA, 122 bp, Homo sapiens
tcttaaagctactttttccaataagactgtgaggccaccaagaggatgcacaagtattatcgggcactgataacttgtgtctctttccctagaagtatgagtggagatacataagtctgggt

SEQ ID NO: 160138 - DNA, 122 bp, Homo sapiens
aatccatttctggattctcgtaagagaacgtcttgtgttggggtgaactcatcagcttttcgggttgagaggagttttagtgtctgtggccgaggcactttcctctcatggtgtgtgcagat

SEQ ID NO: 160139 - DNA, 122 bp, Homo sapiens
ccttcctgggcgtgcagcacggagagggcagtgggaggaggacgctgcagccgaggtgcccgcagacacccccaagcccagtggtcaggtcagcatgcactggtcatgttcatggcgtggcc

SEQ ID NO: 160140 - DNA, 122 bp, Homo sapiens
aattaaacctttcttcataacttatccagtctcaggtagttctttatagcagtgtgaaaacggactaatacactggcaagtgaactgtggagagaagaaatgacagatgctcttctgagcca

SEQ ID NO: 160141 - DNA, 122 bp, Homo sapiens
tcattttttgagcaatgaccatttgtcattgtccttccctcgccttgttcacagttgtatcgttggcatctggtccagagcctggctctgagaaactgcagttacgaaatatttactgaatg

SEQ ID NO: 160142 - DNA, 122 bp, Homo sapiens
gccccgcgacgccttacagaggcgaacaccgtgcgtcttcccagcccggagctccaggatcggctctatttggccgtcctctgctttgctgcagttgggatgaggaataaaattgcgaatgg

SEQ ID NO: 160143 - DNA, 122 bp, Homo sapiens
tagcaataaattcacatcggctttactttgtaccactcacttctgttcccactgggtccccgccagcttcattatcaaccagatacgttgaaagtttgctggcagtgaatgtagagtgctaa

SEQ ID NO: 160144 - DNA, 122 bp, Homo sapiens
cgtggtgctcgcgggccagtgtgagttccaggtgggcgcggtcttggtaggccccacactcggagcagccagccggagccaccagccctgggcagtgaggggcttagcacccaggccagcag

SEQ ID NO: 160145 - DNA, 122 bp, Homo sapiens
tggctcaccgttccccatttagggtcttcccttctccccacttaagatgaagaaggagtccgtgtttgttccgtagcgtgtctccgtacaccaccaggggaatcccccttctgacactttca

SEQ ID NO: 160146 - DNA, 122 bp, Homo sapiens
gactggcggcggccagggtaggagagccctgtcagtgtgaaattagcctgaagactggggcgtggtattagtgcgtacgccaggggcacgtcccggtccctgacacccaggacactgtcgtt

SEQ ID NO: 160147 - DNA, 122 bp, Homo sapiens
ggaatacgcagagtcagtaagaccatggctacgtcctcgatgtctaaggtatgtggtggccgatgcgcactgtggctctaccgctgcctcattcccctttgaagaagggatgaagccgaggt

SEQ ID NO: 160148 - DNA, 122 bp, Homo sapiens
catgagaaatttgtgtcttaccaaagcataattttaaaaattacaaagcaaagacaggtccggttgggatgctagaaagaccaggtcttattaggcaataacaatgacgtgctccaggaagc

SEQ ID NO: 160149 - DNA, 122 bp, Homo sapiens
atccggcaaggcggcggctacagaatggctcacacttcaagcctccttcctcaaacaatccgatgggaaggacctggctgttcaggggaagcctttgctggcctctctttttacatggggtg

SEQ ID NO: 160150 - DNA, 122 bp, Homo sapiens
ggtccgggcccggggtggggcagcgggggccccgggggcgcgaggctgggctcgggcaagcgcgggcgtgggggctcggccgtccgggccgtgggcaggtggagggcgcggcgggggtgcgc

SEQ ID NO: 160151 - DNA, 122 bp, Homo sapiens
cagcccagtcccgatcggcgcacgccgctgttcgcgtgtctggttccaaataaagtttttcgcgactttgaattttttttttaaagcgcccgctgctgtctcggctgccgcgggcgagagcg

SEQ ID NO: 160152 - DNA, 122 bp, Homo sapiens
agcgtcacggagagcaaggccgctcgccggcatctcgggggcctcggcgccgcgcaggtgcgcctccagctttatggccagctctgggtctgaggctgggggagactaaaccgagagctgga

SEQ ID NO: 160153 - DNA, 122 bp, Homo sapiens
cagtttatccacgagactccattctaaagcatgagtcacacttagtatgcataggtccttcggtttcttgaatcagcttagttttctgctctcatttcacaagaatcactctcttccctcag

SEQ ID NO: 160154 - DNA, 122 bp, Homo sapiens
agcagtcctacgatctgcagcctggatactggcacaggagcaggggactggctccatttgcgtttgcccgggcattcattccacatcattcagtagccttcaaacagcagcacctggctctg

SEQ ID NO: 160155 - DNA, 122 bp, Homo sapiens
gacagccccgccccggctcccaccttcaccggaaggctcgcccttccacgcagtctgtttcggtccagagcccgccccaggccccgacgctccccgggccccccagctgaccgttgctccag

SEQ ID NO: 160156 - DNA, 122 bp, Homo sapiens
ttgagtatctccttctagaacagccactgcctatccagcattccttctcctttgaggcaccgctcctctccaacaccaatcatgttattctgtctgccacaggaatgtgcaagtgacacaga

SEQ ID NO: 160157 - DNA, 122 bp, Homo sapiens
cgcgcaacaatcagacgtcagcgccctccagccaataacggttcacttacttacggagaccgccgagggacagaagcctctctcaggtgtttgcgcctcaaggaagaatcaagagggaaagg

SEQ ID NO: 160158 - DNA, 122 bp, Homo sapiens
tcgcacccgccacagggtactgcagacccacatgctcgctccaaccaacacagagcctgacgccccggctacgtcatcttccagcgaccgcgcgcctgcgccccgcccctgccccgccgggt

SEQ ID NO: 160159 - DNA, 122 bp, Homo sapiens
tgggcacacaaaatccctgaaatgccctgacagtgacgtcgaaacggccaccaagcgttgcgcagctgcaggaggaaattcccttaattatgaatttacagaggggactgatcggggccgga

SEQ ID NO: 160160 - DNA, 122 bp, Homo sapiens
gataccgagtgcgtctagtttctactcaagagggactactatatcaaaagctttttgttacggttttcagaatcctaaggtacatttgtgtaaccaagtgtttttgtaactaaatgcagcaa

SEQ ID NO: 160161 - DNA, 122 bp, Homo sapiens
ctggcaaatgacaacgggcaaagcgaagcgtgggccaaggacggaggaggcggtgccgcgcgtctgccgtggtcacaagccacagaagtttgcttcactcctgccagaaaccggcaggacag

SEQ ID NO: 160162 - DNA, 122 bp, Homo sapiens
ctgcgcccacaattgggggctgacctccactgcaggaccccaggccttgctcccccgggacgcctctctcgggtgtcccaccgcaccactgaggccgcgcacgaccctcagccaccgcagcc

SEQ ID NO: 160163 - DNA, 122 bp, Homo sapiens
cgaccgaggctttctaggatttatgctgccagttgcagagaaaatggccctgagtgagggcgttatgactgccccacctgcctcctgtaaccgcgtggctgtgggattcggggctgggaatt

SEQ ID NO: 160164 - DNA, 122 bp, Homo sapiens
gccaagggtctcagggaagacctgtggggcgcggccgccctgccttggaggagcctgtcccggatcccgaagcgggagggtcttggagaggaggacacagcagttgccggacacgagctccg

SEQ ID NO: 160165 - DNA, 122 bp, Homo sapiens
ctccccggctcatgggatcctcccatctcagcctctccagttgctgggaccaccgacatgcgctaccacacctggctaatttttttgttttgttttgtatttttagtagagacaggtgtttc

SEQ ID NO: 160166 - DNA, 122 bp, Homo sapiens
caagccccagctccttccctacttcacatctccttcccaggaagtggcccaggggttccccgctcccagtgtcccccaccctaggagggctgtcagggctgaagaaccccaagcccctgacc

SEQ ID NO: 160167 - DNA, 122 bp, Homo sapiens
ctttccatcctctagtcagcttcttcccagccagccacaagcgaacaggctcgcaagcagcggatgaaacaggaagtctgacagcttgagtctgcagtgggacccctagtgttttcccactc

SEQ ID NO: 160168 - DNA, 122 bp, Homo sapiens
gaataacatttacatatgaaagaaaataggagatggctcagaataatatgtccaaggccacgcccaggcgtcagggattcatgaattttgtatacagtgtatgatgtttctagattaaaata

SEQ ID NO: 160169 - DNA, 122 bp, Homo sapiens
cggcggagacagctgtgaagtgtgaggttctttgtctgctggcagctaggggcgacgaggcgggacgtcatggaagtgtaagtcttctcgggcgcgtcccttttcgcccgaggagcccaacg

SEQ ID NO: 160170 - DNA, 122 bp, Homo sapiens
gcagtgcaacacggtggacgagtgtggagacggctctgatgagggcaactgctcggcgcccgcctccgagcctccaggcagcctgtgccccggggggaccttcccatgcagcggggcgcgct

SEQ ID NO: 160171 - DNA, 122 bp, Homo sapiens
ccaggctggagtggggtttttttctgttgttttccatgagactactgtttttcccagctccgaattcccgaacaccttctcccactcactatcttagcgcttagaaagcccgaaataagcca

SEQ ID NO: 160172 - DNA, 122 bp, Homo sapiens
tgacagaggaaatattgcttacgcccttaggtaatttcaaatgcacgtatgaaggccgtgcgggtttctgcaggcgaagcaaaagaaaggtggggccggcagggtcgtggggcgggggtggg

SEQ ID NO: 160173 - DNA, 122 bp, Homo sapiens
ctcagactccgctctggagtttctccaggactcagcctccatttccatgcctctgacagtcgggagctcctgtctcccacctctcctgggctttgcctccagtcccgagcctccagaggcct

SEQ ID NO: 160174 - DNA, 122 bp, Homo sapiens
tactaagatacccgtacctcactcagagcctgacagttcgtgggaactgcgggccgaggacgccaacagcattgcagaagtgcctcttgccacataagcgaagaccttttcttcagatgcac

SEQ ID NO: 160175 - DNA, 122 bp, Homo sapiens
aaattctaggctgaagtaatctttctgcctcagtctcctgagtatctaggactacaggcccgcacaacaatatctggctaatttttaaattattctgtagatacaggggtcatgctacgttt

SEQ ID NO: 160176 - DNA, 122 bp, Homo sapiens
tgtttattatttaatattgctgtgtgatcatgtgccttcctttacctgaaaacatgaagccgcatcacctttcttcttctttttcctttgccttctcattttctcttggtgatctggatggg

SEQ ID NO: 160177 - DNA, 122 bp, Homo sapiens
ggggcggggcggaggtacctagtttctgccccaggtaggtgaggctgtgatagaccttctcggccgcggccaggtgcgccaaggccgccagcagcgacagccagctgccccccgcgctcttg

SEQ ID NO: 160178 - DNA, 122 bp, Homo sapiens
gtcagagggagagtgtgggaggacctccccaccccgtgctctccccactgcaggggctggcggccatactgtgcacagtgctccactgggtgacacaaagagggtccccccagaccactcac

SEQ ID NO: 160179 - DNA, 122 bp, Homo sapiens
acagtctgagggagccactgtcccttgtccactgactcactggctggtccgagttttctccgcttctggcagtggtatttctttttgtcttggtcctgcatgatttaggggtagttgatgtg

SEQ ID NO: 160180 - DNA, 122 bp, Homo sapiens
catgagctggcaccgggggattggcagacccttgttcctggaacttctcactggttatcacgcctaatgttggaacactgtggtacagtgaactctgattcctggaattgttaccaggcgac

SEQ ID NO: 160181 - DNA, 122 bp, Homo sapiens
cggcgtcttcccagagcccggggctgtgcccgcccgatgcaggatgcaactgaggaagcccgctccaaagcaaaacaaaacaaattcctccagccatgccgtctttctccaacccactcaag

SEQ ID NO: 160182 - DNA, 122 bp, Homo sapiens
gaccctccgagccaggtgtgggtgcgccgttttttaagccggtctgaaaagtgcaatattcgggtgggagtgacccgattttccaggtgcgtccgtcacccctttctttgactcggaaaggg

SEQ ID NO: 160183 - DNA, 122 bp, Homo sapiens
ggcagtcgccaggggtgggcctgcttctcactgacccgtgggtcaggctgtaaataagagcgaccctcgattcactctttaccctgggccaggcagtccgatgcatcctgcatcccatcatt

SEQ ID NO: 160184 - DNA, 122 bp, Homo sapiens
aaggggtgaaaattttgtttcgataatactggggggcaatcaagtcgcaacaagggacttcgcagtcgctgaagcaccagctcctctttcgagcttaggagaccgcctccccaattccagaa

SEQ ID NO: 160185 - DNA, 122 bp, Homo sapiens
aaattaaagtctttgggaacactccagggcttggaagacataatttttccaggtgatggtcggagttcagtgaaggaaagcagagacatatatgtcaactgcttctaaaaagtgtaggtcag

SEQ ID NO: 160186 - DNA, 122 bp, Homo sapiens
tgggcatggtgatgtgcgcctgtagtgccatctgcttgggaggctaagccatgagaataacgtgaacctggaggtaggggttgtagtgagctgagatcatgccactgtactccagcctgggc

SEQ ID NO: 160187 - DNA, 122 bp, Homo sapiens
ttttctatgtgttattctaagcactttacattttattttatgttagacggagtcttgctccgttgcccaggctggagtgcagtggcatgatcccggctcactgcaacctctgcctcctagat

SEQ ID NO: 160188 - DNA, 122 bp, Homo sapiens
aggcggggcctcgctggggaggggcggggcgaggggaaggggaggagcgcgggaacgcggcgcccttctgtaagagacaagttggagaagagatcgagggagggagagaagtggtgaaggag

SEQ ID NO: 160189 - DNA, 122 bp, Homo sapiens
tctgcttcagaagctgtcctcctggcttctaacaaagatgtaaagtgaagcagcagcaaacgcaagagacacgaggcccctggcgggagggtgtgggagggtacagcagcctccggcaatct

SEQ ID NO: 160190 - DNA, 122 bp, Homo sapiens
ttaatgctcatgaactggaaaacgctttgaaaatacaacataggattaagagaggttgttcgaaaccctgaaaactgcacagcctcctgaaagagtggaaactagatgcatggcctgttgta

SEQ ID NO: 160191 - DNA, 122 bp, Homo sapiens
ccccgccacctacgtgctccaggcctgtctgggcgccgccatcttgccccgcagagatcgcgtttccgccgccgccagattccagcttccgccccgcagcccagccccgcctctcccggtct

SEQ ID NO: 160192 - DNA, 122 bp, Homo sapiens
cacctgccctctgggcctatatctgagaacagcaccagctcctcttggggttctaagatccggaatcccatgggggagggacaggggagcatgtgctgtggcctggaagggacagaacaggc

SEQ ID NO: 160193 - DNA, 122 bp, Homo sapiens
ccctcggttcctccacccacggagacaatttatacgaactctgtattgttctgctcctcccgctctgccacctggaatgtgttcccggctccggatcaggccccacgctgtcttctgtaaaa

SEQ ID NO: 160194 - DNA, 122 bp, Homo sapiens
ttgttctgaggctgagcttctcagcactggcagcccccctttttggatcaagccttttcacgtggagcagtcagatggctcagatcaggagtcttcgagcaaatccatgccaggtgggacac

SEQ ID NO: 160195 - DNA, 122 bp, Homo sapiens
gcctccccacccgagttgggcaggtccagaagcacagcagaggctccctgccccacaagtcgctccgccgtggccaggcccaggcccgaggctcctccggttattaccgccaccaggccctg

SEQ ID NO: 160196 - DNA, 122 bp, Homo sapiens
ggacaggtcgcagctgcacctgggtggggcggcactgcacgttgcggttgttgcagcagccggagcagcgctgcacctccacacagggcggccacaccaggaagttggcgttggtgcggtct

SEQ ID NO: 160197 - DNA, 122 bp, Homo sapiens
agaaaccgcagcccgataggattgcaagaggaacccttaaggaatctgctccttgatgggcgctaggaaatacacgtacatctagtacaaaggaatgcacatcacatggccccctgttttgg

SEQ ID NO: 160198 - DNA, 122 bp, Homo sapiens
gctcctcaagaaatgggagatgggcgcaaggctccggactccacggtgcagactgcacctcgcagtctccccaggtccgcgcagcagccacgcttcagccagaatactgggatcttcagtgg

SEQ ID NO: 160199 - DNA, 122 bp, Homo sapiens
tgcaccccagaggccgagggccgccctgaggagccatggtgagtgctgggtgggcggccacgaggccccggcaaaggccgggttggtggcaggcgtggcccagcgagcctgtcagaggccca

SEQ ID NO: 160200 - DNA, 122 bp, Homo sapiens
ctagaattctgctttaaaaccacaggctgtatcttctaaggactttgagaggcctacgcccgagccctcccctcacagagtccccgccttctctctctgctccctctcgaagaacccaggct

SEQ ID NO: 160201 - DNA, 122 bp, Homo sapiens
ccttgcatagagacatctggggacagcttccacggcccctcctgcaccagcacactcactcggccgaagggccagcgggactgaagcccagcccatcacactcactcaccaggccctgggag

SEQ ID NO: 160202 - DNA, 122 bp, Homo sapiens
ggagggggctggggagggagcgagcgagcgagggagcgcgggcggaatccagccccaagccgcccgcgccgccgcgccctcactgccgccctccctccctccctgcctcgcccgcgccctcc

SEQ ID NO: 160203 - DNA, 122 bp, Homo sapiens
tgtgtgtgtacctgcgggtgctgcaagcgggttaagctccttaggaagcgcttgcggcagcgtttgcttgcgtagggcctgcgtggagtaccagatagacgctgaggaagaagacggttaac

SEQ ID NO: 160204 - DNA, 122 bp, Homo sapiens
agaaacaggaggatttagaggataaaatgggtgggaaaaaggaagagacaggatgtggcacgtggaatattcagacagagcagctgaaacagccaatgaaagagaacaaattgtcagaggaa

SEQ ID NO: 160205 - DNA, 122 bp, Homo sapiens
gacaccttctccggcttcaaggtggacatctggtcggctggggtcaccctgtaagtgccccgcccccccgggcactcaccacacgcacactccgaggggcctctgcgtcttgggcagctgcc

SEQ ID NO: 160206 - DNA, 122 bp, Homo sapiens
ttattttctgagtccgaaaggccagaagtctgaaatcaagatatcagcaaaggccgcaggcgccatctagtggctctagtggagattccttcctcacaacttccagcttttggtgaccactg

SEQ ID NO: 160207 - DNA, 122 bp, Homo sapiens
catgtacttggccatccagactatgctgtccctgtacgcctctggccgtaccactggcatcgtgttggactccagtgatggggtcacccacactgtgcccatctacgaggggtatgccctcc

SEQ ID NO: 160208 - DNA, 122 bp, Homo sapiens
tcagctcccccatccataaaatggaggtgatgttaatgatgctgtccatctctcaggttccgaagttttcatcacctttatcccagcccttagcccaggtcctagcacgtggcaagcgcatt

SEQ ID NO: 160209 - DNA, 122 bp, Homo sapiens
actgcagcgcctgcagctggcattggccaacagaaagggcccaattcttctccacgacaacgcctgactgcacgtcacacaaccagcgcttcaaaagttgaactaattgggctacgaagttt

SEQ ID NO: 160210 - DNA, 122 bp, Homo sapiens
ggtctcgagtcaccaggaccagatcgaggatgcggccgaccccctgcccgatgtggaaagcgaagtctccacctcgtgattgggtctctgctgtcagagagcttcacgagcttgaggggaaa

SEQ ID NO: 160211 - DNA, 122 bp, Homo sapiens
aatgctggatcacgtggtaattctatttttgacgttttggggagcctatgttctgtctcccgcagcggctgcacaatttcatactccctccccggcagcgcccggctctgccgtccccatat

SEQ ID NO: 160212 - DNA, 122 bp, Homo sapiens
gttatgtacttgtgggtcatgatgttaaatgtgcttttccaagaatagccaagataaatccgaaaaagaaaaacaagcagggacgacttgccctaccagagttcagaacttgtcatgaaact

SEQ ID NO: 160213 - DNA, 122 bp, Homo sapiens
ggccttgagttaaatacagaactgaagcgcagccactataaccatattcccctctatttacgtagcacaggtgctagaagaaactgacacgaaaattgttctcatgcagctctgcctaccac

SEQ ID NO: 160214 - DNA, 122 bp, Homo sapiens
tccggccctccctgtctccccacacagatggacacaacgctccccagggtgagaagtggccgcccaggtgagcctggtgtttccccgggctgtggcaggggcaggagcagggtccgtgcctg

SEQ ID NO: 160215 - DNA, 122 bp, Homo sapiens
ggtggtatcaaagtcgatgcctcttcacatggcaataacagtgcatttaacattaactcacgggttaattctgcaaatgatttcatagcattactttggctagcacaacagttttagacagc

SEQ ID NO: 160216 - DNA, 122 bp, Homo sapiens
tatgtctccagcatccagcacaatccctgccattagggtcatggcttcataaaaacgtcacgaatgcaacgcagaagtgcatgcatgcatgaataaatgaatgatgcatgaaaagagcaatc

SEQ ID NO: 160217 - DNA, 122 bp, Homo sapiens
tgccagaggcgatgagcaccgggcctcctggcagcggctgggttccgcggcagcacgggccgctcccctgagcctgggaaggaggacacagagactgcccaggagcagcgctgagggggccc

SEQ ID NO: 160218 - DNA, 122 bp, Homo sapiens
gaggggcgaggccatggtgcggggacctgcaagagggccctgaccctgatagagaggggccgatgggcggccaggtgggcctgcgggtttaccttgttgaggtgagggttccgtgtcagcag

SEQ ID NO: 160219 - DNA, 122 bp, Homo sapiens
tgcacgggaaagcccctgcaccacacaggactgtccagcccgtgatgtgcctgcagtgcacgggaaaggccctgcaccacacaggaatttccagcccgtgatgtgcctgcagtgcacgggaa

SEQ ID NO: 160220 - DNA, 122 bp, Homo sapiens
cctcgcgctaacttgagcggcgcaggcgcagaggagacgtgtagaggtcacgtgcgcaggcgcagactgagactcaaaagttggcatatgcatccgcgtttcccagatctgaggcttttacg

SEQ ID NO: 160221 - DNA, 122 bp, Homo sapiens
cacacatggatcccagagtgagcctgggcccgggctcccgctcacctcgcacccgggcctcgctggaaaactccttgcagtcggatttcaggtggatgatgatttttgtcccggttctaact

SEQ ID NO: 160222 - DNA, 122 bp, Homo sapiens
ctttccatccgtttgcctccctgttccttccctctccttgctccctgccaaccctccagccgtgagcctgggttcatatgtcagcaggcctggttcatgcctgtgggtgtctgggcagaggg

SEQ ID NO: 160223 - DNA, 122 bp, Homo sapiens
gatccaaagttaggtctaattactataattttgaggtaatgatgagcaaaaatgctatcccgagatgtctgcaacagctgcagtgtaatatgaaaatatctgtgatttctgttggtaacaaa

SEQ ID NO: 160224 - DNA, 122 bp, Homo sapiens
gcagcgaggacaggaagtgcacgttgcaggcgggcggctgcggggcctgcaggagcgcgacgtcctccagcgcgctgagctctgggatcccggggtactccccgaggagctccccgccgtcg

SEQ ID NO: 160225 - DNA, 122 bp, Homo sapiens
cagcttgggctgggcgcagggaagggcaaacgttgctgagccgccgaggggctgggtcttcgcctttatttctggtgcacgtctagaggggcccgggcagaggccacccacggtccctgaag

SEQ ID NO: 160226 - DNA, 122 bp, Homo sapiens
ggagaactctccctccctggaaagggaatttgctggtgtcagtcactgtgctcacattatcgccaagatttacaatacactgtaaggcaaggagagcttgccacattttttagtgaaagaaa

SEQ ID NO: 160227 - DNA, 122 bp, Homo sapiens
agcctgggagtggaggtggttagggatcctgcccacctagagggcaatgtggggcctgcccgggaactgccacagtgaaacagtgcaagaaacaagtgtcagggctgctggtgagtccaaac

SEQ ID NO: 160228 - DNA, 122 bp, Homo sapiens
tggggttcaagggataggtcctctgtctcttcctttaaattattaactatttattacatccggaacctgtgagattcagcactcccaaccagaccctgggatgggtgagagaaaagcggggg

SEQ ID NO: 160229 - DNA, 122 bp, Homo sapiens
gggctcgcctacctggatgccctaacggaactcctcattcacaataggattgaatgacctcgaactaaagtgtcacgtacttcctgctcgtgatgctcgtgagcccgaacgaaggctgaaaa

SEQ ID NO: 160230 - DNA, 122 bp, Homo sapiens
agggcaccggctgtctctggcacctctccgcgtagcctcccttccccttacccccgagggcgctgctggccgggccgccaaagcctttcgcccccccagcgcccctcgccgcggaagtcctg

SEQ ID NO: 160231 - DNA, 122 bp, Homo sapiens
gacctggccttgctcctgcagatccccacgcagaatgcacaggtgagctgccgctgggcccggagcatgctgggcgtccccacctcgcagactgcacgctccaaccgccccctccacctcct

SEQ ID NO: 160232 - DNA, 122 bp, Homo sapiens
catccagttcctgggccaccttacctgggtgacttcctcactgaacccctccagtcgggacgagctcctgcagctgctagacaccgccagggtgagactctggggagggaggagggcaggat

SEQ ID NO: 160233 - DNA, 122 bp, Homo sapiens
gcttttaagaaaaagaatatgcaaaggctgattgaggcaaaaataacaggctatttctgacgttcattcagaatgccacctaactaggccagtttttggactgtatgccagcctctttctgc

SEQ ID NO: 160234 - DNA, 122 bp, Homo sapiens
cgcgagggaagcgaaaacaagcagagtggggacatggggacacgctcagagaccccgagccgtggaggtagtgggccgacgctggggacaccagggaggcggaaacttggggacacagcgca

SEQ ID NO: 160235 - DNA, 122 bp, Homo sapiens
actctagagaagactccctccggatgatgtgattctgattttttggaaggtattttacaacgttgttgactataggtaactgatcatgaaataattctcgtctatagacagccaaattctgt

SEQ ID NO: 160236 - DNA, 122 bp, Homo sapiens
caggtgacactgggccatgggcagttggggagggcaactcaggatcagccagtacgaatacgcgataaatcagttccacatcaacagtcacaggtgtcatcacttcccagagggtggccggg

SEQ ID NO: 160237 - DNA, 122 bp, Homo sapiens
tgctcagttcatttcactccaaatttgcagacattcttaactggtgagaaataatacttacgatttgatcactcatcagtactgcttctggaaagccaggactttctatatcatgatcgttt

SEQ ID NO: 160238 - DNA, 122 bp, Homo sapiens
ctgtcgaaaggagcctgcagggttccccgtgtgcctgtggctgtgactcgggagcatgtgcgtgaccatctgctacgggcacagaatgccaggctgccggcggtgccctctgtctcgttggt

SEQ ID NO: 160239 - DNA, 122 bp, Homo sapiens
acacgggctcctctggcccatggcccggccctgcctgcccctttctgcacccctctcagccgtgctccactgccccaccacttgcagtccccagagcaaatggtgtcatgttgtgcctccag

SEQ ID NO: 160240 - DNA, 122 bp, Homo sapiens
aggtgtccgtcagcttctgcagtttcttgcggttcatgtctggcgctcagagaatcgggccgcggcgggggtctctgggcgcgcggctaccgagaccctcgcgggacccccgcgagccctgg

SEQ ID NO: 160241 - DNA, 122 bp, Homo sapiens
agcaggacgacaccgacagaggcgcctcggactggggccaggcctggagcctccgctccgcgggcagagagaagaaagcaggcattgtcggaggactcacacaagcacttgtccctaacaaa

SEQ ID NO: 160242 - DNA, 122 bp, Homo sapiens
ccgcacctcctgctccgcggcccgccgccgccagcccggggctgacctctcagagcagggcggaggattttcacagcacagcttcccgagagagcgggattaagggggaactgctcgggtgg

SEQ ID NO: 160243 - DNA, 122 bp, Homo sapiens
gacagatgggcttgtgcaagggagagttcgagccttccggacgcctttgcataaaaatgacgagacctgtgcagctttgattatctctggaatactgcaggaacctagggtcccactacttg

SEQ ID NO: 160244 - DNA, 122 bp, Homo sapiens
tacagggcttctcattccactccaattgagtggtatccggattatgaagtggaggcgtatcgccgcagacaccacaacagcagccttaacttcttcaactggttctctgaccacaacttcgc

SEQ ID NO: 160245 - DNA, 122 bp, Homo sapiens
agaggtacccagggaccctctcccccaaaggtgagacccagagttgctctccattgggggcggggtggcattgtgcctgggctgttgccttttcatggacaagtgggcccagaggataccaa

SEQ ID NO: 160246 - DNA, 122 bp, Homo sapiens
gtcagagcagagcaaagtggccaagagcatgggctctgggttccagtgccacctcaccaccgtgtgaccctggacaggtgacttctctctgagtctcgatttcttgatgtgttaggtgggtg

SEQ ID NO: 160247 - DNA, 122 bp, Homo sapiens
agcctagaacatgtgctgaggagacagagctagacctgttagcagagacagacctgttagcggagtggatagctgggccagcaggtctgaagtaacgctatggaagagcaggccagtaacag

SEQ ID NO: 160248 - DNA, 122 bp, Homo sapiens
acgtaactctccaccgcccggtggcgggtcacgtgactgcgtctccccgccctctcaccccgctgcctctaggttctgggaagatggcgaaggtctcagagctttacgatgtcacttgggaa

SEQ ID NO: 160249 - DNA, 122 bp, Homo sapiens
acagcagcagcagcaacagtggagactggggatgggacctggccagtgaccagtcctctccgtccaccccgtcacccccactgccccccgaggcagcccactttctgtttggggagcccacc

SEQ ID NO: 160250 - DNA, 122 bp, Homo sapiens
aggagtggcaagatttgcgctcgggaagtttgattctgaagactgcgcttgttcttataacgtcataatgcttattttcacagtattggctgggttgaagaccacaataacatttatttgct

SEQ ID NO: 160251 - DNA, 122 bp, Homo sapiens
cgccagggctgccggggtgtgctgctggggagcgtggagtgggcaggaccacgctggacacgcagttcgcgtgcggccgctccccgagcagtgcgcggcgtgggcggaggagcggctccgcg

SEQ ID NO: 160252 - DNA, 122 bp, Homo sapiens
atgcactttcgcaggtttgacaccagctgttaggcttggccacgttgtgtgttgggcactcgtgggtccatgcgccaccactgagccacgtagctggaaaggctgcagtctcgaggcctcat

SEQ ID NO: 160253 - DNA, 122 bp, Homo sapiens
ctgttcacatggttcccctccctagggctacacccccgatcgactccctatcagcagctgcgtgacagtcccagacctgacaccccccaacccagctaggagtctgtttgccaaagttacca

SEQ ID NO: 160254 - DNA, 122 bp, Homo sapiens
cattgtgaatgtactaaagccactgagctgcttactttaaaatggttaattttagctgggcgcggtggctcacacctgtgatcccagcactttgggaggctgaggtgggcggatcacgaggt

SEQ ID NO: 160255 - DNA, 122 bp, Homo sapiens
gtaaggagtatcaaatgtggagaaactgttgcctggactcaacattgtggattcttgaaacgtcatttttccaggaacaccagtgttaagcagatggacctttctgtgctttactagtaaag

SEQ ID NO: 160256 - DNA, 122 bp, Homo sapiens
gtgacatttagtacattcacaatgttgggcaaccgtcaccacaatctagtttgacaatctcgtccccccagaagaaaccctgtacctattcagcagccactctctatcccccgctcctccca

SEQ ID NO: 160257 - DNA, 122 bp, Homo sapiens
acctcgtgatctgctcgcctcggcctcccaaagtgctgggattacaggcgtgagccaccacgcccggccaggtcccgaaacttaagcttcatttgtttcactgcaaatctgcttctgcctac

SEQ ID NO: 160258 - DNA, 122 bp, Homo sapiens
ccccgctccgcgcattcaggagaggctatgccaggactggcgggcagagcgcagcctgcacgcgcgccccatggcgcaggatggggaggaagacgccacagagacctgccgacactcgtcat

SEQ ID NO: 160259 - DNA, 122 bp, Homo sapiens
ggtgggccacaaattgggcaggagctggattggatgtctgttggatgagtctctgaattacggaggtcagggacagttttctgagttgtagagtcagagaaatatgggtaagagacatggag

SEQ ID NO: 160260 - DNA, 122 bp, Homo sapiens
tgtccggaaatgctggcgtatgggagttccttaattagaaatgcgttagcgaatattatacgcttatactatgggcggacgggtggagagccttaaaaacaacaacaacaaactaagcagtt

SEQ ID NO: 160261 - DNA, 122 bp, Homo sapiens
caagctcaagaataagcttgctccaggaggcccaggcatgtctggcacttaccaccactgcggagtcctgcctgggtcccatgacctgctggctagtgagggaaggaggggagaaaatgacc

SEQ ID NO: 160262 - DNA, 122 bp, Homo sapiens
gaggaacgcagggttcaaatcccagctccacttaacctcccccacactgcggcgacgccgcgccttttttccgacccaactgagccggaagtggaggcgcgggcttcccatgatgccccgcg

SEQ ID NO: 160263 - DNA, 122 bp, Homo sapiens
tagcaatggtccagtcactggtcaccttccagaaacagggcccccatgaccagcgagaggcgggatgcccagcaaagccacaacgcgtctcgcccgctcattccccatcaccgctcagctca

SEQ ID NO: 160264 - DNA, 122 bp, Homo sapiens
ccagacaaggccgggacgggggcggccaaatgcccagcaggaagcgggaggcgtggaattcgtgaacagggtgaaaaatgatggaagctgcctggggtcttaggctggagctgcccctcaca

SEQ ID NO: 160265 - DNA, 122 bp, Homo sapiens
cctacagatttatgtctccctgtctctcctcttattcaccccatggtgcattcagaatcccgttttcgtgcctccctgggttgtcatttctcaggctctggctccttggcctggtttacttc

SEQ ID NO: 160266 - DNA, 122 bp, Homo sapiens
tgaggccacgcccaatgttcaagtctataaaagtcggtgccggaggctcccagctcagatcgccgaagcgtcggactaccgttggtttccgcaacttcctggattatcctcgccaaggactt

SEQ ID NO: 160267 - DNA, 122 bp, Homo sapiens
gtgcagcgcccattgggacataacggcagtgcggcgcgagccagaggaatgggctggaaccggatctgtttccagacgcagaatgagtggctctgtgtgaccataggcagatgctgactctg

SEQ ID NO: 160268 - DNA, 122 bp, Homo sapiens
caaagtagactgggatgtggccgtgcttggtaaactgtaaaatgattagcatacgtgaagcgttagtgtgctccctggcagtcagtcctcacgtttacgatggattaatgaaggcagccagg

SEQ ID NO: 160269 - DNA, 122 bp, Homo sapiens
gttctacatgctaaagaccaatggactctgcaccagatcatccagtgggagtcccagctccgacacttacaagctgagcgaccttggacaatacaatggcaatgctaacaagtttaattaac

SEQ ID NO: 160270 - DNA, 122 bp, Homo sapiens
cgcgttcagaagctccagctgggaaactggagttggcctgaaagcagctccaggatctcccggcggcggagaggtggctggaacgtctgtctgtcgctgtccattttactttgccgctcccg

SEQ ID NO: 160271 - DNA, 122 bp, Homo sapiens
ttgctacccaccctagttacgtcacgcgcgggggcggggcccggggtgattggcggcggccggagaagtgattggacggcgccaggccttgcagctaaactattagttccgatgcacgcttt

SEQ ID NO: 160272 - DNA, 122 bp, Homo sapiens
ctgcctccccagcaagaaaagcccagagtttaggtcatgagggggaggctttattgacaacggagaaggcagagttctaggcaagttcacacaacactgctccaagggtccaggcacgggtc

SEQ ID NO: 160273 - DNA, 122 bp, Homo sapiens
tgcactccttctgccccggggcgccccccgccagcccctgcagcctccccgcggagctggcgtttctgcgcagccggacctcggcctggcccccctctagcgccctgcaggggccggggctt

SEQ ID NO: 160274 - DNA, 122 bp, Homo sapiens
gtccgcgacccctcgcgccccccaccccgcgactagcggctgcccccggcccgcgccccccgccaggccaaccgccgccaaatcctcgcgccagccttccgggtgggcacagccactgtggt

SEQ ID NO: 160275 - DNA, 122 bp, Homo sapiens
aagctacgaataccttttctagtattagtacgtcccatgcaatatactagaaatgttattcgttatttatgttaaatttaattttattagggcatcctatattttacctgtcaatccaaccc

SEQ ID NO: 160276 - DNA, 122 bp, Homo sapiens
cccagaacagacctttgcccagcaggaaccaggtttctgcagcgtctggatgagcgtgcacgaagcacacgcccgaaaatcctgagcacgtggctctaccgagggactggaagcgctccagg

SEQ ID NO: 160277 - DNA, 122 bp, Homo sapiens
gtctcagttgtacctgatgaggtagccaccattgcagctgaggtcacttctttctccaaccgcttcacccatgtcctcacagcagggggcatcggccccactcatgatgatgtgacctttga

SEQ ID NO: 160278 - DNA, 122 bp, Homo sapiens
ggtcatgggactcacactcactttgctcttacctctttcttattttcacatgcatcccatcgacactcatgtctaatccagaagactggtagtatataagatcccaaatattaccactggct

SEQ ID NO: 160279 - DNA, 122 bp, Homo sapiens
ctgatctgagcacccctcaccttggtccatctgctgaccatctaaaatgtgtaagcccagcgtcagggctcagtgtgtgaccaagaacagttttcctgtttgaggagttacctgataatgct

SEQ ID NO: 160280 - DNA, 122 bp, Homo sapiens
cctgtttatcatcttccgcacctgcgccctgggctcactcgctggggctgccggaggacgcgctccttcaggacccgctgcggccaccaggtggagcctctttatcatcttccgcacccgag

SEQ ID NO: 160281 - DNA, 122 bp, Homo sapiens
tactttggttctggttttgtatcttgtttttctagtaaagtatcagtaggatacagagtgcgtgattttgtatgactttgggaataatagttcattttatattattctaagcaattgtgtct

SEQ ID NO: 160282 - DNA, 122 bp, Homo sapiens
aaagaaacttgcgttaggcgtccgggaagcgcgcgcggctccgagggccgccaggctgcgcggattgttgctgggtgaacgaatctcacacaaatcccagacagaaagcctcacctccccag

SEQ ID NO: 160283 - DNA, 122 bp, Homo sapiens
gcgctcccccggcccgctccttcctcccacccggcgtctccgggccgctgacgttgcccgcgcctttacgccgtcccagcggtgctgcgcattctccaaccacggcccgggccgccggggcc

SEQ ID NO: 160284 - DNA, 122 bp, Homo sapiens
ttccgcatcctcaagctggcgcgccactccaccggactgcgtgccttcggcttcacgctgcgccagtgctaccagcaggtgggctgcctgctgctcttcatcgccatgggcatcttcacttt

SEQ ID NO: 160285 - DNA, 122 bp, Homo sapiens
ttttaagtaccaagaccgtccatcctgaaatttcggcttatttttgagaaacttacctgccggggatacctgttgttttgctctttaggaaagggcagcattggacgcacctgctttggctc

SEQ ID NO: 160286 - DNA, 122 bp, Homo sapiens
ggatgttcaagacagactgcgcgccggtttcgggcaccgccgaacatggcttccctgttccgtttctaatttacagcctgaaggtaaaaagtacactgattaaatccatgttaggaggagca

SEQ ID NO: 160287 - DNA, 122 bp, Homo sapiens
ttcgccggccgggacagcgcagccgggtttcagctcgttctacggtccacgtcagaagatcgcctccggcgccgcggacgccggagaccactgtctgcgcccccgcacgcacgcacccacgt

SEQ ID NO: 160288 - DNA, 122 bp, Homo sapiens
gctcgaatgtacaaggcgggcgtgatctgcgttgcaccctgggagttgcggtccaggaatcgtggctgccgctactcccaggcgttatgggaacggagtcccctcctcttcccgacgtgccc

SEQ ID NO: 160289 - DNA, 122 bp, Homo sapiens
atttcaagactatttgagcttaacatcttgagaaatttgcctagcttcttgccagttcctcgccaaagaggaaaattttatggtagaccacgtcacttatttcagatcatatcctataagta

SEQ ID NO: 160290 - DNA, 122 bp, Homo sapiens
cacaagcagaggtgcaatttgaagctagattctcccactcttaaactagtgccggacagacgaaggcctagcacatgggctacggagccctagtagattccagtccccacactgagccagga

SEQ ID NO: 160291 - DNA, 122 bp, Homo sapiens
cgccgtaacctacacggagcacgccaagcgtaagacagtcactgcaatggatgttgtctacgcgctcaagcgccagggacgcactctgtacggctttggtggctgagcctcaccccggcttt

SEQ ID NO: 160292 - DNA, 122 bp, Homo sapiens
cccaaagagaaagaaaaccaaaagaagtcccgctacagtgacctgcaacgcgcgcacgctcgccgcggcggtcacttatagagcctgcctggaaggcacgcctctttattcaaaatggcccg

SEQ ID NO: 160293 - DNA, 122 bp, Homo sapiens
cccttcgccgaggaagaaatcctctggggcgcaggagagtttcttcccccaaactccagtcggcagcaaagcggggccgcggggtccggccgcggagctccgccgtctggcacacagggcac

SEQ ID NO: 160294 - DNA, 122 bp, Homo sapiens
caagaagaggggagatgggccaggcatggtggctctcgcctgtaatcccaaccctgtaatcgcctgaggtgagaggatcgcttgagcccaggagttgaagaccagcctgggcaacataggga

SEQ ID NO: 160295 - DNA, 122 bp, Homo sapiens
aatgatttaatcaatcatgcctatgtaataaagcctccataagaacccaaaaattctgtgcgctgccctggcaaattaatggaacccaaagagggtgttgcaagaacctcaatttgtagccg

SEQ ID NO: 160296 - DNA, 122 bp, Homo sapiens
ccctgaatgggggcggggctgcgagtatggagcatgcgcagtggcctcgctgggggatcccgtagaggtttggcgtgtggcctgcgggttccccgggcgggtcgacgtgcgctcctctctgg

SEQ ID NO: 160297 - DNA, 122 bp, Homo sapiens
cggtagctcagccgctccgcctctcttagtccccgtgattcccgccgcccaataggatcgcgccctgtaggacgctcccttgagccttggcggtggcagccttttagtctgttccggtcttc

SEQ ID NO: 160298 - DNA, 122 bp, Homo sapiens
ttattccggacatcgataaaaatggaatcgacgtgtggcctttcctggtggcttgctgcccggagcgtgaggttccgaggttcatcgtgtggctgtggccgcgcctccttccttcctgtggc

SEQ ID NO: 160299 - DNA, 122 bp, Homo sapiens
tcatatcacctctcctctaagattctctgatcccttgaaagttctcacccagctggaaatcgaatatgaactatatttaacaggattttaattggaagtaaacacacagacacaccacacac

SEQ ID NO: 160300 - DNA, 122 bp, Homo sapiens
tgctatcagttggccataggacagcctgcagccccacccccaggaacacaaaatctcctgcggggctggaaaagcttgtaagtaaatgattccaccttcctggaggcctgggcctgacccac

SEQ ID NO: 160301 - DNA, 122 bp, Homo sapiens
ctccatcaataatgtattgaatattgttattctaatatttcagttgagaaaaaggacactcggaagagaaacttaggacaggctccataattttatcagtgaggcagtgctgaaagaacaca

SEQ ID NO: 160302 - DNA, 122 bp, Homo sapiens
ctcacatggcgggggcagcgggtggaggacttggcagcggcagtgatggcggcggcggctcgcgctggctccgactggcgctggctgcccgggacggaaagatggcggccgcgcgtcacccg

SEQ ID NO: 160303 - DNA, 122 bp, Homo sapiens
ggcggggcctcagtcaggggtatagctggggagagtgaggaggctgcccagtcacagggccgggctgagattggccaaggggactttgatgatctgtctttgcagatgtcagtgcagctgcc

SEQ ID NO: 160304 - DNA, 122 bp, Homo sapiens
gtttccgacccccgcccgcggccggctcccggcggttcaagtttctgcgcccggaggacgcggccttagccaatcccagggctacagggcgcttttaaaatgcaggtacggctgcggggagg

SEQ ID NO: 160305 - DNA, 122 bp, Homo sapiens
tacatggccaaggcctattcctgtagcaaaattttaagtcttccaggagctcttcttttccgtcctcacagatccatgcagactcacctggttaaaacaacaaaacaaacacacacatatta

SEQ ID NO: 160306 - DNA, 122 bp, Homo sapiens
agaggtaacccaggagcgtttggaaaggagtagggaggctccgcggccgagcccgactggcggatcgagcctgtttaatggtttgcttgcttgccgggagttgtagttcaccgctcgcccgt

SEQ ID NO: 160307 - DNA, 122 bp, Homo sapiens
gtgctgggcctttgcctgtacaattgtttctcaagcagttgtgtccctgtggctttggtgcgcctgtgtgcactttctccctccacctggagcatgggctaacaccggaggaaaggaaaaga

SEQ ID NO: 160308 - DNA, 122 bp, Homo sapiens
agcaagcaagctcaagggttctcggggtgggccatccccgaggccatccgcagattttctcgcactctttgctccacccccacgtgcaacaaggacaaccggctgccgcctccagcttccag

SEQ ID NO: 160309 - DNA, 122 bp, Homo sapiens
ggggcctgtgcttgtggctgcagcagccccttcccatcagataaggacattgttcatgcgcggactggcacccaggacaaaaacaacacccacaaaacctggtagccccacttaatgttccc

SEQ ID NO: 160310 - DNA, 122 bp, Homo sapiens
gctcaggcgtccgggtggctccggggggctccaggcgggggcgccatgggcggcgtggtgcggccagggccggcgggactcaagtgcggggcgggggcccagggcccgagctggtggcggcg

SEQ ID NO: 160311 - DNA, 122 bp, Homo sapiens
aaaacttaaaaaactgaaaaaaacttaaaaattaaacataattttaaagaaaagacagcccgggttaggaagctaggtctcccacgtcagcacgtgccctgcccttcctggggttctggggc

SEQ ID NO: 160312 - DNA, 122 bp, Homo sapiens
tatcctgggcattgagtgaggcataggagattttctggtgtggcttctgcctcctcagaacgtcagggcttaatgagggtttcttgcggctctgtcagaatgcatgaatggtgaatggtata

SEQ ID NO: 160313 - DNA, 122 bp, Homo sapiens
atactgagccgcctttgtccccaggaaggacatacactctcatctaccggagagtcctggcggaagatgcaggagagatccaatttgtagccgaaaatgcagaatcgcgagcccagctccga

SEQ ID NO: 160314 - DNA, 122 bp, Homo sapiens
gccaaatcatatcacagtttatggtattgttactgcagcctgaacaggctaagatggtgccggcctgtctcccacctgtttctgaacatcctattcatcctgtttggctcaactcaaaagtt

SEQ ID NO: 160315 - DNA, 122 bp, Homo sapiens
aggggaacgcattgaaaaatgcccagacatttctctctgcccaatgggctgtaacagcctcgtcagagaggctggtcatatcagtccgtaaaacatttaaacaaagaccaaaaatgacgctc

SEQ ID NO: 160316 - DNA, 122 bp, Homo sapiens
tcaagttatggaggctgcgtagtcaagtcattctttttatgactctgaacctaaaatactcgcctttgaaaagatcacagtgattgattgtgagtagtagacttgtcccatcaagatgaaat

SEQ ID NO: 160317 - DNA, 122 bp, Homo sapiens
aaataaagtctgaaaactttaaaagcattgcttttgtccatcctcaccagcgcgctggcccgttggcttcttgctccgctttgtggtgggagcacggacttggagctcccttgggtggccct

SEQ ID NO: 160318 - DNA, 122 bp, Homo sapiens
catctttggcacatccctcagcaagctagaaacagaactctgcgttttttccataaagtacgagaaataatgatttcacctttaaaaactgccttcctgagtaagtgtccgtttggtcaacc

SEQ ID NO: 160319 - DNA, 122 bp, Homo sapiens
aacaagggcgtggccaccaactggctgcgggccaaggagcctgccggggagaacggcggccgtgcgctggtgcccatgttcgtgcgcaagtcccagttccgcctgcccttcaaggccaccac

SEQ ID NO: 160320 - DNA, 122 bp, Homo sapiens
tatctagcatgtatttcttaccttacatatgtcaggcagtaaaccccccaaaacataaaacgaatgggacagtatgttccttggtttaccgttgtgcttgagcttgtatgctgtacagtctc

SEQ ID NO: 160321 - DNA, 122 bp, Homo sapiens
acgtcaccggaggatgtggcagagtcggcgcgggagagctgggccgggaggcgccggaagcggcggccggggatccgctgccactgcagcctacacccttcccggccctcggtgcttgtctt

SEQ ID NO: 160322 - DNA, 122 bp, Homo sapiens
ttgttatttatacaaggatgcagagaacagtacagctggagaattaaatggagagatcagcgcacagatgggtaagaaagcactgttttgccaactggataacatctggcacattagagtca

SEQ ID NO: 160323 - DNA, 122 bp, Homo sapiens
acgaacagagacgtgttggggggacgcaggtagcgggacatggcggcggcgtgtctcggccgggcgcactaacgggctcagcaaaccgtccgcggctcaggcggccgagcctcagacacaca

SEQ ID NO: 160324 - DNA, 122 bp, Homo sapiens
cgcaggtgcaggctacccatgcagagtggcagcaagcaaggaaggaagggtaacggggagcgatgattccgcgggaacagccagtgcccctgggagctgctaagctcctcctctcagttgtc

SEQ ID NO: 160325 - DNA, 122 bp, Homo sapiens
tggttacaaagtcatatatcagatctctatttgcccattgctttcttataaatattttaacgtacatatttaaacataaaaaatgatatccatctaaaattaattgttatctatgtctattc

SEQ ID NO: 160326 - DNA, 122 bp, Homo sapiens
actgtgctgttctgcgtcctattaaatccaaaaggggtcttttgtaaacctttctcctgtcgtcaccaggggaaactggagcacggttaaattcgtgaggctgtttgctgtgtacacaatgc

SEQ ID NO: 160327 - DNA, 122 bp, Homo sapiens
catgttatggctacatggctgcaataacaagtggagttatatgcctgtgctacaaagtcacgcagcatgtaagcatcttacctcagcccatccttgaccaaagcacagccatgttccttaca

SEQ ID NO: 160328 - DNA, 122 bp, Homo sapiens
tttcgcacctctctcccgagggctcctcctgggcagccagcaaacgcccgctcctcggcccgcccacccagctgcctgcaaaccccgggcctgccactccctgtagagccgccggggcccac

SEQ ID NO: 160329 - DNA, 122 bp, Homo sapiens
tggagccgaggcgcaggtggcgctgggtgagtggtggggcggcggaggtgcaggaactcccgcctcccgctcatccccgctcctgaacgaactttccgcttctagggaagctaggggttggg

SEQ ID NO: 160330 - DNA, 122 bp, Homo sapiens
gcgttggcgagcaggaatctgaatccagctctgaccgattgtgaaggcactaggtaatcccgtctatacccgacgaaaaaaggaaatcatcgaccctttctccccacccccaccccgaaacc

SEQ ID NO: 160331 - DNA, 122 bp, Homo sapiens
agtactagtcctctggcgccggctcccagcccctctcgtacccttcaaatcgcgctccgccgctagactctcgtgatagctgagactttccccggaaggcccgcccccttcgccggagaggc

SEQ ID NO: 160332 - DNA, 122 bp, Homo sapiens
gggagggcagggtgctgactccagggaccacgacagtcggccccggtggtggggattccgcgcgggacccacgcgggaacaaagaggcggctggacggcccagctctccgcacccggaagga

SEQ ID NO: 160333 - DNA, 122 bp, Homo sapiens
gggctggggcggggccgtcggaggggcggggcgggggctgccagacgggcgcgccagccgcgccaagcatccattacgcctctgccagacctgggcactccagggagccggtggcgccctcg

SEQ ID NO: 160334 - DNA, 122 bp, Homo sapiens
acccggatgcccgcagccccaccagcccagtgcctgtgcccgtcatgtaatctcacccgccgccactaggtgtccccaacgtcccctccgccgtgccggcggcagccccacttcacccccaa

SEQ ID NO: 160335 - DNA, 122 bp, Homo sapiens
ggaggagaccacagtcattccttttgtaataaaacatacaaagccagaacctgaatggaacgcaaggactctctttggagaaaaatcttccttattctctttaatgtatgacattttcataa

SEQ ID NO: 160336 - DNA, 122 bp, Homo sapiens
ggcccccttagtcactctgctccagacacattggctactttgatattccctgaaaattcccgggactctcctgacttggggcctttcaacttgctgttccttttgtttagactgcacttacc

SEQ ID NO: 160337 - DNA, 122 bp, Homo sapiens
caaggcagcatatgctgctcatgggaagttaaacaattgcacttctaaataacagctcaacgtggaacagaagagatgtcacaaggcaagatatgattaattgccaaatgaattatttaaat

SEQ ID NO: 160338 - DNA, 122 bp, Homo sapiens
agccccgcccgcaggctgcggagggagccggagccagagcggagccagagctcagacatccgggcgccagcgaacacctgcgagcggcccccagggcccgcggggggagcgtggggcgccgg

SEQ ID NO: 160339 - DNA, 122 bp, Homo sapiens
gtacagcgctggcgcaggtagacccgagccggcctggggtctgcagcggggcctgctagccgaagtctccgccaggatgggccgccagagcccaatcacacatgagaaacgcgacagatgct

SEQ ID NO: 160340 - DNA, 122 bp, Homo sapiens
ataaagtgctgcggaagaatttttgtccagctgtgagacgacgagtgcgtgaagtgaaggcgattgagaggggctgagggaattgtcctctgtggaagggactttcttttggccctaggccc

SEQ ID NO: 160341 - DNA, 122 bp, Homo sapiens
ccagccctcctgctctggtgactgaggaccgccaggcaggggctggtgctgggcggggggcggcgggccctcccgcagtgcaaggccgggcctggcggggtgaggtagtaggttgtgtggtt

SEQ ID NO: 160342 - DNA, 122 bp, Homo sapiens
aggcacagactcacggagacatcctgcagtgggacttccacgactccttcttcaacctcacgctcaagcaggtgcgctggactggggtcacctgatcggggccacctgtccttcttgtccaa

SEQ ID NO: 160343 - DNA, 122 bp, Homo sapiens
ggattgttctgttgaaacagcgtgactgcaaatattttaccaatagatcagtgaaattcacgtgcccttgaacattttcaaaggtatgaaatcacctgaaataattttttagttcatttttt

SEQ ID NO: 160344 - DNA, 122 bp, Homo sapiens
gggcacagggcgcgaggacacagcctagcacactagggactcacacttcatgttcttcatcggcaagggaatcatcgcgtgaaaaatggtccaactttactcgcagccggaaactgcagtgt

SEQ ID NO: 160345 - DNA, 122 bp, Homo sapiens
cacaggtacccagtggtgtgtccactgtgaggccagcgctgacaggtgggtctgtggcagcggcgggctcccaccagcgcgggactccttggagacccccccatcccacccttgcagagggt

SEQ ID NO: 160346 - DNA, 122 bp, Homo sapiens
cagccccgcacctcccgtcccggccgggcgctgcgggtagggggagcggagcggagggggcgcctcccacctttgaatctcctggctgagggcctctgggcagcgattacacccacccttgg

SEQ ID NO: 160347 - DNA, 122 bp, Homo sapiens
agccttggcgaggccgcgccctggccgtgcgcgccagtatcccactcgcacggcgttccccggagtgagggtcccttccacgacgaagaaagacgcccctttcgcaaaagcgacttcgtctg

SEQ ID NO: 160348 - DNA, 122 bp, Homo sapiens
tccatgggaaaaaagtctggttgcttcgcttgcatactggagcacaacttccttatacaccgcatgcagcgtccctggcagggcaaggtacacagtactccaggtagtgattcgattccttc

SEQ ID NO: 160349 - DNA, 122 bp, Homo sapiens
ttcagctgaggtgccccgccccaatcccaggctctcggggaccccaagaagggagctacccggtgcttctccgagcggtccttacagctttggagactctgctgctgcccaggggtgtagtc

SEQ ID NO: 160350 - DNA, 122 bp, Homo sapiens
cctgtttctgtcagggttggcccaggcccccacagctttcactcacattccaattctaagcggcaggagggagtttgccgatcacaagcatcagctatcattagttcatttcctttagtgct

SEQ ID NO: 160351 - DNA, 122 bp, Homo sapiens
agcaactacggtgtctaatagaatcatatactagttcaataatgatttgaatctattgatcgtctttgcacagtcaagtgtggcaacttctccctgagctcctacagtgacattctgtggca

SEQ ID NO: 160352 - DNA, 122 bp, Homo sapiens
tctgagctttgcccaggcgctctccctctcccaagcgcacgtccccagcagctctgccatcggctgatcctgctcagtcctgcagtcaactaggactttctgatcaactcagttgtaggaaa

SEQ ID NO: 160353 - DNA, 122 bp, Homo sapiens
cactcttccctccatcttccacattcaggcaaagctggccccggggagctcctgcgcagacgtccctcacggccagggaggccgcaatgaaggctgaacctggggaaggggcccaggtgcgg

SEQ ID NO: 160354 - DNA, 122 bp, Homo sapiens
tccaggccctgattttgtcatctttcatttgattcctatagcactacgatttcactgtctcgattaaaaatgatctttttatttcctggatgttacgggctgaattgttttcccccaaaatt

SEQ ID NO: 160355 - DNA, 122 bp, Homo sapiens
agttatcatcagttgtcagtataattggtttttctgattcttttcttcatggcatctagccgagttcactgggaagccagctaataatgtgctgagtactgggccaagcaccatttctgtag

SEQ ID NO: 160356 - DNA, 122 bp, Homo sapiens
acagggccacccacacgttggtgcccttgacgtgcacatggtaagcaaagtagtagacgccgcccacagggcaggtgaagatgccagtggctgggttgtagccgctgtggccattgtagaga

SEQ ID NO: 160357 - DNA, 122 bp, Homo sapiens
gtttgcaaaacttcagtagagctaagcagtggacttgactcgtttcggttccttcacctccgtctttccttgctcaccacctagtggacgtccttgttagtggcacttcctgaagttaaccc

SEQ ID NO: 160358 - DNA, 122 bp, Homo sapiens
taaatcaaaccttggtgaggttcatccttaatattctctaaaaaggctccaaattttcctcgttctttatcccttactaggtcagcagcagcatatcaaagaagcacaaacaacttgctgaa

SEQ ID NO: 160359 - DNA, 122 bp, Homo sapiens
actggtagatgcctgtgctgtgccacacacactccatccagagccctttcaggtaggacacggccgtgaggatgttggtgcccacgtgcgctgtcctccgccagtgcggcaggatggtggtg

SEQ ID NO: 160360 - DNA, 122 bp, Homo sapiens
cttctctcggctttttatagcttcatggcggaccacgttgagaacaacaacagcctggtccggggccagcgccaacttgtgcttcttggagccccttctccggccgctggcttctcggaccg

SEQ ID NO: 160361 - DNA, 122 bp, Homo sapiens
tgtgacttctgccagcaattactgccccatgtggtagtctgcttgcttccggcaatgttccggtgtccattctatcacgtgatcctggaagtaattggaaacatctgttgtgaagtcagaga

SEQ ID NO: 160362 - DNA, 122 bp, Homo sapiens
atgtttgagttgcacagtgagctaaattatgcaagttgcagaaatcctaggtggatagtacgacacctttcagatcagtttctaccctcaagggtggcaacaaccttgtagatccattatgg

SEQ ID NO: 160363 - DNA, 122 bp, Homo sapiens
tcccaaacgaaaggctcatcaggtcaatgaagagagccccacctagcggcatttcagaaccgtcgcttcagaacatcaaagaaatcatcccaaaaggcctgagattttaaaaacagagatca

SEQ ID NO: 160364 - DNA, 122 bp, Homo sapiens
gctggagtaggggtggtgtctgggggattctgccatatcagggcaccaagaagcaggattcgactggaagttgggtgccacccgtgcaggggcagtgaccacatgcagccatctaaatgagc

SEQ ID NO: 160365 - DNA, 122 bp, Homo sapiens
gagtatcctacacataacaaaatatgaattccctgaagctgtaacgatctaggatttgaacggaatggccatcatctccctttgtatggtgtctggagttgaattcagtgcaataagaaaac

SEQ ID NO: 160366 - DNA, 122 bp, Homo sapiens
gaaggacaggcatctccgggttctgagcagttcttcaggcttggagttctgcattcagttcgtggagactatttgcagcccattcgcagaaaaggaaccagaaaccacgtcatataaatgag

SEQ ID NO: 160367 - DNA, 122 bp, Homo sapiens
aaaaccttctccaccagaatccagctcacgctggtgagtagcttcagcttcccaaggcgccgctctcccgacccacctcctgcactggccccgggaaattcgaacgcacactggtctttccc

SEQ ID NO: 160368 - DNA, 122 bp, Homo sapiens
cgatttctccctacctagttagtgtcttgagagagagctaaccttcattcaggtgcggctcgagtccttcccaccccaccagagcgcctaggccggtgcagctgtaggatcagcccgactcc

SEQ ID NO: 160369 - DNA, 122 bp, Homo sapiens
ctccgccccttacccggcgtgccccgcgcccggaggcgctgacgtggccgccgtcagagccgccatcttgtgggagcaaaaccaacgcctggctcggagcagcagcctctgaggtgagggcg

SEQ ID NO: 160370 - DNA, 122 bp, Homo sapiens
agtccaagccctgtgattggtcaggccatcaaagcctcgccccctacacgacccggaattcgacgccaacactggtttctggggcaacttctgcgtagctatgtgactagcacccggaaata

SEQ ID NO: 160371 - DNA, 122 bp, Homo sapiens
ccagattgcggcagcagggacctggaggtccattctgggcccggacctcttccaggcccccgccccccttcggagatccagagcgcagccgcgttctctgaccctcccggctccattcccgg

SEQ ID NO: 160372 - DNA, 122 bp, Homo sapiens
tcaaccctcaaagctaccacagaaccaggtccccacctaccgccgaagcagtggaggccgcggcagcactgagtgactgccaccgtaccagagctgcagcgcgcacagccggcccaagagct

SEQ ID NO: 160373 - DNA, 122 bp, Homo sapiens
catgattaaaagcttttatattaacgggggaacctctgaccagaaagagccgacagggggcgttcctggatgatctggggctgtcaattgcgagacgcggaggattgtgggacttgtggttt

SEQ ID NO: 160374 - DNA, 122 bp, Homo sapiens
aggtccactgggcacctggcccccgtgcccacccccaggcctcgcctgtaacgggtccttcgatatgtacgtctgctgggactatgctgcacccaatgccactgcccgtgcgtcctgcccct

SEQ ID NO: 160375 - DNA, 122 bp, Homo sapiens
ttcaccatctctgtgtgcaaactttttatctagagtatgatgaatcctaggtatggcattcgaggctctgtggcctctcccatgtgtatatgactgtggatgtcaagagtagcccagaaagg

SEQ ID NO: 160376 - DNA, 122 bp, Homo sapiens
aaagtgaaagaaaggcacagaagaagttttaatgtgaacacctccctgacacctcacccacggaggacttagcggatattcctgcctcttccagcttcacactcagcctccctgttttaaaa

SEQ ID NO: 160377 - DNA, 122 bp, Homo sapiens
tagcatttcactgatcccgggcttctatccagcgcccttggccattctccagggctgccccggacacagcctaagccctttaaggatctcaccctgagcaagcccagaacacccccacctct

SEQ ID NO: 160378 - DNA, 122 bp, Homo sapiens
gggcatgtctcctagaatcaggacggctttggaataggagcaaagccagagttggctcttcggctgctgctcttagaggaacagaagaaaaacaaaacagctcctgaggaggatgaagagag

SEQ ID NO: 160379 - DNA, 122 bp, Homo sapiens
cgcgcagtctcgaccccacagacgcggcccggagaggccccgctcggcgcggctggtccacgccccgcccacgcccctgcccattggcctccccgagacccgctggcagaactttccatact

SEQ ID NO: 160380 - DNA, 122 bp, Homo sapiens
ttgtgccaggcttgcactgcctctgggaatccaaacacgggaaaacagacctctccactccgctgggggagcttaaagagcagtaaaagtgaggccaaaaaccaaacacacaagagcttaga

SEQ ID NO: 160381 - DNA, 122 bp, Homo sapiens
atgtcccgcagtgcctggtggaggccgtgctggtgctggacgtgctgtgccggcaggacccgtccttcctgtaccgaagtctctcctgcctgaaggccctgcacgggcgggtgcgcggggac

SEQ ID NO: 160382 - DNA, 122 bp, Homo sapiens
aataaataaatatttgaaaactgacatcctttatttcaatataagtgaaattcagtatgtcggtcagatatctgaatgaatctgaaatggtgtgcttgctgtttttattatttaaataaagg

SEQ ID NO: 160383 - DNA, 122 bp, Homo sapiens
gaggccaggtaaggccaagatggggccggggctggtcagaaagatccgagcgttgggagccggtggaagaaaagagcgcgcgggcgacagtcaaacaggccttggggcagggcacgcctcgc

SEQ ID NO: 160384 - DNA, 122 bp, Homo sapiens
gtaatgcatgagaccacttaaaaatatgagcattttgagaccgtgctgggttgccgccgccgctgcagccatcgtgccagcccctcgggtctccgcgaggccggctgacggtccagagtggg

SEQ ID NO: 160385 - DNA, 122 bp, Homo sapiens
ttccatggtaatgcatctcagctcctctcaacttagaggctcacaggataaacggcttcccggagatgatgctcacagctcctcttaattacggaagtgatatttactggatcagtcacctt

SEQ ID NO: 160386 - DNA, 122 bp, Homo sapiens
ctccctactccggccggtcacccccggcctggctgccccctccggtcggtcaccaccatccgggtccccatctggcccgtcacccctgcccgggtcctcctccggccggtcacccccgcccc

SEQ ID NO: 160387 - DNA, 122 bp, Homo sapiens
tgaattggctttgaagctcacctgccttttctgttggaagagacttcctcttccagggggcgagtgagtagaggccacaggtcagtgtgagtatgtggtaggcctgcctgtagggagggtgg

SEQ ID NO: 160388 - DNA, 122 bp, Homo sapiens
gggccaccagcaccggcctacagggcggagttcgcaactcacttgaaagttgcacggaaccgagtgctgcccaaccccagggctccggcttgccacgcaggcgcagtgtagccccggagggg

SEQ ID NO: 160389 - DNA, 122 bp, Homo sapiens
agcaccccatttgtattcttatcttcgtcatctctatttctaatcttctttggtccccatcgcctgatacttatctctatctccccaaccctgagtccccatttctcctaggatttccagtg

SEQ ID NO: 160390 - DNA, 122 bp, Homo sapiens
tgggggagccgagtacgagccggcagaggtggggccggctgagggcggaagcggcggcgacgcgattacgaaacccgtccggctcggagcccggcgcactgctcccctctggactgcggagg

SEQ ID NO: 160391 - DNA, 122 bp, Homo sapiens
tttatcctcgcgcgcggaggggagactctcagaacgctcctcgaccagcagcgaggaagtcgagcccgcatcccgcatcccgcatcccgcatccagagcccccgagggacgaattcagatcc

SEQ ID NO: 160392 - DNA, 122 bp, Homo sapiens
gggaggaattctggaggagagtaaagtcgaagttcttagaagctctgagaaatcatgggccgtgcggtaggggttgaaatgctcaaaggtccacacttcttgaaataaacagaatggtcttg

SEQ ID NO: 160393 - DNA, 122 bp, Homo sapiens
gccagtgcgcacgcgtgccgttcgcgattctatgaatgggtgggcacaacagaccctgagcgcgcatgcgctccgctcctttttttatgaatggggggcgggaaaagatcttaacccgtgat

SEQ ID NO: 160394 - DNA, 122 bp, Homo sapiens
cttctgtgtgacaccacttctccctgcaagtggtaaagtctctgaaggtacttcccagagcggaatggcagcaaagccagaattagtatgaaacaagatgctccttttcaacttatcgcatc

SEQ ID NO: 160395 - DNA, 122 bp, Homo sapiens
agagaatcatgtgacctttaacctataatatgaacacgtggtcttccatattaatagtaacgtacaggccggccgggagcggtggctcacgtctgtaatcccagcactttgggaggccgagg

SEQ ID NO: 160396 - DNA, 122 bp, Homo sapiens
taaccctgcctaccagtactgagttactgggttcacacagggtgtcactgctagcttccacggacccaagctgatgctccacagttctgctgctggccaggctgcctctggaaccagcagtt

SEQ ID NO: 160397 - DNA, 122 bp, Homo sapiens
cctcccctgcccacttccacttatcacaggaccagttctaaaccgataccactaagaaagcgactggcgctggcactgtagaccccatgccaggctgcttctgggagggacccgggggtgct

SEQ ID NO: 160398 - DNA, 122 bp, Homo sapiens
gaactgacagtgtctggctgccagagaggtcgaggcccttacccgggttggcactcaccccgcgctcccgcccgtcccggccccttcccctgaagtgcgcagcctgggccccaggagagcac

SEQ ID NO: 160399 - DNA, 122 bp, Homo sapiens
gcaaggaaattcctttgtgctattcttcacagcctgttccaaaagtcaagtgataaacctcgagcaacaaatcaacaatttaaggccaggtgcagtgactcactcctgtaatcctagcactt

SEQ ID NO: 160400 - DNA, 122 bp, Homo sapiens
aattagataatgaccatgccagggagtgaatagccagagagtcattcatcttcctctgtacgtgacatagtgtaacgggtgtttctgacgatccgtgcacattgaattaggtcattgctgag

SEQ ID NO: 160401 - DNA, 122 bp, Homo sapiens
aaatggggacaacagaaaatatttcatagataaattatgaggattaaataagataacatgcggaatggcctagcactgtttggcatacaataaatgttaaatgtcctccttttagcccaaga

SEQ ID NO: 160402 - DNA, 122 bp, Homo sapiens
tctcctgtcccccccacttgagctcagtggctgggcagcaggggatgcatggccactggccggccaggtgcagctctcagctggggtgttcagaggacgcctgtgtcctcccctcccccatc

SEQ ID NO: 160403 - DNA, 122 bp, Homo sapiens
ctgttgatatgggtctcaatatgcatgacttgccctggcctgtgagggctgatggacatgcgtcaaggatacacatgacaagtatgtacactggggtttgctcttgctcctctgccatcacc

SEQ ID NO: 160404 - DNA, 122 bp, Homo sapiens
gagcataaactggcctctgtcgagcttggcagccatgctgagtgcgctggcctaagtctacggcgagggtgaggggttctcccagccactgtggctgagtgcacgctgtccagaagcagcgt

SEQ ID NO: 160405 - DNA, 122 bp, Homo sapiens
gctgacacggacgccccaggcccgtggacttccctctcccactctctttcctcctgggaccgcacccggggcttgtgggcagatttacaaaatgagggaaaggaatgttattgctgacccag

SEQ ID NO: 160406 - DNA, 122 bp, Homo sapiens
cctggttcctcggcatactggctggtgtctgctactggccctagagaagtggactgggaacggaggaagagctctggactgggcctcctctcagggctctctgagaccgggggagggctgag

SEQ ID NO: 160407 - DNA, 122 bp, Homo sapiens
aactgaccgatggaccgccccctcctcagtcaagggcattccagagaaacctgaaaaactcgttcaggtcgtgatgggaaaggggacatgcttcattacaccttcctctctctggaattcag

SEQ ID NO: 160408 - DNA, 122 bp, Homo sapiens
cgggcgtcgaggattgcgaagcgtcggggcaggctggcacggtgcccacttttcccaaaacgccagccttccaagcccagaagctcgcccggcccaggccgggagcggcccacgtcggacgg

SEQ ID NO: 160409 - DNA, 122 bp, Homo sapiens
gtgtgacacagacgctaagcgccactggcgaggagatgaaggggtcgtcttcatcttcgccggatgatttccgcccacatagagggcgccagtgacgcccacacacgtgctggtgtcccggg

SEQ ID NO: 160410 - DNA, 122 bp, Homo sapiens
gaaacacctgttgaaataaacgtaatcaccagaaataattacatcacaaatacatgagaacgataaaacactaatatcattccttaacctgttaggaatataaaagtagagttaagtactaa

SEQ ID NO: 160411 - DNA, 122 bp, Homo sapiens
gccgcgacccctgcggctccggagagatggggccactgggaagccaagcccttgtggcgtcggaggaggcgttttccgggttcgagttgggaattactcacagtccggaaatggcaatttat

SEQ ID NO: 160412 - DNA, 122 bp, Homo sapiens
cgttccacacactgttgacgcaggacacaagttcgtcacagtggtcctccgccggctacgcggagtcagtggctttcaggcgctttcctgttggaattggcgactgctgcggggctgagcgc

SEQ ID NO: 160413 - DNA, 122 bp, Homo sapiens
ggtgaaggccacgcactggacagcggcgctgtggaaggccagcacggccagtggctgcatcgtccgccagtggaacacgcggatgcggtggtcccagcctgcggtggccaggatcttgcgat

SEQ ID NO: 160414 - DNA, 122 bp, Homo sapiens
gggttgtgtgcacttttataatcgtatgctacttttcacagtaaaaaaaaaaaaaaaaagcgaaagaaagaagaaaagaaaaagcaaatatgaaaagcccagtcaaggagttttcaacttag

SEQ ID NO: 160415 - DNA, 122 bp, Homo sapiens
cccatccgaaaaaatcccctagcccagtttttgggcagatgccagacttttattctgaagcgtgggccacaacctatgaggtaatctttggagcttcattctgaggcggaatcccattggcc

SEQ ID NO: 160416 - DNA, 122 bp, Homo sapiens
ccagccccgcgacgacaaggagccatgggaggggacaatgcagagccgtcctgtgggggacgcagacgttgtggaggctggcacatgctcggagcacacgctggttgaaatagcagccgaga

SEQ ID NO: 160417 - DNA, 122 bp, Homo sapiens
ggggaaaacctgtgcaaattaattcacatacatggttcagaaaattcacagcaggagggccgggcgcagtggctcacgcctgtaatcccagcactttgggaggccgaggcaggcggatcacg

SEQ ID NO: 160418 - DNA, 122 bp, Homo sapiens
agagcctcggggaagccggaggcccccagcgtggcaccacccgccctgggctgtgcccctcggagcagcttaccagaacatgtcctgagatggatgccgcgttcgccacagacgtggtgaag

SEQ ID NO: 160419 - DNA, 122 bp, Homo sapiens
tgcctgagttttgttggctctgagttcatttgaagtatgaattagatggataacagagaacggggtgagttgtgccttctaatgaccatcaactttgcaaagcttaaatataacaattactt

SEQ ID NO: 160420 - DNA, 122 bp, Homo sapiens
tggcaccaagcatctacacccaacgacagctgtcgctgctgaacctctcggtgggcctggcgccaccccaggtgctggcctgtcccctctggaggaatccagaatctggccagagcaggaga

SEQ ID NO: 160421 - DNA, 122 bp, Homo sapiens
ctatgcctcagaacccgggcgggaacgggccggaacaagggagggggcgcgttgccatgacgaccccgggagcccccgagtcccaggcagtccccgcccatcctgggttcgggccccagttc

SEQ ID NO: 160422 - DNA, 122 bp, Homo sapiens
tctgacgaggtgtccatgatgctcctagatctggaaaagtgactgtggcgccaagcgccgcggacgccagccggtggagttgttactcgtaccacgcggttgcttggcaacgccgccggaag

SEQ ID NO: 160423 - DNA, 122 bp, Homo sapiens
gcacctcccggctcacggggagctcagaggtccatgccgaggagaccaggcaggacctcccgaggctgcgccccggccggcccatgcgttttgtgatcccaagtgactctgtgggaagggtg

SEQ ID NO: 160424 - DNA, 122 bp, Homo sapiens
ttaactgctgggccccgcccctgccctacccccagcccccactacccacccgggccgatccgtcagtcactgccccagccggagctggccaaccctctccacccgggacttgggcagcggcg

SEQ ID NO: 160425 - DNA, 122 bp, Homo sapiens
taacctagaaaataagacatagtgtgacagtcctgaaaggccccaatgttcgcattctttcgtagtccttttatcataacaaaggaaatgcaattggatgaattccaccttggggctgcata

SEQ ID NO: 160426 - DNA, 122 bp, Homo sapiens
cccaacccccaaatatgtttatttgaatgccagtacttctagctctagaaccaacattttcggttaaccagcacccttgccaaacacatgaccgtgatttaaaacaacaagaaagcaacgac

SEQ ID NO: 160427 - DNA, 122 bp, Homo sapiens
ctttgtgtataagtttttatatatgtttttagttctcctgggtaagtacctgggtggaatcgctgagtcatatttaccatatgtttaactttttgagaactgccaaattgttttccagaggt

SEQ ID NO: 160428 - DNA, 122 bp, Homo sapiens
agagatccgtctgcttgtcggagttgaggtccccgaaagccgcaagggtgccccaggcctcggccccaaagagctcggccgtgacgttgtgcagcgcccgcgctgggaccggcccgactccc

SEQ ID NO: 160429 - DNA, 122 bp, Homo sapiens
gtgcggggagcgaccccaggtgtaagtcccggggcgtggggcgcgtgggtcaaggcggagcgacccaggatccccgcgcccgcggcggccgccgagtggcagcgctggactcgcggagaagc

SEQ ID NO: 160430 - DNA, 122 bp, Homo sapiens
attcagcactgggtatcgaaacaagcctgcaccctcagaggagatggctaggggacagtgcgtccaggcctcttctaccacacagagttttcttttttttataaagggtatacacatttaaa

SEQ ID NO: 160431 - DNA, 122 bp, Homo sapiens
cccagcgcagccccgggcacgcggcactttacatgggggcagcttgggcccagactcctccgctgtgtagcagatgaggaaaatcaggccagaggacaacaggctggcgttttgttgggaac

SEQ ID NO: 160432 - DNA, 122 bp, Homo sapiens
ggcttcttggtgccttggttcatccctaagggtcctaaccgggggtaagtgcgtgaggcccgccttgggaggaacgggcggtgaggagctagcaggccggggcggggaaaggcacgaccccc

SEQ ID NO: 160433 - DNA, 122 bp, Homo sapiens
gacttctctttcctgctcacatcttggttttggtttgtggttctaacatcatccaaccctcgtgctcttatgaagggtttggcttctgtgggttttgtttgcttggggaaggagcttccttt

SEQ ID NO: 160434 - DNA, 122 bp, Homo sapiens
agccccaggcgggtgcctgagaatagacctggggcctgtgggcgtggcagggctgcccctcggctgctcatggaccccccggacaccagtcccaccctgtgtctgtgatgctcactctctga

SEQ ID NO: 160435 - DNA, 122 bp, Homo sapiens
attagctaaaaaacaaattaatagttcaggtcctcagccgcacacaggcagttttctccacggtccaaattgttgcccgaattcacccagaccccgctgtcctccgctttttcatgcagaca

SEQ ID NO: 160436 - DNA, 122 bp, Homo sapiens
ggagccacggtgccgtcaggagccaggggtgattggccctggggctggcagcccccaccccgcgggcagacgctcaccaggctgtccccactcactcccacaccccaactcctcctcacagg

SEQ ID NO: 160437 - DNA, 122 bp, Homo sapiens
acactgtgaagcatttagaaacaccttgcaccagcctacttcttaaatacttgttaaaaacgagatcacaccccaaatagagtttcatagaatataccttttttatttttcattattttttg

SEQ ID NO: 160438 - DNA, 122 bp, Homo sapiens
ccaccgcctcccctacgccgaccgccgggctcccggggtcggacagccccgggccacttccgggccttcccggaagtccctgtcacttaacaaccgaagtaacccgcaatgcggaagggcga

SEQ ID NO: 160439 - DNA, 122 bp, Homo sapiens
ggccgcctcgggaggcacctgcgggtctggcgcggcagccgctgcggtttgcagctggcgcgcagccctcgctgggaacttggagctctcaaactcctcggatcaagcgttagccccgaggc

SEQ ID NO: 160440 - DNA, 122 bp, Homo sapiens
cctctgggggcggggcgggctgggcggggctgcgcacggcactctgggaagtgtggttctcgggacctcctccccgaggccacccccacggcctcgcccccgcggctccctagtgggcggcc

SEQ ID NO: 160441 - DNA, 122 bp, Homo sapiens
gggttggggagcctctttgcccttaagtcccaggtcagctgtcagagcctgggtgcagctcgccatccctggagtggataccagtggaagactgagttgccaaaccaagctggttttaaaat

SEQ ID NO: 160442 - DNA, 122 bp, Homo sapiens
agaatcaaaatattaagatccctcagagcaaggtcaattaagcttttgacatttaaatttcgaaggatttttttttttaaagcatatctgggcaagtaaagaacataagcactagttccaaa

SEQ ID NO: 160443 - DNA, 122 bp, Homo sapiens
tacgcggcgaatggcggagacgctgaggcgggtgctaaccaggggcggtgcggcctggtccggggaggagaacatgcctgccgccggaccgcctttgctgctgctcggtacaccaggatctg

SEQ ID NO: 160444 - DNA, 122 bp, Homo sapiens
gagaccgcccccacgtgccccacggccacggcccatggagacgccattcaggccacgcctcgggagccaggagcccaggcaattagaggaaccaaattctaaacaccaacgagacattgctt

SEQ ID NO: 160445 - DNA, 122 bp, Homo sapiens
caatcgactaccgcatctgcagacgtgcgcggaaatggcacgcccgtttccgtgtgaacccgaaactgccacttgctggctgaggagagccgctgcggcgttccactgtcacgtgagggggc

SEQ ID NO: 160446 - DNA, 122 bp, Homo sapiens
taacggacaggagttcatggatccaaaacatgatggctaattagagaagggccggaagaacgacgaaagtgagcaggcaggctggagctaaaagtagtctgggcaatgaagctcaaatgaat

SEQ ID NO: 160447 - DNA, 122 bp, Homo sapiens
gtctttaaaaacaaacaaacaaacaatgaaaaaccacaaatatcctgctcaaatagctcccgaggctcacctttcccaacaggatgaagtccggactccttggggtggcattcaagaccttc

SEQ ID NO: 160448 - DNA, 122 bp, Homo sapiens
aagaagccacggcgggaaaaacctgcggcggcgggggcgaaaagcagtaaaaagccgcggcgccgggggccaaaagccgtaaaaagccgcggcggcggtgacaaaaagccgcggcggaaaaa

SEQ ID NO: 160449 - DNA, 122 bp, Homo sapiens
ggggttttattctttttgaatttttgttcccccaggccaactctaagagccagaactgttcgttatttatctcagcacaggttcggtgtaagcgttgcctccttacccgacgctcaggccct

SEQ ID NO: 160450 - DNA, 122 bp, Homo sapiens
actatctaaacacactcagagttaatgagggagaagggagaaattgattcttctgtaagacgggtagctttgcaaaaaggaaaacagcttaaatcacattcatttcttattaaaagctgatg

SEQ ID NO: 160451 - DNA, 122 bp, Homo sapiens
ctgtctcctctcgttccaccagggttttgccatcttcctacagtataacttcaactccctcgggcaacacgtgctctgctctacccaatgcttgggctcctgtgccaggccttgtcccaagg

SEQ ID NO: 160452 - DNA, 122 bp, Homo sapiens
taggttcctggttcagaaaaggcacctggggagggcagagctgtgtcacaacctaacacacgatgacagggccccttacaggcacgtcgtatccacccccaggagcacacagacagactctc

SEQ ID NO: 160453 - DNA, 122 bp, Homo sapiens
aaagtgctgggattacaggcgtgagccattgcgcccggcccatgtgaaaccctcttaaaccgtggatcctgaatcccaacctgtaacacaacctgaggttctgacattttaaaacagttctg

SEQ ID NO: 160454 - DNA, 122 bp, Homo sapiens
gtctagcatcccccagtttgggcggaaagtcgaactgctcacaacggcggtcctcgcgagcgcctagcacagcggctgcaatgcctcgtccgatcctgcgagggccgctaggagcgagtcac

SEQ ID NO: 160455 - DNA, 122 bp, Homo sapiens
ttggtgccatccatggagggcgtgcgctgggccttttcctgcggcacttggctgccgagccgagccgaatggctgctggcagtgcgatcgattcagcccgaggagaaggagcgcattggcca

SEQ ID NO: 160456 - DNA, 122 bp, Homo sapiens
aaccgggaggtagggccgcacacttggaggaacgttgcctgggggttttgttcgcgcacccgccccttcccctctcccggtaaatgtttaacaccaccgctcatccccaagtccagttctct

SEQ ID NO: 160457 - DNA, 122 bp, Homo sapiens
agaaacgcgggtacccgcgcccctagaagtcaaatgtttggcaaatagcatttgggaattcgttggggtttttttgtttgttttggttttgtttctgaacccccgggggatatttctggaaa

SEQ ID NO: 160458 - DNA, 122 bp, Homo sapiens
gctctgagtcagtttcagaaccaaggatctcaggctgagaaggccaggtccccatgggagcggcaggagtctgatggctctgctgccagagcctaccccagcctgccacgccgctgaccttc

SEQ ID NO: 160459 - DNA, 122 bp, Homo sapiens
gcagagagggaaagggatttgcccagagtccagcgggtagccagtgacccagtcacaatgcgaaccaggagtgccagtgcccagtctgggtgctcgagcctccccacagaccccaacatcct

SEQ ID NO: 160460 - DNA, 122 bp, Homo sapiens
ccacctcccaaagcccctctattatatggggttgctgggcaggcatagccaggttttatccgactttgtttttctagtaaagtaactgaaacatcataggtgcgtaatgaataatcatgatg

SEQ ID NO: 160461 - DNA, 122 bp, Homo sapiens
ggaaagcggagggtaaggcaagggctgctgtaggcgccagacaacagggactctccgaaccggaagtgccccgcgtcgccatggctacaggcgctcccagcagaacccgtagcgttccgttc

SEQ ID NO: 160462 - DNA, 122 bp, Homo sapiens
cggcccgcccacgctcgcctccaacgggcccccaagagggcggggcgcgagaccctacggcgttccattggctgtctgcagagtctgtcggaaggaggaggcgttcccccttgaaaaagagt

SEQ ID NO: 160463 - DNA, 122 bp, Homo sapiens
cccagcaaacatggaggaatctgcattgcctttcaagacccagcttcaggagccatacagcgtcacttccccagcaatttacaggtcaaagtagtctcaagcctggcaaaaggatgaacaca

SEQ ID NO: 160464 - DNA, 122 bp, Homo sapiens
atgcaaacgtgcttctcaaattgcaatatgctgttgaaataacttgagacgttaaaggcacgggtgaggtacatgaaaataccatcgttgactaataagtgactcagacacacagctggctg

SEQ ID NO: 160465 - DNA, 122 bp, Homo sapiens
gccaagagagcagtgaccactgaggattcagacactgtatcccagaactgctctagtgcccgggtgtggtctgggcatccctccagtgtgaccaagagcaaatcctgcctgccctatcccta

SEQ ID NO: 160466 - DNA, 122 bp, Homo sapiens
attcactgcccgtcactctgcagcagccgtgccgccagtcgtttctggatctgtgagtggcgtgcgcgtctctggactggtcaccgcggccaggggatccaatgcgcacctggagaattggc

SEQ ID NO: 160467 - DNA, 122 bp, Homo sapiens
gggggcgggatggggggaggggcgctgacgccgagccttttccgctccagctgcgcgggccggcgacacagcaaattccgagggcacacctggctgtgcagctgtcccgggacgaggatttc

SEQ ID NO: 160468 - DNA, 122 bp, Homo sapiens
agcactcggtatgattgtgaatgaagtggagtggctgtctttccgtcagctctggtggggcggatgtcattctcaatggggatggcgaacaagtgcagaggggcctgcctgggatgtggact

SEQ ID NO: 160469 - DNA, 122 bp, Homo sapiens
ttagaatttagggtgacctctcaagaatattttgtcatactgattccatctacagatatacgttgtggtaggttctggttataaaagtgtaaatggtaacagctgccatttaccaaagatcc

SEQ ID NO: 160470 - DNA, 122 bp, Homo sapiens
cctcgcggcggcggcgcctaggcctctggggagctggcccagaactcagagcgcagctggcgagggcgcgctggccgggtgcgcgccgggcccggccccggggctgcccctcggctgggggc

SEQ ID NO: 160471 - DNA, 122 bp, Homo sapiens
tacccaggcccggaggaagcacctgcggttgtccactgggtgggcactgcccgcggggaacgggcgggaccgcaacttcggagcactttggcagcgtggggagggggctcctacccggacgc

SEQ ID NO: 160472 - DNA, 122 bp, Homo sapiens
cagtgtctttgttaactaggcactggaaaacgaataaaccttcagagaacagggtaggtacgttctctctcaagggcaaaatacttattccttaaaactcagacaaactttaaagatggcag

SEQ ID NO: 160473 - DNA, 122 bp, Homo sapiens
caaagtcccccggccctacccgctggagcgggttcttgttgaggtctaggaacttgagcccgggcacctgttccagtgcccgcctgggcacccgggccagctggttgtcatagaaggagagg

SEQ ID NO: 160474 - DNA, 122 bp, Homo sapiens
accacattttccttaacagcattttgctttcgaagtcttatataagtaaaaacctaaaatcgtctgcctggaactcttaagatattcaggtgagtcactggggtggcaaagttgaagctcat

SEQ ID NO: 160475 - DNA, 122 bp, Homo sapiens
gacccagatggcgctcagtacagccccaggatggctgcgcccacgtccttggagggccggcgctcctgcaccagaaagttgatcatgctctcggacttgatgagcaggttgcagcccaggaa

SEQ ID NO: 160476 - DNA, 122 bp, Homo sapiens
ccctccggggggcgatcgccccagtagggtgaagcaggcctctttgttcacgggatgcctcgctagcaagccggcggcgggggcgttccctggaccgtgagaccccggctcccgaggacgcc

SEQ ID NO: 160477 - DNA, 122 bp, Homo sapiens
cggaagccccgcccccaacatggccgtgcccacaggtctcgttggaggccgtgcctttatcgtcatgtgacgcgagtcctcgccccacccgtctgcagccactcctggtctcagtcccagag

SEQ ID NO: 160478 - DNA, 122 bp, Homo sapiens
gcaggggctgggtctttgaaggatatacagtcaccttaggttggactaggagaaaaacaacgtagagggaatgagtcaggaagacagagtaagtctcctggtttggctgtgtgtctgcttct

SEQ ID NO: 160479 - DNA, 122 bp, Homo sapiens
taagtgttccgagttcaagtgtttttaattgtattttaaaagttgagagcaagagcagtacgtgaatttgaaaatgggccgaaaaccagttgtaagtgcccaaagtaatacaggattattag

SEQ ID NO: 160480 - DNA, 122 bp, Homo sapiens
gggctgggcactggccggggccctgggcctggagaggagaaagtgagagcaagctgggcccggcctaccggccagcacccaccctcacgcccagcagctccgagaacagccccagtggagac

SEQ ID NO: 160481 - DNA, 122 bp, Homo sapiens
tggaggtggacaggctcctaacaagcacttgccagcagggggcactcccagttttcgctccgctgagtcacccaacccctgaggcttcgccactttctaatgtttgctgtggctacaatggt

SEQ ID NO: 160482 - DNA, 122 bp, Homo sapiens
tctttataaagtcagagttggtgtctataggctctctactgccacattcaagacctgcctcgctcaatgtcaccttcaagatgcagaaatagggatttgggaaggggattgtgaaattttcg

SEQ ID NO: 160483 - DNA, 122 bp, Homo sapiens
caagccacttattactttaacagcatttacagcatacccatgctgtgctctctctagacccgagcgagaagttggtgataaggcatcttgtgtgtgctgaggactgtctgttctggaaacag

SEQ ID NO: 160484 - DNA, 122 bp, Homo sapiens
gccttacgcgggcacttccatgactcccaggttctgacggcacaagagccctgatgcccacgctcacggacagttccccgctggagcgggcaggggacctgaccctacgacacagggcgtcc

SEQ ID NO: 160485 - DNA, 122 bp, Homo sapiens
tgtttcctctgtgtcccgcggtagcaccgaggaggctggtgcactgggctccgtggttcccgcccgggcccgccgcagccggctctgaggaagcggctctgaggaagcagcgcaccgccagc

SEQ ID NO: 160486 - DNA, 122 bp, Homo sapiens
gtcgtgggacggttgcatggattattttcgattgatttccgaaccttcaggaagcagacacgctccccttccttcttagggatggggcggcagccaacgaaagcccgaagccgcctcctttt

SEQ ID NO: 160487 - DNA, 122 bp, Homo sapiens
cacaggtaggcaagggctgaaaatcactagttatggttagtgtagttaacagaaggccagcggagtcatgaaaatgttcaaaagtaaaactgtccaagaaaatcagacattcccatctccat

SEQ ID NO: 160488 - DNA, 122 bp, Homo sapiens
ttgtcttgctagatcggggcagcagtgcttagggcgggcctcagaggctcacacacgtatcgccagggggagaaccagctctctccggcttggactcggggcggctccccgcctgcagcccc

SEQ ID NO: 160489 - DNA, 122 bp, Homo sapiens
caacttcgtcatgtcggccgcgcactgcgtggcgaatgtgtgagtagccgggagtgtgcgcgcccggctcggaccccgcgtcccggtctgtgaggtgggtggggggaggccggggccggggc

SEQ ID NO: 160490 - DNA, 122 bp, Homo sapiens
gttcttcagtaacaccatcgcgaattcattttcctgcctcctttcccctccccccatagccgttatctagaccaaagtcggggtggtggtcttacctgtgaagaagtgggatcgttggcatg

SEQ ID NO: 160491 - DNA, 122 bp, Homo sapiens
atttaaagtcattctgtgtcctagtctgtcatcagaagagctgctttgaagccggcttctcggctgctttgtttggcattggaggacaaccactaattaggacgttatgtatctaaagatgt

SEQ ID NO: 160492 - DNA, 122 bp, Homo sapiens
aggcccccgtgccactgtggaagggccgggacgggcctgcccaatgcactgcagatgccccggtgcccactcctcctacctccccgagtgtgcccacggtgcccgctcctcccacctcccga

SEQ ID NO: 160493 - DNA, 122 bp, Homo sapiens
agatggggctgtcccgtcttactgtgtgactgatgagtggaatcactgctctgcgtgtttcgctctccacaccttcggagcccgcacctctccgggccctgaataatagggtttggggagtt

SEQ ID NO: 160494 - DNA, 122 bp, Homo sapiens
tctgctttcaaggttgagaaggaagcaggggtaggggggtggggccaagtggcgcgtgcgcgatactgttgctgcccctttgctgctattgcgttgcaaaaaaaatcctgactaggtagcct

SEQ ID NO: 160495 - DNA, 122 bp, Homo sapiens
ttcacccatcattcatgggcaaatactatgtatccaagcagtgtgcacaaaatacagacgcgaatgccatctctttcactgaagggtgtccagcccatgggagaaggcagacaaggaaagga

SEQ ID NO: 160496 - DNA, 122 bp, Homo sapiens
cctcccccgagggccacacttcttgctgctctgtgcagattctactggaagcccttccagcgctgccaggctcggatcctggtggccttgcgatggcctttggctccgcctgtggccatgct

SEQ ID NO: 160497 - DNA, 122 bp, Homo sapiens
gcattttaaaatctttgaatctgcaccaagtctcagaacagctctggccccggagtgctccgtccaggccgctgtgaaccggctgtccccgcgtctcctccacctcccctgacacaatcctg

SEQ ID NO: 160498 - DNA, 122 bp, Homo sapiens
cgcacaaacggaaagagcgggcgcggtgcgcaggggcgggcgcccagcgggcttggcatgcgcgcccccgcccgaggctataaaagcatcgccacctgctgccactagccaagccgcgcgtc

SEQ ID NO: 160499 - DNA, 122 bp, Homo sapiens
gagacgactttagccggggtaaggggccgcctgggaaccccgcgtcccgcctggacacaccgatgacctgcagaggccacaccgtgggccacctcagctggccactggcacagccttgccct

SEQ ID NO: 160500 - DNA, 122 bp, Homo sapiens
agggggctagagaaggcgccagccccggcccagaggagcagagacgccccatggggaacacgctgacctattgcgtgtccccccagtaccagcctcaagctgggccggtgcgtggtgccaga

SEQ ID NO: 160501 - DNA, 122 bp, Homo sapiens
tcggggtcctagtgccaccggacgcagcgggagtagcgcaggtctgggggcggggtctctcgaggcgcagacaacaagctagatcctgagccctctgcttcaaagcgggtagcgccttcgcc

SEQ ID NO: 160502 - DNA, 122 bp, Homo sapiens
gaaaagcctgacttagaatcggggaaggacctggagtcgcacatgggggctcccgaaccgcggccccaatactgcactgcgccgcagggaagagccccgggaggggcgcgggtccccgcccc

SEQ ID NO: 160503 - DNA, 122 bp, Homo sapiens
cttttctcccaaatgcttcccggaaagcaccggagggccaggcagtcaggtgtaaacaggcgtccaatcaaggacctgcggtggggggggggggggggggcgggctgttgccctggggtgcg

SEQ ID NO: 160504 - DNA, 122 bp, Homo sapiens
ccgagagaactgggtaagttggggtcggcttgcagtttggggtaccccgagggcggtgtacgtcggtaagattgtaacagtattactggaagacttattcgactgtcctgatgatacttgta

SEQ ID NO: 160505 - DNA, 122 bp, Homo sapiens
gagggggggaaggaaataggatagaaacaaaagatacagtgcacttctgagattagatttcgaaaagactaacttctggcttgggcaccctctgtagcttgctagtccaggggaagcaacat

SEQ ID NO: 160506 - DNA, 122 bp, Homo sapiens
acctgtgggacagccaggtagagacatctgaggcggaagctggggaactgtctggaactccggttgatgtgctacctgggcttaagatgtactcccaagcgttaccaacacctacacttggg

SEQ ID NO: 160507 - DNA, 122 bp, Homo sapiens
gtcttgagctcccgttgggggaacgggagaaccttcatcccatgtgggtgtagccgttggcggcacctttgtacggggacacaccctggacctgaatggagtcaggaagggtttcaacctgg

SEQ ID NO: 160508 - DNA, 122 bp, Homo sapiens
cgcgggcggagtggggtctgcgctggcaagcccctgggcgcgcgggtgcccgctctggctcgcccccagggctgacctacccaagccacaggaaaactctgggaagagggtcgcggattcca

SEQ ID NO: 160509 - DNA, 122 bp, Homo sapiens
gggcctcaaggcaaatctggagagtataagagactaaagggagcgatggtaacacagtatcgcactcagaggttacagcaaacacagggacacaaactggaggaggaccgacctggaactgc

SEQ ID NO: 160510 - DNA, 122 bp, Homo sapiens
ccccatgctggaatctgagaaccagatatgggggtcctggtctcagcatccctttccatccggggtgccctgctgctgccagctcacgtgcccaccatcccatcctcctcagggtcagtgtg

SEQ ID NO: 160511 - DNA, 122 bp, Homo sapiens
ttgagcacaggaggtcaaggctgcagtgaggtaatgatcatgccactgcagtgttctgtccgtaggtgtaccatcatttagttaactaatccctgttgtagaatttctgactttttctactt

SEQ ID NO: 160512 - DNA, 122 bp, Homo sapiens
ccgtactgctgcactgacaaatctgccgaagccaccatgaagtgccacttttaatttcagcgcacaaacacatataatggaaaatatttgcttttgttagacagataccacagcaaactgcc

SEQ ID NO: 160513 - DNA, 122 bp, Homo sapiens
cctgtaaccaatgggctgtgccgtgagtcatgatattaaaaacaggtttccaggtcaaaccgacctagtggagtctcatcttcacctcttgacatctgtgtgaccttcagcgagtcattaac

SEQ ID NO: 160514 - DNA, 122 bp, Homo sapiens
acctcttcccaaatgtgaatgactgcatccccatggtgatgtttaccatattgctctgtccgctccccacccccgccgcctcccactccccatcccccacctcccacctccctgtttcctct

SEQ ID NO: 160515 - DNA, 122 bp, Homo sapiens
acaggacccccagcagcagcagcagcaggacacgccgggcggcgcccgcggcggccacagcgccgccccagaagcagcagcagcagcagcagccggcaggtgccatcttccctcaaggcgca

SEQ ID NO: 160516 - DNA, 122 bp, Homo sapiens
ctccacagcccctccctcccgtcggaattcgcagcctccgccgttcttttcatctcccagcggcctccctcctggtattatttttgagggaaaagcaggggggtgtccaagaggcggccggc

SEQ ID NO: 160517 - DNA, 122 bp, Homo sapiens
gagggggtagggggagaccggagaagcaaattggcaccataaccgtgggggtggagccagcgtggggggcgtggcccgaagagaccaaatggaggtggaggtatgggctaaactgaactctc

SEQ ID NO: 160518 - DNA, 122 bp, Homo sapiens
gcggttaggacaatgccacgtggcgtcacagtatgctgttatttattccaataaagacctcgtgagcatgggcctgtccaccgtctttgtttggctgctgttttaatctttcatgcatttag

SEQ ID NO: 160519 - DNA, 122 bp, Homo sapiens
agggaagcatcgtgaaatctgggagccccaggccagcgaaaaatgtggaagggccgtacccgcactctcctagcactgggtgtgaggcagcgtcgtttccccttcgcgctcttcgaatgtca

SEQ ID NO: 160520 - DNA, 122 bp, Homo sapiens
gtttgtttcttattaaaggacagtgcaattatcaatgaggataatttgccaatgttccatcgttgtggaatcatggcactggttgcagcatacctcaactttgtaagtcagatgatagctgt

SEQ ID NO: 160521 - DNA, 122 bp, Homo sapiens
ttcttttaagctatttcagcatttaccttcagtagcatcggaggaaaagaacgatacattcgccccagtgtgtcccctgggggacctctggctaattttcggattccgaaagtgaggttttg

SEQ ID NO: 160522 - DNA, 122 bp, Homo sapiens
tcatgacaaccattgcttgaagtcacagaaaaactttcctgttgtgatttagtattgccacgtgtattagacaattattaccacaataatgtcgcataataagccattccaaactcagtagc

SEQ ID NO: 160523 - DNA, 122 bp, Homo sapiens
agatatctcagatccgacctcgccttcctggagcggaagtgcctccgagtgcccacggttcgtggactccacttcccagaattcctaagcggaagcgtctcagagttctctcactcctggac

SEQ ID NO: 160524 - DNA, 122 bp, Homo sapiens
aatgcgagggccgacctgtgacagacctggttgggagtgcacgtcgactaggatcttcctcgcctcgggcttccttggagaggccgccggctggtctgagatttgggtccagttacagtaaa

SEQ ID NO: 160525 - DNA, 122 bp, Homo sapiens
gcaggaatcctgacaggagcaggctgcctttcagctccaagttcctggcactaagttctgcgcaggggcctgggcgaggtctttatgactttccagaggcttccaggtctctattgaaatgc

SEQ ID NO: 160526 - DNA, 122 bp, Homo sapiens
atctacctgccttggcctcccaaagtgctgggattacgggcgtaagcctccgtgcccagccgagaaatgttgattattaggctgagtagtttgaactcaacaaaggcaatgtaaaatgacat

SEQ ID NO: 160527 - DNA, 122 bp, Homo sapiens
acctgctgggcctgggccctctcccctgggctgggcggcctctgctggccctggggagggcggggctggttgccaaggcctcaggtggtgtggagccggaagcaggaagcagcctgtgctcc

SEQ ID NO: 160528 - DNA, 122 bp, Homo sapiens
ccaccaactccgcctccagacagaccgcaggtgctttctgtcatagggactggcgtgccgcggacagtgtgacaaagaaactgtatgatggatatgagaacttcgtaagacccagcagcaaa

SEQ ID NO: 160529 - DNA, 122 bp, Homo sapiens
tcattgattcctctccctgcactatcaatgaccagggcaaaggcagcccacgatcactttcgaatacagggacaaaatagggcagtgagtgagttgagaggggaggcactgacagcagctta

SEQ ID NO: 160530 - DNA, 122 bp, Homo sapiens
caatggtagtcagtattttcaaaaagttcctgggcccaggccgcctcctgatagaggccccgacttaggacacaaaccgctcccacgccgttccccggcggcacccggatacacccgccctg

SEQ ID NO: 160531 - DNA, 122 bp, Homo sapiens
cgcctggctgcctcccttccttttcctggccgggtcagattccggtgtgtggagggaacacggtgtgttgatccacatgtcgctggccatttgggttgtttccacttttgggccattccaga

SEQ ID NO: 160532 - DNA, 122 bp, Homo sapiens
agtatattatttacaaatatatgagaccttacacacaacgttaaaggcaaacaccttctgcggtgtgcttggctcagctcaggcaggaagccctgcctgaaaaggctgcaccttcggctgtc

SEQ ID NO: 160533 - DNA, 122 bp, Homo sapiens
ccactctgccctggcctggctcagctctaggtctcactcagcgggcgtctgcgggtgtgccgggcctcagaggctgtctccttaggaaacaggccaccaagaagcccaaggacatgctgagg

SEQ ID NO: 160534 - DNA, 122 bp, Homo sapiens
tgcaggggtggcaggattgcggcaggccgaggctcctcagccaggagcagtttggaaagacgtttcggctctcatctcctccttccaccaccaatcctcctcactcacccgccaccagcaag

SEQ ID NO: 160535 - DNA, 122 bp, Homo sapiens
aatggacagatataaagtgagcatagctttagtcattacgcccagcctcctgaattgagacggacaagaataaacctgacttcccccacaaataaatctgcagacgtcacttattcattctc

SEQ ID NO: 160536 - DNA, 122 bp, Homo sapiens
tgggaagatgaggtgcagaagtaagctgggacctgtgagcctcaatttcggcctcttctgcgctgagacccaagcggatcttgcttggcctgtatgcgttactgggggaaatggacgtgggc

SEQ ID NO: 160537 - DNA, 122 bp, Homo sapiens
gcctacttaagtgcgaagaacaggaggcatagcggtgaccaaacacctggcccctgtccccgccgggatcccaaccttggggacccccgaagcgccccgggcgggaatcgggtgggacgcgg

SEQ ID NO: 160538 - DNA, 122 bp, Homo sapiens
ctggatcttcttcacatactgcccaatagtggcatccgttggcgagcttggtggccttcccgggtgctccttccctgggagattggaactggtctcctccctccctgctgggggagtctttc

SEQ ID NO: 160539 - DNA, 122 bp, Homo sapiens
gagctcagggccttggtccccacctccctgccatgaattctgcaaggaaagcgctgctcgcgggtgggccttctctggccacatcctccctgatcaggccatgctggccagtcctccagata

SEQ ID NO: 160540 - DNA, 122 bp, Homo sapiens
ctcagaccggcacagcccgccctcctcggacaccagtgtcccctcgcactaatgacaagccgccctcgtgaccatgtcactggcacccacagctgtgtctgcacctaaaagcaggggccata

SEQ ID NO: 160541 - DNA, 122 bp, Homo sapiens
gcgtcccggccccccagcagcctagacggctgggtgagcccgggcccgtgggagccaggtcgcgggagcagcatgagcagccccccgccgctgccgccgccaccgcccatgtctccctcgtg

SEQ ID NO: 160542 - DNA, 122 bp, Homo sapiens
gtttatgaaaaattaaccaccaggccattctaagagctctgctaggatcaactctttcctcgccagtacagaataccgagaaactcattgcaaatttagaaatttttcttgtaagggaaaat

SEQ ID NO: 160543 - DNA, 122 bp, Homo sapiens
aaggatgctgcgctccagtccagagccaaagcccaaaggggcagctgcgccgacctccaccgaggctccgccccacaggccacaggccccgccttcctagcacgcgccggcctgacgagctg

SEQ ID NO: 160544 - DNA, 122 bp, Homo sapiens
ttactttccatatgctaatccatctataccccacagcagccctgagggtgggtgctattacgatgcccattttaaagaggaagagactgagatataaagaggataactgacataggcacact

SEQ ID NO: 160545 - DNA, 122 bp, Homo sapiens
gcacggcaccgattcttctctggctcttgggtgctgctctgagcagcgtcaccctttcagcgtcaccagaaagctggcaggcaccatgtggaaaaatttaaacaagaaaaaactgtggtaga

SEQ ID NO: 160546 - DNA, 122 bp, Homo sapiens
gatgtgggtggggccagataagataataaaagcaggctgccagagacagcagcagcaatccgctccggtccgcttttgcgctgtggtagccttgttctttcgctctttgcactaactcttgc

SEQ ID NO: 160547 - DNA, 122 bp, Homo sapiens
atcggaccttatcacagctccaacctcctgccccggccaggcccagctcctccctggctccggaaccaaggcccattccagccttgcacatgggcctgccctgtgccctaggcagccacctg

SEQ ID NO: 160548 - DNA, 122 bp, Homo sapiens
gctggaggagctgctcggggccaccctcgccttgcagagctgtggggattttctctgacacggcagcctggaatgctacatcctcaacacatgtgtctccgagtgccacctgttaggaaatc

SEQ ID NO: 160549 - DNA, 122 bp, Homo sapiens
tccaccactcctaagtggcttcccttttgacacattcacataatacctagttgctgacttcgctgggtgtatcattagctgatagcatctatttttgtctacttgttatttttatccgttag

SEQ ID NO: 160550 - DNA, 122 bp, Homo sapiens
tagttacttcctggcagaaggtagcaaaaagtctgatgggccacacgttgctagaagtctcggtttttaaaaaatgtacttcactgggaggccaattcatttgaattatttttctaagcagc

SEQ ID NO: 160551 - DNA, 122 bp, Homo sapiens
gaaggaggctgcgcgccagcccgcccgcggcgcccgggctcaggcgccgtgacggctgcacgcgctgccccgcactctgagggccttcattagctcgctccccgcgccgaggctggggcggg

SEQ ID NO: 160552 - DNA, 122 bp, Homo sapiens
actcatgatttgggtgagtagactagaggagaatcacttctttctttctttttttttagacggagtctcgctgtgtcacccagggatctcagctcactgcaacctctgcctcaccggttcca

SEQ ID NO: 160553 - DNA, 122 bp, Homo sapiens
cgcagcctggaagaggtaggcggctgggagagcccaggtgggctgaggttgggtgtggtgcgctgtggaacgtgcgagctcctgagccctgtctcttgcaggacaagcactccactggacgt

SEQ ID NO: 160554 - DNA, 122 bp, Homo sapiens
tgtggtgctggtgctgacattcttgtcaacttttccctccatcaccaccattgaatcaaccgattgtttcagagactctggcacccttcaaaccctgagtcctgtcttcatggagaaataac

SEQ ID NO: 160555 - DNA, 122 bp, Homo sapiens
gttgatattatttctgaaatgttatgtatgatagaaacaaagcttagtagagttaagcaacgttcccaagatcacaaatgacaagagccagggatgaaatcagatgaactcatgcctcaagt

SEQ ID NO: 160556 - DNA, 122 bp, Homo sapiens
ctgtgtggatgggggagccatgggattacacccaataaggtcacctgcagatcagcagtgcggcccccgtggggtccgcacccaggcgtgtgctcacctgcagatcagcagtgtggcccccg

SEQ ID NO: 160557 - DNA, 122 bp, Homo sapiens
aacaaaacaacgaaagaacaaagcatcaaaagaagcaacgaaagcgcagattcattgacgcgcaagtgcactccgcggctgggagcggctcgagcaagcggctcacgagcccaactgcagtg

SEQ ID NO: 160558 - DNA, 122 bp, Homo sapiens
gctggaggcaaagcaacggaagttgaagagactttgcaacagctgcaagagtttcactcccggtgcggagaagggtagcggagctaggctaccccacccgggcggcgtccagcagccaggtc

SEQ ID NO: 160559 - DNA, 122 bp, Homo sapiens
tggaacacaagagaccacatagctgaacaaattatagcctccttacaagtgagaaaccttcgaggctacatagttttcagccaaaggaaaataaccaacagcttctccacagtgtagactga

SEQ ID NO: 160560 - DNA, 122 bp, Homo sapiens
gaatagaatttggtagaggtgcaaaggggtggatgaaacatattttctgaaactttttttcgggtgtcttttttacaggtttttaacagtgaattgacagtacacttgtttattttctgtgg

SEQ ID NO: 160561 - DNA, 122 bp, Homo sapiens
cgctcacaggtggtggacttcaccagccccttcttctccaccagcctgggcatcatggtgcgggcacgggacacggcctcacccatcggtgcctttatgtggcccctgcactggtccacgtg

SEQ ID NO: 160562 - DNA, 122 bp, Homo sapiens
tcgttccgggagcactccgggctccgatctccggtgtcacagcaaagatccgcgtctttccgatgaatccagccaatgccatccagtacacacgcgcaggaccggaggggccgggccgtggg

SEQ ID NO: 160563 - DNA, 122 bp, Homo sapiens
caggtcctgagccctgccccaagggaaggcagctaaggccgggtgagaaattgaacacagcgccggtgggctggcactgctgggggacccagtacaccctccgcagccgctggcctgggtgc

SEQ ID NO: 160564 - DNA, 122 bp, Homo sapiens
ctgcccttctgcaaaggagacgtgctcaccattgtggccgtcaccaaggtaatcaggtgacgcccaccccaccatcccactgctgggccttccctctgcagggggaggtgggcctgagagca

SEQ ID NO: 160565 - DNA, 122 bp, Homo sapiens
ggcgagtgaggaaaaggcaggcagagggcgccaggtgcaaatctgcaggaccacagacttcggttctggatacagaacaatggttccttgtcattgtagggttttagaccctaagactcgga

SEQ ID NO: 160566 - DNA, 122 bp, Homo sapiens
gtatctggcccctgggcagctgcccggggaggcggccagcgagctggggccgcgcaatgtcgcacggagccgggctcgtccgcaccacgtgcagcagcggcagcgcgctcggacccggggcc

SEQ ID NO: 160567 - DNA, 122 bp, Homo sapiens
aaatagttgttaagtgttaaagggagaaaataatgaattggtttctttgttttctgacttcgtgacaccattttgggctgaaaggttgcagtggtgtctagacacagccttgggcagtatcc

SEQ ID NO: 160568 - DNA, 122 bp, Homo sapiens
gacccgagtctccgccccgccgagttcccgcgcgggagggactttgtggcgactctgaagcggaagctgcctgtaggaggagctttacaaacccaaaatggagcggaaactgttctttctct

SEQ ID NO: 160569 - DNA, 122 bp, Homo sapiens
ctaagaacacctcaataatgatgttccaaggagaccccatccaaattcctccaaggattacgcccccaaggcccagtccacacttgctcactcccaggacggggagctcacctcctcctccc

SEQ ID NO: 160570 - DNA, 122 bp, Homo sapiens
ataaaccctggctggccggagctgcagacatcactgttgacacaggggtgatgtcactgccggccaatggggagaccctcgggggccctacgtgtgcctctctgtgctcccagggcccccgc

SEQ ID NO: 160571 - DNA, 122 bp, Homo sapiens
accttccaaagcccaagatgcctatttaaggaggacgccggtcacccgccgtcaagccggcggcctaggcctaaagaaggcacagtagtgcctacaacacggatggacttgaggcacaaggg

SEQ ID NO: 160572 - DNA, 122 bp, Homo sapiens
agcggcagccgctgggcaggaggggctgcagcgtgtggcccccgggtggctccaaccaaacgggccaagctgaggctgttcccactcgggggccgcccactgtgtgtccacatggccgtggc

SEQ ID NO: 160573 - DNA, 122 bp, Homo sapiens
gagccgggaaccagggctggcagcggccgccatgagcacggtggaccttgctcgcgtgggcgcgtgcatcctgaagcatgcggtgaccggggaggtgaggccgggtggacgcagggcggtgg

SEQ ID NO: 160574 - DNA, 122 bp, Homo sapiens
gcggattttgaaatgcttctgcagccctggcgtggatatgcacgtgagcgaagtaaaagtcgctggagatgagttggctccacttgtccgccctggggagcaatcctggggcaaaatccagt

SEQ ID NO: 160575 - DNA, 122 bp, Homo sapiens
tggcctccgcagcaccctgagctgtctgctggagtcgggtggtccccctccccaccccgccgccactgcttgccagccagtttcaggttttctaaccacgatccaagagtctgaactcttcc

SEQ ID NO: 160576 - DNA, 122 bp, Homo sapiens
ctcagcctcccaaagtgctgggattacaggtgtgagccaccacatccagccagggcttcccgtttattgagaccaaatctaaactctggctttgatggcagagacctcagcctagttcctcc

SEQ ID NO: 160577 - DNA, 122 bp, Homo sapiens
tcctcctctttaactgggctcctccctctaaatctaggctgctgtatttatgagaaacctcgggcctttggcgagagctccacggaaagtgatgaggaggaagaagagggctgtggtcatac

SEQ ID NO: 160578 - DNA, 122 bp, Homo sapiens
gtaggtagcaatattattcttattttagggatggtactgagagtttaagtaatttgcccacgtaagtgacagagccaagtttcaaacccaggaacacctggctctagagtccttagtagtaa

SEQ ID NO: 160579 - DNA, 122 bp, Homo sapiens
catcatctgatccaggatctcctcctttggctctggtggtgtggggtctgccaaaggtggcggtggtggtggtggaggtggaggagaaagaactaaaggagctttctgttgaggctccagct

SEQ ID NO: 160580 - DNA, 122 bp, Homo sapiens
agtggtgcaatcacagctcacagcagcctcaactggtgcaatcacagcttatagcagcctcgacctcccaggctaaagaaatcctcctacctcagccttctgagtagctgggattataggtg

SEQ ID NO: 160581 - DNA, 122 bp, Homo sapiens
aggaaggctgcttcagaatttgacacaaaccatgccactggtttccacaggtatgagttgcgtttccccaattactatagttttgttccgtttgcctatgttattctttgctttatacacat

SEQ ID NO: 160582 - DNA, 122 bp, Homo sapiens
ccagctgcaggtggaccctgagatgggcccaagctcccccgacgtgaaaggcagctgctccgtcctgggcagcaccttcctcaggaagaggcctggctcctgctgccacccccacccccacc

SEQ ID NO: 160583 - DNA, 122 bp, Homo sapiens
gttttacttaggacttccctccaggggcagcgtgcgagaggctttgtcagaaatcgaacgcgttgtcatcagaaagcacagttccgaagtgccatttgtcaggctgtatttggctatgtaaa

SEQ ID NO: 160584 - DNA, 122 bp, Homo sapiens
ccggacgggggctcggccttgggggggcgcggaggtgaaactacacttcccggagtgcaccgcgagggtcgcgcagcctcgcgttaaagagcccgctccgccgagcgccgggcgacggcagg

SEQ ID NO: 160585 - DNA, 122 bp, Homo sapiens
ttggccggtccgaaagacgcggggcgttgtcggtttgaatgagagcgcctggagccggggcgcaggcgcagaggagggcggtgttgagaccggcggagcggcgggacccctaggtggcggag

SEQ ID NO: 160586 - DNA, 122 bp, Homo sapiens
ctgcccaacatcgggcatcaatttaggggagtcagagctgcctttttctgcaggccttcacgaggggacagcgaattactgcagggtcggtttcatttcggttccctctaccctgcggatgt

SEQ ID NO: 160587 - DNA, 122 bp, Homo sapiens
gcccgtgtagaagatggcacaccaatcttaacttcggaaggggtgcaaacattaccaaagcgctgtctttctacaacagtctatgctgtagcataaaatcaactatcttgagtgtgaatatg

SEQ ID NO: 160588 - DNA, 122 bp, Homo sapiens
accacgggccccgcgccaccatgccccggcagctccctcggcactcgcgggaccccaaggcgggctgctgcggcttccccaaacccaccgccaccccaccctgtctgaccacagccccccca

SEQ ID NO: 160589 - DNA, 122 bp, Homo sapiens
gcgccgcgtgatgaggtcggggttgctgctgctgatgtaaaggtggcgggacaggtctggcgtgctgttggcgggcctggggggcgggtagggtgggggtggccggtacacctgcgtccgca

SEQ ID NO: 160590 - DNA, 122 bp, Homo sapiens
ggagccacacagtcttagagttgcatagaactttggaacacccctattgcaggcccctctcgctacagctggggaagctgaggcgggaggaggggaggtactgtgtcaaggtcaaacgttgg

SEQ ID NO: 160591 - DNA, 122 bp, Homo sapiens
caccagacacggtggccgatttctccaccgtggaggctgctcttggggttccccttacctcgcgcctcaaggaagttgtatggtggtgggtcagaactgattttccttcttgtaaaatttaa

SEQ ID NO: 160592 - DNA, 122 bp, Homo sapiens
tcttatgccacagttttgggaaacactgtgctcagcaagctgaactgcttcttgggtgtgcgactagggtgccagccaggccagggacgtccaggactggaagaaatgcaggggcaggacca

SEQ ID NO: 160593 - DNA, 122 bp, Homo sapiens
tcacattttctaacccgcggctcctcggcctctgggtctcacagcgtgtgtggtcggccccgcccccggctctgaatcggtgacccgtgctggcctctgccttcgcctgaagtccgaatcag

SEQ ID NO: 160594 - DNA, 122 bp, Homo sapiens
ctccgatcaaatgtgcttctcgatcatcttttaggcaagagagcgcttggggtgcattttcggcccctcatctcccacccccagtcaagccaggcccctggactgacaggaaaggctggccg

SEQ ID NO: 160595 - DNA, 122 bp, Homo sapiens
aggcctgtttgagttcagtgttcatatttggtctggtttgctgtggcaatgagtatggttcgttcagctcagtgcccattcagaagagactcttggagcacattatcttaaacaaggattgg

SEQ ID NO: 160596 - DNA, 122 bp, Homo sapiens
tcatctggcgcatgactgtctcataatcgggggttggcctgtacgagggcacgatgatcgcgctgtgccggtggctcgggatgtagtcggcccgcatgatgtcactcccagggatactgagg

SEQ ID NO: 160597 - DNA, 122 bp, Homo sapiens
agggctctagctcgggctcggggcacaagcacagctcccgcaactggccgccccaccggtcggaagccactgacctgcaccgtcactccttcgcggagtccctgaaggtctaccccacgcag

SEQ ID NO: 160598 - DNA, 122 bp, Homo sapiens
ttagatgtagaaaagttgcaggcgcggtgcagagagctccctgccaccctgcctcgctcccgtggaggcccccatggggcagtcctcccacctgaggagcccccgccgacccgcggtgttgg

SEQ ID NO: 160599 - DNA, 122 bp, Homo sapiens
cccccagcccaaggctggatctgggccaccagagcctcatcttggtgtcccaactagccccggccctgacaaggagtcttttgagggctagacacaggcgggtctcgcccagggtctcccag

SEQ ID NO: 160600 - DNA, 122 bp, Homo sapiens
ggggacttgtgtgtccctgtgactgtgagtttgtgtgcacctctgccccgtgtgtgctcacgtcagtagctttgtctgtgtgatctgtgtgtgtgtgtggctttggggaatctgcccagtgc

SEQ ID NO: 160601 - DNA, 122 bp, Homo sapiens
ccaaggccctgccctggcttggagaccagcacgcaggggaccacgtgcacactctttgttcgccaccagagggcaggcctgaggcacgatggctgagctaggtgccctttgtccccatcagg

SEQ ID NO: 160602 - DNA, 122 bp, Homo sapiens
gaagccggctgtgcggtgaccggagttgcaggttgccaatcttgctgaggggggctccaccggacgccggcctacgggtcgtaggcgtgtgtggggtgaagggggaagaggacgggagagga

SEQ ID NO: 160603 - DNA, 122 bp, Homo sapiens
gggagccaaaaggtttttctggggggggtgccaacagggggggctcgacgtcccctcctccgtgcatcggagagttgacctatcattaacagaggtgagacagatctttttattaatcggag

SEQ ID NO: 160604 - DNA, 122 bp, Homo sapiens
cctccccaagccccacccggcccaagccgcgcgtcccgcactgagctcctacacgcgccgcgccccggccgcaccccgcgcagccagagcaagcactggagccccgccccttcccgcacccc

SEQ ID NO: 160605 - DNA, 122 bp, Homo sapiens
ctccagtgatctgcctgtctcagcctccccaagtgctaagatgacaggcttgagccaccacgccttgccaaggtgatatttcaggcaaggcctgaaggcaacggagctgtatggatgtctga

SEQ ID NO: 160606 - DNA, 122 bp, Homo sapiens
cagcgagcacctgtagtgactacaccactttgttgacggccgtccggacctgcagctgtccgggccaggtggctgcccccgcctccccccggccggggcgctggtgctggggtggggctggc

SEQ ID NO: 160607 - DNA, 122 bp, Homo sapiens
tgtgcagacgggggacgtgtgtatctccatcctccacccgccggtggacgacccccagagcggggagctgccctcagagaggtggaaccccacgcagaacgtcaggtaagccggcccaaccc

SEQ ID NO: 160608 - DNA, 122 bp, Homo sapiens
agggtgcaaggcgggggctggggggctcgggagagttttctgctccctctcctgaacccacgcagccctgtcagctcaaggctcccgcctcgtctcatctgaacgaaacccttaaggggctg

SEQ ID NO: 160609 - DNA, 122 bp, Homo sapiens
gcggctccctaaaccacttttcgtgttcatccgcctccatccgagatcgaaacgggacctcgtcggccccgtaggggcccgacaagaagagggaatccctgcagaccaacagcgggctatat

SEQ ID NO: 160610 - DNA, 122 bp, Homo sapiens
cccaccagaaggaagaaactgcaaacacatctgaacatcagaagggacagactccagacgcgccaccttaacagctgtgacactcaccgcgagggtccgcggcttcattcttgaagtcagtg

SEQ ID NO: 160611 - DNA, 122 bp, Homo sapiens
gcctaggcctctggggagctggcccagaactcagagcgcagctggcgagggcgcgctggccgggtgcgcgccgggcccggccccggggctgcccctcggctgggggcagtcgagcccgccac

SEQ ID NO: 160612 - DNA, 122 bp, Homo sapiens
aggcaggtaacattcctggggcggcagctgctctgtgcgcagctccggatccaggaaaatcgctcaggtcctggggagaggagctccaagctctctgggctgcctcccggctgcttaaaggg

SEQ ID NO: 160613 - DNA, 122 bp, Homo sapiens
tggacccttctcgttgggagcgcttagcctcaggagcggattcagggcacaggcagaggacgtccacaaacaccacaggaagccgccacccaggggcgtggaaaggcccaatgcctcgtctg

SEQ ID NO: 160614 - DNA, 122 bp, Homo sapiens
ttgcgtagggcattgtcaaaagagaaataaaaacagatgaccagaacagatcctggcacccgtgttcacagcagcaaaagggcagaagcaaaccgactgccaatgagcagatacatggatca

SEQ ID NO: 160615 - DNA, 122 bp, Homo sapiens
aaatattaagtggaaacttccagaaataaacaattcaattaaataaaccattttaaatggcgcccccttctgagtagcgtgatgaaacctcaagcctgctccatcctacccgaagcgtgagt

SEQ ID NO: 160616 - DNA, 122 bp, Homo sapiens
cctgccggcgactgacttcaaggcacaaggcagtgggaatttcgtcgctgagaaatgcagcgtgtacgtcggttgtctttccttaagctgtatacacactagacggagctttcggcaatgta

SEQ ID NO: 160617 - DNA, 122 bp, Homo sapiens
tagtagtacaggcgtgagccaccacacccagccagaactttcactttaaagacataataacgagacacaccagactcatattatttctattttacagaagataaaattgaagcttagcttga

SEQ ID NO: 160618 - DNA, 122 bp, Homo sapiens
tgctcccgtggccagggtcgccctctcctctgtggtttggcaactgtcctgcccggcctacgtcctgtggctccggctgaagcctgggacctctggagatgggtggctcagcccagcctgct

SEQ ID NO: 160619 - DNA, 122 bp, Homo sapiens
cggctgtggctcccgcccaggtgggcaccacgtctgaataatgtatgaagcctctggttgcgtggaggatgggagcgcttcgggcagcatctgtgggcagagacttcagggatgtgaggtac

SEQ ID NO: 160620 - DNA, 122 bp, Homo sapiens
ccttgcagccgtgaccactgctgtccaggaactgctgcgtctggctcaggcccacccagccggacctcccaccctcgaccctgtcaatgacctgcagctcaaagatatgtcagttgtagagg

SEQ ID NO: 160621 - DNA, 122 bp, Homo sapiens
ttcaaattattgacttctacttgtggagtcttcagttaaggtgccagggctagtgactcccgggatattgggcagatggcaggtggggtctgagccatggaagaactgcgaagatccaacag

SEQ ID NO: 160622 - DNA, 122 bp, Homo sapiens
tttccaagggatcgcagggaggagtgaggctgggctgggggtgctccctggctgcgtgcccggcttcagcttcggctgggaccagctgctcgaaccacccctccagcctggccttcctgcaa

SEQ ID NO: 160623 - DNA, 122 bp, Homo sapiens
atgaaaaagagctaattttgaccaaatatcgagcagctacgtcatgagtggagttagcatcgctgatgggtctctacactagggatagttattttggatctgctgctgcgttgttgcatagg

SEQ ID NO: 160624 - DNA, 122 bp, Homo sapiens
gagtttctccgcgcccggagcccatcccccgctcccagggggctggcggagcctgccaggcgccgccacagccgccccagccccagccgccgcctcagcagctggctcaggatgaactgccc

SEQ ID NO: 160625 - DNA, 122 bp, Homo sapiens
cgacaacaaaggaaaccttaagtacctcttacctagaatataggagccacccccacatctcgcctctcccggttccccagcgcctgttgctaaggaggcgagacagcgctcgggaaacctcg

SEQ ID NO: 160626 - DNA, 122 bp, Homo sapiens
cagaggatggactggtgagctaccccaccacggacacaggaggatccccaaaaacctgcccgttttcactgctaggaggccttgggcagggccattagggagagacgctagcgtgctccagt

SEQ ID NO: 160627 - DNA, 122 bp, Homo sapiens
attgggaagaaagcatcttggtctctgacatatccaaacatacgagacactgggattttacgtcctcacattaattagtccagttctggggaatccagtctagaattaactggtgatccctt

SEQ ID NO: 160628 - DNA, 122 bp, Homo sapiens
ctgtagtgtcctcactctatgctgagaatgaaagaagcacagtctatgaaaggaaaaccccgacagcacagagcacttcgtgcggcagcagcacaccgggagtcccactccctttcctgctg

SEQ ID NO: 160629 - DNA, 122 bp, Homo sapiens
aacacgaggccgggcgcagtggctcacacttgtattcccagcagtttgggaggccgaggccggcagatcaggaggtgaggaaatcgagaccatcctggctaacacggtgaaaccccatctct

SEQ ID NO: 160630 - DNA, 122 bp, Homo sapiens
ttcttgaaagccattgtttacactagcgttttgcaggttaggaacggtgccggtgggaaccgagctgacaccgtaagcgcttccctgggactgaattgaccctacaatcagtggagggaaaa

SEQ ID NO: 160631 - DNA, 122 bp, Homo sapiens
ccccatggccctgcgggccgagcaaggccagagtcgggcccctccctccaggccccggcgcggctctgtgtggatgttagtgagggatcgccccttgcccgcagcccacacaatgagcctga

SEQ ID NO: 160632 - DNA, 122 bp, Homo sapiens
tatgaaccatcagcttcatttttcaggagttgatcctgttccctggaagctaaaaccccacgtctccctgaaaagaaaacacaagtaacctagattaaataatcaacttttctgaattaaaa

SEQ ID NO: 160633 - DNA, 122 bp, Homo sapiens
cctccgcgtccttgcccttggccggcccctcctcggcttcctccgtgcactcgctcttgacgggctcctcggccttccctgtgtccactgccagctcctcagccgcggggggcttctgctcc

SEQ ID NO: 160634 - DNA, 122 bp, Homo sapiens
cagcacatagatctaccaaatttccttccttccagtaggtccctggagaaggatgggggtcgggaggagaaaaggttatggggatagttaaatcaacttacccatggctaaaagtatggatg

SEQ ID NO: 160635 - DNA, 122 bp, Homo sapiens
gaaaggaggcccgcctcctcctgaatataagtctcccctttccaaggggccttcaggatgcgcttccccttagtttgcttcaacactgggaaaaaaatcacacggatcgtgaagtactctaa

SEQ ID NO: 160636 - DNA, 122 bp, Homo sapiens
tgcggcctcccttccgggaaagggtcccggacgaccccgcccctgctcccggcgcccaggcggggctcggagctcctgcaggccttctctgggccagactcagtctttgagtcgccttgtgc

SEQ ID NO: 160637 - DNA, 122 bp, Homo sapiens
gacaaggggaagataccgcgggtactcggccgctcctaaagccaaaaagtgccaaggagccggacttcagatctccatcaggctcagcagaaccagggggtggagagaggggttggtctaac

SEQ ID NO: 160638 - DNA, 122 bp, Homo sapiens
acataaaatagcttctaaccccttaaccagtatgctgcataaactagtacctccccgtaccgcataccccaggactttctctttctttctctctctctttctatgtgtacatatatatatat

SEQ ID NO: 160639 - DNA, 122 bp, Homo sapiens
atcattaactccttaacccctcctggacaggacgaagccaggagctggggtggaagatgccgagaaacccgaggaccaagtttcttgggcactggactctgcctttccggggctgtactgtt

SEQ ID NO: 160640 - DNA, 122 bp, Homo sapiens
gctcgcagggctggagggacagagttctcagatccaagtagagaaaaccgggaacggttccggctctggggactgacattcatcgcggcagtttctggtggcaaaacagaggaaacaaagga

SEQ ID NO: 160641 - DNA, 122 bp, Homo sapiens
atctccttttccatggcctgggcgaaccacgtcttcctcgggtgccggtgagtgaggcagcgtccctaaccagcacgcctcgttttgtgtgccacctgcagaccggggcccggcgccctccg

SEQ ID NO: 160642 - DNA, 122 bp, Homo sapiens
cataatgaaaagtaatttctggtaccctcgagatgtgacaacgtgctggcggcccttgctcgctctcagcgcctcctcggccttggcgtctgctctggcctccactcttgccatgctcgagg

SEQ ID NO: 160643 - DNA, 122 bp, Homo sapiens
tccactcctccagcgggctcccgcatcccccattatccggcggaccccaacccctgctcacgtgactcgcccgccaccctcgaagaactctcgtggggccgccccgccctgccgcaggtcac

SEQ ID NO: 160644 - DNA, 122 bp, Homo sapiens
ccgaggttgatgggcgctctccgtctctttctcccagtggtccattctgtgttttagtttcgcatctctgatgtgaggtggtttttcatattctcgactgcttgagtagatttgattttatc

SEQ ID NO: 160645 - DNA, 122 bp, Homo sapiens
aaatcggaggtaaggttttgggggcgcgggctgcagctgtcgctgggcgcgtggtgtgagcggtctgagcctccggcttacttgctcagggctttcttcccgcgtgtgcttggcgctgctca

SEQ ID NO: 160646 - DNA, 122 bp, Homo sapiens
ggaagctacccgggcggcagctgtggggctggcttgtggggaggggccggcgggcccgcgcggaggagcagccccgactcccgcccgcaccagcagctcggcgcccccttgccggcggctgg

SEQ ID NO: 160647 - DNA, 122 bp, Homo sapiens
ggacagaggctgcgtccccccaccagctgccggtcctgggatccctgcccgcctgggcagcgctggggcagagccacacggagccttgggccaggaacaaccccttgccggtggggcctgtg

SEQ ID NO: 160648 - DNA, 122 bp, Homo sapiens
atggtttgctggtttatttctttaaaaataaacaacagcaacaaaacccaaattaatgcccggtcagtgatgcagtcaatgaagagagcattaaagaccgtgtgctttaagaaatagtttta

SEQ ID NO: 160649 - DNA, 122 bp, Homo sapiens
agattttccttttggaaataatccctggtctgtaaggagctgaaggaggtctacaggtaccgaaggagggtaccattgtagggttttcagtaggacagtgataagatgacatgtgcatttta

SEQ ID NO: 160650 - DNA, 122 bp, Homo sapiens
tgccgtggtgcagcccgtagagcagcagcttgtacctgtgggcagggtccaggcccggcacgctgacctccctgaggctgccctccacgggcaccacctggggctgcccgtccctgtctttg

SEQ ID NO: 160651 - DNA, 122 bp, Homo sapiens
caccactgatgtgtggaaccaccacacacctgtgagaacagcgcgaggaaaaaggaaacgcgtggtcacacccagcactggcgaggacgcggagcccctggctctcctgtgccactgctggg

SEQ ID NO: 160652 - DNA, 122 bp, Homo sapiens
tctattaaattttttttttttaattttgtggattacaaccatttcaaaaactaaaataagcgtaaatgtatcaaaatgcagcttacatagcgaggataaatgctgttttgtcaatctgttgt

SEQ ID NO: 160653 - DNA, 122 bp, Homo sapiens
ttcccggcagccatcaggcgccagctccacagcctggctaaacagactccctccaccccacgtgcgcctcttcagccggttcccgttcactccaagacgtctgaacctgtcaccccacttct

SEQ ID NO: 160654 - DNA, 122 bp, Homo sapiens
cattacttctctcttccttctttacatagcggttaatcatattgagcttctgaaattgtgcgcgtgggcagattagccatttttgggttccctcttaccccccggactaagccgggacggaa

SEQ ID NO: 160655 - DNA, 122 bp, Homo sapiens
gggcccaccaaggctgccctcctccgggagcctgagtaggagaaactcagacccagccagcgctccccacccaagggctggttcccattcctgacacctccacccacagtgccctgtctccc

SEQ ID NO: 160656 - DNA, 122 bp, Homo sapiens
ggatggagtggccatggcctcaggctccatgtccgatggggagtgcaggagcaaccggagcgccccctgctgtcttgccgtgataaggcagcagggccagagagtccgagcacttcccgact

SEQ ID NO: 160657 - DNA, 122 bp, Homo sapiens
ggctctgaagagacgttgcttttaaggggccctgcttcttgccagtctcctgcgtgtccccggccaggcggccttagctgacagtggtccggttgtccgggagccgcaaacctgccttgtta

SEQ ID NO: 160658 - DNA, 122 bp, Homo sapiens
gtggacgcgttctctagggtcttgatcgagatgttcaggactggcagggatggggagcctcgggaatcttgaagggcagccgcttaattataacatgtccttgacgtttgcgctttccacag

SEQ ID NO: 160659 - DNA, 122 bp, Homo sapiens
tccttgatcaatgctaacagaagcaacagctgctggttctgatgctgcatcagggtctgccgtattcattttcacctgccacaaccttgaacttcatgaggccactggcctcttgggccaat

SEQ ID NO: 160660 - DNA, 122 bp, Homo sapiens
acctgatcatggaagtaaggggaggaggcagccaggacagcccgatgagcccggaactcccggccctgcactctgatagatacatcgcagagctggccctgcagacgctgctgattgaggga

SEQ ID NO: 160661 - DNA, 122 bp, Homo sapiens
ggtggatgcagttaccataaaagacagcagagtcaaagctgtaaccagaatagactgactcgcagcgacctatggtgcctgttgatcctggctttcctagaagtgaaatagataagaagcct

SEQ ID NO: 160662 - DNA, 122 bp, Homo sapiens
gagacaagaaacgtaaaaccccagggtaaggtaggaatcagtgaaaggcagaggaactgccgtccagtaatgagttaggctttgctggcttctggccctacagatgactctttggagaggaa

SEQ ID NO: 160663 - DNA, 122 bp, Homo sapiens
ggtccaggccagtggttttctggaaaaaccacgtcaacttgtgctccacatggcaaacgacgtgggagaacacatcatcatccatcagcgggacaagcacactgctggtcacattgtaggtg

SEQ ID NO: 160664 - DNA, 122 bp, Homo sapiens
tttaggactgagtccaaaatccctgtttcattggcaggatcacgcatgttcaaagacagccgccatgcattccctgtctccctcctggacatgcttgctgcccaccacttcaagagctggaa

SEQ ID NO: 160665 - DNA, 122 bp, Homo sapiens
gtgtgaaaaaataatacatctccttcctgggcacactcatctgaaactcagtatttttaacgtatctaatgatgtcctaccatttattggaagagactgtagacctacacaggcaattagag

SEQ ID NO: 160666 - DNA, 122 bp, Homo sapiens
ggagggggggctcttggcctggcagccctgcagtcagctggctcaaccttcaaggaggcccgggctgaacctcgcgtcaccctgctgcaacgcgcgccgccaagcgctccagcgagagaaag

SEQ ID NO: 160667 - DNA, 122 bp, Homo sapiens
aggtctgcagcttcactcctgagccagggagaccacaaacccaccagaaggaaaaaactccgaatacatctgaacatcaggagggacagactccagacgggccacctgaaaagctgtaacac

SEQ ID NO: 160668 - DNA, 122 bp, Homo sapiens
cggttgcgatggcctttgcccggcgacccaagaagagtaagcaaactaccgtccacccagcggatcaggtccaatccctgcgcctcggcccaatccctagagccccgcggcgccgtatcccc

SEQ ID NO: 160669 - DNA, 122 bp, Homo sapiens
gatggggacggcgcagtccccatccccgcaccaggcagcaccgccacttcctcgccagcccggccgcagccctccccgtcccgggccgcgccgctttgactgatctcccctattttcaaaag

SEQ ID NO: 160670 - DNA, 122 bp, Homo sapiens
ccgtcgcgcagccgctggagccgggtcccggaccacccgagcgggcagggggcggcggcgcggcccgctgggtcaggctgaacgtgggaggcacctacttcgtgaccaccagacagacctta

SEQ ID NO: 160671 - DNA, 122 bp, Homo sapiens
aaggtcatacagccatatttgacccaagctcttcaccactaagctgtcttagctcattcacgttagcctggccgccccgtgggaagttcccctgcccgtgatcctccggaagaccgcaggtc

SEQ ID NO: 160672 - DNA, 122 bp, Homo sapiens
ccgtgcctcctttgtaggtaagctgattgagtgtcatcacgtgggcttgagtccacctgacgccgtggctccttccctctctcacacgcgccttcaacagagagtagtcagtcagggagggt

SEQ ID NO: 160673 - DNA, 122 bp, Homo sapiens
ctttacctgtgcgcgccttgggagtggcgaatgggtttcatggttgttcgcgccagtcctcgcggcctccaaacatcctccggaagctgccacctaccccgcccccagccgttgtcacctgg

SEQ ID NO: 160674 - DNA, 122 bp, Homo sapiens
accaaaatagccagcactacaaacccactttgtcaaattatttggttggcttcaagacagcgaatatgggatcttataaccaagtaaagcaaatatggccatctttcaaggggataggaaac

SEQ ID NO: 160675 - DNA, 122 bp, Homo sapiens
tcgctgcagatgtagagtagtgtctttccctccttccaagctagtcgcccagggcagggtcgccctgtctggctagggtgctgcacccgcagctctcggtatcttaggtcagacgcctggaa

SEQ ID NO: 160676 - DNA, 122 bp, Homo sapiens
tcctctaacacctgagccccacttctcgcggccgtcccggggagctctcgcgagagctcgcggccccaccgcgctgacaggcatcagctgtctccgtctgtctgacgcgcgctctccttctc

SEQ ID NO: 160677 - DNA, 122 bp, Homo sapiens
gttctcctggcttgggccatccaggcttggctaggattgccggcctggggttgaggcgctcgcagtggtctcttccgggccggggtggatccgggcctctccagcgagtgggcggcgtgcag

SEQ ID NO: 160678 - DNA, 122 bp, Homo sapiens
ttttgcttctgcttttccatctagcacatctgttcttctagcggttcttgtgtcgttagccgcctttccatcccaccttggcgctattcttttaattcaattgtgcgcaaattgcatcaggc

SEQ ID NO: 160679 - DNA, 122 bp, Homo sapiens
gatggaatttgattcgtattttgcaccttgccagtctttccatcagtggccctggcaaagcgtcagttcggctcctccatggataagtaacatctgttttatgtaacgatccggcactgtct

SEQ ID NO: 160680 - DNA, 122 bp, Homo sapiens
tctcccatctgcagagacgcggacgcgccggcccgcagttggcctgcggagcgcggtggacggtttggcgcccaccaggcgatcaatactttggatttttaatttctagatttggcaattct

SEQ ID NO: 160681 - DNA, 122 bp, Homo sapiens
ctgcccctcgccaagggttgtagcagcggccggaggggtagccagcacctggcctggccccgtgctccagggggagcctcctcccggccggctgtgctgagctccgcagcgccgggtgactc

SEQ ID NO: 160682 - DNA, 122 bp, Homo sapiens
cctagttagggggttactttctccttttactcagaggctttgcgcgcaggctcagtgcagcgttctcggccacagccgcagggttcgggtcttggtcctgcagcggggataaaaaagctcag

SEQ ID NO: 160683 - DNA, 122 bp, Homo sapiens
tcacctccagcatttgctctgagtctgttccctggcgaggtgaggccccagctgttttagcgctcataaaaatttacggccatcacaagggagctcagctgggtggatcacggtgtcggggc

SEQ ID NO: 160684 - DNA, 122 bp, Homo sapiens
atggctcctatacattcaccctcttcaattattacgaaatcaactggaccacggggacggcgagtggcggcgaccccctgacaggtcttggtggagtgatggcacaggtaggtggctctcca

SEQ ID NO: 160685 - DNA, 122 bp, Homo sapiens
agggtccacggcgcatttaggtggtggcttgctctggactacatttcccagggtccaccgcggatctaggaggaggcttgagatgcagcctcccagcttcgaggctaccacctgcccgaatt

SEQ ID NO: 160686 - DNA, 122 bp, Homo sapiens
ggtactgctctctcgtgtggctggcgccggtgccccgggctcccccggccgccccacggccgcatcccctggccttgcaccaagagaattttcagcttcgaccggttggtaaaatgtaggta

SEQ ID NO: 160687 - DNA, 122 bp, Homo sapiens
tcgggggcgcacggggcagcctcatccaggacacctaaggccaggcaggacgggcctggacggcgcagtcacctacagggcgagtccacccaccctctggtgcgtcccgtcccctccgactg

SEQ ID NO: 160688 - DNA, 122 bp, Homo sapiens
ggggcgcgggcggagggggcggggatcctagggacgggacctatgagcatcggtcctgagcgctgtcacagctgggattggtggtttcaggagcctgtgggcgtggctagtccgggggcggg

SEQ ID NO: 160689 - DNA, 122 bp, Homo sapiens
tgagcacccggtcccgggcagaatggagacgtccggaagagaacactgacctccaggttgcggtaaatgcaaatgccctgtgaaggagctttgtccttagggcctcaacactgcggccactc

SEQ ID NO: 160690 - DNA, 122 bp, Homo sapiens
cctgaatgtagcaacagaaagggaacaggaggggcaggggcagagaagcctcccgtcccacgtaaataattacaaacagagcacatgacccctggcggtttctgaacgcgcctggcaacagc

SEQ ID NO: 160691 - DNA, 122 bp, Homo sapiens
tgccctacccccactggactggcctctgcccagccaatatgagcagctggagctgaggatcgaggtacagcctagagcccaccaccgggcccactatgagacagaaggcagccgtggagctg

SEQ ID NO: 160692 - DNA, 122 bp, Homo sapiens
ccaagggccgcttaaatcgctgtcccccaagtcctgccgtgctaccaaaggccaggctggcgacggacccaaacccgcagagctgcccccgacccctgggactgagcgcaatcccgagatgg

SEQ ID NO: 160693 - DNA, 122 bp, Homo sapiens
tgtccgggcttgtggcagtctccgcgagggaccagatcttgggcttctgcagggcggaggcgggggctggtgcgggagcgcaggggtccaggctcacggggggcgacggcagagacggcgag

SEQ ID NO: 160694 - DNA, 122 bp, Homo sapiens
ttctgcaattccaaaggccgtacacagcctctcaccatcagaccactttttaaggctcttcgttcatacctagctcgaagattcacttcctcaggaagccattttagttacaaatctgggaa

SEQ ID NO: 160695 - DNA, 122 bp, Homo sapiens
tccctagggagttctatttttaaaattatgaactatggcgctgcatgcttcaatcctgaacgtcactgacttgctgtgaccatccaaataattttcctgtctctgcctctgggagggaacag

SEQ ID NO: 160696 - DNA, 122 bp, Homo sapiens
caaggagctcactacacccctggtcaatcaatggccctcactgggaacgcttaatggggccgagggcgccagcaactccaagctctaccggaggtaagccccagccaggtggggcttgggcc

SEQ ID NO: 160697 - DNA, 122 bp, Homo sapiens
cgctgcctaagcctcatcccgagctgggggcggaggaccaagggtgagagccaccgcctccgcaatcccccgcccctcggcaccgtcgctcagcgcgctcgccggctccctattggccgagg

SEQ ID NO: 160698 - DNA, 122 bp, Homo sapiens
agaattccaccttccagtgagtcagctgattctgcagagggaaacgcggttccaaccccacgtcatacataacttttgagttgcataagtcatctgtgtacaagagctgaatggctcaagtg

SEQ ID NO: 160699 - DNA, 122 bp, Homo sapiens
ttcatgtagaatctggcagcctgcagattgggaataaatgatcttctgttcaccccaccccggcccacttgctcctcacccaacccctccattcaatgagacgtctacagtctgcacctggg

SEQ ID NO: 160700 - DNA, 122 bp, Homo sapiens
gcctctccactcctaacgctttactccctactccccctgcgaccactacacagccggctacggaggcccctaatgtacaaatatcccccaggcccttgctcatcctgataggttttgtcctt

SEQ ID NO: 160701 - DNA, 122 bp, Homo sapiens
tcctctactcctctcccaccttctgtccttccccatctcccacccacacgtgtggggccccggacccgcgcagcggccagagccttccgctgtggacctccagtccacccctccccttcact

SEQ ID NO: 160702 - DNA, 122 bp, Homo sapiens
aatttgccccacgggccattacttcccctgcacttctgggtcacatgtgggtaggcgctgcgctggtccatggtgtctcctgctccagtagcaatagaaaagctccagggcgggagtcaaag

SEQ ID NO: 160703 - DNA, 122 bp, Homo sapiens
ctgtgctgagcgggatactgtgctgtgtgtgagggaacggggccagctcagggcccaggccgctggaagacactggaccgtgctccacccacaggagcagggcccagaggctcactcctaga

SEQ ID NO: 160704 - DNA, 122 bp, Homo sapiens
gtgcgacggcgggccctggggccaatgatggtccaggacaggggcgtttcctgtgggttgcgaagcttggggcgggacttccggcatttggatgggacgtaatttgggagcgacggttccgt

SEQ ID NO: 160705 - DNA, 122 bp, Homo sapiens
agttctgcagttgctaccgctggccgggaaggtgtagattccgctttccctctgcgcacgcgcggctcccggcacaaaattctcttgaatcgaacttatttgcatacgggcgcgcgcacgtt

SEQ ID NO: 160706 - DNA, 122 bp, Homo sapiens
acagtcatagtgtccaggtggctttgtgagtcacccagaccctccgaaataatcccactgcgggtggggctgccttgcagtttctggccccttcccaccctgactcagctttccttccacga

SEQ ID NO: 160707 - DNA, 122 bp, Homo sapiens
cgagtactccacggcggcggcggctgcggcggcggctcccttccccgcttccttccttcccggcaggctcagcgctgtggcttctgcggcacacacacacccccaccccgactccttcccgc

SEQ ID NO: 160708 - DNA, 122 bp, Homo sapiens
ggcgggggcgtggggcggcccatttcctcctcctagccggactggagggagacaaagcagcgcccgtctgcttcgggcctctggaatttagcgctcgcccagctagccgcaggtaacttcgt

SEQ ID NO: 160709 - DNA, 122 bp, Homo sapiens
tgctttctgcctggagctatcttactaaaactcatgacaacccacttatgatccagctctcgcacctcctgcaagatggattgaggctgcgtcaagacagaatggtagagcttgaattactg

SEQ ID NO: 160710 - DNA, 122 bp, Homo sapiens
atcactcagttatcatatgcaagttttctgattccagtagcacattcaatacaattcctccgactaagggcaatgttttgattttagagggaattgtttattctcaatcatattctttgctc

SEQ ID NO: 160711 - DNA, 122 bp, Homo sapiens
agcgctgagtgtggaagctcaggctgagctgagcacaggagccccaagcaggcgcaccagcgtctgaagccctcggcctgagttctcagtccttcctccaaccctcccctttccccgtggct

SEQ ID NO: 160712 - DNA, 122 bp, Homo sapiens
cctgggagcatgttaggcactcagattaaggtaccctctttttaggtctgtggtgggattcgtgtggttctcaaacctggctgaacaactgaatcatcatagagcttctaatactgtaatgc

SEQ ID NO: 160713 - DNA, 122 bp, Homo sapiens
tcatcactgaggagcacatattgtttttattatcatattcgtgttcccaaatccagaggtcgtctggctaggcagagccatactttgctctcccaaattcggggctcacttcaccccatgct

SEQ ID NO: 160714 - DNA, 122 bp, Homo sapiens
acgggttctggccttgggggaagggctattcgggccggctggtccctcaaaggcgggaagcgttgcccaggagaccaccggcctgcaggaagtgttgccctggtgacgtcaccagtgcgcgg

SEQ ID NO: 160715 - DNA, 122 bp, Homo sapiens
gctccccgggcggccacgctccttccttagcagagaacggccttgggcagagaccccatgcggaagccaccccggcctcagggccgcctgcagggactcagggtggcccaaggctgcggtcg

SEQ ID NO: 160716 - DNA, 122 bp, Homo sapiens
ccctaacgtgtaaaactgagctgtgcccggccaccttgggcacacgtcctcaggacctcccgaggctgtcacgggcctgtccttaacttggcaaagtaacctttccaaattcgttgagacct

SEQ ID NO: 160717 - DNA, 122 bp, Homo sapiens
aacacaggccaaccccaaaccattcccaagagaccaggaggagggcaggtcacacaaacacgcacaccgacccactcacacactcagcagtgatggggcacaccctctcacggtggactctc

SEQ ID NO: 160718 - DNA, 122 bp, Homo sapiens
tcccagagccttcgctgagacgctggcgggatcccctgcccaagagtgtgcattatgctccggcacaggccaaactctccttaaattatctgggaaggccgggcccagtggctcacacctgt

SEQ ID NO: 160719 - DNA, 122 bp, Homo sapiens
gcccccgcgatgcggggagtaatatcctcacctctctgctcccctggatgttgcggtccacggtggtcacacagcgtgtttaccttattggcagtaatatcttctccttctctggaaattac

SEQ ID NO: 160720 - DNA, 122 bp, Homo sapiens
aaattatatattccaccaggagcccatcaagctgaaaatgttacctttgaaggttggaaccgaaaatgcacttgctgaggactgaccctcctcataagggtgttcacatttcccccagcttc

SEQ ID NO: 160721 - DNA, 122 bp, Homo sapiens
ccccccaccccaatttctaaaaaaatagatggtgtcttgctatgttgtccagtctggcctcgaactccagggctcaagcagtcctccttcagccgcctgagtagccaagactacatgtgtgt

SEQ ID NO: 160722 - DNA, 122 bp, Homo sapiens
cctctgtcttcccagaatgccatgcccagtctcatctttgatcgggtaaaacccaggctacggaggcactttgtaaattgtaaagtactttacagacttaaaggattaatagagtagtagta

SEQ ID NO: 160723 - DNA, 122 bp, Homo sapiens
tggaagcggagtgtgtgtggggtgggagggatgcggaagaggagggggtcccagccgcctcgcttggctccactttcaggggagaagatgcagttagacctgggagccccgaaggaagaccg

SEQ ID NO: 160724 - DNA, 122 bp, Homo sapiens
cccagttaaagcccaggcagacaagcccaggagccagacgcgctctcctctggtgacccccgggccacaactccccagctgggcccgccaccaccccttgaatgccacgctccctccactgc

SEQ ID NO: 160725 - DNA, 122 bp, Homo sapiens
gaggctgggggttggcgtgaggtccgggcgggcggggtggaaggagtgactagcggcctgcgaacagctggatggttggggcataagctttaactgtcccctttcagagtctgggcaacgaa

SEQ ID NO: 160726 - DNA, 122 bp, Homo sapiens
cgccgggagcgcgggctgaggcggggctgacgtgaggggcggtgacgcgggtggccaaagcggagcggagcgggggtgaggagagtcgagggaggtgacgcgcgctgccggggcgaggtgag

SEQ ID NO: 160727 - DNA, 122 bp, Homo sapiens
cttagctgaccacccttgtagttggccattccctcttttatgccaacactgtgccctgcacgtacattatacctcttacagcacttatcaaacctagtaattattgctttacagatccgttt

SEQ ID NO: 160728 - DNA, 122 bp, Homo sapiens
tcctcctgaattagatcattatagctggctgttttttttccctcatgctttttgagaattcgcaggagtatcaactattatattcaaatgtcaatacagaagtatagctaaatgtagtttat

SEQ ID NO: 160729 - DNA, 122 bp, Homo sapiens
ctcagttgcctcatctgtaaaatgtgtttcattcaagaaatgattacccagtgtctacttcgtgctaaacagccttgagcccttggcctacagcaatgaataaaaccatttgtgatgctcaa

SEQ ID NO: 160730 - DNA, 122 bp, Homo sapiens
gagaggtgtggggattggggccggtctctcggtgccctcctcccgccgccgggaattctgcgtgtccacgtaccttctgtgtgttgggggaggggttcctatgtgtatataatccatttgcc

SEQ ID NO: 160731 - DNA, 122 bp, Homo sapiens
gatcctgcttgtctgctctggagtccccccacccttgccaggagcttcacaaaccagagacgggctgtcagcaagagctcagacaggatgtggtgcaagtgcaggtgcacgagtttaaccct

SEQ ID NO: 160732 - DNA, 122 bp, Homo sapiens
cattttccccaggctgtgggcatttggggcagaggcctcagtgcctggcctgctctctcccggttctatccaatgcctgtgctgggctggaggggccgggcagggtgggcccccaggaagga

SEQ ID NO: 160733 - DNA, 122 bp, Homo sapiens
ctcttcaccagggcacagggaagggagacggccacccacctctgagtgacggcactgcgccgctcttcaccagggcacagggaagggaaacggccacccacctgagtgacggcactgcgccg

SEQ ID NO: 160734 - DNA, 122 bp, Homo sapiens
gggtctagatgcccaaggtggtgaggggagttctcccgggcccaggatggcaaaggtccgcgtgggaagtgtggatcccccggggcctctcactcaatcgccccttccccaccgtcaggagc

SEQ ID NO: 160735 - DNA, 122 bp, Homo sapiens
gcccttgggagccctgttgccaagggaacagatcgacccccgtcagggttggtttacccacggtctgcagccctgtggagaaaaggagtggcccgtgggcctgtcactcacatcagagttgg

SEQ ID NO: 160736 - DNA, 122 bp, Homo sapiens
aaggagatttaaaaggagaaaagaaaaaaggcatcattctgaataattattcctcaaagccgtccctgtggcgtgctgataacctatcgggtcacatgtggcagtttactttaaaggcaaag

SEQ ID NO: 160737 - DNA, 122 bp, Homo sapiens
gaggcagcccagcaccctttctgcagggcagtgcgaagccctcctccgcagataagccgccggcctcttcaccaggttctcaacagccagattggagatctctggcttgcaggctgcggctc

SEQ ID NO: 160738 - DNA, 122 bp, Homo sapiens
cagctcatcgactccatggccaactccttcgtgggcacgcgctcctacatggctccggagcggttgcagggcacacattactcggtgcagtcggtcatctggagcatggacctgtccctggt

SEQ ID NO: 160739 - DNA, 122 bp, Homo sapiens
gccgcgttagaaccatgtccgaagggctccaaacccttgttctacatccatagtctacagcgactacttcagagtccaccttcctccgataatgttctagtcgttttcaaatacattgtcgc

SEQ ID NO: 160740 - DNA, 122 bp, Homo sapiens
tgcgtctgggccggggcaggcggttcggccaccggggtgcggggctgcggagaatcctagcggccgctacggaccgaagtttccaaagatgcggttccccgagtgtacaccgctcccggttg

SEQ ID NO: 160741 - DNA, 122 bp, Homo sapiens
catccagaattctgaccatgtaaatcccctgctctaagtccttccactgctccctactgccgtcaggataaagtccagacactttgcagtggcctgcagcattctgcccactcatccggccc

SEQ ID NO: 160742 - DNA, 122 bp, Homo sapiens
gcaggcagcgactggggctgagattcagggtgactgcataagggattaacttgaacaacccgtgttctctctataaggccctgcctgcctgctgggcacctcttagggtaagggccagcatt

SEQ ID NO: 160743 - DNA, 122 bp, Homo sapiens
acttgacgcttctcttgtgctgtcctttatttagcaggtgtcttctgcggaggtgcgcatcgggcccatgagactgacgcaggaccctattcaggtacgcctcctttactcagccctgtgac

SEQ ID NO: 160744 - DNA, 122 bp, Homo sapiens
gcagagggtctcagcagggacagcgtgctgggagctgccggccccacacagggggtgccgcggccctgaagaccccccctctcccctgcacaggtaggcctgatccaggctgaggtccctct

SEQ ID NO: 160745 - DNA, 122 bp, Homo sapiens
tgaacttgggagcttgagactgcaatgagctatgatcataccactgcactcctgcctgggcgagagagggagactctaacacaataaaatttccagtacagctcccatttctagccctgttt

SEQ ID NO: 160746 - DNA, 122 bp, Homo sapiens
cactctctccccttcccctggggagatggtggtccgcagagacaccacccaccctgcccccgcctggatttggcagtgtggcaggcaggtagtgggccatcctcctgcctcgccagatcagc

SEQ ID NO: 160747 - DNA, 122 bp, Homo sapiens
ccttttgcacctccgggagctgctgctggtgagtggcgttcctggcggtcctcggcggagcgggagcagtgggacgtttccgggggtcgggtgggtagcggcgagcgctgtgcggtcagggc

SEQ ID NO: 160748 - DNA, 122 bp, Homo sapiens
agcgatcctcccgcctcagtcttcggggtagccgggactacaggtgcccgaccgcacggtcggcttaagattaactttaatagcaggaattttcctggatctaatcattagccgactttgct

SEQ ID NO: 160749 - DNA, 122 bp, Homo sapiens
cgaagctaatccctgattggatgaggcaccactcctcgtggggctgcttaggccaccgcgcgcgctgcgcgctgggaaacgagtggagacacgaggaccagcgcgagcggtcccggtgggct

SEQ ID NO: 160750 - DNA, 122 bp, Homo sapiens
attccatattgcaactaacctttaagaagtcagcacctgttagtggaaccgcgactgctccgcagagctgctggtatgagcgcccgtcgccaccccacatcccaggcccagccattctgaca

SEQ ID NO: 160751 - DNA, 122 bp, Homo sapiens
cggcgcgtggacttcgggtcggacgcctgcaggggacagggagtgggctgctgctcaggacgcctccggtggctgtgtgtgtgtgtgtgtgtgacagagagagagagagagagagagaggag

SEQ ID NO: 160752 - DNA, 122 bp, Homo sapiens
ccactcctcctcctggaagcccccgaggtcagggatttgcactgttcgggctgtaccctgcggcctggagcacagatccgtgtgggatcagcgttatgaccctgagttttttcttcactgta

SEQ ID NO: 160753 - DNA, 122 bp, Homo sapiens
cggcagagttgatcgccattctggtaccaggacctggatatagttgtaagttcctagaaccggaggtcagaattggccttgtacagtacctgtaggagtctaaatgagggctacctactgga

SEQ ID NO: 160754 - DNA, 122 bp, Homo sapiens
tcaggctccaggggaagatcccacgcccctcagccagtctccccaaacatagtaccctaccggctcttggcttccctgccacgtgcgggcgttgctccaagccccaagccggcattgccgcc

SEQ ID NO: 160755 - DNA, 122 bp, Homo sapiens
ctgcttccaccagagtgcggaataaaatcacagtaacccacgctgttcctgaaacagcaccgactgcaacactgcttccaccacagagtgcggaataaaatcacagtaacccacggtgttcc

SEQ ID NO: 160756 - DNA, 122 bp, Homo sapiens
ggcaggagtctgctccagcagaggcaaagatgcatgacgaagcctgggctgccggggagacgatgagtaattcagggcagtcagccagtaatggcaggaaacccgtgcactggtacagcact

SEQ ID NO: 160757 - DNA, 122 bp, Homo sapiens
tagagtcaacatccgtgttctgggggtagagtcaccatccatgttcggggggtagagccacgatccgtgttcggggggtagagccacgatccgtgttcggggggtagagtcaccatctgtgt

SEQ ID NO: 160758 - DNA, 122 bp, Homo sapiens
aaagctgttttttgttcttcatctttcttaaccccaaattttcttctatgccttaggcttcgatggttcttccaacccccttaatatggcttagggtggtttttcaaaacctacaatccccc

SEQ ID NO: 160759 - DNA, 122 bp, Homo sapiens
gggagggacacgccggggcccagtggcgcagcccgggctgggagactgacggaccgcgcccggtgtctctttgaggccctgacgtggacacacttcgggtttcacgactccgggtttctcca

SEQ ID NO: 160760 - DNA, 122 bp, Homo sapiens
cgaagcgcttgcacagaaggctgacaaactcggtcttgaagacgctctccaggaagctgtcggcggcatcctcttggaggatgaagaagtcgtcctgtcgcgtgctggggaggggcgggtga

SEQ ID NO: 160761 - DNA, 122 bp, Homo sapiens
ctgcctcttggttgtttgcacggtgtttctttgtgcatagtacccgcctctctgcttgcacggtgtttctttgtgcgcagcacgcgcctctctgcttacacggtgtttctttgtgcacagca

SEQ ID NO: 160762 - DNA, 122 bp, Homo sapiens
ggacagggtgccgcctgagatactgaagtgcaatgggtctgacctctgacggggcgagagcggcccaagtggttatgctggctctaacaaccctgggccggccaccttcccggagatgacgt

SEQ ID NO: 160763 - DNA, 122 bp, Homo sapiens
aacccgcttgggcttccctctcctctgtggagagctttcttcttttgcttattaaactttcgctccaacctcaccttttgggtggtctatgctctttaattctcttggttgtgaaacgagct

SEQ ID NO: 160764 - DNA, 122 bp, Homo sapiens
aaggacaccagggccaccataacacccatagtgctggaaagtgcctcctcagacccatagcgggagtacacaggcttccctgcctcactcagcacaaagacatgcttctggtgcaggcgcca

SEQ ID NO: 160765 - DNA, 122 bp, Homo sapiens
gattgcacctctcgtattattgctgtggggccgagagcagtggctggatgtgcgggtcctcgaggcagcctgtccgtgtcttagcctgagcaatcactgcctctctgtgtctcattccgccc

SEQ ID NO: 160766 - DNA, 122 bp, Homo sapiens
tcatgggccatggtcactcatatttggctcttcaaatactttactgtgtttgactcttttcgttgacaggaacataacacagactttacgaagaactctgaaaagtggttaccaggttccag

SEQ ID NO: 160767 - DNA, 122 bp, Homo sapiens
cccaaagtgctgggattacaggcgtgagccactgcacctggcctgtttttcttacataggcgcctaggtaaaaactaagatatgtctacctgccggtctgctgacagtctaacaaaacttat

SEQ ID NO: 160768 - DNA, 122 bp, Homo sapiens
atcccggctccaccagcatgtggtggcggcctcttgacttggaactgttcttctgggtgccggggttctccagagaaacagagccagtggcacccacatgtgtgtgtgcgcacgcgtgtgtg

SEQ ID NO: 160769 - DNA, 122 bp, Homo sapiens
atattaaaattccccgcaccaaatcacttgggtttggtcaggaaaggatctcagaagcctcgggcttcatgctcttcatttattttttccacaaacacaaaaacaacgcgtccaggcgtccc

SEQ ID NO: 160770 - DNA, 122 bp, Homo sapiens
taaggaaatgcgcggcacagttggctctgcggtgctgccttatttcccttagctcgcaggcgggccagtcccgaagcgctgcggaaagccgcggccgccgcgctgtgcggtctgccggaggg

SEQ ID NO: 160771 - DNA, 122 bp, Homo sapiens
gcccaagctagaagcggggaccccgggagcatcgcaagcctcgagcggcgtgccttccaccggatagacggacgctcgtcgcagaaacacacaccataattgtatagttaaggaactttcga

SEQ ID NO: 160772 - DNA, 122 bp, Homo sapiens
acccaaccaagaggcaggacagtcaacactgcaagccacgagctttggccaggatgaacacgatggcaaacaaactctcccacggggaaaagaaaaacactcatttgggatgtgaccaaagg

SEQ ID NO: 160773 - DNA, 122 bp, Homo sapiens
tcaattccaaattaggctagttctttcttttatatacataggtacttgaattcactttaacggacgctctcacttgcatatctaagtctctcctagagcacaaaaattccccacacatttct

SEQ ID NO: 160774 - DNA, 122 bp, Homo sapiens
agccagggaagtactggaaggaaggtgtaaggcataggctgggtggtgggagaggggagacgcctgggggctgatctgcaagtctggaaccccaacacgctgctcaagggcacctcaacatt

SEQ ID NO: 160775 - DNA, 122 bp, Homo sapiens
tttcagcctctttccgggctacctggtagcaatttgaggctctgtcatcagtttctgctacgtttcaaagatcctggagaagcctagtgttgtgtcaagacgccgatggacccatcacagtt

SEQ ID NO: 160776 - DNA, 122 bp, Homo sapiens
agcacgggaatcggcgaggctcagcagcccgcttcccgtcttgggtcatccttctgctagcggctgctccgactgttccaggcccagccgccccgtccactgccaccaccaacgccgccgcc

SEQ ID NO: 160777 - DNA, 122 bp, Homo sapiens
gtctgtatgctcccaggacctctccccggctcttgcgtagctctttctctggctccaaggcgatgtagcacaacttctctttgatgttatttaccacggccttgttgagtatgcaagggaag

SEQ ID NO: 160778 - DNA, 122 bp, Homo sapiens
aaggcggagataaaaccaataagcgcggtttacttcttaggcgcgagcatcaatctcagccgcccatccttcctttagagctaatttagagttattgcacctcgagcgaggccgtccaaatt

SEQ ID NO: 160779 - DNA, 122 bp, Homo sapiens
gaggtcatgagtaaaacagagccaaggacactcagaggctttattatccacccctacccccgccccacctaccctaccacaatgatatatgcttttattggaatcaatccattcagaaaatg

SEQ ID NO: 160780 - DNA, 122 bp, Homo sapiens
atgaagagcccttcttcagatgggttatttctaccccatggtctttggctgagtgtgtttcgtattagtcttcttccttttcttgccaggccattcttgttctcctcctctctcagatgttc

SEQ ID NO: 160781 - DNA, 122 bp, Homo sapiens
agtaataggcactcatcttgattgcacagttcaatgaattttgacaaatatatacatctccgtagtcaccactacaatcaaaatttccattattgcaaaaagtaacctcatgccccattgca

SEQ ID NO: 160782 - DNA, 122 bp, Homo sapiens
tatgagggagaacatgaggcgtttgctttttttgtccctgtgatagcttgctgagaatgacggtttccagcttcatccatgtccttacaaaggacatgaactcatcctttttatggctgcat

SEQ ID NO: 160783 - DNA, 122 bp, Homo sapiens
tgatcgtaattaaagttaattaacaggccagtcgtcttaacgtggttaacaagcagggtgcggggcagcacagacacccgggcaaattcatgatctctaccgagtaaataacttggtgcctg

SEQ ID NO: 160784 - DNA, 122 bp, Homo sapiens
agagctgaatcagccaatatcctgatataaatgaaatgtcctaccgaatacatcccaggacggagggagtggaaaaaaacacagatttaaagcctctgcagtgagaatctttttcagaggtc

SEQ ID NO: 160785 - DNA, 122 bp, Homo sapiens
ccctcaagaatattaagaacaatatcgtaggggcgggggttgtataccccctttcatattcgatatcatcctctttccccctggatattaggaacaatatcaggaagggatgtacagaccct

SEQ ID NO: 160786 - DNA, 122 bp, Homo sapiens
tcccaggtggtcgggactcttgatcttcgctcgtggtactgtctgttcggctgtcttccccgcctctccccaggcacctgcatcctcccttggcacctgctgccaggctaggaagggcaaaa

SEQ ID NO: 160787 - DNA, 122 bp, Homo sapiens
tgttcctgtctcctttcccatctcccccatatctaggtgccccagccagaatggggcgggcggtggagaaagatcccttctacctgcctgggcacagggaaaggagagcccaagggaggggc

SEQ ID NO: 160788 - DNA, 122 bp, Homo sapiens
acgtgggcatttcctgaggcctcttcctccggatgagctggtttcggcctgggatcccagcgtccccacaccctctggtgaccaccacatggcccagcagccacacagcacccggcacccac

SEQ ID NO: 160789 - DNA, 122 bp, Homo sapiens
ataggcgagcaaagccacaggactctggtgggtaggctatgcaccctggaggcttttgcccgacaagctctctctgcacacacacactccccgagaggtactcacttgaatcctcgaagtat

SEQ ID NO: 160790 - DNA, 122 bp, Homo sapiens
cgattcagtggcttgtaaacaccctcgaagcacatataatcagcaaccagggagagatggcgagggtcgaccgcgatgcctgtcaaacgggaggtaaaattaggagggattaagcagtgacc

SEQ ID NO: 160791 - DNA, 122 bp, Homo sapiens
ccccagtcccgactcccggtcccccggacccccttccccggcgctccaacccccctcccccggcccggccctcaccctgcatgatgtcccggatctgtctgaagtccccgtaccggctaccc

SEQ ID NO: 160792 - DNA, 122 bp, Homo sapiens
actagcttgagtggattcatcttgctggaaagagctgacagactggaccagtttgcattccgaatgtagggattcccgtggatattctctgtcctggattgagggctaatgggcaccttcca

SEQ ID NO: 160793 - DNA, 122 bp, Homo sapiens
aaaactgaaggagagggagcacttcctaactcatttcatgaggcaggattaccctggtaccgaagtcagacaaagacactacaagaaaagtaaaccatagactaacatcacttatgaatata

SEQ ID NO: 160794 - DNA, 122 bp, Homo sapiens
cagccctaccgctcgactcagttgcacgcgcagggagtgtgtgttcactctgactcggcccggctccccgtccccgccgaagcgcagaggcgaatgagagctgagtcctggggagcagcgct

SEQ ID NO: 160795 - DNA, 122 bp, Homo sapiens
tgacgcgtgcgaggtggcccgtgtggtgcaggctgcccaccacgatgctctgcaggtacacgggctccacgaagtgggacaggagcgcgccctgcagccccaggacgttccacctgtgggga

SEQ ID NO: 160796 - DNA, 122 bp, Homo sapiens
gtatagatgaagatcggtggcggaaatcaatttaataagtctaaaagacagttcgggttacgttatcagccagacaggaaatacacatgcaaagaagaaaaagaagctatgaaaggaagagt

SEQ ID NO: 160797 - DNA, 122 bp, Homo sapiens
cccacagtgaagatgggtcaggggtttgcactgcgccaggtctgctcatccccaaagccacggttttcccatcgcaggtggtctggaagcaccagacggcgcgcgtgtggggtggccagcga

SEQ ID NO: 160798 - DNA, 122 bp, Homo sapiens
ccctcccgcacccgggcccctcctgtcctcagccgccttggcctctgtgggggtcaggctcgcatcaccctggcccagggggctccccgacaggcactgcagggcctacatgtgacctggag

SEQ ID NO: 160799 - DNA, 122 bp, Homo sapiens
atccgcctgccttggcctcccaaagcgctgggattacaggcgtgagccaccacgcctgaccgcaactgctcaacttttaaagggactgcttatttaatcagttcttgacatcatatcttagc

SEQ ID NO: 160800 - DNA, 122 bp, Homo sapiens
agcacagcagcacaggaagcagcaagaggcctcacaggtagtgacctggggaccagaaggcggcccagagcaaccggcaaccaggaacacactgaggggaccctgcccaccagggaccaccg

SEQ ID NO: 160801 - DNA, 122 bp, Homo sapiens
accaatttggttgtagaaaaaaagagataggaaaaccgaaccctagggaatccctgtttgcgctgtttgtttattcagtagattacggggtcttgctgctgaccaggctggtctcaaactcc

SEQ ID NO: 160802 - DNA, 122 bp, Homo sapiens
gacttgggatttccgaggggtcgtcccatctcccgctgacagataagcaggttcgttccgcgacttgccaggagtctctgtgaaaggtcgtgaagcgggcttcaggctcaggctcctctgac

SEQ ID NO: 160803 - DNA, 122 bp, Homo sapiens
ataaaatgatgctttttcccatgaaacatccgcaaacattttgacgggtttggctttgcccggctggattactgagtgtccccttgctcgctcgctttttctctctcccccttctccgagct

SEQ ID NO: 160804 - DNA, 122 bp, Homo sapiens
agccaactgcagtgtagcctgagaaacaggcaacaaaaatagaacaccaggattgctgtgcgtgggtgaggcagaaaccacattatgagcaaaagcttccagtattattttagaaccaatac

SEQ ID NO: 160805 - DNA, 122 bp, Homo sapiens
ccgcggcggggctgggggcggggctaggtgtctcgcgcagggggcggggcgcggtgacgtcgcgggcgcctgggccgtgctgtggcggcggcggcggcggtagtggcggcggcggcggtgcc

SEQ ID NO: 160806 - DNA, 122 bp, Homo sapiens
aatctgtcatcctgccaggccactaaagggtaacacaggaaaaccaacgtgacgttgtggcgatttgctcaaacatgcagcagaattgaggtcatttctctgctcactgctaacgacttccc

SEQ ID NO: 160807 - DNA, 122 bp, Homo sapiens
taaaaagtctcaggaatgctgtccctcattggcctggtatgacaaagataagaagtcggtcgtgaaaatttctgaatgtggtttaggacaaggaaccccagtaagaatcagagacaacctag

SEQ ID NO: 160808 - DNA, 122 bp, Homo sapiens
tgagctttcctcactgggtcctctgcagccggccatggctagcaccatgcgctctgctgccggagcaccgtgaggcccagaaacactgggcaggcggcatccctgtcctttcggtccccaac

SEQ ID NO: 160809 - DNA, 122 bp, Homo sapiens
ttcacccccgagtctgccctcaggggtgtcccctttggtctggcagctcactttaaacggcgcggggactacatctcccagcggccccgggccttcctgacgcagccccccctttcagcccg

SEQ ID NO: 160810 - DNA, 122 bp, Homo sapiens
gcgtgcgggtgcgcgccggccctgcgagcgccccctaggcgtgcgtcggcgtcctgggggcgtgtgcctctgtggacacctttgaggtgagtgtgtgcgcttgggccctgggagcgccccct

SEQ ID NO: 160811 - DNA, 122 bp, Homo sapiens
aaccccattacctcaaggtccagtggcagtgcccccaccctgtcctgcctgccctcagcacgcacccagccagcatctcagagcactcctatgtgctgcctgagctgggtgctggcaccacg

SEQ ID NO: 160812 - DNA, 122 bp, Homo sapiens
ttttcctaataagcctgggagcgctatgggagactggagtttatttcatctctgcaatctcgaccataagagacaggtacgccccacggggccagttcagagacctacccctaggtgcgcat

SEQ ID NO: 160813 - DNA, 122 bp, Homo sapiens
acagggcctgaacggagcagcctccagcagtgattggcggggttctcattattcctctcgcgtgtgctgctagagagtttaaagcaactttggtaccgcttgccaaagaaaaatgacagact

SEQ ID NO: 160814 - DNA, 122 bp, Homo sapiens
agaggatgaacacaggtgttcttgaaggcaggctcagagctaggtagctaccagcttatccgaacaggaaccttccagcagacctggtacctgaaccagaccatccataaaacctagtctct

SEQ ID NO: 160815 - DNA, 122 bp, Homo sapiens
tgggggcggggagtggagctgacaacctgtcaaatccactttgggacgaactaggtcacgcgctccgcgggtcgggcacccccgcccgccaggcacggccgcggctccttcctcttcctgcc

SEQ ID NO: 160816 - DNA, 122 bp, Homo sapiens
gaattgtgtagcaggataaccttgtatttttccatccgctaagtttagatggagtccaaacgcagtacagcagaagagttaacatttacacagtgctttttaccactgtggaatgttttcac

SEQ ID NO: 160817 - DNA, 122 bp, Homo sapiens
atccgccccctccccggtcttcccagaatttacagccggtagagccgcagtcaacaaacacgcaaacaccacctgtcactgttcgcgacacacctcggactttcccaaatctcagtcccacc

SEQ ID NO: 160818 - DNA, 122 bp, Homo sapiens
tgaacgcattcaacagcactactcatgagctctcagattcatcctggctgtcctttgacacgttgggattgatgctttcttctcatgggtcatcccaatttctccaggcagctttctcttct

SEQ ID NO: 160819 - DNA, 122 bp, Homo sapiens
cagttgacttgaaatgtaggaagcccaaatgaattctgaaatagagtagaaccgtgagaacgtgcttgtaaaatgtgtcaccacccactgccttccaactggctctggggcctttccagcac

SEQ ID NO: 160820 - DNA, 122 bp, Homo sapiens
tgaagggcagggcgccctggaatgggttcgccccgagagaggggcccgtgccttggaaagcgtcgcggttctggcggcatccggtgagctctcgctggcccttgaaaatccgggggagaggg

SEQ ID NO: 160821 - DNA, 122 bp, Homo sapiens
gtgcagctgtaactccagagtggctggctctacagaacactgactcagatggcttgtattcgatgctgataattcactaactaaaacgactataagaacacatttcaagaggagaaatttgg

SEQ ID NO: 160822 - DNA, 122 bp, Homo sapiens
acaggggcccagacatcacccaactttgtacttggaggataaatagtaaggaacagcactcgattataggatgagggtattaaaaacaaaatgagcagctttcagcaaagtgcctgcccccc

SEQ ID NO: 160823 - DNA, 122 bp, Homo sapiens
tctggttagccagctgcttcatgcggttgaactgcttcttcatggcggcggtggcggcggcggcccgcggggctcgggccgggcagggcgggggacagcctggcagctactacatcgcttcc

SEQ ID NO: 160824 - DNA, 122 bp, Homo sapiens
atgaagatttcctggactcgcagatcactactgtggacttgtactacctggaggtaagggcggagcgcggcagagtagccgccgccgcgcgtccctcggtccctcctcgagttcccgcttcg

SEQ ID NO: 160825 - DNA, 122 bp, Homo sapiens
ccgcgggcaccccctggcatcccaatgggctgctctgagtcagagaagggcctcccaggacgcagccccgggccggggtcgcccctgcacgccactaagtttctcgctggtccggctccctg

SEQ ID NO: 160826 - DNA, 122 bp, Homo sapiens
cggacctgggcttgtcggaccagtgagcggcggcggctgcgcggcggcagcggcagaaagcgtagctgctttgctgtagtccacgcccccttgccgctccggtgacagtctctgcggaaagt

SEQ ID NO: 160827 - DNA, 122 bp, Homo sapiens
cccaccagctttgcaaagacgcctgcgatttcctttggtctacagttctgtcctagacttcgttcggctgatcgatgaaggagacaagctggcccacggggaggtcaatacaatcgatgcgg

SEQ ID NO: 160828 - DNA, 122 bp, Homo sapiens
cacatatcggctgcaccttgggagcagggcctgagcctggggaaccctagtctcttataacgggcagtggcaacaatgctgacatctgcctcggagagagatgctttcttcctgatcacgga

SEQ ID NO: 160829 - DNA, 122 bp, Homo sapiens
cctgggcagtgcacggggcctgggtggggggtgcgggtgtgggtggggacctgcggccttcgagtccgcggccttcgagtcctggggcggcggcggcggctgcaggcacgggcacgggcacg

SEQ ID NO: 160830 - DNA, 122 bp, Homo sapiens
ccactggggacctctcctaggggaggggtctggtgtcctcagctggctcctctccaccttcgcttctacccgggggctccagtgcatctggctttatctctggggtgagccatgcggccctg

SEQ ID NO: 160831 - DNA, 122 bp, Homo sapiens
gtgaccctccctggctgcccctccccagcaagtgagtcagttccagaaacgtttactgcccgccaggcccgaaggctcaccggctccccctccccacgccccagcacccagggccttggccc

SEQ ID NO: 160832 - DNA, 122 bp, Homo sapiens
gaacctgcggcctcgatgtccttctcccgtgccctattgtgggctcggctcccggcggggcgccaggctggccaccgggcagccatctgctctgcccttcgtccccactttgggccctttcc

SEQ ID NO: 160833 - DNA, 122 bp, Homo sapiens
cgtttctcgagggaaaggctgctgcctcctgctctgtcctcatccccggcttaggtaacacgttttcctccttacgacacccaccacagggtccccgcgccgctgcccctcctccttggatc

SEQ ID NO: 160834 - DNA, 122 bp, Homo sapiens
ccgggttggagggatggggaggcttaggtttcctcctccctaacttctgtgcaggttggacgctgacccccaggggctcttgtgggattcggagaaaaggtcatggggacctgagggggggc

SEQ ID NO: 160835 - DNA, 122 bp, Homo sapiens
tcccaggggcgaggatcttcacagaaaagcccgtgtcctgaatgacaatgacttcctggccggtggtctcatctcccgggccggcctcgtcaagcccattttccctgggtggctcggccgcc

SEQ ID NO: 160836 - DNA, 122 bp, Homo sapiens
ggctgttggccagaagtcaccctcagttccttgccaaatgggctgctctgtaggtcagctcgcaacatggtatatagcttcatcagactgagcgagtcagagggcaagagagggagtagtaa

SEQ ID NO: 160837 - DNA, 122 bp, Homo sapiens
agagggtagctgggggcggggttcccagggccaagaggggccattgtcctccctggagcccggcgcccccacagccagctcctctgggagacagcccctcctttcgaatgcgcggggccctc

SEQ ID NO: 160838 - DNA, 122 bp, Homo sapiens
cccttcgtgataacgggctgctcagcaggaggaggtcctgcaggtggtgctgcaaggggtcggctggccgcagggggactgcacagacacaggctggcagcaggtggtggctcagcaggagg

SEQ ID NO: 160839 - DNA, 122 bp, Homo sapiens
agggaagcttctcagtgcctccaggatgagcccaaagtcggagggagcacccagtgcacacgcgtctcagccccgccccctgcggcacaaagggagccgaggcgcaggccccgtgtgtctcc

SEQ ID NO: 160840 - DNA, 122 bp, Homo sapiens
tcccagcacaacagggataagtgcccagctgacctgttaaaagtggcatggctggtgaaccgggctccacacacagcacagttagatcgctggtcctccgagtggattaagaggtggcgacc

SEQ ID NO: 160841 - DNA, 122 bp, Homo sapiens
ccagcctttcccttttcaaactcctcaggcatccggagactctggcagcgggctcggggacgcccgggagcttctcagggaggagacggtgagtagccggacggggcccagcccacgctgca

SEQ ID NO: 160842 - DNA, 122 bp, Homo sapiens
agagaaacttttaagcgattaactaaaatattctcagtagttttagtaattttatactgtcgatgtttttgcttatgtaaagttgtttgatcagagaatgtggtctctaccatagcagagaa

SEQ ID NO: 160843 - DNA, 122 bp, Homo sapiens
gagaaggaggcagggctggagctgcagccagtagcagggcccccgtgctctgcctgcagtcggaagaggcttctccacctcggcagttggcaaataatcacacacacaccactcactgacct

SEQ ID NO: 160844 - DNA, 122 bp, Homo sapiens
tcgctctgagtgtcacagttcttaaaggcagcgtgtccggagtttgttccttctgctgctcggatgtgtttggagtttcttccttctgatgggttcgtggtcttgctggcttcaaaagtgaa

SEQ ID NO: 160845 - DNA, 122 bp, Homo sapiens
gtaacaaaacccagacccccaggtcccggccaatggaggcgatttagactggagtgggaccgcgtctgtcaaaagcccgactcggcagcagcggcggagtccaggaggagagctggagccgc

SEQ ID NO: 160846 - DNA, 122 bp, Homo sapiens
ctccagccgggtgtggatcctgaccagcaccctgaccaccagcaaggtggtgatcatcgacgccaaccagccgggcacggtggtggaccagttcaccgtctgcaacgcgcacgtgctgtgca

SEQ ID NO: 160847 - DNA, 122 bp, Homo sapiens
tgttccacggaagaactagtaccagtgggaggcaaaagtaaaaatatgcagaacaagtcccgagtgtgatgccctgggggcttggataggacctgaggctgcacactttctgcaccaactat

SEQ ID NO: 160848 - DNA, 122 bp, Homo sapiens
tccgggtggaagccggggtggcggcgggcgtgcttggccaggtggtcactgcgggtgaagcgcttggagcacagagggcaggagaagcgcttctcgcccgtgtgcgtccggtggtggcgggc

SEQ ID NO: 160849 - DNA, 122 bp, Homo sapiens
agagaagttgggcaaggtataaataaggaaaaaacagagatgggagcattacactgcactcggcaaatgaaaatgaaaggccttacactcaactagttccatccttagaatacaatctggtc

SEQ ID NO: 160850 - DNA, 122 bp, Homo sapiens
gggtgtgcgtgtgcaccccggagcgtctggtggcgttgttggggtgagtgcgtgcggggacgcgggcatggctccccgctacccacttcccgagtggggacgacgggcggaggagtgtgccg

SEQ ID NO: 160851 - DNA, 122 bp, Homo sapiens
ttatttctcattggccctgtcataaagtggtagcaaactgctttaaaacagtaatcagaccgaaagtagttgaggaagcctatgacaggaagttgttaataatatccttcgaaatttacctg

SEQ ID NO: 160852 - DNA, 122 bp, Homo sapiens
ggggaagcttaagaaggtggatgcggagagccgcctccacccacctatcatggcagaactcgggagggtaatggggagatggttcagtagcttagcaactgaggcaagagtccactcagaag

SEQ ID NO: 160853 - DNA, 122 bp, Homo sapiens
ctgccccaggaaatggaggggactgttggcattgaggccaccatcagatcaccccactttcgcccatatcagctgggccctccaggacagactgggcagtccaccgttgggggaaggctgaa

SEQ ID NO: 160854 - DNA, 122 bp, Homo sapiens
ccagaccaacaccaacgcgcgtagggaagcgttttagatcctgtcggagaggctcaaggccggcagaaggtttgcattaggatcgagaaagccgaccaacggacagatctacctaccttcct

SEQ ID NO: 160855 - DNA, 122 bp, Homo sapiens
ggtcaggggcacctttcctgtgtttttcaaggggtctcagagtctttagaggtctccttccggtccctatgtatgattaccagaatgctgatgttttctcttagtaattttttatctgctga

SEQ ID NO: 160856 - DNA, 122 bp, Homo sapiens
atttcatcattatgttttctgacttttctccttctcaagagagcaattacttactcaaatcggtgggtcttgttttaaaattcatgtaagctataactcccgtccttagcttcggtggactt

SEQ ID NO: 160857 - DNA, 122 bp, Homo sapiens
gtgagaaggtcaggtactgaaatgagggggtgttagacagtctcggttcccaccccctctcgagccccgaatagctctgtgaccttgagctcacaatttagtttcatttcctcatttagcaa

SEQ ID NO: 160858 - DNA, 122 bp, Homo sapiens
aaatcgattcctctactatttcaggtaaattaatgatgagtctcaagatcacagctttttcggagcacatgtggtcctgggcgccacactacgctttaggaaattttctatttctttccttg

SEQ ID NO: 160859 - DNA, 122 bp, Homo sapiens
tatttatttatttccagtcggagaagatgtcggagcccaagccgccggttggctggaaggcgctttctctgtggaggccgatagtggcagggagggggccggggacggttccgcggagggat

SEQ ID NO: 160860 - DNA, 122 bp, Homo sapiens
caggaggttgccgtgcacacgcagtgagagcggtcgtgatgctgctgcgtgatgctatgacgcagatttggagcacaggagacaggttgagacacgcttgttacgtgtgccactcagcagtg

SEQ ID NO: 160861 - DNA, 122 bp, Homo sapiens
acttgcagatggctgtaatcaccctaaccgcgcgacttaacatttgtaaagagcttagcacggtgctggctcatagtaagcgctgcgcagctgcttgttaaataaataaacataaatgggga

SEQ ID NO: 160862 - DNA, 122 bp, Homo sapiens
ggagatctcaaaagcgtcaatgtcctcctaagtcagatctctaactgatgtctgctgttccgctgggcacattggccaggttttagaggaacctaaggaacaggagctgccatttaagtggc

SEQ ID NO: 160863 - DNA, 122 bp, Homo sapiens
gacccagaaaccaaactagacagtgaaatcagtagtgaaggcccccccctccaagctgtacgcaagttggaagggacaaaccactaagttacaaataaggaaacaggcttggaaagtctgag

SEQ ID NO: 160864 - DNA, 122 bp, Homo sapiens
gggagcagttggtgagaagctactggagaagctgatataaaccattatgcagcctgcaaacgcacagggtgtttctccctctccaccgttaccacgcggaaggagcacaccgtccacttggt

SEQ ID NO: 160865 - DNA, 122 bp, Homo sapiens
ccaagtgtacaaactcacagacccgggacgaagcccggagtctgagaggcaactccaagtcgcttcttggagctcagcaagtttccaagcagagaagcaaaacccagagcagtcggctggca

SEQ ID NO: 160866 - DNA, 122 bp, Homo sapiens
ggggtccctccctgatgctgctgggaaggaggcaggaggaagggatgtcccaaagtgggacgcagagaccctagatagatagaccctaggtagaccctaaatagaccctagatagaccctaa

SEQ ID NO: 160867 - DNA, 122 bp, Homo sapiens
gtcccacgttccctcctggggacctgtcatggaagcttttccacaccacagtcgtgttctcggtcctcgcagagctcagctgcacctccagattctgcccaaacatgtggactccattgagg

SEQ ID NO: 160868 - DNA, 122 bp, Homo sapiens
acattgggcatgtatttagagaagcgctcatattccttgctgatctgaaaagccaactcccgagtgtgacacatcaccagtacagacaccttaggcaggaagtagacggagacatatggtaa

SEQ ID NO: 160869 - DNA, 122 bp, Homo sapiens
gcaggtggcgggaagatgagactaattacccacttccgggatccggtttggctccgcccccgccctgctgtatccatggtaaccaggtctccttcgcaaggctggaccagtcgccacgacga

SEQ ID NO: 160870 - DNA, 122 bp, Homo sapiens
gcgggctgagcgcggcccctggcgcccggttggcgtgcgggactcgggcgcgctctggtccgtggaacttccccagccgcggcgtccccgccgctcacgcgccccccactccacggccgggc

SEQ ID NO: 160871 - DNA, 122 bp, Homo sapiens
tggaccacaacatttatgcatagtgttgctacctagctttctagatttctctaaaactgccgcaactatgcatgtgcacttgtttgtccatgtcagtgtcatctgctttagattgtaaggac

SEQ ID NO: 160872 - DNA, 122 bp, Homo sapiens
agcagccaccgcaaagcctcgcgggtaaggccaagccacgcgggtaaggccaagccaatccgttacacaccagtgcgcctgcgcacctttgacgtcactgaacctgtgccttcactgcatct

SEQ ID NO: 160873 - DNA, 122 bp, Homo sapiens
cagggggaagcgatttcaagtatccaatcagagctgttccagggcggagtctaccaatgccgaaagcgaggaggcggggtaaaaaagagagggcgaaggtaggctggcagatacgttcgtca

SEQ ID NO: 160874 - DNA, 122 bp, Homo sapiens
gtgagaggcaggggttcagggatccttgctcttgagccacgatttccgatgagcccctgccgagagcatgccgctctggactcactcctcaaacataactgctctgctggaacgagagactt

SEQ ID NO: 160875 - DNA, 122 bp, Homo sapiens
cctgggaggcaggcagattcgtggcctggggaggccactgtgaggcaaatgctcagttttcggaggatgccgtgaggcagggagaaacttggctttcagtggccgcagtgagggaatagttt

SEQ ID NO: 160876 - DNA, 122 bp, Homo sapiens
ccaccaagcccagctctcctcaaagggctgcctcagcgagggccgctgggggtggggcagcgtggctgagcctagcagggctgctggctggacaccacgggcccaaatgggaagtctgagac

SEQ ID NO: 160877 - DNA, 122 bp, Homo sapiens
ggcagccgctgccagcggtggcggtcatcgaggaaggccacgtcggtgtagcgagtgggccggcagcagggcccgccgtgggctcggccctggccctgcagccgggccagcgccaggccatg

SEQ ID NO: 160878 - DNA, 122 bp, Homo sapiens
ggtggggcgctgcgctgtcagcggccttgctgtgtgaggcagaacctgcgggggcaggggcgggctggttccctggccagccattggcagagtccgcaggctagggctgtcaatcatgctgg

SEQ ID NO: 160879 - DNA, 122 bp, Homo sapiens
cggccagctccactactccgtctctgaggaggccaagcatggcaccttcgtgggccgcatcgcgcaggacctggggctggagctggcggagctggtgccgcgcctgttccgggtggcgtcca

SEQ ID NO: 160880 - DNA, 122 bp, Homo sapiens
aaagcagggcttctcaaactttcatgtgcctgtgagtcactagggattatgtggaaatgccgactctgactcactaagtctggggtggggcatgtgattctgcgagtctacggagctctcag

SEQ ID NO: 160881 - DNA, 122 bp, Homo sapiens
tgattttgtgcatctgaatgctctccccctcagcccccgtcactattggtgtagcttctccgctctgtgtgtgccctgctacatatgagaagcacaggaagtgtgggagagagaaaactcat

SEQ ID NO: 160882 - DNA, 122 bp, Homo sapiens
gtctatatgctgactgtgtctgtgagggtatttttggatgagattagcatttgacttggccgactgcagatagccttcttaaatatgactgggtgggtgtcattcaatcctttgaggttctg

SEQ ID NO: 160883 - DNA, 122 bp, Homo sapiens
actccccgagaaattaacttcggctcaagtgaaaatagcagctgttgtccagaaatggcccgggagtagcatagaaaggagaaaccggcttcctccgaaaggggaggaattggactcaaggg

SEQ ID NO: 160884 - DNA, 122 bp, Homo sapiens
gctgttggggaagtccctctggaatggtttcgacaggtaggatctggctgctgcatttgccgtccctctggcccaccgctgtccactgtacagagaaggcatctctttctaccttcaaatca

SEQ ID NO: 160885 - DNA, 122 bp, Homo sapiens
accgcagagcccgccggcgggaagagaccagacaccgacggagaagcgaagttcaggacgcgaaggaaagggccacttcgggtcggggtcaacccagactggaccaatgcacagtctaggtg

SEQ ID NO: 160886 - DNA, 122 bp, Homo sapiens
cgaggaaactaggactgatccagaacagcgcaggcagagacgcgctgggctcatgaagcgcgacaaaggccccgacccctcttccgcttggctcgttggtctaggggtgtggttctcgctta

SEQ ID NO: 160887 - DNA, 122 bp, Homo sapiens
gcgcggcggccggggccaggcgccactgcaggaggacgctgcggttgcgcaggacgctggcgcgcagggagcggccggccggggcgtgcagcacgcagcccggagcctggcagcggaagccg

SEQ ID NO: 160888 - DNA, 122 bp, Homo sapiens
agctgggactacaggcgtgggccaccacgtgtggctaatttttcatatttttagcagagacgaagtttcaccgtgttagccaggctggtctcgaactcctgacctcagttgattcaaccgcc

SEQ ID NO: 160889 - DNA, 122 bp, Homo sapiens
ggaatctttcaggtaattaagcctaagcctgggtaaggggagggcacaggctaagactgacgagagaagaagacactagagagagcaacaaacaaaatgatcttgaaaaacatgctttttga

SEQ ID NO: 160890 - DNA, 122 bp, Homo sapiens
ctcaagtaattctccaacctcagccccctaaagcactgagattacaggcatgagtcaccacgcccggccataacttgtattttacaagtaaaactgggaagaagacaattggaaattgtctg

SEQ ID NO: 160891 - DNA, 122 bp, Homo sapiens
gatctggacgtgagaggggatgggatgcatggccaccatgccatgtgacagtgatgccttcgacagaactgtcacctgtatggatgcccacctgccaaagcctgccaggaaggcacctgcca

SEQ ID NO: 160892 - DNA, 122 bp, Homo sapiens
tgtagctgactacaagaatgaggagtaccattttcttcaatagaagttgggggagctgagcgagcaagggactagctagtagctgtactgggcaagatcacatggttgacttgcacggtaag

SEQ ID NO: 160893 - DNA, 122 bp, Homo sapiens
ctacccagccagagctccccctccaggagatttcaactctgatagttttcaatccctcttcgccctggaggtggctggagaccaggagcaggcagcaccttcgaggcagatccccgctcagg

SEQ ID NO: 160894 - DNA, 122 bp, Homo sapiens
gctggccgggctgatagaaacggggctggtttattccctaagggactcctagacctgtcccgcttcctgccagccgctcagctaggtctctctctaacagtgagtagaaaagctaagaagag

SEQ ID NO: 160895 - DNA, 122 bp, Homo sapiens
aaatcacgtccctagacagcctcctattttaccactaactttactcctgcagttattcagcggtaggaaactgaaaccaaaaaccagtgtaagcaagtaaacatctaaactgtttcaggagc

SEQ ID NO: 160896 - DNA, 122 bp, Homo sapiens
cgtgttatctgcggaagatgtggggtggccgtggctcctttgcatcccacagactcatctcgcagcctccctcccgtcttgcgaaggctgcgagatgaagagagatgcggtgaccacaagcc

SEQ ID NO: 160897 - DNA, 122 bp, Homo sapiens
ctaggttcagtcaccgcggtccccccccagcactcaggggccacaaactggggaaacacccgcgtcaccgatacacagccgctactagagaccccggaagtctcagccttacgttacgtgca

SEQ ID NO: 160898 - DNA, 122 bp, Homo sapiens
ggtgtcttacgcttccgcgggtgccctaggttgccaagggcaatggggtggtcggtgtcccggccgcaagattttttaaaaagctacaatttgaaagagaaatctcaccgcccccggttttt

SEQ ID NO: 160899 - DNA, 122 bp, Homo sapiens
gctactacttcccttcctgccgggaattctgcctcagctgccctgggctctcgctgcgttcgctcaccgctgtcacctgcacggtgtggctggcagcctacggactcttcaccctctgcgag

SEQ ID NO: 160900 - DNA, 122 bp, Homo sapiens
gcggtgaggagggccttcctctaggctctccggcttctgattccggatgtgggcactgcccggctcagatcacttgctgacctttgcccatgtgagagggaaggcccggcgctgcccattgt

SEQ ID NO: 160901 - DNA, 122 bp, Homo sapiens
ctgtttgtttatcatgagttccctggtaacaagcaatggagatgggagtttgctcagagccgtcagcatccagctgtgaaagggaaacactcaggctcttttaactttgagaatgttgacat

SEQ ID NO: 160902 - DNA, 122 bp, Homo sapiens
tctccagggtctcggggagggcgtcgggggtcggggattgcaggtgcccgcagccggcctcggctgtttaccaggcacccgttacgctaattgaaatgtgccaaatagctgcccggggcggg

SEQ ID NO: 160903 - DNA, 122 bp, Homo sapiens
ctgagccgcggccggtagagaccatggctcggggacgctctctagctcgcccgcttgctccgtccctagttgatgatatttgatttgacctatctttatagttgcttcagcagcccggccct

SEQ ID NO: 160904 - DNA, 122 bp, Homo sapiens
cctagtgtgatatattagtgcatgagcctagcaaggaaatcacatcaccacagggcttagcgcttagaattagaactaagtcctcattatttgtgagaaactcaaaacagaacttaacaaaa

SEQ ID NO: 160905 - DNA, 122 bp, Homo sapiens
ccagctgaaacggaagtgagggcggcaggcgtttgttctgattagaaactccaccgacaccggaataaagtggatttcagctagtgctgagccctccccagggaaatggtatggggtgctgg

SEQ ID NO: 160906 - DNA, 122 bp, Homo sapiens
tgttgcccaagctgaagtacttgtttagccacttggccatggcgagaggccgcctagggccgcggcgcgggagcccggtccgccgccgcggccattcggggggcagcgctgcggcgcaggtc

SEQ ID NO: 160907 - DNA, 122 bp, Homo sapiens
tccttgggcctcacatgcaaatgacactggcttgctactaagcacagggcctgcacacatcgcctgggaaagaaacaaacctttcccaccagtagcccacaatcttctctaatgagatgcaa

SEQ ID NO: 160908 - DNA, 122 bp, Homo sapiens
gatcctcccgccttggcctcccaaagtgctgggattacaggcatgagccactgtgccctacggctgttttagatagagacttgaaggaggcccaggggtgtagcctgtactattaaaggcat

SEQ ID NO: 160909 - DNA, 122 bp, Homo sapiens
gggcccgggaccctcctgccaactgcaggcccacgggaatgctcggtgttggactcgcaccgcgctccacggctgtagccccgcccacagcccctacccacggctcccattggccaaatgtc

SEQ ID NO: 160910 - DNA, 122 bp, Homo sapiens
ccgcagcctcaatacatcaaaggctgagctggcactacagcccatacatcatcaagttcacggacacccctagatggctccgtgacacggtcaaggtccttgggaactcccacacatttcta

SEQ ID NO: 160911 - DNA, 122 bp, Homo sapiens
gacgctccggcaaatgctcagcttcagccccgcgccagggatttgttatgacttgcgagccgcctgacagacagggctgcggcggccgggaggggacgcgcgggaggcgggctccgggccct

SEQ ID NO: 160912 - DNA, 122 bp, Homo sapiens
agcgccctgcagccaaccgccgcttcccgccagtcccctccagctcgggggtgggcaaagcgcccggagcccctacctaatcgtgcaaccatggaaaccagcccgccggctgccacagggct

SEQ ID NO: 160913 - DNA, 122 bp, Homo sapiens
gcaaccgggcggctccagacgtccaggagggcagaggctgggctggtgcggcgcggggggcgcgggcgcgggctctgcgcctttaaggcccgcgtcggcagagcgagcgcaggggccgggcg

SEQ ID NO: 160914 - DNA, 122 bp, Homo sapiens
tctctggctcaggttctcccaccagtcacacccagtccccaaacctccctgtccccatcccgcccaagctaccttgaacctcttgtcctggagaaccttcttgatggcgactagttccctgg

SEQ ID NO: 160915 - DNA, 122 bp, Homo sapiens
ctcgctccccttcctcggtcttcgctatgtgggatactcctgggccgccccggactgacacgtgagccaggcctcggtcacatcccggcccgctccacaactccgaagtagcggccgccgcc

SEQ ID NO: 160916 - DNA, 122 bp, Homo sapiens
aaaagcaaaataaataatgcatttgcttcagtggaaaaaaacccaggcaaattttccaaacgcttatctattctctagatgtttatggacatattactccagtttttaatgccacatactca

SEQ ID NO: 160917 - DNA, 122 bp, Homo sapiens
aggtcggaccccaggtgcactgactacatgccctaactgaggtcggaccccgcagccccgcggcctccccagaagaccttacttgagggagggggcagtctggttggagctcttgagcggag

SEQ ID NO: 160918 - DNA, 122 bp, Homo sapiens
caaaagtttgtcactcatgcaaagtccgctatggattctgtaagtgttccaagacagcaacgcctcatgtagtgactcagcaatccagattgctttaatcatgtgctttgtcatcacatgag

SEQ ID NO: 160919 - DNA, 122 bp, Homo sapiens
atccgcctctccttctccctcccaagttctctttctctttgatgtgctaacgtgctccttcggccaccgaaatacaactcagcgtttgccacaaaactgctgctttttaacccggccggatt

SEQ ID NO: 160920 - DNA, 122 bp, Homo sapiens
gtgacagaagcggagagcaaggcggcggcggggccgcgcgctgggcgcgacgggagcgcgcgcccgcctggccaccccagcccaggctcccgagcccgggccctgcggcaccccccgcgccg

SEQ ID NO: 160921 - DNA, 122 bp, Homo sapiens
aggattgctggagcctaggagttggagaccagctagggcaacataaggagacattgtctccgcaaacaaacagaaaaaaaaaaagtaagaaagaaagagagaaagaaggaaagaacaagaaa

SEQ ID NO: 160922 - DNA, 122 bp, Homo sapiens
tctgtgaatgaagggaaatggtctcaggttttgtcactttggggttaacaatttaaaaaacgtgtttaaagaattattaagataatagttcattccattttgtagtagacattggctaaggg

SEQ ID NO: 160923 - DNA, 122 bp, Homo sapiens
cctcctttgttcactgtggctttgctcctgtttggggcacacgtcgggtgtggctgtacacgatgggcagcagagggcctctcttcacactcgttgcttcctttcagaggagctgatcacgc

SEQ ID NO: 160924 - DNA, 122 bp, Homo sapiens
tggggagacatgggctcctaccaggagagacaggcatcaaacaagtgtgataagcgtttccgaggacaagtggagggggcgatatgaccagaaatggggggcagggaacaccacactctctc

SEQ ID NO: 160925 - DNA, 122 bp, Homo sapiens
gctggctccagctcggctcagacaaaaggcggcggcgggagcgggcgggaggcggagcggcgccgcgagggcctcaaggtgacacccgcccccggccccggccccccccggcccggcccccc

SEQ ID NO: 160926 - DNA, 122 bp, Homo sapiens
gaccctggctgggacatcttcttgttttcctccacctcagccagttcaggcatgctccagcgcccattaacatgttcaaactcctgaacctgtagcaatgggacaagaagttgaagacccaa

SEQ ID NO: 160927 - DNA, 122 bp, Homo sapiens
tccatgtctcttctccccggcgcctgcaagtcctgcgccccgtccccgctctcatgaagccgtgacagagccggccgtctccaccccgctgtagccgcacagactgacaatctcggcacaaa

SEQ ID NO: 160928 - DNA, 122 bp, Homo sapiens
ctcctaacgccagaaatcccgcccagtctcctcgtgggtctcagccccggaccacaaagacgtttcatttttcgggacagccaatcatatgagtcaattcaccttaggcaactcacggctcc

SEQ ID NO: 160929 - DNA, 122 bp, Homo sapiens
tgcggtgaggacgttttttttttaaagatcacgttcattccccgtgcttatcgggagctgcgggagatggagtagcaccccagaatgtctccacgcaaaacttgtcacgccttcactggctg

SEQ ID NO: 160930 - DNA, 122 bp, Homo sapiens
ggatgctattgcctctaggccgcgagaagagggcggcatttatgagacgtcgatcagctccgagattaaaaatccagccctgggtatttttaatcacttgccactcagacgcctacgaacaa

SEQ ID NO: 160931 - DNA, 122 bp, Homo sapiens
ggagcctggcagatgatgtccttatctcacgatggtctgcggatgtccctgtgggaatggcgacaatgccaatggcttagctgatgccaggaggcttgggtgggtgcttttctaacaggcct

SEQ ID NO: 160932 - DNA, 122 bp, Homo sapiens
gactgagtccgaggccgtcgagtgaaaccagggggcagccagagagctccatgctctcggcgtcgacgccggatgagctggaggacgagaagagcccctagggccaggagaatcaccccggc

SEQ ID NO: 160933 - DNA, 122 bp, Homo sapiens
tcactgcccgggccccgggagggccaggccaccctgaagcctcccccgcagcacctgtggcggcagcctcggacccccatccgtatccagcagcgcggctactccgacagcgcggagcgcgc

SEQ ID NO: 160934 - DNA, 122 bp, Homo sapiens
cccagggcaggcggggcaggggcaatgccggaggagcaggtcccacccatggggtggggccgcagagctcttcgccgccaaggccgctgtaggctgggctggcgccaacagggtccaggtct

SEQ ID NO: 160935 - DNA, 122 bp, Homo sapiens
tttagcaaaggtctctaatgggtattttctttttcttagccctgcccccgaattgtcagacggcgggcgtctgcctctgaagttagcagtgatttcctttcgggcctggccttatctccggc

SEQ ID NO: 160936 - DNA, 122 bp, Homo sapiens
agttcgtatccagcagctgctgacagccctgcttgggagcatttcagtctcccccagggccgcctccgcacccacgttcctgcctccacctgctccgcctccgggccccagtcatccacgtc

SEQ ID NO: 160937 - DNA, 122 bp, Homo sapiens
gcacgggaacacctttcaccgccagcacagggctggggagtgacttggcaggagagccctcgttagtctgcgtggtccccctggttggcagtccagactctggtggggacgtccctctgcat

SEQ ID NO: 160938 - DNA, 122 bp, Homo sapiens
tgcgcatgcgcatgccctcaccctcatgcgcaggcctaggagtggggctggcgtcccgggcgaccagtgtgttgttgttgggtcttaattctaaatttgtcagtggctctccttgaaattgc

SEQ ID NO: 160939 - DNA, 122 bp, Homo sapiens
cagctccctggagaaccacacgctgtctgtatcgcacgttagctagcatcaggctctgagcgcccgtatcgcacgttagctagcatcaggctccgagcgcccgtatcacacgttagctagca

SEQ ID NO: 160940 - DNA, 122 bp, Homo sapiens
tcatcatcatagaaacttctattgggcaatgctgctctagacactggcacaactctttcacgcaactgatgttgtagtgcaggagttgagcatttttgccttaagtcatatgtgtgattcat

SEQ ID NO: 160941 - DNA, 122 bp, Homo sapiens
caagtagggcacttcccacagcatgtctgattgtagaggtgctgccccatcatccaccatcgtgcactgcagctttcatcaccccactcaacacagcaggatgcctgaaccctgaacttaat

SEQ ID NO: 160942 - DNA, 122 bp, Homo sapiens
cgaaactccagctcaaaaaaaaaaaaaaaaaagaacaaagtgggaggcagcatttcctgccgaggccttctgacctggcatcagataagctggctctagacaagggtgacggccctgaatca

SEQ ID NO: 160943 - DNA, 122 bp, Homo sapiens
gagagcggcgccggaatcccgcacgcgcggtagcggaacacgaggggctgaatgccgcggcgctctgagcccgcttagctcatccccagcccggcgctccgcccttcgcggcacccccgccc

SEQ ID NO: 160944 - DNA, 122 bp, Homo sapiens
tcttcgagtcctcaaagggcgtggcatacaggaggttttcgggctgtgacacacggacaccgggaaaagggccagtcagtcctgacgcggtgccggtgctgggacaggatggggactaggca

SEQ ID NO: 160945 - DNA, 122 bp, Homo sapiens
ggcttaaagagccgctccggaatttaactgggcctgagggctggtgccctgtgaggaacccgggatagaacctggggacagaggcctccattagtccttgggagcggcaggtagcccatggg

SEQ ID NO: 160946 - DNA, 122 bp, Homo sapiens
acactatattggccctaactactcgccgtccaccaagccctaaccgaagaaatttgattccggctgggaaactgtcacaccttcacaacctcaatacccagctttgtggggccagcaggact

SEQ ID NO: 160947 - DNA, 122 bp, Homo sapiens
attacttgcatatttatgttgcagataatatgcagtatattgcatactattgcatatatacgttattagtctaatgtaattcatgtgtgtgtgtgtgcacatgcatgagtgtcttctctttt

SEQ ID NO: 160948 - DNA, 122 bp, Homo sapiens
cggtcagtgtttgcagggccatctggccatcagagctccactttctagacaaagtggttgcggcctgtgttctccataaagctgcctcgcgtggcaggaaacaacaataattatccttcctc

SEQ ID NO: 160949 - DNA, 122 bp, Homo sapiens
cctcaacccgagctctgaccggtgagcggtattcggatgaggctctgcgcgctggaggtccgcacctgacaccacagccctgaacttgctcgcaacgcctgccactctggccaccaggacag

SEQ ID NO: 160950 - DNA, 122 bp, Homo sapiens
gtgaagcgggtgaccacactgctgatctgctccatgagggagccctgcgaggagctgctgcgcgccacaggctccgagtgcagcgacggcacatcgtcgtccgtgcggctggccgagcccgc

SEQ ID NO: 160951 - DNA, 122 bp, Homo sapiens
cggaggcgttcagcaggcccatctggggcagtgcggggagccctctgagagccagctgagcgggaagccccgcgtgcccgggagcccagagagcaggtgctgcgggtcggacgctaccccgg

SEQ ID NO: 160952 - DNA, 122 bp, Homo sapiens
cccaccgccaccaccactcatctctttatactgcttaatgcctgctccgtcttcagatggcgtctcaagaaacacttgtccaaagaagccttccctgactcctttaactagatgagcttctc

SEQ ID NO: 160953 - DNA, 122 bp, Homo sapiens
gggacagtcggtgctacccctagagccttgtcctttccctccatgaagagggacttctgacgcctgccctggctccctcactccccccgagggacccttacagaacagggaagcgcccgggc

SEQ ID NO: 160954 - DNA, 122 bp, Homo sapiens
ccgggatctataacactctctccgagtgaagacacagaggtgatgagatcgggtaacccacgggcgcccgagccccagccgcgcaagctcacgattgggccagaagtgaggatgaacaagca

SEQ ID NO: 160955 - DNA, 122 bp, Homo sapiens
acttccacctcgccgaagtccagcgtctcctccaggcgaggactgaggtccagtggcacacgctcggtctggacacggggcaggaagcaaggaggcagctgtgagcacaggcctccctccta

SEQ ID NO: 160956 - DNA, 122 bp, Homo sapiens
aagcctgaagcactttagagaaaactgacggacattctactgcacccaagtccagacttccggatcaaccaagtatgggctcaatgcccagcaaacccagcacaggcctcttccagacagct

SEQ ID NO: 160957 - DNA, 122 bp, Homo sapiens
tcgtagcggtggcggaggaggcgggtacgaatcagctgcgggcggagacatggccaacatcgcggtgcagcgaatcaagcgggagttcaaggaggtgctgaagagcgaggaggtcagaaatg

SEQ ID NO: 160958 - DNA, 122 bp, Homo sapiens
aaaggacccccgggctctggaacccgacccaagggtgatgccgccagggctaccaggaagcggctccgtgctgggctcagccggtctcctacccaccccagcacacctcagcccccagcctc

SEQ ID NO: 160959 - DNA, 122 bp, Homo sapiens
ccacccacttcctgtgttccgagggactggcttcccacgtccgcgacctggctctggcctcggagaagaacatcgcgactacaacaaccgagccccagcaacccaaccagctaccaccgctt

SEQ ID NO: 160960 - DNA, 122 bp, Homo sapiens
aaaagaaagaccaagactccaagtgagggcggccaagtcctcgctgagcagagagggagccgttcatgtcagagactcactgccagaaaagccttacccattttggttttcactattgagac

SEQ ID NO: 160961 - DNA, 122 bp, Homo sapiens
gtggaagaaagaacctgatgaagcagcgcgcacagagatccttttgagaaaattccaaagcgaggcagcaatggcagctccaaccaaatgccagctccgcggaagattagtcctgctatgct

SEQ ID NO: 160962 - DNA, 122 bp, Homo sapiens
ccacggtcgggcccaccacagttgggtctaccacggtcgggcccaccacaccgcctgctccgtgcctgccatcacccatctgccagctgattctgagcaagtgagacttgggtgcaagggag

SEQ ID NO: 160963 - DNA, 122 bp, Homo sapiens
ttctctatactccatacccaagtctctctctttacaccctatcccatcctcaggtcatcacgttcagcttttccagagctaaccagagataaggttggaatggtcaagtactgggcactggg

SEQ ID NO: 160964 - DNA, 122 bp, Homo sapiens
ggtgaatgccttgaagaacccacagctcatctttgatgtacgggtgtcggacaatgtggacgccatccttgctgtcatcgcccagaccttcattgactcctgtaccacctcggagcataaag

SEQ ID NO: 160965 - DNA, 122 bp, Homo sapiens
gttctcctctgaaggcccccgccaaacgctgccttgtcccgaccgtggatggcctgccagcgtgctggcgtccgtcagcgtgctcttctgtcgtggtgctccctcaaggtcctctcgctatc

SEQ ID NO: 160966 - DNA, 122 bp, Homo sapiens
ctgtgactctgctgtggccccagctccttcctataaactaggcagatataaaatctgcagcggccctttataaaccacagtggtctgtgttggcagatgtgtgctgccgtgtaggaggacaa

SEQ ID NO: 160967 - DNA, 122 bp, Homo sapiens
ccccggctctagcgtactggcggagacagacgtgagagctcggcgcctggggttcgcgcccgggcacttgaggggctttggctcctggcccaaggactcctcagatttctcctgcccttttc

SEQ ID NO: 160968 - DNA, 122 bp, Homo sapiens
gtcaacagtaagctattagtagctaagtttggagagagtcaacagttatgtgcagattttcgtttgtgtgtggggtcagtaaccctaaaccccaagttgttcaaggggcaactatatgagct

SEQ ID NO: 160969 - DNA, 122 bp, Homo sapiens
ggtttcttcatgttagccaggctggtctcgaactcctgagctgaagtgatctgcctgcctcggcctccccaagtgctaggattgaaataatcaaatgatttttcttggttgggcacagtggc

SEQ ID NO: 160970 - DNA, 122 bp, Homo sapiens
cctgcactttcccgcagacaggtgaggggacgtggggaggaggcacacggagcaggggagcggtggcacctgccactccatccggggtgctgtccgtcatctccttttgtgaatctggagaa

SEQ ID NO: 160971 - DNA, 122 bp, Homo sapiens
caccgagcacgtccgcggaacggtgccgggccacgaagcacgcgtcgtccccgtagcacgcgcccttcttgaggaggcccttacggaagtccttcccgaagccgcagccggccgtcaccagt

SEQ ID NO: 160972 - DNA, 122 bp, Homo sapiens
gaggcccagggcttttcagggccgggggtcgtgcggccaggcgcgggtggactaggccagcggccactgaggggcagagaggtctggggttctaagtttagcccactccgcgaatgtggatt

SEQ ID NO: 160973 - DNA, 122 bp, Homo sapiens
gctgtgggtccaccggctcctcctcctgggagctccgaatgctgaggcctagcatgcaggcgagtggacttagggacccagagaccccaatacccagtgctcagtcctcctggtgcttcctg

SEQ ID NO: 160974 - DNA, 122 bp, Homo sapiens
cttccccaactcccaactcaaccccttttggaactatgtgtggtggttgggaccctgtggcgcatccttgtcgctcgtgtccttctcatgcccggcgacgcgtctttgtggtaacgccctgc

SEQ ID NO: 160975 - DNA, 122 bp, Homo sapiens
cgaaaacgcttcgtatcctcctgggaatacaaagacattttttttccccattagtgacaccgggacacggcaccttcatacaactcccccacccaccaagggctggaagtttacatcggaaa

SEQ ID NO: 160976 - DNA, 122 bp, Homo sapiens
agactgcgtgtctgggggactggccaggatccgcacccacccagggagcgctgggggcagcggggcggccatcctaggcccgtagtaaatggaagctcccttcctggcatgagagcagccag

SEQ ID NO: 160977 - DNA, 122 bp, Homo sapiens
gtgctgtgtgtcatgtgggattcctaaaattcctaaaaatcccaaaggatttcaacacaccgtcatgctggacttcacatgagaattgctttaaaaatgccctccctacttcctccatacaa

SEQ ID NO: 160978 - DNA, 122 bp, Homo sapiens
gacgctgcgtcctaggccctgcccagggcggatggggtccgcgtgagtgaggcgagtccacggggcaggccggggtctgcgggggaggaagccgacagcagcgcccctgggcccgcggggcc

SEQ ID NO: 160979 - DNA, 122 bp, Homo sapiens
tgaccagaaactgctgtcccggcgactcctgaccaagaccaacaggatgccacgctgggccgagcgactatttcctgccaatgttgctcactcggtgtacgtcctggaggactctattgtgg

SEQ ID NO: 160980 - DNA, 122 bp, Homo sapiens
cccctgcccgtgctgagatccttatttggtcaagcttctacctatgccctggcctcggagcgagcccgatagcgctggatcacagcagagggagcgaggcggctgacgtcccatcccgaaga

SEQ ID NO: 160981 - DNA, 122 bp, Homo sapiens
aggcgttgttgtctgtgccaaaacggagtgagcccaatatcaacaaatcaaaatccaaaacggaacaaaaaagtcacaggcccgccctgctcgcgcccccgcccgcccggacgcccaacagg

SEQ ID NO: 160982 - DNA, 122 bp, Homo sapiens
agggagcattgcctcttagggattcctgatataaggccttggggagtaaaattaggagggcgcctgcccatcccagcctgtggggaaaaaaggtggagctgggcttccgtgtgcctgagtgg

SEQ ID NO: 160983 - DNA, 122 bp, Homo sapiens
acctctggacacgtggctgtgggccctcacagccgctcctgacacacccggggccgagctcggagggacctgcaggcaggagggctagaattgcctctgcccaccacccacctcccaccact

SEQ ID NO: 160984 - DNA, 122 bp, Homo sapiens
cgggatttcttcctataaccctagacagaagaattttcagaaacctcattgtgatgtgtgcgttcatctcacagagtggagtcttccgtttgatagagaagttttgaaaccctgttcttgta

SEQ ID NO: 160985 - DNA, 122 bp, Homo sapiens
caactcaacctctgttacaggtggccggccagaaaatgccccaccccacccattgacagtcggggaaactgaggcctcagtaggtgaagtgcctggcccaagcaccaaggcacacagagacg

SEQ ID NO: 160986 - DNA, 122 bp, Homo sapiens
ggcggtgcgctacagcttcctgaagactgcgggcaaccgggactgggagttcttcatcatcgacccaatcagcggcctcatccagactgctcagcgcctggaccgcgagtcgcaggcggtgt

SEQ ID NO: 160987 - DNA, 122 bp, Homo sapiens
ctgggggcaaccgtctcaaccctgaggggtcacggaaagaggacagcctttcttctctggcgaatgcccttcctgcgggcgacggtcaagcattacccttcgggcagaacccggctctgccc

SEQ ID NO: 160988 - DNA, 122 bp, Homo sapiens
ggagatgcagccctgctctgtgtctgccgcccctgagggatcattttacctccaggatcccggtacaggtgaccggcgtcctgcagggcaggtgaccggccttgcattggatcccatgacgt

SEQ ID NO: 160989 - DNA, 122 bp, Homo sapiens
ggaggtcaaggctgcagtgagatgtgatagggccactgcatgccagcctgggtgacagagcgagactgtctcaaaaaaatagttcagtaaaccatgctgtaaacagatgtactgtcatccag

SEQ ID NO: 160990 - DNA, 122 bp, Homo sapiens
gctcttagttcacacctaaaagcaccaaaatgcagagtaaataaagtcaaggcttggtaacgtagagatttgtgtaatcaggaaagtgaaatgccaggctttctgctctgtaattaacaaag

SEQ ID NO: 160991 - DNA, 122 bp, Homo sapiens
cggctggcagagacagaggagggtgtgacggcgttgctggtcccccatgggtccagagggcgagacagactcccgaggcacaccctccaggggccctcggccctccagcgaccatccccgag

SEQ ID NO: 160992 - DNA, 122 bp, Homo sapiens
aaccccactacggcactcaccttacctcaccacgccctgccccctccaccccactgcggccgccaccgagccccaatagctctagccaagcagaaggcggagaaaccaaaccggaagctgtc

SEQ ID NO: 160993 - DNA, 122 bp, Homo sapiens
taactgatgaatcgacaaatcttatgtcacaggtggtaggcaagaggtcatcgggaattccgatcaccaggctcgcatctggcttcttgggtcccactcctgaactaaccagtcgggctacc

SEQ ID NO: 160994 - DNA, 122 bp, Homo sapiens
cctggtggctctgccggtgaggggaaataaagttaggggagggggccttgctggggacctcggtcagctcccccggacaccaggaagatccgaccacgccaacggaacagagacgggggcgg

SEQ ID NO: 160995 - DNA, 122 bp, Homo sapiens
ctaaaggactcctgagtcactaccacagccacctggaaaccacaaggcatttgatgctaccgttctggtcagggattgggctgcttcttcagttcctaataccagaccaagcctcctgatgc

SEQ ID NO: 160996 - DNA, 122 bp, Homo sapiens
cacgggccagctgacctttgactgtgacgttggccacggtgcgcacccggccccgcatctcgcacaggtagataccatcatcgtctgccttcagcctgtggatgatgaggcgccggacagtg

SEQ ID NO: 160997 - DNA, 122 bp, Homo sapiens
gaagagaaagcatgattcccttgatagggaaacgtaaagtatatcatctggccatgacgacgtctccaaaggggcctcaaagaggttggctcttggcaacaggctggagcgcgggccccgcc

SEQ ID NO: 160998 - DNA, 122 bp, Homo sapiens
actgatagatgtggctgttgagaaggccggagagtccgccaacacaaaggactccgccgacgataatcacctgtcgccaagccggtggaagtgggccaggaaggctctgtcggaaacaagct

SEQ ID NO: 160999 - DNA, 122 bp, Homo sapiens
gtaaacagaaggaagtgggagagaactcagatgtatagaggtcagatgacttaagaatcacgagattcaacaaaaccaaagagagagacgctttagattccttaaattttcaccccttccct

SEQ ID NO: 161000 - DNA, 122 bp, Homo sapiens
acgcctcgtcgttccgtcacgggcgcgctcagccactctgcgcacgctcgcgcggtgacacgatggcacgtggcccgctcctgaccaacagcctgacggcctgctcctgggcgcgcctcagc

SEQ ID NO: 161001 - DNA, 122 bp, Homo sapiens
aggtagtaacgacactaaggaggccagtacttacgctcgacgggtgctgaacggcagcctcgtgttgcagcctcacccgctggggcatcatgacgtcatcctgcagtaaagaacacactttc

SEQ ID NO: 161002 - DNA, 122 bp, Homo sapiens
tgagcccgctccagctgtcataaagccccgccttccactctgggctgccatctggtttctcggtctggggatatcctctctctccttttctcagcctgatctaccccaaggctttctgacct

SEQ ID NO: 161003 - DNA, 122 bp, Homo sapiens
ttaggaagacctctgcccggcaggaggtcagtggccactcctctgatagagtcacagcggcgcattaccacatcaaagggtgagctgcagcagttgcccacatgggaggtcaggaggttgga

SEQ ID NO: 161004 - DNA, 122 bp, Homo sapiens
gataatattcgtaatttcctagggagatactactcctaatatcacctagagtgtacactgcgtgatattattcgtaatatcgtagggagctattgcttttaatttcacagtgggtgtatacc

SEQ ID NO: 161005 - DNA, 122 bp, Homo sapiens
tataagaggtagtcatataactattaatggtttatatctagtgaaactgaaggctgcaaacgtcaaaatggttccaacattagtgtcagtaaataagggttggacatgaatccttgcttcct

SEQ ID NO: 161006 - DNA, 122 bp, Homo sapiens
ccaggggaggaggaggacttggtggggctggaggctggggagcgggggttcctcctctcccgtctcacgcgtttaagtcagacggcgacccgggagaggaggagctggtgcaccccatgcca

SEQ ID NO: 161007 - DNA, 122 bp, Homo sapiens
cctagtgccttcttgttacagcggaagccatcacctggatgcctacgtgggaagggacctcgaatgtgggaccccagcccctctccagctcgaaatcgtaagtggctggagtgtaaagaaca

SEQ ID NO: 161008 - DNA, 122 bp, Homo sapiens
aggcggatcccggatcccctcccactccgacccttccctccagaagggccggttcccaaacggcccctttagacacatccaagcggttgccgacggccctcacgatgaaaactgctgtccgt

SEQ ID NO: 161009 - DNA, 122 bp, Homo sapiens
acgggccgccaaaaagggccccatctgagtctcctccaccgtcctctgccccttctcgcccgcaatctccgcacaagcccctaggcagaccccagtggctccctttgcagaacctccccccg

SEQ ID NO: 161010 - DNA, 122 bp, Homo sapiens
ggagagacatctatctattccaaaacaagcctgtatccttcacaagcttacctcaagcctcgttgcaaagccagtggtccagaagtgattaaatgactgatggcagcagttcttaactcaca

SEQ ID NO: 161011 - DNA, 122 bp, Homo sapiens
ccgacagctgcgtggctgccgagggcggaaaggagaaactgtcatgtcccgatagggccgcgcgaggtctccatcctcgacaacgctaataacaaagacgtgtgctcctctttgcttggttc

SEQ ID NO: 161012 - DNA, 122 bp, Homo sapiens
gaacactttagttatggaaattaaaaaaaaaaagttgggctttttaaaaaccaaaaccagcgttttccaaagatgtcccttcgtctgtcccctggagttagcagcgtgaagagggctcttgg

SEQ ID NO: 161013 - DNA, 122 bp, Homo sapiens
gctactcacactgcacacccacacgcatgcacctcacgtgaatgcccacacgactgtgcacgaacacacatgcatgtcaggtgtgcattcgcatgtgcacacacttgtgcccttgcacacct

SEQ ID NO: 161014 - DNA, 122 bp, Homo sapiens
ttcgatctcctgacctcgtgatccacccgcctcggcctcccaaagtgctaggattataggcgtgagcccacgcacccggccttgcctggccaatattttttaattaaaagattttaactcca

SEQ ID NO: 161015 - DNA, 122 bp, Homo sapiens
tctggaatggtaaattgcctgcttgaaagcccttttttcccctttttttaaagaagaggacgaaatcctgctgtgtggtggcaggcaggccaggcctagtggcccctggagaggagaggctg

SEQ ID NO: 161016 - DNA, 122 bp, Homo sapiens
ccggaaatcgttccgcccggtgaggtttcggcgtgagacccgaggagggcggggaagaggcgtgacggagattcctgaggtgtagtagcctgaggttcccttatgtggccctatagctgtta

SEQ ID NO: 161017 - DNA, 122 bp, Homo sapiens
tgtcgcgcagactcggggcctaaaacacttgttctctcagtccggagatcaaggacgatccgaggtaacctccctacctcggtgtcctccatgcaacctcgtcttagggcaccgggtacgtt

SEQ ID NO: 161018 - DNA, 122 bp, Homo sapiens
tgtggcagaacgaaaagtgggacggtcagtggggaaacaccaaatgttttcagagtcccccggccaagtaaggagagctcttcatggctaagtagatggggaatggccaaagaatgagccac

SEQ ID NO: 161019 - DNA, 122 bp, Homo sapiens
taagtctcagatctccacttccagtggagactcagtatatcttcccttaaggagttgcagcgctaatgggggcacacacagcctctgccctggggtttcaagaagagcttcatgcactgggt

SEQ ID NO: 161020 - DNA, 122 bp, Homo sapiens
tcccgacggaatctgagggatcccgaacctcggcctcgagggggcgctatccggcctactcgaggaccaggcagctgcagagaagctccaaggtcaaggccctgggccaggccagggcttgg

SEQ ID NO: 161021 - DNA, 122 bp, Homo sapiens
caggagtcagcaagacggacttggctctcgccagggacaggtggggtcctgaggggccgtcgctcagctgcacccacagaggggtcggcggcgcggcaagttaggctgcggggcgccgggag

SEQ ID NO: 161022 - DNA, 122 bp, Homo sapiens
atttcacccttgtcccccaggctggagtgcaatggggggatatcagctcactgcaacctccgcctcccaacttcaactgaagctactgcctcagccgcacgactagctgggattacaggccc

SEQ ID NO: 161023 - DNA, 122 bp, Homo sapiens
gctgcgtgtcagctctggtaagccgtctagcatgtcattagtggggacctgaggcgccagcgggaaagtcccctccccgtgggctggaggctgagggagggcgggccctgggctgggatcca

SEQ ID NO: 161024 - DNA, 122 bp, Homo sapiens
ctgagaacagcttggagccgacataactgtgtgataggaaaagccaaagttgcagggaaccggggatgggaatccatccagatttttcagtttaaactgattgggggaaaaaaacaaaacaa

SEQ ID NO: 161025 - DNA, 122 bp, Homo sapiens
catcttggggcgtgcagcgctctgtagggaccctggcgtgacctcatttttgctgcttcacgtttaagatctgactgctgagttgtcctcatcaccaatttcaaatcaagcccaaatccaca

SEQ ID NO: 161026 - DNA, 122 bp, Homo sapiens
ttcagcacaggcctggccctgctccaggtgcaggaaggaggataaggccgggccgagaggcggcacacctggaccatcccatgggcctccgcccgcgccgccccgaggatgagtggtgatgt

SEQ ID NO: 161027 - DNA, 122 bp, Homo sapiens
cactgagtccttcagcgacccaggaaataacaacactgttggcaggtgggggagggcgcccgggaagatatccaatagtggcgtcaggcaagaggacagaaatgctcctttcattcaccttt

SEQ ID NO: 161028 - DNA, 122 bp, Homo sapiens
gccgttggtcagcggcccgagcctggggccctcgggttccaccttcatccacccactcaccggcaaacccctggaccccagctcacccctggcccttgccctggctgcccgagagcgagctc

SEQ ID NO: 161029 - DNA, 122 bp, Homo sapiens
accatgggtttctgacccacatgataatccctgctgaggattctacccgcactcgaatagcgtcttctaactccattctcttcaaatccactttccaaactacagctggagggagctttccg

SEQ ID NO: 161030 - DNA, 122 bp, Homo sapiens
tggggcatgtcgctgtgtccgtctgcgtctgtccgtgtgtccccgtggtgtgactgtctgcgtggttgtttctctgtgtggccccgtgggctgctagcccctaagccctgctccctgggccc

SEQ ID NO: 161031 - DNA, 122 bp, Homo sapiens
ccgggcttcttggtgaaaagacctttctcctctgcaagaagggaagtgaccgcaggtcagcgccaaggtcaagcaggcagacccgcagtgagacccgttgagctgcttgcttctggcgctgg

SEQ ID NO: 161032 - DNA, 122 bp, Homo sapiens
acatcaagggatggagttctgcatgtgctcaaaagttacattaaacgtgctcagaagttacgttggagcaaaatctcatcaaagttttgtttggagactacatctggttatagattacagag

SEQ ID NO: 161033 - DNA, 122 bp, Homo sapiens
gggagaggctggaaacaggcgaggaggagcagcgcggctaggggactggacgactggaaccgggtcctccttagctaagaaagggaagggcctcagccttactgaaaggagcgcctgcggag

SEQ ID NO: 161034 - DNA, 122 bp, Homo sapiens
gatttctgatatttaggtgaaatcagtttggaagatgtgtataacatttcagaaaaacatcggtcaggggcagagaaatagccaggggccaaaattgctacttatttaatttcttttagaca

SEQ ID NO: 161035 - DNA, 122 bp, Homo sapiens
cgggccccgcttccaggcccctgtcctttgcttccttcccttggcgctgtgctgaggggtcgtcgggtcctggaagggcgttcaggggtctcgggtggctagcccggctggcggggagatgt

SEQ ID NO: 161036 - DNA, 122 bp, Homo sapiens
atttggataatgcagctacacaaacctctgttccctgcctgggacccccaaggctgcagtcgaggggcaggagttcagagcacggttcagagtcaatgcctatcaggtacactaagggtccc

SEQ ID NO: 161037 - DNA, 122 bp, Homo sapiens
agaggggcggggcaggggcgcagggctggagtcggtggctttgtagggccccgcagggcgcggagccacctggggaaacggaagttcagggagggcgaggccgtgccccacatccaggcagc

SEQ ID NO: 161038 - DNA, 122 bp, Homo sapiens
ctctgaatttaccctctccaagtttcattagccgaggagttttcctaaagtaattagaatcgaagggtctgtccaagtgttccaggtatccatagtatttcactagaatagaggaaagaatg

SEQ ID NO: 161039 - DNA, 122 bp, Homo sapiens
cgggagcgcaggggaggggcctgagaggcccaggggcggggccccgagggggcgggagggcggcagagtgatgcacaatctcaccaatcagaagtcgcctttcgggaaggaggtggggcgat

SEQ ID NO: 161040 - DNA, 122 bp, Homo sapiens
catcacccgcggagcgtgccagcgccggtgcaaataacgttgccccctccctcccggctccgctcgctccgaaactcctgtttgcaaacgccagtacgcctggctaggaggtcccgcggggg

SEQ ID NO: 161041 - DNA, 122 bp, Homo sapiens
tctatgtggtcactcctcatggcgtggaccaccagccagccccaccgcatcaccaggacccgcatgtaaccctccggggatgcctgctgcagatggggcccagctcgtgatacacttgggag

SEQ ID NO: 161042 - DNA, 122 bp, Homo sapiens
taaatttgtcatcggatgctgctttcggaatcctgaaagaacccctcactatcatccatccgcttctgggttgcagcgacccctatgctctgacaagggtactacatgaagtggagccaaga

SEQ ID NO: 161043 - DNA, 122 bp, Homo sapiens
acaggacccccctgtggtcccagggaaccgtcgagccgtcctcgaggtggcagcggagcacgagtccaaggagttggccgctctctagggaaaatccgaggttctttcatactttcttgggg

SEQ ID NO: 161044 - DNA, 122 bp, Homo sapiens
gggcaaagctagtgggtggagatacaccgaacacccggggcccagagctggcgagggcagcgtagacgcctttggtgctggtggtcccgctgtgtcccgtccctggcccccgagcagcgctc

SEQ ID NO: 161045 - DNA, 122 bp, Homo sapiens
tgggaggcgcgctgctcagggttctggtgggtcctctgggcccaggagctgggagggctgcgccggcctctggagccccgggagccagtgccgaggtagggagacaacttccgccgcagggc

SEQ ID NO: 161046 - DNA, 122 bp, Homo sapiens
gagaaaccgtcgtttcccagagtgacgtgtacgcagagcaatcatggagtccagcccagccgggggcggggctcaggcggctccctacgcttcctactccagctggccccgccccacgcccg

SEQ ID NO: 161047 - DNA, 122 bp, Homo sapiens
ctccatggattgattctctcagagcagctgctcggggccgacctacaccaggcctgccgacgtctcccctgggagcctccctggcccgggccagacatccggcacccggagccccgtcaggc

SEQ ID NO: 161048 - DNA, 122 bp, Homo sapiens
ggtggaaacttgaagcggtgctgccgggccgggtaccccgccgcccctggcacctccgcgcgccctccccgcccccaggacaccgttgtcccagagcgaggcccggcgcttggaaagatgcg

SEQ ID NO: 161049 - DNA, 122 bp, Homo sapiens
ctggctatattagctgaaacccaaagcaaatcttgccccagcacaaggcacccctttctgcgcctgtagtgtgtcagctatgtgcattttccttcaggatgagcaaaaatatttcgtcatcc

SEQ ID NO: 161050 - DNA, 122 bp, Homo sapiens
aaactttgggtttgggttgattttcaggtttgtggcctcaagggaggcgtgttcccatcacggagcacatgggtgggggctgagcctgccatctgatcattaggcttctcatggttactcct

SEQ ID NO: 161051 - DNA, 122 bp, Homo sapiens
ccttgtgtcacggccacacggagctactgactgctgacacctgcgtcttcgccgccacaccggccctgcaaatcattaatgcttattctttcaaaggcaaaaaaacggagaatgatccgcca

SEQ ID NO: 161052 - DNA, 122 bp, Homo sapiens
cgccacgccatcttgtggtcccgggtgaactgcaaggacgccaaaggacggcgccatacccggggcaggacaggccttgcggtgacatgggcaatgagggggcggcagctgggaggccatca

SEQ ID NO: 161053 - DNA, 122 bp, Homo sapiens
cttctgtttcctcacacatgccatgagaactgacaaacagtgcactgaactcacaaaacccgacaaatagaggagcttttgaaaaatcttcctatctacctactggggtgtctgtgtctttc

SEQ ID NO: 161054 - DNA, 122 bp, Homo sapiens
gatacgatgggggagtcccagcccctgcagagaagctaccaaggttagcgctaccctagccggcggggaggcctcggcgctgcagcgctcaacaaccggatccacaagtttataaacaaccg

SEQ ID NO: 161055 - DNA, 122 bp, Homo sapiens
gcggccaagaaacatccattgtgcccgcagcagctgatgtggttacagctggcgaagtggcgggcgcccccttgccaccccctcacgccccagctcaggaacagacatcccttcttacaaaa

SEQ ID NO: 161056 - DNA, 122 bp, Homo sapiens
gagaagcagagggaggagttgttgctgccgccgccgcagccgcagctactgtgacttctccgattgtgtgagctttgttggagcctgcgtacgtggatttatcgctgccacggtctgcgtag

SEQ ID NO: 161057 - DNA, 122 bp, Homo sapiens
aaactctccagaaaagtgaggcctgagaattgctggcttagggcctcagctggcagagcccggggagagatgggatgtggcccaagtgggctcacacctgctctaagccaattagcaccaga

SEQ ID NO: 161058 - DNA, 122 bp, Homo sapiens
gctagctggaaagaggtctgattctgtgcattctgaggatgggagcaggtgggtgcctgccgctccaggtgcctgcgctttcacacttttcttttccagaaatcgagcggaggacgctgtgt

SEQ ID NO: 161059 - DNA, 122 bp, Homo sapiens
cctggccacggggcttcttccctccccaagtgccattttcctgcagcgtagactggggctcgctgtgcgacgggtcagtggccgggtgcgcgtgttcgcgaagcattctcgcgatgcccgag

SEQ ID NO: 161060 - DNA, 122 bp, Homo sapiens
tcacagtgttctgcttcagccgtccaggctgcccgagacacgggctcagcacctgcctaacgggatgcacagcacttcggacggggcatcatctcaaggtcacacctgcttcctgctgggtc

SEQ ID NO: 161061 - DNA, 122 bp, Homo sapiens
tcagcgtctccaattacatcttcacggccatcttcgtggcggagatgatggtgaaggtaccgcggggcccggggactgcccttgttcccaggtccccgttctgccctcatccccacccccac

SEQ ID NO: 161062 - DNA, 122 bp, Homo sapiens
aataaaaaccaggaacaaccaacgtgccggccggtgggcttggcgcaatgagcaaacacacgtaacagaccaccctgtggccaccacacgtgccgccgagcagcggaggtccagacgggcgc

SEQ ID NO: 161063 - DNA, 122 bp, Homo sapiens
cccaggtcagtagcgccggcccggcgggcgggcggggacaggggcggagcctaggccaggcgtggtcttccgtgggagagaaggaaattctttgccccaccccctaaaaactgctcttctgc

SEQ ID NO: 161064 - DNA, 122 bp, Homo sapiens
ggagaccagtggggaaaggcctgtccggaaacggggccttgaaggccacagacaggagcccgggacctgcctttaggtgaatggggagccacggcagggttctgaagcaggagagagagtgt

SEQ ID NO: 161065 - DNA, 122 bp, Homo sapiens
tcttgggttccttctgggtgggcctggggcccatccttcctcagtgaggcaggcaggactcgagactgacctcaaactagcctcaatgcccagtgtggatggagaggaagggtcttccctgc

SEQ ID NO: 161066 - DNA, 122 bp, Homo sapiens
atgactattgtctatggttatgactattgcgttcattctggaatggcagagttcagtgttcggaaggaagattacctggctcacaaagtctcaaatactgtgtgccacttggctctttaagt

SEQ ID NO: 161067 - DNA, 122 bp, Homo sapiens
gcagcctccgccgccgccgccgctcgcaccccttctccgcgcgagaacccgcgcggactgcgcctgcgccgaatccgaatcaggccccctccgcctaaccccgccccgcgctggtctgtcgt

SEQ ID NO: 161068 - DNA, 122 bp, Homo sapiens
agcattgataaaccccagagaacaagctgtgcggcgctgaccacgctgtgcagggctgaacgcacattaggtgcttgataaatgacaactgattagttgctgagggaattttttaaagaatc

SEQ ID NO: 161069 - DNA, 122 bp, Homo sapiens
ggacagcgaacctttaccccgcggaggagtcggggccggagcccgcacgtgggtctgcgacggccccgccccctgggggcgtcccctcagggactctagccccggctggtgggccctgcagg

SEQ ID NO: 161070 - DNA, 122 bp, Homo sapiens
taagaatgttacaggaaatagaatattttgaacaaaggttttcacagaacagcagttttacgctctgtcaggtgatgaaatagaatactctcccaccttgtgaatgaagaccattgaattat

SEQ ID NO: 161071 - DNA, 122 bp, Homo sapiens
agagcagagttcctgcagggctaccctcctgtgctctgccccagtcagagtgcagggaggcgtggggaggtgacacagatggatggcaacagccctgggaaggagaggtgggctgggagcca

SEQ ID NO: 161072 - DNA, 122 bp, Homo sapiens
ttttctctaaactgaagctttttcacatcccagtttatgaggcgtgaaagctgagctgctcgggccgcaggcagaagcaggcccagctccctgcttactgcttttcttttgccctctgcggc

SEQ ID NO: 161073 - DNA, 122 bp, Homo sapiens
cgctgcccggtggaactaagaccagggacgaggccacgcaggagatcaaggtactcactgcgttgggtgctgctgcgctgcagcccacgacgtcactggcaggcgctgcgtcgcgcggtatg

SEQ ID NO: 161074 - DNA, 122 bp, Homo sapiens
aagacaggaaacccttaccttttgtgctccaggaacacagggtctgaggacctgtccaggcgcagggaggtcttaaaaagagcgaattccttcctcttgctttctttgtgttcgcctcaccg

SEQ ID NO: 161075 - DNA, 122 bp, Homo sapiens
ttaaaggcgtgagccaccacgcccggccaaggggtcctctttttcaccgaggcaaagacacggagcctcttgagtaagtcactcaaggagatagcgcatgtgaaagaggggagtggaatcta

SEQ ID NO: 161076 - DNA, 122 bp, Homo sapiens
tctcacactttcaggaaccacaggcccttcccgtgcagctacaaccctgcaagaggggtccgattccgcacgtcctccccgcgattctctggttttggctgtgaccatcacaggtgtgagtt

SEQ ID NO: 161077 - DNA, 122 bp, Homo sapiens
ccaggggagggccatcctgtcctggccagagttatgagaatggaactgaattatacccatcgaatggagtaaccacgttcattttctgttttgcaccattggcactgaggctgaacagccca

SEQ ID NO: 161078 - DNA, 122 bp, Homo sapiens
gagcaagaaaagggaagaaatatccagataatttaggtagacaataattctgctgttgtgcgtgtataaacttatatcccccgagtgagttctgtatttggacctggttattgttgcagtta

SEQ ID NO: 161079 - DNA, 122 bp, Homo sapiens
gtcggctccccagccacggcgacccctgacctggtgtccatggcaacgactcagggtgttcgagcggtcacttctgtgacagcctcggccgtggtcactaccaacctgaccccagtgcagac

SEQ ID NO: 161080 - DNA, 122 bp, Homo sapiens
gtggcctcaacagggccaatcgggggactcgagcccgacaacagggcaagccgccaacagcgatcaatcagaggggaggagcggctcccagatacccaatcagcggccttcaggcgcagatc

SEQ ID NO: 161081 - DNA, 122 bp, Homo sapiens
agggaagcgctgcccatgtggcgacgtgtgtcttcacaatgctcaccggacaagcagccccggccacttcctgccagggtcccgacttagcagggatttcccccagcatagcagctagtaaa

SEQ ID NO: 161082 - DNA, 122 bp, Homo sapiens
gactgatgaaccagactttttgtagcaataagacaccaaattccagccaggtttacaggacgcacagcaagccctgaaagaaactgaagtatttcactccaaaatatatttatttgacatat

SEQ ID NO: 161083 - DNA, 122 bp, Homo sapiens
ccttcctcttagaggatatttatatataccctatgccaaatcacaataacgctttgtgatcgatcgttatccaatttttccaatgcataaaccatgcttcaatttggttaagttactcgttc

SEQ ID NO: 161084 - DNA, 122 bp, Homo sapiens
ttcatttaagcctctcgccaactgttccctgcggcaaggcagggcaacgagctgcagggtcgccaagcacgtgcttccaagggtcctcaaggctttgtgaacggcggccggccaaggacaga

SEQ ID NO: 161085 - DNA, 122 bp, Homo sapiens
gggcctatgggccagcagcaagatcatggagccccagcactgcctgacccactgcatcaccgcccacatttttaacaaggctccaggccattcacaggcactggacagtttgagaagcactg

SEQ ID NO: 161086 - DNA, 122 bp, Homo sapiens
ggagcatagttgtcgaggtagcctaagtctcctttaagggaagtggctacttttaagctacgtttgcaattagttaatctttgtggaatgttgaccatgtgactagggaaaattcttacaaa

SEQ ID NO: 161087 - DNA, 122 bp, Homo sapiens
ggccaaagctgtttccacttccctatggtccagctttcatgggccaaccacaaaccctaacgtctgtgtttcccttcctgcccagtcagacatgtctccacctactgcagacaaggaaggca

SEQ ID NO: 161088 - DNA, 122 bp, Homo sapiens
agggctcgccaggcagtgcagagattccaccgagcccaggccgcagcccccacctcccgccgggctgtgctcagtgtcaggaatcggctcccaagatggccgcctttcttgtaaagctgtgc

SEQ ID NO: 161089 - DNA, 122 bp, Homo sapiens
agggactacctttctgcgtattcctttctgttctttaaaaatgttaaaccatggggtgctcgcttcggcagcacatatactaaaattggaacgatacagagaagattagcatggcccctgcg

SEQ ID NO: 161090 - DNA, 122 bp, Homo sapiens
aattaaattgaatcaggaatcaagaaattcaattgacagactatagtgagagatagggaacgctagttgaaacaagtaaaaataacagtaacttctaagtttctaagttgggaactagctag

SEQ ID NO: 161091 - DNA, 122 bp, Homo sapiens
cgcggtcctgcgcggcgcgcagctgggtctgcatggccgccagcttgtgccgcagctcagcgttcaccagcaggaggcgctgcagctgctcctgcaactgggagcggagcaaagggtggggt

SEQ ID NO: 161092 - DNA, 122 bp, Homo sapiens
tggcggatttgatcatttggtgtgttgggcaatttttgttttactgtctggttccttctgcgtgaattaccaccaccaccacttgtgcatctcagtcttgtgtgttgtctggttacgtattc

SEQ ID NO: 161093 - DNA, 122 bp, Homo sapiens
ggcaacggcggctggagctgccggtgagtccggatgtgggagccagagggccagctgcggcggtggtggcgccttcgccttctgggcggtacccgcgggccgggctcgggcactgccgggag

SEQ ID NO: 161094 - DNA, 122 bp, Homo sapiens
ccaccggaagccccacaggacaatccgggatgtgggggtatgctggggcagccttgacagcgtccacagagggcacaggaagatccccaggaaccccgtctccagaagctgggactcccatc

SEQ ID NO: 161095 - DNA, 122 bp, Homo sapiens
tttagatttagatgccatcctcaggagcaaggtatttgccccagagattgcgtctgggagcgcgggccctgcagaagcatggagagcggaggcctttgtaccaggacatctcacaggcccac

SEQ ID NO: 161096 - DNA, 122 bp, Homo sapiens
ggagtcgcgagcggggaatcacggtcgcgcaggcgcagaagtagtacggtgggccgaaggcgcgcggctgcgcatgcgcactgggcccggggccgggtgggagagttctagactcgatgttt

SEQ ID NO: 161097 - DNA, 122 bp, Homo sapiens
ttgtttcagggcgccaagcttccattcttttggctgttccctcctagttctcagaaaccccgatgtctgcgggaaagcacgcggtggctcggctcggctgaatgctcatcccaaccttgacg

SEQ ID NO: 161098 - DNA, 122 bp, Homo sapiens
acccagcggcggtgccctgagccttgaagaccagggggagcgcggaccaacggggtcgaacgcccgggcgcagaaggtcccggacgcagaaggtcccgggcgcgcagaatcgcagcgggtcg

SEQ ID NO: 161099 - DNA, 122 bp, Homo sapiens
tggaccctgttccattttcagcacggattttggcgtcagtatgcgtctcctcctccatcgcgccgagcccacgtgcggctgcagttgtcacttccgcctggcagcgcgcgccgcaaacaggc

SEQ ID NO: 161100 - DNA, 122 bp, Homo sapiens
aaaccttctcaaaaagcacacacaagcacagaagcagaaactcctgtgtgactggtgttgcggggtggacccactgccgccgcctcctcctgggctgctctgcgcgcctgccaggctcttcc

SEQ ID NO: 161101 - DNA, 122 bp, Homo sapiens
gcacctatattcccagctacacgggaagcttaggcagcagaatcgcttgcatcagggagtcggaggttgcagtgagcagagacctgccattgcactccagcctgggcgacaagagcaaaact

SEQ ID NO: 161102 - DNA, 122 bp, Homo sapiens
cttccagccactggaaaattattttcacatagttgctatgtcccgcttttcttgctttcgcgatccctccagcccccccgcgcgcgtgtccacgcaggcacagacacaccggtgcctgcctc

SEQ ID NO: 161103 - DNA, 122 bp, Homo sapiens
gatgactctctggatcacaaagcctattcaagcttctccccagggccccaaaacaacatgcgcaacaacttcctagggaaactcaaagcctacctcacccttcccactggggaaatacacag

SEQ ID NO: 161104 - DNA, 122 bp, Homo sapiens
gaccgccgccgcgtgcggggcccgagccggggtcaagccgagcgccaccgcaggcagtggcggaccatgagacactgtgagcccgggaaagcccttggcactttgcctcctaccccccacgc

SEQ ID NO: 161105 - DNA, 122 bp, Homo sapiens
tgtagggttacagtccatttatgggcgcagccgaaggcagatatcagtgtcgatggcattcgctcccagctattcttaggagcctctcaagagctccacgcagcccggctgggcagcaaggg

SEQ ID NO: 161106 - DNA, 122 bp, Homo sapiens
tcctgcggcgcctgcacaaatattaactctctggcccgagctcaggcagttcctgtcccacggctggatccacgcttggggcgggggcagggcaaacagccaacgcccggcaccgccagcca

SEQ ID NO: 161107 - DNA, 122 bp, Homo sapiens
gggtggtatatctccacttgaagtcaattgaggatccagggagcagagggcttccatctgcgtcttccttttgtgttcaaggaaagagaagtttggaccaaggataggaccaagataaaact

SEQ ID NO: 161108 - DNA, 122 bp, Homo sapiens
tatattaagtcaaacagccacactcacagcgaaggcgacacagtggagtacgtcattctccgcctccaggtcagtgaagaggctcctgtttcccctgacagactccaaggaagcacttacag

SEQ ID NO: 161109 - DNA, 122 bp, Homo sapiens
tcctggtgaaggatgttcatgttcatttttccagatttagggggagcaaccccaaaccaccggttagcctttcctggggagggaaaaggagtacgtcggaaatcacccttactccacaaaca

SEQ ID NO: 161110 - DNA, 122 bp, Homo sapiens
gtccccagcctgaccatcctcagctcttacatcttcatcattgccagcatcctccgcattcgctacactgagggcaggtccaaagccttcagcacttgcagctcccacatctcggctgtttc

SEQ ID NO: 161111 - DNA, 122 bp, Homo sapiens
ctcaaaaaagaaacggtacccattagcagtcagcccctctcttctcccactccccatcctcggcgtccacagatctgctttctgattggatggacattgcatataactgggttcatgtggca

SEQ ID NO: 161112 - DNA, 122 bp, Homo sapiens
ccctgccttccctctcctacagtggggcggggccgggccgcccgagtcgggggtggaaggcgggggccacataatgccacgcccccgcctcgtccccatttgaagccccgcgactcttcact

SEQ ID NO: 161113 - DNA, 122 bp, Homo sapiens
agcgtgcggtgtacctcctccttagcaaagctttctcaatgcctcttaggttagacccgccgcagggatgaaggggttgctggcggattgcaggtgcctgcagcacagggcccagaactaag

SEQ ID NO: 161114 - DNA, 122 bp, Homo sapiens
ggggagaagtcatttgcattaaaaaaacactagctgtctattcccattagaaaaaactctcggtgttttagtacaaattattttaaaagagcagataacttatggatgcagaaagggtaatc

SEQ ID NO: 161115 - DNA, 122 bp, Homo sapiens
ccgcgggcctggctgggccaccgccgagcggacgaagcacaggcgcccttccgtccgcagcggccccgaccacttccgggccacggcctcgacacctcccactccgcccgccccgggccaca

SEQ ID NO: 161116 - DNA, 122 bp, Homo sapiens
aacatcatcgccactgtagacacgaggctgcctgagttctcagagctgcagggctgtttccgggaggtgaggaggctctgggctggtggctgggtcttggggagttgggggcagcccggaca

SEQ ID NO: 161117 - DNA, 122 bp, Homo sapiens
ggaagcgtcttccttttttccgcctctcgttcgcttttgtcttacgaggcttccggaacacggcccagaattacagagaaaacacactgcgcacgcgcactctctcgtcaccgctgtgcggc

SEQ ID NO: 161118 - DNA, 122 bp, Homo sapiens
tatatttaacaaaaataggtcagttggggacttaggcctccctatatagtgccatactaacgtcagaacttgatgttaaaatattctgagacggagtttcgcttttgttgcccaggctggag

SEQ ID NO: 161119 - DNA, 122 bp, Homo sapiens
accgtgccacatttccgttccctctggcctcgccctcaggggtcgaccggcggcggagcgcggggcctcctgtgctgaaggcagctccctggcctccagaaactcacagtcagtggtgggag

SEQ ID NO: 161120 - DNA, 122 bp, Homo sapiens
accgccccatcctgcagaccagcctggtccctcctgctgagcctgggggctccctcaggacggggcctgccctgggctgacagcatgggcgtgtttgttgactgacccatggactgacagat

SEQ ID NO: 161121 - DNA, 122 bp, Homo sapiens
gcattttattcttaagaacatttgtaaaaagcttaaagcaacgcatccaagggttgaagccgggactttctgcaaatttaggaaactgatttccccccaggaaaatgtctgaaggcatttac

SEQ ID NO: 161122 - DNA, 122 bp, Homo sapiens
tggaaagaggcttggaggtggatgggaagggatttccaacggaggcggctcctctctcagcgtcctcgctgctgatccccttaccgacggctgaagaagcagattcatcccttcaacaaatc

SEQ ID NO: 161123 - DNA, 122 bp, Homo sapiens
ggccttccgggccagtgttggatccctgtagtttgtgaagatggtgttgctaacaatgatcgcccgagtggcggacgggctcccgctggccgcctcgatgcaggaggacgaacaggtgagct

SEQ ID NO: 161124 - DNA, 122 bp, Homo sapiens
gcactgtgactgtgccctgccctggagccctctctgggcagctctgcacccgcagcgctgcgtctctcccagattatgcaggaaccagagaggatcgtcagaggagaatcctgactcgggct

SEQ ID NO: 161125 - DNA, 122 bp, Homo sapiens
caggaagcccacgcccagaaggttctcacgcgaacgccagacgtggtggctctgcgcgtgcgcagagctaggtcttgcctacgcggtcatgttctggcttcccaagtaggcagaattggttt

SEQ ID NO: 161126 - DNA, 122 bp, Homo sapiens
cttggcaaacttcttagtgcaagcaatggttagattaatttgtgaggcagctctttaagacgttcagaggtaagaaatactggatttataaagcaaatggctgtttgggggattccaaggat

SEQ ID NO: 161127 - DNA, 122 bp, Homo sapiens
ccctgtttcgtgctggaactgccctcacctgacccacgtggttctagtagagttgttacccgacccccgggcctggacgatcacacggccgtgtcccctggcccaggggagcaagccctttc

SEQ ID NO: 161128 - DNA, 122 bp, Homo sapiens
cgctgggttccaaccgctggccacctggggcgggccaaaaaggtgcctcccttagggtgacgtgcggccgcggggcattcaggtctcagggatctgcactgggtggggtggtgagaaggccg

SEQ ID NO: 161129 - DNA, 122 bp, Homo sapiens
aaattcggggcttctgccgtcttagcacaaaacaaagccggagtattcaaagaatttttccgcccagcttgagttcatcgcggatgcgttgactacacagcacccattttctcactttgttc

SEQ ID NO: 161130 - DNA, 122 bp, Homo sapiens
gccgccgctagccggctgcccacgtgcctgcaacagtggccacgtggggccctgaggaaacgcctttacaaaggtttgtcccctgcgctgcccagtagggaggaaaaccggaggagagcgca

SEQ ID NO: 161131 - DNA, 122 bp, Homo sapiens
gggctcaagagtgcggcgggtcagcgtggcccacttcggcagtcgtcgagccgaggactacggggagcaccacctggcagtccttaccaacctgggcgacatccaggtggtctcgctgcccc

SEQ ID NO: 161132 - DNA, 122 bp, Homo sapiens
tcagtcacgtgggcagcacgccccaggcctccgactgctggcgtgcagtggggcggattccggaggattcctgcagccacagtgaatgtttggttattccaggcgcagggcagcagcgaaga

SEQ ID NO: 161133 - DNA, 122 bp, Homo sapiens
agccaggacgacatcgcggcgagtttagagaacgacccggtccgctcggaaaaaagaaaacgtttagcgccgccgggcgatccgaccaaatatccttgaacgcctgccttcgcgagacagga

SEQ ID NO: 161134 - DNA, 122 bp, Homo sapiens
gcctggggacacagatagcatcagagcagcgtggcccacggcccccgtctccctcctcctcggtcttttcagggtctcacaacagcggtttccctgggttaggaaaccttggaaacactgcg

SEQ ID NO: 161135 - DNA, 122 bp, Homo sapiens
actcatacttaaatataggaacaaaacaggatcatagtgcttattttttctgagtcctcacgatcattctatgagtcagttagtagtagtatttttactttatatatgcagaaacagagact

SEQ ID NO: 161136 - DNA, 122 bp, Homo sapiens
ctgggatcctggctagaccagacagagccttggtgaagtgcttaggctgtctgcacatcgcgaggaaggtggtattcacttcgctaagctccttggcataggcagtttgaacagggctttat

SEQ ID NO: 161137 - DNA, 122 bp, Homo sapiens
tgagggtgcgttcttagcagcatcttaaaggggtagcttgtctttctggccagcttcccccgggtcctttccgtcgtgtgtgtgagagtgtgtgtgtgtgtgtgtgtgagagagagacagag

SEQ ID NO: 161138 - DNA, 122 bp, Homo sapiens
atctggctgtccctcaggccaccggctcactgctccccagctcctgatctgcccccaccccgtggccctgtccagggtttgccgtccctcacactgtcaggtcactgctccccagctcctgg

SEQ ID NO: 161139 - DNA, 122 bp, Homo sapiens
ttatttggaacctgagatgagccagatacatgaacataattagaaccggatgtggtggcacgcttctgtggtaccagccacttgggagactgaggcaggagtaccacttgagcccaaaagtt

SEQ ID NO: 161140 - DNA, 122 bp, Homo sapiens
aaggggaaagatttgctgctacacttggggccaaggaggcctgtgaatagaacctagaggcgtcccaggggagtctccaactaacaccatgtcccgactccctatctgtccacagccctccc

SEQ ID NO: 161141 - DNA, 122 bp, Homo sapiens
aggcggaggaggcgatggctactatccctcgggaggcgcctggccagagcctggtcgagccggaggaagccaccaggtaagctttgcaccctctgtccttgcggggaggtgagggcccttgg

SEQ ID NO: 161142 - DNA, 122 bp, Homo sapiens
cgggagatgaaggtgtaacctttttccagcgcagggctcccacgatcctccagacaggcccggagaagcggaccctcatggacaacagcgcccatctctggtcagagaaactcgactggctc

SEQ ID NO: 161143 - DNA, 122 bp, Homo sapiens
tcccatgcctcgccacaagctctcctcccctgggcttcacctgaaatttcttccctggcccgctgtcaccttcaggataaattctcaactccttacaagcggttgaccgtttgcttggggct

SEQ ID NO: 161144 - DNA, 122 bp, Homo sapiens
ggaaggcgccggcctccagggcgcgcaggctgttgttgtgcaggtagagccggcgcagagcggcgagtggcgccagggctcccggctctaggcgggcgatgttgttgtcctgcaggaacagt

SEQ ID NO: 161145 - DNA, 122 bp, Homo sapiens
catattctctgtgcactttgcattacctaatggtttcctggctcatgtgagagaagtcagcgtcagcagtcgggttttgccgagatattttcttgtcctttccagcatagagctctacaaac

SEQ ID NO: 161146 - DNA, 122 bp, Homo sapiens
ctcccgcttctctttgccggtctggtgcactggcttcttcctacttgtgaccaaaacctgcgccgccgcggagcatgcccagtctttgcgtccgctagctcgccgctcctgggcgcgatcct

SEQ ID NO: 161147 - DNA, 122 bp, Homo sapiens
gggcaggagggaggtgcatgttagctcttcctaaagtggcctcctttactttgcacttctcgtgtttttccctgtcaagcgccttcattaccacttggaatgttgccatcttcccagcgccc

SEQ ID NO: 161148 - DNA, 122 bp, Homo sapiens
gttgcctctctgaggccactttgatttggtctgtcctgttcctgggtccataattcctgccgcctgccctcccacacagaagtccgacagggttacaggcgtgagcccctgctcccggctag

SEQ ID NO: 161149 - DNA, 122 bp, Homo sapiens
actcccaggaatctgctgcctcgatacacagctgatgatcctcagatggcatttcaaggccgctcactcttttaccccctccccagttcccttgataccctctggggagaggaaaaggtcag

SEQ ID NO: 161150 - DNA, 122 bp, Homo sapiens
tccctgggttctcgagacgtcactctgcggcgtatgtccaggcgagctgtgcgtcagttccgttcctctgcttgtgcctcaagagtctggcatcagatgggaattgacaaaccaaatactga

SEQ ID NO: 161151 - DNA, 122 bp, Homo sapiens
ctcgctcttgcaaagggaggtttgcgttcaatgaaaggatcaagtgtggccagggcagcccggccgacctcgagaggttcccgcgtcctctccccgccctgcctaggagtggggtgtcgggg

SEQ ID NO: 161152 - DNA, 122 bp, Homo sapiens
aggatttttaaagctctgtcccaggaaccagggacatagaccatatatattcttttataccgtggtacctaaaacctgaaaacaaaccaaatacccattaatccattaataaaaaaggaata

SEQ ID NO: 161153 - DNA, 122 bp, Homo sapiens
gcgcgtctccatctacagcacgcgccgcccggtgttggcgcgcacccacgtccagggccgcgtctacaacttcctcgagcgtcccaccggctggaaatgcttcgtttaccacttcgccgtgt

SEQ ID NO: 161154 - DNA, 122 bp, Homo sapiens
ctggaaccagatctctgtcctggctccatcagctttctcctggctctttctgcctttcaacggtgccaccaccctgcttctgtctgctctgaacacttgttccaaaaagggaggataaaagg

SEQ ID NO: 161155 - DNA, 122 bp, Homo sapiens
aaaagttttttcatctatagaaactaacatttaattgttagcagtcttgcccaagacctgcggggtcaggagtccaggactgtcctgggtgcccccgccttgcctggacgtgagagtgctgt

SEQ ID NO: 161156 - DNA, 122 bp, Homo sapiens
cgcaaggctgtctctcgcagccccgccttccctcagcttgaaacacctgctgcttcgcggcggtggctttgtgccacttttcccagggcttgggcatcattctggacccatgttcggtgaac

SEQ ID NO: 161157 - DNA, 122 bp, Homo sapiens
gggacagtctacaaatagacccaaagacacagcacactgcaaacttgcagaggctttgagcgctgcacagagcaggacacccagcgggggccagtcatctccgctttctcaggccacagtca

SEQ ID NO: 161158 - DNA, 122 bp, Homo sapiens
tttttcacaacaggtcaagcacagcagggtccctcctgcatttgcctggagtgagatagtcgcagccggtcaggccccgcctctgggcacagcctgttcccgtcggaaccgcccgcagttgg

SEQ ID NO: 161159 - DNA, 122 bp, Homo sapiens
cacccttggaagtgccgcgtcgtaaatgctgggaaaagcctttcgttatctgcctgagcccgtgagttaatgcacagatactttggtttcgggtgtgaacaaaaactttcttcgaagccgag

SEQ ID NO: 161160 - DNA, 122 bp, Homo sapiens
tcttaggccactgacagaaacatggtttgaaccctaattgttgctatcagtctcagtcagcgcaggtctctcagtgacctgtgacgccgggagttgaggtgcgcgtatccttaaacccgcgc

SEQ ID NO: 161161 - DNA, 122 bp, Homo sapiens
tttattttaaagcttattttaaagcatgtccctgaagacgagtggggagagcagaccacccgctgattccaattccctaggcggccgcggcgagctgcggcgtctctgtgccccggcctgcc

SEQ ID NO: 161162 - DNA, 122 bp, Homo sapiens
agagggccagacctggaagtcaatcttcagcgtttgagatatggtggagatcagggtggacgacctctgaggtctctagccaggaccagtcacataatttgcacagccccgtgcaaaatgaa

SEQ ID NO: 161163 - DNA, 122 bp, Homo sapiens
agcggccattcagcttttctgaccatggcccatatcaacaaacacaatatggtatgtgagcgtatacatgtgcacaaacacgcaaatgcaccctcacacaggtacacatgcacgccctcaca

SEQ ID NO: 161164 - DNA, 122 bp, Homo sapiens
tttaactcgtgacgatctccttgctgtcctccacgaagcgggtgaagcggaagttggttccgttctcactgcttgccattttctccaggccggccaggggagcattgggctctgagttctgg

SEQ ID NO: 161165 - DNA, 122 bp, Homo sapiens
atggaaccttccagaagtgggcagctgtggtggtgccttctggagaggagcagagatacacgtgccatgtgcagcatgaggggctgccggagcccctcatgctgagatggagtaaggaggga

SEQ ID NO: 161166 - DNA, 122 bp, Homo sapiens
tcctctcttctctctctttacctttccagaattcaccaatctgttggaacacttctgccacgtgtgaagagttttggcagaccaaatccacatgcctgaagtgatgcccaccaacaaagaca

SEQ ID NO: 161167 - DNA, 122 bp, Homo sapiens
cttcctcagggccagctcatcctgcccactgggctcgtagtcgaacagggctgtccacaccgggttggcataacccgctgcctttggagacccctcaggccggcctcctccaccgcccccac

SEQ ID NO: 161168 - DNA, 122 bp, Homo sapiens
gcctcacgagcccctggtcccgccaccggggccccgaagcgaccacagccacaaactcaacgccagggccacatcgctcgtgattctcgtccatcctccgacccggtcccgctccgggagac

SEQ ID NO: 161169 - DNA, 122 bp, Homo sapiens
taccctgccccgcatccacagatatcttcccttccttgatcgccagtacctggcactgaccgtgctttgaattcaaacaccctgggaggcatagtccctgtgatttaaactaacattgaaga

SEQ ID NO: 161170 - DNA, 122 bp, Homo sapiens
gtagcaagctaaggcggccctagtagtctaggaggaaccatgtacatgaagaaatgcgggcggtgggcgaccctgcagggccagaggcaactggaaatcggggagaaaagagggctggggaa

SEQ ID NO: 161171 - DNA, 122 bp, Homo sapiens
tcctttgtagaatataaagtaagagtgatactaaatatttaacagtttttacagtatgagcgctgtgaagacctgaatgggctaatgtcagttagcgaggatctttcttgtgaacccgctgg

SEQ ID NO: 161172 - DNA, 122 bp, Homo sapiens
tgggtagggggcagggccacagcaggggcctgctccatggagcccctgcgtttgaggggccggggaatttccgccaacacccgtgccacctcctccagctcgggcaccgactgtgcctccgg

SEQ ID NO: 161173 - DNA, 122 bp, Homo sapiens
ttttttccacatcccgtgattgcgacaaggaaggagactgggtctggggctaaggagccacggctgtcacttgccaatctccctttggagcaaagagacagcaaatatcaggcctggagact

SEQ ID NO: 161174 - DNA, 122 bp, Homo sapiens
gaaagcccttggaggtggtctggttacctgggtgagctaggagccacagtcatcataccacggtcactagggccagcatggtcacctagaagcctgcaaacagtgccagcctccaggccctg

SEQ ID NO: 161175 - DNA, 122 bp, Homo sapiens
cccacgccccgcccagtcccccaggccctagcgtttacccccacgccccgcctcgccccgcgacccacgtaccccgcctccgagccccgcccccgcccccacgtgccccgcccccgagcccc

SEQ ID NO: 161176 - DNA, 122 bp, Homo sapiens
cggacgctgcgaggatgcacctccacacgtcaacctcccacaaacagcatggcttcgtggcgtgagcacccggttcggacctgaacgcctgggtccgagtcccacctccccctcctgcctgg

SEQ ID NO: 161177 - DNA, 122 bp, Homo sapiens
gatttattaaaactattacgtaatgttggaatcctaggaatggagctgaatgtgattacacgtaacaaactacaagtatacattgagaattcctctggagtgaggagttacaactcatactt

SEQ ID NO: 161178 - DNA, 122 bp, Homo sapiens
agccgacagtgccacagcggagcgttctcccagctctggtgccgacagcctgtgcagtaacgcgtcactggaccccgcgtgttgccacggtatggccgctgggaagagcctggcaatgtctt

SEQ ID NO: 161179 - DNA, 122 bp, Homo sapiens
tactggcttctacaaagaaataattctctcaataagtcacttgcatgagaaaccccgtctcgggactcctctagggaaccctacctaagtcagaggcaagtgggggagcagcaaccaaagta

SEQ ID NO: 161180 - DNA, 122 bp, Homo sapiens
acgcggggactggaaagggcgcctgggtgggaagaggcgctggcgggtgatcgtccccaccgggccagtccccgggatctgctgccgcccctctccgaaattcacagccagagcgggcgcac

SEQ ID NO: 161181 - DNA, 122 bp, Homo sapiens
atctataaaaaacaacacctttgtatgctttctttatagtgacttggaccatatttgttacggaagtactgctaaatcaagctttgtcaacaattcctagactatgtttagaagagacataa

SEQ ID NO: 161182 - DNA, 122 bp, Homo sapiens
tgcagccggaggtcagcccagcagagactgcagctggagagggcagtgcaacaccaccaccggcagctgctgctggaggggctggcccggtggaagacgcaccatctgcagtgtgtcaggaa

SEQ ID NO: 161183 - DNA, 122 bp, Homo sapiens
ttctccgcgtccgaggccagtttcctggagggagaggccagtccccctttgggcgcccgccgccgtttctcggcgctgctggagcccagccgcttcagcgccccccaagaggacgaggatga

SEQ ID NO: 161184 - DNA, 122 bp, Homo sapiens
atttatattagtatagttctctaggactaaatctaacacaagatgtatgagaccgctacacggaaaactataaaacatttggttaaatggaggaacataccacgttcaaggattgtaaaact

SEQ ID NO: 161185 - DNA, 122 bp, Homo sapiens
tggagattatagggaatcattcccatatgtctccagtggagagctgctaatctctgtttgcgtggaggtgatttcctttggaaccctgcccagccttcaacagcactagggctgaacaaatt

SEQ ID NO: 161186 - DNA, 122 bp, Homo sapiens
tcaagcaaaaaggaatttggtgactagagtgctttccctcactgatactaaaaccagagacggaaaagaaagatggggattgtatgaagctctctttcttctccttttccctcttatcttta

SEQ ID NO: 161187 - DNA, 122 bp, Homo sapiens
ggggcggtgggtggccgggagagggggacagaagaggggcgcccagatccccccaacctgcggctctgcaatgcaccaggaaacaagccgccaatactctatgccccagtttctccatctac

SEQ ID NO: 161188 - DNA, 122 bp, Homo sapiens
tctagatttcctcttggtcgcccctagtttcccactccgacctcggcttcctccgcaagccgagcgccccttccctccgcactccactcggaagccctggcgtctctttccgggggcggcgg

SEQ ID NO: 161189 - DNA, 122 bp, Homo sapiens
tctcttctcgctgccatcggatgccccaaataggtcctgtcccctcggtgaatcagacttcggaaaccgcctcgcttcagggtcagagtccaagtacagatgagcttgaggattctgaatgc

SEQ ID NO: 161190 - DNA, 122 bp, Homo sapiens
tcctctgcgcgtccgagtgtttcatgttttgagtcccgcccgagtgacccaagccagtaccggggtgggcgctttccacccaacctccacttgaggacccagcttattcgtgagaccttgac

SEQ ID NO: 161191 - DNA, 122 bp, Homo sapiens
cccagaaggctctaattcaccttgactttgggcgatctttgcatttctctccagtctacacgagatcatgagataagcaatatacttaaccttttggagacttgaaatgctgaattcaagca

SEQ ID NO: 161192 - DNA, 122 bp, Homo sapiens
gctcccctcgtcgcagtttccagcccgacgagcttgttttgtcccggactcggtaggtggcgacgggccgtggcctgagacctccggcgaaacgcgggagcgaagggctgagtcctccctcc

SEQ ID NO: 161193 - DNA, 122 bp, Homo sapiens
tcaggagatttggctaaatagtgatgtctgcaagcttagggcctcactgggaccttctaacgttcacataggctttgaaatttacaaaatacagtatcatacattacacatcatatattatc

SEQ ID NO: 161194 - DNA, 122 bp, Homo sapiens
aagaaggaaggtcaaaatcaggtgtacgaggcccgtgtgccccgccccgccccaggcggacggctgacagcgccccaccccaggaggaggcgggacttcctcaccgcagagtggctgcttcc

SEQ ID NO: 161195 - DNA, 122 bp, Homo sapiens
cgtcaccgtcaccgctgtgccagggagaaacttcggctggattcaggcccagagctggggcgtggcagagctggggttcaggcggggacccccgcacacagcctgctcctgttttctgggct

SEQ ID NO: 161196 - DNA, 122 bp, Homo sapiens
agcttgaaaaaaatagtacggacacagctgattcaccagggtgactcatacctgggatcacggcgcctcgactcggcttcccatggcctgtcgtggcttgcgaaggaccatggcaacttgaa

SEQ ID NO: 161197 - DNA, 122 bp, Homo sapiens
ctaaaatcctaccaaccctcaaaggtcttctactccattaagtgagccctgaacctctgacgctttaacaactgagcaacttgtgatgacttgatccctccacctcctttaaatacccacac

SEQ ID NO: 161198 - DNA, 122 bp, Homo sapiens
acttttccgagcagtgggaagtgctcacttcggatccactttggctcagggctgtgctgacgttttctccgctgtcactcatccaggcaccatcagcacccagtgggcatcagacagcaccc

SEQ ID NO: 161199 - DNA, 122 bp, Homo sapiens
ttgagaactcaagctgttttactccctctgtgcttaccctaaggcagagtttctcaactgcgacactgttgaccgcatgaacccgataacttgtggttgtgggggctgtcctgccatcacac

SEQ ID NO: 161200 - DNA, 122 bp, Homo sapiens
cccacccccagcacatcttcaaaggggcagaactgaaggccatgcacagggcctgagagccggtgggtgaggtagggctgttcaagggagggtgggctggccttgccctgccctgcccagat

SEQ ID NO: 161201 - DNA, 122 bp, Homo sapiens
ggcaagcctttttacagagcatatgtctccagttggcagcttgagatatttccgagcatccggttctagctaccagtgcctcccaatgcttagtgcacagtactgtagactggccatcaccc

SEQ ID NO: 161202 - DNA, 122 bp, Homo sapiens
ctccccgcctcctatgaggcctgcccactctgtgtgctgcccgctgcagcgggcagaggccgggcctgggaggggcagcctgcgagcagctcagggaaaggccctctcacccacaatagatg

SEQ ID NO: 161203 - DNA, 122 bp, Homo sapiens
ccgaagcgtcgggaccacaggcggcgagccaccggccggcctctgtgtgcaccgaggagccgggcagccaccgccacgatccagctttaggacatttccatcaccccactcagccttcctgc

SEQ ID NO: 161204 - DNA, 122 bp, Homo sapiens
tctccagacattgccaaatgtcctctgcggggagcaaaatcgtcctcacttgagaaccaccggtgtagcgttaatcccaaaagtaggaatgtttgcatcaaggggcgtgacaatgagtccat

SEQ ID NO: 161205 - DNA, 122 bp, Homo sapiens
gagagtcaaaggaaggtgaccaaggatggccccctccactctattccccagaccaggaagcggtagacaggggccagaaatggattttaaaggcaaagttctcagacccactaggaccatga

SEQ ID NO: 161206 - DNA, 122 bp, Homo sapiens
tgggggcggtgggaagcgctccgcgtccgggctctcagcgttccctggcctgccccggctcgctaggctttgatggctgcttccgctccccataaaggcctgtttcatggccgacgccggca

SEQ ID NO: 161207 - DNA, 122 bp, Homo sapiens
tcctgggtgcccacgcagctgccatcacggcctatgccctgacactgaccaaggcccctgcggacctgcggggtgttgcccacaacaacctcatggcaatggcccaggagactggaggtgag

SEQ ID NO: 161208 - DNA, 122 bp, Homo sapiens
gcattcagaccagatgggaaacaacccctaagaattccccatgctggtgtttgctgtgtacgttggcctgggacctcaaggctagaatgcaacaataatgaccatgcacagacagaactgtc

SEQ ID NO: 161209 - DNA, 122 bp, Homo sapiens
tgcagtattatatatgaaatgtttcctattagaatcaaagttcccacaatggaacatgtgcgacaatactaactaaacactaccatctagtggccagttttgagaactacaaaagctcgcaa

SEQ ID NO: 161210 - DNA, 122 bp, Homo sapiens
tagatgcccggaggcatttgctcgggaaaggaaatgaatcgctaaaacaggattagcgcgcgcttgcccttggtggacttgacaatttgtgtaatgcagagctttgataggctctggcaaaa

SEQ ID NO: 161211 - DNA, 122 bp, Homo sapiens
gtgtgactttgtcttcttattccacagagagaaccatctagacagtgtcctaacgcagtacggtctgtggcctctgatgagcatagataactgccccagccaagaggctctgaaaggctgca

SEQ ID NO: 161212 - DNA, 122 bp, Homo sapiens
catgccctcagtcggctcttattcttgtacaagacgtagtctttgccagtgctcttattgcgaaagaaattgattccttccttaagactggcaacttcaacaggtgataggcacaacaggat

SEQ ID NO: 161213 - DNA, 122 bp, Homo sapiens
tctggacagcccaaggcgccaggatgcaacctgctttcaccagactgcagacccctgctccgaggactcttagtttttcaaaaccagaatctgggacttaccagggttagctctgccctctc

SEQ ID NO: 161214 - DNA, 122 bp, Homo sapiens
cactgtctactcccgctccgagcttgtttacaaccagggtagccatcctcgcaggggaagcgccacagaaacagccttcagagtcctcaactgagaggcggggttgagccacctacccagag

SEQ ID NO: 161215 - DNA, 122 bp, Homo sapiens
cacgccgtgtcagagggcaccaaggccgtcaccaagtacaccagctctaagtaattctaacgtcttcatacccaatcccaaaggctcttttaagagccacccactttttcagctatagagtt

SEQ ID NO: 161216 - DNA, 122 bp, Homo sapiens
ggcgtctggcggcatttgagcagctgccagatctcccctggaaacactggggtgtgtgctcggtgggtgccgtgtgtggggggtatgtgctcggcgggcgccgtgtttgtggggtgggagct

SEQ ID NO: 161217 - DNA, 122 bp, Homo sapiens
tacccatactccattctccaaaccttattctttatactccattctctcttgtcttttctccgcactcctttctcctttctccatgcttcattctttatacaccattctccattctccatttt

SEQ ID NO: 161218 - DNA, 122 bp, Homo sapiens
tgcgacagcggcgggtttgctgatgattggtcgggaggccgccggcgaggcggatgagggcggggtgcggacccgcttccggttgggcggtgcttgcgcgcgtgagctgagccggtgggtga

SEQ ID NO: 161219 - DNA, 122 bp, Homo sapiens
aggagcgccgggggcatagcaagagcccgggactcgtctgatgaacgaacaagtagtggacggacagatggacagactgaccaacaggccggcagtggacggggtgtgtgcagatgaaaggt

SEQ ID NO: 161220 - DNA, 122 bp, Homo sapiens
tgagagattctggccctaatcccttcccctcccagaggagtcactggctccccgcgcccccgtcacgcctggacgactgtacccagtctcggacgctttggaggtgctctggcactggaagg

SEQ ID NO: 161221 - DNA, 122 bp, Homo sapiens
tagttaacggtctatgcttcatcaacgttttccgtttaaaacctgtgtgcggcccacacacgtatgacattctgattatgtgattcactgctgaaaaagaactggacgccaggaaattgggg

SEQ ID NO: 161222 - DNA, 122 bp, Homo sapiens
ggcaggcgggcgggcgggcgcgggtggggggcgggggcggcactccagagccggaaatggcggcgacccccgggccggggctgcgcgggcgctcggggccggagctgctgcgacgccgcggc

SEQ ID NO: 161223 - DNA, 122 bp, Homo sapiens
tcctaccgctgccgccgcggggcccgggaccccggccacccggcccccagccgccgcccgcgtcgcctccgctcctgggactcgcagctgcggcctcctccgctactgccgcaacccgcccg

SEQ ID NO: 161224 - DNA, 122 bp, Homo sapiens
caaggcgggggaatgccccggggccggtccggtcgcgcccagggtccgccggtagcgtcccggcccaccgcttcccgttgcttttgtctcggctccaatcgagagacggagagcggagcggg

SEQ ID NO: 161225 - DNA, 122 bp, Homo sapiens
gctttgggaacctcagttgcctcggttggaaatggggctccccggcaggaccgaggtggccgcgtgccatctgcgcgagtccctgggtccctcgatgcgcgggggcgactgctgccaccgcg

SEQ ID NO: 161226 - DNA, 122 bp, Homo sapiens
cgcgtaggcaactcgtctccacaggatagacacccaaagggccgcagcgccgcccgcacccggagggtctgcgctctctacaaccgccccacgccgttcccaggcgtgctaccccgcgcagt

SEQ ID NO: 161227 - DNA, 122 bp, Homo sapiens
tttatttctgaactttttgcaatgtccgctaaataacaacggcaaatgtaagtgtttccccgagtgccgtgagctcttccagcaaatgaatgcaactaaatctgggagtggtggcaacctga

SEQ ID NO: 161228 - DNA, 122 bp, Homo sapiens
actgcccacgctttttgctcttgagcctgtcagttgttcctcttccaccgtctttttaatcgtatctgtcgccttccctcctcccacttcttcctactctttctctctccaccccttttccc

SEQ ID NO: 161229 - DNA, 122 bp, Homo sapiens
gccaggcagcacgtagctgctacggcaggcatggaggcgttgccatggaaactgcccaggcggcctttccactcacaacctctaggttcctttgtttgtgtcatccgtttctaggagataca

SEQ ID NO: 161230 - DNA, 122 bp, Homo sapiens
ttctgccgctggatatgtgaggggcacagcacagggctctggaagtccctgctgactgctcgaagcctttctccctgctaaaacctctgaccaaatgcttaataatatctgctgtaggctgt

SEQ ID NO: 161231 - DNA, 122 bp, Homo sapiens
actgccttacttgcttcatctctctctctctttattttctttcgtttttggacagagtctcgctctgtcactcaggctggagtgcagtggcgcaatcttggctcattgcaacctgcacctca

SEQ ID NO: 161232 - DNA, 122 bp, Homo sapiens
ctcctgaatccagagactcttgttttaataagctcaccagatgataccaatgtccgctgacgtttgagaaccactgcttttccggggcggtggtggtgggtggcggggggtgttggtggggg

SEQ ID NO: 161233 - DNA, 122 bp, Homo sapiens
gaccgggacctggaccgcgaacgagatctggagaccgacgaggacttggacttggaccttcgtgcggatctggacttggaggtcgaccgagatcgagaacgagtgcgggaccgagacttcga

SEQ ID NO: 161234 - DNA, 122 bp, Homo sapiens
cacaaagtatgtaagttgaggcctggggatgtggactggtcactaagccggcaccgccaccgccccaccacttacttcctgcctgatttgccgttgacccggagcagccagggctggtcctc

SEQ ID NO: 161235 - DNA, 122 bp, Homo sapiens
ttgttaccctcaggcaaatgattgatttagaaaggccccaggggctattttttgcaggaacggtcactccctaaatccaggcagggaaagggaggagtctgagccgagtcacgccccttctc

SEQ ID NO: 161236 - DNA, 122 bp, Homo sapiens
tgacgccgacgtgggtgtgacaagtgtccctccaggtctgcccacaaaacactggcctggcgctgtgccctgctttttagacacaaacggcgttggggcagctgtggcctcgtgccttgccg

SEQ ID NO: 161237 - DNA, 122 bp, Homo sapiens
tgtgacctccctcctttagcctgcctgaaaaaagccaccaccctaccctttctctgacaccgaaatgacctccactggatgtaagattcatgaggacaggggctgacctagtctctcttctt

SEQ ID NO: 161238 - DNA, 122 bp, Homo sapiens
tcgtgggggcggggacagggggacgaaaacaaccgcgtcctcagcctgactgaacaggctcggactcctccgacggcgccgcgccgcgcacagatgagcctttgtgggaccccgcggaagga

SEQ ID NO: 161239 - DNA, 122 bp, Homo sapiens
tttcaaatgaggcccggctcgggtgaggacctgacaattccccgtcaggatggcagatgacggctaaaattacccggaatcaatattctcaccgggtgtcccgggctgataagctccgccaa

SEQ ID NO: 161240 - DNA, 122 bp, Homo sapiens
ggtgggtcatggggcggtcactactcatctctgctgttgttccacgtggcctctctcggccgctacgggaagaagggaatggtttctttaaggaacgaggctatttataaaataactataaa

SEQ ID NO: 161241 - DNA, 122 bp, Homo sapiens
gggcggctcgtagccccaccatttaaagagacagcagcgagaccgggagccttactgcggcggaggcttccgacggaggcgggaggcgggcgcggagttgccgaggtggcgggagcgcaggg

SEQ ID NO: 161242 - DNA, 122 bp, Homo sapiens
aatgttctgctctcagtcatgttctaaccacaaggcagcaaacactggcgcagctgagcccgaggctggggctgcagtctgaacttttacattactcagttaattacaaagccagtcaaatc

SEQ ID NO: 161243 - DNA, 122 bp, Homo sapiens
aggtaagaggagcatattgtaagttctggtctcctttttttcaaatggaccctgtgttgccgcagaacccatggtgccacccactcagaaggcttcctggatggctctgtgcatgcttaaga

SEQ ID NO: 161244 - DNA, 122 bp, Homo sapiens
ccctggaaacccagagcaggcggccggacctccctgttaaatgcagacggtcagtcctgccgggtcagttgcagggcgtgctgaggcgcacgccagacggtggagggaaaagcgttgccgag

SEQ ID NO: 161245 - DNA, 122 bp, Homo sapiens
gtgaaagacctgtgtcaaaactgcattacaattaaattctcaaagctcctgttttactttcgcagactatggttctgtgactctgggttgttgcatttaaagttatcctcattctctagcca

SEQ ID NO: 161246 - DNA, 122 bp, Homo sapiens
gaaaaatgaaaaaggaactattttgtggcttgcttcattgatttacattaacctgcctggcgctgtggacacttcagtttgcatccgccttctatgcatcttgtatatctctctaagttcta

SEQ ID NO: 161247 - DNA, 122 bp, Homo sapiens
gatctgatatactgtgggtgtttgatattttctgaagtgcctccacaaattcccagattacgtgcataaaacacaaccggaacactaacacgtagacatagatatatcatatacatcattcg

SEQ ID NO: 161248 - DNA, 122 bp, Homo sapiens
aggacaccctgtctccacagagcccacaagctcgcagccttgtcaaagacacctccccaccgcccatacagggtctaactcacgggtgacacatgggctcagggttatatacacacggcaca

SEQ ID NO: 161249 - DNA, 122 bp, Homo sapiens
agttaagcaacgatggactccagggggaaaaccggagaagaagaaactgtaattccagtccgtccacatggcccagcagtgaacgacaattgcatggtcagagagagcaaaagcaccacgcc

SEQ ID NO: 161250 - DNA, 122 bp, Homo sapiens
cgccagtccgcggggacagtggcggccgggatgtggccgagctcttctaccggaagctgacgggactgccaggagacgagtccccggttgtcatggtaaccagtggcgggaggcgggtgagg

SEQ ID NO: 161251 - DNA, 122 bp, Homo sapiens
cttcttcagctcctgccggggagaaagatgcgaatcagatggagtgggctcgccgcgacccggggcccctccaccaggcagccccggcccctcactgatcccatctcgtgcgagataaaagg

SEQ ID NO: 161252 - DNA, 122 bp, Homo sapiens
cagaatggcggctccagaggcggtttcaagtttcataagtcaggtaacactgtgggtttccgccttctcggacgcggggaaaggggagacaggaggcttccccttgcgcggggtgggtcggt

SEQ ID NO: 161253 - DNA, 122 bp, Homo sapiens
tgcaggtcccaagccctgccccacggggaggcggttgaggcccagcgagaattcaagcaccgcacgggctggccagcagtgtcagcggacccggggcaccctccgcagctgctggcctgggt

SEQ ID NO: 161254 - DNA, 122 bp, Homo sapiens
aagccagcgaggctgctggattttctcgaagggtattgagttgctaagcaacagcactggcggcgcctatcatgcccagcgatgtcaatgcctgagtgtggcctgcagagcacatttgctcc

SEQ ID NO: 161255 - DNA, 122 bp, Homo sapiens
tttgtgggcggggcctctggagagctcccgggggctctcttctgttctgcagcgagtaggcgtggctcgtagctcccaggtccgggctgataccgctggagtatgcagttcgccgccgcgcc

SEQ ID NO: 161256 - DNA, 122 bp, Homo sapiens
ttcttctgatttttacagaaaacattttcatagatctccaaaagtatcgtgggccctaagcgctgtagctaagtcgtttctcctttctcagcctccagtctgacatgttccactatggcctt

SEQ ID NO: 161257 - DNA, 122 bp, Homo sapiens
cacctcgtggttcttctccccgaattccagcaggtgcgcaaagcgtggaatatacaggcacgggtctgcggcagacacagcacctcagtgcccacctccatgtgccatggcacgtgcacagg

SEQ ID NO: 161258 - DNA, 122 bp, Homo sapiens
gagatgcaaggggtgaaggagcgcttcctaccgttagggaactctggggacagagcgccccggccgcctgatggccgaggcagggtgcgacccaggacccaggacggcgtcgggaaccatac

SEQ ID NO: 161259 - DNA, 122 bp, Homo sapiens
ttcccaatgtgggctggaatttccaggctaaagggcgagcattgcactggctgatgtcaccgtccagtagatgcctagtttaggcgaggagccagctctggtgtctgctgttagcacccaga

SEQ ID NO: 161260 - DNA, 122 bp, Homo sapiens
gccaagtactgaagtctgctctgagccatgagaaggaacctcacacttgttccccagctgcgttctcgaagaatcaagccaaaacccgccacacaagagctttagtacatctgccagaaaat

SEQ ID NO: 161261 - DNA, 122 bp, Homo sapiens
tgagcacttggtgccacacactgtttgggaacaggaaatctgcaataatgttctccctaccgtcaagtaggaaaacagcaatacggtgaacaataggtgttccatcagttatgtgaccttgg

SEQ ID NO: 161262 - DNA, 122 bp, Homo sapiens
ggcggaggaagagcttacccccagcagtggagatggcctgtatctcctgaccatggagttcgccggctggctgaacggctccctcgtgggattttatagaaccacctacacggagaacggac

SEQ ID NO: 161263 - DNA, 122 bp, Homo sapiens
agtcccagaggggggatgtcttactcctttccgtgaagcaaaccctttgagtacggtttgcgtccacaaagcgtagggtgagaaccttgggagcgactgggcccgtctttgctccctcggtg

SEQ ID NO: 161264 - DNA, 122 bp, Homo sapiens
ggagccgtggctgcctggactcctgggctgccccaggagccgaggacagccaggtggaggcggctacggctcggcccgaacccaccacggcctcccctgcagggacctgtgtccagcctcca

SEQ ID NO: 161265 - DNA, 122 bp, Homo sapiens
gattctccagaaccaacgaaacgtatgctttccttccaagggttagctgagttggcacatcgagaatatcaggcaggagattttgaggcagctgagagacactgcatgcagctctggagaca

SEQ ID NO: 161266 - DNA, 122 bp, Homo sapiens
ctccgacaccttcccgcggctgtgccgcgaccgcccggccggcgggacagacgctgggaccgctacggaaccgccagacccacggcgcccagccccagctgagccggactgagggcgacgag

SEQ ID NO: 161267 - DNA, 122 bp, Homo sapiens
ggggtgggagataggggtgcgtacctgtaggcctgggggcacccggggcgggggggtggtcgccgaactctgtgcgatcactggaggaagggactgggggtcatttgagggatgaggaaatg

SEQ ID NO: 161268 - DNA, 122 bp, Homo sapiens
caggagaattccacacgagcatttctagcccggctgggtcaccgggtaagatctgggcgtcggtcttgtcatgggaattgaagagcactttcagaaaagcaaattgggtttttgtttgcgat

SEQ ID NO: 161269 - DNA, 122 bp, Homo sapiens
acaatagtactgtttttgatagtccgattcatccgctccacctttccggaactctgaggccgggaggcggcatgcagtttgcgtgtgatccccaatacctttgcggtcttctgtaccaaggc

SEQ ID NO: 161270 - DNA, 122 bp, Homo sapiens
ctacctgctctgtgataccaggcaagttaaagtcttgtgtgcctcagtttcctacctcaccgtgttatggtgattaaattaatatatatgtggagtacttgacacacagtcaagcctgcgat

SEQ ID NO: 161271 - DNA, 122 bp, Homo sapiens
gatatccctgccttcatgaaacttacattctagagatatcaacagttttaagtatctgtacgcatactgtcaaatcacttttagaaaggtcgaactattttataactccagtacataagtag

SEQ ID NO: 161272 - DNA, 122 bp, Homo sapiens
actgacggcggctgcgggcgtcggagtcgtcattcctcggtccaggacttgcgtgggtggcgtggtggggggagctggccggccagtcctcagccctgcgccccgtacaccctgcggggcct

SEQ ID NO: 161273 - DNA, 122 bp, Homo sapiens
tcgggattcaggaagcaacagagaagggtgtcccgagtggtcgtctttgcctcttctgttcgttcagcaaattctcattaaaagcccccatgccagggatgcctatgagttttctagccttt

SEQ ID NO: 161274 - DNA, 122 bp, Homo sapiens
tctccagccccatgccctctccctgctgtctgcaccctgggcagcatgaggctggagagccgagttcattcttgtggtcgcccctttcctcagggcctacttggaagtgcaccagcaggagc

SEQ ID NO: 161275 - DNA, 122 bp, Homo sapiens
cccctgttttgcatccccctaccttccttttagaggatgtaatcatactggagagttctccgtgtgaaggcttgaaaacaggatacccctcttccttctctgggcttctccaggaagatgct

SEQ ID NO: 161276 - DNA, 122 bp, Homo sapiens
ttctttggggacggtcttgttctgggaggttttcctgcctcctcacagcctggactcgcccgcacctgggacctccccctccccatttcccagggggcgttcccatcttagagtaccgcgct

SEQ ID NO: 161277 - DNA, 122 bp, Homo sapiens
ctcgcgcgaagccactcgggcgcccgcaggcccggccggcccggcgcctcttggagctgacgccgcccgcgccatcttgaccgagggcagctttccactatttccgttccttctccataagg

SEQ ID NO: 161278 - DNA, 122 bp, Homo sapiens
ctcgctagttggggcgttggccttccttaggagtgtgagtctagcgttatcccttttttccggctggatcccgggttaccccaccagcccgacctcaacccactcacgtccacagcacgagc

SEQ ID NO: 161279 - DNA, 122 bp, Homo sapiens
taggaatgtgatagagaatttcccctgtaggttcttcgtatggtgcgctccgctggatcacgtgagccagttccaaaatggcggcaggggtggccgggtggggggttgaggcagaggagttc

SEQ ID NO: 161280 - DNA, 122 bp, Homo sapiens
tggctggcgtttcaacgcgacgcccagaacaggccgcacagaagctgcagggctccgccacgtcccaggcccccaaaccagagaggcccaccgtgtgctcctagtcagtcctccaaggcccg

SEQ ID NO: 161281 - DNA, 122 bp, Homo sapiens
tttccctgaagtggctggggttcctgtttccttctttgattgacaacttgtgttaaccctcgcacatctctgggccaatttttgcttgtaagtctttccggagacccctggaatttaaatca

SEQ ID NO: 161282 - DNA, 122 bp, Homo sapiens
actgctcccaccctgcgcggccaggagcggggctggcgatactggggacactgtccaatccgggcagggggcgaggccgggggaccgggcgggcctggggagcaggcacgtgtggagggcgg

SEQ ID NO: 161283 - DNA, 122 bp, Homo sapiens
atccacacacctcggcctccgaaagtgctaggattacagtcgtgaaccaccgcgcttggccgcaacttgatttttaaattgctctctgagtgtagattccttgtttgtttggcaagggttct

SEQ ID NO: 161284 - DNA, 122 bp, Homo sapiens
gagactcgggctcttgaaagcacgacgtgtttcatggaaaaagagggagtggccggccctcggagcccgggctgccccgaaacctccctcggcgccctgtttgttttttcagcttctctcaa

SEQ ID NO: 161285 - DNA, 122 bp, Homo sapiens
acattcttttgacttgagaaagtcagactaagagcagcggctaagttccatgtgaagccccgctaaataagcgtatctgcatgctttcacattctggcaggacaggattcctcccctttcat

SEQ ID NO: 161286 - DNA, 122 bp, Homo sapiens
gatagtgactgtagaggtaagggtgggagggtggagggaggcggattaatcccttaattacgccgtgatcggcgtggcacctgctttccgcctgcccagctcccaggggactccggcactag

SEQ ID NO: 161287 - DNA, 122 bp, Homo sapiens
ggtcccggcggccgcgggcgcgggcgggcgcgcgggggagcccggccgagggatgggctgcgcccccagcatccatgtctcgcagagcggcgtgatctactgccgggactcggacgagtcca

SEQ ID NO: 161288 - DNA, 122 bp, Homo sapiens
ttcctgggcatgttgtttgtttcaacatctgatagattcctatgtatattccaggtttaacgtggttaagggctaagcacaggaggcagggaatgggagggcagtagactgcctgttttcta

SEQ ID NO: 161289 - DNA, 122 bp, Homo sapiens
ggaccatctatgggaactgctgtgttccagctacagtacctgctggatctcctggggtcccggctgtgggtggccagccagggcccttgcctgtcctgtgaaggacatccccagagacctgt

SEQ ID NO: 161290 - DNA, 122 bp, Homo sapiens
gggagcgctcctgcccgggtgtggggtgtgagcctcagcctctgtccgcccggcagcgcgcgtgcctcccttggtctggcctccctcggcccggtcctggcactggccgtgctagctggccg

SEQ ID NO: 161291 - DNA, 122 bp, Homo sapiens
caacaattggttgcagtcatcggatgcaaggatagtctctcactaagtatatacagcagtcggattacacatatttttcttttataaaactataaccacaccgaggatcatttcctttcatt

SEQ ID NO: 161292 - DNA, 122 bp, Homo sapiens
cgttttgacaggccgctggtacccacagaagcctggaactgagggggcccaaaatcatctcgggcaacaccacccgtttatatcgtaatagcgcaagactccggcgcccgaatcacccagag

SEQ ID NO: 161293 - DNA, 122 bp, Homo sapiens
tcaggcttctttctcagtggttacattgaaactgctctctcaaaaatcctgagtgctggccgggcatagtggctcaggcctgtaatcccagcactttgggaagctgaggcgcgcagatcact

SEQ ID NO: 161294 - DNA, 122 bp, Homo sapiens
gagctgggccaggacaaccctgagacacctgtcgggcggggcaggactggggctgcagggcgggactgtggggaggggactgtggggcggggcctgcagggcagggtgtggggcgggagctg

SEQ ID NO: 161295 - DNA, 122 bp, Homo sapiens
gagcgctgagccagacaaaggctccggagttgcgcttgctctcgggagccgggccccaggcgctgggcgccgaggctgcggaacctcgccgggggcagctccggtcggccccctttcccgcc

SEQ ID NO: 161296 - DNA, 122 bp, Homo sapiens
gagggccgccgggcaagaccatagccctggccctccaacgttaggctccctgagcccccgcgcagtctttcagctgcaaccagagaagtggctgcaggtctggggctggaggttgtggccag

SEQ ID NO: 161297 - DNA, 122 bp, Homo sapiens
aagggacggcacagtcagctatggccgcggaggcccggagatctgctctggccccggccccgcccccggcttgccctccgcgcggccccgcccccagtccccagcccggaagcggtggcgcg

SEQ ID NO: 161298 - DNA, 122 bp, Homo sapiens
ttgcttcagagggccggatctggctttgctcaggtggagcacctgccctggggccagctccgtccctggggtagggggagagctctctgggtggggcacagctttgcagtgaagggtacaca

SEQ ID NO: 161299 - DNA, 122 bp, Homo sapiens
tagtgagctgagattccaccattgcactccagcctgggcaacaagagcaaaactctgtctcgaaaaaaccacaaataaatgttaccgggatagttggagtgcagcaatccatccagattggc

SEQ ID NO: 161300 - DNA, 122 bp, Homo sapiens
tcgacctcgttagccaatggattgttggcagtttttacatttcacctcgcgatatctcagcgcctcggtcatcgttgagcttccggttatgtcctcagcgattggccaggacggaggggtgc

SEQ ID NO: 161301 - DNA, 122 bp, Homo sapiens
gcgctggcgggagctggctgagaagctggccaaggtctccaagcagcagatggacgcctacgagtctccccaccgggacaggaacggggttgtggacagcgaggtgagcagcggctgagctt

SEQ ID NO: 161302 - DNA, 122 bp, Homo sapiens
ctcagggaccaggacccaggcgcccgagtccccagctccactgtcctccgcctctacactcggggattctggagaccacgtcgacccgcaatgaactggaataaagattccagtctccagcc

SEQ ID NO: 161303 - DNA, 122 bp, Homo sapiens
agccagcctggatttataggtctgctgggagaaggctcagggacagatgttgcggtgagacggggagtgcatgtgattggggagcagaagagctacccttgccctccatgtccctttgatgc

SEQ ID NO: 161304 - DNA, 122 bp, Homo sapiens
tccggcgtccccccattagtgagtcttggctctacttatagcatctgacaccagaggggccgaaaatagcccctggagaagggggaggagggggctatttaaagggcctgggaggggagaga

SEQ ID NO: 161305 - DNA, 122 bp, Homo sapiens
ggccacgccccgaacgcaactgatttgttttcttacaaactcgctactgtgtagcggcaccgcgttgcccggcgcgcgaccttacggcgttccgcccacagggcctgcataaccagtggctg

SEQ ID NO: 161306 - DNA, 122 bp, Homo sapiens
cgtcctccacaatacacgcaagtgctgcccgcggtttgttgcctggtgttaccgtcccaacgcagaaggcctcctgcaggaaccctgcatcatgcctggggccccagcacactccgcggagg

SEQ ID NO: 161307 - DNA, 122 bp, Homo sapiens
ggtgacgtggcatggggacagagccaacaactgctagccaccatggctgggagggagccacgtgaggacccaggggactggctggggctggggaagctaaatatgtcattccatggagctgg

SEQ ID NO: 161308 - DNA, 122 bp, Homo sapiens
gcccctgaaccacgtgctgtcggctgagtgtcagtctcgggtgccctgggtggtgaggggcgggggagtcaggtgacctaggccaggtttcggggaaaggattcgaacttccgacgtccagg

SEQ ID NO: 161309 - DNA, 122 bp, Homo sapiens
gcggctgaaggtcaagaattggcggtagcccatcggtagcccagagacccaaactgtgtccgatgtgagtgaaggtcaccccagatcagtgcgtcagttccgttttggcggccaaatttctg

SEQ ID NO: 161310 - DNA, 122 bp, Homo sapiens
ggggtgttcaagaatctatagggattaagaaatcagggtaacatggagaagcattcttggcgaaagaaacagctcgagcaaagacagaggtggaaattggcctggcatctttaaggcactga

SEQ ID NO: 161311 - DNA, 122 bp, Homo sapiens
gtgttaatgactttgttctctttgaattcctgtgagattttattccctttggtgcccaggcgttgtgtgccacagtgatttctgcccagtaagacttctgctgtgataaaaaagaaactgca

SEQ ID NO: 161312 - DNA, 122 bp, Homo sapiens
agtgtgagccaccatgcctggcctagggttttagttgaaacataaagcatgggccaggcacggtggctcacacctgtaatcccaacatttcgggaggctgaggtgggcagatcgctcgagcc

SEQ ID NO: 161313 - DNA, 122 bp, Homo sapiens
ctccagtctgtgagtcctgccaggagtacttcgtggatgaatgcccaaaccatggccccccggtgtttgtgtctgacacaccggtgcccgtgggcatcccagaccgggcggcgctcaccatc

SEQ ID NO: 161314 - DNA, 122 bp, Homo sapiens
tctttaccatagccgaaaagaattcacagcacggacacacacaaggagtgggtttaggagcggaaagtttaatagaaaagaggagtgagaggaaaagcttcctaatgctgataaggcaggtc

SEQ ID NO: 161315 - DNA, 122 bp, Homo sapiens
aaccttaattgaatttaacaatgttcttgatttaataaaaagacccccacaatgtctgtccggactgtattcagtgcatccactttgcaaaggggctgcagacagtagtggctgacgaggtg

SEQ ID NO: 161316 - DNA, 122 bp, Homo sapiens
ggtaaccgctgagtccaaggcagccgattggaggtttcttcgctgaggggaggtgcgaaccggaagccgggccacgtgacccggaagcggcgtttgccgggcccgagcgcccgcgcgcccgc

SEQ ID NO: 161317 - DNA, 122 bp, Homo sapiens
agcccgggcaggtgggcgcgtttgacaggcagagaggaggagctgacgcgccagcctccacggtgctggcgtcactgcctctcctgcggcaccacgctgcggagcacttaaaatacccacgt

SEQ ID NO: 161318 - DNA, 122 bp, Homo sapiens
tgcatgcctgattggacggtttccagcccagcgtccctggttggataatgcttaaatccccgccctgtcaggctttgagtgacagaagatgtgatcagatgcgggttcaatgaagaaagagt

SEQ ID NO: 161319 - DNA, 122 bp, Homo sapiens
ccacagctaatcgggcttccatctgtcacccaggtgtcccttggccagagtcattgccctcgaggtttccctcagtgtggctggctcagctggctgcctgcgtgggcagctcctatcacctc

SEQ ID NO: 161320 - DNA, 122 bp, Homo sapiens
taatcatgcttacctcctgctatagccactagcattatccaagaacacactgaccttttgcggtgctacattccttggcaattatcctcactcttctcttagtttaatatttttactttctt

SEQ ID NO: 161321 - DNA, 122 bp, Homo sapiens
cagtagagcaacttcccaaacctgcacacagaggcacccacatgtcagcactgacacccccggctcactcagcatcacgtctcacatgcagaggggagtactccactgtccacataccccca

SEQ ID NO: 161322 - DNA, 122 bp, Homo sapiens
tctgccacccaggcagcccccagagaggcccagaccatctctggaaaaaacagcgccaggcggatgtaaagcagcttagacatagacttccgcggtccagggttacaaatcgttcctgaaat

SEQ ID NO: 161323 - DNA, 122 bp, Homo sapiens
gaggtagtagtaggactcatattttactgtccctgtagtcttagctcttcttagacccttcgactgttagtggaaaaaggcagttcaacactggtgcctgtcctcttgggacttacattcta

SEQ ID NO: 161324 - DNA, 122 bp, Homo sapiens
ttgcagaatgattagttaagtattttcacaaactccaaggagagggcagaaacccagctccggtggctgtgtatcaggcaaaggaagctgacacgtgcattcctctcattattctttccctg

SEQ ID NO: 161325 - DNA, 122 bp, Homo sapiens
gaaaacaaaaaaattaggggtattgattttgtagctgcgctaagtaacctttgctttttgcgtcccttggtctcagtcctagccatttcctatccaccctgtggctaatttgtcctttctgt

SEQ ID NO: 161326 - DNA, 122 bp, Homo sapiens
tgtttggtgggtatagtggctctgatgcttagtggtcaatggctggagtagtttggggcccggtggtggacgctaagtttgctcccagcttgggagctacaggtttttgagcaggggagtca

SEQ ID NO: 161327 - DNA, 122 bp, Homo sapiens
cggccggaccgggctttcctctgctcccgggtgtgtcgagtaaggctaggaagcagcggacgtgtccggggcgccgcgtggggaaaggagagcctgcggcggacggcaactccgcgattccg

SEQ ID NO: 161328 - DNA, 122 bp, Homo sapiens
aaactcgtgggaggtgcagatcgtatttatttagaagatctagcctaggcacttacaaggcgaagccctggggaaagaaacagggccaggtcggaggtagaagaggagactgggcgcccctc

SEQ ID NO: 161329 - DNA, 122 bp, Homo sapiens
tgcaggtaccggaggagtggggcggccgggaggggctaggtctaccggggctgcccgccacgcagatccgagcccagggaaccccctcgctcccactcccataccccacagacgcatccaaa

SEQ ID NO: 161330 - DNA, 122 bp, Homo sapiens
tataacattgttagtcaatgtaaattagtggaggggctgatacacagtatcctttgtgaacgcatgcagtttagaatagcacccattagataatgatggacagtagcctagatcaattcaag

SEQ ID NO: 161331 - DNA, 122 bp, Homo sapiens
tctgacgccgctgccgccgccgccgccgccgccgccctccgcagcccagctcgcgccccgcggcagctccgcagtgcactagccaccaccgccgccgccgccgctccgccagacctgctgcc

SEQ ID NO: 161332 - DNA, 122 bp, Homo sapiens
ggacgggacgcggagggggcagcgggaagtgggggcccgcatggctgcgactcttggcagcgccgcgggacagagggaaactgaggccggagccgcagactggacacccgagggggcgaccc

SEQ ID NO: 161333 - DNA, 122 bp, Homo sapiens
ccaacgaatgcataggtagggcgggccgtagtgctgggcacgccccatccccacagagaccgtgggagcgaaggctggggaatgaatggtgaagggcgtagcgtggatcctggcatttaata

SEQ ID NO: 161334 - DNA, 122 bp, Homo sapiens
gaattattataaaatagacctgtattcataacttagactctatttcagttttctacactgcgagcaatcataggactgaagggaaatttattataaagtcacctgggatattacttcataaa

SEQ ID NO: 161335 - DNA, 122 bp, Homo sapiens
ttttttggccaaggcaacacatcagcctggatcagactcttggcattccatgatggaccccgctccaatgatgattcatagcagccatgtgaggaatggagactttcacacgaactcgcctc

SEQ ID NO: 161336 - DNA, 122 bp, Homo sapiens
gcccatcgcgctacctccagaccaggaggtagggctaggctgcgtctgctcaactggtcacgtgtttctggaagctgcacggtccctgttgctctgctcctcattggttcaaagacaccact

SEQ ID NO: 161337 - DNA, 122 bp, Homo sapiens
cggcctaagtgggtcccacttcccacctcccacctcccacatacagctgcgctcggccggcgcccaggtgatacaagacttagtgtgcgacgcaggcgctgtgagctccctggatctggcgg

SEQ ID NO: 161338 - DNA, 122 bp, Homo sapiens
ccaaggaagttaaaaggcttggtatggatgttggtgtcagataggtctgactaacctctccgtgctgcagcctatactaaggtgacccagggccacatgtagacagctaggccagtgctttt

SEQ ID NO: 161339 - DNA, 122 bp, Homo sapiens
aatcaattcagtaatcccaagtgggtgggacctggataggcatctaaactgtatcttttgcggactgcttttttctttttaaaatattgtggtgataaacagagaagatatttgcaccttgc

SEQ ID NO: 161340 - DNA, 122 bp, Homo sapiens
tgattaggagccaaataaaaaggaaagttctttgagggaaggctggggttgtttggggagcggggtggagctgggtgtttaagtattgatatagggttaatccagacaactcttggcatgac

SEQ ID NO: 161341 - DNA, 122 bp, Homo sapiens
aaggagacatcggggctggggatgacatcccaaaactcccagcgccggggagctcaggctcgggcggtgcctggctcccctccccggttcccgccgcaggaggctgctgagtcactcccgcc

SEQ ID NO: 161342 - DNA, 122 bp, Homo sapiens
cagaggaggccttgtggaaaagttccaggaggtcatcccgcagctgctgcctgtccactgcgtggcccaccggctgcacctggctgtggtggacgcctgcgggagcatcgatctggtgaaga

SEQ ID NO: 161343 - DNA, 122 bp, Homo sapiens
ttttccaagtccagcaaattgtagacgagggaagattggtcactcggcaaacctcatgatcggcaggattgtcccaaaggtcacttgacagcgcacatgatcgatccaggatggcaaaatag

SEQ ID NO: 161344 - DNA, 122 bp, Homo sapiens
ccgcaggaaatctgggtctttctgaaggcatcttcttgtggtgtagtccccttggaaccgcggcctttagaatgaacatgacatcaccttgggcaacaacgacagagggtgtgttcctgtag

SEQ ID NO: 161345 - DNA, 122 bp, Homo sapiens
acctcgcggctcaggccctcgttggcctcggtggcatcatccagttcccgctggagtttacgccgagatgcgttggcacgcgtcgcttcttcttctgcttcctccagctggcgtttaagctg

SEQ ID NO: 161346 - DNA, 122 bp, Homo sapiens
ccaatttgtctggcacaacctccttccactcctcctaccctctcagtggtcaggaaatcccggagcagtccttgccctggagctgcttgtgtttttagtaaccagggactgagctgattttg

SEQ ID NO: 161347 - DNA, 122 bp, Homo sapiens
gctgcgctcagggctgggcaggcgtctgtcttcaggcggctctgggtgaggctggctgggcggggacttcagggagagggcctcgagggacaggacgtgaagatagttgggtttggaggcgg

SEQ ID NO: 161348 - DNA, 122 bp, Homo sapiens
caggttgtttcactttcatttatctctgtcatctgggaatacaatatagatagtatcaggcgcaacaaaaggtacattctgatattattttcagttttttgtctagacagagaagactaacc

SEQ ID NO: 161349 - DNA, 122 bp, Homo sapiens
tagactcgggcacatggggcaactttttttgtgttttgctctaccaggtcgtccctattccgtgggactagtgtctagccccatttcttcagcagtggagcctaggatgtagagctgcatac

SEQ ID NO: 161350 - DNA, 122 bp, Homo sapiens
ccctcatcctcctcctggctggtttcccttttccacccaaagctccacctcttggagaaccgcccaaaaaggctcaagcaaatttcctcctccagcagaggtagaaatctacattcagcctg

SEQ ID NO: 161351 - DNA, 122 bp, Homo sapiens
tgcagggtgcccagaaaaacaagggacctatgccagtgtgcgttaagggcctaggtcccccggtaggtgtgttatcaccagggtcattcagtatataattgtttcattgtttcgtgaaaaca

SEQ ID NO: 161352 - DNA, 122 bp, Homo sapiens
cgctgaaaatgaaggtatgaaaaggcatcatcatccgtggttcccacctggcataatgaccgtatcagaacagacatctggtagtatacaccacatagttgccagactccgataccaagggc

SEQ ID NO: 161353 - DNA, 122 bp, Homo sapiens
agtttggagccataaaacccaacccaggttggactctcacctctccagccccttctgctccggccctgtcctcaaattggggggctgatgtccccatacacctggctctgggttcccctaac

SEQ ID NO: 161354 - DNA, 122 bp, Homo sapiens
tgggggcgggagcgggcgagccgagaagctcgtcttggcgcgtctattggctggtactgacgcccatccggaccccgaggccaggcagttggccaaggggggcggggttcgcagagccccaa

SEQ ID NO: 161355 - DNA, 122 bp, Homo sapiens
ccccgtctccaccaaaaaaaatacgaaaaccagtcaggcgtggcagcgggtgcctgcaatcgcaggcactcggcaggctgaggcaggagaatcaggcagggaggttgcagtgagccgagatg

SEQ ID NO: 161356 - DNA, 122 bp, Homo sapiens
tctcttcaaatattttacagagttggactcttttcgttgacaattcaatgacgcttcaagcgtttttggcagctctcatcagtgggatccgcattaatagtgaaacggcatcatggcgcttc

SEQ ID NO: 161357 - DNA, 122 bp, Homo sapiens
ctggtctgtgctgccctgctctggggatgcacggcggcagggtgggggagggaggttcctcgcaggtctcagcccgggacagggtcttgcaagcagcctcctgggcagtcgtaagggttgcg

SEQ ID NO: 161358 - DNA, 122 bp, Homo sapiens
cctgcagccgagtcgactaccgagtggagcactgaacggcgcggattttgagaccgactccggtttttgtccttggattttaaacgtttttatcattgtttttgttttgctttctccttagc

SEQ ID NO: 161359 - DNA, 122 bp, Homo sapiens
ttggccacccaaagctactgctgctgcatttggttcaggtcggatgcatgagcccgagctcgtcctaaacaggcattctgaaaagcactggctcccccgaccctgtgagggcccatcacgcg

SEQ ID NO: 161360 - DNA, 122 bp, Homo sapiens
tcttcccgagcgttttccgagttggcgcggggggtggaggcggggccatggagcgcgtcccggggaccgttgcatccggaggcggccgtcgtgcggctccttcccgcctcgagagtgaggtg

SEQ ID NO: 161361 - DNA, 122 bp, Homo sapiens
agaggggtcccagggacagagtcccagagagcagctgggacctcggagcttggggtcagtcggcactggggacttcttgggtacctcttccctctccgtccccaagtgtgtgcaggcccagg

SEQ ID NO: 161362 - DNA, 122 bp, Homo sapiens
cccgctgccgccccgcccccggcctagaggacgggtctggggggagggggcgtgtggcgacgctgccatccaccagggcccagccgccgcccctccgagttgggccggtgccccgcgcggcc

SEQ ID NO: 161363 - DNA, 122 bp, Homo sapiens
gacaaaaccaaagcctaattttgctatgtggaaagtgatgcctggattgtcatgggaattcgatgagatcccatatgtgaacgtgctttgtaaactgtaaagtattacacatgattgggtct

SEQ ID NO: 161364 - DNA, 122 bp, Homo sapiens
ggtagcaaacagattcatttctcaaaatagccaggagtttgagagattaatatatgaagccgtacattgtagcgtttggggcctcctccaaggaaaacacttcacgctggtgtttatagagt

SEQ ID NO: 161365 - DNA, 122 bp, Homo sapiens
gctgggggtgtcccgttattttctcctgttctggaggccacaagttcacaatccgggggccggcagggctggtttccccagaggcctctcctgggttgccggtggctgccttctccctgggt

SEQ ID NO: 161366 - DNA, 122 bp, Homo sapiens
gaatcagacctcctgaattcacacccagctctctaaatcgtagcttaacctcaagcgaggcgcttagcagtagggccccccacttgtgaaacaggtaggacgaggatgcccgaaacttcaca

SEQ ID NO: 161367 - DNA, 122 bp, Homo sapiens
ccgccgcgcccaggccgacgccgctcgcccctgacccggatcagcgagtccagcgccgggcggtccagacacgtgaagttctgcaacagctcccacttgtcgcgctggaagctgcggctgga

SEQ ID NO: 161368 - DNA, 122 bp, Homo sapiens
tcagttcagctatgtgactgaaagacactgttcttcagcagctgtgagtttacaagatgtcgcacattgagtatttttctctagcttatttagaaacgccagtctagacttccgcagttttg

SEQ ID NO: 161369 - DNA, 122 bp, Homo sapiens
tgcccggagtggggagagggctctgctccaggtctgcatacccaccaagggctggcctgccgcagagctgtccccactgggctctgagaccctgggggtgctggggctccctggaggttctg

SEQ ID NO: 161370 - DNA, 122 bp, Homo sapiens
gccgcctcccattggtcgcgggcgcgggggcgaggctgggcggtgagcggtactgcacgccgggttccccaggctgcaaatggaaaggcgaagacaggagaatttaaatgagtttctctccg

SEQ ID NO: 161371 - DNA, 122 bp, Homo sapiens
aaaggggcagggcctgggctgcacaccttaggatgaagtttgctttcccatggctgggggcgggccatgacagggcctctggattaagccaccctgagctctccctccgctagcacacaagc

SEQ ID NO: 161372 - DNA, 122 bp, Homo sapiens
taaagcttttaaggccttcttgggagcgagtggctggctaatgagaggttaattttgtttcgaagggaaggctgcactggtttcctgagataaatggacaggaagcgcattacctccgcgcg

SEQ ID NO: 161373 - DNA, 122 bp, Homo sapiens
ctggcttcttctcggtctcctttctctgaatgaagaattccagtggacggcgggcccgcgcgacccctcccagggagccctcgcttcctgctgatttatttgttatttagtagttaagtttt

SEQ ID NO: 161374 - DNA, 122 bp, Homo sapiens
cgcccggcgcggagaccgaaggctggcggctggtcgcgttgcaggtgaggttgtgacgcgcggtgtggagccgcggcccgggtgcgtccctgtctggttcctgggcggggttcctggagagg

SEQ ID NO: 161375 - DNA, 122 bp, Homo sapiens
aatgaaatccttgatacttagctctgagaaccattagccttttactgaatctaggaaacacggccctctgacttcaaggctttgcacccatttccaccataccagatttagaggggagaaaa

SEQ ID NO: 161376 - DNA, 122 bp, Homo sapiens
cccagctccatgatcgtgacggtgtcctgggtgcgggacaggaacacgtagccgaagttccgggctgcggtgaccagcgccccctcgtcgggggaggccgcctggtacaacagctggtctgg

SEQ ID NO: 161377 - DNA, 122 bp, Homo sapiens
ttataagctaattcttatgcatgaaaatattgcaatcttggcaaaatatatttttgcatccgatggtcttagctgccttccagccttgcttaacaacttctaaaggacacacacaagtactg

SEQ ID NO: 161378 - DNA, 122 bp, Homo sapiens
agtagtgaaatatgttcactgtcattcggtgcagttttgtagactaacctgaaacgtacacgtgccaatgaccacataattattgccaccatatgcaattaggtttcctgaatccccattct

SEQ ID NO: 161379 - DNA, 122 bp, Homo sapiens
gcccagccccgccgacccccgccctgcgcacacgcccttggcgggccctggcctcgctctcgcgatccagagagtatggttttcagggctcctttaaaagaaaaagacggcgcggtcagggc

SEQ ID NO: 161380 - DNA, 122 bp, Homo sapiens
tgtagacaccgggatcagagattggctgagacacaccagaggccccacagtgacccagggcggagcagggtctagaacctaatagtcctgattcccacccctgtgctctctccgtggatgcc

SEQ ID NO: 161381 - DNA, 122 bp, Homo sapiens
cccagcttctggggccaaagacaggcctctgcctccatgctcctagtcccttccttgaagcggtcggataatcacatgacgagcctcaagcaagggacttcaagctggtggcttccagcagc

SEQ ID NO: 161382 - DNA, 122 bp, Homo sapiens
ccaaagagtggggagcgggaatggatacacccgggaacgactgcacgtcctgcgggcgcccggggaagaaggcagcgcagcacaaaacctctcctgcggtcacctcccaccccatcctgcac

SEQ ID NO: 161383 - DNA, 122 bp, Homo sapiens
gctcaaggctttctccccactcagtgtgggagagtggggtgcagggtagtctgagcccctcgggttgctgtttcccatgccctggcagaagcctcagtagtagtcatactcctgcctttacc

SEQ ID NO: 161384 - DNA, 122 bp, Homo sapiens
cttccgcccatggtcccgcccattcttccgcctccccaacctgggtcccgtcaacggacgcgaaggagaacaggggctgtatatcacttccggcgaaggaaatggaagaatctatgggctgg

SEQ ID NO: 161385 - DNA, 122 bp, Homo sapiens
acggccagctccctgcaaggaaaaaaatcttctgtggagatcagagcgctggcctcggaccgttggattgggcgagcatcttgggtaaagagaacagagctttatggctctgggccggcctg

SEQ ID NO: 161386 - DNA, 122 bp, Homo sapiens
gtgttatcttttggaaataaatcactccattgaacatggagaatgtggtcctcgtgtcatcggcattttcttcatatttccacctcagtggagtgatcctggctctgctttgccgctgtgct

SEQ ID NO: 161387 - DNA, 122 bp, Homo sapiens
ggggggagggcgcagcctggccagggctgactgacctttgcgtgccactgctgcttgaggcgacatagatagagagagtgacctccttaccgggttctggcgcggatggtggtgggcggctg

SEQ ID NO: 161388 - DNA, 122 bp, Homo sapiens
aatatataataaagctactgccttgcaaggacatacaaataaaaagatgaatactgactacgctaggtgagagggcagttaatggaagtggggaatggtaataaaacaatgccaggaaggaa

SEQ ID NO: 161389 - DNA, 122 bp, Homo sapiens
actggcctggacgacttgtactttgtggccctccaacttctggatgtgaattttttttcacgacttattattatgctcttcgtggtctttgtgttgaaaatcacggagctgtatttttattt

SEQ ID NO: 161390 - DNA, 122 bp, Homo sapiens
aggtagcaagcagcagaggccaccctgctcagggctgggtgccaggccacagggcatgcccgacgaacagggagtcggaaccccctcaggccaccctcgggagtcctggggtccagaggggt

SEQ ID NO: 161391 - DNA, 122 bp, Homo sapiens
gtgggaacttctcactcattggcttctttcccacacacctgaagagcactgactgtgtgccgggcactagtgatacaaaagagtgtgacagttgttcagtctgcattttcgatcatgggcta

SEQ ID NO: 161392 - DNA, 122 bp, Homo sapiens
aataaaagtagttgaaaaattctaaataaaaaatatgtaggagaggaagtaattcgcgagcgtcaactagcagctgcccttaggaagctggggtggccagtgggccccacgcaaagggaatc

SEQ ID NO: 161393 - DNA, 122 bp, Homo sapiens
tccggctgcggaggagctccctgacggtgctgtcggcctcaaataaatcccaaaaagtgacggtcgagctggcgagagaatttgggaaaccaacagacaaaatatacagcacagcccgtggg

SEQ ID NO: 161394 - DNA, 122 bp, Homo sapiens
cggacgaggacgaggacctcttcgacatcgaggatgacatcatctacactcaggacttcacggtgcccggtgagtctggcgggggcccctgcccggctctgctgactcggccaggatgtccc

SEQ ID NO: 161395 - DNA, 122 bp, Homo sapiens
ccccggggggaggaagccgaaggcccagagaggtcaagtcacttgtccatggccacacagcgaacagccccagaccgaaagcagagggcacctgccacagacacacgacatctccccacccg

SEQ ID NO: 161396 - DNA, 122 bp, Homo sapiens
cagcgtgacggaagcaagtaaccaccaaggcatcaccactggcgctaaacttctcacttccggagtgctgcaagcgcagaaaatatacgtcatgtgcggaggcggagcttccgccctgcgcg

SEQ ID NO: 161397 - DNA, 122 bp, Homo sapiens
gtgtgctttgtgttcgaaggcggaacgtgtggccaggcgttctggacgtgacatgtgtggcggggtccgagtcccgctgcgtgtcagcgtgtgtctgcgctggaacgcgggccagcacgtgt

SEQ ID NO: 161398 - DNA, 122 bp, Homo sapiens
cggggagaggggcgggacccgagcagtgacctcaggctaagtggccagagcagggttgtgcggcggctcagatcggatcttagggtttgttttttgtctgtccaaggaatttgcctaaccca

SEQ ID NO: 161399 - DNA, 122 bp, Homo sapiens
gggaaaacaagctgctcgagctttatttcttcggtgcaaccaactcagaatgaattcctccgcccctgcgtgctcagtgagtcggcaccctagcagtgaactgcatttaaaacctcaggaat

SEQ ID NO: 161400 - DNA, 122 bp, Homo sapiens
aatgacagggcagcataaagccacagacctccatctgctctaggacaatccagacagcagcgtggcaccaggcccaggtaaggcccgaccctcctccagcaaggacccgctaaggctatgcc

SEQ ID NO: 161401 - DNA, 122 bp, Homo sapiens
aggggagggccccaggtcctagtgctggcggtagcagtaaacaccgtacaagcggctctgcgggtcggggaagccaaagcttcggaccccaggctctgggggcccacagttaggatgcgggt

SEQ ID NO: 161402 - DNA, 122 bp, Homo sapiens
tcccctgtttccctggaggactttaccatgaaagtcttctgctgtgtgactttggacaggcgtcttggcctctctgtttctctttattcataattgaggctaaagtgacacctttgccatct

SEQ ID NO: 161403 - DNA, 122 bp, Homo sapiens
cgtttttgaaggagatctttttaaaacctacaagagacatctctctatgccttcttaaaccgagtttactccatttcagcctgttctgaattggtgactctgtcaccaataacgactgcgga

SEQ ID NO: 161404 - DNA, 122 bp, Homo sapiens
ggaggacccgcagctcgtggattcgcgcctcagtgcccaagctggtgttgatgggggttgcggtttcctgccactcactccccatgggtcctgtggggggcgtggggatgcggggagagggt

SEQ ID NO: 161405 - DNA, 122 bp, Homo sapiens
ctaagtgggtgtccctgtgcaatttccccaacacctgaaaacactcagggtgggccagagcgcccctgccccagaaaaccctttgctgccggaggccaggctgtggtgcagcgagctggctg

SEQ ID NO: 161406 - DNA, 122 bp, Homo sapiens
aggacgccccctgccccggagcagcgcgtccagcgggggtcggcgtgagctgtgtggaggcgcccaccctcccttgcagccagaggtaggaagtagaagggaaagaggagaggtcgctctgt

SEQ ID NO: 161407 - DNA, 122 bp, Homo sapiens
gcagtgtgggtttcgggcaccgcaggaacaaattctccaggttgcctctcacttggttctcgatactggttcgctttctctttcgggcctgcacgagggtttctgctttgcatatctcctga

SEQ ID NO: 161408 - DNA, 122 bp, Homo sapiens
acacagccgcggcctggcgcaggcggtgcggacagagggtatgccatggcgagacgctggcgcggcgcaggccctgccggccgggacacggagggcggggcacaggcgcagcaggaaggggg

SEQ ID NO: 161409 - DNA, 122 bp, Homo sapiens
ggataagctgggtgccttccccggcaatgggtagaggggatgatcagggtttgggggcagcgttcggatgcggagagggagctgctcaccttccatgtccatttgctgctgttgttttttgg

SEQ ID NO: 161410 - DNA, 122 bp, Homo sapiens
gtcagggtggtatctcccccggtgtggggtcgccacccaaccagccacttgggctgctggcgtgtggccactacaggtggctccggcagccccctgacctcactactcatggccatgatttg

SEQ ID NO: 161411 - DNA, 122 bp, Homo sapiens
aataatttctgaaagactgataaattatttctttttttaggaagattccaaatttggcctcgaagggaaatcaggtcatctttaatagagccacaaatctatagagcagaagctcccccagg

SEQ ID NO: 161412 - DNA, 122 bp, Homo sapiens
gcgccggctgccagcagagggcagcattgagacacgaacgagggagcgcccgcgaggcgccgcgggggcagcggaaccgcaggaccccagctccgtggcggctccaacctttcaagcgactc

SEQ ID NO: 161413 - DNA, 122 bp, Homo sapiens
atcacaagctcaaagcactccatttctgctaccatgaagtcaaggatggtgactgtgagccgcctgggacctgagctgcctgggactgtgactgaggcacccggggtgcctcttagggcctt

SEQ ID NO: 161414 - DNA, 122 bp, Homo sapiens
gggggctgctactccggagcggcgaactggcgggcgggggtgcgcctgtgagtgtgagcgcgcgtgtgcgtgtgtgcgcgcgctctcgtggccttccggcagctggcagctgtcccggcccc

SEQ ID NO: 161415 - DNA, 122 bp, Homo sapiens
cagccccagaggccaggcctcagccattcagacgcgggggaggtgatcgcagcacagggccgcgccctgcctctgccgctccgggggtccccaaggaagcaccaacgcctggccgcaggggg

SEQ ID NO: 161416 - DNA, 122 bp, Homo sapiens
ggaggccagagttatttagcgttaaatatcactagcctcccagcattttgggaagccgaccgaggcaagcggctcatttgaggtcaggagttcgggaccagcctggcaaatgtggtgaaacc

SEQ ID NO: 161417 - DNA, 122 bp, Homo sapiens
gtgatagtatccataactaaaacagtatgactagtcagtgtaggagaaatagaagcacctcgggatggcaggttatctaggagttttattcaagattttattgcctcaggatcagacagagt

SEQ ID NO: 161418 - DNA, 122 bp, Homo sapiens
cggtggcatggccaccaaagccactcaatcgagaaagaccgcggctctgtctacagctcgcggtgccacggccttcttggcagaataaaaatgtagacaagtaataacagaggataatgaaa

SEQ ID NO: 161419 - DNA, 122 bp, Homo sapiens
ctcccggacggggtggctgctgggcggagacgctcctcatttcccagacggggtggttgccggacggaggggctcctcacttctcagacggggcggttgccaggcagagggtttcctcactt

SEQ ID NO: 161420 - DNA, 122 bp, Homo sapiens
gaagcccgaatagccacgtgctgtctccaagactcagagcagagacccctaaagctgaaccggattcacaagaggagcagaggaccgcctcccgcaaacccgggaagtccttgagccctgca

SEQ ID NO: 161421 - DNA, 122 bp, Homo sapiens
tgaagggggctcttgggtggtctgtaagccgcggagctaattggagatggtttcacagcacgcagtggcttcggggtgagtggccggggctcgctcagcttctctgtgtagctgagtgatgg

SEQ ID NO: 161422 - DNA, 122 bp, Homo sapiens
tgccctgtggcagccggggcccaggtggattcctcctgggaacgacccctccctcctcagcgcgcactgtgccagagcagtacacaggtacaaagggcaaacgtgttcatgatttcatttga

SEQ ID NO: 161423 - DNA, 122 bp, Homo sapiens
cctggtccacatggctcccaagtacatcctggagcagtttctgcagcagaaattgctcatcgacatcacagagtacgagctagtccctgagtacgttgtcatgaccaaggaggaggtgacag

SEQ ID NO: 161424 - DNA, 122 bp, Homo sapiens
tatgcatactgaaagtaaatcaacatattaaaaagcaagagaaagagatcagaaaaggaacgacatttgttagtggtttctgatttatgagtctgaaggacctgtcacattgagcctcggca

SEQ ID NO: 161425 - DNA, 122 bp, Homo sapiens
tctcttccgccaggctccggaaccggacgtcaacgttgtaggacacgttgtagttgctggcgatgttctgcaggtgtgtccaggtcacctcctggaatctccggaactgtaaggaggacacg

SEQ ID NO: 161426 - DNA, 122 bp, Homo sapiens
tttactgctatacaatgatgtacagggaatcccaagacttcagggggtgtgttatttacacgggatattatgtgaatggtgccctttggagttggctatctctgcacccatgggaatcttct

SEQ ID NO: 161427 - DNA, 122 bp, Homo sapiens
tcggcttctaatcgggaagtaatctcagtgacgctggcggtgcagagaaccgagtctggacgcacacacacaaacacaccgcgggcctccgcagccttgcagacattctctccaacgctgac

SEQ ID NO: 161428 - DNA, 122 bp, Homo sapiens
aattctgtttctctcatattggtctctccattcttcagtttcccctaacacaaatatttccgcctcttctcccatctcagcgcctcctctgctctccctgttacattctctcttccctgtta

SEQ ID NO: 161429 - DNA, 122 bp, Homo sapiens
ggagacgccgggagaaggctgggtcccaccgttgggggcaggtctggggaaaccacaccccgaggggctggcggtgtgtactgggcagtggcagtagcagcagcggcagcaggaggaagaga

SEQ ID NO: 161430 - DNA, 122 bp, Homo sapiens
agggtgtcctagccaagccggcgtccctcctagtagtaccgctgctctctaacctcaggacgtcaagggcctagagcgacagatgtttcccagcagggggttctgaggctgtgcgcccagat

SEQ ID NO: 161431 - DNA, 122 bp, Homo sapiens
aactcgattgcagatgagcagaaaggaagaaatattcatagtctctctgctagtaaacttcggtgtgtgtgaccacataggctagatccagaaaggccatatcattttccattcccactggt

SEQ ID NO: 161432 - DNA, 122 bp, Homo sapiens
cgcgggtgaacccagaaggaattacacggagtggaaaaaaggccccgctcactgataacgcgggtgaacccagaaggaattatacggagtgaaaaaaggccgagctgaaagatcacatgccg

SEQ ID NO: 161433 - DNA, 122 bp, Homo sapiens
tccgccggcaactctgcggccccatttcggaaagcgcaccgcattgaccgggacctgaagcgggataagaggggtcctggggaatagactgagaaagacattcatgtctgagatgaagctca

SEQ ID NO: 161434 - DNA, 122 bp, Homo sapiens
tgccccttccaacctggggttgggggacacagacgcgagagagccggagacccccacccccgatctggaaaggaaagagacctgtatcttggtgtttttctggctttttcaccctttcgcct

SEQ ID NO: 161435 - DNA, 122 bp, Homo sapiens
tggccccggggctactgttggacggcttcctcgccaggctgggggcacgggcgggactgccgggcaggagggaggtgggacgcaggggacgcgacaggagggtgacggggcccagtggagcc

SEQ ID NO: 161436 - DNA, 122 bp, Homo sapiens
caggctctccagactttttgaaaactacgtaacagttaccttgcagtgctcctgaaaacacgggggaagttcatatttgagaggcctgggaggggctaggatgatcctagtcaagcacgagc

SEQ ID NO: 161437 - DNA, 122 bp, Homo sapiens
tatggctcgggctgagggcaaggtgggactggggagaggcccctggggaccccgggaaagcgaggagaaagggctttaccctgaccccaggaagcaaaatgtggggaccccaaggaggaggg

SEQ ID NO: 161438 - DNA, 122 bp, Homo sapiens
cagacatgaaaacaaaggactgtgcatcacagaaatatgttagcacatttactggctccacgtcccctgcccatgacagcagtgaagcttacgtgaacttcaaagcctccacttggaagctg

SEQ ID NO: 161439 - DNA, 122 bp, Homo sapiens
taaagtataatgaaaaagggagaaaaggcattagaagccgaagctgcgcagccaagcgggcggagggcgaaaggaaagcctcagctgcaaaaaagctcgcagcgcccaagctgacagggttc

SEQ ID NO: 161440 - DNA, 122 bp, Homo sapiens
gcggggtcgagccgctctgggagcgcgaaccctggaccccaggcatgcgcagcaagggggcgcgtgaagggggccagggccaagaccctgctttgccttgccggttttttttccttccacca

SEQ ID NO: 161441 - DNA, 122 bp, Homo sapiens
ctgatgaaggaggagccatgggagacttgaccaatcgactaccgcatctgcagacgtgcgcggaaatggcacgcccgtttccgtgtgaacccgaaactgccacttgctggctgaggagagcc

SEQ ID NO: 161442 - DNA, 122 bp, Homo sapiens
gagccctgctcagctatgagaataagaggggaattaattctaatagaatacacttgttctcgcatagctgttgttccccaccagaaccaaatgagctcaagatctgacaaagaaaaaaaaaa

SEQ ID NO: 161443 - DNA, 122 bp, Homo sapiens
ggccgaggggaggcgaacgctcaggttcacacatatgcaagtgggctctacagcggacttcgaagcatacactcaactccccaccatgcgccggcccgctgctctacccctgaaaagctctc

SEQ ID NO: 161444 - DNA, 122 bp, Homo sapiens
gcagataaacgaagcggacagcggaggaaaagcacgtaaccaagtgcagtgggtctgaagcgaaaggcaagaaaagctctgcccttaggaacggggtgtcactgcgcggctcgcaggcacct

SEQ ID NO: 161445 - DNA, 122 bp, Homo sapiens
gcctcttgcacccattgcagaagctgccctggttctccgcgtcccactctggggacggcacgatggcataggcatcatggactgcccgggcccgcctccggttgccacacagacggatgaac

SEQ ID NO: 161446 - DNA, 122 bp, Homo sapiens
tctcccccaggggctcgcagtccacggggccctttgctacctccgcaggcgctggcgcagcgggaagatatggaggagcggattacaacactggagaagcgctacctgagcgcccagcggga

SEQ ID NO: 161447 - DNA, 122 bp, Homo sapiens
gtggtagggcggagagctgtcaatcaaatgcagtgcctcacctcctgcggcaggattggacgttcggcccaagccggaccaatcagcatccttccccagtgctttccgactggacctaaggc

SEQ ID NO: 161448 - DNA, 122 bp, Homo sapiens
gggaacgggatgggtgcccttgttacggagtccgggggaacgggatggctgcccttgtaacggagtccgggggaacgggatgggtgcccttgtaacggagtccgggggaacgggatgggtgc

SEQ ID NO: 161449 - DNA, 122 bp, Homo sapiens
tgagctaacaatagtgaactttatctcccgccccatgctggaagttccagctgtaggtcccgaattctaataagggctttgctcatgcctctgaggttatggtaatattttatccatctttc

SEQ ID NO: 161450 - DNA, 122 bp, Homo sapiens
gcagggaccaagccgcccgctgcgagcaccggagacggccgggctggggcgtgggctgggcgcctttcctgggcccctgcatttagcgggtgactctacgaaaccggtcacggggagacgga

SEQ ID NO: 161451 - DNA, 122 bp, Homo sapiens
agctctgacaacccatacatagaaagcacttgcaaaaatgtatgtcacaggcacagcgttcgtttcagtgatgtctgtatttaacacacacaccagtgaggattgctatatttttgtaaatg

SEQ ID NO: 161452 - DNA, 122 bp, Homo sapiens
tgcgttcgcagcaggggcgggcgtaggaccaatgggggcggggcgcgtgcgcgtgcgtgacgtcaggccacggggaggtggcgccgccgtgccgagccggcctcagactcacctctgacgcc

SEQ ID NO: 161453 - DNA, 122 bp, Homo sapiens
gaatatgccctcataaaaaatggcggcggcgcgggtactcgacctttgcccctacgcagtcgtgcccaagacaacgcccccggtatctccagtccgcgttctctccgtaccctcatccaaaa

SEQ ID NO: 161454 - DNA, 122 bp, Homo sapiens
ctcactgacttatctgagtggatggcgacacacaaccatttctgatgtcttctgtaggggcgatggagcttgaaacagtctgtattcaaaaggagagggtcctcttatttattgagctttgt

SEQ ID NO: 161455 - DNA, 122 bp, Homo sapiens
cgcggccatggcagcgccccgcccactcgccggcacgcgggtccgccggcctcgcttccgcgtcgctcgctccgcctcccgacaggccccgcccccaacggccccgcccccgcactcgcctg

SEQ ID NO: 161456 - DNA, 122 bp, Homo sapiens
atttatgctgcccttgccaaaaacaccgccgatttccacgccctcccatggctaagataacgaatgctgccttcggcctctgagagctgcacttatttaaaactccagctatgctgtaacaa

SEQ ID NO: 161457 - DNA, 122 bp, Homo sapiens
agaaaggtgaacaggttggccccggcccaagaatgacagaggcgccttgctcctgccacccggctctgctcctctggcccaggaacaataacaaggcgctgtcaggaagtgacactaaaatg

SEQ ID NO: 161458 - DNA, 122 bp, Homo sapiens
aggcatgagccaccatgcctggccccaggtattcccacttttaaaactgacatatatcagcgtaagtttgggtctctcatttgaaataatgatattgatgttattaataagtagcatggtat

SEQ ID NO: 161459 - DNA, 122 bp, Homo sapiens
tgcctgcgtcttcacgtgctgttggtgcgtcctcctgaattacttttgtgtcctttgacacgtcagatgtggctggggaaacagaaactcgcagaagttaaaaaaatgtgcttgaggtgcca

SEQ ID NO: 161460 - DNA, 122 bp, Homo sapiens
aaggcttttcccattgggttttaacttacagtgccatattttcttcagctactgaaaatccggttttctttgtaaacagtatcagaattttagcgaagtcctatgaccctccatttcctact

SEQ ID NO: 161461 - DNA, 122 bp, Homo sapiens
cttctgcaagctggggtggagagtgtgttcctgcctaccggctcagccagcacaggagcacgtagcctgcaggtgtgggttgtacacaggcttccccctgctgagtcagttccccagatctc

SEQ ID NO: 161462 - DNA, 122 bp, Homo sapiens
cacgggagggggcgggcccagagcgtgtcagtgcagccgaatcaaaacaagccggagacccgccttttccctccggctcgggagcgtctcgcttgcgccccgggcccgcggcgcccgcgcgg

SEQ ID NO: 161463 - DNA, 122 bp, Homo sapiens
aaacaggaagttcttccctgagtgcttgccgagaaggctgagcaaacccacagcaggatccgcacggggtttccacctcagaacgaatgcgttgggcggtgggggcgcgaaagagtggcgtt

SEQ ID NO: 161464 - DNA, 122 bp, Homo sapiens
ggcaccaacaaggctcagctgagcccttgccagaggagacacggtgggcaccagccccagcgctgccacctgcctgcctcctctgccaccgagggaagccatgtcgccttcctgagcctgct

SEQ ID NO: 161465 - DNA, 122 bp, Homo sapiens
tgggaacaggacacttgctgtgacccaatggcatctgctcatttgtccatttgctcctctcgtgagccacaagggtagggacttccttgtatcatcttgggtccccggggtctggtgtgggg

SEQ ID NO: 161466 - DNA, 122 bp, Homo sapiens
actctctggctctggggtccactcatctggttttatgtgtctataccctgggaccatgtccgaccccatttttcttctatagaagacactgagtgtagttttaacctggggacaatggagac

SEQ ID NO: 161467 - DNA, 122 bp, Homo sapiens
aaagaaaacattgcatctcaaaaggtgaagatgattgttctttcttccatatcctccttacggcatgtccttggataacttttcaaaaggtatccacacttttggttgagtttagttttctt

SEQ ID NO: 161468 - DNA, 122 bp, Homo sapiens
gcactcacctcatggcatcaagccatctccatgcatgtgatggtggaaacatttgcaagacgtggcagtgacaacaaaggtagcattatgacctcaggggtgtgtgtaagacttggggcttg

SEQ ID NO: 161469 - DNA, 122 bp, Homo sapiens
tgtgtgcggagaggggtgcgccggtgtatgtggagggcgctgggtgtgtgtgccgaggaccgcgcccgcgtgtgtggagagcgctggtgtgtgtggagagcgtgctggcgtgtgcttagtag

SEQ ID NO: 161470 - DNA, 122 bp, Homo sapiens
ctcttaataacaagggaatctgtgttaagcatagccacagtcatttctttgctgaatcaacggctgttaaagtgagtgaaagctgcagaaagtttcaggatccttttggcagtttaagtgaa

SEQ ID NO: 161471 - DNA, 122 bp, Homo sapiens
ttgggcgatgcctggacagcatcagtagtagttgcccgagggaggggggcagtcctcgtccggggacaggtcccaaaaggctgtttatttgttagagttctacgctcttcaaatgaacccaa

SEQ ID NO: 161472 - DNA, 122 bp, Homo sapiens
atcagtgaagaatgtgggctgcaggtgaggatgatagagagttctagaggtggatggtagcgctcgttgctcaacagtgtggatgtacttcatgccactgaattgcacacttagaaatggtt

SEQ ID NO: 161473 - DNA, 122 bp, Homo sapiens
ccggcaccatgcctgaagcatagtaggtgctgctacgaagtcatctttatccccattgcccggtgcagggaaggaagacaggccagaattgaactgtctgaagctccctcctactggggctt

SEQ ID NO: 161474 - DNA, 122 bp, Homo sapiens
ggcgaagccatcggtgttcgctgatgtccagtctatggagtcagttggtaccggtggcggcgcggaggcagaaggcggtgtccgagtaggggcctctgccccaccaggatgttacccggctt

SEQ ID NO: 161475 - DNA, 122 bp, Homo sapiens
tgtcctcagccaggaaggggccctgctccccacccgccgtatgagacccaagtcctcctacgagtcctcaatgtccacctctggggctgtccgtgcaggacccctggtctgcaggtgcctcc

SEQ ID NO: 161476 - DNA, 122 bp, Homo sapiens
gagagcgagagagggaaccagaccccagttcgccgactaagcagaagaaagatcaaaaaccggaaaagaggagaagagcaaacaggcactttgaggaacaatcccctttaactccaagccga

SEQ ID NO: 161477 - DNA, 122 bp, Homo sapiens
tgcccagccctgaacagaggcttggggaagccccctactcccacgccaagacgtgacttgcgcttctctgggcactttgtgccagccctaccagggagtgctgccccgctccccaggtctcc

SEQ ID NO: 161478 - DNA, 122 bp, Homo sapiens
accgggcctctgctagggcagggaggccaagggagtttgggccggaggggacaccctgagcgccccacctgcctcccgactgttgccggcctgtgattgatgcagtttttttttgtttgttt

SEQ ID NO: 161479 - DNA, 122 bp, Homo sapiens
agaacacgaaattgctcaagtggctgtttttctgattcatccaggagtggtacttaaccacgtatccttccagaactgtaggagaggctgatactaattaattcaacagcattctttaggac

SEQ ID NO: 161480 - DNA, 122 bp, Homo sapiens
agaagacggtgaatggggtgtgagtggggcgaggtggaccagcgattgcatggcgttggccgagggaggggctaagactgttgattgactcaagaagtcacttagcgtcatgagggtccggg

SEQ ID NO: 161481 - DNA, 122 bp, Homo sapiens
catccttcatccagtggatttgaggagagggctgggcagggacttcacaggtcagggttacggttccaccaggagctactgctccaccttctggctccaccaccaattggacctcctccaga

SEQ ID NO: 161482 - DNA, 122 bp, Homo sapiens
catatacaatcatgtgctacataatgatgtttgctcaacaatcagttgcgtatatgacagcggtctcataagattatgctaccatatttttactggaccttttttatagtaaatgcatttag

SEQ ID NO: 161483 - DNA, 122 bp, Homo sapiens
agtttttccaacatgatttccaaaaggaccgcctccggaagacggcatttccaggagtgacgctaaggcttcctaggcgcggtttctcgggcactgcctgcaatgtcattcccagaagtact

SEQ ID NO: 161484 - DNA, 122 bp, Homo sapiens
tctgaactgcgaagggacgcagaggcagggcttccactcacaggctggctgtccactggccgccactcacacgggacacgcggaccacaggggtgcctttgatcttcactccgcagctccca

SEQ ID NO: 161485 - DNA, 122 bp, Homo sapiens
acacagaacagccagtcccgacagcgcccaggccccacaggacaatgctgttcctggacccggagccatggccgtggaataagagctaggtcttcagggcctcctcctaggatccttcttaa

SEQ ID NO: 161486 - DNA, 122 bp, Homo sapiens
aagagagtttgaaaagcaagtttgccagggaagttgggctgtgtgctgggcgacttaggtcggaggaggcaagacattaagagtggggatgtttctcatcacctgcaaaagagacgttaaag

SEQ ID NO: 161487 - DNA, 122 bp, Homo sapiens
tccctccctccctccctagtattgggactcgctggcgtagggatgctgcgctcaagggtgcgacgccaactgggctcgcgcaggcgcgcgccgtcgagcgggagcgggacacctgggctcct

SEQ ID NO: 161488 - DNA, 122 bp, Homo sapiens
gcagcaggtgaggaggctgcagaagacaaacagggccttggcccccccggctggacagcacgaggtaggtgttcacgttctcttccccaaactgttcggccaggtagagccccagcgagccg

SEQ ID NO: 161489 - DNA, 122 bp, Homo sapiens
gcactggtttctatttcttttgttacctgtgatccgggcggggggctcctttcggccgctcgggctggggtccggcccagagaggaggcttctgcgggcgcctttggccgcgacttctcact

SEQ ID NO: 161490 - DNA, 122 bp, Homo sapiens
gtccctgccgccctcaggctcagcctctcttctcgtttttttcgctgcagatgaaccggacgacccccgaccaggagctggtgccggcgtcggagcccgtgtgggagcggccgtggtcggtg

SEQ ID NO: 161491 - DNA, 122 bp, Homo sapiens
gggtgctgcttctacgaaggcgtctgctacaagaaagcggttcccagtgagtagacgccccggccaccccgtggcggaagccgaggtagctggtgaccatgccgaccactgccctgcctgtc

SEQ ID NO: 161492 - DNA, 122 bp, Homo sapiens
tcccatggccggaacatctgaacgttcattgatctcatcgatttctcaacccaaagccatcgagtgctttgaggtgaagaaaaaggctttccttacccacggcagataccacggcagtggcg

SEQ ID NO: 161493 - DNA, 122 bp, Homo sapiens
gcccggccggacgtgggggccggcgtgagaatcccgcccatctgtgagccggcctcacgccgtcagacccaatttatctcgccgccaaagtttcacagccatctgctcgagtggaacggctt

SEQ ID NO: 161494 - DNA, 122 bp, Homo sapiens
acgtcctcgtgcccttgctccagctgcgcacacgacctcagcctcctctgccccgctgggcgcgagctgcagtcctggcaccttctgctggggtcctgatctgagccagttgtctagcgatt

SEQ ID NO: 161495 - DNA, 122 bp, Homo sapiens
ctaatccccttcccctagaagacggtgcactggtttctatttcttttgttacctgtgatccgggcggggggctcctttcggccgctcgggctggggtccggcccagagaggaggcttctgcg

SEQ ID NO: 161496 - DNA, 122 bp, Homo sapiens
ctccctcaatcgtgaacccagtaaaccagcctgcaccccacacagcccaaggtcttgccccgcgcccaggtcccagcacctagcgacccgccttcagcacttggaatgggctggagttggga

SEQ ID NO: 161497 - DNA, 122 bp, Homo sapiens
cggctgtggaagggtggtaacgttagacagaaattgcagccgtgtaaccagaaacttctgcgcattaggagccgatgtgaagtgttgctcaggaatggcagtgttcagtgtggttagaggca

SEQ ID NO: 161498 - DNA, 122 bp, Homo sapiens
tgaacccgggagaagggggttgcagtgagccgagatcacgtcattgcactccagcctgggcgacgagcaaaactcggtctcaaaaaaagaaaaatcattctgtcattctggccgctgtttga

SEQ ID NO: 161499 - DNA, 122 bp, Homo sapiens
aaatattaagagaggcacagagttgctgacctacttatctcccattaggatgaggactagcgttttagtactctcattgctgaccttcggggatgatgactttgaggaccaggaagcaaaca

SEQ ID NO: 161500 - DNA, 122 bp, Homo sapiens
gaggcagctgaggaaggcaagggagcgctaggaggtctgctgcttctgaagcctccgttccgcggcggcagccagcatccttcgacgcagggtcacggggtcagaggacgcaccttccgagg

SEQ ID NO: 161501 - DNA, 122 bp, Homo sapiens
cgatcgcccagcaccaagtccgcttccaggctttcggtttctttgcctccatcttgggtgcgccttcccggcgtctaggggagcgaaggctgaggtggcagcggcaggagagtccggccgcg

SEQ ID NO: 161502 - DNA, 122 bp, Homo sapiens
ggccgactcctccccatgcaaacagcggcagcttcccgaggccccaccgcttcctcccagcgcgtaggccaatgggagatttctccaggtcagtaatccgatttttcggccttcaggctgtt

SEQ ID NO: 161503 - DNA, 122 bp, Homo sapiens
ctgatctgagggcccttcatgaaggtagcagccattccctcagcacggcagccaggacaccgaccctgtcgcgggctggccccaccgctcaccgtatttctgcttgaggaacagcgaggacc

SEQ ID NO: 161504 - DNA, 122 bp, Homo sapiens
cacactggaggagggggcaggccacggcccggctggagagcctctgtgcctagtgggccccggagccccaggtccctggtgcagggggtggaggtcaggcaggccctgggcagctgattgct

SEQ ID NO: 161505 - DNA, 122 bp, Homo sapiens
accaacccgtggagtatagatagaattattgtccccattcaacagagaaggaaatgtaggcgcaggaggttccatagcctccttacatgcagtgagttgggatagcatattcacattctctc

SEQ ID NO: 161506 - DNA, 122 bp, Homo sapiens
gcacggtgctcggccccctcgggctccgcgcgcggctacaacccggactgggcgcgcccccggcatcccgcatctctgcgcgcgtcccacatcccgcatccggcatcccagcggccgggcat

SEQ ID NO: 161507 - DNA, 122 bp, Homo sapiens
cttctaactatatctgcgacaagttgggtttgtgggtctacttttcacctgcacattttacggaatgtgtatagagaccaagtgttgcgatgtgctgaagtataaaacatgtaaaacatctt

SEQ ID NO: 161508 - DNA, 122 bp, Homo sapiens
actcgagcgcgacactagaaagagggacacaagcgaaaagacaggtggcccccaacagcgcgcagcgaactccactgccgctgcctccgccccagagacacgttgcaggccagagcggccgg

SEQ ID NO: 161509 - DNA, 122 bp, Homo sapiens
gcccccggactcaccccggaggtccagctcccggtcgcgcaccgcgttggtgtactgcgccgcctgctcgatcagctccgccgtcagcttgaccatcctgcagcctcccgttcccccgcgct

SEQ ID NO: 161510 - DNA, 122 bp, Homo sapiens
tggcattaaatctgcttgggtgactcagaatgtatgttggcacggcaacatgtcatggggcgagcggcaaacatgtcctgtcggtggcggtggcgtgtctgaaagggccttgggctccaccg

SEQ ID NO: 161511 - DNA, 122 bp, Homo sapiens
aggggctcccccaagttccaaatgacacagggggaatcatcatctcagaagtctgtcccacgtaatgtaaaaagaaacataaatattctcccatgcagactgaattattgcctcaccaggaa

SEQ ID NO: 161512 - DNA, 122 bp, Homo sapiens
attccagactctctactgcaagctctttctttgtgatttggccaacccaacagagaagaacgttgagaggatttctttctgcacattcattggcagtaagtccaatgttaatccatcctcag

SEQ ID NO: 161513 - DNA, 122 bp, Homo sapiens
ggcatgcctggcctcaggtcctggctgtcccctgggtacccatgggcagggtgacttaggcgtccctgtctggtcctgacctgagccctgggcctccctatcacatgctcacccgcctttgc

SEQ ID NO: 161514 - DNA, 122 bp, Homo sapiens
aaaatgcattttcctgcccaagggaatcaccgacccggagggtgtattgccgcctgacaacggcccacgtgtgcccagcactgggctgcctctcgcatttggcagccgggtcctgctggcgc

SEQ ID NO: 161515 - DNA, 122 bp, Homo sapiens
gagtcctctcaggagaaatgaaagcgctgtctctttaggtgcccactccttacccaccagcggagcaatgttttccaggctggccaggctccagaagctcactaaggaagttggcttggggc

SEQ ID NO: 161516 - DNA, 122 bp, Homo sapiens
caaacacagttgctgtgtaaccactcatttcattttcctaatttgtgttgatccaggacacgggaggagacctgggcagcggcggactcattgcaggtcgctctgcggtgaggacgccacag

SEQ ID NO: 161517 - DNA, 122 bp, Homo sapiens
gcgtcaatttaactccagtctaaaccacgaacaggtcacagactagccaagtggctgagacgagtgtggggtgcgtgactctgcctgcgcgcgcgccagccccgcagctctcgccagagcct

SEQ ID NO: 161518 - DNA, 122 bp, Homo sapiens
cttaagcaaatcatctcattgcattgattgagtttcctcatctgtaaatgggaatagtcacgtatcatcccagtggctgtgagaaagaagtaaaagcacattttagatgcactttgtatatt

SEQ ID NO: 161519 - DNA, 122 bp, Homo sapiens
ggatataatcacggggcaaattgtgcaagaatgagcaatggaagacgtctggcgattgagcgatttctcagcccctggatgtagtgagcagagttggaatagatggatgagacctgacatat

SEQ ID NO: 161520 - DNA, 122 bp, Homo sapiens
cggctcggctcgctctcaaaatggcggcggcgtgaaatgtcacatccgcatggggggccgcggagcgagcgagcgagcgaggagagcaagcgggcgggcgccgagccggagggcggagcggg

SEQ ID NO: 161521 - DNA, 122 bp, Homo sapiens
ggcgggggctcgagtttcaccccgcggcgctgaatggggttggggttactagcggacgtccgcctttaacccgctcggtgccagcgtctgccggggttactggcggtcactggccctcagct

SEQ ID NO: 161522 - DNA, 122 bp, Homo sapiens
tctcacacacccagacgcgcgcgcatccccgggccatggggcgcacgtgagcccgcaccccgcgcacccagccctgcctctcgccagagcatcctcagcagctgccaccgaagcagcctcct

SEQ ID NO: 161523 - DNA, 122 bp, Homo sapiens
tgctggtagtgaaaagtccctgtggtttgagagactgtaagccacagaagagactgtccccgctgagagacaaggactgctgcagaaacagaaagcctggaggctggccagtgctcaagcct

SEQ ID NO: 161524 - DNA, 122 bp, Homo sapiens
agctgtaaccccttccacactcctgattaccacactccaccctcccattctctgaactggcgccaccctaagacatcttgaaatccaccactagggatgccaccctcaaccccccttctcga

SEQ ID NO: 161525 - DNA, 122 bp, Homo sapiens
tccgcgtggttctctcattgtgtgtgtgtgtgtgtgtgtgtgtgtgtgtgtgtgcgtgcgcgtgtgtggcagtcccagctcctccattaggttgagagctccgtgagccactccggggaccc

SEQ ID NO: 161526 - DNA, 122 bp, Homo sapiens
tgcgcactccgactgggcggggtctcctcgacgtcctggtggaagggttcggaggacggacgccgatcatgcccactaccacgcccccagccctgccagttccccacagagcgggtttgacc

SEQ ID NO: 161527 - DNA, 122 bp, Homo sapiens
tcagcaacacaataaggttatttaatgtacagagataggcaggacactctccagtaccctcgagtgcaaattgcatggaggtgatttgttcagaaatagaaatgacagctattaacaatgtg

SEQ ID NO: 161528 - DNA, 122 bp, Homo sapiens
tccaccctggcctgaggatcccattcggattagagatcaagagccagcctggaggcaaggcgtctacgcttgagcccaggatagaggcagaagcccctggagctgggaaggagtgagctggt

SEQ ID NO: 161529 - DNA, 122 bp, Homo sapiens
gtggggcgggaaagctgcagggatgcagagctcctagttttgtgtaagggactcatcaggcggaatagggacctggcctctgtgctcgcacgtctgaagtggggtgggaaagctgcagggac

SEQ ID NO: 161530 - DNA, 122 bp, Homo sapiens
ggccctcttctagggcggagagatcaccaaaagccgctgagcaaggacagcccttccagtcgtcgctcgcgggcacggagctgggagcgcgcgggaaccgaccgggccttactctggggcgg

SEQ ID NO: 161531 - DNA, 122 bp, Homo sapiens
ggccggtgcccactgctcacgcattcctctctcggcccatcctgagccagggggccctcgcgtcacccaaggccactgcagcacctccaggaacaaaccacccacagatggactgctctcca

SEQ ID NO: 161532 - DNA, 122 bp, Homo sapiens
cagtccagtgccgggcaggagtctcgcagaatgcagcctgacgcctccacgtggctcccccggcccctacaggctccctcagctgcagagctgggtcccatccgacgctgtcgctgggcagc

SEQ ID NO: 161533 - DNA, 122 bp, Homo sapiens
tgtcagagtctggggactcggcgtgcagggcgggctccaagcgctttgcttccggaactccggcttcccaaggggtactgtgcagactgaccaccggcctcccgcctgcaggtcagaggctc

SEQ ID NO: 161534 - DNA, 122 bp, Homo sapiens
gctgtggtttgaacatgtcccccaaaagttcacgtgttggaaacgtaattgccaatgtaacggtattaagaggtggggtctttaagacgtgactgggtcatgagggtgtaactctcatgaat

SEQ ID NO: 161535 - DNA, 122 bp, Homo sapiens
cacagctatcaggcccaatttcctcaccccctcctataaactcccgccttctggcctccacgaatttactcaggctgtgtttcaggcttaacaggtcactgtcaccaagacaaacaactgag

SEQ ID NO: 161536 - DNA, 122 bp, Homo sapiens
agagaggatgcgacttcacaaatttgggatccctcctcctcttctaaattggggggagggcgagtggggaagaagcagtttgccaaagagattttcaatgccgcaggaaggagctttggctc

SEQ ID NO: 161537 - DNA, 122 bp, Homo sapiens
gagctctggcgcatgcgtaatttcaagagccagcccacctcccgccggcggattattacacgcttgggttttgggctcagcacccccacccataaacccgccgggctttttgttgcgcctgc

SEQ ID NO: 161538 - DNA, 122 bp, Homo sapiens
acagaatttattctgggccttgaaagcatgtacatcctgtacacttctgagacactaccacgttagtgattatgtataaacttgaggaaacttgaagctgtgcatcaaattctcctaggaaa

SEQ ID NO: 161539 - DNA, 122 bp, Homo sapiens
gacttgttttgatgcttccattaataataatgatgatgatggaggtcagggtaataatcacggaacattggccatttattgacagactgatctgtgctaggtgcttgacttacatcacgtag

SEQ ID NO: 161540 - DNA, 122 bp, Homo sapiens
cctgcccaaaggcccctgggattacaggcaggatggggagccctatctaagtgtctcccacgccccaccccagccattccaggccaggaagtccaaactgtgcccctcagagggagggggca

SEQ ID NO: 161541 - DNA, 122 bp, Homo sapiens
ccgcgccccccgcaccgtgtcaggattggagaccgctcgggggctggtgtggcccgggctcgacctcccaccctggagcctctccttctccgcctagggcgagaggaggggagggtccaggg

SEQ ID NO: 161542 - DNA, 122 bp, Homo sapiens
agaggccggggagcgggcctggcgcgcgggtagagctgcgtggacgcccgcggcccttggcgctcagagctcccgccccgcagccagcgcctctaggaggcccagccggacagtctgcgagg

SEQ ID NO: 161543 - DNA, 122 bp, Homo sapiens
ggcgggagccggggaagcccgggaggtggtggccgagtgggcgccgcccctctgggtctgcggctcaggtcgaagagtcggctgcgtgggccggggaatccggattccgggggttcaacgcc

SEQ ID NO: 161544 - DNA, 122 bp, Homo sapiens
tgaattcacataatctcatttacttttcacagtcaaaccttgaggtaagtattatctttgcgtatgtgtttgtgtacatttgtgagtatgctagggcaaaaccagcttgtaggttactgtgt

SEQ ID NO: 161545 - DNA, 122 bp, Homo sapiens
gctgactattctgtaatcaacctaactaggcttaagatgtactgcattaaacttcttacacgctcctcacctttcgtattcctctgatatataaggaacacattctggtatagtcttttaga

SEQ ID NO: 161546 - DNA, 122 bp, Homo sapiens
cctgccacggtgctggaagtgcagcgggcacagaaagtcgcgcagtggaaatgcgggctgcgggcgtggatggggccgccgggtctggggacgagctaagacctggcagcagggggtggccg

SEQ ID NO: 161547 - DNA, 122 bp, Homo sapiens
cttcttccatccctgctttcactcgcgaccctctaatgcagccctgcctccagcgacccccgggatggaacccctcgcccacccacaaaagagcagcctcgacctagacccactttccaggg

SEQ ID NO: 161548 - DNA, 122 bp, Homo sapiens
atcgactccctaccaaatcagataggctataagaaaaggggaaatgcagtgtgtcgttaacgtaatttcctatcaacccatgtgaactatgaactttttaagtaggcagtggacttagagca

SEQ ID NO: 161549 - DNA, 122 bp, Homo sapiens
gacaaccaagaggaaaagaagggaaacaagaaagagatggagacccatcattgtggccaacgaccccacgaagagggaatagcggtccacgcacgggacccagcctccgatcaagcccagca

SEQ ID NO: 161550 - DNA, 122 bp, Homo sapiens
ctcagggatggaacccagagctgccaccgtcctgtgggtgacggcagaacatctggctgccgggtggcctccgtaaccgccacacacctgcctctgctggaatcacctgaggctctggtgcc

SEQ ID NO: 161551 - DNA, 122 bp, Homo sapiens
ccatgcaccgcccgggagtctctccgggcagggtcggggagggacttttttgccggtggccgtggaggaatcgtcccgttgagcaatgaccccggtgacgcggctgagggctataaaagcaa

SEQ ID NO: 161552 - DNA, 122 bp, Homo sapiens
caacttcccagggatgattctcagctcccgccctggatgtcacagtttagctacagaaaccgagtggcccaaatatctggaggctgaagataaattgacaaagaggcgggccgcgcacgctc

SEQ ID NO: 161553 - DNA, 122 bp, Homo sapiens
cccccggaacccccccgtgcgatccttccaatccagggcagcctcactgtcctggacgcccggccactgcatcctctgcccttgtgtgacctcctgcaagaaggcgggagcacgccgttccc

SEQ ID NO: 161554 - DNA, 122 bp, Homo sapiens
ctttttgtcccccgccgccgcggctttctgcgcgctgcggctttttgcaccccgcccccacggctttctgcccaccgcggctttttgccagacccggctttttgatcccccgccgccgcggc

SEQ ID NO: 161555 - DNA, 122 bp, Homo sapiens
ggctattaggataagattcaaaatcctggaaggaccttgttagacttttttatgcctcctcggcatgataaatgatgggttttgtcatgttttctctgctgcagtcatgtttatcttctttc

SEQ ID NO: 161556 - DNA, 122 bp, Homo sapiens
actacaaccagagcgaggcgggtgagtgaccccggcccggggcgcagatcacttactccccgctccatgcctcacggacggccctggtcccctgagtctccgggtccaagatcgaccccgag

SEQ ID NO: 161557 - DNA, 122 bp, Homo sapiens
tcctgttgaggttcttccagatgaattttagcctctgacccaggggtatgatttgataggcgtggagttctggttacttcttaaatgaagagtttccccaggatatctgaacaattctcttg

SEQ ID NO: 161558 - DNA, 122 bp, Homo sapiens
tgccaaggttcttcctgtcttattcaactttgaatatccaatgactaaaataaagctgaacgccctaaagatggccaataaacgtgtagagaaagacagagggaaggatgaaggaaaggaag

SEQ ID NO: 161559 - DNA, 122 bp, Homo sapiens
gtaatttttaaaaactaaggctgcgtatatagagaatgatgaaaagctggttactgtgctcggtttgtgtgtatgtgattatcagggccatagacaataacacagggtggaggctgtggtct

SEQ ID NO: 161560 - DNA, 122 bp, Homo sapiens
gcaggctggacagcgaccagcagctaggaagccgccagggttggagcctctgctcttccacgccccgggtgctgttggaagctctcgctccacgccccgacctgttggaagctctccctcct

SEQ ID NO: 161561 - DNA, 122 bp, Homo sapiens
tgaggcaaacgagaacaaagcagtcgaacagcaccatgatcgacgatactttgggggcggcgtgatcagaggattccccttcccgggaacttgcgtctagtcctctgacgcatcctagttcg

SEQ ID NO: 161562 - DNA, 122 bp, Homo sapiens
aggcggcctggaagagcagagacagggctgccgctgcgggtcgtgactccagagttggggcgtctcttctaagctccagtaggtcaggtagtccttgcgggggtatccggacggctccgtcc

SEQ ID NO: 161563 - DNA, 122 bp, Homo sapiens
ggtgatcctcccatcttagcctcccgggtaactgggacaacaggagtgtgccagcaagcccggctaatttgggagtggttttttgtgtttgtttttttgttttgttttgtttgtagagacag

SEQ ID NO: 161564 - DNA, 122 bp, Homo sapiens
agccaaacaaaaggtaagtagaatgggccacagggggcccattagcttcctggagcctcacggaacattcccaggagagatcattgctgggagtgtgtgatcagcgcaggcaccatcacagg

SEQ ID NO: 161565 - DNA, 122 bp, Homo sapiens
agactgagcctgcccagtaatcgcctgtggaaaggcgacgacggcgccctcgtgactccgcgccgaccaaccaaagctcgcggccgtccccatgagccaatcgcgagcctctaaccgtgaac

SEQ ID NO: 161566 - DNA, 122 bp, Homo sapiens
caagatcaaacttgtttatgacttcatctgtcatttcggagggagccttcttctattacccggctcagccagcctatttcccaactgccgcagagcagagaggatcaatttttattaggatc

SEQ ID NO: 161567 - DNA, 122 bp, Homo sapiens
aattcaatcgtcccgtgcaggggtaagtgagtctgagatgtgttttgagcctggccgttgcgcatgatgtgaagtgacaagtctagtctgcagttttcagaaaccctcattcctcccttgac

SEQ ID NO: 161568 - DNA, 122 bp, Homo sapiens
gctggatgatgtgctagcaactgaaaccatctctgcgacttaagcttctctggtgcgtcgcgccccacgtgcttctccagaatcccgtttggaggggccaagcaagtccaatatagataggt

SEQ ID NO: 161569 - DNA, 122 bp, Homo sapiens
gctcccttctcccacccggtggccccggccagctgcagccccagccctgcctcctcctcccgtgtttcccaaagagaaagccgaggcctgcaccagctccttcgctgctgcctagaaaaagg

SEQ ID NO: 161570 - DNA, 122 bp, Homo sapiens
tctgttttctctatacttaaacactggaagtgatgactgtggagagatctgaagacatagcgtttaatctcctgtggccccatcatcttttggttactgtctgatctctggaagaaaggtgg

SEQ ID NO: 161571 - DNA, 122 bp, Homo sapiens
gcggcgggggctgggcacgcccctagcgcatagctggcttctgattggctttccggtgctcgcccgagcagggttggggcgagtggaccgcgcctctaaaggcgcttgccagtgcaatctgg

SEQ ID NO: 161572 - DNA, 122 bp, Homo sapiens
ttctggaggaatagattgagagcaattagggagggaggggacattggaaattggcagctacgtcagctgaaacaagcctgggttcagtaaggtgactgatgttgtggttgattccctacccc

SEQ ID NO: 161573 - DNA, 122 bp, Homo sapiens
ccggctgcactgctggacatggcaagctctgctgccgtgccatggctttccaagccacaccggggggttggtgtttaggtggggaggacacccctctcctcctacacacacacacacacact

SEQ ID NO: 161574 - DNA, 122 bp, Homo sapiens
ccccagaggttttccgtgagtccttcctgaagtggtccatgcatattcagctatgtccgtcggtctgcctgtctagttacctacctctctgtttatcttgatccaacttgtcttttcttcct

SEQ ID NO: 161575 - DNA, 122 bp, Homo sapiens
catcctctggcaggtgcctggagcctggtgctgaggaaggcagaaaacagcctgggaagccgagcctccatgtgctttctgggcttctgctggaactacagttgctggcaccccatcgccag

SEQ ID NO: 161576 - DNA, 122 bp, Homo sapiens
gtgtggagcgagaggctggggcaggcgctggagctgggctatgggtcagtctgcgtggcccgggcgctcactcctctcctcattcttccatcttcatctcccttctccctgggtcgctcccc

SEQ ID NO: 161577 - DNA, 122 bp, Homo sapiens
cgggccggacaccggaagtggaggccgaagtgccggtgcccgaggggtgtccgttggccgcgggctgcccacttcctgtgcgaccaagctggagtcaagagcccggcccaccgctgcttgaa

SEQ ID NO: 161578 - DNA, 122 bp, Homo sapiens
agatggctctaaaggaggtgtgcacggggatgtgtcactggaatcatctcgtgggccctgcgacctctgggtgtgggaagcagagctggctgacaagtgccttctgcaagatgagtgataca

SEQ ID NO: 161579 - DNA, 122 bp, Homo sapiens
gaataaaggacacccatgcccccacccaccgctccgcaacccgcagaaagaaacccgggacggggtttcctaaataagagattttgttgtgtctttcaaactgcaagcattccccttgaaga

SEQ ID NO: 161580 - DNA, 122 bp, Homo sapiens
agaaccagaatcctagggctgggaggaccacgaaggttgggcctcctaatcccttcatgtcgctgctgacaacatttgacggacgcgtggtgtgaggcagccgcagccacagagccagtgag

SEQ ID NO: 161581 - DNA, 122 bp, Homo sapiens
catatggtcttcccggtccagccaagagcctggaaccacgtgacctgcccatttgtatgccgcggagcgctccattccggcccctttgtggccagaagaaagtggcccatctgtcgccagtt

SEQ ID NO: 161582 - DNA, 122 bp, Homo sapiens
ggcaatctcatgaatatttatgtcatttttggttaatttctatctcaaacaacagataaacgactgatgggacaggcagcaaaatagcaactatggttatctccaggaagtgaaacaatggg

SEQ ID NO: 161583 - DNA, 122 bp, Homo sapiens
ttgggtcccagacagcgcccctcccctcattcgaacctgaatgatgggggagtcctattccgcatggggaaacagggtgtcagggagcgctaacagccagtccgctcatctgtgagcaagaa

SEQ ID NO: 161584 - DNA, 122 bp, Homo sapiens
ctggcttgagatcctggactctaaccaggggtatcaaacctgctggtggtgagttgatcacgtgtaaagtgtccccctcccccgtctttggggctcatgtctaaaagacagattgcaaattg

SEQ ID NO: 161585 - DNA, 122 bp, Homo sapiens
gcggcccgcgcgggggttgctccgaaatgggtgccccggccgccaagggtgcagctggagcgagtcctcccggaaggggagaggagcttaggttcccaggcatggagaggagcgatctttgt

SEQ ID NO: 161586 - DNA, 122 bp, Homo sapiens
tataagcctctcctcaaagacagggtctgtgttgaagttcccatttaaaaatgctttgcacgtagtaggccctcagtcatcccatttgggaacagtgcatggcggtccttcgtcacaagcac

SEQ ID NO: 161587 - DNA, 122 bp, Homo sapiens
acccttggtccgctctgcgcgtcgctctaggatccccgaaaaggagcacgggcgcgaaagcggccaggctgggccaggatctagaaagactgcctggcgcaggctccctgcccccgcgggcc

SEQ ID NO: 161588 - DNA, 122 bp, Homo sapiens
ctaaggcaataattctacaagtctgtaaaagttacagcattatggggcctgcagtgccctcgaatgcacaaatgggtgcagtgaccacagatttagatcacaacactcaattccctttaata

SEQ ID NO: 161589 - DNA, 122 bp, Homo sapiens
ttgttgtggggattaaatgaagtaattgaaatgaaatcctcagctcagtgcctgacatatcgtaagtgctcaaagttagatatggacatcttattacctccttataaaataaaagcaatgtg

SEQ ID NO: 161590 - DNA, 122 bp, Homo sapiens
tggcggagcgcggtgccgggagcaagggcggcggtcgggggctctatccagggacagcaccggggccgagaggccccaggactcgtggagtcctctgagtcctgcgcagcagcggccgtcgg

SEQ ID NO: 161591 - DNA, 122 bp, Homo sapiens
gaaaggggaggggacaggaaggggaagaggaggagggctgggcacctggccctgggtgctcggcgttgcccttgagtgccctcctgtgatctttctgccgttccttggatctggtctcctga

SEQ ID NO: 161592 - DNA, 122 bp, Homo sapiens
cctcctggccgcctgacgcccgctttcccaggcagagctggtgcacgaggacatcgagagcgcgttggccgactgccggctgggcaagaagatgcggccgcagaccctgaagtagggcagcg

SEQ ID NO: 161593 - DNA, 122 bp, Homo sapiens
tggggagtgttttaacggatcgtgtcgcaggagagcacagcccagcgttggggccgggaccgctggcgcccgacgtcggaagcatacaggtatactatgcaagtgtattctgccacaacaac

SEQ ID NO: 161594 - DNA, 122 bp, Homo sapiens
cctgggaagggccagagaggggccaggcagggccccggaaggctcggcccatgcatccagcgtgcctgctcccaggaattgcacctggattgttccagccattgagtggataaatccacatc

SEQ ID NO: 161595 - DNA, 122 bp, Homo sapiens
gtgtggccttcacttgggctcaggagcagacaccctaatctggccttgtggccagaaacacggctcccgccaggccagcctcgcaccccagggacagccgggcgcggagctctctgcgaggg

SEQ ID NO: 161596 - DNA, 122 bp, Homo sapiens
gccccgccccctcggccagcagagagtccatgctgaaatggaagtcccggctctgcagggcgtccccttgcaggccaaacttgcgcaggcttcccggggtgttggtggagctcgggggttcg

SEQ ID NO: 161597 - DNA, 122 bp, Homo sapiens
gagagttattttattcactcattgactcatttattacccttgaactgcttatttgttccacgttaaaggaaacaaggaattaggaatctgggttttattcccactcataccacaaactgatt

SEQ ID NO: 161598 - DNA, 122 bp, Homo sapiens
agctctttctggggcaaatacaaagagcgtgtttcttcctacaaattagtggcatcctcccgctgtatggattcagctggcaaagtaactcaagccttgtcctgactgcaagggtgggcggg

SEQ ID NO: 161599 - DNA, 122 bp, Homo sapiens
tgctgccggcccctcttccccgacggctaataataaacccgggttcctgtttcccggccgcggccactccagattcggggctgaggggctcactctgcaaccaaggcacgtgcattctggtc

SEQ ID NO: 161600 - DNA, 122 bp, Homo sapiens
ttaccctctttttttgttacccaaatggtcacacactctcgcccctgctcttccctctaccgttttctctcagtgcctggagggataggtcttggaggttgttctgtccaccttattccctt

SEQ ID NO: 161601 - DNA, 122 bp, Homo sapiens
gcgtcagatgcccacttcaccaccttcttgatgtcgtcatattcgacaggtttttccaggcggcaggtcaggtccacgaccgacacgttggcagcggggacactgaaggccatgcaagtgag

SEQ ID NO: 161602 - DNA, 122 bp, Homo sapiens
acaaagggccccagatcagacttctcaagtcgggatgattttacctcccagataaaatgtcgaatgacatttttgcttgtcacaattggagaagcgggtgctcctggcatccactgaacaga

SEQ ID NO: 161603 - DNA, 122 bp, Homo sapiens
tagacacggactcggtagttggacttggtctcctttccattcctgttcattgcctggcaccggaaaatcccctcatcctggatcccgacagccggaaggaagagggagccgttgggaaggac

SEQ ID NO: 161604 - DNA, 122 bp, Homo sapiens
cccactgcgcaccaggcgcgagccctgcgcatgcccgttgggtcccggaggccgagcctgcgcagttaggggaactcaggcccataggctccccgcctttgcgttgccctgagcagcgaggc

SEQ ID NO: 161605 - DNA, 122 bp, Homo sapiens
accttcttatttcacgacgtatggtcgtaaagcaataaagatccaggctcgggaaaatgacggagaggtggaactatagagaataaatttgcatatataataatccgctcgctaattgtgtt

SEQ ID NO: 161606 - DNA, 122 bp, Homo sapiens
aagatctattcaactcactgcccaatctcctctcctggtgcagaaaagacacccagtcagcgacttgcattatctgcaggcatgagtgaataataataatgcctaacccttatatagtgcta

SEQ ID NO: 161607 - DNA, 122 bp, Homo sapiens
ccaagaaggtgagtttcgtcccctcgatcctcgcggagctcctggccgctgggctgcgagcgactccgttcacacccggcgtccatccctagccaagccctggggcctcggcaaaacacttg

SEQ ID NO: 161608 - DNA, 122 bp, Homo sapiens
cgccactaggcgcggtcacgtgcattcgcggtgcattcgcgggggcgtcggtgcgggtcgcgtctcttaagacacccagggagacagacgtggggcagaactcatgggctgaagtgagagat

SEQ ID NO: 161609 - DNA, 122 bp, Homo sapiens
aggaggggtggggacggtggggacggtggggacatcaggctgccccgcagtaccagggagcgactgaagtgcccatgccgcttgctccggagaaggtgggtgccgggcaggggctgctccag

SEQ ID NO: 161610 - DNA, 122 bp, Homo sapiens
ggtgatctcagaagctgtgggaggggagagaagtgggtggggaagggaaggagacagtagcgggctcattgacaagacagtactgggttcgttgacttatggagctcattcgactggggacc

SEQ ID NO: 161611 - DNA, 122 bp, Homo sapiens
atttttttttaatgcaacaaaagagatgattcagaattaatagtgtttttccccagggcacggttttaacacttggattacaggttcatctctccatgccagaagagagcagcagggagcga

SEQ ID NO: 161612 - DNA, 122 bp, Homo sapiens
gtgaaggcggacttgcttttttcgccgtccacacaaccgcactagccgggccttcggcaccgacggaacatctctacctgcgccccgggagccctcgccgtctcacctcgcgcgctgccgtc

SEQ ID NO: 161613 - DNA, 122 bp, Homo sapiens
tgaaaatgaaggaatggcttcaaaccaaggaaagatggaaaatgaagaacagccacaagacgagagaaagccagaagtaacttgtactctggaagacaagaagttagaaaacgagggaaaga

SEQ ID NO: 161614 - DNA, 122 bp, Homo sapiens
ggttctactaattctcatgcctcagcctcccgagtagccagaatgacagacatgtaccaccgtgcccagctaatctttgtatattttggagagacatcactttgccatgttgcccaggctgg

SEQ ID NO: 161615 - DNA, 122 bp, Homo sapiens
tgccaagcttgtccgacctgtgacttgctggctgcatatggcccaggatggctttgattgcggcccagcacaaattcacaaactttcttaaaacattatgagattttttttttttaaaaaaa

SEQ ID NO: 161616 - DNA, 122 bp, Homo sapiens
ccacctccggctctggctcatctgctcttgtaagcagggtcctgggctgggtgctgcaggcgcatgaggaaagtgggagccgggacggggcagctcagggcacgccctccaacactgcgctc

SEQ ID NO: 161617 - DNA, 122 bp, Homo sapiens
tgcgaagcccggccccggactgcgcgcatgcgcccgtctttcatacctgcactccggacgcgcccttcgggtctgcactgacaatgacttgcttgcatcctttgtggacaccttatttcccc

SEQ ID NO: 161618 - DNA, 122 bp, Homo sapiens
atcttgagctcctgtcctcatgatctactcaccttggcctctcagtgctgggattataggcgtgagccaccgtgcccagctcaacgtggcctgtttaacttgagttttacattttttaaatt

SEQ ID NO: 161619 - DNA, 122 bp, Homo sapiens
gccttggcaggacgggaagagccatgtgtctgggcctgcgcagcacctcagcgagcatggcgttgcatttgacgcccggatgagggggaggccctgcttgtggagctcctcggagcagctcc

SEQ ID NO: 161620 - DNA, 122 bp, Homo sapiens
tgtcatatcagagtgacaacacacagccccataagctaaaaccatctcctataaactctgcgagtccaacccattctcactcctcctctgttgcttcagcattccgggcttgggaggatgtt

SEQ ID NO: 161621 - DNA, 122 bp, Homo sapiens
aagcccacaccttatgacccggagagcctttggagtagtacacagaaaatctcttggacccgtgctccaggaggcacaggtaagaatgttcgtgccacattactgaatacaacccaaatgct

SEQ ID NO: 161622 - DNA, 122 bp, Homo sapiens
ctttattaagttataattcacacacgatgtaattcgcccatttaaaatgtacaatgggcccggcgcggtggctcacgcctgtaatcccagcactttgggaggccgagggggcagcggggatg

SEQ ID NO: 161623 - DNA, 122 bp, Homo sapiens
gctcagagacaacctcaattttgcctggattgcacgcgggccgaggaagtcgggatgctccgaagggtttctgctctgggagtgcctctaatgtgggttttctatgctttctctcttcgcaa

SEQ ID NO: 161624 - DNA, 122 bp, Homo sapiens
agagcatatttggacacgaggagattctgtatccggggcccttgagtcgctgctggggcccgctcccacactgtagaatgtactttcatcttcaataaatccctgctttcgttctttcattg

SEQ ID NO: 161625 - DNA, 122 bp, Homo sapiens
tttccctattagttcccattttcttatgttctacatgagatacagagacccagatattggcgtggtgaataatcaactgttttgtatacctaaataccagtgagataataagcgagacttgt

SEQ ID NO: 161626 - DNA, 122 bp, Homo sapiens
tgcacttctgacgtttgcattcctcaggtgatggagagcaccccttcaaggggactgaaccgagtacacctacaatgcaggaatctgcaggaattcttagggggcctgagccctggggtatt

SEQ ID NO: 161627 - DNA, 122 bp, Homo sapiens
tatgaggtcgtataactgcactcccgtcagcagcccgcgtctgccgcccacgtacatgcacgccatgtggtgagtgtttcaggatcctccaggtgccgtgctcccccgccctccgtggcact

SEQ ID NO: 161628 - DNA, 122 bp, Homo sapiens
gccgggccgagcgcactgggaaggccgggccggaccaggctcgggatccgccgccgccgccgccgctccacagacgtcacatgatgtttggtcacgtgggctccattcatgaagcggcgacg

SEQ ID NO: 161629 - DNA, 122 bp, Homo sapiens
ggacccccgtgccccaaacacatcccgccgagcctcctgggaccaggcccctgagagccacggggctgtctggagagtgtccccagcctcagccatgtggggtagaataaaaatgattaaga

SEQ ID NO: 161630 - DNA, 122 bp, Homo sapiens
gcagctgcctcccagtgatgattcagtaccacgcagatggatggggaggcatgctgccctcggacacaggctcccttcctttttttctttttttttttttaatactttaagttctagggtac

SEQ ID NO: 161631 - DNA, 122 bp, Homo sapiens
taatggtgataagtaatacctgattgtttccttttctgttctagtaactcagaggagatacgtgttttatttgtgatagcaaattcctaaatgaacattaggcaagtggtatcattatcagg

SEQ ID NO: 161632 - DNA, 122 bp, Homo sapiens
ccacgcagactggcgcgtccaggtggccgtgaagcacctgcacatccacactccgctgctcgacaggtaggcagtcactggggttccctggaagagccctcaactcctgcatcccctcaagc

SEQ ID NO: 161633 - DNA, 122 bp, Homo sapiens
agtcgcacacggggcttctgagatgtgcggcccgggcctaagagctgcatgtgttgaagccgctccgggttggaaaatgtatgtaaagtaaaataaacacggctctcgctgggagggctccg

SEQ ID NO: 161634 - DNA, 122 bp, Homo sapiens
gtccgccgttcccgcaggtctgcgcacggatttgtccctggttcccgcaggcaatggggccgcaggggccggccgggggggtccccagcgggctctgcgcgccgacctgcagctgggacccg

SEQ ID NO: 161635 - DNA, 122 bp, Homo sapiens
ggatgtttttttcagggctcctaggctagtgctcgggtgagaacacaagttgtttagattcgggggcattatggtgctcaaagttgactttaaatgaatgatagagtgacagtagcttgctg

SEQ ID NO: 161636 - DNA, 122 bp, Homo sapiens
gagagggtccatggcacccctcggattccaggtgctagctttttggtaaacaggggcaggcgagcccgaaaggggaggggggcgtgtgtgagcccgagcgcgcgtgtgtgaaggagggaggg

SEQ ID NO: 161637 - DNA, 122 bp, Homo sapiens
gggagcgttggcggggtgggagggcagccctgacattcacccggttcctcctgggctcgccgtggttctaaaagcattagccgcgtgcttcagcgggaagagccccaggccaggaacaaggg

SEQ ID NO: 161638 - DNA, 122 bp, Homo sapiens
gcaagcctgctgtgaaccaaacggcggactgccgattacccgacaatcactgcactttgtcgcgatctcttttaccaataaatacggagggctgtgtaaagctctatctcttttaccaataa

SEQ ID NO: 161639 - DNA, 122 bp, Homo sapiens
gtccgggaggagtgtcatatggccccttcgagctcttggttctcagctccggcgacaagccgaggggctgccactttctaagttccccgtttgaaaacaggaaacaggctgtgtgacctgct

SEQ ID NO: 161640 - DNA, 122 bp, Homo sapiens
cagcgggggcgggagctgaaaaggcgcgggggtggctaagggaccctgcgcaggagctgccggccctcgcgcgcccctcgcgggccccccgggccccccgcccgcccgcggctgctgccgtc

SEQ ID NO: 161641 - DNA, 122 bp, Homo sapiens
agctcaacgacctggtgaagagggcccggctggtgcgagtgagtagtcctgagggctgggcgcgcattcttggaggaggtttcctcggtcctctcctaccagtgctgtgagtccctgactta

SEQ ID NO: 161642 - DNA, 122 bp, Homo sapiens
gggggtcggggtgtgcacgcgtgtcacctgcagcaccagggccggcagcagcggggtgggcgggctgccaggctccgggctgcgcaggtgttccttccactgcccgcctccggtggagagag

SEQ ID NO: 161643 - DNA, 122 bp, Homo sapiens
actgcattggagagtctcaatctctactacaactgcatctcctcgttggcagaagtgtttcggctccacgccttaaccgagctcgtggatgtggacttccggctgaaccccgtggtgaaggt

SEQ ID NO: 161644 - DNA, 122 bp, Homo sapiens
ctccacacttccccagcgtggcctgcatttctattgggcagctggcgctccggaagtgtccgcactctttattatcgactctgcgcctttgggcaattgtcactattttggttcatcaaaat

SEQ ID NO: 161645 - DNA, 122 bp, Homo sapiens
tcaccgggcgtctgctcggcggctctagaaggtcgggctgcgctgtgggctgcggggagccggaggcctcttgattggctctttgacgctttcggaccaattgtgttgctgcataggcgtgg

SEQ ID NO: 161646 - DNA, 122 bp, Homo sapiens
gtcggcgagaggcgggccctggcgctcagcccgaggccgggcgaaggcgggggccgcggccgcttccttggcctccgagtgcctggcgggcctccaggccccagacacacccctctcgaccc

SEQ ID NO: 161647 - DNA, 122 bp, Homo sapiens
caagccatacacttgaagcatatgcgtggagtgttttgagaaacggaacacacaatacatcgcaaataaggctgcttctccgtctggctgggacacatctccacgctccgccagatggtccc

SEQ ID NO: 161648 - DNA, 122 bp, Homo sapiens
agtgagcatggagctctgctgccaccgctcccctcatggcaccaggcaccgcacagacagcgctgcagctgggagctcgtttcaacctggagacagccctgctgggtgggcggggcccctcc

SEQ ID NO: 161649 - DNA, 122 bp, Homo sapiens
gcaaatcaatgggcctgtacttttgtctctccgcctgctgggatttgcagtttgtgaggacgtttcacatctcacggatatttacggagtcccttccacggcccaggctcttctggacacca

SEQ ID NO: 161650 - DNA, 122 bp, Homo sapiens
tagagggcaatgcactgccctcatctctgcctcttggatggggggctttgtccactccatcgtgcagatctccctgttgctgcctctccctttctgtggacccaatgttcttgacactttct

SEQ ID NO: 161651 - DNA, 122 bp, Homo sapiens
gctacctggcacgactgatgtaactggcgtaaaattttttgaagctttccatattcctctcgttctaaatataattttccaagctgcaagaaagcaaatttattaaaatcaagatttcaaca

SEQ ID NO: 161652 - DNA, 122 bp, Homo sapiens
aaaggctgggcgggggtcacacatacctcagtggcaggcaggcaggcggcaggcagagcgcgctctccgggcagtctgaaggaccgcgggaatgtggaggggtttagagacaggcaacagga

SEQ ID NO: 161653 - DNA, 122 bp, Homo sapiens
ccaggaggaggcgagacccaccccacccaggactcaggagggggcgaaacccatcccacccggacggcaccaaccctggtacccgcacctagtgctcaccgggcccgtgccatgtgggcacg

SEQ ID NO: 161654 - DNA, 122 bp, Homo sapiens
agggctcggtgctatttgtaacggaataaaatttgtagccagaccccaggtgcctgctctcgtctttctctgggtggcctctgatcttgcaccccgtcttcaccccagggctcctgaagact

SEQ ID NO: 161655 - DNA, 122 bp, Homo sapiens
ctttcacctcagcaagttcctgtcactgatgttatgttgaaggcagcaacaagacacatgcgcaagcttaaaaccatatgactgggcctttaatgcccttcttctgactctgaaaatttcct

SEQ ID NO: 161656 - DNA, 122 bp, Homo sapiens
aggccagcctttatggggagcccagctcccccaggacaatttcccacaagagggtttaaccgtagctccattttacccctgcctggtaatcaggaccccccaatccaactgatcttcatgga

SEQ ID NO: 161657 - DNA, 122 bp, Homo sapiens
agccgcgccccctcgatgcctgctggctagctcgctcgctcaggcctggccggcacccctcgagcacagcgcacttggcctgtggaacgcccagcccgcctgcgccccctttatacgcgcgg

SEQ ID NO: 161658 - DNA, 122 bp, Homo sapiens
ccactcctcctccttatcttcttcctcaaccactggcatagttttggtcatcctccttgtcgtcacaatggggcgcctgacaccatggagacccgggaaccccactgatcttgggtcctgca

SEQ ID NO: 161659 - DNA, 122 bp, Homo sapiens
ctcccacgctaagcctggccctcagcctgccagcgtttccgcctggctcacgatgttccacgctgttcctccaggcgtccctgagggcctccatcctcgctcgggactgtgcggctgcggcg

SEQ ID NO: 161660 - DNA, 122 bp, Homo sapiens
ttgtgctccaatatccaggtggttgcagatcattccttttacttgtctttcttttcctttcgtcttgtatattaccacggagctttctcttatttctcctcctccctttcaaaccagactgt

SEQ ID NO: 161661 - DNA, 122 bp, Homo sapiens
cctttctctcagcactcaacctaaagtgttttccctctccctccccattattctctagcacgtgattccttcaaagccctacctttgtgatgaatgctgtgatgtgccaccctgacccccct

SEQ ID NO: 161662 - DNA, 122 bp, Homo sapiens
taccagttctttattggtgaaaacctaaatccacctggcatggttgctctgctgaactaccgtaaggatggtcagtatgaccccatatatgattttttaaggaatggtttagaaattaaaag

SEQ ID NO: 161663 - DNA, 122 bp, Homo sapiens
gactcacctgtgaggtaaggacggggccaagacccggaaccgaaaagcaggtcacgatagcgctggaaggcctcgtcgaggactgagcagccgggctgcgcggccgagctgacatcgtactg

SEQ ID NO: 161664 - DNA, 122 bp, Homo sapiens
tcggggtcccttggcctggagaccctttgtccaacccgtcgcccacctcaagacctgcctcgatgctgcgcatacagtaggtatccaataaatgttcctgggatagaaggcaaaggcgctgg

SEQ ID NO: 161665 - DNA, 122 bp, Homo sapiens
tagcaagggatacccatcaccaccagggagcagaatccgttccagggattggggtgagtccgacttcgagcagcagctgccccccaacatcatgtacccagcccgtgactacgtggagccct

SEQ ID NO: 161666 - DNA, 122 bp, Homo sapiens
tccctagcaggaagaccatttaacagatagaccattttacaacgcaaacactgaaaattccgcaggagaaaagaggcactggtttttgaaaaccgtgctctgtccacagtcagacaccatct

SEQ ID NO: 161667 - DNA, 122 bp, Homo sapiens
actcgctctccagcagttcaataccagcagcaaaacgcaggtttttgggggaactcccgccgcccgccaccaagggctatctccagacgggcgccgggtgcagcgccgtgaccgggcgccct

SEQ ID NO: 161668 - DNA, 122 bp, Homo sapiens
cagttgtctggagcagggttgagggagaggcgcaattttcctttcactagcatgcaggcccgggttaactggtgccctagttctaattcatcctaatgatgtctcagtgccacttttagaga

SEQ ID NO: 161669 - DNA, 122 bp, Homo sapiens
agctgcggcagtggcaactgaaggtgattgagaacgtcaagcggggccaacacaagaagacgctggagcggctcttccccggcttccggccagcggtggaggcctgctacttcaactgggaa

SEQ ID NO: 161670 - DNA, 122 bp, Homo sapiens
tattatggctgcacatctgtgtgtgaaatgtgctcattctgacattccactgctgctcggcgctgcagaggcctttgttaggtaaaacactgttgtcaagcctaacaagcaggtcatgcaat

SEQ ID NO: 161671 - DNA, 122 bp, Homo sapiens
tgggtgggtctggcagggtggaggtccctggaggggctgggcccagctttctcctgcctgcgctggagcttctcatcgtcactcagataggggttctctggttcctcctcctcctcctcctc

SEQ ID NO: 161672 - DNA, 122 bp, Homo sapiens
aaggcaaaatccaattgcttctcattttcttgatccaactggcagtcggcatgtcacctacgttcatgtgtgttctggtgagctggaggtgggagaaggagcttttcattgtacagtgaggc

SEQ ID NO: 161673 - DNA, 122 bp, Homo sapiens
tggagccggcggctgcgagcactcctttgagcggcgctgcactcagcggagggttacaggcgggagggcggggcctggaagggggcggggattcgaggcggggcctgcggggcggggcctgg

SEQ ID NO: 161674 - DNA, 122 bp, Homo sapiens
tcatactcgccaatcactgtcgcttccagcgctgactggccagggagcagccaatcggggcgtggcgtggacccctcccgtggcgcgctctgggggtgcgcgaggcggggccgtggcggctg

SEQ ID NO: 161675 - DNA, 122 bp, Homo sapiens
gcccggttcggcttacctcgctgaacgccccgcgtccgatcaccttcagaatctcgaagtcgtccctctgcagtcggacctccttaagcctcaccacgatgggctccgctgggggggtggtg

SEQ ID NO: 161676 - DNA, 122 bp, Homo sapiens
ggacacagtcactgagcagggaggagaaaggacgcccggggggctggctgtcagcgcagccgccatcttatggtccaagtggactgaggccgcctgggcgaggagaactcagggcgcaaatt

SEQ ID NO: 161677 - DNA, 122 bp, Homo sapiens
tagcaaagctacttcatgtggatgggcctcttttgatatccctgggcctgagcccggccacgctctgcagctcacgcactacacaacagcggccagaaggtggcgccggggaggcatccact

SEQ ID NO: 161678 - DNA, 122 bp, Homo sapiens
gcgagagcttgtgaggcggcaggatgataatgtggcatgacacttctgaaatgagcggcccgttgccatggtgagcagccaggagggaccggctctcccgaggctgaaataaaacacgcttt

SEQ ID NO: 161679 - DNA, 122 bp, Homo sapiens
ttaccgagccggaacacagtcacgtggctgagaccttggcctgacctgtccggaagtaggcgtggctaatccaaaactactcagggaggtcacaccccacaaggggtgggcctgggcgcttg

SEQ ID NO: 161680 - DNA, 122 bp, Homo sapiens
ctcccagtggcactggccgtgtgggatgtgggtgcagcagacaaacagagccagggtccccgggagacaggaaaggctgggcagccaggtcccacaggctcaggcagggggcttgtcaaaaa

SEQ ID NO: 161681 - DNA, 122 bp, Homo sapiens
cagccgatgaccagacgcccatctttcttccagtgggttacttctcccccatcagtccttcgctctgcgcccgctgacccagtcggggctggctggtggaagagggcggggagagccttcta

SEQ ID NO: 161682 - DNA, 122 bp, Homo sapiens
ccggactccccttccccgacgccatcacagcccttccctcccccaggtcacgcggctccgcgccctgcccctgacccaagggcagctggttctggtctggtcggatgaacacgtgggctcca

SEQ ID NO: 161683 - DNA, 122 bp, Homo sapiens
tgctaacagtcatctgaaccttcagcaacttgtcatctttttgcagttggagggtcttgccgcaatgatatcgagggctgctaactgataatggttgctgaaggttggggtggctgtagcaa

SEQ ID NO: 161684 - DNA, 122 bp, Homo sapiens
ggagggaacaacagggccaagagagtttaatcagtgacacacagcttcaatttacccaaacgctagctccataaatgtcaaaacacattttcaactttttattgaagactagcacacctaaa

SEQ ID NO: 161685 - DNA, 122 bp, Homo sapiens
tcttaggactgggtgtcccaagtgtccgcagctgccccggggggacagggtgggaggagccgcccagcactcgggcccctgcctgcggcatgacctgaagctgaacacaggcacggcagcca

SEQ ID NO: 161686 - DNA, 122 bp, Homo sapiens
gagtgtgtgtaccctgtggtcagcctgcttccagactcggctgcatccggggcggaagcccggacctgaggccgtggagagaaacctcagattcacagagctcctgggctggaggggacttg

SEQ ID NO: 161687 - DNA, 122 bp, Homo sapiens
cacagtgagtgaggacggacctcaggctgtctcttcgggtaacagccactgtgaaaacaacgcggatacagcaccagggcagacactcgcccccaggggtggctcccccagatcccaggcct

SEQ ID NO: 161688 - DNA, 122 bp, Homo sapiens
cctgtgtcatggcttaattatcctacttcctcacaatcttttcctgcgcagttggaattccgcatccaagctcgtttgaggcaaaacggcgaccgcgggctccagtgtcctgagtatgtttg

SEQ ID NO: 161689 - DNA, 122 bp, Homo sapiens
ggggtgaaagctgggcccaccctacagggaccccaagtttgcggagcaagagtggattggcggagagcgcagatggcaattctcacccgccttaaaagtaccaccttaaaattctccccatg

SEQ ID NO: 161690 - DNA, 122 bp, Homo sapiens
tgaccaggtgcagacgctgtgttactcagggacgggctcacaggcagtcacacacctatacgggctgacaccgctaagtgaacaggtgcagacacaatggcactcggggacgggctcacacg

SEQ ID NO: 161691 - DNA, 122 bp, Homo sapiens
gccccgagaaagcgggcaggggccagacagaaagacgggggagggaaaaaaccgctccggcgggggaacaaaatctgaagtgaccacactgcatgcattctaagtagacagaggggctttta

SEQ ID NO: 161692 - DNA, 122 bp, Homo sapiens
tggagagtttttacatccagtccattccatttccagaagctacacgactcaccagtaaggcgtgccgatgaaggaatctcgtttctgtagagtcttcagattcttggcagacacaccaaagt

SEQ ID NO: 161693 - DNA, 122 bp, Homo sapiens
gggctcctgtcaccctcgggtagaaggtggcccaaggctgaagaccgaggtccagggaggcgcctttccaaccgtgccagagagggcaggtcgcagacgccggggctgcggggaatagaggc

SEQ ID NO: 161694 - DNA, 122 bp, Homo sapiens
agactgcctgccccgatgagggggcggccgtgaccgcgctgcgccttctgcccacccaggcgcccccaaggccccggctaggaggactagagagtggggaccccccaaactgcgcggcagcc

SEQ ID NO: 161695 - DNA, 122 bp, Homo sapiens
ccgtcactctcgtgggttctgggagggaagccacaagtctcagattggggattgccagctcggagtccatgagcagattttccttgcatggggcttaatgctgagtggacactcaacactct

SEQ ID NO: 161696 - DNA, 122 bp, Homo sapiens
tcaagaaagctctgttgagaaacagtggctgcccatctgggaacaaagaccaactctgcacggggtcaggaccactggcctcttgccttagctctcttcctaactcactacaagccttctct

SEQ ID NO: 161697 - DNA, 122 bp, Homo sapiens
ccgagcggtcgatggaacccgaggattggcggagttgtcgatgggcgggacagggcagggcggggtctcctcagacgcggaagaccttgcaactttagtaacctacgggcccgcctggggtg

SEQ ID NO: 161698 - DNA, 122 bp, Homo sapiens
ctgcggggacggtgaggccctgctgaggactccggccagtatgagtcccgggggcggcggcggggctcaggccctgggtctgccccgcggtgtgaccccggccggtgccttggttttcctgg

SEQ ID NO: 161699 - DNA, 122 bp, Homo sapiens
gtcgggattgaattggaggacaccctgcgggcgcccgctgcagaatggattgcttgctgccgggagaaacccccgcatcttctgggtcgcagatcctgtgccgattgcggtgctggcgtcag

SEQ ID NO: 161700 - DNA, 122 bp, Homo sapiens
tttacttctcaagatcaaatctaagttttccatgttaacgtccctcataatcttgtcaagcgctatattttaaggtattttaattgacataaatgttcccgagacttctcaccaataccaat

SEQ ID NO: 161701 - DNA, 122 bp, Homo sapiens
ccgcggctgctcttgcagccccagggactcgggagccagccacagcaggcctgccaagagcgtggtactgctctctcgtgtggctggcgccggtgccccgggctcccccggccgccccacgg

SEQ ID NO: 161702 - DNA, 122 bp, Homo sapiens
agtttacaaagtcttctacctcattcctgctattcagtaccagaatactcattttaacaacgctttttctcagtaatatttaattcattgtagaaatttaaccaaactagtcctgacataat

SEQ ID NO: 161703 - DNA, 122 bp, Homo sapiens
caagatggagttgctttggccttcacacttcacctcccagtccagcttttctatcttatgcgccctcccctgaacgttaggtagggtgcctgatattgcagagctttagcagcagtgcagtg

SEQ ID NO: 161704 - DNA, 122 bp, Homo sapiens
tggcgtcgcccaggaaggtcagctcgcggcgtggggctggagtttcagcgtcctgggctgcgggcgcctaccatgagcctgggtgtgtagtgcccggaaacctgctcctgcgcgcggaggtc

SEQ ID NO: 161705 - DNA, 122 bp, Homo sapiens
cataaaatcacatgtaaggcttccattcttacactcagtgctggaattaggacagcccttcgttctgtggggttgattctaagatttgacccttgcttcagtcctgcggtggggagattgtg

SEQ ID NO: 161706 - DNA, 122 bp, Homo sapiens
ctcaaactcctgacctcgtgatccgcccgcctcggcctcccaaagtgctgggattacaggcgtgagccaccgcccctggccaccctcaaggccctttgatcttccgccacttccagtagctg

SEQ ID NO: 161707 - DNA, 122 bp, Homo sapiens
aaatcaaaataacccaatccgagtctaaactcaagtcctttcttgcaaagctcagtagtgcgcgggggctgcggctctacgcctggctgtggtgcgaaacaagatgaaattttttcaaaaag

SEQ ID NO: 161708 - DNA, 122 bp, Homo sapiens
tgggcccgcgggccgggcgggctcggggcggccgggacgaggaggggcgacgacgagctgcgagcaaagatgtgccccgggacccccggcaccttccagtggatttccttgcggaaaggatg

SEQ ID NO: 161709 - DNA, 122 bp, Homo sapiens
cggggtatgggcttgatggcttatgggaaggatgtaaccagcattttcggggtatgggctcgatggcttatgggaaggatataaccaacattttcggggtatgggctcgatagcttatttag

SEQ ID NO: 161710 - DNA, 122 bp, Homo sapiens
cggagtcccagctctcgggcccggggacgcggctggattctcccccaaggcccacgcgagcgggctcagtccccagaccttcccgcaacttcccacccgttcgccctcgggctcgtggtcgg

SEQ ID NO: 161711 - DNA, 122 bp, Homo sapiens
tctccctgggaggtgggtcttccactggttttccccgccagggctccagggggcgccatgcgattcagcgctgggctccgctgggggccgggccttggaggaggcgaaccgtgcagggaagc

SEQ ID NO: 161712 - DNA, 122 bp, Homo sapiens
gtgagtagtgctggagtagatgctgctggtctgtgttttcctgtcaccgtgataaaccatcgctggcactcagacccgtggtgctcaccgcagcgacctgaaacaaaatggagaggagcatc

SEQ ID NO: 161713 - DNA, 122 bp, Homo sapiens
cgacgtggcctacggcgagagccacctgttccgtgtccccagctaccaggccctgctccgcggtgtcttccaccagacagtctccaggaaggtggcgctgggctagcccaccctgcacgccg

SEQ ID NO: 161714 - DNA, 122 bp, Homo sapiens
ttacctcgatgacggggtccgaggaatactgcttcaggatctccagaacttccgggtccccgatggcccccagggcctcccctgggaagaagcagccggagagctcatgttggtggggtgga

SEQ ID NO: 161715 - DNA, 122 bp, Homo sapiens
ccactccaagtttggttgctgcaggagcaggtccctgctcagagagttcatcctgagtaacgtgaaaagaaaggagaaaatgacatataactgcacaaatggaaagctaggattttcctacc

SEQ ID NO: 161716 - DNA, 122 bp, Homo sapiens
gattcaagtgaccctctcaccttgacttcccaaagtgctgggattacgggcaggagccaccgcacccagacaggattgtttttataaggttgtttttgttgctgcagctattgtttgcaata

SEQ ID NO: 161717 - DNA, 122 bp, Homo sapiens
tcaaggtcaatgtgcctctgactggggcctggagagctgccaagaatgctgggcttggagcgctggggtcgcgccccgctactgcgccttggaccccgcagtggagggcgctgagaccgcac

SEQ ID NO: 161718 - DNA, 122 bp, Homo sapiens
gcccaggcggcggggagggcgccttccgcccgctcggtttctttcttccccgctggctcccggagaccgcgttatagagaactgccccctcgctgccccaataccagcgccggggccgcgag

SEQ ID NO: 161719 - DNA, 122 bp, Homo sapiens
gcaaagagggatctgctgagcggcaggtgcaggcagtggaagcagtagctgctgtccagtcggtagccgacttgcggatccagcaagagccagcggctgcgcttcggctgctgcaggtaacg

SEQ ID NO: 161720 - DNA, 122 bp, Homo sapiens
gagcagactcctgctccccccagaccccctgggagtcgattctgtccccttcttcctggccgcaggtcggtgcagccgctttcctgcctggaagagtaaagtggaccctgtgtgaaaacatt

SEQ ID NO: 161721 - DNA, 122 bp, Homo sapiens
ccgtttcccgcccttgggcagaggcttcagctcatagtcagtaccatctccagacaggtccgcctctgccccctccacctcgtcatcttcctcctcttcctcctcctctgtggggaaatact

SEQ ID NO: 161722 - DNA, 122 bp, Homo sapiens
atttattctccaagttactattttatgactctctgcattgactaaaacttgaagaggtaacgagtgatgcctttattgtttcaccagtaagtatatagcggcagtgggctgcatgaacctga

SEQ ID NO: 161723 - DNA, 122 bp, Homo sapiens
ggccactcgtggaaccagtcgatggccgtgcagttgaccacagctgggaactttctggctcgtacccgcagcacggagcccacaggggagaaacacaggatcacctgggtgtgggagacaca

SEQ ID NO: 161724 - DNA, 122 bp, Homo sapiens
atttctgcatccggagtatgagaaccctcaaccaggctgaccggatccggaagtggattgcgagccaggaggaggaagccggcggtggccccgtcagcagccggctgctgagaggccggtag

SEQ ID NO: 161725 - DNA, 122 bp, Homo sapiens
tcttgcggattatggtctcagtgctggcctcctctcttcctctactcccaggcctcgggccgtgagagagccgccatcctttgaaggatgcacgactctctttagagccaggcacctgtgtt

SEQ ID NO: 161726 - DNA, 122 bp, Homo sapiens
tcccaggagtagccagggctgcacaagtggtttgacgtgggatctttctcatctttgccccgggttgttgctgctttgaaggttaagtgctccagggatatttttaaacagcaggggctgat

SEQ ID NO: 161727 - DNA, 122 bp, Homo sapiens
caggagagttgaggaagaactgggcgaactaaaggccgttctcacagacgcgggaggatgcggggggatgcggggggatgcggggggatgcggagggatgcggggggatgagcggagaggtg

SEQ ID NO: 161728 - DNA, 122 bp, Homo sapiens
cggcggaagttagagctgggagggcaagtccgggcccctctagccgccagtgtctatggccgtctcagccgacgtcgggcgcgcggctgaagacgtcatggagggggctggtgtctcgaggg

SEQ ID NO: 161729 - DNA, 122 bp, Homo sapiens
ttgttttgggtgttcgcagtctacatttatttcccttttaggggaaacaatcactgtccacgggattaaaataatcccgagttgattatttggtgacatcaaccaacggtgcacattttggg

SEQ ID NO: 161730 - DNA, 122 bp, Homo sapiens
ccaggcagcggcgccagcctagttcttagccccgccctggatgggcgccgccttccatcacgccaaagactttccaaaacagcccttcttgggcctgggaagcagatcctgggcgtccctgg

SEQ ID NO: 161731 - DNA, 122 bp, Homo sapiens
tggcattttcacaccctttccttcccagcattttaggaagcggagttccagtagctttgacgcttagaaaatataagaaaaaaaagaagtaacagaaaccgctatatctttaagatagagcc

SEQ ID NO: 161732 - DNA, 122 bp, Homo sapiens
cctaaatgtagttcctccaagacaggcctctgatgttcagaaacaggtggaaaagacgaacgtttcttggcctcactggaaagggcctcgggccttcatttagttcgtggggggttggctga

SEQ ID NO: 161733 - DNA, 122 bp, Homo sapiens
gctattggctgcggcgcagcggcgggcagggcctgtttctccggggcgggccggaggccgcgtagtgcagctgcgcacctggggcagggacctgcagaactgacccgctttggctgcagggc

SEQ ID NO: 161734 - DNA, 122 bp, Homo sapiens
gcagaaccatcctgaggacaacctgcagctccatcgattttttcttggctgggacgcaggcgagcatgaaagcgatccaaacacagccagagggcgccaaaatgccgcaaataaaagttcca

SEQ ID NO: 161735 - DNA, 122 bp, Homo sapiens
tatgagctgtaacactcaccgcgaagatctgcagcttcactcttgagcccagcgagaccacgagcccacccggaggaacaaacaaatccagacgcgctgccttaagagctgtaacactcacc

SEQ ID NO: 161736 - DNA, 122 bp, Homo sapiens
ctgcgggcctgccgctcgcgctctagctcctccagctgccgctcaagctcggtgcgccggcgctgcagccgccgcagctctgcccgcagcttgtcaatctgccgcagctccacatcgatgct

SEQ ID NO: 161737 - DNA, 122 bp, Homo sapiens
ttccccgagctcacgggactagctgtgattggccggatgaggttgagagcttcatggggacgcgcgcgctacgtgcaggggcgttgccttccattcacttggcgcccgactgccagtgcgca

SEQ ID NO: 161738 - DNA, 122 bp, Homo sapiens
ggtttcctgtaagacctccatccttggcttgcagatggccaccttcttgctgccttttctcgtggtcatcctgtgtgtacatgcacctctgctgtatctttctgttttctttttttttcttt

SEQ ID NO: 161739 - DNA, 122 bp, Homo sapiens
caacaacgtactaatttgatgcacacatggatgcctcgcgcactctgcaaattcatcacccgcatcttgcattagtcatctgacggactgccaagtgtttcattttctttccatgtgacttt

SEQ ID NO: 161740 - DNA, 122 bp, Homo sapiens
taatattccttcataagcgccctccctgggttataaagacagaatttcaatctctgaaatcggatgaggaacttgggaaaatacaggttacaaaggagaaaaacaactgacattgttgggcc

SEQ ID NO: 161741 - DNA, 122 bp, Homo sapiens
agggaagggggtgtgctggggagacagaaatacatatgtatctctcgcccctcccccggtcgcagcccactcggggccgagccgcggtaacctggccttacctttgcattgctccccatcct

SEQ ID NO: 161742 - DNA, 122 bp, Homo sapiens
cactccgtggacaggcccgtcacccttccccttggcttcggaagtctccccacctccccccgaccccaggcccagctggctgcaagccatacacttgaagcatatgcgtggagtgttttgag

SEQ ID NO: 161743 - DNA, 122 bp, Homo sapiens
tcttggtctccccttccaaaagtcagtgcctctccaggctgcccatccccagcaaagatccggaagtccgctgcccctggcaacagcacccagcacctagccctctgcttcgccgtaccgca

SEQ ID NO: 161744 - DNA, 122 bp, Homo sapiens
gagtttgctcacgtaaacgcccgtgctgggccctgtgaagccagcatgttcaccactggtcgttcagcagccacgacagcaccatgtgagatggcgaggtggctggacagcaccagcagcgc

SEQ ID NO: 161745 - DNA, 122 bp, Homo sapiens
ctctgtttccctaggttatcaaggactgttctttgattcctgccaccacaatgttcaatccgttatagtttttcctttgcaaaaattggttaaatgttactgtttcaattatcatcacctat

SEQ ID NO: 161746 - DNA, 122 bp, Homo sapiens
gcacatcatgtgacctgatcaagcctagatttaattggaacacattctaaaataagctttcgtgtgtagaaaacattttgaaatagtccttataatatatgctgctctcaagttctaatgga

SEQ ID NO: 161747 - DNA, 122 bp, Homo sapiens
caaagtaggcgacaagtgaggcagcgcctctcgcggggagcccggcgcgcgccccggcggcgaaagagaaagagaaagagcctgggccgggaccggggctatccccaaccgccaccgccccc

SEQ ID NO: 161748 - DNA, 122 bp, Homo sapiens
gtggtgtctcgggacgggtgtgcgtggtgtctcgggacgggtgtgcgtggtgtctcgggacgggtgtgcagtggtgtctcgggacgggtgtgcgtggtgtctcgggatgggtgtgcgtggtg

SEQ ID NO: 161749 - DNA, 122 bp, Homo sapiens
ccggagcttagggcggggccgagtccgggtttggggaccgggaggcggggccggttagggcgagggtccctgggatcgtcgggtcaggccttgggccaacgtaggcactctcgcagttcctc

SEQ ID NO: 161750 - DNA, 122 bp, Homo sapiens
atgagctcagcccgggcagggagggctcggagctgcggctgggacagcacccggtggaagcgatgatagagctggatcagctgggtcagcgctccctggtcaaagaaagtcattgagggatc

SEQ ID NO: 161751 - DNA, 122 bp, Homo sapiens
ggacgactgtgtgccccaggacaatttgcgcatggtcctagctggccggctctaggtcgacggccccaggcggttaagctacttacaaagccgtgaccggtttgcccgcggcgcaccaggtc

SEQ ID NO: 161752 - DNA, 122 bp, Homo sapiens
tacgttttgtttcagcctttggagttgaccaccttttcttgcaacttctgttgctctcagcgtccctgtctccaaatgcattgacccaaatgtaccagtgcttgggagaaagtttgtcttct

SEQ ID NO: 161753 - DNA, 122 bp, Homo sapiens
acctgaaaatggttaattttatgttatgtgaatttcacctcaataacaaaaaaagtgacccgggacatatcatgtgcacacaggagcccatttggaaggggtcacgatggccaaacagagag

SEQ ID NO: 161754 - DNA, 122 bp, Homo sapiens
tgcgctggtgttggggcgcgtgaccactgcttgctctgccgcaaccacaccaaggtgggccgcccggagcctcagacccccgaccctgggacccaggccctcacttgccttcatcccacgct

SEQ ID NO: 161755 - DNA, 122 bp, Homo sapiens
gacagtcaccaccatgtgccggctataccccacagggtccatttgggagtgagtgggccacgaggaagacccaggtgtggacaggctgaagttgttgaagcaggatattttcccatgcaggt

SEQ ID NO: 161756 - DNA, 122 bp, Homo sapiens
gctactcactgaccctgcccctgccccaggaggccccaccgccactgtcacccccgcagccggccagccctgctgaggaagacaaaatgccgccctacgacgagcagacgcaggccttcatc

SEQ ID NO: 161757 - DNA, 122 bp, Homo sapiens
aggctcccgctgcctggcgctctgcggctggggagtaaatttctccctgtcatcaggtcgcggggagaggaggaggaggaggagtttgttaatgttcagtttgttcagcgggatcgatgttt

SEQ ID NO: 161758 - DNA, 122 bp, Homo sapiens
cctgtaatcccagctactcgggaggctgaggcatgagaatcacttaaaccccagaggcagcggttgcaaatcttcagggcctgagatcgtgccactgcgctccaggttgggcgacagagtga

SEQ ID NO: 161759 - DNA, 122 bp, Homo sapiens
tgcaggcaaacacagctgcatgattatcacatatgatgattaaatcacaggtcacacacacgcagagtaagcacacagaacaacccacaaacctggtcacagagtgactcatgcagacagac

SEQ ID NO: 161760 - DNA, 122 bp, Homo sapiens
agctgcactccccagccgcgcgccccgcccccgggcgcccggcgccccagctccgacccgcgcccggccccgccccgcccagtgtgcccacccccggcccgtcccgccgccccgtcgcccgg

SEQ ID NO: 161761 - DNA, 122 bp, Homo sapiens
aggtcctgtcatggtcacctgtggcttgggccaattctcacttcccctgaagggcagctgcgtgtagggagcgggggctgcccaaagtttcactctgactggaggtaaacttaacatcattt

SEQ ID NO: 161762 - DNA, 122 bp, Homo sapiens
ccattgctgattcctccccgtccctggctcccgcgacagcgcagcgctgtcctgagtttccgtcttgtctctgatgtgcctttgtcatcagcttgtccttggctccagccaccagagtctga

SEQ ID NO: 161763 - DNA, 122 bp, Homo sapiens
ccaccctccattgcgtgcctctggctgcaaaaacaggcaggatcttccggccggtttgcccgccactcaccttccgagcatgcgcaccctccgagattgccaggaattgacttctctgtggc

SEQ ID NO: 161764 - DNA, 122 bp, Homo sapiens
atggtgcccctcccttgaggcttgctgggtcctctgtgtagggatagactctgttccgggcgccgtggctcccagttccagactggcagccctttgagcggctgaaactttaattcatcttt

SEQ ID NO: 161765 - DNA, 122 bp, Homo sapiens
cggacagcagggcagggtggggcaggagcagaggaggcagggccgcaggacagcttttgccgcttggctgtgtgctcgctccccgaaattgctcagcctcccacccgacctcgccctcctcc

SEQ ID NO: 161766 - DNA, 122 bp, Homo sapiens
tggaaaaacaggcaagcattctggaaatgcgcagtcccagcagggaagtaggcctggctgcggggtcgcggcctagggcattggtcgccggatacagagaactagaaaccgggaactgtcca

SEQ ID NO: 161767 - DNA, 122 bp, Homo sapiens
ttcatctcactagggagtgccagacagtgggcgcaggtcagtgcgtgcgcgcaccatgcgcgagtcgaagcagggcgaggcattgcctcactcgggaagcgcaaggggtcagggagttccct

SEQ ID NO: 161768 - DNA, 122 bp, Homo sapiens
gaggccaattcagaatgtctgggggtggggctcatttaaaaagtatttccaggccgggtgcggtgtctcatgcctgtaatcccagcactttgggaggcccaggtgggcagatcacttgaggt

SEQ ID NO: 161769 - DNA, 122 bp, Homo sapiens
tttacactcatttacgtagctaaaattatttggcttttctgacaggatcacatgaccttacgttcctttagacctctaagacatatatagcctataactgatgatacaaaggtattatctta

SEQ ID NO: 161770 - DNA, 122 bp, Homo sapiens
atgagtggatctcttggaagaatccaagccttatttccccaggagcaagatcactggtaacgacacaccctatcaattgagatgagaactattcacaaaaaaactatagcagaagtcagctg

SEQ ID NO: 161771 - DNA, 122 bp, Homo sapiens
aattccttgttttttttccttgtaaagccttactttttccctttaagagaaagagaggtccggagagaagaaactgaactaggcttctgttctcaaaaatgatctaaagctacaagttttta

SEQ ID NO: 161772 - DNA, 122 bp, Homo sapiens
ccggcggcttcgaaagcttcgcagccggaagccgccggttggcggcctggatttaccttacgaaaggttttaaccaaggacttgaggtttctcaggttttaaatttaaactaatatgctgtg

SEQ ID NO: 161773 - DNA, 122 bp, Homo sapiens
ctttattaaatttatgcaagcatcaatgtttccgttaccagtcacctcagaccatagctgcgtgcttcctgtgcagactcagagagacatggtgacagagaaacagaaagccaaataaatac

SEQ ID NO: 161774 - DNA, 122 bp, Homo sapiens
aaagcttggcttgaagctgttcccttgtgcctctgtcacttcaaggcctgggacccgattcgatctaagccagttcggtctggcttcccctgaccatatgggtgttgggtaagaaagagcta

SEQ ID NO: 161775 - DNA, 122 bp, Homo sapiens
gcatgtctgttaatgccttccactctgggggtaccttctgaagctggctcttaaaatttccgggaaccaagtctggaactggtttcatttttatcagtggtaagtgttgcctatctctagag

SEQ ID NO: 161776 - DNA, 122 bp, Homo sapiens
ttgaaaaaagaaaaaaagtcccacttaaaaaaaaatgaggtcatcatatcctttccttcacgaggcttgaatttactatcctactttggagaaaacagatgattcatttgccactcagtggg

SEQ ID NO: 161777 - DNA, 122 bp, Homo sapiens
gccagagccctgtcctctaggttcccctcccctaccatggtggcccttgaggcaggatgccgggccttacaggacagagttgaaacttctggactgggcaatccctagggactcgttcagct

SEQ ID NO: 161778 - DNA, 122 bp, Homo sapiens
tcacgtgctgttggggtgaggctggggctgggaagccattctgctcccacccccactggacgccgatggtgaagatactgaggcccccagaggggcttgtccagacttgtaagtctagactc

SEQ ID NO: 161779 - DNA, 122 bp, Homo sapiens
cgcgactcgctcagatcttctgggagtctgtctcagcattacaggcgtcatttccgggcacgtttacaaggtgtcttggtaggcgcaatgggcgcctgcgcagtggcagcctattttgcggg

SEQ ID NO: 161780 - DNA, 122 bp, Homo sapiens
tactcgggaggctgaggcaggagaattgcttgaactcgggaggcggaggttgcagtgagccgagatcgtgtcactgcactccaacttggagacagggcaagactccatctcggggtggggaa

SEQ ID NO: 161781 - DNA, 122 bp, Homo sapiens
gttcctggggcctgcctgtgggctcgtcgggacactagagagcaggcattcccgtggccgcgggagagccgcgttcctggctggccattcccgggccctctagaagggagcggctgagagct

SEQ ID NO: 161782 - DNA, 122 bp, Homo sapiens
agaccatggccacccctctccctgcctaggagcacgcctgccccagcacccgggcctgaacgcagcgagagctccagagcctgcgagtcccagaggtcaggatccgttccttctgaggtgtc

SEQ ID NO: 161783 - DNA, 122 bp, Homo sapiens
tgctcagcgccgcagctgcggggagatggggcacggccgcagcaggtgtggggagccctccgggaatggaggagtctcgcagctgcgggtgaagtcccgggcaggtgcggtgtactcgccgt

SEQ ID NO: 161784 - DNA, 122 bp, Homo sapiens
aagccggaaaccgtcctgttcgctacagctgcgtggctgattggacggtttccagcccagcgtccctgattggataatgcttgaggccccgccccctcaggtcctgagttacagaagacgtg

SEQ ID NO: 161785 - DNA, 122 bp, Homo sapiens
tcatcaaatggttcatctcagggaaaagggacctcaacatggcttttcttttccttcggacggtttcgtgttgccaactctgctgcacatagtacaggaacggaatccaggcgcgcacacct

SEQ ID NO: 161786 - DNA, 122 bp, Homo sapiens
accaggccagcaaaggcgagatgcccatgtgatatgggggctgggaggtggggaccagtacggaaggaaataagaccctaagccatggaagaaacctccttgccggagattacagatgattt

SEQ ID NO: 161787 - DNA, 122 bp, Homo sapiens
ttacaaaacttcattcctggtgaatatgaaagtgtaatttatctacagtcctaggacatacgttaatttgctttcctaacccaagtcctccagggcttttcttatttcaagaaagatcatca

SEQ ID NO: 161788 - DNA, 122 bp, Homo sapiens
cgctatctcattttcagacgccatggatcctcactagcaaaacacaatgtcacagacaaacgaggcatatcaggtttttctaactcatttcggtactccatcacttaatcatgaaataatgt

SEQ ID NO: 161789 - DNA, 122 bp, Homo sapiens
aaaagccatctttgcattgttcctcgtccgcctccttgctcgcggcagcctccttgctcgcggcagcctccttgctcgcggcagcctccttgctcgccgcagccgcctccgccacgcgcctc

SEQ ID NO: 161790 - DNA, 122 bp, Homo sapiens
cagacggaaatggaaggacgtcctggtctggaaggagctgcccagagataaatacagcagcgagaggcccagaaagatcgagggtgaggtagggaggggggaaaggcaagaaatggcaaagg

SEQ ID NO: 161791 - DNA, 122 bp, Homo sapiens
ggccgggcctggcgcggaggctgaagctgaggaggcggcggcggcggcggcggctcaacgcgggaacaaggcctcgctccacacggccgcggagcactctgggaacccagccgctgggagga

SEQ ID NO: 161792 - DNA, 122 bp, Homo sapiens
cctgcgtgccttggggggccagctgtgcctgggccggtgtgggcagggaaagcccctctgcgctgcaggctggaccctggcagctgccgaacagatctcagtcagagtcgtgggagccatgt

SEQ ID NO: 161793 - DNA, 122 bp, Homo sapiens
atctcaaaaatgaagaaaacagttccgagcgtattacggaacggagtacacctcggagtacgggctccagacgagggaacgcaccggcgttgccacgcccaccttccccgtccagccggaag

SEQ ID NO: 161794 - DNA, 122 bp, Homo sapiens
aaaataaataaataaataaataaataaataaataaataaatacagataggaagtggtgttcgctctccaacaccaccgccgcctctcgcttgcagagctccacctgaagcagaagggggata

SEQ ID NO: 161795 - DNA, 122 bp, Homo sapiens
aggattgcgtgtgtgactatgcctgccccactggacctgctctggcgccaggtagtgtcgcgggcgcttcctagtgcgggcactcatcctgccgctctccggtcggccatttattgtcttgt

SEQ ID NO: 161796 - DNA, 122 bp, Homo sapiens
cactgacgcgccgtctccatcctaagccccaaaccttcaaagtgcaggagacaactgtcacgtcaccctgcaaaaaatgctaacgtctgataatataaaatgctggtgtggacgtgggaaaa

SEQ ID NO: 161797 - DNA, 122 bp, Homo sapiens
cttcctggtgaccacagcgtggcatgttaagagtcaaggaagactgcagcactgagttgccgaaaccaatgagccatgagaaggctgccatccttaggcagaaccaataattcatgatgact

SEQ ID NO: 161798 - DNA, 122 bp, Homo sapiens
ggggactgatgccggtgaattacaggaagaaagaggaaaggggtggattgatgtgaagatcggaggaggaagctcacacatttgatatggtatttctttgggtcattgagcagaagcggaac

SEQ ID NO: 161799 - DNA, 122 bp, Homo sapiens
cattgatcagctgagcttgagttccttcatctgcaaagtaaatgcaataagccccacctccgggggttgtcatgaggattaagtcaaataacatatgtgatgccccttgaccaaggctcagc

SEQ ID NO: 161800 - DNA, 122 bp, Homo sapiens
atttgttgcaaggatgtttaccgcagggataaatataaaagtgaaggctgaaaacactctcgtggcttagtaacacactgttagagaatgctgtgtacttattaaaaatagtgtttacaaat

SEQ ID NO: 161801 - DNA, 122 bp, Homo sapiens
ggaccctatgaactcagtctcacgcctcaggacagaaattagcggaacccaagcgagacccgcttctccaccaggacaggaagttctgcaataactggaagcaatcaaatgcgaggcgcttt

SEQ ID NO: 161802 - DNA, 122 bp, Homo sapiens
ctcagggcgagaatctcgctgttctctgacctccaacgcgcaagtcagtggcgtcacatccggccccgtgacttccctgggttcacagcaggggtggaactggattcttcctggatggggat

SEQ ID NO: 161803 - DNA, 122 bp, Homo sapiens
ctaatcctttatcaattgctgcaagtatcttctttcagtgtgtggcttgctttttcactccgtttgttgttttttaatcaaagtataagttcttaattttaacgcactttaactgtcatttt

SEQ ID NO: 161804 - DNA, 122 bp, Homo sapiens
agcccgccccctcgaagtccggggactgattatcaaggccttcgccctaactgacggccacgccagccaaccagcacccgaggctctccaagccgcccagtgggacggtggggtgggacagg

SEQ ID NO: 161805 - DNA, 122 bp, Homo sapiens
caaattcctgagctcaagccgtcctcctgcctcggtctcccaaagtgctgggattacaggcgtgaaccaccacacccagccggaggtatttttcaagaagaaaaataaagactatcccctga

SEQ ID NO: 161806 - DNA, 122 bp, Homo sapiens
acgatcagcctcttcaaaacatatatttaaacaatagaaataaacttcattggaatctagcgaccaatttggaagccactggaagagaagacaataagacctgattacacgcaaggattctc

SEQ ID NO: 161807 - DNA, 122 bp, Homo sapiens
gtttcccatcttctaagacactcgcctcacctggaataaacccttaagccgattggctctcgtactatttattggcctgtgggccaaacatttggccttcaagttgccctgaaccgactaat

SEQ ID NO: 161808 - DNA, 122 bp, Homo sapiens
gcccgcagaagcagcagcagcggcagcagcttggctcctgcgccccgctccatcctgtagcgtctgtgaatcaggcctcctaagcagatttatatcagtttggcctctgtgagggctccgat

SEQ ID NO: 161809 - DNA, 122 bp, Homo sapiens
tctggagatggcgtggtagggggctgcaaggggttgccaccccaacggcccacatcggaacgtggcccatccatcatgcctgttaggaagaggcagggtggctccttaacccaggtagtccc

SEQ ID NO: 161810 - DNA, 122 bp, Homo sapiens
gaagtccggttgatcttgctgttacccgggtcttaattggccttttcagtcattaggacgcggatccatgttgctgcgggctacagagtgggtgtaaaccattctcatatggactctttcga

SEQ ID NO: 161811 - DNA, 122 bp, Homo sapiens
cacttctaaccgaatgaatcgcaaccgagtagggaactttatgcatgattcataagtaggcgcggcccgcttgcatccgggtttctgggggtggggcccaaggttttgttccggccccaggc

SEQ ID NO: 161812 - DNA, 122 bp, Homo sapiens
agggggaggaacggcgtggttgacgtcaaggggccgcgcaagcgcgctgacggtctcgggcgatctcccggaagttactgggttttgtgctaagagggggatattcagtccctgcttgcgac

SEQ ID NO: 161813 - DNA, 122 bp, Homo sapiens
ctgttgatggtgcaagtcacgtggtcatggagaagttcacagtgcaggtcacacagttcacggtgacgtctatgatgccgttgatggtgcaggtcacacagttcacagtaacgtctatgatg

SEQ ID NO: 161814 - DNA, 122 bp, Homo sapiens
agctcaagtgatccgcccgtctcagcctcccagtgttctgggattacaggagtgagccaccgtgcccagccagaacagttattaaatacttgactttattgtttttgtagagacagggtctt

SEQ ID NO: 161815 - DNA, 122 bp, Homo sapiens
gtgcactcagcaggtactcgcaggtgccttggaaattgaatcggtgcccatccagagtgacgtaatgggggtcaccccacgcctggcactcagctgtgctgacgggctggcagccgtgctgg

SEQ ID NO: 161816 - DNA, 122 bp, Homo sapiens
ttcttccttttttatagccctataaagctcaaggcacgggggatataaggcaggcagagccgggctggggaggggggtgggcaggaggtagaggcggtcctgacacgggcagactgcgatga

SEQ ID NO: 161817 - DNA, 122 bp, Homo sapiens
aactgcctcgtttaccctgccatgatagatgcttaaataaaccgagttgcaattactcaccggatgtctgccctgcggatacatggcagggaggggtcgtgattccgagagcgtggaagcgc

SEQ ID NO: 161818 - DNA, 122 bp, Homo sapiens
cctcgcgggaaagcctgagcctcccgggccttctcgggccttctcggactttcccccaggcgtcctggaccttcttcggccttcctgggcctcctcgggcttccttgaccctccccaggcct

SEQ ID NO: 161819 - DNA, 122 bp, Homo sapiens
gcctccgaaagttagtttccctggggtgttgccgctgcgccgcggggcggggggcgggggcgggggcggggacggcgaggccgtaagcggggaggcggggcggaagacagtgggcgtggccg

SEQ ID NO: 161820 - DNA, 122 bp, Homo sapiens
gggaggcaggcttggggactgagccctcagcgaatggtgtctgacccatctccaagtagacggcgtcggaattaaactggaggacacccagctggtgcccgctgcagaactcactgaactca

SEQ ID NO: 161821 - DNA, 122 bp, Homo sapiens
gagaccggcgggggccggctccgctcttccaacccctccatgtgtgaagagggcggacgacgcagcgggggaagaaaaataagctagtctaggacaagtgtccaggcgacgtggaacccagt

SEQ ID NO: 161822 - DNA, 122 bp, Homo sapiens
ggtggcggaactctagccggtacccgggcgggaccgagaaggcggctgcacctgtcggcgcggcctgcctccaccgctgtagctgtcaccccgcagccggtgggtgtggctgctgcagggtc

SEQ ID NO: 161823 - DNA, 122 bp, Homo sapiens
gtctacatgtagaaggaccaacaacctgtccccttctttcacatgtttgtgtttgctatgcggtgccagatcctgcactgggtggtggagatacaacggtaaataagacagctaaggtccct

SEQ ID NO: 161824 - DNA, 122 bp, Homo sapiens
aaagctgacatggccaagccaaatgaaggcgcaaagccagatttccttaatttgggggagcgaaaattgggccgcctccacgtccagccattctccagcggccgggtttttcaaaacgctgc

SEQ ID NO: 161825 - DNA, 122 bp, Homo sapiens
cccaacctcgggggctgctcactttgtggtaattcatcaagttgtctacttaatcgtccacgtatgtaacttacactaagtttttaaaagttaagaggtccatgtggacagagggatatgga

SEQ ID NO: 161826 - DNA, 122 bp, Homo sapiens
ctacgccagcgttctggattattttccaaatttggttcctgataatctgagaaagctatgcgctcagtaagagcagggaccttgttttatcaaactttgatctttcattaagcacacagtgg

SEQ ID NO: 161827 - DNA, 122 bp, Homo sapiens
cagccacgtattcacatgagagggtgcgggtttcacctctcaaggcgaaggagcctcgcccgacgctgggtggtgagcacgttgaagatgaaaacatctgagagcgccgtgcaagatgggcg

SEQ ID NO: 161828 - DNA, 122 bp, Homo sapiens
gtatggagccttggatcgcgtccctggaaagggacaccaaagatttccaattccggagagcgggcccgaggaagggtcactgctcgggcgcacgaaagctgtctaaggcttgggcgtatatg

SEQ ID NO: 161829 - DNA, 122 bp, Homo sapiens
ctggtgtatttcgaagtgcaaatacaagctcatatgtccagatgaaaatacagcctaggccggccgtggtggctcacgcctgtaatcccagcattttgggaagccgaggcgggaagatcact

SEQ ID NO: 161830 - DNA, 122 bp, Homo sapiens
tgcttgctttggtggcacgctggagatgtttgggcacatgtgtcgtgcgcacacctgctgcggacagcagttgttgggtggaaatcaacagttgtagccttgacacagatggaagtgaatgt

SEQ ID NO: 161831 - DNA, 122 bp, Homo sapiens
cccacaggcggccctggcagagcttggctagggcgtagcggggacccgccccacctgcgccgcgggatggtgcccagaggggacccctcccactggattcctctggggtccgcgaagcccgc

SEQ ID NO: 161832 - DNA, 122 bp, Homo sapiens
gcagcgagccgagtgttaggctgtgcctgggggcagccctgtggcctgacagtgtcccctcgccccgtcggccgtgtggtcattctgtgtggcccacctgcctcctgtctgagaagccgagt

SEQ ID NO: 161833 - DNA, 122 bp, Homo sapiens
ggagcaggctggagcggctctagtctcctccagtaagtggctgcctgcaaacctgccagccgccccaggacgtcctccctcccgtgctatgcgaggcaggactgaggcccaggggtaggaga

SEQ ID NO: 161834 - DNA, 122 bp, Homo sapiens
gtgctgcgtgcggctccggagctctgttctcgctcctgagcagctgctaggtttcccaagcgactgtctcaaccgcccggccgcctcccccgggcagccagagcttcacatctacctccagc

SEQ ID NO: 161835 - DNA, 122 bp, Homo sapiens
gatctgaacctaggggctctgatctgaacctatgcgttgtgagtgcactgtaaggagctccggaaacgtgatgtggggctctacattatctttatcccggccctttcactccatccccgctc

SEQ ID NO: 161836 - DNA, 122 bp, Homo sapiens
agaggtgtggcatgtgacggtctgcgagccggtgtcgcgggacgccggggcggggcgggccgcccaagctgcagcccaggcccccagcccccagccctagcctcggcccggcctccggcatt

SEQ ID NO: 161837 - DNA, 122 bp, Homo sapiens
aaagaaatataatctttttactcagacatttcaacatctttactgaaaatcattgtacaacggagagtggggcacatttgttctcaaatcattgactatatattcttgccttctaaataatt

SEQ ID NO: 161838 - DNA, 122 bp, Homo sapiens
caacctgccccgtccgggtttggccccagcttcccgtgagctccagggtaatccctgtgccggctatgatagggacatctgacctagtggcctccaagtcctcccctgccccaggactcctc

SEQ ID NO: 161839 - DNA, 122 bp, Homo sapiens
acttcagcctctcaaagtgctgggattacaggtgtgagccaccgcgcccggcctgttttacgtttttaacagaattattattattttgagacagggtctggctcagctgcccaggctggaat

SEQ ID NO: 161840 - DNA, 122 bp, Homo sapiens
cggtcagtcgtgcgtggcctggctggcctcctgcccggctgcctgtcacccgctccctcccgactgccttccgctctgccggtcagcactggctcccgtcggctgccaaggaggctggactc

SEQ ID NO: 161841 - DNA, 122 bp, Homo sapiens
tgccctggtctcctgcattgagctgtggtgagcacatccggatcctgctggatgcgtgtgcggggaagggggtgccctgggttgggtcaatgagaaccttatattgtcctgaagagaggtga

SEQ ID NO: 161842 - DNA, 122 bp, Homo sapiens
ctacaggcgtgagccaccacgtacggccagcaccgggcatttttcttactttagccatcccgtgtttgaggttgctgtctgggctctgctcctacccgagggcacccctggaggaaattctc

SEQ ID NO: 161843 - DNA, 122 bp, Homo sapiens
gagccgctcagagcggaaagaacgaccgaagcagggaggagcggggtcacggaacgggggcggaacctcaaagagctgagtcggaggagacagcctggttgacaggcagggatggggaggtc

SEQ ID NO: 161844 - DNA, 122 bp, Homo sapiens
cagctgccatattttcttgcaggtggaaggcaggcccttcctggtgtaaacaaacaagatcgggccagagtgacaatcctccctgatggcccgcacctggtttataccctctattaatgggg

SEQ ID NO: 161845 - DNA, 122 bp, Homo sapiens
ccaaccaggctccccgagatgttccctggtggtgctccctgtaactgaagccagaccaggcgtctttccagtttattcaggggctggtccaatgctgggatatgtcatggtggcctgagagg

SEQ ID NO: 161846 - DNA, 122 bp, Homo sapiens
ttggtgactcccttattgcaaaccccggggccaaaaatcccagtcccactgggtgcgaggcggagaaatccggcgaggcatttctatggggagcggcccccagcatttaggagttagatggt

SEQ ID NO: 161847 - DNA, 122 bp, Homo sapiens
gacccccaatgccgcgatccctgctgcccccaccccgcccctcttctagaagcaggcaagcgtgggcttggaagttgggagggaatgctaaaccccgacctcaggagaacacaggcctatcc

SEQ ID NO: 161848 - DNA, 122 bp, Homo sapiens
caagtgttttcgggttcatcattgcatgtaagcatcctaggatcccattcttaatcctatcgcctgaagaaggcagaggattggagtgccaagagtctttggtggttacttcactgctaaac

SEQ ID NO: 161849 - DNA, 122 bp, Homo sapiens
gagatgggggaggaggatggggcttaaggacgcggtgttgccgcggctcagccatcggggcgggaagctcggggagggagagcgcctgggcccgcttctcgcctattctacgcagaactttt

SEQ ID NO: 161850 - DNA, 122 bp, Homo sapiens
tgtagggttgctcgtctgtccctgcgtttctcatggtcccctctcctttctgccccccagcggctagccttgatgtaccgaatgcaggttgcaaatattgacaagtttgaagagaagcttcg

SEQ ID NO: 161851 - DNA, 122 bp, Homo sapiens
gggctgcaaggaacccgagagatcttctagtctaatcctcttttagtctccatccccgtccggatgaagacatcgagattcaaaagcaaagtcagttgtactgtgacttcatagcaggatac

SEQ ID NO: 161852 - DNA, 122 bp, Homo sapiens
catacccagcttcagcaccctggaggccctgagaaagatatggccctggagccacaggagcggaaggagaaatgggaacgtcgccttatcaagaaccccgggagttggaaacctgcctcctt

SEQ ID NO: 161853 - DNA, 122 bp, Homo sapiens
cttgatgcctccccaggtggcaaaggctggagtcagggagagggttccgggtgtggcccgcgggagaagcacgcacatggctccattggtgtagacggcgtctcccccttccacgtactgca

SEQ ID NO: 161854 - DNA, 122 bp, Homo sapiens
cacctcccctgcagggtgagaaccgcgaggcggggccagggtccagagtggcggaagctccgagcctgggagcaagtcctgcccggctgtgcaagagcgaggacagcacagtcggctgcctt

SEQ ID NO: 161855 - DNA, 122 bp, Homo sapiens
gcgggctcccgagaaaggaaaatccgtctacagtccagcggctgacatttcccagtcagccgtagcgccgcccgcttccgcctccccgcctaccccgtgggccgaccagtcccgctcccgcg

SEQ ID NO: 161856 - DNA, 122 bp, Homo sapiens
atctcactcatgattttcgacccctgtaggacttgggcctgcctttgggggacgcggggacgcagggacgcattgagcagaagctgcaagcggatgacccatgggccaagtcaagtctgctg

SEQ ID NO: 161857 - DNA, 122 bp, Homo sapiens
acaggtacagaggcatcagcgctacgtgcttcgccttgttcaccctcttcccagccaagtcgtttatacagggttcttggttcagcctgagtcctgggaatcttgttccagctcagggcgat

SEQ ID NO: 161858 - DNA, 122 bp, Homo sapiens
cgagggggacttcagtcccaggttcattttcagatctgtttctctgtgagtgtgtgcagacgagagagcacatgatagtgtctctgggggaggggcgggccggggctcccaggtgccctgac

SEQ ID NO: 161859 - DNA, 122 bp, Homo sapiens
ctcagccaagagtccacagaggggcctttgtttaactgcatggagctcatggctgacaggcgcggcggcaggacgggacgggaccggacgggctgtgtacctgtctttataccagtaccata

SEQ ID NO: 161860 - DNA, 122 bp, Homo sapiens
aaaatgaagaatttggccctcttggccttaggtccttttcctgccctgcacacagtaacccgagaagactagaaaaccacattttctgggcctctccagcctagctgctgccagagatctga

SEQ ID NO: 161861 - DNA, 122 bp, Homo sapiens
tggccatcagtagagacagaacagtgactgcagcccccaatccccttgagccacagagagcgacagtgaccttgagtgtggagagcagcggtgaccttgagcgggtggagagtggtggtgcc

SEQ ID NO: 161862 - DNA, 122 bp, Homo sapiens
ctcgccggcttcctttccctcccaactcccctgctctaggccactgcctctggggtggggcgccgagaaggaggccctggggacctacccccggctcttctgagccaagtgagttcccagct

SEQ ID NO: 161863 - DNA, 122 bp, Homo sapiens
cgggtgggtactgggccttggtgccctgtctgggtagatgctgggccttggcgccctgtccgggtagatgctgccgggccttggcgccctgtccgggtaggtgctgccgggccttggcgccc

SEQ ID NO: 161864 - DNA, 122 bp, Homo sapiens
aggccagggtgcggaaggggcctccccggggactcacagccagtgcaggggcgggcacggcgaggcgaggggggtccccacaaagcccccaccctcactccgtcagctcctccaaggaccag

SEQ ID NO: 161865 - DNA, 122 bp, Homo sapiens
ggggggtcagggtagctctcggggaggtgggcaacgagcagagcaggtgactgtcgagggcgccccactcagggggagcagccagggaaggccccaaggctgtgacatcagcaaggagcccc

SEQ ID NO: 161866 - DNA, 122 bp, Homo sapiens
aaaaaagttctctttaaaaaaatacaaacagaagaactctttcacaatcctggtcagtcgcgcacaatcaacacttgattagaaatatacaaattaagggaaagtagtttccaccatctatt

SEQ ID NO: 161867 - DNA, 122 bp, Homo sapiens
actcaggaaggtacccgaggacttctcggtgagaaccagctccgcctcttcttccatgggcgtctccggggcttcgcttttgcccaagcgcaaggaccctgactgcagctcattatgtaact

SEQ ID NO: 161868 - DNA, 122 bp, Homo sapiens
aaacaattcctggtcattgccagaagaaagaatgtaattttcactgggagtttagggttacgtgagataaatgaaaaaaggctggtcaaaaacatattatttctacttggggtaggtttatt

SEQ ID NO: 161869 - DNA, 122 bp, Homo sapiens
acctccgccaggggcagggtccggccagtcaggcgcgagaaggctaggcgaggccgactgcgcggggtgaagacgccaggccgacagctgcgggccctaccgccagccctgacgcgagcctg

SEQ ID NO: 161870 - DNA, 122 bp, Homo sapiens
atgcatctctagtcattttcagcccagcaataacagactttgaatcttctgtacctcactcgagctctcttttaccttaaccctgcctttgcatattctacatgctcagtctggaatgccct

SEQ ID NO: 161871 - DNA, 122 bp, Homo sapiens
cccgaggctgtttgcccttgggaaggaggggcggcccgtccctggccctgcaggcgtccgcgcagccagatggtcacccacacgtttcctcaggcgtggaatccaaacaccagacgtgcacg

SEQ ID NO: 161872 - DNA, 122 bp, Homo sapiens
gaatggggatggaattcccgcagaatcacggagggacgaagtacatgagctcacgaaaagcgtctagaacagagcgcctggccgctcgccctggccacccagctgtcatgcttcgggctatc

SEQ ID NO: 161873 - DNA, 122 bp, Homo sapiens
acccctaagggtgggcgagatgggtcccttccagcaacggattccccaagatggacatcgcggtggcgtgctgggagtcaatattgtttggtccactttctcagttcctgtaatcagctgta

SEQ ID NO: 161874 - DNA, 122 bp, Homo sapiens
gatgtatacagtcataaccttagatttatctatcattttcatggctgtaactaaaagctacggttaattgaacatttattagcagtgtgccagacactgttgagctttatgagtattagctc

SEQ ID NO: 161875 - DNA, 122 bp, Homo sapiens
ccccgccccagcgtcaccagtgggacgcagagactcaggactaggaaagcacttttaaagcgttaagggattgcgaagagctacggagaggcttcctcagggctatactgggtccacctccc

SEQ ID NO: 161876 - DNA, 122 bp, Homo sapiens
cgacaaaggacacccccattgtctatgcatcgagtatgtgtcgaagggggcggctgggcccggagcggcaagacgcctgtcccgagatatcggggtcccgcgacccacctcgtgtcccttgg

SEQ ID NO: 161877 - DNA, 122 bp, Homo sapiens
acctgaagggacgcagggccaggggaaagctctttctgctcagcagctcctggagaggagcgaccctgtgccgggacacccttccccctgcggcatccagcgcagcccatctctgagggagt

SEQ ID NO: 161878 - DNA, 122 bp, Homo sapiens
tccaagtggaatgctggttatcagcaatgcaactgaaggagatggcgggctttatcgctgcgtagtggaaagtggtgggccaccaaagtatagtgatgaagttgaattgaaggttcttccag

SEQ ID NO: 161879 - DNA, 122 bp, Homo sapiens
gagtccagagagggaggtgatcatattgaagtagagacataagggcacatagctgtggctcggtgagttgagaaaggattttcagtgaagtgaaaattccaggatatgtggggaccaactca

SEQ ID NO: 161880 - DNA, 122 bp, Homo sapiens
tgaggagtgatcatggctacctcagagctgagctgcgaggtgtcggaggagaactgtgagcgccgggaggccttctgggcagaatggaaggatctgacactgtccacacggcccgaggaggg

SEQ ID NO: 161881 - DNA, 122 bp, Homo sapiens
ccccacgcctgcgcactgcgagcactggaccggcgggcggggcggggagcgcctttaacgcggctctgctagtgttcccacccccgccgggccaaccccgtgcgcaggcgcactccgccagg

SEQ ID NO: 161882 - DNA, 122 bp, Homo sapiens
ttcccgggagacttaggcggtgagggaggtgcagctccacggctggctttcgcagagcagcgaagctgatcttgctttctggttatcaaagaggtcatctacgtcaacccttgggtgtcacc

SEQ ID NO: 161883 - DNA, 122 bp, Homo sapiens
gaattaaggaccgccctgggcattggtcctttgtttcagcaatctgccgtttgattggtccgagagctgggggcggggatttgggccgctgccgggagaagccggaattactttggagagcc

SEQ ID NO: 161884 - DNA, 122 bp, Homo sapiens
ccggacctgcgcgtcatgtatcgaggctgctgccgcagtaggcgggggcggggcctggggcgggaccacccggacctgagcgtgacgtatcggggctgctaccgcaatgcgtgagggccagg

SEQ ID NO: 161885 - DNA, 122 bp, Homo sapiens
aaagacaaagcctgtgctggggtgtgcaggatataaggttggacttccagacccactgcccgggagaggagaggagcgggccgaggactccagcgtgcccaggtaaaagtagggaaggggct

SEQ ID NO: 161886 - DNA, 122 bp, Homo sapiens
actcgatcacacccgccgaggggaggaggggcgggggcgggggcgagccttggccccgcgcgggtcacgtgcccaaaacacgctcacgtgatgcgcgccccgcccctcgagccgggcccatg

SEQ ID NO: 161887 - DNA, 122 bp, Homo sapiens
gcaggcgccttggagcagggtctcgggggtccccggaacagtcacgtgttctcgagacgccgttaaacccccgccccctcttccccaccgccgcctccaggtcctgctcccgctgctgccgc

SEQ ID NO: 161888 - DNA, 122 bp, Homo sapiens
caaaacatgagttgagaagtaccaaaacaaatggtcttgacctgggctcccaaatccaaacggaacaaagagacaatcaagatcaacagaaatcagtgtagaaaaagtcagaggcaggtgga

SEQ ID NO: 161889 - DNA, 122 bp, Homo sapiens
acatgggatggaatgatgaggtacgaccccagcgccgcccgcccagctccgccgcaccttcgtcctgccttctgggactgacccccagctctggccacaaggacagcgcccctcccacccca

SEQ ID NO: 161890 - DNA, 122 bp, Homo sapiens
atgaacgcaaggagctgcagggtgagccaaatatcctgtcggccgttttctcttcggccgcggcctagcttcagcccggagcctggatctcgagtaactaaccatatccagggaaagacgcc

SEQ ID NO: 161891 - DNA, 122 bp, Homo sapiens
gcattaagtattagtggcagaaagtattcctgacattgtaagtttctccaaaaagtaaatcgttcacaaatttaaaaatccttccatgtcagtccttacaatgccacacagtacaatggaaa

SEQ ID NO: 161892 - DNA, 122 bp, Homo sapiens
ggtgctgcgaggctcctccggttggcctccaggcgcctcccctttgccgggtttgatttgcgtgggttttctccgtacagccctggttttgcagatgggagagccagaaacgcagaaaagtt

SEQ ID NO: 161893 - DNA, 122 bp, Homo sapiens
atagaactaacagtaaaccctgccctggagggcttctggtagggaggagagacaataaaccgaataaactagtacattatttggaatattagacgctgataagagctcaagtgaagcatggg

SEQ ID NO: 161894 - DNA, 122 bp, Homo sapiens
attgttccagccacagatgaggaaacgcagagccttccaggtgttataactcttttctcacgcctctcttacaatcctcaggaaatgtcgcccccccccccccccgaccccccgccagcccc

SEQ ID NO: 161895 - DNA, 122 bp, Homo sapiens
tagaacgttatttcctacaagttctggatttgctgtacgcgttcaggtctctaagccacccgaactgtgtgtggctggaaggatcgctccatgaccacgtacgctggcggcccctcttccgg

SEQ ID NO: 161896 - DNA, 122 bp, Homo sapiens
ttcctcagggaccccctccacactcagtagtcctcgccagcctcagagaggtttccgccacgcctgccacccgcctgggccgtgttacccacgtgttttgtcttcataacgtgggtggcggg

SEQ ID NO: 161897 - DNA, 122 bp, Homo sapiens
gatctacaaatggtaagatggtcctatggtgataatgaaggataacctgtttcaggttggcggttttctgttcagattcaatgttaggttactgctgagaaacctgaagaccaaaagatgga

SEQ ID NO: 161898 - DNA, 122 bp, Homo sapiens
aggcaaagcagacgcgcactagcctggaattaagacacgtattcacacattggttaaggacgccaagcagatactaatccgtggtgttttcacagaaaagagaaaatgcacaggcagcacat

SEQ ID NO: 161899 - DNA, 122 bp, Homo sapiens
ctcaaagccctcgcgcagcggcaccgtccccagcttcatcttgaacttcttgagctcctccggtgtcaggttctccagcaccttcaggatggcctcgcgcttcgttcccatggctcagccct

SEQ ID NO: 161900 - DNA, 122 bp, Homo sapiens
agactggcccggccaacacagtgaaaccccgtctccaccaaaaccagtcaggcgtggcggcgcgtgcctgcaatcgcaggcactcagcagactgaggcaggagaatcaggcagggaggatgc

SEQ ID NO: 161901 - DNA, 122 bp, Homo sapiens
ggcccggggtgctcaccgggatagttcggggtcaacggcgtccacagggtccacgggttccgcgggccgagggcgaggagggcggccccggcgggcatggggccaggggagtggtggggttc

SEQ ID NO: 161902 - DNA, 122 bp, Homo sapiens
tccaaatggggactcgggttgcctgggaaatatctcagtaacccgacctccgctccaaagcgcccttgcggcgtccggtcaggcgcggggctttcctccagagctccagggcccctggctca

SEQ ID NO: 161903 - DNA, 122 bp, Homo sapiens
cgccagcgccaggctcctcccccccggcgcggatgacactagaacctccttaagttgcgtcgcgccacagctgtctgcgaacactgagctgcctggcgccgtcttgatactttcagaaagaa

SEQ ID NO: 161904 - DNA, 122 bp, Homo sapiens
aagcatgcatgggtgcccaaaggtggtgggctgctgcgggtggggagacctgtgtgattccggcaggcgcccccccccacccccacgctgcaaagggccgccggacttagcggatgcaaaga

SEQ ID NO: 161905 - DNA, 122 bp, Homo sapiens
ttctgagctgctgctgcctccaacactgaggtccactgaaatattcctgtcagtagacttcgagcaggcagttattataaaaacgcagtgaaatctggggcaaggggtggggggggggaatc

SEQ ID NO: 161906 - DNA, 122 bp, Homo sapiens
gggtaaggataggaagacggcaggatgcatggtaacgctggggtccgtgacagggacaggcgctggcggctgggactgggctaggttgggttgggttaggaaagggctgggctccgggagcc

SEQ ID NO: 161907 - DNA, 122 bp, Homo sapiens
ccggcacctcgggaggccgaggctggcggatcacttgcggttaggagatggagaccagcccggccaacacagcaaaaccccgtctccaccaaaaaaatacgaaaaccagtcaggcgtggtgg

SEQ ID NO: 161908 - DNA, 122 bp, Homo sapiens
gggcccgccttcacccgggctgttccagcgcacagccagggcagccaccagcagcgagagcgcagggttcagtgaggtgtactccgcatccaccaggagccgcacgtgctgggcccgggcat

SEQ ID NO: 161909 - DNA, 122 bp, Homo sapiens
tgcctttcctcctcctgtgtctacacgtgggtgatggggccacaatgacgacctctgagccgtgttgaagcagcaccgcgtttctggcgtgcgttaaggtgacccgcactgagagccggggt

SEQ ID NO: 161910 - DNA, 122 bp, Homo sapiens
ctctgctgccgccgagcttcgaaggtgtgcagtgttgagccgtgtcttgttccgtggcttcgaggggtgtgcgcgcttcctatacctccccggaacgcgcgagatagtcacacgcgccactt

SEQ ID NO: 161911 - DNA, 122 bp, Homo sapiens
gcagcgtctcagagacggagggaccgtcgcagcgtctcagagacggagggattgtcgcagcgtctcagagatggagggattgtcacagtgtctcagagatggagagattgccaaagggggtt

SEQ ID NO: 161912 - DNA, 122 bp, Homo sapiens
aggtagagctaggagagatggcaggactgagctgtatctgtcgggggaggaggggggaggcggtgtggtccagtccccatctggtggaaggtgacagtccttagtctaatctgcatagcatg

SEQ ID NO: 161913 - DNA, 122 bp, Homo sapiens
tctgggactggtaaagaacagagaggggcactggacaacatcagccaagtaaaagtagtgcgggggttgggtcccaagtgatctgtcaacatcctgaaatgatattttgagtgaccagagaa

SEQ ID NO: 161914 - DNA, 122 bp, Homo sapiens
agaagaggcggagaataaccccgtagggagttaagcggcctctgcctacagcgttcctcccgcctccacggcgccgagccctgattgacgttcagccaggccaatcatagcctgtgtctgag

SEQ ID NO: 161915 - DNA, 122 bp, Homo sapiens
atgcctggtgagtggcggacctgcctagagaggcttctggtgtgctccttcctgccgctccgtgaccgtgacagcctctgcagtggtgtggaaatcagcacattctctttcttactccgaag

SEQ ID NO: 161916 - DNA, 122 bp, Homo sapiens
cagcatgcaccaccgtcacttcccaagcagggtttgtgtcccggcaccatgccaggctcccgagtgaatcattggcacgttttaaggactccctctgcgccaggcccatctcacccccagag

SEQ ID NO: 161917 - DNA, 122 bp, Homo sapiens
aagcttcaccttggtaaactgaactcagtttaagattaagaaactgatttcggccgggtgcggtggctcacgcctgtaattccagcactttgggaggcccgggcgggcggatcacctgaggt

SEQ ID NO: 161918 - DNA, 122 bp, Homo sapiens
cccttataaaaatcaggtcttataacactttctcaggttctgttgatcaaattatagagccggcaagcatattgacttcttgaaagtcactttatccagcaagccaatagttgttttaaaac

SEQ ID NO: 161919 - DNA, 122 bp, Homo sapiens
tgcaagacagggagacacaggcttacgcagggtccctgcccgcagcacactctccaccgccggcactagtcagcattactccctgtgggatattcccaaagtccttccagcaacagctgagc

SEQ ID NO: 161920 - DNA, 122 bp, Homo sapiens
agggtcaggaaattatctttccactttccctactaaatggacaaagtattcatcttggggcgaaagagcaattctgaaactccaagagaaagcaaggacttccagaagccattggtccaggt

SEQ ID NO: 161921 - DNA, 122 bp, Homo sapiens
gagggcagcaggtagctgagcaggggccggagccagcggaggatggcgggcacctggcatcggagcctgaggtgcagccaagtgacaggtcccccctagagcactcctcacctgagaaggag

SEQ ID NO: 161922 - DNA, 122 bp, Homo sapiens
agacagaactcctcagacaccggattaaagaaggaagaggtttttttattcggccgggggcgtcggcagactcgtgtcttcagagcggagctcgccgaaaaagaaattcttagccctttgaa

SEQ ID NO: 161923 - DNA, 122 bp, Homo sapiens
gagtactgccactttaagagaggaaaatgattacaagcaaaaatggctgtaaagtcctggcgttgtgcctgacagaatttggagcccagtggtattattttctatgtttattactccatgca

SEQ ID NO: 161924 - DNA, 122 bp, Homo sapiens
tgggggagcgtggccaaagctaaagcagtggctggcagctggtggcgctgtggttccagacgaggcttggaaggaggctgtggggtgggcggggaggacccgttatggggcctcaggatcca

SEQ ID NO: 161925 - DNA, 122 bp, Homo sapiens
ttgctacacaaatgtgcagccagccttttttcttaggcccactgagatccctgctcagtgcgtctcaattgtatctccagtctaagaggagggtggggggcacccggggcctcctccactcc

SEQ ID NO: 161926 - DNA, 122 bp, Homo sapiens
cgcagggcacccaaagcggtaagggaggaacccggcccgcacacagccccagaagcccagcgacccctaagccacgtaccgtccccaggcagctcctcgacggctagagctctcgggggccg

SEQ ID NO: 161927 - DNA, 122 bp, Homo sapiens
gaaggcagacgggcccggggcgctgtggcttgatttgcaggtggttaggtggttgtcgtccgcagcgggaatggacgctgcggaaccccagcactcttccactctgccctccctcgcgaagc

SEQ ID NO: 161928 - DNA, 122 bp, Homo sapiens
ctcatccctgtctgcccctcccccacccaccctcacgcacacacaacatatgtggctaaacgaaattcaaaccaagggaaagacagagaaagggaaagatgtgcctggatgtctgtgcctct

SEQ ID NO: 161929 - DNA, 122 bp, Homo sapiens
cctgcagggcccagtgcggggaccagagggatgtgggatcctgaggatcactgtggggcacggacgctcaatcctcagtccccagtaagggaaagccgagggggtggcagaaaagtgtgtgt

SEQ ID NO: 161930 - DNA, 122 bp, Homo sapiens
aggacttcagcacctaagacagctccaaaacaaaccagaacagtcagctccgggggagcacgactgggcgaggtaagtgaaaactttacctttcctcttctttttccctcctgcctctggaa

SEQ ID NO: 161931 - DNA, 122 bp, Homo sapiens
caacagccccgccctgcacatcggcagtgtcagcgccacagacagagactcaggcaccaacgcccaggtcacctactcgctgctgccgccccaggacccacacctgcccctcgcctccctgg

SEQ ID NO: 161932 - DNA, 122 bp, Homo sapiens
tgttcggctaagagaactgcagttacatctactttcagcctctcagtctctctctacttccgagtctactctcttccgtggctcttttatctttttctatcttggtgcctccttctctgttt

SEQ ID NO: 161933 - DNA, 122 bp, Homo sapiens
cgtaccgtcccgactccaaggcgcctggctttgaggcgggctgcgtcttgctcggagtcccgccccttgccgggtcgagcaatgggcgccttccgtttggcgcaggccccgcccctgtcgct

SEQ ID NO: 161934 - DNA, 122 bp, Homo sapiens
accagaccgctaagcagctttaaacatggtcagtaaggaggaaaatgggggggcggggggcgcggtgagaacagaaccactacaggaatatacaaagttattcgtttctgttgaaaaggact

SEQ ID NO: 161935 - DNA, 122 bp, Homo sapiens
ctgtcttagagacacagagagcagtgaccgaatgcacccgctgactcatcactgtgtcaccgcccaggctgaacctgttacacagagccgccttcaattctgctagataatctaggcctttc

SEQ ID NO: 161936 - DNA, 122 bp, Homo sapiens
aggagccaactgtgtgcacctcttgccaaggccatgtttagggaagacacatagatagctcgaaatgagccattctggaagtatttacactatggaaatcagcaaacactacaaatcaaggc

SEQ ID NO: 161937 - DNA, 122 bp, Homo sapiens
gaagttttcagaaacaagctactggaactgtggtgagatcagcacggtgggcagagcaaccgtgtgctatctgatttgtaacctttattttgcacataattgaatagcatatttatttgaca

SEQ ID NO: 161938 - DNA, 122 bp, Homo sapiens
cagccgcgcgtgcgcagtcgcccagactcgccgtgtgcagtgggagtggctagccagtctcgctagcgcaggcgcaggccctcccgcccaggcccttgcgcaaggcaggccatctccccgca

SEQ ID NO: 161939 - DNA, 122 bp, Homo sapiens
tttcccaggcccgtgctggtcgccacctacactttggggactcccctgttggcaactgctcgcaccgagcagtggaatctcagtccgggagtcgacgacttttcgcttctggctagctgctc

SEQ ID NO: 161940 - DNA, 122 bp, Homo sapiens
gaagcgctgcgggccgcagggtgcatcgaagacgaatcaccgcaggcaaggccgggccctcgggagccaatccccacgaagcaaggtgcccatgggggaccacatgggtgcctcttcctctc

SEQ ID NO: 161941 - DNA, 122 bp, Homo sapiens
gttaatagggtagaatagaaatatcagaatatgtcactcatgggaagggaactgctgtttcgtggaaatgttgtttcacagagcgcttgttttagtcaaaggtgaaagctactggcatggaa

SEQ ID NO: 161942 - DNA, 122 bp, Homo sapiens
tgatttacattcaaaatttcctgcctactctttaactgttatttttattactctttgatgcggtcctttttatccaagaaaggcacttgctcttacactccctctcataatgacataagcct

SEQ ID NO: 161943 - DNA, 122 bp, Homo sapiens
acggttaatcctccgcggctgctgtttggacgaaaagcgctgggggtgttggaggctcctcgctgctcacatctggctgggcttcgctccttgcgcgtctgtcccactttctccctctcttc

SEQ ID NO: 161944 - DNA, 122 bp, Homo sapiens
aggacaagggaggcagagatactctaaaatactaatacgcagaactagtgttacatagaccgtgcccaaacagatacacaatgaaaaatcaaggatatcaaaagggcctttcattacatacc

SEQ ID NO: 161945 - DNA, 122 bp, Homo sapiens
gcactgcaggagagaatgcccagtgaccagtcactgaccctgtgcagaacctcctggaagcgagctttgctgggagagggggtagctagcctgagagggaaccctctaagggacctcaaagg

SEQ ID NO: 161946 - DNA, 122 bp, Homo sapiens
gaagctgccctagccggggtcgctgatgattcccacgcaccaagtccagcatcttctctacggtctggtccgggtgtgtcgcttgggaacgtctgattttcatgaccaccaccccaccagca

SEQ ID NO: 161947 - DNA, 122 bp, Homo sapiens
aggaatgctgggttgtctgtgtgcttgcataaagaatctccaacagccttggtgccggcccgaactggaatcttcctctccctggagctccttctcttgggcctttgtttctgagctgcagt

SEQ ID NO: 161948 - DNA, 122 bp, Homo sapiens
cttcccgggtgagccctcaggatgctgcagtgacccggccagggccctccacggggaggccgatgagtagtggagtcgcaccggcccagagagccaaatgccaccatgcttgatgcccgggg

SEQ ID NO: 161949 - DNA, 122 bp, Homo sapiens
ttcaagcgacatgctctacaatattcagcagctacttgctgcacctgttgggccagttcccgagttggtgccagcaccaaacactaaggaaagagaaacagctttcagcacaaacctggata

SEQ ID NO: 161950 - DNA, 122 bp, Homo sapiens
tgagatctaggagtcacagacgccctttatctgacagtcctgtttctctctccagtgtctcggccccacatccatctcttcctgggatctcacctgctatcctcagtacttcctgggcccac

SEQ ID NO: 161951 - DNA, 122 bp, Homo sapiens
gcgtcgctggcttggagacaggtgacggtccctgcgggccttgtcctgattggctgggcacgcgtttaatataagtggaggcgtcgcgctggcgggcattcctgaagctgacagcattcggg

SEQ ID NO: 161952 - DNA, 122 bp, Homo sapiens
cgccgccgtcgccgccgcgcctttgatccatggcccgaggccgcctgacagtggaaaatgcggggagacaaaaccactcagtcaaagtgattcccaacaactgtctccccgagataaggacg

SEQ ID NO: 161953 - DNA, 122 bp, Homo sapiens
gagctgtccaggcgcggagctgtccaggcgcgggagctgtccaggcgcgggagctgtccacgaggcactgaccttggtttcagagcctctgcagggcttctgtgtccttttggctgagccga

SEQ ID NO: 161954 - DNA, 122 bp, Homo sapiens
tgggaggaccctcctagagagcctgaaatcccaacctgcccaatgtacagacggggaagacgaggttcggagtggggcagggacctaccccagagtccaccgtgactcaaagccctgcccgc

SEQ ID NO: 161955 - DNA, 122 bp, Homo sapiens
ccagggactttccttggtaagccttcccatttttgtttgcccagctttcccaggcagagacgatgttagtgcagatgaaggtcaaggagaatctcaagtctttttttttttttaaaaaaagg

SEQ ID NO: 161956 - DNA, 122 bp, Homo sapiens
tgaatcagggatggtgcttaatagtcctataggggcagaagcagaccagtcttatttactcggcacaaaaggaaccctccttggataatgctgagcatggaggtcatgtcctgcttgctgtt

SEQ ID NO: 161957 - DNA, 122 bp, Homo sapiens
tgtgccccctcagccctaagaggagggggtggtcagatgatactgctgccctcggactgccgaggacacaaagccaggcctaaaaccctgggaaagcggggtcagagtcctgcgtccgccct

SEQ ID NO: 161958 - DNA, 122 bp, Homo sapiens
cgcagcgctcggaaatctccctcaggatggcgtccacttccgcgcaatcctgccccgcagcgctgaccaactcctccaggctccttttggccttcgccttgagcaggaagggctcggccgcc

SEQ ID NO: 161959 - DNA, 122 bp, Homo sapiens
caggttgtggttggtgggcgtggaaaagtagagctgctcactcgacgcgtggttgtcgcacgggctgcttagccccagcgtccgctcaaagtccagcagctgccccatgaagttgaagttgg

SEQ ID NO: 161960 - DNA, 122 bp, Homo sapiens
ttgacctttgcgggtctgttcccgctgcggcgccggcagctgcttggtagttgcggggggcgtgagggcggtggcccagaccaaccggctggcagcccagctccgctccgcccgcccctgcc

SEQ ID NO: 161961 - DNA, 122 bp, Homo sapiens
ctgatggagctgaaaaccaaggctcgagaactacgtgaagaatgcagaagcctcaggagccgatgcagtcaactggaagaaatggtatcagcaatggaagatgaaatgaatgaaatgaagtg

SEQ ID NO: 161962 - DNA, 122 bp, Homo sapiens
agaagaaccgatgtttcaagagaagcagaaggctaaacactcccaagagtgaggcgaacgcgaggcagtaagcgaatcttcctactgctgtctgacaggttgtcattaggagcggaggagga

SEQ ID NO: 161963 - DNA, 122 bp, Homo sapiens
ccagggtgctgctccgaggggatctcaccacttttccacatcttcttgaacttggaccggcggttctggaaccagattttgacctttgaggaaaaagacctgagcattagtggaggaaccta

SEQ ID NO: 161964 - DNA, 122 bp, Homo sapiens
aatgttcaatgcagagaatggaaagtagcgcatccctgaggctggactccagatctgcaccgccggccagctgggatctgactgcacgtggcttctgatgaatcttgcgttttttacaaatt

SEQ ID NO: 161965 - DNA, 122 bp, Homo sapiens
gtcctctgactcctattcattatctccagcagcatatgggaccattctcctacgtatcctcgcctttttcttctgaaaaagcaaaagcaaccaagcctgtcccgcttcagagcaatcctact

SEQ ID NO: 161966 - DNA, 122 bp, Homo sapiens
cctgcataaacgtgtgacactccatcacgaaactccctttggttatctgcttaaacttatcgcaaatgtctggaacgctggtggcttccaaaatcaactcctggtgctgcttaattaaggtc

SEQ ID NO: 161967 - DNA, 122 bp, Homo sapiens
catttgttaaagtaggtatttttctatttgtcttttcaagtttattgtattgtattggaccgctgctatagatggacaggtcaagcaaagagaaacttcatttcccatgctgttgttaatag

SEQ ID NO: 161968 - DNA, 122 bp, Homo sapiens
cctcaagtcaggtctcccggccagactcaggcctttctaatacaggcgtgaagggcgggacgcccagagccctcttgttggccggtggctaaggagccaggtggataacttctgcggattcg

SEQ ID NO: 161969 - DNA, 122 bp, Homo sapiens
cgccgcgcccctcccagccccgcccagcgagggaggaggacccaaatgtccggcaacccgcgccctgaacttcgctccaaaacagctgaagacgacaacgttggggcacaccctctcgctgg

SEQ ID NO: 161970 - DNA, 122 bp, Homo sapiens
aacagctctgtcttatttggcccaagccactggtggagacaagggctattgcttttatttcgtgatctccctgcaggtgaagtaacacaacaaactccacatacgtacacaccccacacaca

SEQ ID NO: 161971 - DNA, 122 bp, Homo sapiens
gctcgagctgaaatccctgcaggaggaaccggtggagggcttccggatcaccctggtggacgagtccgacctctacaactgggaggtggccatcttcggaccccccaacaccctctacgaag

SEQ ID NO: 161972 - DNA, 122 bp, Homo sapiens
aaaaataacgaaaaataatgaaaccaaaatgcatgcagaagcataaatcccgcagttaaacggtgctatatttcaccaatgaacttaaaaataactctggggctttcttattcaaatttaga

SEQ ID NO: 161973 - DNA, 122 bp, Homo sapiens
gcggggccagggcgggacctgtgagtctctcagcatcgttcccagcgcagaggcatttttcgggttttggaggcgagaccggccaggaaggctgaggcatgattcaaaagccctggaattat

SEQ ID NO: 161974 - DNA, 122 bp, Homo sapiens
ggtggacagattgcctgagctcaggagttcgcaaccagcctgggcaacatggtgaaaccccgtctgtactaaaatacaaaaaattagctgagcgttgcagcatgcgcctttagtcccagcta

SEQ ID NO: 161975 - DNA, 122 bp, Homo sapiens
gcgggtcaacgcagcttggcggctgcgagccagcgagcggcgcgtgacgaagagcctgagcgacgggtcactttggccaatgatctgcagccgccagggtattgcagccagtggcgagtcga

SEQ ID NO: 161976 - DNA, 122 bp, Homo sapiens
ccgacaagggactgcagtatggtaagaagccacatctgctggctggacttggcaaacccacgctccaggctgctctgggtacagtggggacagggagtggggacacagaccggaccctctcc

SEQ ID NO: 161977 - DNA, 122 bp, Homo sapiens
ccgaaggcattttccatttcctaggcccctcccgcttcccgtccctcacctctagcccctcggcttcagctcaggcccctcggggagcatcccttgccgtgagactgacagcctttgggggc

SEQ ID NO: 161978 - DNA, 122 bp, Homo sapiens
ccagtctgtgaccctccgccccccacagggcagtgagtggctttctcccctcagcagagccgaggctttgagcctcccggaacctctggactttctggaatattccattttaaatgagtaaa

SEQ ID NO: 161979 - DNA, 122 bp, Homo sapiens
tacagcttctggaagctataagtagacccagagatggacccagggatcttagaaatcatacgtgaaactttgagaaggaagttgcccttgactaccacaactgaggtttggagtaagagttc

SEQ ID NO: 161980 - DNA, 122 bp, Homo sapiens
accttttctgaccagtggcgtctgcaggaaagaatgtgggtgccagtgagcaaaggttcacggtctcccccaaacctgtccctctgagacagaaaaatgctggggctggggtcagccgaggg

SEQ ID NO: 161981 - DNA, 122 bp, Homo sapiens
tccacggcactgcttccggtacagcatggaagccgctgttattttgaaaacgatggtggccgagagggcacccctgatagaagactgccaatcaatagtggctagaggggcggagccaaggc

SEQ ID NO: 161982 - DNA, 122 bp, Homo sapiens
ggacgtggatggactcactgacgggccctgcgaggcgcacgcctcccctccactccggagcggctcggacacctcccaggtctcagttcctgggcctcacttaggaagaggcttcaggcgtg

SEQ ID NO: 161983 - DNA, 122 bp, Homo sapiens
catttagcagagtgctgggcatacggaagacagcaggatcccgtggctttgcctgaaacgcggaacctggtcttgacttttgagtgactgagccctcctggtgcccgcactctggccgggag

SEQ ID NO: 161984 - DNA, 122 bp, Homo sapiens
tgggatctgcaaattcctaaggtccttttatactctggggccctacaaagagaggaaccacggctgggctatttgaggagagaaattaggtgagtatgatccctcctgaggaatgttaacta

SEQ ID NO: 161985 - DNA, 122 bp, Homo sapiens
gtacagattctgcagcagggcagccactgtgctcttcccagacccattgggtcccaccagcgccgtcacctcgccagggcgtagggtgaatgtcagcccctagaggccagagaagcacacga

SEQ ID NO: 161986 - DNA, 122 bp, Homo sapiens
gctgtgcccatgggagacgtgagtgacgcccggcagtggccgactcttctgcggtggctgcgcccacgggagacgtgagtgaccccggcagtggccgacttccacggtggctgcgcccacgg

SEQ ID NO: 161987 - DNA, 122 bp, Homo sapiens
aggcttgcggggagttctcttccgccgtgtggcgggcaccgccctggccttccgcaccctcgtcacccgcatctccaacgacctcgagctctgagccaccacggtcccagggcccttactct

SEQ ID NO: 161988 - DNA, 122 bp, Homo sapiens
ttatttcagattgtcaatagtagaaagggcagagcctcttctgccatctggagggttgagcgtctcccagctccctggaactttgggatggtttcgggcccctgtgccccatggcacgtgga

SEQ ID NO: 161989 - DNA, 122 bp, Homo sapiens
cattccttcctctactcttgcccctgccattttgtcttctttgctcttactgaaactacccgaattttcctatccctgccttctctctttctcaccttctctctccatccctcctcatccct

SEQ ID NO: 161990 - DNA, 122 bp, Homo sapiens
tgtacggagggcgggggcgagctgaaacagccaatccggcaagccgcgcgtgaggccagacgccagtcccacggggattgaattatgtacacacacaacccccaggcccgggggagggggga

SEQ ID NO: 161991 - DNA, 122 bp, Homo sapiens
cctggccccgtgctccagggggagcctcctcccggccggctgtgctgagctccgcagcgccgggtgactccctgccaggtcacacggagcttatctggctccaggtgtgctccctcacgccg

SEQ ID NO: 161992 - DNA, 122 bp, Homo sapiens
caggaaatacggtaagagcgaaacaggaggaagccagctctgtgcctggaggggactcgccgccatctcaggtctcttggctttgccagggcccaccggagaaaactgacgacccgtttctg

SEQ ID NO: 161993 - DNA, 122 bp, Homo sapiens
ctggctgctgtgccctggggagccagctccctgcataagtgcacagatagacagatagatcgtattaagcatacaacattcaggggcttcatttggaaaagacactgattctaaatggctgt

SEQ ID NO: 161994 - DNA, 122 bp, Homo sapiens
taaggaagggtgactgagtttctaaggggaatacactttccagggccaccactgccctcgcgatgtagagcatgcaaattcctaacatgttcctgtgtgcgcagacggcagaggaagcagag

SEQ ID NO: 161995 - DNA, 122 bp, Homo sapiens
tctatgattctgaagggactgagaagaattctaccccaagctctcacccaaagtgagaagcgcccgctgtcccatgctgccttgagcactgacatccctttggcctgtccgagagccagagg

SEQ ID NO: 161996 - DNA, 122 bp, Homo sapiens
cttcctggtcgcccccgtccagctccgtgggcaagttgttggggtttcctccaaacagttcgtaccacaaaccgtgcagcaagatcttgtactgagggcgagacccaatcagtagaatgctg

SEQ ID NO: 161997 - DNA, 122 bp, Homo sapiens
ggcctgtctgtcagcgacctttttgcagggactggggatgagcagccaccccgtcacaagcgagcccagccacggagcccccgtagtggggttctcggagcccctctggtctggtctgtttc

SEQ ID NO: 161998 - DNA, 122 bp, Homo sapiens
cctttgctcagaggaaggatgcgatgcaggcgcggggagcgagcggcactacagaggaaacgcgggagcagcagcacctaggcgcatccataatttataaaatgccagcagcaacaaaggca

SEQ ID NO: 161999 - DNA, 122 bp, Homo sapiens
gtttacttgcctgctgtcatgtggtcaggaagtggggagccaggctgtcaggcaacaggccggcattttgggccaaaggagaagagattatttttatacagattggaaaaataaaaacaaca

SEQ ID NO: 162000 - DNA, 122 bp, Homo sapiens
aatacatgtatcttgtggaccatgggcaagctgcaatttaaaaaatgctgtttccttgctcgtgccttggttgctaacctttctcacttaaatcctatcaaacaacttatttggagtcaatg

SEQ ID NO: 162001 - DNA, 122 bp, Homo sapiens
gccttgggttccgagggacccagctgcctgaatggacacgagtaggaggtttttgctgggcgtctttgcggtggcgggaagcggtgagggagggaaagaaggatacaagctcaaggggcagg

SEQ ID NO: 162002 - DNA, 122 bp, Homo sapiens
atgagtaacgtttgtatagctcctgtggcagtgcctgatatataacagctattcagtaaacgtttatgtctgcctaacttgttgctctgctgttagttgggacctgaacagtgggagccttg

SEQ ID NO: 162003 - DNA, 122 bp, Homo sapiens
cccgcgccccgctcgatctgagctccctctcggcgcacgcccctccctcaggctgccacgcgttacactctgagtcccgggcctgagcccgtatttaaaggcttttgcctgcgaaggcggag

SEQ ID NO: 162004 - DNA, 122 bp, Homo sapiens
ttacgtctaatgtgggatttgcgctctctctaacgctaaaatggaatacgatgataagtccgctcaaaatttcttaataagcccacttaaaagtagtcacaaacacacccaaactgagaaga

SEQ ID NO: 162005 - DNA, 122 bp, Homo sapiens
ggtgcaaagttaagagccccaaaaagcagtgataataaacatccctcttgtgctccttctcgccaaataaagcgaatgggtggaggaaatcctgggcgagccctcctcggcagggtccctca

SEQ ID NO: 162006 - DNA, 122 bp, Homo sapiens
cgggtgagaagtagctgaataacctgcagggggcagcagagccccaggccagtgactccacgccgaggccagtgtggatcctgcaaaggaagagaaagagagattccctggggtcttcccgg

SEQ ID NO: 162007 - DNA, 122 bp, Homo sapiens
cagactgctgagaatgccattatttcgtttcttactcagccataaaagggaacaaaataacgacattcgcagcaactgggctggagttgtattcagtattttatgtccaagtagtattcagc

SEQ ID NO: 162008 - DNA, 122 bp, Homo sapiens
aaatgtaaagtcagctgatatgtcaacagcagggaaataattcattgtctcttagaaaagcgaatgccaataacaatagccatgattctggcaacagagtagtacttcagagggtcactttc

SEQ ID NO: 162009 - DNA, 122 bp, Homo sapiens
gtgtggcgttgccacagtccagtgtctgtccaccaggtaagcttgattttggtcagccggcgcctactcatcccccgccacgcgcagtcacagacacacacaataatgattcttccatggca

SEQ ID NO: 162010 - DNA, 122 bp, Homo sapiens
tgacagtagtaactatacagggtgatgtgagtgtaaaaccagctaatgtgagccaaaacccggctaatttttgtatctttagtagagacagggtttcgccatgttggccaggctggtttcga

SEQ ID NO: 162011 - DNA, 122 bp, Homo sapiens
ttggttaattttcaaatgttatctaaatggccggttgtccttccggatccccattgattccgattgggatgacactataggagaggcagaaccagtgaaggaaacataacgtttattcagga

SEQ ID NO: 162012 - DNA, 122 bp, Homo sapiens
ccgggcagggggcgaggccgggggaccgggcgggcctggggagcaggcacgtgtggagggcggacccgccgggggtcgaggcctgcctctccgagagctcctggcgcggccgtcccggcccg

SEQ ID NO: 162013 - DNA, 122 bp, Homo sapiens
ttccctgacaatttgcatctacctggatttcaaattgtaacttactcaattgtgctatttcgtcatgagacagtcagccctgggtacacctcacctttgcttttaccatacacagaaggagg

SEQ ID NO: 162014 - DNA, 122 bp, Homo sapiens
ggggtggagggaaagctacgcaggagctctgcggaaggcccaaggggtgttcggggcacacgaggggtgttctgccccaacagtggggtccgggaaggcttcacagatgagggaacccgggc

SEQ ID NO: 162015 - DNA, 122 bp, Homo sapiens
aatttgaagaatttgaaaaggcagaatgcaaatgccagtcttagagatttccttgtcagccgctgaaggggaaaagcccctctttgtggggcagtggagagagaagtggagtgtggagttct

SEQ ID NO: 162016 - DNA, 122 bp, Homo sapiens
tctgctgccaggtccttgggtgctctggttgctgggctgggcccagcctcctcctaagtccgtggatcttgcaccctatacagcctgcagaatttggctttctgcctgtccctcctttctcc

SEQ ID NO: 162017 - DNA, 122 bp, Homo sapiens
cggcagccgcggcgccgggctccacagccagtggcctgcaggtggctgggaagtggaactcgcagaggaagccatcggccttcacttcgcactgctgctcctcccagatcggctcgctgggc

SEQ ID NO: 162018 - DNA, 122 bp, Homo sapiens
actcaattctcaccaactctttctctctctggtgttttctccttttctcgtaaactttgccgcctatgagcagccacattgccttactgaaatccagagcctaaccttcaatcccaccgccg

SEQ ID NO: 162019 - DNA, 122 bp, Homo sapiens
ccatctggggagcctcgagaaccaaggctgacaggaagcagcctccccgacagggaacaccgggctccaccatctaggacacagccagctgttaccctcactagcacggtggagtgctgtcc

SEQ ID NO: 162020 - DNA, 122 bp, Homo sapiens
cgggttcaggggtacacgctcaaggtgacgggttcagggggtgcacactcaaggtgacgacggattcaggggtacacactcaaggtgatgacgggttcagggggtacacgctccaggtgatg

SEQ ID NO: 162021 - DNA, 122 bp, Homo sapiens
agcccggtcactaccaacactcaccataggcctactgggcgccaagcctggagttagtgccggagaggtggtccctgcccttgagatgtcacagttcaggaggggagatgagactgagacaa

SEQ ID NO: 162022 - DNA, 122 bp, Homo sapiens
ctgcttgaaaacacagacacccggttctagctgctccagccctgagccattagatttggtcgtcaaggagcccagcagggcaaaggtcaatttctctttgcttttttcttccacttcctgtt

SEQ ID NO: 162023 - DNA, 122 bp, Homo sapiens
cgttgggggaccgggacggcagtgtcggggggctcggggctggtgcccggcgggcctctgcgtgtcccctggagcctggggccgagcctaggtgagagtctcctgggtccgcgcgctggaaa

SEQ ID NO: 162024 - DNA, 122 bp, Homo sapiens
tggcgtccaaggcgctggctgcggagaagtggccgcggtctccatagagctgggggcgggcggcccggtatggagagcagccccgagagcctgcagccgctagaacacggggtggcggccgg

SEQ ID NO: 162025 - DNA, 122 bp, Homo sapiens
gctcatgaagtaacccctgtgcttctttgagatctgattcctagatttcgactggccttacggatcggctcagataacgggcctgcgtttttggctgccttggtacagaagacggcaaaggt

SEQ ID NO: 162026 - DNA, 122 bp, Homo sapiens
gctttctctactccaaacatcacccctttcctttgcttggctgtaaggcattatagcttgcgtatttgtctttgccactttagaaccataaaatgagactataagctattgcgttatagttt

SEQ ID NO: 162027 - DNA, 122 bp, Homo sapiens
cagcctgatacaacagtgatttcattagacatattccttcccactcttttttccatgccacgaggcaaaatgtgaagatgtggagaaagcattcccagagaagccagcaaaggtgaaatgaa

SEQ ID NO: 162028 - DNA, 122 bp, Homo sapiens
tacgggattgcacagtccccagggcacaatcggggctgtcctccatggagagtgatcgcccgggcagagacccccacctgttgatctcccccttcccggggcgagtggcaacctgcattgtg

SEQ ID NO: 162029 - DNA, 122 bp, Homo sapiens
atgctgcgttagcaagacgcaaggagggggcgctccggcaggcctctcgcaggagtgaggcggggcaaggatttaaggacccacagctgcaacggatcagacatatgtttcgggggagaaaa

SEQ ID NO: 162030 - DNA, 122 bp, Homo sapiens
caaccagaggcagggcaagtgagggctccgctcaagtgacaaacgggcccccgagatgagcgtggcagctccctcgttcctacagctgctctcaggttcctgacagtttatgtcattcagta

SEQ ID NO: 162031 - DNA, 122 bp, Homo sapiens
gtctgtagactgaagacgtttttggcttcgcacccagctcttggtctaactcagtgtgtgcggccaggatccgtaatgatgtgttatggagacgagtaacgttgttggatactgagcagtgc

SEQ ID NO: 162032 - DNA, 122 bp, Homo sapiens
agggaacaaaggccggctgggagttggcagggcgccatcagggttcaatgcacaatggcccggggggctggcggcttcgctcctggccggcatttgcataatgtctggggcaggaacaggtg

SEQ ID NO: 162033 - DNA, 122 bp, Homo sapiens
ttggctggtgattgggaaaagaggaggatctcagatttcaggttttagttatcattctcccgagatgggaagaggctgtgattcttgatctgaagagtcttatcgtcggtagaacttgccat

SEQ ID NO: 162034 - DNA, 122 bp, Homo sapiens
ccccgtctccgggggctgggcatgaagagagccggtccagtctgtggtccccagctccagcggggccgtggcgtggcgcagcccctcagccctgactcccacaagaggacagcgagtcgtag

SEQ ID NO: 162035 - DNA, 122 bp, Homo sapiens
agcgcccggctagaagcgacaccagacggagcctccggagttcctccgcccccacctcgccgggtcctggagccgcagtcctcccagctgccctcctcgtggccatggagtgtccacacctg

SEQ ID NO: 162036 - DNA, 122 bp, Homo sapiens
caggcccttccctagggcagctcttccccagggcagctctgggagctgatggtctctacacgggcgctggccccccctgctggtctatgcacagaaaatgggatgacaacccgtcaccagaa

SEQ ID NO: 162037 - DNA, 122 bp, Homo sapiens
ggtggctctcgcctgaagtgcctgtgttccttgtgacccgtgtggctctgggatcaagatcgtgtcgctccggcagcccctgaggggccttctccagacttcgctattaaaatgctctttaa

SEQ ID NO: 162038 - DNA, 122 bp, Homo sapiens
ctggaggagttggcgtccggggagcaagggccatggccaccgtgcaggagaaggctgctgcgctgaacctctcggctctccacagccccgcgcacaggcctccgggtaggtgccgaggactg

SEQ ID NO: 162039 - DNA, 122 bp, Homo sapiens
caccttctccgctgctattgtgaagggcatgtgcagcagagaaaggagggtgagtcgaggcgatatgctgagcatgaagccatacagccccaccactttcaccaggcttcgcaagagcacat

SEQ ID NO: 162040 - DNA, 122 bp, Homo sapiens
tgttcaaaaaaagcatgtaaacacagggcttgattttgttagcctctatcccagaaaattcgtcgatcactccttggcttttgtataattcagtgactggctttgccacatctttgtactgt

SEQ ID NO: 162041 - DNA, 122 bp, Homo sapiens
atccaaatactctaggtttctttgcaactgaagatctaaaagttcatcctacccggagcccgaggcccagaggccaaacagcaacacaaacaaacaggaacacacaaaagaaaacaataaaa

SEQ ID NO: 162042 - DNA, 122 bp, Homo sapiens
cccccgccgccccgagcccgtccccgtgctgggcccgctggtgcgccaggagcccggccccgtgcccgaagcccttcccgcactccagacacacgtacggcttgggggccggggcgcgccgc

SEQ ID NO: 162043 - DNA, 122 bp, Homo sapiens
cttaaccaactacaaatcaggaaatccttgaatcctctgatgacccctaagtcctcacttcgagatctcccacccttttaggtcaaaacccacgtgtacgcccaacgtcctgattgacgact

SEQ ID NO: 162044 - DNA, 122 bp, Homo sapiens
cagtgagaattaattctacagaggttggaagcgcttagctcattgcatgcctcacgtaatcgttcagtagaagtcgcctgtaagtatttttcgtcattgctctgatgccggcagacgcagaa

SEQ ID NO: 162045 - DNA, 122 bp, Homo sapiens
gcgggtgcgcgggtcggacgggtgcgcgggttggagtacaggaggcccagagcttggcggcggtgagagtccgagtgaagacggatagctgcttgggcctgaagtcagcgggatgatgtttg

SEQ ID NO: 162046 - DNA, 122 bp, Homo sapiens
ccccaccttatcttgcacccacacaccccatcggcgggttcctccaccccgggccgcccccgctcgaccccgttccccactggtggcacggaggcctgctcaataaacgacctttagtctcg

SEQ ID NO: 162047 - DNA, 122 bp, Homo sapiens
tgggcacaggagacaacgccagcctggccatggtcaccgctctgtccccgaccccaaacccgtgacaacgtccgaggctccttggaggaaaacgtgtaactgcaccggctgcagcctgtccc

SEQ ID NO: 162048 - DNA, 122 bp, Homo sapiens
gctgcggaggcactggggcaatctgtgtgtttctcagcctggcgtcgggggttaagggggcgggaattactcggcgaggtcgggaggtcgcgcggtggaacccgggggccaggtggaactcg

SEQ ID NO: 162049 - DNA, 122 bp, Homo sapiens
tgccccaaggcactgtatcctaatgtagaaacagatcacaggtcccactacaatttcatccgaagttttaagtcaacaggaccttatttttttttctttattttgtctaaaaaacaaacaaa

SEQ ID NO: 162050 - DNA, 122 bp, Homo sapiens
gcctcctgagagagtcggcctaattcgtaagctggttcccagtaaacagtgcagagcaggcgctaagtgaatgaatgagcacgagagctggaagccctctgaggcctctctggtgtcccttg

SEQ ID NO: 162051 - DNA, 122 bp, Homo sapiens
ccccgccggcggacccgccccgcgcccgcggccgccgccgccaaccagagggcgcgggggcggagcaaacggcacgccaggcccaaccaatccagttctaccgcgcgccgaggtgaggccgc

SEQ ID NO: 162052 - DNA, 122 bp, Homo sapiens
tttcaaatgcttgcctccgccatcaggagccctgcaggcccacggggcggcagctccgcacggaagcctcctaacactccacctccacctggtgcctgtttcaagtgcggcaatgaaggcca

SEQ ID NO: 162053 - DNA, 122 bp, Homo sapiens
ggtcgttcggggactggacatggagacagatcgcgagcggctgcggaccatttataaccgcgacttcaagatcaggtacgggccggcccactcccggccccgaatcgcgggcccagcttgct

SEQ ID NO: 162054 - DNA, 122 bp, Homo sapiens
cggatgggccggatggggcccgggctcacatcgatggccatgtgctcctgcatgctaacccggggaggctgcccacctgctgccgcagtgcccgccatggggacccagacggggggcggtgg

SEQ ID NO: 162055 - DNA, 122 bp, Homo sapiens
gtactgatcttccgccccccgccccgccccgcccggctcctcccgccggaagtgacgtcacgccgagcccctgcgctccttgcacaatacagcggcgaggagccgccaaagcgcgcccgccc

SEQ ID NO: 162056 - DNA, 122 bp, Homo sapiens
actctaggtcatagcacgttccctggatcaaggtttccatagttaatcagagggcgtctccgcccctcaccccaaccccatcctgacaatatatccttttgatttcacctcctaaaccaggt

SEQ ID NO: 162057 - DNA, 122 bp, Homo sapiens
attttgattccttttccggaacaagtttgcatctctcctcggtctctccctgaagcccaccggtccccaacgcatcatgccagggagccaagcgtcctgcccggccgtaagtacgtgccccg

SEQ ID NO: 162058 - DNA, 122 bp, Homo sapiens
cttccccggcacctttcaagtccccgagagcgagtgcctcatctgttgctctgtttactccgcggagccccgccgagctggctggcgcggtcgcctctccggcccgccgctgcccccgtccc

SEQ ID NO: 162059 - DNA, 122 bp, Homo sapiens
tcagaatcacaaaaccctaaagattgttccacttgagaaggcagcggataggtacatttccgcagccccgaaatgccacttttatggcgctgtttgtctccctgttctgggttctcaatggg

SEQ ID NO: 162060 - DNA, 122 bp, Homo sapiens
ggctgaagttgctttgtgtcctccgctaaagcctcctaccatcgattcccatctccaacacgttttcaactgtggtgttttgggaaggtaaccatagcaactaatcttattcagaaatgact

SEQ ID NO: 162061 - DNA, 122 bp, Homo sapiens
aatacccggctaaaaatcagaggcttggttggcttctgcctccagttgccaggaacctgccgtgtgcccttgatgggtggtgttccttctctgggctttggtcatctctttttggcacagtg

SEQ ID NO: 162062 - DNA, 122 bp, Homo sapiens
attccttgactgagttcatgctagttaccagaaaacaaaaccagtcactcactgagaccacgcttcttctctgacctctatacatcctttccaaagagcttccttccccacctacctgaaaa

SEQ ID NO: 162063 - DNA, 122 bp, Homo sapiens
ttacaggcgtgagccactgcgcccgggcagtcaggttttctgtggtggctccagccgtgacggccggggtctgtgacactccagcttccgcgagtgcagcagtgttcacgccccagtcgttc

SEQ ID NO: 162064 - DNA, 122 bp, Homo sapiens
ttataggattcaggttaagaatctctgtctgaactctcagtggcttatcaccgaattacacgaaattgtttggtaaaggaacagcagaaagagagccaaaagatattggtagctgattgggg

SEQ ID NO: 162065 - DNA, 122 bp, Homo sapiens
gtccgttgagtgacgcacttccggttctccgtttgcgccattgccctggtggttccgcctcgtgggttagatcccaaattacgcccgctctcgatccttaataatgggaaggggcttccact

SEQ ID NO: 162066 - DNA, 122 bp, Homo sapiens
gctcgcccgccgcccccctgccaggggaaggagcgcagcgtgcgcgccgccaggaagcggcgctcgaaactctgcagcaagagttcggtccccgcattctcctcgggcgccatgacgtgggc

SEQ ID NO: 162067 - DNA, 122 bp, Homo sapiens
aacccagagcacctctgtcctgggacccaacccaggctccagggctcccgcacgtccttccgctcctctgagatggctccgctctcgttcgcatgctccagggttctgtctgcacacacttt

SEQ ID NO: 162068 - DNA, 122 bp, Homo sapiens
ccaggcaggcgaacgggtgctggggtgcaggctgctccttcaatgcatggaggctctaggcggcgattgcagggtgcagaggtgcagacgatgcccgcccgctccgtccgagccccagccag

SEQ ID NO: 162069 - DNA, 122 bp, Homo sapiens
actttaacaggcaattaagtcacaaaataaagttgacttgatttcttcctagattctatccgaataaatcagccacttcctcatcttctaaaaccatctacatttgtttaatctaccataaa

SEQ ID NO: 162070 - DNA, 122 bp, Homo sapiens
gttcatctcactagggagtgccagacagtgggcgcaggaccgtgggtgcagcgcaccgtgcgtcagccaaagcagggcgaggcattgcctcactcgggaagcacaaggggtcagggagttcc

SEQ ID NO: 162071 - DNA, 122 bp, Homo sapiens
gctcttctgtcattgccacctaattgtaggcctctgcttgctagttgtatccactgtttacgttatagagaaatcttttcacatatgtaaggactttatatctgtgtgtgtgcccattcatt

SEQ ID NO: 162072 - DNA, 122 bp, Homo sapiens
ttcagtagtaagtgttattcaaaagcttgaaacttttaacatgcccaataaccaagccaccgtccataccagctcaccaaactgctgcattaagcccccttgacaacactgccttctccaca

SEQ ID NO: 162073 - DNA, 122 bp, Homo sapiens
cgtgcagctggcgccagtgagtgaccacacggccggggcacaggtgagtctggggccccgcgccgggacactgaagtgatggcatggccgcctgccgctgccaccgggcacacgtggccccg

SEQ ID NO: 162074 - DNA, 122 bp, Homo sapiens
ttgcttaaaaattgtgtgagtttccggtgtatctgttttcaaggaatccagcctattagacgaaagccatacccataagtttctttgacacaaacccttctctatcttgggtcccctgtgag

SEQ ID NO: 162075 - DNA, 122 bp, Homo sapiens
agaaacctgaggaggccagagtctcctcacattcatattcacaacactgcggatataatccgagattacccggaaatgatctgctgagacaaaagaaaccatgcccatcggagaaacctaag

SEQ ID NO: 162076 - DNA, 122 bp, Homo sapiens
agccctccaccgcctcctcgagcggcagcacgctgtggccgcggtgctcgcgggagcggtcgcacaccacgcagatgggcatctggtcctcctcgcagtacagcttcaggggctcgcggtgc

SEQ ID NO: 162077 - DNA, 122 bp, Homo sapiens
aataggggttgcttttcttattttttatcctctcttttgcttccttccctggacagccatcgtcatgacccacagcttgagcctggaagtgttcaactacagaattggaatattttcattta

SEQ ID NO: 162078 - DNA, 122 bp, Homo sapiens
acgttcgtcttcactaagttcctctgctgcacatgtggagccaaatggtggcgacgtcgtcggtggacgttcccagtcagctatttcttctacaactccatttacgttggagtcgaatttta

SEQ ID NO: 162079 - DNA, 122 bp, Homo sapiens
ccgacagctagaaggaaggataggacccgtccgacgataaccactgttgacatttgagcgcgtttccttcccggcttttgtgtgagagtggcagtctgtttgcttttgtggtcgggatctgc

SEQ ID NO: 162080 - DNA, 122 bp, Homo sapiens
acttaaaatgtgtctagtgcaactaatggcctgaaattttaatttcatttaattttaattcgtttaaatttccacagccccatatggctgccatattagacagtgctgatctcaggagtttt

SEQ ID NO: 162081 - DNA, 122 bp, Homo sapiens
gtttacgcccgtctcccccagggcagggccctgaacagcacctggcacacggcagggccccgtaaaggtttgctgactggcgcataaggacaaagccccctatctgcctcccctggcagccc

SEQ ID NO: 162082 - DNA, 122 bp, Homo sapiens
ttatctgaacttagaagttagtttttaatactcggttcttagcacattgaattaaacaaccggtagtgagtaggtgatcttttatacatgtttgtctattaatttaattaaaattctatttt

SEQ ID NO: 162083 - DNA, 122 bp, Homo sapiens
tgctgtaacttccaccatgcaagggacccaggtgggaggaagccagtaggtttgcacgctcgcagtccgttcttggggtctgcacgctcgcagtcagccctcaggggctacaaatttagccc

SEQ ID NO: 162084 - DNA, 122 bp, Homo sapiens
tttttttttttaatacagagtctcgctttgttgccaggctggagtgcaaaggcgcaatctcggctcactgcaacctccgcctatcaggttcaaggattacagacgtgagccaccacgcccgg

SEQ ID NO: 162085 - DNA, 122 bp, Homo sapiens
ggagagggctgattcccaccattagggagggctgactctcaacattggggaggactgatacgcaacatttggggagagctaattcccaacattagggagggctgattcccaacactgggcaa

SEQ ID NO: 162086 - DNA, 122 bp, Homo sapiens
agtccagacttttacaaaccattaatgaagggcttaaattctccagggcactgtacccctcgtacagctctgtggagactgagaaaatggggttctggcacccaggaacctggacccccaaa

SEQ ID NO: 162087 - DNA, 122 bp, Homo sapiens
ctgggaccacaagcatgcgccaccaggcccagctggtttttattttcatttttgtacaaacggggtctcgctatgttgaccaggctggtctcaaactcctgggctcaagccatcctccccgc

SEQ ID NO: 162088 - DNA, 122 bp, Homo sapiens
cagcaactcctcctcatctcccccgaccccgtcatgcactcaacacacatttatgaacaacgtactctgtgccaggcactgtgctaggcgctgggaatacagagatgagtaagacacggttc

SEQ ID NO: 162089 - DNA, 122 bp, Homo sapiens
aacaagggtttccccatattgcccaaggtagtctccaaatcctgggctcaagtgttctgccggcttgggcctaccaaagtgatgggatttcaagggtgaatcaccacactcagcatgatatt

SEQ ID NO: 162090 - DNA, 122 bp, Homo sapiens
acagcttggcggggaagttgttggggttgatgggggtggagagcagcgcctccatcgccccgccgggccggggcctcgccccccgagcctagctctcccacaccgttctcgatccctccccg

SEQ ID NO: 162091 - DNA, 122 bp, Homo sapiens
gcggcgcggagcagctaagtgggcagctgtgcgagccaaggcaggtcccacgctcaccgacgaaaatggagatgatttaggattgccaccctcaccaggggacaccagctactaccaagatc

SEQ ID NO: 162092 - DNA, 122 bp, Homo sapiens
ttgatatgaaattgcttgtacttttgatacgcattttaagctagtgtaagtaacgagaggcgtatttcaactgaacagaaggcaagaatggatccatggagcacacagcctcacagcagggt

SEQ ID NO: 162093 - DNA, 122 bp, Homo sapiens
cggggcgtggactgagcagtcactgagtattacgcaaattgcgcgagcgcacgggaaaagcgattggtcggtcaggagagagaggtgtgtcctggcgggcccgcagctccgattggccgaca

SEQ ID NO: 162094 - DNA, 122 bp, Homo sapiens
ggcagaggagaggtggggagaggctagctccactgaaggtttcggccaacgtcggggcagcgggcagggaagcggtgaggtcaggaggaggaggtgggatgtggggcctgccggtcaacacc

SEQ ID NO: 162095 - DNA, 122 bp, Homo sapiens
tagcagcgccgggagcccgcgcagaaacgacctgaccctccgcggcgccatcttcctctgcgactggcgctgcgcggagaaaacctagcctgccgatgccccgcccactaccccgcccccac

SEQ ID NO: 162096 - DNA, 122 bp, Homo sapiens
tcctgtcctttccacactcttcctgccttccccaaagtcactgggtaactacgctgtacacgtcagtaccaagccttctttaggggctggggattcagaatagaataaggtcccagcaacta

SEQ ID NO: 162097 - DNA, 122 bp, Homo sapiens
gagaggttggtagtgccaggctctgaagaaggtccaacttggaaggtcatttcagacaggcgtggagtcagcatttgaggcctgtctggtctctactcctgccaggactaccctgtcagcca

SEQ ID NO: 162098 - DNA, 122 bp, Homo sapiens
gttccgccagtcgatggcctgctggcatgccgtcttctgtcctgtgctcttctgccagcgcgttccccttgacgtcctctcaatattcagccacttgtgtcttcttccaccgatgtgttcct

SEQ ID NO: 162099 - DNA, 122 bp, Homo sapiens
tctgcctgtcagggttggctctttaatctgtcgtgccctcggtattgctctttgtctgcccgtgaataaagtgcagcattgtggttagtaatcccactccagtgactcgacttcaaatgtgg

SEQ ID NO: 162100 - DNA, 122 bp, Homo sapiens
tcctgtgaatgttctctgcaaaagtcagatagcttaatcagaccaagtcagatgtaactacgatctggctgcagaaagccggcgtctgggctccttgctttatgtcttatatcccttttaca

SEQ ID NO: 162101 - DNA, 122 bp, Homo sapiens
gcctctgctcgctcacccgcccggctgccttaggggtcggcgctgcccagcgggctccagcgcagcctcctacccggcatcccaccggccgcgcctgccactgactcctggccgcccgctac

SEQ ID NO: 162102 - DNA, 122 bp, Homo sapiens
ctccctttggggttcccttacatgcacgctcacctgatggcgggtgttgtacaccttctccgctgctattgtgaagggcatgtgcagcagagaaaggagggtgagtcgaggcgatatgctga

SEQ ID NO: 162103 - DNA, 122 bp, Homo sapiens
tggcttatctgtgccttatgtggcatacgttgggttggagggtctacttccaggctggctcgttcacttggctggcaagtggccactggctgtggaccaggagttcagctggggctgggcac

SEQ ID NO: 162104 - DNA, 122 bp, Homo sapiens
ctttttatgtatcagtgtttgataaacacagtccttaactgaaggtaaaccaaagcatcacgttgacattagaccaaatacttttgattcccaactactcgtttgttctttttctccttttg

SEQ ID NO: 162105 - DNA, 122 bp, Homo sapiens
agcaacagtgtgcccagctcatcccagatcccagaggtgtgacgtgtgaactcaggacgccggccgagagcccaggttccgagttgcagtgatccccaccccaggcccacagacaacacccg

SEQ ID NO: 162106 - DNA, 122 bp, Homo sapiens
aaatgaatatgagaggaacttactactcttcatgtgtagggcctttacttttgacttgcccggctcaattcctttatcataaaatgatgtaacaccttctataggagtgttctttgaatatt

SEQ ID NO: 162107 - DNA, 122 bp, Homo sapiens
caagactaaggcccactctttaatggctgaatgcatacatttcacagcacatggtggattcgctgctctgagaattgcctttaaaaaaagtaaagtgaaaaatagacaaagaaatctggaac

SEQ ID NO: 162108 - DNA, 122 bp, Homo sapiens
acagtgctgcagcccctcatgggccagagacaggatgcacggggactcccagcccctacccggcaagagaggcatcactgaggctgcatctgccatgcgctcctggtgtgactgcaccctgt

SEQ ID NO: 162109 - DNA, 122 bp, Homo sapiens
ccatcccagggcgaccaagcttgcagagacgaactccgcaccgaccttcacgtgtctccgcgacggaaccggaaccacagctagctgcctctgggaccgcccccgtgagtgcactgcgtcgg

SEQ ID NO: 162110 - DNA, 122 bp, Homo sapiens
ttctcgatgtagctggcaaagcggtcattgagctccatcatctctgcccgctcactggcccgggtctccttgaagccagcattgagtgccccagccagggagaaatccacccgggtcgggag

SEQ ID NO: 162111 - DNA, 122 bp, Homo sapiens
ctcaagccgccctcacctgttctgacttcccctcgaggcacaatagcctgagagatcagacgtgggagattagattgctcggcgtcagacctacttctaggcaaccccccctagactggagc

SEQ ID NO: 162112 - DNA, 122 bp, Homo sapiens
accttttagattcataattatttttcttgtatcaaaatttcaattaatagaaataaatgacgttactgacacttcatgatgattaagttttgggcaagtgaaccattttacactctattttt

SEQ ID NO: 162113 - DNA, 122 bp, Homo sapiens
tgggtcgtggtagttgtgtcaaagggcagaggttggaggtcatgacccaccaacacacgccggttgaaacttgagcgcaagggacggttgagattcccggaggacacgcccctatcggcccc

SEQ ID NO: 162114 - DNA, 122 bp, Homo sapiens
gcagagcggggctggggagagggacccacccccggcgcgcccggctgcccggttgcgcggcgcgggctcctggccccggcccgctcacaccctcccgctcggctccaacttgcaggcgtcca

SEQ ID NO: 162115 - DNA, 122 bp, Homo sapiens
aaccctgggtgtgaccttgcccgcccccaggaccttcgccccgctctgggaggtcttccgcgtctcctcggacaagctggcgctgtgccacctggaactgacacggaagttacaggatctca

SEQ ID NO: 162116 - DNA, 122 bp, Homo sapiens
gctattcctgcaatcctggcctagcctctcactgagagcagggaattccctctctggcagcgggataaagaaggaccctgcttagagccgggacagccaaagggacagggagggcctggatg

SEQ ID NO: 162117 - DNA, 122 bp, Homo sapiens
gggattgaatttctagaagcaggaggggcacacacagactcctccccacatcccagaaatcgccagccagagagagctgtctctgttgagtttcttgactgttaacccttggaaataaatca

SEQ ID NO: 162118 - DNA, 122 bp, Homo sapiens
aaggccttgtcaccaggcgggggcgggaaggcactggagcgcagcagcattgagagcatccgaattccctcctctgtccctgattggttgaagaactggggagcaccgaccagccccctgcg

SEQ ID NO: 162119 - DNA, 122 bp, Homo sapiens
cactctggtcggtcccatggagctctgcactgtagcttcccttccacaggccccgcagggcgccccctgcctctgaggatgagtcactgcagcagccgcgccctgaccctgctgagcagcgt

SEQ ID NO: 162120 - DNA, 122 bp, Homo sapiens
ggaccctggaggtgcttctgcctcgacgtcctccaacatgggtgctgccagactctgctgcgctcctgagttgctcctggcggaattccagccacccgacatgggtgtctcattttcggctt

SEQ ID NO: 162121 - DNA, 122 bp, Homo sapiens
gctgattgggcggcagcaggggaaggcttgcggcgggctgctgcacggattggctgggtgcggaaagtgatgtgccgtgtcctgtcattggccgaaagagtctcgttttgatgccacccggg

SEQ ID NO: 162122 - DNA, 122 bp, Homo sapiens
cagggggtgagttatccatttgtaggcttcttttagctgaactatatcatctcttcccagcgacagactctgctttctgaataacataaaaattaattcactgacatgaaaaactttacttt

SEQ ID NO: 162123 - DNA, 122 bp, Homo sapiens
ggagaggccagggcagacaacctccacccgtttccggagccactggcgccccctcattcccgctccagcagcccatgcctcgcttcacccctggtgcctcatcatcgcaccaggaagccagg

SEQ ID NO: 162124 - DNA, 122 bp, Homo sapiens
tgcattgccgaaggctgcggcctctctgggcgagccccataccgaaacacagaggtgcggcggtcctacctgaatagccaggagcatggagaatgcattgagctgggatttaaggaggtggc

SEQ ID NO: 162125 - DNA, 122 bp, Homo sapiens
ctccagccgccagcggggaggcgccccagagctgcggagctgcagacccgccgacggtctcgcgctctgatttcctcaccgtatgaaatgaaattccacagggggattcgaaaggaaatgag

SEQ ID NO: 162126 - DNA, 122 bp, Homo sapiens
ttaaaacagtgaaattttgctcagattgagaaagtaaaagttggccttccccaacatccacggatgaatgctaaaattagtaggcagaacttgaagccgaaacaggatatatgcaaagtttc

SEQ ID NO: 162127 - DNA, 122 bp, Homo sapiens
agttttaaaacactcgattttgctcccctgaaaaacctctcctgttcccctcccaatccgcgctccacgcccctagctccaggcagccgctgatctgccgctgtggttttctgcctctataa

SEQ ID NO: 162128 - DNA, 122 bp, Homo sapiens
atcggtagcaggagcggcgagcggaacccagagagccctgagcagccccaccaccgcccccggcctagttacagtcaccccagaaggagccacaaccctgcagccagcaggtcaccatcaca

SEQ ID NO: 162129 - DNA, 122 bp, Homo sapiens
tccccaccccacggccgcgcccctcggcctcccaatgggctgtgcggctgccagcgcttgcgccggacgccacttccggtccccgtggtcacgtgaccgtcacttcacgtgaccgcgcggcg

SEQ ID NO: 162130 - DNA, 122 bp, Homo sapiens
catggctatggagatgtctcagacgcagccatctctctgggagaacagacgtgatcacctcgacacactatcccaggtcttaaagtcagacagatgcgggttccaaccttgcccctccactg

SEQ ID NO: 162131 - DNA, 122 bp, Homo sapiens
atcttggctcactgcagcctctgcttcctgggttcaagctattctcatgcttcagcgtctcgagtagctgggattataggtgtgcaccaccacacccggctaatttttgtatttttagtaga

SEQ ID NO: 162132 - DNA, 122 bp, Homo sapiens
agtcggtggagcgggaggtcggcggtggcggggatgggggtatccggagcgcagccggggcgcagctgctggcacaggagctccacaggcagccaaggactcggtcctgtcccagagcctgc

SEQ ID NO: 162133 - DNA, 122 bp, Homo sapiens
gcgagggggcgtgcggggaaaagtggggagccctggcgaggccctcccgcgcccgggccgcggcgctgaatcaccggccaggtatttgcatccgagagcgactcgtcccctggtgatttgtc

SEQ ID NO: 162134 - DNA, 122 bp, Homo sapiens
gtcaaagggtgctgtcaagtcctcttacttgaggattagttatggtttaacttgagaacacgtgtgtaataggtggcacctgcctggctgtataaccaggtggcatccctctccgtctttgc

SEQ ID NO: 162135 - DNA, 122 bp, Homo sapiens
tggccgccctgacgggtgagggccgctttcccaaggccccgcatcgcgcctcggcgtccccgcatgagctcctggtcttggcaacccccttactgcatcttcccaggccagatgctccgaga

SEQ ID NO: 162136 - DNA, 122 bp, Homo sapiens
gagtgaacggcgccattttaggcggcggcggcaaccaatccctgcgcgggaggcagggggcgccgggtcgttaggaagccgccgccggccaggatgggcgccggtctcggagactcgggggg

SEQ ID NO: 162137 - DNA, 122 bp, Homo sapiens
tgaccgacacctcacctccatagtccacataaaagactcctgacaggttctggaggcagccgacgccagcttctgttcccctccccagcccttggcagctcaggttccgcgggaggacgttc

SEQ ID NO: 162138 - DNA, 122 bp, Homo sapiens
gaggggcgcggagggtcctccccggggcggagggacacagagggattctagggaacctgccgtcgcgagtcccgcttcaggcggagaatctaggcggcggcggggcctccctgaggcggagg

SEQ ID NO: 162139 - DNA, 122 bp, Homo sapiens
gcctgattgacaattctcaggaacccgcccacgactttgattgggtagccctccaggtcccgcctcctgggcactgagtgacagaagaagcgatctcacagtgctgagtgcagccggatgaa

SEQ ID NO: 162140 - DNA, 122 bp, Homo sapiens
cccaggtgcagaggtgctgcatataggggctcctgtcctcactctctgcagaagcaacctcgactccagatattgagggctctctcatcctggatgctccttgctctatggccactaaactt

SEQ ID NO: 162141 - DNA, 122 bp, Homo sapiens
agcagcggctcggggagctgtgggctgcgggctgggcggggcggcgcgatgcggggcgggcggctcagccccgctccccctaccggcgccctcaggggatgaatgtccctcctgacggtctc

SEQ ID NO: 162142 - DNA, 122 bp, Homo sapiens
agaggagggcctctggacatcaaaggttccttttgtccccttccgagtggcagggcagcccggcccgggctgctggcgatgactcaggcctggccctgacgtcacccacgcccggccactgg

SEQ ID NO: 162143 - DNA, 122 bp, Homo sapiens
ttgctccctagctgcatgatattgcttcgagtttgtttcggtgtgagcaatctgagtcgccggaccctctcgagtctgactttcactctgacaatcggtccgtggctttacgaatctgaatc

SEQ ID NO: 162144 - DNA, 122 bp, Homo sapiens
aaggagaaagaagatagccactggagaacagagcaaaggagccagcagaaaaagacgagacggctgtagccccacaggaagcagaaaccgataggctaagtaggatacacacaaagaaaagt

SEQ ID NO: 162145 - DNA, 122 bp, Homo sapiens
atagctctactaggtaggtttaaaatttgtccctacgaaaaaattaaaaataaaattaaacgcctgatatccagaactcaccatatgccggaagtgatttggattgttaactagaagccgtc

SEQ ID NO: 162146 - DNA, 122 bp, Homo sapiens
gaacctcacccatcagccaggtgcctggccccgggtctgtctcttagggttacatgctcccggggctcccgcacataccccggcagatgagggtgcgcaggggtgagggcgcagggctgggc

SEQ ID NO: 162147 - DNA, 122 bp, Homo sapiens
gcctgtccagacagaagctggggcccaccggaggtagctgcagacgcctgagagcgaggccgaggcccctcaggggtaggtggggggaggctggctggggggatgggcagcggggtggcagg

SEQ ID NO: 162148 - DNA, 122 bp, Homo sapiens
ccgggcaccgccatcttggattgtcacatgatcagctagaaccaagtctcgcgagaacaccgcgagcaacgttccagcccctgcgttgcgagattgtgaaaattctaactagtcctttggga

SEQ ID NO: 162149 - DNA, 122 bp, Homo sapiens
aattctgccactgccaggcctccacccacgccgtgtgctgctccccgtcctcctgtgggccggggcagagatgtgagaccctcaggggcatctttgggtgccacccactctcccctggcatt

SEQ ID NO: 162150 - DNA, 122 bp, Homo sapiens
attctgtgtttctcgatcaggacagataagtaagtgggggttcctgggggaccctatacccgggagggagggtaactgcgaattcaaggaagacttacttataaagaggaagaagggttgaa

SEQ ID NO: 162151 - DNA, 122 bp, Homo sapiens
tttctttcaacaagcaacatacttaagacggcgtcctcactttttttttttttttccattcgtctcgcactatttccaatcactgggtacggccctaattcaacaagccttcccagtccaaa

SEQ ID NO: 162152 - DNA, 122 bp, Homo sapiens
ggtctagagccagggactcccgggcggcccagctggtggctggagcgctgggtgcctcttcgggctgcccggatttctattgcagtcccatctcaaggacaatcagtttcgtctctgtcacc

SEQ ID NO: 162153 - DNA, 122 bp, Homo sapiens
acatagacacagcctcgtctcatgttcaatagcaacggaaagatttatttgtgtgcattccgatgtcctaacagtactctaacctgcagctagggtctttagcagagggattagttgtcaaa

SEQ ID NO: 162154 - DNA, 122 bp, Homo sapiens
aaacttgaggaaacgcaactcagggaggaaaggctgccaggtcctctgtttttgagttcacgccacattgcaagtgagtggcaaccttcccagccactgtccactcctttcccagtccagct

SEQ ID NO: 162155 - DNA, 122 bp, Homo sapiens
tctccagaccctcatatctccaggtccaggccccattttcctccgctgacagctcagcagcgtgcgcttccgctggattcaggccaggaccagcgaagccgcaccttacacccaccgaggag

SEQ ID NO: 162156 - DNA, 122 bp, Homo sapiens
agacacgcgtgggtgactccagcgtgatggaacgcggggtgtcccgggatagggctaaagcgatgggatttccagacgagtctttcccaggccaacttttaaaggtcggaggaaagtttctc

SEQ ID NO: 162157 - DNA, 122 bp, Homo sapiens
tccaaacttcagaccactccaaagcccttaaaaaccctagccccaaactcctcagggagacggatgtgagttttcatcccatgtcctcatttgatggccctatgattaaacccctttctctc

SEQ ID NO: 162158 - DNA, 122 bp, Homo sapiens
cagtgccccgcagcgggtgaaggtggtcccgccccaggccggatctggccacagggctggcggcgcgctggaaaaccgcccacgtgggaagaagccctggctgcatttccgccctggactgc

SEQ ID NO: 162159 - DNA, 122 bp, Homo sapiens
cctatcctggcatccacacagacctaggctggggagtgggtgctgagacctctcctaggacgcggaggcccaggcggccccaacccatctccgtactccttcccaccatctcactcggcctg

SEQ ID NO: 162160 - DNA, 122 bp, Homo sapiens
ggacaatgaggcgggcttggtgcacggctaccgggtagcaggcatgtgggacaagtataacgagccgctgttgcagtcagtgtgcgtgttccgcgagcggaccgcgcggcgcgtcctggagc

SEQ ID NO: 162161 - DNA, 122 bp, Homo sapiens
agctgctttcggaagggcttcaggagggggtgagtactgagcagcgcacagaaaagggagcgctgtcctttgctgaaggcattgtccttggcttgcattgagtggctttcccaccccccggg

SEQ ID NO: 162162 - DNA, 122 bp, Homo sapiens
ggggaagtcggtgacgccatccttattattttagggagccaaggaacacaagctgaggcgcgctgcagcggtaattaagctgtctgccagggccccggctcataggctaagccgccggcgcg

SEQ ID NO: 162163 - DNA, 122 bp, Homo sapiens
agggcatgttcagcgaagttttataaagaacagaccaggagcctggaagacgcaagagctcgagtatcgagtgcccaacacgtttcagcactgcttttggtgcaagcgttagagcagtgaga

SEQ ID NO: 162164 - DNA, 122 bp, Homo sapiens
agatggatctcatggcctttagccccagcctttcaccttgtcctattatgatgggtaaggcggagaatcaggatttaaatgaagatcatgatgccaaagtaagtgaattttcataattaaca

SEQ ID NO: 162165 - DNA, 122 bp, Homo sapiens
gaggcccccatgcagtccagcccgggtccacctaaccgctgcctccagcggctagagatgcgctgtgggccaggcctgctccccgattcagattgagggtcatctgtgacccagacacccgc

SEQ ID NO: 162166 - DNA, 122 bp, Homo sapiens
gcatggcgccccaccacgggctcggtctatctgcgcgccaagatcccgcttggggcgaggcgttgggtcagcgtttagagccactccctgcgctggtggctggacatagcctccctatccca

SEQ ID NO: 162167 - DNA, 122 bp, Homo sapiens
tgtgcggacacggcggctggcaagacagcagggctggccgagagtctggcgggatgaccccgggggttgttgcctgccatgggcacagtccgggagtcctgacctacgtctgagggccagag

SEQ ID NO: 162168 - DNA, 122 bp, Homo sapiens
aatacaaaacttaaaaagtcacaccagggatccggtcccagaaagtccgtatcctgaaaccgcatgtccctgacacatagctgcccagggggagcatgtgtccagtcccaggaagtctgtat

SEQ ID NO: 162169 - DNA, 122 bp, Homo sapiens
gaagggctccagcagcacatccgaccgcttgcacagacgccgcagcacggcggctccccgcggctgcttcaggtccagcactagcgagcgcttgccccggcccaagcggctcacgtcgtagc

SEQ ID NO: 162170 - DNA, 122 bp, Homo sapiens
agaaagtatacatacaaatcaacttgactccactgaaaatatttttctctaatgaaaatgcggatagaaaattgagcagtctatatttttagtgttttgagtacttcaagttgatggtacaa

SEQ ID NO: 162171 - DNA, 122 bp, Homo sapiens
aggaggagcacctctgcctcccgggcgcccttctgccgcctcagtgcctccagctcctcccgcagctgcaagacctcatccgcctgggccctgtcaggctcgatgcgcaggacctccttgac

SEQ ID NO: 162172 - DNA, 122 bp, Homo sapiens
cccctctcggggcaacccagacgtgcaacaaagtgcgatggtaagaacagaccagggtgccggggccttcaggtcacttggggagaagcgcgtcacctcctcgcccaggcccgcagcttagt

SEQ ID NO: 162173 - DNA, 122 bp, Homo sapiens
cgcgtctgcggggacagatggccctgtgtcagcgtccctgtgtgatattgatgtgaacagcgagggaaggcgacgtgtctcatggctgtaaaaatagacgtgcattaggaatgcatgaagtc

SEQ ID NO: 162174 - DNA, 122 bp, Homo sapiens
cagtctcagtccaaccacattgatacaggcaaaatacacaaagatattcagtgaaggagccgtgagcaaggagagactgtataatgtgaaagagggagcactagccccagagtcttgcctga

SEQ ID NO: 162175 - DNA, 122 bp, Homo sapiens
cagagcatgggggctattggtttactctgctgccttaaacacgccggcttaaacagagttcgcgcactgacctctctagagtttgcctaataggaattcaatcaagataataacagcatttt

SEQ ID NO: 162176 - DNA, 122 bp, Homo sapiens
ggagcatgcgcgtcagcgcctcgatctgcttgtctttctcctgcagcatctggtccttgtcgcgcccctctagctccgcccgccccccagggctcaggcaacaggacccggcccgggggccc

SEQ ID NO: 162177 - DNA, 122 bp, Homo sapiens
gggaccggctgtatgattaggccacaatcttcaatgagtaaacatattcctgtgagtagccgtcgcatcgtcgcctctcgggctgggaatccacgaccggccccccatccccgctgtcgcct

SEQ ID NO: 162178 - DNA, 122 bp, Homo sapiens
gtagatgatggggtcagagggcttgcccccaggagggaccccatgaagtgacagctcatacggggttccaggagggggtggaggcaccagagcctggcggacgtcccctggcagcacttcct

SEQ ID NO: 162179 - DNA, 122 bp, Homo sapiens
ctaccagtccacaattccagaaaaatctgacctatctgctcccaggatgtcagatgaaaacgaagatggctatacatacaactcaggccacatttgtcttctaggactgagtttttgttagt

SEQ ID NO: 162180 - DNA, 122 bp, Homo sapiens
aaaaggcaggaatgaggagcagcggatagtgacaaaaaggggcttggaggaggggttttgcgcccctgcccttgaatgtccgtctgatgtacaaaacagtcgttttcttaatcttatgcaaa

SEQ ID NO: 162181 - DNA, 122 bp, Homo sapiens
aattcttaggacgacccccttccattcgaggtcttggtcatctcagatcccagagggacgcgcagggaggaacccttggtggtatcctgattgtcatcaggcgcttccatgcgcgggcggta

SEQ ID NO: 162182 - DNA, 122 bp, Homo sapiens
tctttcagaacccgtggctgatgtcaccagataataatgcctagcgccattcgtgccaagcgtctggggttgaaccattcaagcagagaaagagagtgttctgtgcatgtggagtcgcacag

SEQ ID NO: 162183 - DNA, 122 bp, Homo sapiens
agtcgccccgtacgcgtgagggtctcgggacaacagaacaaacagcagaggggcagatgccggctgcaaagggccgctgtgcgtgattttcctctttagccttccgccatgttcctaatgtt

SEQ ID NO: 162184 - DNA, 122 bp, Homo sapiens
cctccagtccacctcaccttgtcgcttcttccagggtccgcaagcaggtggtgaacatcccgtccttcattgtccgcctggattcccagaagcacatcgacttctctctgcgctctccctac

SEQ ID NO: 162185 - DNA, 122 bp, Homo sapiens
ttcattactctcatactgtaattaaaacttgcaatctgagagactgttgaaaaaggtgatcgttggcttttcaacagggagtaaggtctggtttaaaaaaaaattagtaagcatttggccaa

SEQ ID NO: 162186 - DNA, 122 bp, Homo sapiens
gagaagtagaggaattgcaaagctttcgctagtctccgcatggccggtgccaatgcttggcggcaatgctcggctcttcggcatatgggcaaaaagagccaaggaagctgaaaaacaggatg

SEQ ID NO: 162187 - DNA, 122 bp, Homo sapiens
gaagctaacatcagacctgcccatgaataatacccctacgagggatgcggtccggaagcacggtgccaggggtcgggtagaaaagcttcctggccgggcacaccttgccctaggtgcatagg

SEQ ID NO: 162188 - DNA, 122 bp, Homo sapiens
caactgaggattgaccgttccttggagtgaaggctccgcattcagacgcctttcgccttacgtcatcataattgagaagggaaaggagacgtgttagtttcagtctgattatttaccatcaa

SEQ ID NO: 162189 - DNA, 122 bp, Homo sapiens
tattacattatatatttctattaactatacaattccacttttgtgcacatagtggtaacacggtatataatcaatttggaccagcagtaaaaatatggaaaagagaaacgtactatacataa

SEQ ID NO: 162190 - DNA, 122 bp, Homo sapiens
agtgatcctcctgcctcaccctcctgagtaggtaggactgcaggagtgtgccaccacgcccggctaatttttaaatgtttttgtagagactggtctatgttgcccaggctggtctcaaaccc

SEQ ID NO: 162191 - DNA, 122 bp, Homo sapiens
ggaccgcgtgggagggccgggagagcaggtggctgccccccacaagggggcgggctcagccggccagtcctgcccggaacccccggcaacgcgcatacgactacacctgctccggagcccgc

SEQ ID NO: 162192 - DNA, 122 bp, Homo sapiens
cccacagagcatacctgcctgcatctcgggaaaagatcacgtcgacaccctccacagctacgcgcttgcagactgccttcatgcagacccctgactccagcacgtctgggctgccaggtagg

SEQ ID NO: 162193 - DNA, 122 bp, Homo sapiens
ggtgatcctcccacctcagcctcctgagcagctgggactacaggcacatgccaccatgcccggagagttttggtattttttgtagagatgggatctctactatgtggtccaggctggtctcc

SEQ ID NO: 162194 - DNA, 122 bp, Homo sapiens
gccacacgctgcaggactcgggagctggtgcacggagctcggaaaggtgatggcactgcccggaggggcagctctctggattttgagaaaggcacgtcttccccagtctagtttcagaccca

SEQ ID NO: 162195 - DNA, 122 bp, Homo sapiens
tccggaagtgctcggagccctcggcgcggcggtcccgtcccgcgcaggcccctcgaggcgcgcgcccagtctcgcgcccggccccgccccctgctccgcacgccaattcgcgcctttcgccg

SEQ ID NO: 162196 - DNA, 122 bp, Homo sapiens
ggagtgtcccaaggacctagccattcggccgaattttttagacattttgggagtctcctccgaggcctttaagtgcgaaccgcgcgaagcggccctgcccggggagactcgctgaggcaggg

SEQ ID NO: 162197 - DNA, 122 bp, Homo sapiens
gctgcctggcgccgagaggcccggactggcgactgctgccgcgccaccggggcccacctgcgcagggacgctcggcctcaggccctctgggctgctccaccctgctccggccgcaggcgagc

SEQ ID NO: 162198 - DNA, 122 bp, Homo sapiens
tgtaacttccctcgtgcgctgtatgacgtcgacgtgacgcagcaggatgccacccctttccgttccatgacgtcagcagggcacatgtttccgtgtttgtcatctcattttaattgcaagaa

SEQ ID NO: 162199 - DNA, 122 bp, Homo sapiens
gggctccgcggcgcccccacccgcttcccctccaggccgttcctcccactgcggccgcagcgtccagccaggctccttcctggccctgaacacacggtgacattcctgcccacacgtccacc

SEQ ID NO: 162200 - DNA, 122 bp, Homo sapiens
taagctgcagaagataattaacacctagacctgcctggagtggccactaatgaagctcagcgggaagggttttagttaaagaaaactcctagtttttagttcgaccattgtggaagacagtg

SEQ ID NO: 162201 - DNA, 122 bp, Homo sapiens
gcctcccaggctcaagcaattctcctgcctcagccacccaagtggctggaaccacgggtgcgcaccaccaaacccagatatttttaaggaattttttagtagagatagggtttcaccatgtt

SEQ ID NO: 162202 - DNA, 122 bp, Homo sapiens
accgccgctctgcactgggcgtgaagccctcgtactgtatgtgggcatacagggcgaatacgaccgtcttgatgcatttgctggtctggttgttgatctctgttgtgaagacgaccttctct

SEQ ID NO: 162203 - DNA, 122 bp, Homo sapiens
agcaaccaaaatgcgcacgccaggcccacggaggccgattgccgaccagcgtagccggcccgcagcgccagagaagccgctcactccggcggagtctctgcaagagaatctgaggctgggga

SEQ ID NO: 162204 - DNA, 122 bp, Homo sapiens
ggcctctcaccagcaggccggctggaggctcagcaggtacggtggccaggcgcagtagggcggccagccggtccagggcccccagctccacgtccgcctggaagttggccaggtccagggcc

SEQ ID NO: 162205 - DNA, 122 bp, Homo sapiens
cccagggcagcctgtggcccactcagagtcggatactgacacacattcgcatgttaacttcgaagcccacaaaaagttttaactgtccacactccagaatcttctatcaacagaacatgccc

SEQ ID NO: 162206 - DNA, 122 bp, Homo sapiens
aacccggagctttgactcctgagccccagttcaaaccctgagacccccagctcctgctcacggagagctcagaaggggccaacccctccagactcctatatttaccactaaacccctggggg

SEQ ID NO: 162207 - DNA, 122 bp, Homo sapiens
acccagaagcaaacaagggccaaatattttatatttaagtttggaaaaatctgcaaaaggcgacctaactggctattttgaacatccctaagcactcttcctaggagagggaggccaggcca

SEQ ID NO: 162208 - DNA, 122 bp, Homo sapiens
gcgcctcgccgaactccccgagcgcgctgcggttcacacccgcagcctcggcgccggacgcgttgtgcggctcgctggcatttggagagatccagctcccgttatgtcccatggcgaggctg

SEQ ID NO: 162209 - DNA, 122 bp, Homo sapiens
aatattttcatgacactggacacagaaaactatggctgggtgtgtggtaaggggaaaacccgctccttaaggcagcttcctgcgtgcccaccgtgttcgggcccccgtgggacttgtctctg

SEQ ID NO: 162210 - DNA, 122 bp, Homo sapiens
cagtttgcacataattgttttatatcatagcagtaaatatttgcaagaaatcccactcatcgaccccgggtaaaatgttatggtaagcatgcacagtttgcagtctacagtttttttatgta

SEQ ID NO: 162211 - DNA, 122 bp, Homo sapiens
tttctcagaggagaagcttttaagttaattacttaaaacctgcagaagcacctagtcccacggtcaaaaccaactgcgcaccagagaagctgcatgggaaagtttgtatgttggataaagtg

SEQ ID NO: 162212 - DNA, 122 bp, Homo sapiens
acgaaaaatgcatgtgttcacacgtgtgcagctctgcgtgaggaaaatgcaaacaaagctcggtaaagcaggccggggcccacacatgcgggcagggcatccaggcagcttgggcagagtga

SEQ ID NO: 162213 - DNA, 122 bp, Homo sapiens
gacagaggacggggcgggggcgccgcgacgacagcgaggcggtgaccgagcctcagcggacgcagaactgactaggcagcggcggcacccccattcccggccctataagcgctgggtgccgc

SEQ ID NO: 162214 - DNA, 122 bp, Homo sapiens
ggcctagagtctgtccggaggaaaccaggtcctaagggggctgcttggatacaaaaagggcggggcctcagcgggggataggcgtggccttgaggctgaggctcgaggagttgaggcccaga

SEQ ID NO: 162215 - DNA, 122 bp, Homo sapiens
cggagctcatgacgaagtcaacgtactgtggggccgtgcacttgaccttcttcccccgctcgtcataccagtagtactgtctgtggagacagagacacggtcagggcatgcgcccgctgcac

SEQ ID NO: 162216 - DNA, 122 bp, Homo sapiens
ggtgggctccgtcctcacggctggaggggctctcagaacatctggtgggctccgtcctcacggctggaggggctctcagaacatctggtgcacggctcccaactctcttccggccaaggatc

SEQ ID NO: 162217 - DNA, 122 bp, Homo sapiens
attgtgggcattcaggagccaaaatgcccccactcataaaaaatgatccaaacaatggctcgtgcccaagctttcacacttgttttgcagagaagtcttggctggcagaggcaggatttgta

SEQ ID NO: 162218 - DNA, 122 bp, Homo sapiens
tgacacaaggcccagggtctgggcgctgcggcggagcccagtgaaagtggcgtttccttccggagaggtgggggaacggaagcgcgctcccgggaagcagcccggcaaggcagcatctgagg

SEQ ID NO: 162219 - DNA, 122 bp, Homo sapiens
cacagctcgggggtggcgcatttcacaacgagggccctgagttcagaggttgcgtcctctcgccacctttccccaagcccagtgcggcggctcctgctcggtgggaagcccagctgtgtgta

SEQ ID NO: 162220 - DNA, 122 bp, Homo sapiens
gctggcctgggtcaggacattcatagtgaaaccagagagatcttgcagtgagattcatttcgtgcagcgcacctgcctcggggcagggctgggaggcacggggaggcgatagagcccatgtg

SEQ ID NO: 162221 - DNA, 122 bp, Homo sapiens
gcagagaatttccttaattctttcttacaattccagtagaatacgatggtgtcccttctccgacaaaagggaatatttgggcattatcactgccaaagaaaaatgcctttttgatgggtgaa

SEQ ID NO: 162222 - DNA, 122 bp, Homo sapiens
ttaaaaaagtgaattccatactaaaactaggaatgaaagtgagagatttctaaacttttgcgaaagtgggtcattttttgtttgactataatagcaggaagaattatagcaatctgtcattt

SEQ ID NO: 162223 - DNA, 122 bp, Homo sapiens
tgacctcaagtgatcctcttgctttggcctcccaaagcactgagattataggcgttatcccgtgcctggccctctttctacacctcaatcattgtatcattagcctgagctgcccatagtcc

SEQ ID NO: 162224 - DNA, 122 bp, Homo sapiens
ggagtctacccggaggagaaagaggcttccgggctggccctccaaagccggttgtacaggcggcagctcaggctgctcactgcgggccctatgaccctttctggggccctgcttgctctctc

SEQ ID NO: 162225 - DNA, 122 bp, Homo sapiens
agtctaaggttacatatttctgctcagtaagggtatccatggtgataactctcatgatgacggtagtcatcctggtaaccatcctggtatccttggtggtaactatggtaaccatagcctgc

SEQ ID NO: 162226 - DNA, 122 bp, Homo sapiens
cactgatacactgattctaaaagggaaacgtatagcaatctgcaattatgatcattgtagcgttactgattagtgcttcgtaataattggaatcacactgagaatcacgtttcccatggtat

SEQ ID NO: 162227 - DNA, 122 bp, Homo sapiens
tgtggatccccccagctctgcgatgatggcagaagagcacacagatctcgaggcccagatcgtcaaggatatccactgcaaggagattgacctggtgaaccgagaccccaagaacattaacg

SEQ ID NO: 162228 - DNA, 122 bp, Homo sapiens
acagacaaattgctagtttagaaatgatctgaacttatttttcccaaaaaaacaaagacccgcaagactgtgtatatatggcaacaggcattatttcattgatccccaaggctgtggatcta

SEQ ID NO: 162229 - DNA, 122 bp, Homo sapiens
accgcgccgcgggctcctcctcacagtctctcccacttcaactctgggaagactgatcttcggacttactggctgactcctagtcagcaacacagaaggaagtcataatgtctccttgcaca

SEQ ID NO: 162230 - DNA, 122 bp, Homo sapiens
gtgaactgcggtccgaagtcggcgtagctgaagccgggcgggtagttgtcgcgcatgaagcgctggtactgcggccgcccctcgccctgccagtgccaccagaaccactcgctgccccaggc

SEQ ID NO: 162231 - DNA, 122 bp, Homo sapiens
cactcagacaagttgccgcccgtccggcccgagagctgggaaccctctagagcagcgggacgagccaggatcgcaaaatgcagtgcttgcccgttgagtcatcagctcacccggctgggcct

SEQ ID NO: 162232 - DNA, 122 bp, Homo sapiens
cccgcgccattttggaaagcaacccgccacgtcaagactagccacggaggttgagagacgcgcggcagagggcggggcgggaggcagagggggcggggacagaaaggtcaggggcgtggcga

SEQ ID NO: 162233 - DNA, 122 bp, Homo sapiens
gaggacactggtttgtactgcatgcgtgtgaggatggctttcctcctggaaggtctcaaacggaaaatagtttcagtgtgacgagtctctggacaaagcaagtgggtcattctgactcagag

SEQ ID NO: 162234 - DNA, 122 bp, Homo sapiens
ggcggagccggccggcagccatggaaccggccccctccgccggcgccgagctgcagcccccgctcttcgccaacgcctcggacgcctaccctagcgcctgccccagcgctggcgccaatgcg

SEQ ID NO: 162235 - DNA, 122 bp, Homo sapiens
ccccaacacaccagaagaggaataaaggccaaccaacttccgcccacccactacaaacgtcgagagaaattcgtagatgaggccttgtcaaaattcagaggcgtcctacgtctgctttccca

SEQ ID NO: 162236 - DNA, 122 bp, Homo sapiens
tgtctggggagtgtcaactttccattgaaaaatacccctatgatcaagccatttcacttccgtggcaatcttatttatgtattcaccaaaattgggtgggagctagtgtttagctgtcatcg

SEQ ID NO: 162237 - DNA, 122 bp, Homo sapiens
gtttttgccttgttttaaaacattttatcccagtgaggtatttacttcctattcaaatagcgtatagtaggcagagtaagaacattcctagccccagaatttatgtgtccccttatctagca

SEQ ID NO: 162238 - DNA, 122 bp, Homo sapiens
aaaaagcaatgaagcaattacttatcctgtttaattagaaagaagacacagaaggagccccgcctttcaaaatctctgcactgaactcatctatgaaagatgggggcatcgaaacccaagca

SEQ ID NO: 162239 - DNA, 122 bp, Homo sapiens
ctaggctgccaccacgccggctggccccaaaaactcgatggttgttgggcggggtcgtgacgtccttggcgtggctgcaggggaggccgcggcggggaaaatggcggacgggaaggcgggag

SEQ ID NO: 162240 - DNA, 122 bp, Homo sapiens
atggacaaagccatcaaggtaagggggaggtgccccctcttcccccgcgttgtcctgtggcgttcttctcggctctagcctcaaaaagcagggagattttgcagtgagaggttccatcgact

SEQ ID NO: 162241 - DNA, 122 bp, Homo sapiens
accaggcttcccccaagctgctaagatttcatttcacctccgacaggcttcatggggactcgctgttaaaagatcactctcccgggatgctgtcgtgggggagggggcccggcactgtatac

SEQ ID NO: 162242 - DNA, 122 bp, Homo sapiens
tagctatttttctttaattttttaagaataaaaaatagtctggtgttgttcagagatgtccgaccttggtagcacattggaattactaggggagcataaaaatactgatttttgcctctttg

SEQ ID NO: 162243 - DNA, 122 bp, Homo sapiens
cagcaaagacacataaggaactcgccctccggaaagacgcgggggaattctgggagtgcgcggccttggagcgcgcacatgcgcggcagctcccgctgctgaatagctgagaggcgcacccg

SEQ ID NO: 162244 - DNA, 122 bp, Homo sapiens
atggataacgaaaaagaagacgctgtccttctattcagggagtttaacatctggaagagccgggagttctttgtgctaaaggccctctacaaagtgcctgagatgcaaaaataagtcacttt

SEQ ID NO: 162245 - DNA, 122 bp, Homo sapiens
caccatggaagagatctaggtgggggacctaagtagtcagcctgtttgatcttgaggacacgggaaccccccccccaccccaagagatctgtgaagtgtctagggcagagcctgggtggtgg

SEQ ID NO: 162246 - DNA, 122 bp, Homo sapiens
ccatctggaaagacagatctacctgccttttggctttcttccttggtcaaaactaaaatccgaagtggagtgccccgagcgatagagaaagtgcctatagctttgacagccgcttggagcat

SEQ ID NO: 162247 - DNA, 122 bp, Homo sapiens
ctggaagttggcaggaagtcctgggctgcattggcacgagacacctcacctaaggctgctcggaaccgccgagaagaaccaggtccaaagtaggcggcaaagaggtcatcagcaaggagtgt

SEQ ID NO: 162248 - DNA, 122 bp, Homo sapiens
ggcaccgggctgggtaggacgcgtccggtcggggttgagggtccccggggcctgtaggggcgggctccccccggggcctccggtcactgcacctgctcggcgaggacgtgtctcagcccatg

SEQ ID NO: 162249 - DNA, 122 bp, Homo sapiens
gcatcatgtacacattgcattcggccttaaaacaacattggaccctcgtgaaggaagcgtcgtgtggacgttgcgttctgccttaaaacaacgttgaacccacgtgaaggaagcgtcgtgtg

SEQ ID NO: 162250 - DNA, 122 bp, Homo sapiens
gcacttcgtgtctgctgagagcaaccagaccttccatgtcctcgggcagctgcaactccccgcgagaccccgcagctgggtgggatgaacaagcaacgcagaccacaagcgagtgcctggga

SEQ ID NO: 162251 - DNA, 122 bp, Homo sapiens
acgtgccccccgggagactgggctctgcctctctagagaaactgaacagatgacaagaaccgaccttgagagactggcatctgggggtcctctgacgaagtgtgtggcttgttctctgggca

SEQ ID NO: 162252 - DNA, 122 bp, Homo sapiens
tccctgcctgtggggggagttccggcaggcctgagtgccacccagacccagccagcctcacggtggcttcagccgtctttgaggctaaaggcgccacaggagagttatcccggctttaatga

SEQ ID NO: 162253 - DNA, 122 bp, Homo sapiens
gtgtatattctaccatgtgccacacagtatgctatgcattttatagatgatatcttaccccgctctaacagaattcctttgaatttgtcagcattgattccatctgacagaaaataaaattt

SEQ ID NO: 162254 - DNA, 122 bp, Homo sapiens
gaggagcgtcccccggggcttcccctgcctcccccacctcccagcagttctgctgtcttccgcctggaccaagttatccacagcaaccctgctggcatccaacaggctctggcccagcttag

SEQ ID NO: 162255 - DNA, 122 bp, Homo sapiens
aaagaagataccgacatggcccctaaagtattaaaagcaccttctttccagaagtacctccgaattgccagggacttcgcccaaaactagaggttggtcgaagtgaaaatctaaacctaagg

SEQ ID NO: 162256 - DNA, 122 bp, Homo sapiens
tgagcgctctgcacattgatgggtcaatggacgagctcgtgctgcagcggaggtgccacacgtggcgcgggaactggaagcgtccccggggccggcgccctcgtctctcacctgtgtctccc

SEQ ID NO: 162257 - DNA, 122 bp, Homo sapiens
cagtatcttcatgtgtcctcatttaagtcaccattagattcagcccaacaatgtggtaagcgatttctatggacaacttgttggagtgaagcgattaatcctgttaaagaaaagaacgctcc

SEQ ID NO: 162258 - DNA, 122 bp, Homo sapiens
aacgtcccacagagccgaattcagaaagctcggcctgctattccccagggagcccgcgcccgaggacttctcttgcaatttcctctgggtagtgcagcttcctcggatgggggtggtgtcca

SEQ ID NO: 162259 - DNA, 122 bp, Homo sapiens
gcggcccagtaagacaactccaccttaaagagctgatatgccttccattaggggcgaggtcgtgggagttgtggttccataagcggtctaaaatatcaataacaacaaagatgatttttcac

SEQ ID NO: 162260 - DNA, 122 bp, Homo sapiens
gggaaacagaggcccggggcgggggcgaactctgccaaggtctcccggggcgtcggaggccgagcatgggctaggacctggcatgttgttgcccatatactccagtgcgtaacatgatgccc

SEQ ID NO: 162261 - DNA, 122 bp, Homo sapiens
attgttttctgtaaaacgcagctaggccaagaaaagccactaaagtatggagaacatggacggtagccttctgccccatctctgtgctgctgtacctgttgtttaaagagaggaagaggtag

SEQ ID NO: 162262 - DNA, 122 bp, Homo sapiens
tcttatgacaacatttattggtgtgtccccttgcctagcccaacagaagaattcagcagccgtaagtctaggacaggcttaaattgttttcactggtgtaaattgcagaaagatgatctaag

SEQ ID NO: 162263 - DNA, 122 bp, Homo sapiens
tgaggttgttttaagtacactaaaaatcttcagaagacccggttaatgggagccactatccgggtcttctacggcctgtgctggctctgggatctcagcacaggtcttttgctcttcctcct

SEQ ID NO: 162264 - DNA, 122 bp, Homo sapiens
ctcctgtctgcttgggagggtcaaagcctgggtgtgcaaggctaggcaggaacgtgctgccggtgtgcggccagcaagtctctcgagcagagcaggtgaaagcaacgccgtcgcttcgcctc

SEQ ID NO: 162265 - DNA, 122 bp, Homo sapiens
taacctcgtgatccacccacctcgacctccctaagtgctgggattacaggcgtgagccaccgtttggaccaggactacaaaccttctagaaactgcccctggagccctcctctaaattccac

SEQ ID NO: 162266 - DNA, 122 bp, Homo sapiens
gatatccctacagggcggggaatgatgtccctacagggcggggaatgatgtccctacaggcggggaatgatgtccccacagggcggggaatgatgtccccacagggtggggaatgatgtccc

SEQ ID NO: 162267 - DNA, 122 bp, Homo sapiens
ctgacccaggctcaggagctgggggcccctgcacagacgcccaggtctcgggacaggcggcgactgcactcacggaagtacgctgagctctcccctgtagaagggcgcctctcctcccccac

SEQ ID NO: 162268 - DNA, 122 bp, Homo sapiens
ctagtggataagtctcacgagatctgacggttttaaacacgggagtttccctacacaaaccgtttctttgcctgccgccatccacgtagaatgtgacttgctcctcttcgccttctgccatg

SEQ ID NO: 162269 - DNA, 122 bp, Homo sapiens
ggataaacagatgggacggagagtgcaatttacataacaattaagctagtttagtacatccggcaatgctgctgaaagcaggcctctccctgggcgggctttccgtgttattaatctacttt

SEQ ID NO: 162270 - DNA, 122 bp, Homo sapiens
agagacagcccctgaggagggctctctccagctgcgaaggcaggcactcccagaagcccccgggggccttcctccatcgcctcattggccagaacagtgtcacatgaccactctagccgcaa

SEQ ID NO: 162271 - DNA, 122 bp, Homo sapiens
tggcgagcgcagcaggagtgcctggagagctcgcggccagcggggagctgagcgcaaaggcggaggagggaagcagcctctgaggcttccccgcctgggagaagagtttttggaagtaggcg

SEQ ID NO: 162272 - DNA, 122 bp, Homo sapiens
aaggtaaaggtgagcattgggtggcagggcctgagtctcctgctggccacagcaccctcgcgtggttacggagcagggcctaagcctcccgctggccttggcaccctcgcgcggttatggag

SEQ ID NO: 162273 - DNA, 122 bp, Homo sapiens
acctgcagcttctagacgccgccctcggtgccacccctcgcggaaggcgttctcccacaccggggtcgccactgcgcccagctgcagaaagcactccgcacccccagcaattcggggcatgg

SEQ ID NO: 162274 - DNA, 122 bp, Homo sapiens
ctccctctctctgcggccctagagttaatcccatcagccgaggtgaggcacctgttaccccggccttcctcacccccgcggcctctcctccattacaccgcggccgccgaaacggcccggcg

SEQ ID NO: 162275 - DNA, 122 bp, Homo sapiens
tgcttttactttgtaagttcatgcttaaaatagcgccagcggcctctgtttcaccttttccgaggttggaagcggtttgctctcagctccatgagaagacagcgggggaaacgcggcaagga

SEQ ID NO: 162276 - DNA, 122 bp, Homo sapiens
taaagacaacaatttcacagctctgatgatcagaaatgatgtaatggccacaggcggctccgcctgcgtcatccatgatttcatcacacacctcgggaggctcagggtgacagacagtgcat

SEQ ID NO: 162277 - DNA, 122 bp, Homo sapiens
gcagaaacagcagggggaggagcaacagctgccaaattcgccaactagaggagggagaggcggagcttgggtccctgtagaagccagaggcgcagtctggactgtagtttcccgggagagac

SEQ ID NO: 162278 - DNA, 122 bp, Homo sapiens
ggggctgtctctgaggtttggattcggaatcgtgacatcttgtcccgtgcaagacgaaggcgaggacggcgagggcacacccttccagtcccgaccccacagaggccaagcggcccttcgcc

SEQ ID NO: 162279 - DNA, 122 bp, Homo sapiens
gtgagccactgcacccggccgagacaaaatcttctagactgcaaagttacgctcttttcacgaagtccttgcccacctgcccagggtcccttgggcctgctttttgtcccccgggtggggtg

SEQ ID NO: 162280 - DNA, 122 bp, Homo sapiens
tggtatgctaagggtaggaacaggagagggatggggtagagcgggagcaatcaggaatggcggtgaaaaggtagactgtggttcgactgctgagagccacaacgtcatgctaagcagcttat

SEQ ID NO: 162281 - DNA, 122 bp, Homo sapiens
ttaattggggtatttagcccatttacatttaaagttagtattgttatgtgtagatttgatcgtgtcatcatgatcccagctggttattttgcagacttgtttttgtggttgcttcatagtat

SEQ ID NO: 162282 - DNA, 122 bp, Homo sapiens
gatagtctagaactgtcctcattgctgctgttcctaaatagtatctttaccaagtaataacgtgccgtctttgggaataagtgctttcctcttagcctgttctgttttcttgggtgcgctaa

SEQ ID NO: 162283 - DNA, 122 bp, Homo sapiens
tggggggggtgtgggggaaacgtcagggtctgagttcccggacactgggggccccctccccgcagtccgcactcaccgggtgccttccctgggggtacatcctgccgatccgaaaagccccc

SEQ ID NO: 162284 - DNA, 122 bp, Homo sapiens
gcagccgctcagccgctcagaggcctgtggggcagccatggcccgggccctgggctcgggcgcctgccaatccccgtctgccgccggctcgtgcccgctcacctttaaccccctctactttc

SEQ ID NO: 162285 - DNA, 122 bp, Homo sapiens
aagcctgccttgctagctagttccctccgtcgtcctaagaaatcactaaagtacgctaggcgcagtggctcacgcctgtaatcccagcactttgggaggcctaggcaggtggatcacctgag

SEQ ID NO: 162286 - DNA, 122 bp, Homo sapiens
agctggcgctgcggccgtgaagctgcctcctggagccatttcgcccctctgaatggcgctcgggttattttcagacaaaggagcatcaactggaggttctgccttttcgaatggatggaatt

SEQ ID NO: 162287 - DNA, 122 bp, Homo sapiens
gggaaggggtggtgggtgaggggctgtgggcaccgcagggccgagtccccggcccgtctgcgctgctgtagggcggctgcccgcggcacccgggacgatccagcctctgcctcgcgggcgtc

SEQ ID NO: 162288 - DNA, 122 bp, Homo sapiens
cccttctctttccccatttccatttccggactcttctcctgcccgcagggcagacgcacgcgcagagagattgccagccctggctgccagagacccggaagcatcgatcggctctgtgctcg

SEQ ID NO: 162289 - DNA, 122 bp, Homo sapiens
gcaagaggtgaagatcttggagtctggaatcagaccacctggattttcatcctagttccccgatctgggggaagtgggcctccctctgacagctccggagtgttctgctgagctgtggagaa

SEQ ID NO: 162290 - DNA, 122 bp, Homo sapiens
tttctccgttcctaacatcccctaaagtaacgagcagagtggtcatcaggagtatataaacgcagggcaagcgcacagcaaacattggtgctgggccctgagcgcccagaacttgcaacgtg

SEQ ID NO: 162291 - DNA, 122 bp, Homo sapiens
atgataaagcacatctataaaagccttaagttaatagcacactgagcactttccaccccccgatcaggagttggaaaaggttatctattgtctccacttgtattaaacattttactggagat

SEQ ID NO: 162292 - DNA, 122 bp, Homo sapiens
acacattcccctcccttctctcctcacttttattgcttttctagtctgcctctctagtcacgggggcagctttagattttctgtcctcagagcaaaagggatggaaaaaggaggatacatgt

SEQ ID NO: 162293 - DNA, 122 bp, Homo sapiens
tccctcagagtcccccgccaagggcccgctgcacctattcccgcagacgcgcagctgtaccggcctcagaccacgacctaccacaacccgccacgctccgtccaatcagagcgcgccgacgg

SEQ ID NO: 162294 - DNA, 122 bp, Homo sapiens
gccggcacctgcaggaactcggccgctagtccctgccacgccattgaaccttctcaagcacgcgtggcccagccagcaacgcgctctttaacccgcctcccagccccgccttcggccaatcc

SEQ ID NO: 162295 - DNA, 122 bp, Homo sapiens
gatgctggtctctgaagacaccctactccccacaggactgaggcctttctctgcaggtcacgggtttgaaggtggctagcttctcaaagaagccccatcccttcacatctccattgctgctg

SEQ ID NO: 162296 - DNA, 122 bp, Homo sapiens
ggcgcttaaagcccctctccataagacacgcccaccacctccatgacagtttaccattgccgtggcaacacccggaagttactgccccttgccgcggcaacaccggaagttcccgcccactt

SEQ ID NO: 162297 - DNA, 122 bp, Homo sapiens
gggcagctcccgagggcaggagagtgccgtgcttttcagtctgatctgagctgagagtggcggcctgaggcgtccccaacaccggtccactgtgggtgctctggggcacgctgcctcgggag

SEQ ID NO: 162298 - DNA, 122 bp, Homo sapiens
aagaagtacattggttcagtctgaaaaggtgggacaacttgaagcaaaggcaggaagacacgaagctggagggagcttccaggtcacagataggtggactcaaattcttttgagtttctgat

SEQ ID NO: 162299 - DNA, 122 bp, Homo sapiens
gaacaaatctgttatcaagccaaaattctaaggacaagagacaggatactcacccacacacgtacaccttgtaacacttggcaagagtgaggaacatccattttcagaacagctgctggggt

SEQ ID NO: 162300 - DNA, 122 bp, Homo sapiens
aagtgtgtgatgggcacctgatctacaccaagagaacagggctgtctgcagaagacccagcggcctgacaccttttcttgttgccggggaaggaaagtttttcttttgatttgtcctctcac

SEQ ID NO: 162301 - DNA, 122 bp, Homo sapiens
tcctccccacacctcagctcacccactcggaattatctgtgagtttccttccagcttcagcgccacaaggacagggaccttgtctcttcctgtggtggttgtttctatcatcactaaatcca

SEQ ID NO: 162302 - DNA, 122 bp, Homo sapiens
aatgaaagacacgaaggagctgctgtggagctgctgtctcccctcggagtttggcaggcccgggattccgcaaaggagttggcggggccagatgcctccagccctgagctcagtacattcgg

SEQ ID NO: 162303 - DNA, 122 bp, Homo sapiens
ggccgagaggcggacggggagcgcagggagttcagggggcgcccgtcatccgcatccccacgccacctcctccgggaagccctccggacacacccccgcgcgtcacggaggcagaacggcag

SEQ ID NO: 162304 - DNA, 122 bp, Homo sapiens
agggcatctggaacagagggagtgaccttgaggttcctaagcgtgtacgtgccatggggccgggtggagggagtcctgccgaggcaaaggggagggaacatctaagggatgacttagatacc

SEQ ID NO: 162305 - DNA, 122 bp, Homo sapiens
ggttcacttcatcataggcacactttccacacacgtgtccagatcacctgctcctcctagcgctcttgtgaggtgtagcctattactattctcattgtacagatgggaaactgaagctgaaa

SEQ ID NO: 162306 - DNA, 122 bp, Homo sapiens
aaaaatatattgggtgccttttgtgtgccaggcattatactatttgtttaggagagagtgcgaaacaagacagagaaagtctctacccacatggagttttcattccagtggagcagtgtgtt

SEQ ID NO: 162307 - DNA, 122 bp, Homo sapiens
gcaaacccgggaggcaggccaaggctccgcagggacagggcatggagcccagtctccgggcggaaggtgggggacctctggtggagggtgagggaagcttgtgtggcctgagaccaggccag

SEQ ID NO: 162308 - DNA, 122 bp, Homo sapiens
acaccaatggctcccggttgaaaagaaattccggatccaacttagtaagcagccagggaacgatggcgaatttgcaacaattcggaagaaatcagagccgaaccattggccaaacaagtaac

SEQ ID NO: 162309 - DNA, 122 bp, Homo sapiens
ggcccggcgcgtggctcgggctcgggcggagctggagacgtgtggagctgttcgaggactcgcgggtgtgcaggtctgagtaccactccgatccctggtggaggtccccgcgcctctctgga

SEQ ID NO: 162310 - DNA, 122 bp, Homo sapiens
ggcctgggggcttggccctcgaagccactggtgggcaaattcagaaactgaagccagcctcggcgggaccgaggtcccggagccaagctgtacccctgctgggggagtgccctatctgagga

SEQ ID NO: 162311 - DNA, 122 bp, Homo sapiens
gctgagcagccaagcgcagaagcgaagagagggcggcagcctgcggccgtggccggcccgcgaggtctgggcctgggagcgcagatctggctgagcagctgattcttccagcagatccgaga

SEQ ID NO: 162312 - DNA, 122 bp, Homo sapiens
atttgtatctgaaggagattttccttcctacacccttggacttgaggattttgagtatctcggacctttcagctgtgaacatggactcttcccccactcctcttatttgctcacacggggta

SEQ ID NO: 162313 - DNA, 122 bp, Homo sapiens
tcaatatctaaatttgagccctcgagtgaatgtgaggtcttgactctgccagagactagccgtgcaaaatcatgacaatacattttgtctcctttacccttgttcggtctacagtctggaag

SEQ ID NO: 162314 - DNA, 122 bp, Homo sapiens
aatttgttgacattatcacttcaatgatattactttgtgatactgacattatcacttcaacgaacacaaatcacccacaatcgaagattccagtgaagaaccacagatatggagctgcattg

SEQ ID NO: 162315 - DNA, 122 bp, Homo sapiens
ccctcccgcgcccccctttttagcatatttgatcactttgattctctgttcttttctctccgcggtgtgtgtgtgcgtgcgcgcgtgtgtgttttcttcttctcctcctcctctccccgagt

SEQ ID NO: 162316 - DNA, 122 bp, Homo sapiens
cttgagttatttgttcaaattatttgtctcctctccaagactcattgttctatacttgtacgcattgcaaatactatgctcacttgcagagtttttgaaatcgcatgcatttgtttgctcaa

SEQ ID NO: 162317 - DNA, 122 bp, Homo sapiens
ttagcactgtccccggcccacctgcaccagcgtgaactcacatgagcttagcactgtccccggcccacctgcaccagcgtgaactcacattagcttagcactgtccccggcccacctgcacc

SEQ ID NO: 162318 - DNA, 122 bp, Homo sapiens
ggtgcaggatataatctcgtggtgcgctgttttttaagcccattggaaaagcgcagtactcgggtgggagtgacccaattttccagttgccgtccgtcacccctttctttgacttggaaagg

SEQ ID NO: 162319 - DNA, 122 bp, Homo sapiens
cccgcacctgcccactccctcccctccccgggcctcctacccacccctgacactgcaccccgcctccccaggagtccacattccaggagctgtgcgaggggctgctggaggagtcggatggt

SEQ ID NO: 162320 - DNA, 122 bp, Homo sapiens
caacatctggtacttttgcaatcatgaatacctggctttaggcttcccagcatgggggatcgttttggtcaagggcacaatgacactccctgggttcggataataggggtgtgaaaggagat

SEQ ID NO: 162321 - DNA, 122 bp, Homo sapiens
atgtgtgcgcctgtcagtcaacgctgacaggccgcagcccattggtcaggccccgccggccgtcaccgcccaccgccgccacccattggccggtttgaacacaaagccccggctcgccccgc

SEQ ID NO: 162322 - DNA, 122 bp, Homo sapiens
ctggagaaccgggaatcaagccctgcgcgttcctcttcttcctccttcgtgccgaaagcacgcttcatgtctgccagggcatcagttctgaaagtgagcggagaacaaggagtttctttttc

SEQ ID NO: 162323 - DNA, 122 bp, Homo sapiens
ctcattcctttgcagctctaaagctcttttgtgtttcatcatcttgctcgaaaccttgcccggagggctcactttggccccagcagagagtgcctttcctgagaggtgagggatgtggggag

SEQ ID NO: 162324 - DNA, 122 bp, Homo sapiens
ggttgggatcctggctctgcaggactgcgtgaccttggtgagttacttcatccctccaaacgcgctgttctccttcatagaatggagatgaccacagggccagattcataaggttgttcctt

SEQ ID NO: 162325 - DNA, 122 bp, Homo sapiens
tcgtctctctccatctctgggcagctctggtcctgcccagctgttccatgcttgtgttagcgtgactgttttttttttttatatatataactgagtccctaaactcaatctaactggcctgg

SEQ ID NO: 162326 - DNA, 122 bp, Homo sapiens
tctcagagctcttaaatccctggggctttcctaattccgcagtgtagcggcacttccttgcgcggttttgggcacattggggtttcttaggaacacgctgtcatcggtaaggaaacatcaga

SEQ ID NO: 162327 - DNA, 122 bp, Homo sapiens
aaccacattttttttcctccctctgtctccctgcccagccagtccctgcgaactgcccggcgcgtcctgccttgccagaccctctgcccggggtcatccgcagcccgcgggcgccatcggct

SEQ ID NO: 162328 - DNA, 122 bp, Homo sapiens
tcctcgtcatctcttttaaagggcaaatctgcaggcgtgtgtgtccagcatcatgagcttcgtggggtctgagtcatagaacgtgtgaggacaggagcgtgaggcgtgggcgtggggaggga

SEQ ID NO: 162329 - DNA, 122 bp, Homo sapiens
agccctgcccggggctggggatgggccatcagggggaggacactgcagctctgaaaaaggcgatgccagcagggaaggagaggcagtgatcagggcagggaaactccaaagcccaaagcagc

SEQ ID NO: 162330 - DNA, 122 bp, Homo sapiens
ccctggggctggacgcgggttcccgggtcgccttccggcctcgctcccgtcgggaggtcccgacacgggcttcctcgcagcctccccgcctggcccggcccgattttggccgctgcggtcag

SEQ ID NO: 162331 - DNA, 122 bp, Homo sapiens
tagcttctgtgtgccttcatttcctcgtttgtaaaatgggaacagtagtagtaccacatacggtgactgaggattaaatgagctaatacataaaatggtaagatcttaaaaaaatattagct

SEQ ID NO: 162332 - DNA, 122 bp, Homo sapiens
ggtcagaaaaggattttatggagttcatgatcaaggggacctcagctttggtgtcggttccgtcacaatgtgtcaagcaggtggccccattacctgaagaacaagggtgaaaggactcaagt

SEQ ID NO: 162333 - DNA, 122 bp, Homo sapiens
cagcggcgggggcaatttcagtcccaagtccagtgcagggctgcgctgtatatttttaggcggatgaaactctgaccctcaccgcatccaagtgactgtcagttatcacctacaaaactacc

SEQ ID NO: 162334 - DNA, 122 bp, Homo sapiens
ctgggacggcccgacgccgccctaccagccgctcgtgccccagacggcagcgccgcacaccggcttcaccgaatacttcagcatgcacacggccgggggcactgcacccccggtctgagcac

SEQ ID NO: 162335 - DNA, 122 bp, Homo sapiens
tcagtttagggtgaggtctctaaagcaattcatccatgcatgacacaagtcagatcaggtcgatacagattaaatcaggtcacaatagataaacaactctggggatgaatgtcttttacaaa

SEQ ID NO: 162336 - DNA, 122 bp, Homo sapiens
aggtgacattgaagccagatagtgaaggatgagtaagaattggccaggcagaaaggaacacgaagggtatcccatgccaaaagaagagcatgtgcaaagacctggaagtgggaaatggagtg

SEQ ID NO: 162337 - DNA, 122 bp, Homo sapiens
agtcccctgaacttggctcccatgccctgctttgttcccccttgctcattgctgttcagccgcgtgggtctttccatccttggagcacaagctcattccaacctaagggtctttgcacttgg

SEQ ID NO: 162338 - DNA, 122 bp, Homo sapiens
catccttgccagccgaggcctggttggggaggccaaaccaaggagagcttccccagcagtcgtcagtgctgtggtctctgctctggctgtgtttcagcccacctcctcccagctttctccac

SEQ ID NO: 162339 - DNA, 122 bp, Homo sapiens
gcatgtgtgttccagcactggcctgagtatctgtgtcaatcccagcatgggtgtccagggcgtgtctggatgtgggtggtgtggctggggggagtaagtgtgtgaatgtgttccttggaatt

SEQ ID NO: 162340 - DNA, 122 bp, Homo sapiens
aacaagtatttactagttcttgggtgtacctactctgggtgggtggaggcctatccaacacgaactgagaaagctcgtgataacccctgtgcttcttcgaaatctgattcctagatttcgac

SEQ ID NO: 162341 - DNA, 122 bp, Homo sapiens
tgcagatgtgattgaactgaggatcttgagatggaaagattgttctgaaccatggtggggcggcgtctgatggcatcaggaggtcccgataagagggaacagaaagaagtttaagacacgga

SEQ ID NO: 162342 - DNA, 122 bp, Homo sapiens
ggaacattacacagtttctgagattttgttacgatagaagtcagcattgataagcctctgcgcacctgttttaatgtaggatcattgggaactgagcagtagcttacagggcttgggagggg

SEQ ID NO: 162343 - DNA, 122 bp, Homo sapiens
ttttggaaagacactcgccctggaaagtgcagtacgtcctggggatgttgtgtaaacactcggagcctcttttctgcacgggaccgctcagttcccggtttccatctcacagattttcaggt

SEQ ID NO: 162344 - DNA, 122 bp, Homo sapiens
ctccccagtcgacttcctcatcagaaggcagcatccattcataattctctgcctgtggaccgagttaggctggagctgggcatggactcctgcgatctctctttttgcatctgaaggagaaa

SEQ ID NO: 162345 - DNA, 122 bp, Homo sapiens
gggcctcccggagcagaggctggagtcagtcccaatgccaacagtttcgaaccttgcccgcgggcactgccctcgggatggccgccagggggcgctgcgccgccactgcccagaaattgggc

SEQ ID NO: 162346 - DNA, 122 bp, Homo sapiens
gcagtgatgaagcacatgacttaagagaagagtagcccaggctccctgaacttgactgcacgttgcagaaccacaccccgctaacggccacaggaaaggaccccaatggtgaatggtataat

SEQ ID NO: 162347 - DNA, 122 bp, Homo sapiens
gatctgtgacaacacggagctagtatttcctacaacataatgcctggcacacggtaagtgcgcaatatgtagctgttgcacggctaaatgtatacataagcttcaaagcagagtggcccata

SEQ ID NO: 162348 - DNA, 122 bp, Homo sapiens
gacgttgtcaggaggtctccgcgcggaatcattaggtagctgaggcaggtgcactgaatgcggttttgttggttctgtgtcttctttcggagaggggcagtagcagcagtgactaattggtc

SEQ ID NO: 162349 - DNA, 122 bp, Homo sapiens
tgcgagcaaagccgggagagcgagccccaagcacctggcagcggtgcccccagcaggcgccgaggaatccggctatccatttctggtgaactctgcgcccactgaggcattcgaggtacgga

SEQ ID NO: 162350 - DNA, 122 bp, Homo sapiens
ctgctcatggggtgcctgtctccctgggtactgctggaggccaagactaggggagaggagcgtctccactgggaacactcactctatcacatccaaggtgtcgcttttgagttgtgtgctga

SEQ ID NO: 162351 - DNA, 122 bp, Homo sapiens
atttccacacaaaccccttcatggggagctccaccatctgcagcgaccacacctggtccccgccatgaatcccagctgctcaacgagctatgtaaggtctgcctgccatctcaatggagtgc

SEQ ID NO: 162352 - DNA, 122 bp, Homo sapiens
ctaccaggcccctcctctgacacatggaatctcaggtgtgaacatactcctctggcctcccgggctttcttgttccacctatcttctgtttcacccagagtatggccattctccaggtccta

SEQ ID NO: 162353 - DNA, 122 bp, Homo sapiens
ttcgacgccatcttgggaaagggcagtccgctgcggcctcaccccagtcagagaagcaggcgcggggatgggacacgcagcttccgggtcaagcgctttttctttttcctcccggaaacaac

SEQ ID NO: 162354 - DNA, 122 bp, Homo sapiens
ctctggaacgtggcctctagctcttgcaactgctggcttgtgaagtgcgtacgttgccgccgctgcttcttcttcttggctgggtcgtctgcgccgccgcagcccgtgcctcccgcaccact

SEQ ID NO: 162355 - DNA, 122 bp, Homo sapiens
tgagccgtggggaccgtgagccgtggggccgtggggactgtgaactgtggggccgtaagccgtggggcccatgagccgtggggaccgtggggaccatggggaccgtgagccgtggggccgtg

SEQ ID NO: 162356 - DNA, 122 bp, Homo sapiens
tctttctcattgatcttggctgaatggactctgccaggtagctctcgcatggggtctctacgcagctgcagtcaggcagtggctggggctggggtcatcttgaaggcttcttcactcgtatg

SEQ ID NO: 162357 - DNA, 122 bp, Homo sapiens
tttagcaaatgcttttctctttctgcctacaaggctgctttagcattctgaaggaaaggacgtggtaatgcctgataaaaaccctttctcagttaggtcagtgtgcaggctgtgcatcccaa

SEQ ID NO: 162358 - DNA, 122 bp, Homo sapiens
atcagaatgacaaagagaaagaatcttccagtgagaggtaacatctattgtaaaacaaaacgaaacaaaacaaaaacagtgtcagggagtattaaggaagatccatgaggctagagtacaga

SEQ ID NO: 162359 - DNA, 122 bp, Homo sapiens
gtcccctgtcagttagaatcaggaatggtttccctccgcctgtgctggagactggaagtgcgtgcaaggctcttcttgctgctgttcctacttttacatgccccaccgcttgctatatcagt

SEQ ID NO: 162360 - DNA, 122 bp, Homo sapiens
gcaaggtggatctgggactgagccggtggtggaaagctgcgcactgggtcggtccttgtgcgcatgtctgcccatgcgcacaggggatgtaggccgcttacccggtagcgctaagcactatg

SEQ ID NO: 162361 - DNA, 122 bp, Homo sapiens
gcgagtgttcccgtacatggagggggaccggggcagccgctaccagggggtcagagggatcggaagagtcttcaaaaacggtacggagatattcagatagagagtgagacagcactctcgtg

SEQ ID NO: 162362 - DNA, 122 bp, Homo sapiens
acccaaatgggaccggaggctctccttaccctctacccccagctggcccagggcctacctcgaagagccaaatgaggagcgtgacgacacccatggagttcatgaggctgctgtagtagctc

SEQ ID NO: 162363 - DNA, 122 bp, Homo sapiens
agctggctcatggagcaggggtcagtctcacgctccagagcggccggacagttccccgcccgccaggagtccacaaacagcgaggcggtgccctcggcgatacccatgctagtggtgaagtc

SEQ ID NO: 162364 - DNA, 122 bp, Homo sapiens
gaagcaggcaccccagacatcaaaaaaaaaaaaaaagtgcccttaaaaaaccaggataaacgtttaccaaaaacacgagggcttctgtctttataaggtgatccttgcactcccttccctgc

SEQ ID NO: 162365 - DNA, 122 bp, Homo sapiens
ggcaccagcggtgctttgtctattccagttggctggatgataaaaagaggtgtccaaaaacggaaataaaaaggcaaaagggcaacttggatgtaattatctacaagtagaagatatattca

SEQ ID NO: 162366 - DNA, 122 bp, Homo sapiens
aacggcctttggaatgcctaaacttaaaaaagtacactaccaaggacttggaaagaatctcgcactccaacgccaaagaatctattgcatattaatcttcattagaaaaaaaattgattggg

SEQ ID NO: 162367 - DNA, 122 bp, Homo sapiens
ccaagtggaactggtccaaatggaaaaacagccccccgggacgtcttgtcttcggagagccgcgtctccggggcccgggcaggccctgtggtctccctgcctgggctgtacttgctcagcct

SEQ ID NO: 162368 - DNA, 122 bp, Homo sapiens
ggtcaaatttacataaacaaatgtcttccggggccagcaggtagcatgtctgggcaaaagcgtgtgtggcaaggttttgataaagcgcagaacacatgttctgtttaaaaatgttcacattc

SEQ ID NO: 162369 - DNA, 122 bp, Homo sapiens
cttggggttttcccgggctcaccccaggggagacgtggtcaagggctctttcccagggctcggggccgtttgcacgtccttcttcatgaggcatctgttcaagcctctgcccatcttctacg

SEQ ID NO: 162370 - DNA, 122 bp, Homo sapiens
acctcaggtgatccgcccgcctcggcctcccaaagtgctgggattacatacgtgagccaccgtgaccagctctctgcctggctaatgttttaattttgtgtacagatggggtctccttatgt

SEQ ID NO: 162371 - DNA, 122 bp, Homo sapiens
gttctgtcccgccccattgccctcctagccccgccttctaggccccgcctttcctctattcgcgctctgacaaagtgcaggggatatagaccaaccgcttgtgaaggctgctggttctgtta

SEQ ID NO: 162372 - DNA, 122 bp, Homo sapiens
aggtccctgtcgcccattgggccggccaggcgaggatctcagccagtgggtgctgaggcacgagaacttcttcgcagccttgggcctgacttggatccactgtctcagatataagaggagcg

SEQ ID NO: 162373 - DNA, 122 bp, Homo sapiens
ggcgggctgcgggggtgccgggggctgctgatggtggtggtggtggtggtggttcggattcgaggcaggaatgtttcctgtggagccgccaccgccactgctgctatagaaactgctttcag

SEQ ID NO: 162374 - DNA, 122 bp, Homo sapiens
caagtctgtgagcgcctcctttgtgctgggtgagggtgtcaccccagggagttcccagaccgagggaatgagtgtgagggaagtgcacggggactgggcccctgggcggggcactggcaggt

SEQ ID NO: 162375 - DNA, 122 bp, Homo sapiens
ccagagagagagggggacagagacccagagatacagcgggacagagacccagagacatagcgggccagagacccagaaagagggggacagagacccagagagaaagggagacagagacccag

SEQ ID NO: 162376 - DNA, 122 bp, Homo sapiens
ggaacgagagagagacacacacagggctccttccccccgccctcccccccctccctccgtcggtaccgactcacccgacaccaccaagccgcagggagggacgcccccgccgacaggagaat

SEQ ID NO: 162377 - DNA, 122 bp, Homo sapiens
ggttgattaaagagtcaggtagacatttctaaggcagtggggcatataggtgtggaggcccgggagtgctgacatgtggaaatgcaacagtcatgaagctgcagtcgttaacgtaactgaca

SEQ ID NO: 162378 - DNA, 122 bp, Homo sapiens
aggaagtttccttgactgtcctcaaagtgcacagcttgtgaatggaggagccaggatgggcgcccgctggctctcctatcccttcagttatgtcagcgtcccccgcagcagcccattgtctg

SEQ ID NO: 162379 - DNA, 122 bp, Homo sapiens
aaatcttcataagtatggcagacccctaaatcattgtaggatttatctctcaggctatgacgcaagacccatgggtcttgccaaggtatccagaatacttcccacttccttgcaccaacaca

SEQ ID NO: 162380 - DNA, 122 bp, Homo sapiens
acggttagtgattggacgaagcagggcgcgggggcgcaagcccgggtcctgcaggggcgacgcgaggcctcttttgaaagatgcggccctgaccctgtgaacctcgcgcagagcggcctgaa

SEQ ID NO: 162381 - DNA, 122 bp, Homo sapiens
cattaaaaaatgaaaaatctgatcatagtttcactttcaatttattggtatatccttctgcgccaaggttttttgttgttgcttaaacgtttgccgccacttattccctccccacattttaa

SEQ ID NO: 162382 - DNA, 122 bp, Homo sapiens
acctgacaatccctgcctgcaaatagcaaatcccaaagtaatgcttccacctggcctggccgccagcaccttgcccagaaacagcctgtagcaagctgtggcatttctaggcctggagaagg

SEQ ID NO: 162383 - DNA, 122 bp, Homo sapiens
ctcacccagcagtgaagggagaatctccctccactcacttcaccgcgggagagattagagcgacactattattttgagacagggtctcactctcttgcccaggcaggagtgcagtggcgccg

SEQ ID NO: 162384 - DNA, 122 bp, Homo sapiens
gcgtgcagagcagtccttcctctggcggcagcagcagcctttgtgtactgatctgggagacggcagaggaggaagtgacactccccagggtggggaagatttggggttggtgggggtgactg

SEQ ID NO: 162385 - DNA, 122 bp, Homo sapiens
catgcagggctatagaaggcggactggccgccagagggcaggatgcacttgtaatcaagccgattctgtaactggttctgtttctactacctccatccaaaagtctgtgctgtgatagataa

SEQ ID NO: 162386 - DNA, 122 bp, Homo sapiens
caataaaaaataaaaataaaaaaaaaaaaataaaaaaataaaaaaaaaaaaaaagaaagccgcctgacctgtatacagtattctgaaaagggggtcgcgaggtgcatgtccaacctccgccg

SEQ ID NO: 162387 - DNA, 122 bp, Homo sapiens
tcctgcctgtgttcaggaagggagtttctgtggtccctttgaaaccacagaagagcccctcgtatagctctcaatggagggggcaaaacattcaaataactcaggagataacacaactattt

SEQ ID NO: 162388 - DNA, 122 bp, Homo sapiens
aggtcaacgtgggtcaagtttaagaagggggggctcaggggtagaaggaagaaacggggacgcttgtcatgatcacagccgggaggagaaatggatccgctgggcttggagaaagagggaag

SEQ ID NO: 162389 - DNA, 122 bp, Homo sapiens
atcttgccacttaactagggtcacagagcttattagatccctaacgctgagtcctagaatcgcaaacacccgtccgttgaacaatcccacatcacttctctccagtcgtcaaagtctacagc

SEQ ID NO: 162390 - DNA, 122 bp, Homo sapiens
tttgctgactttactctgtatcctttcactgtaataagagataatggtgagtataacagccgcttctgagacctatgagttattctagtgaatcatggagcctgagctggatcttggagaca

SEQ ID NO: 162391 - DNA, 122 bp, Homo sapiens
acaactcccaggagtgttagtggggctggtttgtggactcgcctttgagtcgttggtctccgctcaatcaatattagataaaatgacagtattgggagaaatccagggggctctggaggacc

SEQ ID NO: 162392 - DNA, 122 bp, Homo sapiens
ccccatgcagtgcaggggaggggcagggggaaggagaggctgtgaaagcaggagagtggacgggaggggcaggaagcccaagctagaaagagtcccagaaagagaagaagagttgaaggaac

SEQ ID NO: 162393 - DNA, 122 bp, Homo sapiens
gcagctaccgcatcgccccccgcggggctggtccccaccctttctccgccccctcacctccggcagccgactccggctgccccctatgggtctagggaaacccctcgagacttcccccatgc

SEQ ID NO: 162394 - DNA, 122 bp, Homo sapiens
cctgggccacctccctgtccggtccgttgaagaagacctagaactcccgctagacagctccgccccaggctcttcccaagggacatccccggctcctcaccgcggactcaggaccggtggtg

SEQ ID NO: 162395 - DNA, 122 bp, Homo sapiens
accccctcatctgccccgctacctggttaagggcccgagggctctcatagaggagacctgcgggcacccagggggccgagctgcctttggagactgagccttgtgcacagcatcacaggcca

SEQ ID NO: 162396 - DNA, 122 bp, Homo sapiens
cacacacaaagaagaaactgactccctgagacacctctcctaagaggccgagttcgtgagcggtcaaactagggttccaatctcatttcagatcccctcagctggcagttattttattaggt

SEQ ID NO: 162397 - DNA, 122 bp, Homo sapiens
cctgcccaaggtcacacagcaccgcagtggcacagccaggactggcacccacacctcccgcggaaccttgcaggggcccaaaccacctgggttctagagctccttgaactggcctcttgggc

SEQ ID NO: 162398 - DNA, 122 bp, Homo sapiens
agctgatgtcacgcctgctccttggcgcaaccttactcccggctcaggtgggagggcaaccgagtcggcctgggttcaagttctccagagtgccggccctccactcgagttcccctgccccg

SEQ ID NO: 162399 - DNA, 122 bp, Homo sapiens
tgatttgggaaacttttcattcactctttacacaatgaaagactagttttcttcctagttcgccaacaaagtaaataaaaagaatacattatcattgccttacaattctaaaagcagaacaa

SEQ ID NO: 162400 - DNA, 122 bp, Homo sapiens
cagtagagatcccaggtagagcaatttacctgcacattgttgccagggaacaagggaaggcgagtcaaactatttggggatttagctgagctttgaaataactgaaaagctatgcttcaatt

SEQ ID NO: 162401 - DNA, 122 bp, Homo sapiens
cttccttctcctgtggttccttgacgggtcccggaggatgggtgcagggctgggggctgccgtccgagggcccggaggctggagccgaggtggactcgggtagggagcgcagagagcgcaga

SEQ ID NO: 162402 - DNA, 122 bp, Homo sapiens
ccctagacaccctgagcagccctggcgatggaaaaattccttgagtaaattaagactgctcgactcgggttgctctgtgctgggtgcgagcctcggaggtctgctctttcggggcttccccg

SEQ ID NO: 162403 - DNA, 122 bp, Homo sapiens
gttcaagcgattctagtgcctcagccctcagcctcctgagtatctgggataacaggcgcccgccaccctgcccagctaattttttttttttttttttttttttgagacggagtctcgctctg

SEQ ID NO: 162404 - DNA, 122 bp, Homo sapiens
gagttgcagggagggagtagaagacccttgaagccccctgtgaatgagggcagccacttgcggagtcctgcctgtgtgagagatgtaccagcgggtgcacgttcatactacagcctggaaag

SEQ ID NO: 162405 - DNA, 122 bp, Homo sapiens
tgtcctggagctgggaactgagggacgccacgtccttggccagcttaatggccttcccctcggcctcgttaagcatccctgtgacgctctcaacttcattctaagggtgccaagagactggt

SEQ ID NO: 162406 - DNA, 122 bp, Homo sapiens
gtctgtccgtctgtgggcgaggcctggagccacaaacccaatcactggactgaatcaccccgcggagaagaaaagaaggcggagcctgccgacctggaggcggggttttgtcagagctgggg

SEQ ID NO: 162407 - DNA, 122 bp, Homo sapiens
cacagggctgattttcaaaatgatgtgctttagggatctgttctttaaatatgtaagtgacgcttatggaagggaatcagtcttaaaggcggggccagactgctgcatacaacctcaaatgg

SEQ ID NO: 162408 - DNA, 122 bp, Homo sapiens
ttcccctgagcccctcccttcaggcccagggagtggcctggggcccaggagagcccgctccgcgctcacagcctccgttcccagacacgcccgggcctgagcccccaggctgcactgtgcca

SEQ ID NO: 162409 - DNA, 122 bp, Homo sapiens
gcttccctctgcccactccccagcgggattccctccctggcagacgcgcgcgccccagcccgccctcgcacaacctccaatagcaggtcaactggcttgtaacgctggcttagggttgctct

SEQ ID NO: 162410 - DNA, 122 bp, Homo sapiens
tgtgtttgtgtgtgtgatcatgcatacacacaatccagtatcttccaccgggtgtccccacggcttctagcctttggggttaccctcttctctaatattaaagagaaactcaagccctcatc

SEQ ID NO: 162411 - DNA, 122 bp, Homo sapiens
gtgtttggggagggagttataccttttattcctcaggtatcaccactcttctcttcctaccgcgaaacagcacagtgaaagggaggagatggagtgaagagaccgagggcagggagagggag

SEQ ID NO: 162412 - DNA, 122 bp, Homo sapiens
agttgttatctatagagcaggggtccccaaccccccatgccacaaactggtaattgtccacggcctgttaggaaccaggccgcacagcaggaggtgaacagtgggcaagcaagaattaccac

SEQ ID NO: 162413 - DNA, 122 bp, Homo sapiens
taattaaaagatcttttaacctttaattatagaaaaagatttaaactattcttgaggtaacggagggaagtatttgtccacttacctgttgatatgctacccagacagaagacacccgagca

SEQ ID NO: 162414 - DNA, 122 bp, Homo sapiens
ttggctaacgttattaaagttgcatcaggatagatacagagcaaagcagataacaggctccgcgcgcgggagctggaaagaccggcagcctctggttcctgttgttgttttttaagtgcgcg

SEQ ID NO: 162415 - DNA, 122 bp, Homo sapiens
gttcagacaactaagtccgagatggaaggcaacgtgtgactcacggcacactccttgtaacgcccgggcgccgtccattcgcaacatcagtccctgcacattaaatgcggaagggcccttca

SEQ ID NO: 162416 - DNA, 122 bp, Homo sapiens
tactcatgatgggtgtacccgaacattcctgggctcaacaaaaccgattatctttataaccgcggcgcctagcacagcgcctggtgccctaaacgttggctgcgggaacgtccgagacgcgg

SEQ ID NO: 162417 - DNA, 122 bp, Homo sapiens
ggggttaggtaagtttgaaagtctggacaaggctgtcattaaagcgtaggtgatgctaaacggcgtgaaagcctctgctttctagaggctccagcaagactgacacggaaaagctgaggacg

SEQ ID NO: 162418 - DNA, 122 bp, Homo sapiens
ggaatacagagcccaaatcccctttctctgcaacctgcttttatgctaaaggtgcgtgcgcgcacgcacacacacacacattgcctacatgcacgcagcacactgtagctccctggagccat

SEQ ID NO: 162419 - DNA, 122 bp, Homo sapiens
aggcctcctggttggctaacacttgtttacttctggggcatgagtgttcatgtgagcccacgatgcctggcctgttcctcttttaacaaagtctggtaggacatggtggctcatgcctgtaa

SEQ ID NO: 162420 - DNA, 122 bp, Homo sapiens
acttcatgaaagaccctgaaccctgaggaggaagaaagatagaagataagagttaattggcgctaggctttgttgtaggaagtttgtaagttttaaaatagcaagtagattcacgtagacct

SEQ ID NO: 162421 - DNA, 122 bp, Homo sapiens
gccgccctccgcctcccatctgcttgcggacggccccacttgccttgcgttggtcccgcgcgccgctgcccgggcaacacactcagatccgccaggcgcgcctctgcagtcccaagttcgcg

SEQ ID NO: 162422 - DNA, 122 bp, Homo sapiens
ctcccccgacgccgcactcccctggtctcccctgtcccccgcccctcctcgggctgctttcgttttctagaagtcttatctactgtaaattgttatataatgccagtctgcgctccctcttt

SEQ ID NO: 162423 - DNA, 122 bp, Homo sapiens
atcccccgctgcagcgggcggaagtgacgtagaggcgcctagcaacggggcccagcgcgccggaagtgatgccttccaggttggcttggctgcggaagcgactcctgccagggcggggtgcg

SEQ ID NO: 162424 - DNA, 122 bp, Homo sapiens
cctaacgatgcatttcctggacgggatcccagtcgttaagcaatgcgtgactatgcatcgcgatgcatgactatacattgcgatgcgtgactatacatctgcatataagacaagtctacctt

SEQ ID NO: 162425 - DNA, 122 bp, Homo sapiens
cggccggggcagggctggggtcccggcgctgagcgcccccagccgcgccgggcagcctggcgcctcgctgagtcggagcaacccccggcaggagctttcaggctctggtcaagcctcgggac

SEQ ID NO: 162426 - DNA, 122 bp, Homo sapiens
ccgtggctttttgttcctgctgctgaggctttttgccaccgcagtttttgcccccactgccgtggctttttgctcctgccgctgaggctttttgccgccgtggtttttgcccccaccgctgc

SEQ ID NO: 162427 - DNA, 122 bp, Homo sapiens
gcatcacttaacaatggagatgcattctgagaaatgctttgtgaggcaatttcatctgggcgaacatcatagcgcatacttagaacaaacctagatggcaccgcgtactgcgcacctaggct

SEQ ID NO: 162428 - DNA, 122 bp, Homo sapiens
tcggcctccccgtggccctcactggcccccgcgcgtcgcggcctcggggatgaggggcttcgcgactaccccggcggcccccggcccccgctcccgcccgagcccccaccttctggaccccg

SEQ ID NO: 162429 - DNA, 122 bp, Homo sapiens
ctcctgagttatatgcatacaaccccaaagttgtttgctgtctggagctgtgcctacacccgcctggcatattcttgagacattggagctaggaagttggaaattgatagaaaattttgtca

SEQ ID NO: 162430 - DNA, 122 bp, Homo sapiens
ggaggctgaggcaagagaatcgatggaacccaggaggccgaggttgcagtgagacgagatcgccccactgcactccagcctgggtgacagagtgagactccctctcaaaaataaaataaata

SEQ ID NO: 162431 - DNA, 122 bp, Homo sapiens
cctgtttcacaggaaacgacagccagctcctgccgtgtgtgagccttccctaccagactccggccatgatggggcagacgccgcggtcataaactgtaaacttggttcccctgaggttagat

SEQ ID NO: 162432 - DNA, 122 bp, Homo sapiens
acccgagacgcttttcctgctgtgcatcagcttggctctatggagttacttcttccacaccgacgaggtgaagaccatcgtgaagtccagccgggacgccgtgaagatggtgaagggcaagg

SEQ ID NO: 162433 - DNA, 122 bp, Homo sapiens
ctcaatgagccagtctccctttcaaaaaaaaaaaaaaaaaaggcactaataatgagggggcggggcatggagctttatccaatcaggggcgctggagtggaaaccgtccaatcaggagtgaa

SEQ ID NO: 162434 - DNA, 122 bp, Homo sapiens
tgaggtttcaaactgaaccgtcttgtgccttttgcccggcgggcatttctgcggggaccgcgggtcaccttctgaatttttaccttcataaacagcaaggactgcgctctttcgcacggcgc

SEQ ID NO: 162435 - DNA, 122 bp, Homo sapiens
ttgggtggtcgatgggactgggtgccctggagcagggagtggcgctcgttggggaggctccggcagcacaggagcgcacggaggcggcggggaggctcaggcatggcgggctgcaggtccgg

SEQ ID NO: 162436 - DNA, 122 bp, Homo sapiens
gattcctatttcatttgcacaaacacacgctgatatgccaactcacttgcctttatatggcgccccgcctgtgtacgtgggcctctgttggtctctgagggtcaggagaggaatcacccagg

SEQ ID NO: 162437 - DNA, 122 bp, Homo sapiens
ggttgatgggtgggacctgtcttgaccatcggagttttataatcgagggccaggagggcccgggttgctctcctggttatgtatgtacttgtacataaccacctaaagaatggtgaaataaa

SEQ ID NO: 162438 - DNA, 122 bp, Homo sapiens
gacgccagagttggcaaacccctgacctatgatggacgtattctctagccaattactagacggtattctcagacgggccgcctccattgccaatgaaatcttccagcggggtcgcggtaggc

SEQ ID NO: 162439 - DNA, 122 bp, Homo sapiens
ggatgtctgaccgaggccagagaccacgctcaggggacctggacgcccggggagttcaagcgagcctctgtcctcagtgatggagtcctgggccactggggcagtgtttgggtgctgcttcc

SEQ ID NO: 162440 - DNA, 122 bp, Homo sapiens
ggtgatccacccaccttggcttcccaaagtgctgagattacaggcgtgagccaccgtgcccggcaatggctgggctttcattgggtgtgaagtctacaaacagcatcttcaatttaaactgt

SEQ ID NO: 162441 - DNA, 122 bp, Homo sapiens
gggtggccggccgcgggaggaggacttggggtcgggctgctgcagctgggtggccagcgccgcggcggcccctcccccgctctccctggccgccgccccctcctcctcccgtcctcctcctc

SEQ ID NO: 162442 - DNA, 122 bp, Homo sapiens
ggagctaaggttaacattagacgaggctgtggctaccggaaagagcgcaggcgcagagcgcggaatgcgcctgcgcagagcgctgggcgacgtggccagtcggggcccggaagtggtccctg

SEQ ID NO: 162443 - DNA, 122 bp, Homo sapiens
tcctccacggcggaaggtggcaggaaacgggacatggaacacggaggcctccctcatattcgcggcccggaatcagctgacggggaacctgatcaccgctgctcagtcaggtttcttgttgc

SEQ ID NO: 162444 - DNA, 122 bp, Homo sapiens
gcttgccatccaaacccaggggtccctggaaaacgagagagagagaacacaggttacacacggggatgacacttcctccatgtcttatgacccaggtgcactattcagtgacaagaaaacaa

SEQ ID NO: 162445 - DNA, 122 bp, Homo sapiens
tgccaaagaacggagtcaaattcggcgaaccctagaggggctacctgtggctggggactgcgggtctgcgcgcctctggacaaggaggggcaaggcgggcggcctgagaacaggcacttctg

SEQ ID NO: 162446 - DNA, 122 bp, Homo sapiens
gccggccgcgagaccaagggggaggaggggcagtgctgggcgggtaaaactacgcacaagcgaaggaatctgggcccccagcctctcgccgcccgctctccagaggcagtctgcaccttgcc

SEQ ID NO: 162447 - DNA, 122 bp, Homo sapiens
ctaaagcactaaagtccggcagggcccgcgcgctcttcccacaccgaaatggcggggtgacggtttccaaatacccagaaaggaagtggaacctgcggtgaggccccagaggtgacccgcct

SEQ ID NO: 162448 - DNA, 122 bp, Homo sapiens
agcccgcccaggactccgcccgcccccctctctccttactccggtaggtcgttcatctcccgcacagcgtccaaggctcccgggatgggctccaggtccaggaaaaagcccggggcttcgta

SEQ ID NO: 162449 - DNA, 122 bp, Homo sapiens
cgattggtctctgcttttccttgcctgtggcaactgacagcacctcccagcctagcaggccggcggctgctcacccagccagtcagttggtctgggcactgcagcaggctcggctctgtccc

SEQ ID NO: 162450 - DNA, 122 bp, Homo sapiens
acgcacctatgcgcgcctctgccggtcctcctagaaatcccgccctgcctacccgcggcgcgagacgcaacgacgctttcaggggtcaaagacctggcagaaatgacttcccaaccccagat

SEQ ID NO: 162451 - DNA, 122 bp, Homo sapiens
atctgaggagcaggatgagctgggactgagacttcgggagccccgtcagcctcctcgtcacggctccgacatccaccaaagtcctggcagctgctgggctccagacggtgttcccacaagcc

SEQ ID NO: 162452 - DNA, 122 bp, Homo sapiens
ccgccctgggcggggggggagtcgctgggggccgcgccctccttcgcctggcgccccgcccgcgctcgcccactcactcttgggacctgccgcaaggagcccgcaccggcctggccgacccc

SEQ ID NO: 162453 - DNA, 122 bp, Homo sapiens
gcctgggcaccgcggcctgtgagcaagagctgcctgcccactggcgggctccgaccactccgggaccaggaacctacggtctaacgccgggatggccacttggttctgcttcaactgcagcc

SEQ ID NO: 162454 - DNA, 122 bp, Homo sapiens
gagggcgcccaatctttgaactggtcgggttttgcatgcctccgctccgagcccgtggagcgctgcacaaaatcgtctagcgcggagcagggcggggacggggagagacacaaaacaatcct

SEQ ID NO: 162455 - DNA, 122 bp, Homo sapiens
ttgtgaagggggcatgacaccttcttcacagaagggtgaagaacatttaaggtgctcattcgtgcttggagtattatgcatggctcaataaacatttgctgtttttctgctttctttctcat

SEQ ID NO: 162456 - DNA, 122 bp, Homo sapiens
agcacttggagcgcagaaccggccgcgcccggtgagtgtggaggggggggacctgcgggccgaggaagggtgcccactctagatggctcaggatgcccgcacttttctttgttcttgggaca

SEQ ID NO: 162457 - DNA, 122 bp, Homo sapiens
gccactgtaaaagggaggcgaaggcccattctgccattttcttttcgtggaggttgggctcgcgtgcttctctgcgctgtggtcgtcatggaccggaagcgtgtgcggcgcgcctgccttga

SEQ ID NO: 162458 - DNA, 122 bp, Homo sapiens
tagaactgcagaatgcttagaatgtagaaaataatagcatcctctatcaatggggagtgtcggcagggctaggtctgtgaagccgagggggcactccaattccaatgtagccaattggcaaa

SEQ ID NO: 162459 - DNA, 122 bp, Homo sapiens
gcagtaacacatggactggcaggagttgcaggttggggagaagtgggtaagtgttgggaacggcattgcagcaggatggaacagcatgtgcaaaggctaaaacataatgtcatgtttacgaa

SEQ ID NO: 162460 - DNA, 122 bp, Homo sapiens
tggcctaactggattggtcactgcagtgatccaccttacaatttctccggcgctctctgccgacctcagccggcgatcaggccggcttcgcagtaggtggcggctgagcgccccggcaaccg

SEQ ID NO: 162461 - DNA, 122 bp, Homo sapiens
cgtgccttgcatgttgaagaatttctgtctttggttacctgacatctgaataaatgctaacgatctcaccagtcagtccacagagtccactgtttatgtgcttcagcctgtaatgggagaca

SEQ ID NO: 162462 - DNA, 122 bp, Homo sapiens
gccaggagttgggggcaatcttagaggctgcctactgaattaatcatgtatgtaaatcgccgcccagattaccactttgttgtgaaatccacttgatgcccattggtcctgattttgaggtc

SEQ ID NO: 162463 - DNA, 122 bp, Homo sapiens
ccgacaacgttggcccccagcggtgcggcggatgttctgcagccgtcgcgtcctgcggcacgccacggcgttctaaggcctcccagcacccgcgcgtcgccgcttagaacccgcccctggtt

SEQ ID NO: 162464 - DNA, 122 bp, Homo sapiens
ctcttttcggcctctgtccttcacatcgccaaactccaagaaatggtcaaaggctttgaacggagaccttgaagaaaaagcgggaaactgcttttcaacatgtccagagatgctcattcttg

SEQ ID NO: 162465 - DNA, 122 bp, Homo sapiens
cgcgcagccgcgctcgtttcttcctctgggattttcctgagaatccccaggagttggccacgatcccatggggggtttccttctacccagccccgcgtcctggcctcgtccttaacccccgg

SEQ ID NO: 162466 - DNA, 122 bp, Homo sapiens
cagacgcccacccaggaggctgggagagctcatttctgcgcccaactcaagtggctgcagcggctcgcgatcccttgcccagagtaggggtgccggtccctgcgaacctggatccccgcact

SEQ ID NO: 162467 - DNA, 122 bp, Homo sapiens
cagcaggacttgagtgacacccaacagctggtctgatctctttcaggcgccaacgccagacgccagcctcccagcggaccctctcgcagacccaccttcaccccacgcgccctccccacaca

SEQ ID NO: 162468 - DNA, 122 bp, Homo sapiens
gttcctctgaggatcagagagtcgctctgggcgtggacgggcccctggatcttgcatccccggtccgggtttcgggacctgttctcacccccagagacccctccccactcacgttctcaggg

SEQ ID NO: 162469 - DNA, 122 bp, Homo sapiens
tctctctgactctctcatctttgtctctgtctctgtctctgtcatctccctgtctatctccgtgtcctcctcctctcatctctgcctttctcatctctgtgtctctctctgtgtttctgtct

SEQ ID NO: 162470 - DNA, 122 bp, Homo sapiens
ctccaggcgccttctgggatacttggttgcctgttgttctgggtcacagcaatggcattgcggccagggccgtgctccggcagctggcttagagggacagatgggtggggctgggtgagggt

SEQ ID NO: 162471 - DNA, 122 bp, Homo sapiens
catgacgctgccccttttcagtccttcgcataacctttgccaaatccccgctccctaaaacgcgcagggtttttaaacactcgaggaagtgcctggctaagaggggacaggaaaaaaggaag

SEQ ID NO: 162472 - DNA, 122 bp, Homo sapiens
gcgagatagacgagagcctcatcttctacaagaagtgggagctggaagcctgcgtggatgcggccctgctggccacccagatggaccgcgtgaacgccatccccttcacctacgagcagctg

SEQ ID NO: 162473 - DNA, 122 bp, Homo sapiens
ccagccaactcacaacagaagccaggcggcactgccgaggcgctgtggggccagcggccacgcctcggccaggcagcgacagacaccctccacggtcaagcttccatcctcaggctctgtgc

SEQ ID NO: 162474 - DNA, 122 bp, Homo sapiens
cacagtctcaaattcctgggctcaagcgatcctcctgcctcagcctcccgagtagaaggacgagaggtgcatgccaccacacctagatagttttgcactttttacatttcagtctgtgatcg

SEQ ID NO: 162475 - DNA, 122 bp, Homo sapiens
ctagggaagctccatgacttcattggctgttgacacggtgcttccattataggaagctaacgtctaatcaatgtctctgacaggcatgccatgctattgactcatccagtcaataaaaatct

SEQ ID NO: 162476 - DNA, 122 bp, Homo sapiens
agagcaaagagaccgacttcctgcgcctcgggtgggcggggaacgctccttgagcaggtgcggtatgaaattggactttaagagatgagttggagcctgatctcaaaaataaagtgtggacg

SEQ ID NO: 162477 - DNA, 122 bp, Homo sapiens
cccagggcaccgtcacacttgccagagaggaactccggagcccgggcagggaggaggcagcggagcggcccagggcgccatctctcagtactacccagaggggagtgctccctgtcagacac

SEQ ID NO: 162478 - DNA, 122 bp, Homo sapiens
tcagacccacagctcctgggtgcactcagccttgggtcccgatggcaccagagtgttccacgcctggggcagcgcactcattgcagatctggcctgagactcagcagccgggcaccccatga

SEQ ID NO: 162479 - DNA, 122 bp, Homo sapiens
gcagtccctagacgaagcgaaggaggcggcgcctgccccgcccacaagagctgccgcgcgcgggtgttatagctccaccccatctgcaaaggaagggggagcggaaagagcgggatctagcg

SEQ ID NO: 162480 - DNA, 122 bp, Homo sapiens
ggacatggaaggaggtagggctggtggcgggggcggagccggccttccggtctgagtcaccgtggcgggaactacgtcttccggcagccactgcgcgggcgccgcggggcaggaagccggcc

SEQ ID NO: 162481 - DNA, 122 bp, Homo sapiens
aaatctttgcaatcataacaaatggctcatgtcctgcgttaggctgacgcatgatcttatcgtaccctagtgggaaaagtccttcattcttagatcagtcctcagttccaaatggccatgcc

SEQ ID NO: 162482 - DNA, 122 bp, Homo sapiens
gatacagaggacagtgctggaggcgggccagagaccagggaagctctggctgagagcgaccgtgcagctgagggtctgggggctggagttgaggaggaaggagatgatgggaaggaacccca

SEQ ID NO: 162483 - DNA, 122 bp, Homo sapiens
tgggtcaccggggaaggaaaccagctctgccgcatgtggagacgagccaacgggtagggccgtgaacagatgtcatcccaggcgaggtttccaggatgtgcgggcgtgcgtgtcatgcgtgt

SEQ ID NO: 162484 - DNA, 122 bp, Homo sapiens
cggcagtggcggttcctggcgatgtggaggcgttccaggacctgcagaggcggcagtcagcgtccggccgcccctcggtgccccgcccgctccaggcaggccccgatcccggcgtggggaca

SEQ ID NO: 162485 - DNA, 122 bp, Homo sapiens
gccggtcaacgtgcccctggacattttcctggaggagatccgcttctaccagctgggggacgaggccctggcggccttccgggaggacgagggctgcctgcccgaaggtggcgaggacgaga

SEQ ID NO: 162486 - DNA, 122 bp, Homo sapiens
tttcccgctgagcccctgcctcaggtccaccccgtgacagcgtgggtccggatcccccaccgtatgagaagatcgcactttgcttatccacgctgatgctttttaaaaaacatttctgttta

SEQ ID NO: 162487 - DNA, 122 bp, Homo sapiens
tggaaatctgcacctgggctgggttagatataatagctcttcagccttcttgattctgtacgagtttttagagccacaagaagttttaagattccccccacctatatgcacagaagtgtgaa

SEQ ID NO: 162488 - DNA, 122 bp, Homo sapiens
aatgaagagatgttgccttggccagtgcagacgggggacacctgcgcacacggaggagcccgtgaggccgctgccgccctgtgggatgggaaacggggaaggctttgggggggcctctgggg

SEQ ID NO: 162489 - DNA, 122 bp, Homo sapiens
caggggaatgaaaggagcttgccttaggaggcagatctggtttgaactctcgcctgcctacgcaggcacttacaggctgtgaggcctgaggagttactcaacttctctgagcccgagcttcc

SEQ ID NO: 162490 - DNA, 122 bp, Homo sapiens
tgggaagttgcgaaacgttgacctgcagggtcttgaggaactgtcggcctgggctgtccccgtgggtcattgaacattaatcagccaccagtcctcgaccaagccaaccgaaatagagtcag

SEQ ID NO: 162491 - DNA, 122 bp, Homo sapiens
catcccccggtgttgctacaaacatagtcctcgtgcctgtgatgggctccgagtagaggccggaacttatccctcacctcgagagtaaacgccccgggtgagaagggccgcttgtgctgatg

SEQ ID NO: 162492 - DNA, 122 bp, Homo sapiens
gcgcccgcccctttttcaggcagttcagggcttttatggcaccagccccgcgtgggcccccggcacccagagcgcaaccaaagtatacactgatggaagtgactaaaagctgtaatagcgct

SEQ ID NO: 162493 - DNA, 122 bp, Homo sapiens
cctaagttcagatcctagtcttcgccttcaagacacctgctccaagcaacagctactccacgtcctggggtcagacacactcagatctctgtgttcgccaaagtgcttcctccacatattca

SEQ ID NO: 162494 - DNA, 122 bp, Homo sapiens
agccctgagggttctggacacagtgaccgatgtgggaccccaggagtgacgggttagccccgatttctctccctggcccctgcccgatgcactgcatggcctcgcctgtaggcagggacagt

SEQ ID NO: 162495 - DNA, 122 bp, Homo sapiens
actgccaagcagatggttaagttggttactcagtgtttctttagtctgtgggacttgaggcgcagtgccaaaccctgcagctcagatctctttcaggctttccctgtgtaccctggtgactc

SEQ ID NO: 162496 - DNA, 122 bp, Homo sapiens
agagtttatgcctgttctcccactctcaaccataggcttcaggtgtaactttggggtttccggggtaaggaaggctttttacagatactgtacaggagcaagtcgcccatgcctcctggact

SEQ ID NO: 162497 - DNA, 122 bp, Homo sapiens
tggagagctctttttctccaggaaaagctccactgcatttgtttctgagtgggaaaatgtcgggatctggattgtattggaactgcttatccatttgtagacctgagtgttttccccttttt

SEQ ID NO: 162498 - DNA, 122 bp, Homo sapiens
gtctgtggggctctaggagatgtaccaccctttccccgccgcacagcaacggcgccgagacgcctcttcagggacctggtgcgcacaggctcctgaaaccctttggccccgggactgcggat

SEQ ID NO: 162499 - DNA, 122 bp, Homo sapiens
aagctgcaggagaggttgtgcctggacacgccattgcccacctctgcccggacctcatagcgcccaggcagccgcagtccagggttgggcctcaagcccagcagcacggtgagctgttccgt

SEQ ID NO: 162500 - DNA, 122 bp, Homo sapiens
aggctggagggtcgaggccatgaggctgggggccatcataaggccatgaggctgggggatcgaggctcgaccgtgagacggccatgaggctggggaggtgccacctggcggctgcggagacg

SEQ ID NO: 162501 - DNA, 122 bp, Homo sapiens
atgctctgggccaactaacccaccgccacccagaacgaggatgccccatgctcaccgctgcgagaacaacgtggggtcctgcctgggggcgagaccgagacaacctccctgcagggcaaacc

SEQ ID NO: 162502 - DNA, 122 bp, Homo sapiens
ttgaagttaagaactgagcctgttcacattatagcctagctcctagaacagtgacaagaacgttatagggtctcaattactagttgaaccatgaatgaatgaatgaatgaatgaatgaatga

SEQ ID NO: 162503 - DNA, 122 bp, Homo sapiens
ccgttagtgactggaacgggtcgtctccgggtggctggctgactcccaacaacgttctctcggaagcagaaatcctgctttgggcaccccctggccccgcaggccctggaggacgtgaagac

SEQ ID NO: 162504 - DNA, 122 bp, Homo sapiens
cttcatctgtttatataagaacgctgccaaagtaaccatctatgtgcccaggttttaagccgcatgacacaacctctttaccctgaggtgagagtgacatggtggccaatgagaggccatca

SEQ ID NO: 162505 - DNA, 122 bp, Homo sapiens
ggaggtttttcctccagttttaatttaagacttgccaggctgggtgtggtggctcacacccgtaatcccagcactttgggaggccaaggagggcggatcacttgagcccaggagttggagac

SEQ ID NO: 162506 - DNA, 122 bp, Homo sapiens
cattctcaggcgaggcttcacacttggggttctgcggcagaaatctgttttgaaacatgccgtgggaaagacaaatatatccttccgtgcacatcacagggagctcctttattctgagccag

SEQ ID NO: 162507 - DNA, 122 bp, Homo sapiens
ctgagtcgcggccgcagtggtgatgggggtcacggtgatgttggttaagccgactgagctcgatggtgtggtcacatttgggtcacccagggtcaccactacctggaagattcacacacaac

SEQ ID NO: 162508 - DNA, 122 bp, Homo sapiens
ggcccttcggagagggcgctccaccggccctgcgctccgtacctgtgccgccacgcccaccggtcccctgctgagcctagcaccgcccatttagacccagcaccacccgtccggaccgaacc

SEQ ID NO: 162509 - DNA, 122 bp, Homo sapiens
taaggtgtgctgtgattcctgtggcaagctcaggggagggtattgaatagctctggatgtcggagtaagtgggcactttgcgccagatgaagtatgtgagtctacaagtttccatgggcctt

SEQ ID NO: 162510 - DNA, 122 bp, Homo sapiens
tctatcttggagtgtcctcatgaaaaacccagttacacccagggcagttacctttctgagcggtttcttataacattcctggagtggaaagtgatcaactcaaagccctccaggactctaga

SEQ ID NO: 162511 - DNA, 122 bp, Homo sapiens
ctgtcccagattcacataaggagagtgacttctgaaggagcggggctgtgtcagtgccaccgcaggttgagttggaagtgtggccatagctgacccctgatatggtgacgtggatgtttggg

SEQ ID NO: 162512 - DNA, 122 bp, Homo sapiens
ccttcacttctcagaagctgggtaagaaaccaggctggtcagcatcacctgcaaattctccggcttctgacttctctctcaccacagagacaactctctgatttgctggtttgggtggcacc

SEQ ID NO: 162513 - DNA, 122 bp, Homo sapiens
ccgactcgggatgacaattgacggggatcaagggattgcccattctgtgcctgtaagaaccgattcgtgccagagaaactcatcaagtggaggcggagaataaagaccgttcgggggtaaat

SEQ ID NO: 162514 - DNA, 122 bp, Homo sapiens
agagccggccggcgccctacccgctgcccggcctgcgtggccacggctaccacccgcacgcgcatccgcaccaccaccaccaccccgtgagtccagccgccgcggccgccgccgccgctgcc

SEQ ID NO: 162515 - DNA, 122 bp, Homo sapiens
agcctgtctgctgacagcacgcccagcagagaggacaacaggtcttttattgaagggagacgtgcatggcacatcacagtatttaccacatagatctgggcatctgttcaactggaatccaa

SEQ ID NO: 162516 - DNA, 122 bp, Homo sapiens
tggccgaattggacccttgtgtgtcctcagcgatgaggaacacgcggaagtgtggccgggcggtctcggggcaatgagaaactgagttttggccaaaatggaaggtatttttatcccgctca

SEQ ID NO: 162517 - DNA, 122 bp, Homo sapiens
agctgaccttctgcaagatctgtgccttgttggcagcctggagcaggactagtcccggcccgcatactcactccacctttccaagtttagcctttgtgatgaggcccgtccttgtggctgtt

SEQ ID NO: 162518 - DNA, 122 bp, Homo sapiens
ccatggcgaccgtgacctcaacgcctgggcggggagggagaggctgagccggttgctgcgcgacggcccagtgacgtcagacaattgagtttggttcccaaggcaactggccgggcagctgg

SEQ ID NO: 162519 - DNA, 122 bp, Homo sapiens
ctcgcaaagtgctgggattacaggcgtgagccaccaagcccagtgcaagaatttttttaacgcaaaacatacacagtcaatgccaagagcccatgagtcatgtgaattcatttccctgggtg

SEQ ID NO: 162520 - DNA, 122 bp, Homo sapiens
ggcggagccggcagaggatggggcgagcggctgggggtgcgtctggctttccccgaaccccggcgcccggcccgcgcacttcctgtccaccgctcttcccaacgtgggcggcggacatcctg

SEQ ID NO: 162521 - DNA, 122 bp, Homo sapiens
tgtgtttgggaagggtggggtccgccccaggggcgtctgctcaactgctgggcagggggacgcgaagtgctcgggccttctggatcccgcagcaggatccgggccggggctccactcgtttc

SEQ ID NO: 162522 - DNA, 122 bp, Homo sapiens
gcggggagggctccctcaccttcccctcctccctcaccagcatcttcaccaacaccctctcggagcccaccgatggccctgtggccactaaagaggcctccatcaccttccccttcatcttt

SEQ ID NO: 162523 - DNA, 122 bp, Homo sapiens
cccgcgccgccccagccgcgagcgccctggacacccactccgcagccaggctccggagcccgcccccacccacccgccgggggcagccacgcccaccacccggacttcgggcggccggcggg

SEQ ID NO: 162524 - DNA, 122 bp, Homo sapiens
acaaatttgagtgtcatatttttctcttaggagtttgcatgaagccccaaatcctcaaggcgcatatgccaacgcaggagcccaggcataaactatcctgccgaccttttcacctcatcatc

SEQ ID NO: 162525 - DNA, 122 bp, Homo sapiens
tccagggcccgaacgtgggtgcgggctgggggcgcagcggcagaaacgcggccttagacgcgcgcggggggccggtgtcccccccgcccccacggcaccgggagccgctcgctcatccatcc

SEQ ID NO: 162526 - DNA, 122 bp, Homo sapiens
ctccgcatgcctcttctctctcaccctccagaaagctttcaaacagctcaagtttcactgcgggttggagtgggaggcaggctggcctggctgcagcagtaatttgtctggtttactaggtc

SEQ ID NO: 162527 - DNA, 122 bp, Homo sapiens
cgggcttcccgtctcaggttctggaaagtccgggcttcctgtctcgggttctggaaagtccgggcttcctctctagggttctggaaagcctgggcttcctctctagggttctggaaagtccg

SEQ ID NO: 162528 - DNA, 122 bp, Homo sapiens
cagcagaatgtgggtcgaacgtgcccggcgggctgcaggcccaggaaacccccacattcccggcctgaattcagtccagaggaggctggctggtgtttgctgttgcatcatgcctgcaggag

SEQ ID NO: 162529 - DNA, 122 bp, Homo sapiens
ccagcaagtgtctaacattttctatcttctaagtgactggtaaagttccgcacctatcagcgctccaagtttgtttttgttttggccgactttgcaaaacggattgggcgggatgagaggtg

SEQ ID NO: 162530 - DNA, 122 bp, Homo sapiens
actatatcaacatcaacagtattctgaacatagaagacagtcatccatccccagttcatgcggtcctgtgtgattaattctgtcccgctgaatcttgggttagcaatctcaaaaacctatct

SEQ ID NO: 162531 - DNA, 122 bp, Homo sapiens
ggagttcctgaggcagacgggccactggtgacgccaggtgtagcagtagaggaccttcgccgctgccgcaggaggaaatcgtgtgaagctccatccatggcgtagaatacattagccgaggc

SEQ ID NO: 162532 - DNA, 122 bp, Homo sapiens
gctatgagaagaaagaacatcgtgtccatacatacaggcacagtcattatcacaggattccgttttctctgttctgtttgaatccatctcctggcaacagctgtccagctccctaaagccag

SEQ ID NO: 162533 - DNA, 122 bp, Homo sapiens
agagcgactctctgcactgtggagtacgccatgactgctcacggtggtcgcaggtgcagacgccagccggaaccggaaccggaaccggagcacgggctgccgctcccgaccgaaccgcgggc

SEQ ID NO: 162534 - DNA, 122 bp, Homo sapiens
tgatgctggaggaggtaccggggaggagcgtgtgtggccccggcctctcactagcagcggcggctcccgacgctagcctgctcgagcgcacccagcaccctccccaagaccatggcccgcac

SEQ ID NO: 162535 - DNA, 122 bp, Homo sapiens
gccgtggaggctggactcaaccatccttacccacagagaggggaccgaggctgggcacggcgcagtcccagacagacagagcccagcctcggggcctcgggctgcccgcaccgtgctgcgct

SEQ ID NO: 162536 - DNA, 122 bp, Homo sapiens
caatggatgaatattaatgtcagatggatttttcctcttatgtttccttgtagaaaaagtcgtccttggagcagagggtctaaatatcaaaaggaagcttccaattgacatagattcgttca

SEQ ID NO: 162537 - DNA, 122 bp, Homo sapiens
tgactttaggcaagtaactaagcattgatttggtcaatgaaatggggataacagtattcacgcatgggattgtgaagattaaatgaaataacatatacaaagcacttagcatacagaaagag

SEQ ID NO: 162538 - DNA, 122 bp, Homo sapiens
accccagacttttctcccacctgtctgtaggctgaaagttggggcaggtggtccctcctgcggtggaaactgccatcagacctgaagcctcgggtcacaaccagggaggtagggaagggggc

SEQ ID NO: 162539 - DNA, 122 bp, Homo sapiens
cttggccaaccaatgacctttggggctgccaaagcgcctgcctccgagagttgggcggggcgagtagttgcaatgacaaacatttaacccaatagcgaggagatttcagacgctacggccgc

SEQ ID NO: 162540 - DNA, 122 bp, Homo sapiens
acatagtacacgctcaataaactggtgactgaggaataaatgcaggaaccaacaaacatacgacggcatggaaaaggcaaaggctgggagtggggctttgcggaggagagaaagatggggtt

SEQ ID NO: 162541 - DNA, 122 bp, Homo sapiens
tgcgcccgcattcctcagcccttggatggtagatgggaccttgcgccatggagcaggcggcggtgcccgtcggggaggctcgggccgcgcaggagcccaccaggggggttggggggagctcg

SEQ ID NO: 162542 - DNA, 122 bp, Homo sapiens
cgctgcaggcttttctcccatcccgtctccgcctccgagcgcccaaggctgaccctggagcgtcacgtcggctggcagcaggacccacaccttagctccgtctctggttccagcaagaactg

SEQ ID NO: 162543 - DNA, 122 bp, Homo sapiens
cccatgggccttggggaccgggcaccactttaaggcatgtctggctcctcaccagcatggcgggccctgctgactgaggcatagggaggccacacgggcttctgcctggcacagccaggacc

SEQ ID NO: 162544 - DNA, 122 bp, Homo sapiens
tttctagaaacagccatctctgcctcccagatggtcaactgtggacaatgagataacccccgcaaaggagtgaggagaggatagtgcctctaggagtaaagtactgataatcacacctcaaa

SEQ ID NO: 162545 - DNA, 122 bp, Homo sapiens
ccatccagcaggctgtgggaagctccctgcagggggacctgcccaatgataaaggtatggcggcttccggttccttttagcccctgccccctctctgcattctttatcctaatgtcattcat

SEQ ID NO: 162546 - DNA, 122 bp, Homo sapiens
cgcctgcaggttctgctgcactgttggcctggcaccaccagggggagctccgactgagtccggcctgcgggacccaggccaggaccagagttcgggccccgcctcccccacacctcctcggg

SEQ ID NO: 162547 - DNA, 122 bp, Homo sapiens
taatccagatctccagtggcagagagttgagagtgatccaggaaagtgaagcaggagatgcgggactgccccgggtggaagtgatcctcgactgctctgacaggcagaagacagaagggtgc

SEQ ID NO: 162548 - DNA, 122 bp, Homo sapiens
ggtgcggaccccaactaagtcctagttttgtgctacctgtttgtgtgcggagcccagccccgggagaggacttgaggttgtggcgagtccctggcgctggcgtccgggctgcgggagcaccg

SEQ ID NO: 162549 - DNA, 122 bp, Homo sapiens
cttgtgtgccatccaagcctagaattctctgctttcttgatcatgagctgtcacctagcacggcctggcttttctctccttcccacgtgagaccttgtcctttgtctacccctagtggtggt

SEQ ID NO: 162550 - DNA, 122 bp, Homo sapiens
gtcccagttggggatacgctctcgcgcaccaggtacgcctggtgtttctttgtggtttttcggattctttttggggagtgcggggagtcacagttagaaggcggccgggtgttgctggagga

SEQ ID NO: 162551 - DNA, 122 bp, Homo sapiens
gagagaagaaagagaaaggatggctgcatctcaaacggtgcttattcccaggggttctaccgcaaccgctcagaggatcctgtgggtagagacaggaatgataactctgctcactgtgagag

SEQ ID NO: 162552 - DNA, 122 bp, Homo sapiens
ttagcaactaagcccccggctcctccagaagcccctcttcgcacatgcgcaaactgcggacggggaactgggctccctagccctggcgtttttggtgttgctgtcccagccagaatcgcgtc

SEQ ID NO: 162553 - DNA, 122 bp, Homo sapiens
cccggagcagtacagcgcggggatgggccgctcctacgcgccctaccaccaccaccagcccgcggcgcctaaggacctggtgaagccgccctacagctacatcgcgctcatcaccatggcca

SEQ ID NO: 162554 - DNA, 122 bp, Homo sapiens
ccaggatgagcaccgagggcagcagcagcagcaccaggcaggcgcccagcagaggcagctcgtcggcgtagctccgcgtgcaggccaggtgcagcagcgccgtgatgtcgcagaagaagtgc

SEQ ID NO: 162555 - DNA, 122 bp, Homo sapiens
aatttctttttgagacagggtcttgctctgccacccagcctggagtgcagagtgcagtgacgcattctcagctcactgcaacccctgccttttggtgtcaagcgatcctcccacctcagcct

SEQ ID NO: 162556 - DNA, 122 bp, Homo sapiens
tatttttcatgtccagtaggaggagccaaagtctccaggttctttctaaccatagcagggcgattcttggccctaggttgtcctgggagctgtcaacttcagcacctctcatttatcttcca

SEQ ID NO: 162557 - DNA, 122 bp, Homo sapiens
ggttcgcatctctgtcagggtggccacggagcccctcaggtttctgggcctgagttccctcgtagctcacctggagaagaaagtaggcgatgctctcgttgccacagctggaggccagcatc

SEQ ID NO: 162558 - DNA, 122 bp, Homo sapiens
gtctgggtaataaatcaaggcggtttacgaggctcacacgagacaaacaagcgagaagggcgcaacacaagcccctggaagaggactgcacggagctgccaggagtcgggagctcccagcgc

SEQ ID NO: 162559 - DNA, 122 bp, Homo sapiens
cccacaacatctaccggtctgtacctcttgttcacactttgataagtcagaaacagttcccgtacttggcaagattttgttgtagcttcttccattttggtctattaggaaataatttaaac

SEQ ID NO: 162560 - DNA, 122 bp, Homo sapiens
cggacatgcctgaataccccggctgtaactcacacgtggtctgtgtaagtggattaacctcggggcggccttgtttaatcctgaataatatctgaaagactgagtttacttgggaatgtgta

SEQ ID NO: 162561 - DNA, 122 bp, Homo sapiens
tggtctgtatgtgcagggcccgagtctagagaaggccgcttggtccgtatgtgcagggcccgagtttagagaaggcggggtctgtatgtgcagggcctgagtctggagaaggccgcttggtg

SEQ ID NO: 162562 - DNA, 122 bp, Homo sapiens
tcattttcacacacaggtgggctaaagctaagggaggtgaagtgaatttgagaagcaagtcggtggcttggccagctccggcgagcctggtttccagaacatctcacttgccactctgtctt

SEQ ID NO: 162563 - DNA, 122 bp, Homo sapiens
gttcccaccgcggatctgggcactgactccctcccgaggcacccgggaccgccgagtccacgcagtcccgcccccagggaggctaaagccgagaggcgtccctcttcagtcgcaaagctgct

SEQ ID NO: 162564 - DNA, 122 bp, Homo sapiens
ctgagcaataagtccaggtgcatggctcaagcctgtaatcccagcagtttgggaggtcgacgtggcgagatcacttcagcccaggagttccagaccagcctggatgtcataacaaaacccca

SEQ ID NO: 162565 - DNA, 122 bp, Homo sapiens
taaagttctgcttgtgccttctgcccaactctccatcctcacactaggccctcccctgcccgcaccccgggagatccacctctcacagatcggcttctcgctgtgtctgcctctgcggatgt

SEQ ID NO: 162566 - DNA, 122 bp, Homo sapiens
tgtactgcgaagcccggcagtgcttgctgtggaagctgtggccggagatgaggctactgacgctgcccatggtgactcggggctgaggatggggcagggccgggcagggtcttggaaaggct

SEQ ID NO: 162567 - DNA, 122 bp, Homo sapiens
ccagagtgggctggggagggctgggagggcgtctggggccggctcctccaggctgggggccgccagctccgggaaggcagtcctggcctgcggatggggccgcgcgtggggcccggcggggc

SEQ ID NO: 162568 - DNA, 122 bp, Homo sapiens
tgctccgagtcccttgtcgctgggagcggcacatggggtctccggactttgatgtgggggcgggggaggaagcgaccaggtccggcacgaaggagggagaggtggcctgaggagcggagggg

SEQ ID NO: 162569 - DNA, 122 bp, Homo sapiens
atttcgtttcttcattctcctggtgatgggcacgtttgtgtacaactctttgtgtggatgcgtgtcttcaagtccttggggcctgtatctaggagtgggtcatgtgctggggtaaactcggt

SEQ ID NO: 162570 - DNA, 122 bp, Homo sapiens
cacaaatcatttaaatcatttctttgtcacccacgggtgaagggaatgaagcagagtccccgtcacagagagtaagagggatatggctctctcacctcgctggatggctctgtggagagacg

SEQ ID NO: 162571 - DNA, 122 bp, Homo sapiens
tgtgacgagctcgctggtgtctagctggggcagtgccgagaggccgtgggggtgaaaggccgggattcgtggagccgggcattcgagcccatcgcgctagggcagacacgggcccgcagccg

SEQ ID NO: 162572 - DNA, 122 bp, Homo sapiens
gggcgggtgccgggcgctgcaggcgggcgggggcgacacaggggacccagaccccagggtcgctgctgacgcgggccgggcccgcggaggccgaggagcagcaaagcggagagaggcaggcc

SEQ ID NO: 162573 - DNA, 122 bp, Homo sapiens
ggctcttgtttcccatcagcctctgggtccaaactaaccacaggtctctgggtccttttccggtgtccttaaggttcttggactctgcatggtgagttggtcgtgtctgtagaagtaatcag

SEQ ID NO: 162574 - DNA, 122 bp, Homo sapiens
gcgcgtgcgctgtgagcagggtgggcaggatccgcacgtgcgtgtgctattgaggacctgcgtccagtgtgcgggaggcggagatgaacccacagagcagggcgcctgcccttgaggacctg

SEQ ID NO: 162575 - DNA, 122 bp, Homo sapiens
ggtaaactgtatttttttatttctgtagataagcaacccaaactgaggcatgttcaagtacgctaataagcaacatactgggaaaagaattggctgtggcatacaacgcacatcatttcagt

SEQ ID NO: 162576 - DNA, 122 bp, Homo sapiens
atggaaatgttctgtgtagactgtatcaaagacattatcctgctttgaaactgtagttttcgaagatgttaccattgagggaaaccaggtaagggacaaaagggtctctatgtgatttctta

SEQ ID NO: 162577 - DNA, 122 bp, Homo sapiens
gtcacttccggcgcgagaggccgggcaggccgggcagggagtgcgggtcggttctgcgtgcgctgccggacgaggctcccgccgccgattgacccgcgctccgcccgtagtcgggccggtga

SEQ ID NO: 162578 - DNA, 122 bp, Homo sapiens
taatgacagttgaaacgtgggtcagctggttcctaggcccgtgcacacgtctgcaagggacgttgatcctcactctccaatgcgtgtcagtggcatatgggggctggggtgggggaggggcg

SEQ ID NO: 162579 - DNA, 122 bp, Homo sapiens
ccaaggtcaccaactagaaagtggcaaggcgggaaaaatgtcttcagagagttcggactccgagctttcaaccaccaagccactaactttgaccctgttggcccactgatggtttaactggc

SEQ ID NO: 162580 - DNA, 122 bp, Homo sapiens
caggaggcgacgacgccgggccctaggtccaggagctcctaagccatccccgtcctcagccggtggcccggtccccttagggactgccttatgagttgcactcgctgatggaaatctcggga

SEQ ID NO: 162581 - DNA, 122 bp, Homo sapiens
cagggtgctggtgggtgccctgtaccccaatcccaggtccccttggccccctatttttctcgggcccattggggcctgtttctcacctgctggctggaccccctgaagggccgttcccagag

SEQ ID NO: 162582 - DNA, 122 bp, Homo sapiens
tctgtagtagtggcattctggttgtacagtcgtatacgggtctctctcttcaaaggtgcacgcagtctgattgatccctgtgcctcggaatccgtgctaaataaatattgagtcggtgaatg

SEQ ID NO: 162583 - DNA, 122 bp, Homo sapiens
gagaaaactaagtcagaaagtgcattaaactgaatcacaatgtaaatattacacatcaagcgatgaaactggaaaactacaagccacgaatgaatgaattaggaaagaaaaaaagtaggaaa

SEQ ID NO: 162584 - DNA, 122 bp, Homo sapiens
ggaaatccactctcccacgccagtaccccagagcatcacttgggccccctgtccctttcccgggactctactacctttacccagagcagagggtgaaggcctcctgagcgcaggggcccagt

SEQ ID NO: 162585 - DNA, 122 bp, Homo sapiens
ccactggggaatgtaccaaagcccacccccagagtccggcccggggtcctcgcaggtgtccggcttggagacaaggacacggcaccactgagagccaactgcacggaagaggcaggaggcca

SEQ ID NO: 162586 - DNA, 122 bp, Homo sapiens
tctctgagacgtgggcggatggggtgcagactgcccggagctgcgcatgaacccaggccccgagacaagggtgaatgggctcacacaggccgagacaccggtgaatggtgtccaaagatgca

SEQ ID NO: 162587 - DNA, 122 bp, Homo sapiens
ctgccccaagactcaggaggcctcgtcctgttttgccatccacgtgctagtaaactcggacgagtgattccaccttgctgaggaataaactgggacaattctccactaaccaaagaactcgt

SEQ ID NO: 162588 - DNA, 122 bp, Homo sapiens
ggctggagagagggtccaggcaccagaagattcggcagaggctgcgggacagagcagggtcgggccgcagagtgggcaggcggtcagcagtacccagaacaaagtggtgacttccttggagc

SEQ ID NO: 162589 - DNA, 122 bp, Homo sapiens
acagggtcctctgtgcaggggacaggccatcccattccgcctgggtgaagtacacagccacgtcctcaaaggtcaccgacttctgaaacaataggttcctgctgccctagggccaattccat

SEQ ID NO: 162590 - DNA, 122 bp, Homo sapiens
ggcctgggggagccacccaagcaggaaggtcggagagcatctttattgtggggaggggcccggcccccaaagttctgacaccaaagacagacaccagacaggcagctgcagacagtgagttg

SEQ ID NO: 162591 - DNA, 122 bp, Homo sapiens
agccaagagccaggcaaagcgaaaccaagccctggaagcagatccggtgcgggtgacagccggcgccacccctgcccccatccctgtgaaaaagaggcgactgcgcggcgaggggtccccgt

SEQ ID NO: 162592 - DNA, 122 bp, Homo sapiens
gcgcctggcactggaattccgggcgctggagcctcaggggctgctgctgtacaatggcaacgcccggggcaaggacttcctggcattggcgctgctagatggccgcgtgcagctcaggtggg

SEQ ID NO: 162593 - DNA, 122 bp, Homo sapiens
tgttcattttgtgccaggtgccatttaaaaattttgtatgaattatgtcctcgcccacagcgactctctgaggtaggtaccatgaatgccccatttcatagataaagaaattgaggcacaga

SEQ ID NO: 162594 - DNA, 122 bp, Homo sapiens
agttaggcatcacttgaacttgcctgtgcctgctctttttcctccctgcaccgtctatgccgggcttagcatgtttctttttaaatgaggtttgtcaggatcaggtaaagttcctacaagtg

SEQ ID NO: 162595 - DNA, 122 bp, Homo sapiens
ggcgggcgtgagggtctccgcctcatcctccaccgggaggtgggggccggccggctcggccgcctgctccaggtcatcctgcacctccatgcccctctggatgagctgctccagggtcttgg

SEQ ID NO: 162596 - DNA, 122 bp, Homo sapiens
tcactattgtgttacatatcgttgcgtgacacggtacattgcctaagtgcccatcgtgggcgttggtttgggtgatgtgggggcactaaggaagcccccaccatgcgctgctaccaccctca

SEQ ID NO: 162597 - DNA, 122 bp, Homo sapiens
gaataaatgaattcctgataggactttgcagccgagaatcacccttctctttcttgtctccgaaaccgcaaaagagattgcatgattcaggaaaaaaattaaaacaacaacaataacaaaaa

SEQ ID NO: 162598 - DNA, 122 bp, Homo sapiens
aatatttacaacccgcctgaaagcaatgcttcggtcatctttgactacagtgatgacggccgcatcctgaagacctcctttttgggcaccggacgccaggtgttctacaagtatgggaaact

SEQ ID NO: 162599 - DNA, 122 bp, Homo sapiens
tcactggttgacagctgctttctctcggcaccttaaagatatgctttctctttctccttccgctgctgctgttgagaagtcagcttccaggctgcctggattctgactggctccttatcgaa

SEQ ID NO: 162600 - DNA, 122 bp, Homo sapiens
ttggagggtgtggaagggtgggtttggggccgggggcgggtctgggggcggacccggaggcggggctgtctctgcggcagggcccagcttcgctccccccggtctgtctctgtctctcctcc

SEQ ID NO: 162601 - DNA, 122 bp, Homo sapiens
ttcttgtttctttgaggcttccgaatgctcctccccagtctgcgtcctgctttgactggacgttgcaaacaaaagattcttgctttgtctgtctccatcctttcgaccacctccagaagcta

SEQ ID NO: 162602 - DNA, 122 bp, Homo sapiens
gtattgcttcagttggccttttgatacagggaccttttcaaggactgtgaccgtcccgcccgacatgtccactgcagtctttttgtctgctgccgttacccactcactaatactgtcacaca

SEQ ID NO: 162603 - DNA, 122 bp, Homo sapiens
tggacatgggtgtgggatccggaggaaaatccgcaaactgggccagctgtccctcagcgacgcctgtaggcggcaggcggattgcaaggaggaagcctgctgcctggggaaggaaggagggg

SEQ ID NO: 162604 - DNA, 122 bp, Homo sapiens
cacaaagcgctaggcgagcgctgggtgctaggacccggggggcgcccgggcagggaggtccggctgcgctgcctgcagtccgcggggagggcggatgggtctgtgagtccgactgctgtgaa

SEQ ID NO: 162605 - DNA, 122 bp, Homo sapiens
ttattgtgacatttctgtatgaaatcagccttcactacatggataggaccagcaggcttccgcggcacgactctgcaatcatactacatttttttttgtattttttttattccttttgagac

SEQ ID NO: 162606 - DNA, 122 bp, Homo sapiens
tcctcagcccttgggaggtcgatgggactgggcacccgtggagcagggggcggtgctcgtcggggaggctccgccccgcaggagcccacgcggccgggaggctcaggcacggtgggcggcag

SEQ ID NO: 162607 - DNA, 122 bp, Homo sapiens
agggggaggggaaagaaccagggctgagctgtggagtgaaggggagccatttctctccaccgactgcaacctccgtgctcacagctcacggttcaccagaatccaggggcttggtcggccta

SEQ ID NO: 162608 - DNA, 122 bp, Homo sapiens
cctttgtgtatcaggttactcccatcagtctgaatgtttgagacaaacccaggaagccaacgagagtgattggtctcattgcttttaaggagggcacatagttttaagagaaataggaaatg

SEQ ID NO: 162609 - DNA, 122 bp, Homo sapiens
ctcgcgtatctgcgcctccctttctacaatccccccttacgctcccttaggtgaggaccccgcattaatcatccatatcctcccctatcctcctccgagtgctcgactcccctgcagcccgg

SEQ ID NO: 162610 - DNA, 122 bp, Homo sapiens
tgcaggagcaaagctccgtgattcaatgactttgtcaaacgagaacacctgagcctcccccgccacgccactccttgttctggtctccgctgtcacgtcgggcgcattatcagggagattga

SEQ ID NO: 162611 - DNA, 122 bp, Homo sapiens
actccctgcaaagtagctgtgtcagggtttggcaaggtttggggatgaggcaggactgagcgggatgaaggtgtaatttcattcctcagccccagcctcactttgcagagatgaaattggcc

SEQ ID NO: 162612 - DNA, 122 bp, Homo sapiens
tatcactcactgtaggctcccgtcccttccacccccgggcggggacccctcccagcgacccggccagctctcagcacttcggtccccactggcctactcgctccgacggaggggctcctgca

SEQ ID NO: 162613 - DNA, 122 bp, Homo sapiens
cggccgctctaccccaacaggccgccaccagcgagagtgcggccataaccatcacgtgaccgcccaccgacaccagcgagagtgcagtcgtaaccgtcacgtgaccgcccaccgtcggcccg

SEQ ID NO: 162614 - DNA, 122 bp, Homo sapiens
tgaagctcaccagaaacctaggagtggggcagatgcacgttgggcttctgcatcccctctcggagatggagacaggagtccccgagccctgcgcccgccactcaccctgtatgcaccgggct

SEQ ID NO: 162615 - DNA, 122 bp, Homo sapiens
cagtctaaccccagggcctgctgggaaatgtagttcgaatgcaaacaaccaatggacgaccgtcaggcgcggcggttggggcggggcaggcccccccaccgccccaccccccgcccacccag

SEQ ID NO: 162616 - DNA, 122 bp, Homo sapiens
ccaatcgatctcgaagggcactcgtagagaaaactacacctcccaggaagccgtgtgcgtcgccccgccttctactgcctttcactgcgcgtgcgtcgtgctgtgggattcgcggacccctc

SEQ ID NO: 162617 - DNA, 122 bp, Homo sapiens
ttgacttctctgtggccaatgaggtgccgcgttcctccaggctcatccaatgaacttatccgatgcttttgcatccaccaatggggtttcgagtgctgtgtggccaggctggcccggccttg

SEQ ID NO: 162618 - DNA, 122 bp, Homo sapiens
agcacacgggctgacccgggcgcccagcggctggctcggccctaacgcgtggtctggcctcgcgctctttgccttggctgagtcttctgcccgcaatgacctggccagcttcctccctcgcc

SEQ ID NO: 162619 - DNA, 122 bp, Homo sapiens
catgaaagatgaggcctggggcatgaggctgacacgatcagctggggaacacacgtccctcgagactcagttgtatcacttgaaaatggggatgtcaggacaagtgaccacaggggcctttt

SEQ ID NO: 162620 - DNA, 122 bp, Homo sapiens
tctcccgtgattcaggtagcctggcagaaccgcagttccacaattccttacccagcattccgtttcagctgctggaggactgcctgagccttatgcaaatgagaccagctcggaggctttga

SEQ ID NO: 162621 - DNA, 122 bp, Homo sapiens
gggagggagacggctgcacggcgctccatctggcctgccgcaaggggaatgtggtcctggcgcagctcctgatctggtacagggtggacgtcatggcccgagatgcccacgggaacacagcg

SEQ ID NO: 162622 - DNA, 122 bp, Homo sapiens
gatgtcacacttccaccatgcacttgatggggcttccgtgaatcgctgtttctgaggttccgcggtcagagaagggaaaggccagagcaagcagccagtccgcattacacgcatgttctgtg

SEQ ID NO: 162623 - DNA, 122 bp, Homo sapiens
agcagggctgccacactggcaactccataaggtgctattcatatgttataaaatgttaatcgtgtcccccaggagttacagaacatgacagctctgggaacttggactctagaagggaaagg

SEQ ID NO: 162624 - DNA, 122 bp, Homo sapiens
gagtggggaggtgaaggacagagagaggacaggagaaagaggggactgggggacctggaacgacgcgacacctcaacaatcagaactgggctgcggaatgggaagcagtttatggagttaag

SEQ ID NO: 162625 - DNA, 122 bp, Homo sapiens
cctccttctcctccgggctcggggctgagatccggtacaccacatggttcccctctaccacgcggccgtcggcctcagtcttacaggccttgatgacctgccctttgtggctgggattgtag

SEQ ID NO: 162626 - DNA, 122 bp, Homo sapiens
gaaagggtgtcagaaacgttcactgcacaacctgttccctgcaattcgatgactgaagcgcgccgccccacacttcggaagggccgttggcgaggtgacgtgacctctttcatcccctggcg

SEQ ID NO: 162627 - DNA, 122 bp, Homo sapiens
tgacttatggctgactgaatgtgcaggagagcaggtggccacttggtctagaatggacatcgtctgccatgcgtgggaggtgagagtgtgtgcacagcagcataaaaagatcattggtttct

SEQ ID NO: 162628 - DNA, 122 bp, Homo sapiens
gtgaaacggttttgaggctttttgagaatggctgttctatatgcccgcgtggggctcatgcggcgagcgccgccactcccgcagtggcccctgtgggggtgatacgtgatgtggcttaaatg

SEQ ID NO: 162629 - DNA, 122 bp, Homo sapiens
ttttctcacacacttggcacaggtgctccgcagggtcagggctgcatgccccgggctgtccgtttatggcaggttggagagctgtacagttttcaggaaatctgctctgaaagaggctgtga

SEQ ID NO: 162630 - DNA, 122 bp, Homo sapiens
gctcctgacagagagggagggaggcagcctggggctgggggccctggcagcagtggcacacggagtgtgcacatggatcctagtcagccttttgcagggcgctgaagccagtgggggccccc

SEQ ID NO: 162631 - DNA, 122 bp, Homo sapiens
ccgtgaaaattaaagaatgagaatgttctgtgtccagctatgctgacgacggggacctggcggcacggctgactctggagagtgagcgagggacccaagtcagaggccattttctttcattg

SEQ ID NO: 162632 - DNA, 122 bp, Homo sapiens
ggaaggggcttgcgctctggggctgtcgcttcggaacacttctccttcagtccattgctgcgctcgccctggctgctgaataaatggtttcggagtgaaaagcatctcactgaagaacttgt

SEQ ID NO: 162633 - DNA, 122 bp, Homo sapiens
aacaccctcctccagccaagggaggcagtgagtgagcgtgccacccagcaggagaaactgcgcttttgctgtggaactgtgtgacccacagattggaagatcccgctcgcgaacccacacca

SEQ ID NO: 162634 - DNA, 122 bp, Homo sapiens
aaaaacatcaagataaaggacgcctttcaggcattagctaaacttccacttcataactttcggcgagacatggtgagcctcctggtgtagagttcttttgtctttgtatggaatgacttttt

SEQ ID NO: 162635 - DNA, 122 bp, Homo sapiens
gccctactccacccagtgggaggagaagtttacagaactgagaaccatttagggttcagacgtatgcacacacttcctaaccgcgttctgggcacaggacactttgttgcaggtttagcttt

SEQ ID NO: 162636 - DNA, 122 bp, Homo sapiens
tctgccgctagggcctaagttgtgggttcaccataactcctcagcagacattggagtgaacgcatcgactgccgtcacccaagtgctaatcactgccttctcccactcagcgctggagtggg

SEQ ID NO: 162637 - DNA, 122 bp, Homo sapiens
cactactctactcaggcatagattcagtctagagctcttcaacagcaatgaaacggtaaacgaggggtaaacaaaacccagagatgtcatcaggtgcctgctaggagtcccacccgttcccc

SEQ ID NO: 162638 - DNA, 122 bp, Homo sapiens
cccccagtccaggttacctgccaccggctggccgcgccggggacagttcagccaccgcggcgggatcttgttgtgagccatgtcttggggctgcgcagagctgccctccctcaccaacgttc

SEQ ID NO: 162639 - DNA, 122 bp, Homo sapiens
aaaaataaggggcggggctagaaccagggggagttcgcctggggcggggccagagtggggcgggaccagttagggggcagggccaacctgggcggggccatggccggggacgtgggcgggac

SEQ ID NO: 162640 - DNA, 122 bp, Homo sapiens
cagctggagagaatgtcgccctgggtgtttccggggtgggagaggttccttatgaggtctcgccatccactcgggaaagagcagtttctaaatgtgcctgtctggctcctccggcagcccat

SEQ ID NO: 162641 - DNA, 122 bp, Homo sapiens
cgcgtggacaccagccccggcccaggtgcgggtgggccccgacgggagcgcgtggcaggccgggggagagccagtctaaacgcggattcccaggccccaccccccggccagctgactcagga

SEQ ID NO: 162642 - DNA, 122 bp, Homo sapiens
ggtgcataccttgcagtttgtcaatattcttctcccatttgtcttctattctgcgttatccgttggaaccaactcagatgacagttatgagagtctggagagagaggaagagaaaggatttt

SEQ ID NO: 162643 - DNA, 122 bp, Homo sapiens
agccccgagatcttcaagcccgaataatttttatcaggcgcagtgtggacagccccgaagcgcggccgggtcccctcatgcatatgcagcagattgtgatccttactccgtgagcgctgggc

SEQ ID NO: 162644 - DNA, 122 bp, Homo sapiens
agagcctcagtaggtaaagggatgggccccatttgctcttgcagtagctgccgggaatggcgggcgggatgcctgggatcctgggctgcccagaccggagcagtgagcgccgcacccccttg

SEQ ID NO: 162645 - DNA, 122 bp, Homo sapiens
ggtatttaggtgaggggggcgacggcggcaccggactcctctcctctcagctgcaaattccgacccacgacggcccaaggcacagaccttcccgccggtactctccccaagaaatgagaaac

SEQ ID NO: 162646 - DNA, 122 bp, Homo sapiens
gcgccctctgaggcgggaggcttcgttcctgcaccagcgtggcttgccctttggacgcggcgaggttgtgtgttctctgcttttgttttacttggaacagatgtttggcttttgtcaaggtc

SEQ ID NO: 162647 - DNA, 122 bp, Homo sapiens
ggaaactgaggtcggagaggctaaacccgccccaagcgcatgcccataccaagcgggaaacgaagcaccgaatatttccccagctcgtaggaagccagatgggggccagttccctcaggaga

SEQ ID NO: 162648 - DNA, 122 bp, Homo sapiens
ccacgggggtcatttatatttattattattatttttggtacagccgcattttagggccttcgctgcttctgttttagacgaaagatcttctctggatggcttcaatgatttggttttaaaag

SEQ ID NO: 162649 - DNA, 122 bp, Homo sapiens
cagaaaaaaacaaaacaaaacaggtatgtcttgaattaggctaggctaaatctttcaaagcgtgggacttaaccccttgccagagatgttgatgtgaaccccgaatcctaaggtgctgtgtt

SEQ ID NO: 162650 - DNA, 122 bp, Homo sapiens
atgaggctgtggctttcaaccagcaactcggggaggagccaagatttgtaaaccaagatgcgtctgagacagatctcaatccgtttagtggtttattttgtcatggttgaggatgcccacag

SEQ ID NO: 162651 - DNA, 122 bp, Homo sapiens
gctctaaatatttaaagaacttattaaaacacaaattgctgagcctcacgggttcccaggcgatgctgatgtaactggtcctgaggccacactttgagaaccgctgctctaagtaacaaaat

SEQ ID NO: 162652 - DNA, 122 bp, Homo sapiens
acctccatgcggcctcgtccacgctcagcaccggggaagccgaggcggagaagccgcgcgcgcctcagaagctcccggacgcccaggtacgtgggagcactccacagatggcgcaagtacgg

SEQ ID NO: 162653 - DNA, 122 bp, Homo sapiens
taagtggtttctgattgaacacagctgtctagctgctggccacggggtgcgcggaggaggcggggctagagggagaaaagggtgggggcgagtagcctggaggccgagcagaggagaccgtg

SEQ ID NO: 162654 - DNA, 122 bp, Homo sapiens
gggcggcctgcgggaggggctgaggcgcagttccctactcacccaggtccgaatccaccgcggtgctgtttccagcgagtcagattccagatcgcgctccagcctggactcggaattcctgc

SEQ ID NO: 162655 - DNA, 122 bp, Homo sapiens
tgggacgggaccagcagtgcatgcggctctggattcatgtttgttgaatgactgactgaacggaggctcccttacagaagtgaacggcgcggccctccctgagttccggcctggctctggat

SEQ ID NO: 162656 - DNA, 122 bp, Homo sapiens
agaggtgtgtacaaaaccgagacaactcgcaggtcgccattttaattgcggctaccaacacgcccgaggcccacttgctgccctccaagacgcgggggggcggcggggattgcgctttaggt

SEQ ID NO: 162657 - DNA, 122 bp, Homo sapiens
acccagggccccgtgatcgagtctgtgccccatgcagtgctcatggatgccaccagtggccgggtgggcattgcttcaccacgtgcccatcaccacctggaggggcagggagaggggcgaga

SEQ ID NO: 162658 - DNA, 122 bp, Homo sapiens
atggcctggaacgaccccctgcttttcagcggggatactccgcgccgtcgtgggacaagacggcaggacaggagcctgaaacaacagcacctcaaaggagcagctctgcgcagtaagcagcg

SEQ ID NO: 162659 - DNA, 122 bp, Homo sapiens
agcaacctgaagccaggggatgtggagcgccggctcagcgtggaggtgtgggactgggaccggacctcccgcaacgacttcatgggggccatgtcctttggcgtctcggagctgctcaaggc

SEQ ID NO: 162660 - DNA, 122 bp, Homo sapiens
tgaggccgttttcatcaccaatgcctggtctctgatctgcctccctgaggaacgcacatgcgctttgtcccaggactgggaaggaggctgactaccctcatcccacgctgaaccccgtttct

SEQ ID NO: 162661 - DNA, 122 bp, Homo sapiens
cgcgaacaacgcatgcaggcgcagtgggagcgcgaggagcgtgagcggctggagattgcccgagagaggctggccttccagcgccagcggctggagcgggagcgcatggagcgggaacggct

SEQ ID NO: 162662 - DNA, 122 bp, Homo sapiens
gccaggcaaaaacaaaacaaagggaacaagacaaaaggaaggtgctttctacaaaggcaacggtatgcaaaacgttacatagctgccaagaaaatgcaaactataggtatggccagagacag

SEQ ID NO: 162663 - DNA, 122 bp, Homo sapiens
ggctgccagagtgagtgcccggcccaccagggactgcagctgcaccagcaggtgccatcacgcttgtgatgtggtggccgtcacgctttcatgaccactgggcctgctagtctgtcagggcc

SEQ ID NO: 162664 - DNA, 122 bp, Homo sapiens
gacgccccgttgacgccgggcgcgcgtggccgcggccgagccgctcttcaaagccggcagcgtctggtctggcctggctccgccagctgcccgcaggtcctgtcctcgtggctttctgccct

SEQ ID NO: 162665 - DNA, 122 bp, Homo sapiens
agaataagggaacccaagcccggcccagtcttacctgcaggtagctgagggcctgagattcgggaagaaacctttaaacgctaagggacaaagtggtgcgtaggccaggcctggacgcccag

SEQ ID NO: 162666 - DNA, 122 bp, Homo sapiens
gtcctcagggtacagcatgtcaaagtaggagaggtagaaggcggacaggccctgctcgggcgtggcgggtggactgggactccagtcccgtctctcgagacccactgcccccgctgccgcct

SEQ ID NO: 162667 - DNA, 122 bp, Homo sapiens
ggaactgcacagaatagccagtgtatgccatggtcacaggctgcaaactgtgctccctcccgatctcctccctgcctctctctccctccccagctgctccagctcctggccttcccttggcc

SEQ ID NO: 162668 - DNA, 122 bp, Homo sapiens
taactgaggaaatgtcggggagcccctggatggtcctcccgggcttctgcgcttggtgggcgctggcgccctctggctggagccctgcgcccggcccagcccaggccgctgagggtgccctg

SEQ ID NO: 162669 - DNA, 122 bp, Homo sapiens
caatgtggtggttgttataaggaaaacttggcactgtaacatccccccaaactgggaaagcgtcgagagaccaaagaataatatgggcaagtccagcttgatgaatagatgagtttactagg

SEQ ID NO: 162670 - DNA, 122 bp, Homo sapiens
gcgacgccagcgaggaggagctcaagaaggcctatcggaagctggccctgaaatggcacccgggtaagtacctgtcccgcagcccccgcggccactcggagaagcccggccctccccgacct

SEQ ID NO: 162671 - DNA, 122 bp, Homo sapiens
atcccccaggtaacctctggcctcagaactcactgccctgcgtggggcagaagttctgggcgctggagtccgcgtcccccaggacacgagggtgacccaagggcgcgcggagagcggcggga

SEQ ID NO: 162672 - DNA, 122 bp, Homo sapiens
tatttaaggatatatggggagtaaggattatagggaaccttgttaggttcatgattagaccgtatgaccaacaaaaatacagtagcaattctgtatctcagtgactgctcaaggtttactct

SEQ ID NO: 162673 - DNA, 122 bp, Homo sapiens
actctaagacccatctcaaagggttagaggtaaaagagttagtatgagacaattacctggcgcatagtaagcacacagtacatcttggttgttattattaaaaaggcagtctgtgtgggcac

SEQ ID NO: 162674 - DNA, 122 bp, Homo sapiens
cgtaccctccttcagaccactccaattgggaatttagtaattatgcaagttcccccccttcgggcttgaaatcaaaaggcacagggttaagtttgaggaactacgtggaacattctcgagct

SEQ ID NO: 162675 - DNA, 122 bp, Homo sapiens
ctcaacagtctctcctacctgcgtgtaacactatgggtatatttgagcagtacgcagacacggcaggggcaggcatcagggcaaatagtgttcactttgggaccaaagggtgactcttgatg

SEQ ID NO: 162676 - DNA, 122 bp, Homo sapiens
cggagcccccgtccgccccttacggccgacccaagctccgccgacctcccaggccccccccggagccccctatgggcccctcacggccaccccgggcccccaaagacccccggctgccccga

SEQ ID NO: 162677 - DNA, 122 bp, Homo sapiens
actctcagctgcatgcgaatcatttacttatggaattttcatcttgaattattggcactacgtatgtgggggtcaaaaaaattaattcatccattgcctaagaaaactatcctcacggcctg

SEQ ID NO: 162678 - DNA, 122 bp, Homo sapiens
acgcttaacggatgacgcgagggttcaggaggtgcccaaacttaaggtgtgtgcgctgcccgtgaccagccggcccacagcggcatcctcagggtgggggccaagatcctgactttcgatca

SEQ ID NO: 162679 - DNA, 122 bp, Homo sapiens
tcgctttattttcattcattttatttattcattcagcacctgtgcactgagtgcctgctgcgtgtcgggccccgtcctaggcagtggggacaaggaggctacagggtacaaataaatgagtg

SEQ ID NO: 162680 - DNA, 122 bp, Homo sapiens
gtctgccctgcagagtctacaccggcctcctgctggaggccctgacgacggctgatgggacgggctcacaggccctgggcccttgaggactttggtgtaggcaggtgaacccgggccgccca

SEQ ID NO: 162681 - DNA, 122 bp, Homo sapiens
cttggtgtcgccagcaggttcctctgttcccggggaaactgcagcggaagacgggggctccggggtggttgtttctggggagacatccgtaagtccttcccctccagcagcaattgaagtag

SEQ ID NO: 162682 - DNA, 122 bp, Homo sapiens
tggaaccagaagcacctctgctcggaaatacattaacggaggagctcacaatatagttaacggggaagctcacatctgctcgatttaaagttgctgtttcagactaacttctctgccgctac

SEQ ID NO: 162683 - DNA, 122 bp, Homo sapiens
acccgaggggagtaaacagatgcccctaaagtctgcagtaaaggtgcccacgcgcaacggcgtgggtcaatgccagaaaccctgggatcccggaggtcgaggcctccacacagacgggaacc

SEQ ID NO: 162684 - DNA, 122 bp, Homo sapiens
cgggggcgggtctgggggcggacccggaggcggggctgtctctgcggcagggcccagcttcgctccccccggtctgtctctgtctctcctcctccctcctcctgctccgggcggagcccggc

SEQ ID NO: 162685 - DNA, 122 bp, Homo sapiens
ggccacgcagccctgggcggggctctgacagaggtgcccagggagccaagccggtctgatcgaccctctccccacactgggatttcccgccctccctctccactcccatccccccacttctc

SEQ ID NO: 162686 - DNA, 122 bp, Homo sapiens
ccgggcgctggaggcaggtggcggtaagttgagtgctctgatccagggtttcgctcagagcggcggcgaaggagaaattcccctccccaaccaacaggaggcgccgaggggccatggcctcc

SEQ ID NO: 162687 - DNA, 122 bp, Homo sapiens
gggccagttcctgcagcccgaggcgtggcgccgcggccggagcccctccgacatctccagcgacgtgtccatccaaatgacgcagaactaccctcccgccatcaagtacccggaccacctgc

SEQ ID NO: 162688 - DNA, 122 bp, Homo sapiens
acaggccaggaggggctccggctggggaagcatgtggggagcctggctgtgggacccaggcggccccgggccctgtcgccctgcagtgcaggtcagctctgcggacgctcggctcatggtct

SEQ ID NO: 162689 - DNA, 122 bp, Homo sapiens
tgaagttgggtgtgagaaggtggcgccagggatggcttcgggaggcggcactgctggccacggccacccacaggatccctgcttcagaagccgggcagggtatgggtgagttcggccagtga

SEQ ID NO: 162690 - DNA, 122 bp, Homo sapiens
cctctgctgcagctgagatctgggcccaggatggttcttacctgagggagtcctcacaggcgcggagggccctgggatgacgaggggctggcaagaccaccgaggaccgcagggccctctgg

SEQ ID NO: 162691 - DNA, 122 bp, Homo sapiens
ggttcgacggcatgttgctggccatggctcagcagcacgagggcggcgtgcaggaggtaacggcccgcgcggcgtcggcccacccggcggccttggccacgctccttccgcccttctctgcc

SEQ ID NO: 162692 - DNA, 122 bp, Homo sapiens
agctgccgggaagccgaggcagggcccggcgcctgaactttctcgagtttgttttgaaaacgattgcaaattttgggttttgtcccttaaagcaatcaaactttcacgtagaaatgtcttcc

SEQ ID NO: 162693 - DNA, 122 bp, Homo sapiens
gtctgagttgaaaaatgccatcccacattcagcatgatgttgcaataaaatgacttcttccggcaacttgccttgtaatttgggtgaattacaattggttctgccggtaaaataatgtgatg

SEQ ID NO: 162694 - DNA, 122 bp, Homo sapiens
ccgtccgccagggctgccacagctgagcagctgcatcgggaaagcccactaagcagaaagcgctccccagcccggcctctgatttctcacatttaattacctgatttccctttcctgcggtc

SEQ ID NO: 162695 - DNA, 122 bp, Homo sapiens
aaccagaagctgcagtggaatgcagccaagctcttctaccaatggggagacgtgagctttcggttttcttctataacaattaggttgcttaagtgaagtggagtcattttttgattgattgt

SEQ ID NO: 162696 - DNA, 122 bp, Homo sapiens
gcgggggcgctgctgctgcgggggcaggcggcggcaggggcggcggcggcggcggcggcccgctccagccatgccgaataaaaacaagaaggagaaagtgagtccgggcccggccgcgggac

SEQ ID NO: 162697 - DNA, 122 bp, Homo sapiens
agacaaagtctagagttcagcccaactcctctgtttcacagatgtggaaatgatggccagcgaggtcacagtctgaccagccaagaccaaaacctacatctcagttcctaaccagtcctctt

SEQ ID NO: 162698 - DNA, 122 bp, Homo sapiens
cttcttcttgaccagttgttaggtttcgggccccgctccttaggagaagttgcaggtgggcgacttggagctggagagaagatggggagctcacgtgggggctgagtggggaagcaagcaga

SEQ ID NO: 162699 - DNA, 122 bp, Homo sapiens
ttttaaattaagcagtgagttctttcagctcatcataaacatgctaaaaagcttcagccgcggcctgagcccacccccgccctttacacacacaggcagcagctggggccactcgaccccac

SEQ ID NO: 162700 - DNA, 122 bp, Homo sapiens
aaccttatggttgctggaaagataaaaaaccaatgggccaattggggtgaaactctggcccggaaacgtggggtgccagccccctcagcacagatgcaatgcagagttatgggaggtgcgaa

SEQ ID NO: 162701 - DNA, 122 bp, Homo sapiens
tgatgaatgaagcccaggggactgccattttataaatgtcagcagttggaaaaatcgtcacgaattgacttagagcaagggtcagcaagcttgtctgtaaagggccaaacagtaaatatttt

SEQ ID NO: 162702 - DNA, 122 bp, Homo sapiens
cacaaacacagctgaccgtctcacagctgcacacctgcaccgctcacgagcacagctgaccgtctcacagctgcacacctgcactgctcacgaacacagctgatcgtctgcctcttcgtgtg

SEQ ID NO: 162703 - DNA, 122 bp, Homo sapiens
gacccacagccctgaatggccccaaccacgtgagtgtgggtggcaggtcccagggggccccggagaggtcacatgttcatttaaagctttgcttcctgctgggggcgccttttgttggcttg

SEQ ID NO: 162704 - DNA, 122 bp, Homo sapiens
cccatgcccccaatgaactttgatccccgatggatgatgattcctccttatgtggacccccggctcctccagggtcgtccccctctagacttctaccctcctggtgtgcatccctctggtaa

SEQ ID NO: 162705 - DNA, 122 bp, Homo sapiens
ggaacattcgaccatgtctggagacatttttggttttcccaacgaggaggttgctactggcgtctcatgagaagagaccagggatgctgctacacgccttcaatgcacaggacagcccctgc

SEQ ID NO: 162706 - DNA, 122 bp, Homo sapiens
tcggtggcgttcaaggttatccagacagcggtctgcgggtttcatttgcaagtcactgcgcggcgcatgcagaagcagccgcgggccggcggggcgcgcagataaggtctgggggcgtgggt

SEQ ID NO: 162707 - DNA, 122 bp, Homo sapiens
gttttgttttttaacagaatctcactctgtcactcatgctggtgtacagtggcacaatctcggcgcgctgcaacctccgcctcccaagctcaagcaattctcatgcctcagcctcctgagta

SEQ ID NO: 162708 - DNA, 122 bp, Homo sapiens
tacttgggaggctgaggcaggagaatggcttgaacccgggaggcggaggttgcagtgagccgagatcgcaccactgcactccagcatgagtgacagagactctgtctccaaaaaaaaaaaaa

SEQ ID NO: 162709 - DNA, 122 bp, Homo sapiens
cacgactggaactggcgccctccggaagtgaaggaggtgccccgcagaggaggcggtagccgtggtccctgtaaaccaggccttgctgacaaatgtcagacgccaagaacagaagaacggag

SEQ ID NO: 162710 - DNA, 122 bp, Homo sapiens
tgtattagaaaagcaggaaccttcaaggcatagcattatgcaaaggcatgatggattacacgagcaaagctgcagtttattctaataattaattagacaaaagggggaaaaatactgaccct

SEQ ID NO: 162711 - DNA, 122 bp, Homo sapiens
gaaaagttaagatcctcctatagttcctcaatgtgatgactgggtgttcacactcattggcgagatgtgcctctctcaaaccttgttcagatgctgcagacacattacccatcagatgtgca

SEQ ID NO: 162712 - DNA, 122 bp, Homo sapiens
agcaagatgggtcaccagcagctgtactggagccacccaaaaaaattcggccagggttctcgttcttgtcgtgtctattcaaaccagcacggtctgatccggaaatatggcctcaataagtg

SEQ ID NO: 162713 - DNA, 122 bp, Homo sapiens
tttcgctagaaaggggcgtgttgagaagggccagcactgagaagagccagctgctgaatgcgcatgtgcacggtggacatcaaagaaagggctcgtgctgggaaagcgggcggggctgagag

SEQ ID NO: 162714 - DNA, 122 bp, Homo sapiens
ctccttcgtgggcaatatctccaaggacctggggctggagccccgggagctggcgaagcgcggagtccgcatcgtctccagagggaagacacagcttttcgctgtgaatccgcgaagcggca

SEQ ID NO: 162715 - DNA, 122 bp, Homo sapiens
ttagaactgggagcttcccagctagcttgctgcagcgcgagctgtttttcagctgaaaggcgccccctgggtcctaagcctcctaggtcatgcaaaatctaactgagccaagaaaggaactc

SEQ ID NO: 162716 - DNA, 122 bp, Homo sapiens
tcagtagcgacgattgggcagtctggccacgtgctcgtgggggtgtggcctttgtttctgcgtcccctggggcctgctctgactaaggcaagggttttctccatcctccccctcttggttgc

SEQ ID NO: 162717 - DNA, 122 bp, Homo sapiens
agagtaatggattgggagtcagaagatgcacactcgttctcaggactgtaatgttgtctccgtgggtgatttgggtacttaactccccagagctgcttttcccaatggtgacatgagcctat

SEQ ID NO: 162718 - DNA, 122 bp, Homo sapiens
agactgctgtgtaacctccagagtccactctccccttcctccttttaataatagaacccccggagttattgctggtcaggcggccacctgggaagactacattttccagatcccctacgaca

SEQ ID NO: 162719 - DNA, 122 bp, Homo sapiens
cagcctcctctcagaggagctgcctccccacctgccacatcacccagaagcattgctaggcgcagccccgctccaggggaggggactccgtaggggtgtgcatccctggggccatctcagag

SEQ ID NO: 162720 - DNA, 122 bp, Homo sapiens
aggcagcccctggagggcaggaccccggttataagcctcagaaaacgtggcttcggaggacgtggcaaggaggactgaacgaaggatgaggagatgaacaaatgaatggacggaaggccgaa

SEQ ID NO: 162721 - DNA, 122 bp, Homo sapiens
cctggtatcctggataaaaattgtcttaatttgagttagcctagctcattgcccattttgcgtcagagtgtgacagtgattatcattttaatttagcctgtaatttttgctataaaatataa

SEQ ID NO: 162722 - DNA, 122 bp, Homo sapiens
ggagccttgctgggaaggtgagtcccacctgagagcaagaactaggggaggcccccacaccgctacaaccccactgtgaccctaggacggtggcacctacttcacggcgttacctgattttc

SEQ ID NO: 162723 - DNA, 122 bp, Homo sapiens
atttcagttgtaaaccaagaagtagccgggacaggcctcggtgggcttcggagcgtggctcggcaaggtcgaggtcgcgcctggggggacaggtcgatgcctttctccagagatggttttga

SEQ ID NO: 162724 - DNA, 122 bp, Homo sapiens
ccaccatgcccggccccggatttcttgatctaaagaatgtccgccgggcgcggtagctcacgcctctaattccagcactttgggaggccgaggcaggcggatcacgaggtcaggagttcaag

SEQ ID NO: 162725 - DNA, 122 bp, Homo sapiens
tccgagggcttggctgcacgtggggccggggatggatggggaggcgatgctggaggacctcggtcctgcagagttgggatatcgcatgatagctggtcctcccagtcctatttaccaccctc

SEQ ID NO: 162726 - DNA, 122 bp, Homo sapiens
aaacagtcctgatcgtcttccctgcggcatgccgatgccctcagcttgactctggggtggcgggtccggggcaaaggctcatatgagtgccattcacttaacagctctttcaaattccccag

SEQ ID NO: 162727 - DNA, 122 bp, Homo sapiens
ccactgccctgcatctgattatgctagccagctaggcctttcctgagcttgctctggttccggaactgggagtataaatctgtactcagtgggcccagggtctcctggccagcccttcaact

SEQ ID NO: 162728 - DNA, 122 bp, Homo sapiens
gccggtcgccggagagaggtgcgcagtgctcgagacccctggcgatggggaggcggtgaccggtgcaggccgagccaggccaagggctgaggggctggcttgagaggcaccgtcagatcgtc

SEQ ID NO: 162729 - DNA, 122 bp, Homo sapiens
accccttgaacggccggaagatcaagtagggttctctgggtttaatgtccatggggaggccgctgatagtgtccggacctcctcttccaggacgccgccggaacccgcgctggagccagtac

SEQ ID NO: 162730 - DNA, 122 bp, Homo sapiens
acaagccagtaagtcacagagcaaagtccctccaacctcccctctgccactcgtctcccgcgtgccctctggcaagtcggaccctactcttaggcctcagcttccccatctatacaatgggc

SEQ ID NO: 162731 - DNA, 122 bp, Homo sapiens
gcacgaggaggtagtgggcataggcagtgccgaagtcctggacgcccagacagtgctctgcgctctgcaaggaccgcgacaccagctcgtcccggccggctgccccagcgccacccccggcg

SEQ ID NO: 162732 - DNA, 122 bp, Homo sapiens
cagggcgtacatatttaacacagctgaacagtaagatacaggagccagaggaaaggacagcgaagctggaagcatctccacagtcctgctaagcagaagctaacccacagatctgcagccag

SEQ ID NO: 162733 - DNA, 122 bp, Homo sapiens
aggggggtgcggcctgtacagtcccagcgaagcctccgctctctcgtagccggtcagccccgggtttcccctaagcccagccccgcatagactcacccgcctgccttgcctcgcttttccct

SEQ ID NO: 162734 - DNA, 122 bp, Homo sapiens
ttacccctaaaaagcactataaatacccactgaggagatctggttgtcttttaaatacctcgagtcagtaaaaactcacgaaactccgcacctcaggctccaactcgtgggaaaaggtagct

SEQ ID NO: 162735 - DNA, 122 bp, Homo sapiens
gaaggtagtaaaggaactctggaagatttggggtggatcctctttcggtgattctcaattcgggccgtaccgccctccagtggtgtttgaatgagtgagtgcattttgattgtcatatttcc

SEQ ID NO: 162736 - DNA, 122 bp, Homo sapiens
gcggtaatgcttgtaagctcagacagcaggggccagcaataaggtttgagggtactggggcgctcactgccttaggctccgtccctgtcagcccgaaattaacccctaaagcactaaagtcc

SEQ ID NO: 162737 - DNA, 122 bp, Homo sapiens
gcaaggaagggcgggtattcatactgaaactgcagaactaagcaggtgacagctgcacaccgctcctttccctggccgggctgccccagctcagtgacatcacagactgtgacgaacccaga

SEQ ID NO: 162738 - DNA, 122 bp, Homo sapiens
aggggcccaggaagggcggcaaggcagcctcgccgggaagggccctttacatccaggtagcgcgagccgcgccggcccgggacagctcacatgaccgagccccgcgctttgaacggcccttg

SEQ ID NO: 162739 - DNA, 122 bp, Homo sapiens
agacccgggtctcctctgtgcgcgtgctccgtcagtggtggtgtcgctgccatgggaagccgccctcagtgatggctgtttgttccttcttgccgtgtgggttgcagttagtacacctttcg

SEQ ID NO: 162740 - DNA, 122 bp, Homo sapiens
aacacttaaaagccaaaggaaaatagaacaagattgacaacactttgaaggggtaggtttcgacccttcatagattcatagatggtggcaagaacgagactccatctcaaaaaaaaagctaa

SEQ ID NO: 162741 - DNA, 122 bp, Homo sapiens
ccccaagtgatctgggcgtgccggagaaacgagcagggcctgcgggggtccctcatgcggcgaggccgagcaagggcaggggcctgatgggatcgggatctctccggcctcagggacgggga

SEQ ID NO: 162742 - DNA, 122 bp, Homo sapiens
cggggctcgggggcggggcctgcttgcgacccgcagccaggagcgcctcgagtgccccctcgcgcccaggggtgggagtacagagccaggctcgccattccatcgtattaggtcagtaagat

SEQ ID NO: 162743 - DNA, 122 bp, Homo sapiens
aaggaggaatagggagacctggggcagtgttacaattacagaaaagggagaggcgaggtccgctgagtccttggcctgggcaacaaggcacactgaaaactgggttccttttcgacccgcat

SEQ ID NO: 162744 - DNA, 122 bp, Homo sapiens
agaacataggttgccggtggagttaggaaactgactctaggtttggctcatcattggctccgaatatgtcaacttcatggccctttctgctccaaccccagcatagaagtgtggaaaggtaa

SEQ ID NO: 162745 - DNA, 122 bp, Homo sapiens
tagagttcaacagaaggatttcttctactgccttgggaagaatgttccattgtggcatcacggttaccatggcaccaccaagcaactgtctggacatggggacttacgaggagctaggatga

SEQ ID NO: 162746 - DNA, 122 bp, Homo sapiens
gtttatgtaaaatcagggtcaaatagatcacatcagcctaaaaagcccattactctgaagcgtcctatttgtaaagataattggcaagcatttgaaaaaaatacacataataacaacaaatc

SEQ ID NO: 162747 - DNA, 122 bp, Homo sapiens
caggcttcagacctcccctggcttccgtgttatctcgtctccacgccgggaagggagaggcggccacagccttgcagagacctcggccacttgcagccatttctgccccaggctgggccttg

SEQ ID NO: 162748 - DNA, 122 bp, Homo sapiens
gcccccgaaggtcacgccccaagacaggatgggggtcccagggcggagcccctgctggatcgtccggggcccccgcggagcgccggaagcggctcacccggcccggctcttgcaggcgtgac

SEQ ID NO: 162749 - DNA, 122 bp, Homo sapiens
agaacgcccggaggcgggaggccggaggcaggctgctggctggagaaccgacggcaacgacggcgcaaagccggcgcggaaagggcaggcgcaggacccaccctgacgccgcctctcccagc

SEQ ID NO: 162750 - DNA, 122 bp, Homo sapiens
ggcacctctcctgcagggagctgggacctaagggactcgcgctgggcacggggcaggcggcgcccatgtccccttcccacggtgcccagagggcctgtcccatttgtgagcagctcccaggc

SEQ ID NO: 162751 - DNA, 122 bp, Homo sapiens
ggagctgagcatcaagagcggcaaccccggggagtcctcccgcggctggatgtggggctgcgccttctcgggggactcccagtacatcgtcactggtgagccccgccctggcctcccccatc

SEQ ID NO: 162752 - DNA, 122 bp, Homo sapiens
taatggacttgtctggggggccccttcattgcgacgcacttgaaccggagctggaagctccgccactgagaccctctgggctgggagatgtctgcaagaacggcacctttctcctggtcagg

SEQ ID NO: 162753 - DNA, 122 bp, Homo sapiens
tcctctgtgcgggtgggaggctctggaaggcccgcctctgttgtggggtttgttcccagacgaattgcgccacctgtgaaagcttgtcgagcgcgtcacagcaggcaggcctgggcccctcg

SEQ ID NO: 162754 - DNA, 122 bp, Homo sapiens
tatccagcccgcgacaagggccctggtttgagcacagctcttcgacagtatctcccatcccgcatccccgaggcaggcacccaggaacttgggcggctccattctttcttcccgcccaccct

SEQ ID NO: 162755 - DNA, 122 bp, Homo sapiens
aatccaggccacttggctacagggtcttggctcccctggttaagtcagggacccagtagccgaccacaaacaatcccagctgcacggtgccttcatggtctgtggcgccccctggtgttgac

SEQ ID NO: 162756 - DNA, 122 bp, Homo sapiens
ggctctctgacatccccacagcgtgagtgagcgtctcagggcagcttcgtggttctgtagcgggaacacaggaagcagagagacctcggttgtaggactggagaagtcataatctctgctgc

SEQ ID NO: 162757 - DNA, 122 bp, Homo sapiens
aagaaattttagggaaaggacgcaaaccttcttgaaaggtcagaaggttttgcatagcttcggggaagaataagcagaaggcagctgttctaccctgaggcagagggtgaggagtaggtaca

SEQ ID NO: 162758 - DNA, 122 bp, Homo sapiens
ttcaacttttctattgttaccctccctaatacatctgttgccaaagaacttgtactccaacgccaaaatcttacttaatagaaaattaatcagtctttaacctttcctaacttcatgtgggt

SEQ ID NO: 162759 - DNA, 122 bp, Homo sapiens
gcagctgctgcagctttgatcgcggttctaggtctctccctcgctgcatcttcccctcttcggcagggcacccagactcctcttggaagacaccacttccgcccccgctttcacacttggga

SEQ ID NO: 162760 - DNA, 122 bp, Homo sapiens
ccaattctgcaagaagggattccgtcaggtctgaacgggctccagcgggtgggagacctccgcaacccttgttcaggccgcggcgcgggaaaaagggggtgtcagacaagggggccgcgaac

SEQ ID NO: 162761 - DNA, 122 bp, Homo sapiens
gtctatcgataaattaacctgctttataatataacgattccattacagcacatagtatgccgggggcagagtgtatagaatgtgtggagagtgcacatttcaccataacaagaatccatctt

SEQ ID NO: 162762 - DNA, 122 bp, Homo sapiens
cgccccggaagaggcctctacgggaggcactgggaaggccgccccgagagcgactatgggcgccgccggttaccatggcgacaaccccgccgaaagcccccgcccgccagctgccccgcggg

SEQ ID NO: 162763 - DNA, 122 bp, Homo sapiens
ggaggtcaagccacttactatggcttatgaggccctgcatggcctagcacctggtaacatcgctggcgccctctctttctgctccccctttgaatatcaaatcagtgtttattttgttctga

SEQ ID NO: 162764 - DNA, 122 bp, Homo sapiens
aaacatcctttagaggggagaagcggctcacttgcttatctcgagggttcatccgagccccgcctctggattcttttaggtttagggacgctcataaaggctcccaggcacttggaagcagt

SEQ ID NO: 162765 - DNA, 122 bp, Homo sapiens
ccatggctgccgtggcctcaagggccaccagcctcgctccgcaggtttccaaagagaggacgcggtgccctgacctgactgggtgcgcctcttaccacatgcctccctggcaggcaaggtct

SEQ ID NO: 162766 - DNA, 122 bp, Homo sapiens
ccctgcccccaccctggattttttttccccttctctcaaacctctaaacaggaaatagcccgaatcacaataatatacgggagcagccgcggaggccgctggcgccctcccattcccgggga

SEQ ID NO: 162767 - DNA, 122 bp, Homo sapiens
agtttggcaatctcgctcacacctgggtgtgaacctgcgtgtacccagcccgggagatatcggggtctgtacaggattggtaccccttatgggttagagagaccttctttccttagctccaa

SEQ ID NO: 162768 - DNA, 122 bp, Homo sapiens
gcgccggctgcgtcctcccaggcaggaaggtgaaagatgacccattcctcacgcggaaggcgcgctgggctacagccaggctgccctttgctaagcgcgcatccctcacgcgaggaatcctc

SEQ ID NO: 162769 - DNA, 122 bp, Homo sapiens
ggtcctccctgttggactggaaggggcgggagagccatacagggcgattgggaaatggatcgggtggctagtaaaagccaagtaagacaggagtgtccaaaggaagaagggggtagggaggg

SEQ ID NO: 162770 - DNA, 122 bp, Homo sapiens
gatccttacgtccgcctggtcctccgggcctgtctctgcctccagcccggttcccaagggcgccccggggccctcccgcaccctcgcggaagaaactactacctccccgcaccataggccaa

SEQ ID NO: 162771 - DNA, 122 bp, Homo sapiens
cgccgggcgccccgggggagcggggccggcaccctaggggacgcgaagcccgggaaggggcgtgtctgagcaccgagcgcccgctgtgcggatgtccgggccgtaacccgagccgggcgcgt

SEQ ID NO: 162772 - DNA, 122 bp, Homo sapiens
gacctttccttggctgccctttattaaaagttttttttcgctatagttacagtactcgaacgtaacagaactgcccttgttctaaagtctttccactggttccatctgttctccccctaatt

SEQ ID NO: 162773 - DNA, 122 bp, Homo sapiens
agttgctccctgaatttttatagcacttcaggaagaggcaggctattgttacaagaagaacgtttaagtatattgttcactttttttgaacagagattgtcgatgttatttttaaattctaa

SEQ ID NO: 162774 - DNA, 122 bp, Homo sapiens
ccagcacggggcctgctcccagcgcggggtctgctcccagcacgtggtctgctcccagcacggggcctgctcccagcgcggggcctgctcctaacgcatccactacatctagtaatttacta

SEQ ID NO: 162775 - DNA, 122 bp, Homo sapiens
gctgtagactgcatcctttgagcaataggaggggaagccggttaccttggccatggtcagcgtcttgcagcttgtctggaagaaccgaaggatgccatctgcactccaagtccctttggttt

SEQ ID NO: 162776 - DNA, 122 bp, Homo sapiens
tggccccccatgagccgggcacggagccgggcatagatggtacggaggccctgcagctgccgcgcagccagtgcagtgtgcacagcctccgggctgtgcagatcgcggagggagaggcccag

SEQ ID NO: 162777 - DNA, 122 bp, Homo sapiens
tccagagggggccttaggtaagtgcgactttggaccacgatacacagacagagctttgaacgtggcttttcctagctggagagacaggaatgttatagtcggggggggggggcggggggaga

SEQ ID NO: 162778 - DNA, 122 bp, Homo sapiens
gccagaaaaggccgtggatggcagacctgcaggtgcgccctggagggagtggctgccgaccggcctcccacagcgttggctcttggcctgagcctttgcctctctctggcctcctgtgatat

SEQ ID NO: 162779 - DNA, 122 bp, Homo sapiens
ccacccaccccggcgcgggggcccggccgcgggaacgccctcccggaatgaagcgcttcccggtgccttcaaggtagctcggttccggatcgggaacccccccggtcttccctctcaggtcc

SEQ ID NO: 162780 - DNA, 122 bp, Homo sapiens
cgggcccaaggctgagggacccggtggagcggaagtcactccctgaggcagtggcgacagcggcggcgagaggatgaacaacaagttcgacgcgtgagtggctcgtggccgcccccggggcc

SEQ ID NO: 162781 - DNA, 122 bp, Homo sapiens
catcgaggcaatgttttctggtagagatgctcatggaaatcactgagccaatgccactcacgttgcaaagaaccaaaaaaagaaaaaaatgcttagtaactgaatccgtggtgaaacggacg

SEQ ID NO: 162782 - DNA, 122 bp, Homo sapiens
aggggccagagtagggtccgagaaggaagctagggttagagtaggtgcacctggtgtggacgagagactcgcctcctgagagctttgtaggggccttgcatccttaagtctgggtgtatttg

SEQ ID NO: 162783 - DNA, 122 bp, Homo sapiens
ctcgccagggctgggaggaagggcagataaagctgccgacgctgtgttcttctttaccttcgctttaatggtcttcacagcacgtcgtgtttatgagtcagaggaccctagagcgacacttg

SEQ ID NO: 162784 - DNA, 122 bp, Homo sapiens
aggctcccttctaaggagccactctaaggccgcgccagggctttagtgagcctatctactcgtgggcttcccctactcaaaacaccgtgggtgtgtgtgtgtgtgtgtgtgtgtgtgtgtgt

SEQ ID NO: 162785 - DNA, 122 bp, Homo sapiens
gcctagcctctcttgttcaaaagagaacagaggctcacccacagcagacattcctgcttccggatcctcagcggcctctcccagggggaggaggaagaagcaaagagaacaggctaagagtc

SEQ ID NO: 162786 - DNA, 122 bp, Homo sapiens
tccagagtttgctgcagtaggaggaagagaacgctgcagggggcggggggcggggcacagcgtggaactcagagagaagcctggagcagacagtgtaagtgtgcctggccctgcttcaagcc

SEQ ID NO: 162787 - DNA, 122 bp, Homo sapiens
ggtttcaccgtgttggcgaggctcatctcgagctcttgatatgaagtgatccgcccgcctcggccacccaaagtgctgggattgtaggcgtgaaccaccacttccggactcccccattttaa

SEQ ID NO: 162788 - DNA, 122 bp, Homo sapiens
ggcggggcggggaggggcggggaggggcggggtcgcggggcggatgcgggggtcgccgggcggggcccgggctaggccccgccccctcactgagccgcccccgcccccagctcctgtcccac

SEQ ID NO: 162789 - DNA, 122 bp, Homo sapiens
gcccaggccccttccctgaggaacagggaggggataaaatcccccggtgggcttgaaacacggtcacacattcaaaagtgtgaccctcctggaggtacgtggccagggacaaagaaggactc

SEQ ID NO: 162790 - DNA, 122 bp, Homo sapiens
ttaaaaaaaaaacaacagtggaagaatcctgttttgaaatcttgatttgctttaaaagcacgtagatggttgttgacagatttttgttggtcctggggctgccacaggtcagccaggtgttt

SEQ ID NO: 162791 - DNA, 122 bp, Homo sapiens
actcatcttttctcctccctcttgtttttccaagacatgatgttgctaaaatcaggcaagcgttcatcaaactttgagtctccatagtagttctaacaccatagccaaaaagttcttgatac

SEQ ID NO: 162792 - DNA, 122 bp, Homo sapiens
gtccttgggccacggaagagagacctccttccccatggtcaaaagtggagtgcaggcccccggctgtggaaatcagtgctcggctccctgaggggcgatgccttaaatattccaccactggg

SEQ ID NO: 162793 - DNA, 122 bp, Homo sapiens
accccgttcccacgcccgcgacttgaagcaagtgcgcctcccgcgtcctgaagcccttctcggccctggcctctcaccccgcagccccggacagtaacagaagggctattttaccgcccagt

SEQ ID NO: 162794 - DNA, 122 bp, Homo sapiens
tgtcgcgcgcgcgaccatcgtgggcgcaggcgccagggagggaaccagagcccgctgtggcggatgaaaggaagccgtcggcgtgttgtccccactcactgatagtttttgaactctagaac

SEQ ID NO: 162795 - DNA, 122 bp, Homo sapiens
tcgcgttccagaatagttttttttgtgcgttccccaagccaagccgtctatcagtctgaccgtggccgccttttttccctttctctgaactggaggtccgaacgcaaggctcattgatggca

SEQ ID NO: 162796 - DNA, 122 bp, Homo sapiens
gggctgctgtctggggaggactgaaactcgggttcccgaagtcgggctgctctggggccacggagagaaggggagagaacgtcgaggaagaggcagagctcaagtggacggaggatggaaca

SEQ ID NO: 162797 - DNA, 122 bp, Homo sapiens
cacgccagaggccgaaggatgcaaaagtggttttctgctttcgatgatgcaatcattcagcgacagtggcgggcaaacccctcccggggcgggggaggtgtgagcttcacgaaggaggttga

SEQ ID NO: 162798 - DNA, 122 bp, Homo sapiens
tgtggaatgtgaagtcagacatatctaatcattggcctcatgtttatcagtgtatgacctcgggcatgctacttaacctttctaatataaaactaagttaccaaacagctaccagaactcat

SEQ ID NO: 162799 - DNA, 122 bp, Homo sapiens
gccccagggatttgaggatggatgcggacacccgggcctgaggcagctcgcggccttgaccgaattccacgcgagctgaagcccagggatatcccagaatcttcctcaggatcaatcttccg

SEQ ID NO: 162800 - DNA, 122 bp, Homo sapiens
cgcgtggcagggaccgtgtgcggcgtggaggctactgggaattgtagtcctgcgcggcagcggggtaggtgggaaaagagatgtggcctttcctgcactgccggtttctctggcccccgggc

SEQ ID NO: 162801 - DNA, 122 bp, Homo sapiens
tgacagccacgtgtactctcctgctttagaacaaggacctttcccttttgtgcatgaatacgctctcagcagatgcgagaaaatgggagtcaaatgcacctttgtggtttcttttccttcta

SEQ ID NO: 162802 - DNA, 122 bp, Homo sapiens
tggcttcctacgtcactcaggccttagggggcggggtatgtcaccctatccaatcaggggcgctggggcggggccctgccaactgtccattcagatgggcccgggagaggagggcagggcct

SEQ ID NO: 162803 - DNA, 122 bp, Homo sapiens
agggtggccactgtccaaagagatgggcaaagagctgctgccagaggcctgggctgcagacgccctgcatggctctcaggggagccagctccctactccacacccctgcacagcagcccctc

SEQ ID NO: 162804 - DNA, 122 bp, Homo sapiens
gccacatggacctgacgcgggaggtgtgcccactcactgtgaagcccaaggaggtatggtcgggcttgagctgcccgggtttcccaaaggatgaacattcccggtgctgtcgtgccatcctt

SEQ ID NO: 162805 - DNA, 122 bp, Homo sapiens
cgtccggcccaacgccggaggcttggaaaagagagttggcagcgggagcggactacgtgccgggccatggcccttctgcccgggccctggccacaatgacctctttgccctgccccctcccc

SEQ ID NO: 162806 - DNA, 122 bp, Homo sapiens
cctgagcaggcccagcgcaaacacaggggcctcctgcagggaccttgtgtcacggccacacggagctactgactgctgacacctgcgtcttcgccgccacaccggccctgcaaatcattaat

SEQ ID NO: 162807 - DNA, 122 bp, Homo sapiens
gcagcactagcagcaaagagaaaacctccctccctgcagctacctctgccgggatccagccggtacctgacatgacccaagaccccagagacagacagtgtggccacatgttgggagatcca

SEQ ID NO: 162808 - DNA, 122 bp, Homo sapiens
ccctgcagctgcacgcgggcccgcacctggagcagctcccgcagcaggctccgcgtggcgcgctcacagcgctgcttgtgctcccgcaggcaggccacctcggcctgcagctccaccaccct

SEQ ID NO: 162809 - DNA, 122 bp, Homo sapiens
ttttccacttccagccagctctcatcctcaggcagaggttgccagccattccagactaagcgggggtgatgacgtcagtggagagaaccggaccagcagcctggatgctccgactcccgcct

SEQ ID NO: 162810 - DNA, 122 bp, Homo sapiens
cctgccccctcgggcacacaaacagagctgaagaccaccctgggcacctccttggctggccgcatacctcctggcgggcagctgtggtgcattgtagttgcattgcatgttctggtggtacc

SEQ ID NO: 162811 - DNA, 122 bp, Homo sapiens
ggggagtgggtgtggccaagccgcactcgaggctgcctctccccaaaagggagagaggcacgctgccaccactgaactccagacaccagacaggcgctgcggagacactgagcactgccctc

SEQ ID NO: 162812 - DNA, 122 bp, Homo sapiens
catctctgtgcctggttgcagattaagagaggctcctgcccattaccgtagctactctgacgtcattttgttaaccccttagctgctatatccactgtggacaagtcttgtactggaaaagt

SEQ ID NO: 162813 - DNA, 122 bp, Homo sapiens
agagagagacaagagaaaggacagtgtcctagggatgacatcattctgtcctgtctgcttcgactcccaccactggtggtgggggctgggggaaacggcagcaggctggtgaacgtgcttgg

SEQ ID NO: 162814 - DNA, 122 bp, Homo sapiens
agcaagtgtctgtgggaaggcactggaggcgagggctccggtctgcagctgtgaaaaacacgtctttccacatgagaccggctgctacctgcaggcctccaacccacatcccaatttcatga

SEQ ID NO: 162815 - DNA, 122 bp, Homo sapiens
aggcaaggggaggacactagggaggccaggagaggctacgggaggacgctcgggaggccacgagaggctacaggaggatgcttgggaggccatgagaggctatgggaggacgctcaggtgct

SEQ ID NO: 162816 - DNA, 122 bp, Homo sapiens
caagatggcggcgagccgggagcctaggagcagccagcaaagttacccgggccgcgcaggcgcagaataatcttgcactctcaacctccgggccgcccggctacaccttaatccataggttc

SEQ ID NO: 162817 - DNA, 122 bp, Homo sapiens
tccccaagcatattccaaccacttctccgtagagctcattccttccgtgcatacgaagggcgccaatccttcctgtatccctcctacagataccgggtgactactgcttttgcgcccaaagc

SEQ ID NO: 162818 - DNA, 122 bp, Homo sapiens
gggcgccggggctagttggcgggtaggatcacgtgcgaggggcaggccccgtctaggccccgcctccttgctgctgctgccgccgccaatcctggtccggttgcccgagttcccggaggtct

SEQ ID NO: 162819 - DNA, 122 bp, Homo sapiens
atggtggccggggatgcacattcactgcccctcccctcttcaaccccactctccacatcccgtgacctggtgggatgccagtggtcatgagatcccatcacatacatgagtttcaagagtca

SEQ ID NO: 162820 - DNA, 122 bp, Homo sapiens
acagggaaatgaccggtggtgcggtaacctgcgtggctcctgatagcgtttggaagaacgcgggggagactgaagagcaactgggaactcggatctgaagccctgctggggtcgcgcggctt

SEQ ID NO: 162821 - DNA, 122 bp, Homo sapiens
ggtttccagggacgggggaagagggaactggggagatagcggctgatgggtacagagtttcgcaagacgaaaggcgttctagaaactaatggtggcggtgaagtgcacaacaacgtgagcac

SEQ ID NO: 162822 - DNA, 122 bp, Homo sapiens
accagcgctgcacccgcgggcctcagtcacgggaccggccagttgggaaacgtactcacgcggttgtgagccagctgggtcctgggggttcctcgtgttcctctcaaattctctctcctcct

SEQ ID NO: 162823 - DNA, 122 bp, Homo sapiens
gctgcctagattcttccccttcccggagtggtcatcatttgtcaaactttacctccacctcgcacatgcgggcggccgctgcagccgccctccctggcggcatgggctccgctcgctgatgg

SEQ ID NO: 162824 - DNA, 122 bp, Homo sapiens
aattacaggacaaatattcttcatgtcacagaagggtccatccagggggactcttttacacggaaatgtgcttagtaagttcatttaacatggaaacatgatgaacttcaaagtttgaatta

SEQ ID NO: 162825 - DNA, 122 bp, Homo sapiens
tgctgccccgaggccatgtaggccgtgcttaggcctctgtggacacactgctggggacggcgcctgagctctcagggggacgaggaacaccaccatgccccggggcttcacctggctgcgct

SEQ ID NO: 162826 - DNA, 122 bp, Homo sapiens
agcctaggtggctgagcaaggaggctggaagcctgagggggtggtcgggaggggcaggagcggccagcctacagcctcagccctcatggtggccacgtgaggaaaccgtgatctcccaactt

SEQ ID NO: 162827 - DNA, 122 bp, Homo sapiens
ggcccgttttcctaggagcccagggcgcttcacctgtctgcagtcagcccctttcttggacgtctcctcccctgagtttcctcctcataggcttgtccctgggagtgtgggcggcccctttc

SEQ ID NO: 162828 - DNA, 122 bp, Homo sapiens
cgggctctagggcccagcggccgggcgccacggcgggggtggagtgtagggttctagtgacgagcccgggcgaccctccccggcccgcgcgcggggagcggggagcgcggacggcggcggga

SEQ ID NO: 162829 - DNA, 122 bp, Homo sapiens
gggcagcgttccctgagctcgtctcttccagctgcccaaagatcaagggctgggtcaagtcggatgaaaacattccagcccccttctctgtcacccaacattcctggcaaaaacacacttcc

SEQ ID NO: 162830 - DNA, 122 bp, Homo sapiens
cgcacttccagtcctctgacagctgcaggtacccactggccgactgtgggtccagggtgacgctcactgtggggacaagggaaaaaaaaaaaaacagcatcactgttttgttttgtttttta

SEQ ID NO: 162831 - DNA, 122 bp, Homo sapiens
gttctgctttttctttcagtttccccctttctagggtgaggatggttctacacagccacccggagttccttagttgaaaggtgcgccctgctgtgacaggtattctttctttatgtttttct

SEQ ID NO: 162832 - DNA, 122 bp, Homo sapiens
ccctggaatttgtcatgacctgaatttgacacacttaagaaatcaccctggaatctgtcacgacctgaatttgacacacttaagaaatctgaaattccaatattccaccttctgaccacaac

SEQ ID NO: 162833 - DNA, 122 bp, Homo sapiens
accctctgggatccccacttttgtgcactaagcaaatagcagcaggaatgggacccacctcgactaccccagccgagatctaactatagtgtcccggctccctcacccgccacccctagaga

SEQ ID NO: 162834 - DNA, 122 bp, Homo sapiens
gggttcacagtgggttcacggggttcagacgtcagcctgctccgctgctgactcaggactcggtggtggcttttgcacacatggaggaaaaaaaaagaagaaaccttttttaaggctctttg

SEQ ID NO: 162835 - DNA, 122 bp, Homo sapiens
tgctgcccgtgacagccggggctggggccggggctggggccggggccggagcagaggtctcggccgaccccgggacccaggcgggccgcgcctccccgggggccaccagggtgacgggggcc

SEQ ID NO: 162836 - DNA, 122 bp, Homo sapiens
gctgtttcctcagttggcctgtggcctggcttccaggcttcggggctgctttcgtctgctcgcaatgctcagagggcgctgctctcctgcactcccaccttgccaagaccaggtgtgtggcg

SEQ ID NO: 162837 - DNA, 122 bp, Homo sapiens
tcaccccagacatactgactcaaaattcaggggtgaggtctcaccatctgtttcctaccacgccctccaggtgattctgatggacttcaaagtttgagagccatgtacctagcccatagtta

SEQ ID NO: 162838 - DNA, 122 bp, Homo sapiens
accttctcacctccgaggggttgaacccgagttgtctgttggggtttagggactcaggatcgggtctgagggacttcgacataagtgcgtggcggtagtgggtatacaggggaggggggccg

SEQ ID NO: 162839 - DNA, 122 bp, Homo sapiens
gagaggccttgatgaacacctcaggctctccattgggactcctgaaaatttacactctggcgttatgtttgaatcacatgtagatttaacttaaaagttagataatcctggagtcagttcag

SEQ ID NO: 162840 - DNA, 122 bp, Homo sapiens
gtcgggggtcaggccaggaaagccccttgggaagcccccggggagcagctggagcggggtcgccgggcggcgggaaggagtgggcgcctctatttaagcggcttccccgcggcctcgggaca

SEQ ID NO: 162841 - DNA, 122 bp, Homo sapiens
atagcggggtaactctcccttctcccctccctctctgccatttagagcccctcttacaggcgggcgcatgcacatataccctggcattcaggctgtgcctcgccctgccccacctaccacca

SEQ ID NO: 162842 - DNA, 122 bp, Homo sapiens
tgcaggttctgtgtgctcacagccttggcgcactcagagaccaccactgcctgcacctcccgtccgtcaccgcagccttccaagcagcggtgctgggcccaccccaggcctgctgtgccctc

SEQ ID NO: 162843 - DNA, 122 bp, Homo sapiens
cctcacctcccagacagggtggctgggcagagacgctcctcacctctcagacagggcggccggacagaggcgctcgcttcctagatggggcggccgggcagaggcgctccttacctcccaga

SEQ ID NO: 162844 - DNA, 122 bp, Homo sapiens
acctcaggtgatccacctgccttggcctcccaaagtgctgtgattacaggcgtgagccaccgtgcccagcctcttgggctttattttttagaggcaaagtctcactctgtcacccagtctgg

SEQ ID NO: 162845 - DNA, 122 bp, Homo sapiens
cttcctagcattctctgccatttcccagtgctaacggccctgaatgtagcttctcactatcgttattgtccctcttgggcactagcctggcagctgagctctctgaagcttatagcctttgg

SEQ ID NO: 162846 - DNA, 122 bp, Homo sapiens
ccaaggtcccgaggtctgggtgggaccgcaaggggttgcccctgtccccagagctgcgcccggccatcccggtgggagggctcggctggaagaagttgaccaccttgtggagcgactgcact

SEQ ID NO: 162847 - DNA, 122 bp, Homo sapiens
ggccgcccctgctggtgttccccccgacccccgtcacctgctcccccgcctccgacgagtcgcccctgacacccctggaggtgaagaagctgccagtcctggagaccaacctcaagtacccc

SEQ ID NO: 162848 - DNA, 122 bp, Homo sapiens
tgggaaccggccccgggggaggcgtggaaacgcggggcctgggactcgaccagcctctcccgtgcggatcgcaaaatctcggagctgaaacagcccgttgttcgcagcctccctctgacccg

SEQ ID NO: 162849 - DNA, 122 bp, Homo sapiens
ggtcgcgctgaagctctatcctagggcactggtcgcaagagcagatggtgccacacgctccgggcctacaaacttcagcggctgccgggcccgggcccctcgtcttttgttgggtttcctct

SEQ ID NO: 162850 - DNA, 122 bp, Homo sapiens
agcttcacccacccctgcatcctctttcttactcgccagcccctcccgcctgctccctcccgctctccaaacccaacctgcttcccgcgacggggccaggtgcagccaggagccaaggcctg

SEQ ID NO: 162851 - DNA, 122 bp, Homo sapiens
tgtgcaggagctgaactggaactcccaacaaccaaactgctgtcaaacgaaagaatctctcgtccagatagccattatctgataactgtcttgtctgcattttcactctctttcagagttgg

SEQ ID NO: 162852 - DNA, 122 bp, Homo sapiens
gaaaaagaaaaagaaggtgtcctgcttttccaacatcaagatcttcctggtgtccgagtgcgccctgatgctggcgcagggcacggtgggcgcctacctggtgagtccccgagccaactccg

SEQ ID NO: 162853 - DNA, 122 bp, Homo sapiens
ggcgcaagagactggggttgcactgggactccaggaaaggcttagctgttgacgaaggaccggggcggggccggggggcggggcgaaggccaggatctccaggtacccggaaccccaagggg

SEQ ID NO: 162854 - DNA, 122 bp, Homo sapiens
gttggttttgtttttcacttcacatattgtttcctaaacagctttccctgtttctacactcgtcataataattctcaatgactgcatgatattctaacatgtcagtgtatcataatttagct

SEQ ID NO: 162855 - DNA, 122 bp, Homo sapiens
cttcaaggctcatctggtgactggggcattcttttgggctgggatctgtggggccctccccggctagcaacttggctttcagaagtagatgcagccactgatgcagtccacgtgccaaacag

SEQ ID NO: 162856 - DNA, 122 bp, Homo sapiens
gcgagctaggactccaaactgcactcatcatgctgccccggccagaggcactgctaatttcgatgagtataattaaaagattccctccattgagagccgcctgcttcttggagaagcccagc

SEQ ID NO: 162857 - DNA, 122 bp, Homo sapiens
ccaagcccgcgtgcagcccacctcgtggggtgtctcctgaatcccaatccaggaatcaggcgtggggaggtttatcccgaagctagaggcccaaggcctgaggagaagcaacacccctcctc

SEQ ID NO: 162858 - DNA, 122 bp, Homo sapiens
ctttctccaccctgcttacctcttatccaaaattatctcccccatatcacatatcatcctcggcctcaggaagaaatgtagggggaacatgacaactatgtataaacatttgataagctttg

SEQ ID NO: 162859 - DNA, 122 bp, Homo sapiens
ggcacagcctcacttgctgctggagggagtcaggtgagacttccccacacagggagtaggcggaacagcagcgtgggaagggggctggcactggagccagccggacccggttcaaatccagg

SEQ ID NO: 162860 - DNA, 122 bp, Homo sapiens
ggcagggactttgtttactgttaggtctcccagggcctgggaacctgcctggtgcataggcggctgtaggtaaaccttttagagtaaaggaatgctaaggctgtcgacttactgtgctttaa

SEQ ID NO: 162861 - DNA, 122 bp, Homo sapiens
taaccgccctcccttgctccatcttcgcaggacccgattggctgatggggcaaccgccaacggctgtggcgtttaaacccaagccgcagccgctgctgctcgccgagctcccggagctgggt

SEQ ID NO: 162862 - DNA, 122 bp, Homo sapiens
ctcctcggttacgagggctggtttcaggctcccgctcttttagagctgaggcccgtcgggcggagagcgtcttgcccctgcctacctggaggcacaggggtggctgctggtggacactaggg

SEQ ID NO: 162863 - DNA, 122 bp, Homo sapiens
aacttcgaatagtggtaagggctatgggggaaagtataatacagattaatgtgatagtgacgtgggttggggaatagctactttacacagggtggtcagggtagcctctcacagaaggttaa

SEQ ID NO: 162864 - DNA, 122 bp, Homo sapiens
aacccaacgaaaattaagaaaatgcaaacattgtaatagttatgtttgcagaacatcagtcgctcatcccaagcaaacgagctcgagctcagccacacattagcttgggcctccttccagtt

SEQ ID NO: 162865 - DNA, 122 bp, Homo sapiens
cgtctgtcctgtccgcggaaaccgtcgcctgagcttgctccacgttccagaccggggcagcgggttccccaaggctccatggccgtgggatgtgagggcctggagccttcccggagcaggat

SEQ ID NO: 162866 - DNA, 122 bp, Homo sapiens
tcccaccgttaggaaccgggacctcaatccgcagcacccggattccgagaacagaggcgtcggggccaaatgggctgaatctggtacctcactcccacgcccccgggtggacagcgaccctc

SEQ ID NO: 162867 - DNA, 122 bp, Homo sapiens
ttttaataaaattctggcaaaggcgggtctttggggctagcggagggccgggtctccggacggaaattgccgaagactagcggaggctccgaggccgggcgtggtggggctggaggggaggg

SEQ ID NO: 162868 - DNA, 122 bp, Homo sapiens
gccgctgccccttgggagtgggcttagccgttgtctacgccacccgcctgcttccacagacgggggaaacaaggatcaagaatggccaggcagctttctggggaccaccggcaccgccgcca

SEQ ID NO: 162869 - DNA, 122 bp, Homo sapiens
cgggggcggccccgggactgggggtggtgccctgggagctgtgtggccgcgtgcgcgctccgccggggtcctggaggcctctgggcgcgtgcgcgggcggtcgctacctgcggccgagccag

SEQ ID NO: 162870 - DNA, 122 bp, Homo sapiens
tatgtgaaaaggtgacagaaaagaaatcttcctaaaagagtcagccactgctctgtggaacgatgatcatttaaatgccacgtcgatttgaaacgtacaacaaagggactaacagttgagaa

SEQ ID NO: 162871 - DNA, 122 bp, Homo sapiens
agttttagtcgtggctgagtttaggtggccttgcttcaacgccatcagggttttgaacaccgtcggggggaagacgccagtctgctcaagtggtgcccaaaccagaaatgccagtgtcatgt

SEQ ID NO: 162872 - DNA, 122 bp, Homo sapiens
ggttcccaggcgcgcccttggcccgcgggaaaccactgcccggtcttggtccaggcggcccgtcctacggtccagggttcctatttccgagcctcagggacctcctttccccacggacccca

SEQ ID NO: 162873 - DNA, 122 bp, Homo sapiens
agagaaactaagtgaactgtaccgatgcggccacggcttgggcgggactaaggctgggaacgagccaccgattggtcagagctacgcggcgaatggcggagacgctgaggcgggtgctaacc

SEQ ID NO: 162874 - DNA, 122 bp, Homo sapiens
gcggggcggccggcatggagctcccggaggcgcggcagggtcaggagctcggtggcatggcggcggtggctgccccgatttcctccagctgccactccttgcttcgtgtccccggtccctag

SEQ ID NO: 162875 - DNA, 122 bp, Homo sapiens
ccaagagaggcagtgtcgttaaagctgcatatttacatggtagggtaggtggtgtgtccacgctcccagtgtaaggtccctagactgagccctcctgaccctgatgacagtcctgtggaaga

SEQ ID NO: 162876 - DNA, 122 bp, Homo sapiens
gacgacgcccctgtccccgtctccagtgggagcaggcagcgtgggcatctgggagagccccgatgcccgcgagggtccctgggcttctggccgctcttcatttcgcaggggctccgccggcc

SEQ ID NO: 162877 - DNA, 122 bp, Homo sapiens
atatcctgagtgattgcagtgtaaatgagctagacccttgcttgacgatattgaggggtgcgtatttcagggaagacaaacattgccacatgctacactatccactatcagtaagtgctggg

SEQ ID NO: 162878 - DNA, 122 bp, Homo sapiens
gggagaggaggcgatttcgaacgcggattggatcgtctgggcacccgtagttgggaacagcggaacgctggtcccggggactgagtaaggtgtctggatcggagggaggttcgggtgggcat

SEQ ID NO: 162879 - DNA, 122 bp, Homo sapiens
ctgggcccccaggaccagacccatggacaaatctgccatcaaagtgaaccaaagagaatgcgccacccaaggcgaggctctgcagtgggatgtgctcagggcaggtgggttctctgaacaac

SEQ ID NO: 162880 - DNA, 122 bp, Homo sapiens
tgaggacatctgaaattccgactttattttcctccagcacacctggcccctgccctccaacgggaactcccgactgcttgcttattttagctctcaattggtattaaaagcagactgtagtt

SEQ ID NO: 162881 - DNA, 122 bp, Homo sapiens
aacaagatgttgaataaacccccagggaagaagtgagtaattgtttcttaccttatagtgcggcgtacatagagcttaacagaaagccttgtgtcttagtccattcatgctgctataataac

SEQ ID NO: 162882 - DNA, 122 bp, Homo sapiens
gtgtgcggccacaagcctttccgaatgagtgacagcgggagcccatccctccaggagacgcgtgcagaatgaccaatgggatggatgggggtggatgggtaccagtctccgcagaggccggg

SEQ ID NO: 162883 - DNA, 122 bp, Homo sapiens
gctggcgaaagccctttgcagggtcctattgttattctgggctggagaaaatttccgcggcgagatttacagcgctggtatttgctcccggtcggccggaatgtcagttaacacaattttca

SEQ ID NO: 162884 - DNA, 122 bp, Homo sapiens
gaaagttctgccatttttcttcttctttgtgaacagcccttacctggtgagctggggaaacggggccacaggggagtcaggcctatgggggtgtccggacagaggggccgggtgcgtgagcc

SEQ ID NO: 162885 - DNA, 122 bp, Homo sapiens
gggccaaggacaggcagggagggaggccaggcctcgcttgcaccgcgggacgaggctgaccgggctgttctgtagactcaggaccgtggctccagaactcctgtgccaggcgggagggaagg

SEQ ID NO: 162886 - DNA, 122 bp, Homo sapiens
cccggcctggcagagacagggactttaccgagcggctcctgggcctggcggccagagaggcgagggagcgggagctaccgagggttcctccatcggcagggaaggtcctgagtcccccagac

SEQ ID NO: 162887 - DNA, 122 bp, Homo sapiens
ttagctgaacgggcctggaggaagcgtggcgggaaggctggatccccgccgcaggggctgcggggctgtggctgcctgcgggctgggcagggccgggcgcacgccctccttccgggtggccg

SEQ ID NO: 162888 - DNA, 122 bp, Homo sapiens
ggaaatttggacagagaccacaggcagatgcggtgccgtattcccacagggctggagcagcgggtgtgtttttctgtgatagcagcgcttcccggaaccagcagggtacacgttatttgacc

SEQ ID NO: 162889 - DNA, 122 bp, Homo sapiens
ggccgccgcggaacccacctgtgctgggcctcaggccttgcgccgccctcgggctgccgtcgccaaccccccccaaacagctcgccgccacgctccctcgccggggcaccgcccccggcacc

SEQ ID NO: 162890 - DNA, 122 bp, Homo sapiens
tgctttgctcgttccttctggacatcctcagagaaaagctgggaggtgtggagaccctctcgccgtgcacctgcacgtacagggagatttacaacagggaagacaccccccacagatcgccg

SEQ ID NO: 162891 - DNA, 122 bp, Homo sapiens
aagtaattattacaatataaattttacaagtttcaactaatgcagaaggtagacaatgctcggctatctgaccagagaagataacatgaaaataaaataattgatacacctggggaattgat

SEQ ID NO: 162892 - DNA, 122 bp, Homo sapiens
tgatcctcagtctcctcatctgtaaaataaggataagaatagacttgacttccacttcaacgagaagtgaaacgagatatcctaccactgcgctttgcacataaaggctctataaatgtcag

SEQ ID NO: 162893 - DNA, 122 bp, Homo sapiens
tccagccccgagctgtgaagacgggggcagaacgaggcgcccggatcacccttatccagccgcgggagaaccccgggccgggaggaagcggcgcctcaaggtcgtggcccgctcggcgacca

SEQ ID NO: 162894 - DNA, 122 bp, Homo sapiens
aagatcccttttgccacctatggcaggttctctatcctaaagagagcccctcacctggcacgggaatgtagactggtcagtgttatttcttcattttttccaggatgttgtgaacagagtgc

SEQ ID NO: 162895 - DNA, 122 bp, Homo sapiens
tgaactcctggcctgaggtgatccgtctggcttggccttccaaagtgctgggattacaggcgtgagccaccgcatccagcctgtacatgtacttttaaatgggaattatctgagggagtgag

SEQ ID NO: 162896 - DNA, 122 bp, Homo sapiens
ggcagaaaacagggtagtcagggtaaaagtctttatccttctggggctactcttatcaggcgaaagattacctttcccagtagccctgtagtagacttcccctcaaatctctttgccatata

SEQ ID NO: 162897 - DNA, 122 bp, Homo sapiens
ttgcctgattctttgctgtatcccagtgaactgaatgagctgctcccagacagttagaatcgcagccggggcccaggcggctgactgcacagtgaggagccaggccggacaggccccaggcg

SEQ ID NO: 162898 - DNA, 122 bp, Homo sapiens
agccggcggcgggggctggggcgggagtccacgcaggaccaggggcggtctccggcggggcggggcgggcggtggtcacgctccgggccagctggcgcgcggcggggcggggcatccgtgcg

SEQ ID NO: 162899 - DNA, 122 bp, Homo sapiens
agggatgaggatgttggataagcagctcagcatgttccccaacatgtaagggaatcaggtcgagttctacactctccttcttggtacacatcctcagaatgcaggaagtgcctgtgcttgct

SEQ ID NO: 162900 - DNA, 122 bp, Homo sapiens
ttgattttgccctctggattaaaaagaataaatggcgagcgattaaggcatatctacgggcgcccatactttggtggccactgaaagtcagcggcgcggactgccctgagggcgggaaaggg

SEQ ID NO: 162901 - DNA, 122 bp, Homo sapiens
tttgagcttcatgtgtccttgaaaccattgtcaaggctggttaaactaaatgtcagtcaccgctttccacctgccctgctgtatgccgttctctgcccatgcctcctcttccacctggagcc

SEQ ID NO: 162902 - DNA, 122 bp, Homo sapiens
agcaggtcggtggccgccagtccggtcaccagcaccgcgaaggccgaggggcgcgccggtcgccgtgcgctcaggatgcccagggccagcccgttgcccaccacaccggccacgaacatcag

SEQ ID NO: 162903 - DNA, 122 bp, Homo sapiens
tctccctcacaggacggccaggaggaccaaacccgggaatggcgggaaggtagagtcccccgacagccctcaatgtggtctgacctgaatccccccgtcaactgcactgccggcccctctct

SEQ ID NO: 162904 - DNA, 122 bp, Homo sapiens
gccccaccctctgctgacgtgagtctccatccctctgattcccgaggatgaaagaggaggcgcctcagtctcagacagggttggagtggaccccctatcctgaggacctgggttccctgagg

SEQ ID NO: 162905 - DNA, 122 bp, Homo sapiens
cggacgcttccaggcgactccgggaacatggaggcgggagtgagctcacatcctccctgccggccggggcgggccctgcgggggcggggccgggtggagagggcggggcctgggcgttggca

SEQ ID NO: 162906 - DNA, 122 bp, Homo sapiens
cgggactctggggtggtgggaagagtgccctacgggggacaggacccaccaggaggcctgcgcttccccttcaccgacacacgctgctcccgggccccactcgggccatctcagcccgctac

SEQ ID NO: 162907 - DNA, 122 bp, Homo sapiens
gaatgaatttgtcagcttcatcccttcatgctacacaaggaggcggtgttgctctgctctcgtgaagataccacatttgacacaacaactgcaattagctttctttagcccaatatcatcct

SEQ ID NO: 162908 - DNA, 122 bp, Homo sapiens
agccaccactaccgttaacagaatccggagaggccacggcgcaggcgcaacggaggtgagcgtgcttgcgggcggcaggccccaccccggaagcgcatgtctgcgttccggccgcagccgtc

SEQ ID NO: 162909 - DNA, 122 bp, Homo sapiens
tcttggggggtactcatgtttgtgttgagaaccctgccacaggcgcgtcacaagtgtgtccgagtcgaaagctttgccatgagtcctggggctcctgagcccactcgggacagggacgcagt

SEQ ID NO: 162910 - DNA, 122 bp, Homo sapiens
ccttatgggaattaccttggcatccctgtgatacaatggcctccattaaaacactaccttcgtgcctgggacctcacaccctggaaaagccaaacagacttggttcccttctgtgcttagtg

SEQ ID NO: 162911 - DNA, 122 bp, Homo sapiens
gctgcagctaaaactcatacaactgccttggctgggcgaagtccttcccctgcttcagggcgacgcggggagggagatgcgcctttcagtgaaccaggtactaccagcacacaacggcctag

SEQ ID NO: 162912 - DNA, 122 bp, Homo sapiens
acctccgctatttcagctgccagaggggaggcaaggtgtggggaagttttccttcccgggcgaagaagctctgcggaactgtcattttccggaactggatgcttgcttcctggcggggttct

SEQ ID NO: 162913 - DNA, 122 bp, Homo sapiens
gggaccgggaaaaacaaactccaagtcgagtttaacagccgaaacgctccgtgcctaggccggcggacaagaaggagacagaacagatcccttggctccctcgcagcgatcgatcccgttta

SEQ ID NO: 162914 - DNA, 122 bp, Homo sapiens
ggagaggaggccccggggccctaggagcctatttgccctgggaggacttgggctggccctcgtccccggccccatcctcatcctcgttttccggctcctccaagatggtctggagcccctcc

SEQ ID NO: 162915 - DNA, 122 bp, Homo sapiens
ctagtaggtggtgggggcgcagcggctgtccccactcagtcctggtggggtcgcacgtaacggtcctgagctatgcataagccgtttgaccacgcatggagaattttaccacccagagacac

SEQ ID NO: 162916 - DNA, 122 bp, Homo sapiens
ggcccacgccttcttccgcgaggagcgcggtgtgcacgtggaactagcggaggaggacgacggcgagaagccgggcctcaagctctggctgcgcatggaggacgcgcggcgcggggggcgcc

SEQ ID NO: 162917 - DNA, 122 bp, Homo sapiens
tgccggtttaagctgctaagtttgtcatacaagaatagaaaaaccaacctcacaacaacccgatgggtacagatgtactatgactgcaggtcagtacagatgatgaaggagaggcagaaatg

SEQ ID NO: 162918 - DNA, 122 bp, Homo sapiens
ccactgaactacttgctgactgctatgtgacagaatgacatcacaccaggccttaagatacgcttgagatacaagggtaaagaagacacaaggcttgttttcaaggagcttataatcttatg

SEQ ID NO: 162919 - DNA, 122 bp, Homo sapiens
tggaggaggaggtgggagcctgccacagctgctgtgagggggcgcggcccagactatgggcgcaagggtggggtcttgtggccgggatgggaggggggccggaggcgaggcctgcggcgagt

SEQ ID NO: 162920 - DNA, 122 bp, Homo sapiens
tatcctccagcctatgcctccctacgtgctgggattacaggcgtgagccaccgcgccttgcggaattggaattacatatgtttaaatagtcgagaaatgaagtgaagcattgagccaggatt

SEQ ID NO: 162921 - DNA, 122 bp, Homo sapiens
ccgggcgggagtgcaggggacgtgagggcgcaagggccgggacatggggcccgccagccccgctgctcgcggtctaagtcgccgcccgggccagccgccgctgccgctgctgctgccactat

SEQ ID NO: 162922 - DNA, 122 bp, Homo sapiens
ggactgcaacctggacagagccgcctccctctgcttgcccaggtactccttccgccgcctcgatacacgggacgttgagcacaacgtatctcctggctacaatttcaggtgggcgtgagctt

SEQ ID NO: 162923 - DNA, 122 bp, Homo sapiens
agtgatccacccgtctcagcctcccaaagtgctgggattacaggtgtaagccactgtgcccggccccaaatgaaattttatgggatgccccagtgaataaaacagagaaggggtgcagctct

SEQ ID NO: 162924 - DNA, 122 bp, Homo sapiens
ttgtcccccttcccctctggaacataagctccacaaaggcagggacctgggaatcccgttcgcctgcattccccagcaaacgcctaacgaacccaatggcccaggactgaaaattcctttcc

SEQ ID NO: 162925 - DNA, 122 bp, Homo sapiens
aaaacagcttcgcagagctacccatgagccatccccgacccgtgttcttttcccgtgacccgggtaaccatcttgggaggctctaacaccctaggcggtcagtgggcagcaggcaccacacc

SEQ ID NO: 162926 - DNA, 122 bp, Homo sapiens
tgaaccatgaaggccaaatcagaaagctacttctcacaccaaggctgggaggaactcattcgttgccgccgctcccccccgccgcccccgccctccccaggtttactcctgctcttcctcat

SEQ ID NO: 162927 - DNA, 122 bp, Homo sapiens
gccggcgcgggcgcattcctcaggcagctcctcgccaggcacgggcaggaagttgaggtccggggggaaggtgcgcagcaggtcgaggatgtagtggcgcccgtcgttgccaatgatgccct

SEQ ID NO: 162928 - DNA, 122 bp, Homo sapiens
catggatctcattaagctgttgccagaagctgtcagggtcactggttgtaaagacagggccgaaccctgggaaggggaaaggaggttaagataagtgaggaaagagctcccctcattcttac

SEQ ID NO: 162929 - DNA, 122 bp, Homo sapiens
gggtttttgccatgcgggccaggctggtctggaactcctgacctcaagtgatccgcccaccggacctcccaaactgctgggatgacaggtgtgagctgccacgccgggccagccttgtgcat

SEQ ID NO: 162930 - DNA, 122 bp, Homo sapiens
tccctaagcctgccaggaagcttccagtaaccacttcctgactcctagcatgacacacttcgggccttccaaggttgacgatctaaggcccttacacagcgccagacacgcgcaggcaggga

SEQ ID NO: 162931 - DNA, 122 bp, Homo sapiens
cttcaatgccgtgtccttttctcgcctggggctttgtgcaaagaatcccttcagccctcacgacaccgccttgctcccgcctctcctccctctctgctggcgccaccgcagcccccacgccc

SEQ ID NO: 162932 - DNA, 122 bp, Homo sapiens
tactagtgaccgaagcggcagtgcagggcggcaagattcagagcggcgtatctcaagctccggccatagccctcttccccattacttttgctttcggctccggtaagaatcagacgatcaaa

SEQ ID NO: 162933 - DNA, 122 bp, Homo sapiens
aaagtttagaccccgaaaccatgattccattgccaagcacaaagcaatgcaagagcccaacgtcggtcgccgcaccgcgatcctgacaaagcctgtatggagccagaacaaataagatgtta

SEQ ID NO: 162934 - DNA, 122 bp, Homo sapiens
gttagaagaacccaattccaactggtgaccatcacattctcagtcttgatgtccccatgacgaactccagatttgtgtgcttggtccacagctgtcaggatctggaaagcaatccagcgctt

SEQ ID NO: 162935 - DNA, 122 bp, Homo sapiens
cgtgcggggggtccctgctttggtccagtttcatgtttgtgtgtggataccttcagagggcggtaactgatgaaaagaaaataaaactgggtgaagcgttcgagcgagaggggctaccatct

SEQ ID NO: 162936 - DNA, 122 bp, Homo sapiens
cacagacacactacgagagtatcagagagagacgtaaagaggaggacagggtacgaggggcggggagaaacagagaccaagagagggcaaggaagagagatacacagagacagtgagagact

SEQ ID NO: 162937 - DNA, 122 bp, Homo sapiens
gagctggagtctgcgtcccaggaacgggaggcgctggtggaggcgctggcagcagcgggccgggagcggaggcagtgggagcgtgaggggtccaggctgcgggcccagtcggaggccgccga

SEQ ID NO: 162938 - DNA, 122 bp, Homo sapiens
aactttcccctcgactgagcaacaagataatgcccagaaattcagccccatcatgagctccgactggcggagggtgttttcaggccgtaggcgccccctccttgggacttggctgcggcctc

SEQ ID NO: 162939 - DNA, 122 bp, Homo sapiens
gtggctcccgaggaggccgtgaagtagacagagctggagccagtggagtcactcctctcccggacaaacggaaaccttcgccgccgagccactctctggttctcttccatgtggcatctgga

SEQ ID NO: 162940 - DNA, 122 bp, Homo sapiens
acatgctaatgagtccccgtggctgtgcccatcttgtggcctggacctgggctggtggctcggtcatggggatgatggtgacaatgatggtttttcacctcactttctgtgggtctaatgtg

SEQ ID NO: 162941 - DNA, 122 bp, Homo sapiens
tgtgccagttccttgaagagcaggcgcagactcaaggctgttgcttccgcccttactccccgccgctcgtccctgggcggggcgaaggctgggctgggggaagaggcgtggcggcgctgtgc

SEQ ID NO: 162942 - DNA, 122 bp, Homo sapiens
ggctgaaaaggaaggggaagtgcatgtctcccgcctcccagcctttgtctgagcaggggccgagccacgaccctccctctcgccaggggagcgcgcggggtgctccagccccccacgggtgc

SEQ ID NO: 162943 - DNA, 122 bp, Homo sapiens
acgcccacttccaaggcctccctggggatagtggtggctccttccgaggccctcctcaaccgtccacagtcctaggagggggcttgagaacaaagtacagctggctcaggacaaggttttgt

SEQ ID NO: 162944 - DNA, 122 bp, Homo sapiens
cgtctgccgagaagcgtctcgtgtcgaatttggcccccgcgccgagccggcgaaagagatcgtggacgtccatctttacccagaaagcgccacagttctacggcgcctgcgcagactacttc

SEQ ID NO: 162945 - DNA, 122 bp, Homo sapiens
actttgaacacacatttaagactactaaacgctgtgatgctgtgatgtctctcagacctgcgacatcagcaaactggatcctctttcttagtagaaaacacagggatcaaatttcggtttaa

SEQ ID NO: 162946 - DNA, 122 bp, Homo sapiens
acctcaagtgatccacctgcctcggcctcccaaagtgctgggattacaggcaggagccaccgggcccggcgctagttcctactttaaaaacagttgaagagtacatgtataaatggttacat

SEQ ID NO: 162947 - DNA, 122 bp, Homo sapiens
acaatgcctagggagatctttgtccagaaaggtgagttcagagagcctgctgtctgaccacgcttccccttccctgggcgcagatccttaaaagtgttaagtgaacactgctgagttcactt

SEQ ID NO: 162948 - DNA, 122 bp, Homo sapiens
ccatcgcctgtctccaggtggaacaaaccctctcacgacagaggctcagcccccagcatgcggaggggccaggcttaaccaccccagccctgcccgctccccctgcccgggacagactgtcc

SEQ ID NO: 162949 - DNA, 122 bp, Homo sapiens
ctgcctgagctttacgcacaggaaaggacagtggctcttcactctcccggccgcatcactcggcacctaattccgccaggctcccagaggggcggttgcagctacagcctagcacgccgcgt

SEQ ID NO: 162950 - DNA, 122 bp, Homo sapiens
tctgccctcacgccgctgaaccgcgagggtctcccgctcctcaggcttgcggctcggccgcgaagtgtgtcaggtgtgcatcctgggtgctcctttgtgctctgtcctacggtgacacaggc

SEQ ID NO: 162951 - DNA, 122 bp, Homo sapiens
gctcagcaatgcggccgctgagctagccatcaaggagcaggcgctggccaagctcaagggcgacctgaagcgggagcagggccgggtccgcgagcagctggaggagcggcaacacagcgagg

SEQ ID NO: 162952 - DNA, 122 bp, Homo sapiens
ttttcgcgcccaatagtgtttataaaaagcgccgcctttcccgttcactttgtggttgctcgtagtgagttgcgctcgctatgtctggacgtggcaagcagggaggcaaagcccgcgctaag

SEQ ID NO: 162953 - DNA, 122 bp, Homo sapiens
agaagcgctgtcctggggtggggaagtggccacacccctacaggaggacctttgtgatgacgcagccgtccctgtcaccctcggggtcgtccttgagcggcggcggcgcagcgggggcccag

SEQ ID NO: 162954 - DNA, 122 bp, Homo sapiens
cagacacggtcgcctccacatccaggtctttgtgctcctcgcttgcctgttccttttccacgcattttccaggataactgtgactccaggtaagcaaggtggggtagcagggctggtgactt

SEQ ID NO: 162955 - DNA, 122 bp, Homo sapiens
attccaaccagcccctcctccaagtctagggactccaagccccgcacacgcaccgtatcccgggttccaggtgtcctggcttccttactacgcctcctttggtcagagctggtcacagcaga

SEQ ID NO: 162956 - DNA, 122 bp, Homo sapiens
actaccctcttaacaattcctaagtacaattatccccccatatccaagaaaaattggttccgggacaccctgtgaattccaaaatttggggaatgttcaagtaccttattaaaaaaagtgta

SEQ ID NO: 162957 - DNA, 122 bp, Homo sapiens
ccttcagagacactggggtgtcagcaaggtctcttataaatatctgccaagggctcctgacgcaaagggcttcctggacccaggggaaggttctggttttaaacagtcccacccatccagtg

SEQ ID NO: 162958 - DNA, 122 bp, Homo sapiens
cctcctttgccttcgcccagcctgcgggacggccaggtgctcccgggacctcaggcctcgcgtctgatgcctgtctctgttcttgagacccgtctgggagtcctctgtccagcccccaactc

SEQ ID NO: 162959 - DNA, 122 bp, Homo sapiens
ctgggggtgcgggggtggggggacaggccgattccagaccgcccaggagtggggtgggggcgtcctttggtcccagcacagtccccaaagggtagtcagtctcctaggctaccaccgggacc

SEQ ID NO: 162960 - DNA, 122 bp, Homo sapiens
acccaggggcattgcttctacacactggcacccaggggcattgcttctgctttccaggtgcggaaggcccaccaaggtcacagaatgagtccatggcggcacttaggttagaatctaggtct

SEQ ID NO: 162961 - DNA, 122 bp, Homo sapiens
tgtgggaagcactgtgacgggagaagccgctcgcacctcacgcatgcgcattggctgggccgactcgctctccgctcctggcaggcaggctgcgtcctctttaaataatgccaccgctgcgc

SEQ ID NO: 162962 - DNA, 122 bp, Homo sapiens
ggagtactttgagctcgaacggaggccatccgtgtaaagggccagattctgtcaatggatcgatccccccgatattgatggaaacccctgagtgcacgcccgtgctgggcgcaggggaaaca

SEQ ID NO: 162963 - DNA, 122 bp, Homo sapiens
ctgaaactcggagcgagcgcggtgcagccggagcggcgctcggggggaggggggagcgggcggaaaaggccgactcagccgctccccaacctcatatagagggcacgtccctctacgtcatc

SEQ ID NO: 162964 - DNA, 122 bp, Homo sapiens
atggagagaagtgaacaacagccactgatgggctgggaagatgaaggtcaaccattcattcgtcggcaatcaagaactgatagtggaatattttatgaagattctggctactctcagctctc

SEQ ID NO: 162965 - DNA, 122 bp, Homo sapiens
ctgagatggcacctgcgtgagtgtcgcagtttccacaccgtgagctgctgagacggcacccgcgtgagtgtcgcagtttccacaccgtgagctgctgagacggcacccgcgtgagtgtcgca

SEQ ID NO: 162966 - DNA, 122 bp, Homo sapiens
tggctgcgggcccagcacttgcctgacggccttgacctggccgccctcaaggccgcagcccgagggctcttcctgctactgcgccactgggaccaaaacctgcagctacacctgctgtgcta

SEQ ID NO: 162967 - DNA, 122 bp, Homo sapiens
cttctaccctgacacccaggcaatcctgcgctcttccgccccggcaccctggcacccccgcgctcttccgccccggcagccgggcaaccccgcgctcttccgccccggcacccgggcaatcc

SEQ ID NO: 162968 - DNA, 122 bp, Homo sapiens
gggcctagatgtagcctctgttcctcctggacataggaaggtcccaagcttagtatcccacgtggcctttacaaatcctatggctggccttctcattccacaagggccctggaaagggttga

SEQ ID NO: 162969 - DNA, 122 bp, Homo sapiens
tagagtgccctgcggaggcggggtcttctccccaggctgaggcctgtggtgtgggatgaccgattttatttcctgctacaggatttttctgtggctgctaccttggctttcgtttctcctcc

SEQ ID NO: 162970 - DNA, 122 bp, Homo sapiens
tttctgctctctggaagaatttgtgtgggactggtgctgtttcttccttagatgttttgacgtaagtagtgattaccctttagtttaaatgcttaatctgttattatttgtatacttcttgg

SEQ ID NO: 162971 - DNA, 122 bp, Homo sapiens
agaaggaaggtctcgataaggagccattcagggtccattacctgctggatggttgtacaacggcctcaatttctcgggcagcatcagctccactttatcgaggagccggtggtaggtggccc

SEQ ID NO: 162972 - DNA, 122 bp, Homo sapiens
agtgaaggctgatgaacccttgaatgggagacctatgtactttcttccacccagttcattcgtagcactttgttaatagaaccctcgaaaccttctgcctgatgtaacaatatgtgtatggt

SEQ ID NO: 162973 - DNA, 122 bp, Homo sapiens
aatgctgaaaggctgtttataggaggtaccccacttagagccattctgctgtgaaactaccgggtactacgaagtacctggagaaattgctcattgctaggtggtgtaggcttctgcatatt

SEQ ID NO: 162974 - DNA, 122 bp, Homo sapiens
cctgggccagtcatgctcatacacatatgttccttccttgtccaggcacctccattcagccgccttcttactggggggcctggaggaggtacttttcttccctttgatttggtactttccca

SEQ ID NO: 162975 - DNA, 122 bp, Homo sapiens
gttaataattgctcctaaagattataattttaaaagtcacaggaggagacaaattgctcacggtcatgccagttgctggttgtacactcgaacgaagactgacaagtatcctcatcatgatg

SEQ ID NO: 162976 - DNA, 122 bp, Homo sapiens
ttacttttaggatcgttgggctgtgcgttaggggaggaggtggtcctcagcgtcctggaacgacaccacctgctccaatttcccgtctggaggttctggtcgaggctccgaactcgggttcc

SEQ ID NO: 162977 - DNA, 122 bp, Homo sapiens
cagagatggggagagaagaaaaccagccagcgccccgcagaagggctgcgtgaggagtcccggcggcctgagtccccccagcctgcagagcccacagccctgtcccccggctggtatgtcct

SEQ ID NO: 162978 - DNA, 122 bp, Homo sapiens
atgtccaaggttctgggctattgttctgtaaatctgtgatcctattctgttatttaattccgtgactctgtgttgacatagacgtgacggtgtccctggggcatttactcctaggtgagctt

SEQ ID NO: 162979 - DNA, 122 bp, Homo sapiens
ccgcccgcccacttgaaaagtgatacaaccagggcgcttcagcccctccttccccgaccccggaacaactcgacgttccagcagggagcagagttcttccctgacttttgtatcccccttaa

SEQ ID NO: 162980 - DNA, 122 bp, Homo sapiens
ccgcaacctggtcccacagccggctttcgaggctggatccctaccccaggacccccagcgcgatcctcaacctggctccccactcggccttccagtcccgggattcccaaccgggatcatct

SEQ ID NO: 162981 - DNA, 122 bp, Homo sapiens
cgaggtcgtggccgctcggggcaggaaagcaggctcctgtctctccaggatccagcctcccgatcaccgcgctagtcctcgccctgcctgggcttccccagagacgggagcttgggtggggg

SEQ ID NO: 162982 - DNA, 122 bp, Homo sapiens
tggggagtgggtgctgctctcctgtgagggggcgtgggcttgagcgtcagtagtggcactcgggatggtggcatcgctttacatcctagggagggactctcttaccacccgggattaaggca

SEQ ID NO: 162983 - DNA, 122 bp, Homo sapiens
gcgcctggcacacgcccgcggctggcacacgcgggctcccccgcgcaccctctccggggccgaccagctcgggccgctggcacagtcacgcgcgtccacacatcacccccgcacccacacgc

SEQ ID NO: 162984 - DNA, 122 bp, Homo sapiens
agggatcaggttaaaattctttgcatgcagaatgaagaatgaggaggtgctgcgatcgaacgactgcgaggaaacacacccgctctcatggcattcccagtaaactgagaagacgtgattaa

SEQ ID NO: 162985 - DNA, 122 bp, Homo sapiens
gagcgatgccaggtgactctggggaggctcacctgctcaggtgagtagaatcaaccctgtcggccactggagccactggggtagccggggccgtggagctctgcacagcccgggggaggccg

SEQ ID NO: 162986 - DNA, 122 bp, Homo sapiens
aacagaaaagctgccttctgccatgaggacacattgatatgaaagtgagaggtactggtacgcttcttcacgctaacagacctgtgaggatgtatgactctaaaccacacggcctacagttc

SEQ ID NO: 162987 - DNA, 122 bp, Homo sapiens
ggaagcagcgacgcgcggacgcagaggcggcggctcgggctccagctggggcagcagcggcggccaccagcactagcggctggggctccgcccatccccaaggccgcgaccgccgcgatgcc

SEQ ID NO: 162988 - DNA, 122 bp, Homo sapiens
tgaggttcacacaaggagaccccagggggcctgggtccggctccctcaccccacgctccacgatgccagctcagccacccaccttggaaccgtgcagatggacagcagggagggtcggggct

SEQ ID NO: 162989 - DNA, 122 bp, Homo sapiens
aagggcccactcctcttccctgaagccagaccgtggcttatgtctgcacgctgctgggttcgtccctttccttttgtgacatggggttgcctcattccccatgacaccacccctctgcatga

SEQ ID NO: 162990 - DNA, 122 bp, Homo sapiens
gctgcgtcctggggctccagtagctggcgcgggctggggtgggctgggctggcctgggaccgcctcgatgggacaggctcgggtttccctggcgctgtttctccctcctgcggtctacggcg

SEQ ID NO: 162991 - DNA, 122 bp, Homo sapiens
gaggcactctccagctgcaccccgggttctggttgtgcctctgggagcctaggcacaacccggggaatggaggactacggcaggacctctctagggacactgcctcgccgctccccccaccc

SEQ ID NO: 162992 - DNA, 122 bp, Homo sapiens
ttttcatgtaatcctcaatgcaatgcgaagttagaaatattacaatacccattttacagacggggaagtggaggtttagagaggtcctgtggctggcttgttgatcgtcacacaaatggcag

SEQ ID NO: 162993 - DNA, 122 bp, Homo sapiens
ttcaaatgatttgcatacattatgcaaataggtagaactgcccgaagaatgcctacgctgcgtggtgcggacgaaacgcttcccggggcctttggattggtctgtctagccacctcatttgc

SEQ ID NO: 162994 - DNA, 122 bp, Homo sapiens
tcttagagttgccatagataataaggttaaaaatggtcagttccctatgctaaattgtagcggaggattgtcagatgtaagtagcttcatcccagcatagtattttttctccttaaactgga

SEQ ID NO: 162995 - DNA, 122 bp, Homo sapiens
ttctcaatctagaaactctgcccttccattctgaacagtttgctagagttttgttggtttcgtgtgtgtgtatttttatttttatttatttattttggagatggagtctcgttgtcacccag

SEQ ID NO: 162996 - DNA, 122 bp, Homo sapiens
tatgggtcacggcgcctgcaaaactccctgacacagaaacgccgcggggcctgcgcgtgtcgggaacaatcctgcgcctgatgggaagcgacagctccgccccgcctccctccactcctgcc

SEQ ID NO: 162997 - DNA, 122 bp, Homo sapiens
tgggtgggaagccagcttggcaagccgggtgtgaatgaacaggaatgagcaggagacgctcgctgatgccttctgtgatgtgtttcttccccagctccagaagaaaaggaagtcattaaagg

SEQ ID NO: 162998 - DNA, 122 bp, Homo sapiens
aatgcctctcctcctccaggcctttgctcaaatacctctcccttggagaagcccttctaacgcctctcctcctccaggcctttgctcaaatacctccccctcggagaagcccttctgccccc

SEQ ID NO: 162999 - DNA, 122 bp, Homo sapiens
cgagccaagggaccctggccgcgccgctctgcgctcagccttcctctcgcgtcttcattgcgcctgggcccgggtgggcatgcctcgcccactccagctgcaagaaccgcaggcggctcggg

SEQ ID NO: 163000 - DNA, 122 bp, Homo sapiens
tccaaggctattcagtgacagagccgggactggaactcttgactctgtcttcaaagcctgcgctgcatctgtgattaatcgcaatgcaaacacatacccacgcacgcatgccaattaagggt

SEQ ID NO: 163001 - DNA, 122 bp, Homo sapiens
gggctccaaatccacgccccggagcacagagagttggctaactcctagcggggcctggggcgcccacatccacggcagagccacctgtgagcctgcagagcagcaacgggatgcgcgcaacc

SEQ ID NO: 163002 - DNA, 122 bp, Homo sapiens
aagcaggcaccggcgctgggggaccagggtcagggggctctcttcagagacggcagagcacgaggctggggcaggaggtgtcgggggcttgagaggcgcaggggagcagggggggagagtgg

SEQ ID NO: 163003 - DNA, 122 bp, Homo sapiens
gattgccaatgcggagctgtgaatggggtcagggtggggctgaggcagtaccagatcttccgcgcctagaggaggttagaagaaaagagcgtcgaacggccacagcctttttccgaaagaga

SEQ ID NO: 163004 - DNA, 122 bp, Homo sapiens
gccgctgggagaagcaggccagagccttccagagcctccgcccgaggacctgacaaagagcgcctcctcctccgcagccgggttcccggtggccttaccagcctccagcagcagaagcaacg

SEQ ID NO: 163005 - DNA, 122 bp, Homo sapiens
gtacccaagctgcctgcaagagtctttgtgtgtttgtatttaaactgtgagactaacaggcgtgagatagactactcaggcaatagggaaagaaactggggagctctaggaactcctgcaga

SEQ ID NO: 163006 - DNA, 122 bp, Homo sapiens
gtgtgtgcttgcatgtgaggcggcaaaaacagcgcgctgcagggccggcgcggtggctcacgcctgtaatcccagcactttgggaggcggaggcgggtggatcacgaggtcaggatatcgag

SEQ ID NO: 163007 - DNA, 122 bp, Homo sapiens
tctgagcactcgcttcgcgtcgcggggtctccctcctgttgctttcctaaccctgccctccggggcgttaataaagtcttagcaagcgtcccacacagtgagcctcgcgtgccttggtttta

SEQ ID NO: 163008 - DNA, 122 bp, Homo sapiens
ctccaactcggacaatggcgcctccaactcgaacaatgccacctccaacttggacaatgtcgcctccacctcagacaatggcgcctccagcttggacgatgccgcctccaagtcagacgatg

SEQ ID NO: 163009 - DNA, 122 bp, Homo sapiens
gaggaggcctcaggagacttacaatcatggcagaaggggaagcaaacacgttctctttcacgtgatggcacgaaggagaaacgccaagccaaagggggaaaagccccctataaaaccatcag

SEQ ID NO: 163010 - DNA, 122 bp, Homo sapiens
ggattacagagtgagccacctccccggctcaacttgttgactttcatgatgacctgatgacgaggaactgctgtcatccccatcttacagatgaggaagctgaggctcggaggcggaggggg

SEQ ID NO: 163011 - DNA, 122 bp, Homo sapiens
catgagttcaagttaacccactcctgttttgggtgagagatactaagcagaaaagccacacggggtccctgtgagtaaggcattccatttcaagagcctagtgtttgcacaggccagtagct

SEQ ID NO: 163012 - DNA, 122 bp, Homo sapiens
tgggggtgctccactggccctgactacagatgctccgggagctgcccaccagatggaagtcggggtcacaccggaaatccacccgggctccgtccagagctgggaggtccccacccgtcagg

SEQ ID NO: 163013 - DNA, 122 bp, Homo sapiens
ttctactccgcagacccacttcgaggctcggaggccccgtgggctaccagcccacggctgcgaaccacacaggaagaggcctggccgcatcccctcgtccccaagaccacttgctgaccctg

SEQ ID NO: 163014 - DNA, 122 bp, Homo sapiens
gctcataggcctcacagtggggcccagaggtgaccaggtgcacaggaggaatgaggggtccgcaacagggctggcaggagctcacagtccccacagtaggggccagaggctgaatgggcaag

SEQ ID NO: 163015 - DNA, 122 bp, Homo sapiens
tcttccgcgtcgctacgtgacgtcagtgcgagcgaccccgggccggctgcgtggagctggcgctgcctctcctgaagccgaggcgctaacttgagtgaagaggtctataggctttttcactt

SEQ ID NO: 163016 - DNA, 122 bp, Homo sapiens
ggtgacgtcatcggggcgccggaggcccggggcgcctgggaatttgaagcaaacaggcagcgcgcgacaatggcggtcgctcgtgcagctttggggccattggtgacgggtctgtacgacgt

SEQ ID NO: 163017 - DNA, 122 bp, Homo sapiens
gtggaaaatattcagaccactttaaattttccattgtgtacccattttctctttgttttccgaatctctgacgcccatgcacaagccattcagtgtccatcttaaacagtaaaactgctggt

SEQ ID NO: 163018 - DNA, 122 bp, Homo sapiens
cgtggtcttgggcgtagctacgaggtggttggtgggctccagggcctgcgtgcccctcgacgtgagcgatgattggcgatgaaggataacagatcgccttctcggccactcagtggcagggg

SEQ ID NO: 163019 - DNA, 122 bp, Homo sapiens
tcggggcacatggttcgcatttcagtttaagtaactttctgctgtgatgaaactaacccgcgtggcctcttcccgtcctgtgtgccgcaggctctgcgccgggagacccacgagtgctccat

SEQ ID NO: 163020 - DNA, 122 bp, Homo sapiens
acaggttgcagggtttaggatgaagtccgggaggaaagggcagagtggtccttaggaggccgttaggacaggtaaggtaatgggtctcaaagggagtggccgaaatgcaatggaaaaagaga

SEQ ID NO: 163021 - DNA, 122 bp, Homo sapiens
tgccttagactcccccgatgcccctggggagggccgggggtgcggccaggcctgcgtgggcggaggggtcctgtccaggtggtcccgggcctggagacctgctcctgcccctccaggcctcg

SEQ ID NO: 163022 - DNA, 122 bp, Homo sapiens
tgatgatcaaaaaatgggataattagacaatcaaatgtgttttctagactgcgggagcaacgtcaacagaggcaaacaccatcttgaaaaggggtagattctaagggaagaaaataaataag

SEQ ID NO: 163023 - DNA, 122 bp, Homo sapiens
gcttttgtgcgtttcctagtgcacgggctttgggcgcgctggtgcccggaagcacgtgggcgaggccgtcggtccccgaaagacgctcagagtgcgcccagcctgcccttctgcgtacgcaa

SEQ ID NO: 163024 - DNA, 122 bp, Homo sapiens
agtatgtcagtggcaggtctttctccttgagaccacagcagacccccagccctgaggatgcgaggcaggtgggttggatgagagggatctggatgtctggtctcaggctgctcctctaaggg

SEQ ID NO: 163025 - DNA, 122 bp, Homo sapiens
atctgtaactggttgagattaattagttataagcaacagtgcactcagaccagcctagcacggactttgacttcagacaaatagatgcaaattgaggaagaccataaaataattagagtgag

SEQ ID NO: 163026 - DNA, 122 bp, Homo sapiens
cttgggtgcccccgtaaccccgagcagcgcgttccgcagcaggttgtgtagcactacgtccgggtcggtcacctcctcaacccccagcagctgttgctgctcgtgccgctggccgcactcgg

SEQ ID NO: 163027 - DNA, 122 bp, Homo sapiens
actttcctccttcctctcattacccctttccctgtctcaggaagaccggaggagagcgagcgcctggatgctgttgcaactctttccattgaaccctcgcatctaatttgttccctttattg

SEQ ID NO: 163028 - DNA, 122 bp, Homo sapiens
gaggggtgcgccgggcggtgcgcgcacttccctgggctcagctccgtacccggtcgctcgcggtggccagagcccagtctctctaggccaggagtggcgtccggctgcatccccgcgccctc

SEQ ID NO: 163029 - DNA, 122 bp, Homo sapiens
ctgtttcaattatacctcgtgatagagctggacagttgctattctggtgtcaggtttaatcgtacagacaggaaacatggaccccagatgtgatgatggcattgcctttgtgctgcctcaca

SEQ ID NO: 163030 - DNA, 122 bp, Homo sapiens
gctaaatttcagccaggtggttgtcttgcgagaggggcttgtgtgtggaagctagcaggccgactgaaaaaagtggggggagacaagaggcttccttcatctggaaatccgcaggatcttac

SEQ ID NO: 163031 - DNA, 122 bp, Homo sapiens
gccagagcagaagacagttggcagttatttcgcaaccttcatctgttcctggaagatacccgtagcctgccttccttcttgacaggctgatttaggggtgctccccaagaagatcaggactg

SEQ ID NO: 163032 - DNA, 122 bp, Homo sapiens
cgcctcaccagcagggggatggccgagcttccagcttgacctctgggctgtcagcctggccgcgccaaggccgcctctgcatggtggctgcacactgcgtgtgatcagtggggaaacctgta

SEQ ID NO: 163033 - DNA, 122 bp, Homo sapiens
cgcggaggccgagcgcggagtcccgcacggccgcgcccctgtgcacctggcccccgcccccgagacgtcccattggccggcgccctagcctggtcccgcccaagtggaccccgcccccgccc

SEQ ID NO: 163034 - DNA, 122 bp, Homo sapiens
tggctcacctgatggctactaattggccccctgatgtgaagaccccatccttggatccctcgggtcctgagcaggggcatgctgaggtcccaactgtccccttctcaccaacccacgccccc

SEQ ID NO: 163035 - DNA, 122 bp, Homo sapiens
gcttaataaaaccaagacagccagcacctcctgcaaactaaatccacgttctgttcgatgcgtagacgttattctgggtcggctccaggtgtccaagagttgttcagtgtgtgttcattagg

SEQ ID NO: 163036 - DNA, 122 bp, Homo sapiens
tgccgccgctgctgcacctcttagtcttcttgtcgcttggtcgcgagtgaaggagcaactcgccatggtgatgcacgatggttttaaggtgagcgaggaggagggggaattcaggaaaggga

SEQ ID NO: 163037 - DNA, 122 bp, Homo sapiens
cactcaatacgagttagctgctgttattgttcaaaattcttcactaagtatttgctgttacgaactgtgtattagtctgttttgtgttgctataaaggaatatctgaggctgggtaattaat

SEQ ID NO: 163038 - DNA, 122 bp, Homo sapiens
acccaccgggaggaacgaacaactccagacgcgcggccttaagagctgtaacactcaccgcgaaagtctgcagcttcactcctaaagccagcgagaccacgaacccaccaggaggaacgaac

SEQ ID NO: 163039 - DNA, 122 bp, Homo sapiens
gtttgcacgtctcctgccccagcagcaagggggcggggggttgaaagggagtgcggagggcggtagcagaaagcaggctctatccacagcaggccctcactcagagtaaaacccgagttctc

SEQ ID NO: 163040 - DNA, 122 bp, Homo sapiens
gcaaccttccataacttgtagccatccatagcgaaagctctcagagctacccccattctccgcaggaggtcacctagccttatattttccttttaagtatgtttgctgaaatgtttgtgagc

SEQ ID NO: 163041 - DNA, 122 bp, Homo sapiens
gctaagtggccgacttgtggttccccagtgtgtctgggctgtttcctacacacttgtattcgccctgcattcgcggcgtattcctttgatcccaggtggacttttatccgccgttcattttg

SEQ ID NO: 163042 - DNA, 122 bp, Homo sapiens
gagatcaggaggtgaaaggaagatggccttggagaagctctttgcaggtctccatcttctcgtgttccaggtggatcacaaggcatttggccaagactcaggccacaggagaagcagtgcca

SEQ ID NO: 163043 - DNA, 122 bp, Homo sapiens
gtccttccggaagctgccgaatcttagaagtcgcgccactgttgtggcgatggaagaaggcgaagctctacagaaaccattttggttgagggaagagtggttttaaagttaatttggaaagg

SEQ ID NO: 163044 - DNA, 122 bp, Homo sapiens
atctccttggaggtgcctccagtcactgaaaaccttgctcaagagcctatgtgtccttttcgctctatttctctgcatagggtccaacgctgtcccttgccccctttgttcaccaatatagg

SEQ ID NO: 163045 - DNA, 122 bp, Homo sapiens
ggactatattaccaagggggtggagccagatgcctgagggggtgtggccagagcctggggcgtgtcacagccgaaggggcagggcggcagcagcaggcgtctaagtaacttcagcgcctgcg

SEQ ID NO: 163046 - DNA, 122 bp, Homo sapiens
cccaccaagcctgtcttccccttcgtggtttctccagccccaccctcacaccgtcctcctcgatctgcgcggcttcctgcctccatgccactccagactgcaccggcatggcactgactgcc

SEQ ID NO: 163047 - DNA, 122 bp, Homo sapiens
caaccacttgtcatcaatacctgagctctagttcatacaagggagactcgagagctggaccgcagtttgaggtgaaaggaccagaggagtagaggcaccgagagccaaatctgaggccgaat

SEQ ID NO: 163048 - DNA, 122 bp, Homo sapiens
tgcaggaggaagggatcaaccacaaagcactttttggaagtggcacctatgaaatacacacgtcttgtttaatgatctaaaaacatttcagtcgttttaaattttcatacttatgtttcaac

SEQ ID NO: 163049 - DNA, 122 bp, Homo sapiens
gctgtcacgtgttaagagcgagcccgccctgccgagcgcctgctggccccacctcgttttcgtccaattctgggaggggcagcgagcaaatccacgccccgcccagttctgggcttggtgaa

SEQ ID NO: 163050 - DNA, 122 bp, Homo sapiens
ttctggcattccattccaagcgagggtcagcatgcagggtataatttcatactatgcgaccgtaaagagctacagggcttatttttgaagtgaaatgtcacagggtctttcattctctttca

SEQ ID NO: 163051 - DNA, 122 bp, Homo sapiens
catcgtcatggagatcgtcaactgtcatggcatggatgggagcgcaatttagcctggaaacgggattacaatgaagcgtgaggtctttttgaagtcatttggccggctctcttggttgtaac

SEQ ID NO: 163052 - DNA, 122 bp, Homo sapiens
tgccacctggcagacaagggccacacagctgaacccggggtatgctggctagctttaccacgcgtgaagactcactttaaagccacgtccccaatccttaccagggggctgatcagtgccgt

SEQ ID NO: 163053 - DNA, 122 bp, Homo sapiens
atggtctgtcttacccaggagtcagtgtgacgatggcttcggctccgctgagtctgatggcgcataagggcccgtcccagcgacccaccggccggggctctcctccggcccatggcaacacg

SEQ ID NO: 163054 - DNA, 122 bp, Homo sapiens
agcatccaacacagcaacaccggacccctggctagaataacccacacagtgatacagatgcgcaggaagctcaattccaaaacacacgccttccaccgggggcaaccccaacagggagccag

SEQ ID NO: 163055 - DNA, 122 bp, Homo sapiens
cagcatccccggtgcagggaagcacatccctccatcttcacggacgtgtccaaagccgcgcggcaatcagtgtggtgggaagaacagggcacttgaccacctgacgcacgaactgggagggc

SEQ ID NO: 163056 - DNA, 122 bp, Homo sapiens
gtccgaggaccgcgtcgcacagcagctttcaggacctggagagaaatcgaggtgggggtgcgtgaacgtggatgggcagaaataacatcttttgtactctaattggaacatagcatgtcctt

SEQ ID NO: 163057 - DNA, 122 bp, Homo sapiens
ctttcaacaacttttattgaacatgtagagagagaaggggaggttattaactctcctgctcgtactgggataaatgaagaagaaggcataaggacaataaacatggaactccactgcaaatg

SEQ ID NO: 163058 - DNA, 122 bp, Homo sapiens
cataaccagggactcgaggtccgccgtgggaatgatccacgaactgctcttggctctgagcgggtaccctgggtccattttcacctggaacaagcggagtggcctgcaggtactgtccggcg

SEQ ID NO: 163059 - DNA, 122 bp, Homo sapiens
cctgccatacccgctgccgctgctctgcatccccaattccggcgggcacgggtgcagctccgcgtagtgctcccgaatccccatcgccggccaggccccgcccctactgtccggtttccccg

SEQ ID NO: 163060 - DNA, 122 bp, Homo sapiens
acctagaagagcgttgtcctgtgacttacaaggaaagccgagaggctcaaagaggccgcgcgtctccctgagagccatcagtgggtgggagctgagctccgggaagtgtcaggggccgcgtg

SEQ ID NO: 163061 - DNA, 122 bp, Homo sapiens
tacaggtgagccactgcgcccggctcagattaactcttcttaaaaaaatcaatgaagggccgggccccgtggctcatgcctgtaatcccggcactttggaaggccaaggcaggtggatcatg

SEQ ID NO: 163062 - DNA, 122 bp, Homo sapiens
agggagcctggcgggcctcgaaggtggcgggtggaaacagagtccactcccacatgagcccggtgccaccaggctgttgagtggccacgagacggcagcgtccccacccccagggcagcacc

SEQ ID NO: 163063 - DNA, 122 bp, Homo sapiens
ttaaaaccacaacatattttgtattctccttgaatcactccgatcacagatttaatttttcgagtcatttctggagttgtgggaccacacagctagtttgcaatccctatagctttaagaga

SEQ ID NO: 163064 - DNA, 122 bp, Homo sapiens
cctcggcctgcggcggggtagagcgccggaaacggctttagcggctttgggaattgcgggcgaaagttaaacggagagatcttagagatttgcccgcaaatcgaaacaaaactgcccctact

SEQ ID NO: 163065 - DNA, 122 bp, Homo sapiens
ctttccggggacggtctcgggagtgccatggggtccctggggctcggatctcggcgcccgcgtctccgccgggggcgaccccacagccaggctccttcttcggcacagaacccgcctcggct

SEQ ID NO: 163066 - DNA, 122 bp, Homo sapiens
aggggaaatgaaacagaactctgtaactggtctatagctaccaatcatcatttaaccaatcggtaaaataatattgaacacccaacacttccttacattctgagaatatgttgatctatagt

SEQ ID NO: 163067 - DNA, 122 bp, Homo sapiens
gctggccattctggccaggccggaggtgttttccagcccggggctttgtgataactgggccgaaacccgagggtcctggagcgcggcgggtggcgggagcttgcggagcgcggcgcactcgg

SEQ ID NO: 163068 - DNA, 122 bp, Homo sapiens
gctggtgtctgctctatgctactattacaactcctaccttttgtggaaaatgcagtcaagcgttctaggactggtgctgtggtacatgtcaaacctgccctcacattccagaaagggaaccc

SEQ ID NO: 163069 - DNA, 122 bp, Homo sapiens
aatacatcttccccagaagctaaataagtggtactcattaaagctggcaacaatagacaccgaggactactagacaggggaggaaaggagtagggaaaggggtgaaaagtgactactgggta

SEQ ID NO: 163070 - DNA, 122 bp, Homo sapiens
cagccccgccccggctttgggacactgcgggtggtctgtttcccccagcttgggacaccccgttttctgaggcgtggaagagcgtcgccccggagtaagctgcccgtgccgcgccccgacag

SEQ ID NO: 163071 - DNA, 122 bp, Homo sapiens
gctcacgctcttcctctccctccatgaggtcacctctcacggcctccacagcctctcacacgcactgggcactttccagaccagaatccagcaactctgctgtctcccatttaggggctgct

SEQ ID NO: 163072 - DNA, 122 bp, Homo sapiens
ggttatctttgaggtaacacagtcagtcaaggtggccattataccccaggaagatgagttcggatatgtttagaatgactgcttttaggaactgtccccgagttgtgcttaactgtaaattg

SEQ ID NO: 163073 - DNA, 122 bp, Homo sapiens
gaacctaagtgcctaagtattaggacctggcccattcctgtggtcagcttcaagttgtaacgtatgtcagaggaaaacaataactgtaacttatcaaaagttcctacctgtagaattgatgg

SEQ ID NO: 163074 - DNA, 122 bp, Homo sapiens
tcttgcacactctttgggccagtctagaattcttcccatcagcatttcggtgatctggaccgccgccacccacactgcgctccagggcagaaaagacgccccatgcccgcgcctgggccggc

SEQ ID NO: 163075 - DNA, 122 bp, Homo sapiens
tcggtgtatgtggcccgcctggacggaaggctggcccgctgcatcgtccgcaaggacccgcgggcttttggctggcagctgctgcagtggctcctcatcgccctccctgctaccttcgtcaa

SEQ ID NO: 163076 - DNA, 122 bp, Homo sapiens
agcgcaggaatcatttctagatttttcccttaataccagcatctgactggctgccaccaacgtgtctccaaggaatgatgaaaactggggttggaggaagaaaatcccaatgcaccagggat

SEQ ID NO: 163077 - DNA, 122 bp, Homo sapiens
cagacaaagtcgtccgcacctgactctgctgggcgccgccatcttaaccggaaatacgcacggtttcacccggaagtgccaggcgtacccacccaacttcgtgccgtggttgcggctgaagc

SEQ ID NO: 163078 - DNA, 122 bp, Homo sapiens
tcagggggtaattgggtgtctgagagaaattgccagcggctggccggctcccccgggggccgcacaaagctgagctgtaactctaataaaggaaaggaaattctagaaaagggggctttgct

SEQ ID NO: 163079 - DNA, 122 bp, Homo sapiens
gctggccccatgacaaaacctgctcaaaaggaccagcctgcggcctggcgtggtggctcacgcctctaatccctgtgctattagaggctgaggtcaaggaatcacttgagatgagaagttcc

SEQ ID NO: 163080 - DNA, 122 bp, Homo sapiens
ctgccaggctcaccgaaatatacagacctaagcatttgcctgaactcaccatgtcccttacgtccagtgccaagcaatctgagatctagacattacccactgccagccccccactgcctctg

SEQ ID NO: 163081 - DNA, 122 bp, Homo sapiens
tttgttttgaaggaggaaaaaacccaatcaggaaactattttttcttccaaaaccaagaccgtggcgtttatctgccgacgttctgagcagtgggcctgagctgcagcgactcggcaggaag

SEQ ID NO: 163082 - DNA, 122 bp, Homo sapiens
gccgcttcctctcatcaatctgcatggtctccttgacatgaagaaggcgggcctcctctgcgttcagtgcctatagtgagaggaataaaatgtgtatcacagctctacatcagatgtctttt

SEQ ID NO: 163083 - DNA, 122 bp, Homo sapiens
cctaaggaaccctgtgcagggcctgcatcccggaaggcctccaccagcccgaacctggcccgtccgccctagatggggcaatcggcgtttctcccgggacagcctcctccctggcctcctgg

SEQ ID NO: 163084 - DNA, 122 bp, Homo sapiens
gctccacacggagaggggcgcagaccccgtgatagggctttacctggtacatcggcatggcgcaaccaaagcaagagagggtggcgcgtgccagacaccaacggtcggaaaccgccagacac

SEQ ID NO: 163085 - DNA, 122 bp, Homo sapiens
atgggagacgtggtcagtgggaagcgtccttccaccctaaggtgcgttgctccgggtggccgctggccaagtcgcctggggtgggggcggggctcccctgtcaggaccccccttccccagcg

SEQ ID NO: 163086 - DNA, 122 bp, Homo sapiens
gccgagccccctccgggccgcgcgggggcgcatgcgcggggccgcgggatcgatcggccgcgctcgggcctccccgcacccgcccgaccccgcccccccggctcgttgcccggcaacctctg

SEQ ID NO: 163087 - DNA, 122 bp, Homo sapiens
cacactcaccctttcggcatttggagcagctgaggcagtgtctgaggtggttttctgaagcggtgaaggagccgctctcacactccctgcagtccgtatcctgccccgggcctggacagtca

SEQ ID NO: 163088 - DNA, 122 bp, Homo sapiens
attggtaaaccatacttgatcctaaattcctgtacttcctcaggccatccgagcatgaaacgctgtcacctacccacatccgctggctgtgacgcttgtcaaagtgttctctatcggctgca

SEQ ID NO: 163089 - DNA, 122 bp, Homo sapiens
ttgaaaagcgatcggcgcagccggagccggcccccctttcgtgcaatcagcagggctggtcgcaaaaggtatatatgattaattgaaagataagctggaactatcaccgggaatgtcattaa

SEQ ID NO: 163090 - DNA, 122 bp, Homo sapiens
acacacacagagcccgtgggaagacaagaccgccggcgacagcccgccgcgctgcccgggcgctcaagccgccgctactcactagcgagtctgtcagtctgtctgcctggctgagtagagcg

SEQ ID NO: 163091 - DNA, 122 bp, Homo sapiens
ctgggtctgggtgtgcgaagtgggctctgctgatctggtggtcctgcgcggtaacggccacgcggcctggccgggagccacccctgagcagtgggtctcagactccacccatggctgctctt

SEQ ID NO: 163092 - DNA, 122 bp, Homo sapiens
tatgcaggtactcacatcaaatctgtttttaagttcaaaacagagccatatgtgggaagacgcatttctcttctgaagccttatctctgaagctgagcttggagtgaagtgacaggcggaac

SEQ ID NO: 163093 - DNA, 122 bp, Homo sapiens
ttgatttctccccagcatatccagctgccctccctctcttcctgcctcctggcaatgaagcgagcccccagggccatggtgtaactgtgaccctgcctctacctatgactaactcctgccac

SEQ ID NO: 163094 - DNA, 122 bp, Homo sapiens
cctgtcatgctgctgtttgcaaagcaggcccagggcctgggaaggacaggggctccagcacgcaggtggctatgctgtctggctactgggcggacactccccataacggacctttttggtga

SEQ ID NO: 163095 - DNA, 122 bp, Homo sapiens
agacagacccaccccccaatcctggctccctgcaggacgcggggccccccgagatcctggcggtgctcagcacgacgggcacctccgtgttcaccagtccaatgggcacggagcgtggcttt

SEQ ID NO: 163096 - DNA, 122 bp, Homo sapiens
cacgactgtggcttcaacgactaccttggtgttgcagagtccaaatctctctttctactccggctcatagcacagaattccagcgggccgtccgttcgcgtgtcaaacttcagccaggcact

SEQ ID NO: 163097 - DNA, 122 bp, Homo sapiens
cgaggcccgcgcgggcgcaggggcggcgcctgtctcctcccagagcatggctcagctgggcgcttgcagtgcccccgacgcgatcagcgatcctggagccccaggagctgttaattatttct

SEQ ID NO: 163098 - DNA, 122 bp, Homo sapiens
ttctcaggcttctactgagtccaaggtgcctcagggtctgaagacaaagctgcgtcctcccgctcaggagggcccgaggagcggacggcagaatcttggggcccagcccgtctgtccctcat

SEQ ID NO: 163099 - DNA, 122 bp, Homo sapiens
gcctcgggctgctttctcctgatagtgctgtcttatgtgtccatcgtctgttccatcctgcggatccacacctcagaggggaggcacagagcctttcagacctgtgcctcccactgcatcgt

SEQ ID NO: 163100 - DNA, 122 bp, Homo sapiens
ggtgtaggtggagtgtcctaagctctgggggtggggggacacgtttacgtgtctgcaaaccgctacattctgctaagacatctcaggagcccgccaagcccttagtgaaaagtttcttaagg

SEQ ID NO: 163101 - DNA, 122 bp, Homo sapiens
cagcaaaaagcaaacattcaaagcagtccctgcgggctcagcgtggcgaccatgagcgcacgtttgtgtgccggctgactctcctcctcgcataggaggaccagggcgcattggtggcggtg

SEQ ID NO: 163102 - DNA, 122 bp, Homo sapiens
acaggctgcacgcagagagcacccctgagctgagccgggacgtggggcgctctgtgtccacgctgtccctgcctgagagccaggctctcctcacgcccgtgaagagcagggctggcagagcc

SEQ ID NO: 163103 - DNA, 122 bp, Homo sapiens
ccaccagtctaacagcaggtgtatgtttagaatatttgtgctcggcacagtgtagggacacgggcaggtgtgatatggtttctgctcagaagcttcttatagtccaattgggtaaacgagac

SEQ ID NO: 163104 - DNA, 122 bp, Homo sapiens
aacgccaacacataaagcgctaacacgctcacactgccagcagcatactgctcagcattgcggctagtgagccaccatctgtcctaccattccccgtcactctaaagactggctgatggccg

SEQ ID NO: 163105 - DNA, 122 bp, Homo sapiens
caggctggagtgcagtggtgcaatctcggctcacaacagcatcaatctcctgggtttaaacgatccttccacctcatcctcccaagtagctgggaccacaggcatgcaccaccacacctgac

SEQ ID NO: 163106 - DNA, 122 bp, Homo sapiens
tgggaggcagaggggtaaaaagaaattaaaatacatggcgataagtcttgtgatcagaaccgagtctttgggcaccttgggggcaatcgagtgaacttcccagaggagcccagcagactggc

SEQ ID NO: 163107 - DNA, 122 bp, Homo sapiens
gctgtcggagccggaggactaggccgcttccgtattggggcggagatagcggcagacggacgtctgctacggccaatagaagctcggaagggggtgcggcgagcgctcagactctcagggaa

SEQ ID NO: 163108 - DNA, 122 bp, Homo sapiens
cagggtgactgggtcttggttgcaggcacctggcagggccttgcaaagggacagtgtacacggctagtgagatgcagagtaccattcctgggtaagcagaaagcagttttacaaggcaatca

SEQ ID NO: 163109 - DNA, 122 bp, Homo sapiens
atcccatgggtcccaagaatttcaagtggtttctctcttaaaggttaaaccttcgagagacgtccagggtaggtttgtggaagccagtgtctgtggatgtgtgaaggggggtgactattcac

SEQ ID NO: 163110 - DNA, 122 bp, Homo sapiens
ttaatatcatccagttcttgtcttttttttctacgcttcgtgctgaaacaagtttggcagcgttcttgacagttaacgagcccgatgcccctgtgtgagcaggagccatggatcgtgttttc

SEQ ID NO: 163111 - DNA, 122 bp, Homo sapiens
tttcttaaaagcaggtttttaaaggaaagaaggggacacggaggcagtgggctgctacaacgctgtcaggaatcctcattggtttacagaaataacattaattagggattggctatacattg

SEQ ID NO: 163112 - DNA, 122 bp, Homo sapiens
acaggagggaggggccaggcccgggaacccagcagatccgggaacccagccgagggacttcgaagactgtccctcatagggaaaccgaggacagatcttgcagcaagaacccccgaccccca

SEQ ID NO: 163113 - DNA, 122 bp, Homo sapiens
aacaggctgttaaaaaaagaaaaatacgtgccggtgacgcttcgtggagctggcgagcctcgcctgtcccgcgactgagcttgcggtcgccccgattctctagtagaccctggcgtggggca

SEQ ID NO: 163114 - DNA, 122 bp, Homo sapiens
gctcagagaggctgggggcctggccccttcaggaagagccaggccaagaccatccagtaacgagaacgcaaaccttctggcttcagagctctcactgaggaagaatctcaggcatggcagga

SEQ ID NO: 163115 - DNA, 122 bp, Homo sapiens
attggatccagggaggggagaaactggctggagccctccagggtgcagctgggagggagacgtacatcaattacttaattatccaaagcaggtggggagtaaagaccccacccggagagcaa

SEQ ID NO: 163116 - DNA, 122 bp, Homo sapiens
gacaggcttcacagccccggcggccctcagagccaggcacctcgcacccctcctcctcctcgagacccagtcccggcccgcccaccgttcccacgccgcccaataggcgccgacgctactca

SEQ ID NO: 163117 - DNA, 122 bp, Homo sapiens
tgaattcttctgtgcaagcagagagagggagcggcctgggagccaaggccgcaggtcggccgctccaccacaccagggatccccggcccacccgtggactccctgcctcgcacgccgcgccc

SEQ ID NO: 163118 - DNA, 122 bp, Homo sapiens
ccccgtggtgggggcttggggcccgcggactttgccccctggtggactttggtctgagcccgccgccctccgcgccactccaggccctggcgagcgcggcggcggcagcgctggggaacggc

SEQ ID NO: 163119 - DNA, 122 bp, Homo sapiens
gaaggacacatgtaccactgcagctgctggcaggggtagtgggggcggagccagcgacagcggcaggggaagtgctgccccactgggagacagaggagatggctccatgttgtggagggagg

SEQ ID NO: 163120 - DNA, 122 bp, Homo sapiens
catgatttaggatgagccaactagactgacagaatttacctcaacctgtaggtggattctcgagttagccggagtgtgtatctggggaaagcagcctagagtttcatgggtctctgaccaca

SEQ ID NO: 163121 - DNA, 122 bp, Homo sapiens
ggtagatttgctgttgatttcccagagtgggttcccatgcctcagtcttggtctaatgcgcgttacagtctgcctctcagcttctccagcagaaccaagggaaccctcctcacatcctatga

SEQ ID NO: 163122 - DNA, 122 bp, Homo sapiens
cctgcctgagacacgcagccaggacgcacaagtccaacccacgcacacacggcgactccacgctgcactgaccgaagggggcattgcctgtaatctgcacacgcctatctccttttgggtcg

SEQ ID NO: 163123 - DNA, 122 bp, Homo sapiens
aaacctcagtctttgctcttcaggcctctcagctgattgtgtgaggcccactcacatcatcgaggatgggtctctactttatttcaagtccactggttgtagatgccaaccacagctacaaa

SEQ ID NO: 163124 - DNA, 122 bp, Homo sapiens
tctgaagatggagaccacagggtgggcggatttaatgcctgtgcagtgagctgtggagtccgtggtgacgtgggccgtcctccagaaggagccctgggcatccgccacgctgaggctccctg

SEQ ID NO: 163125 - DNA, 122 bp, Homo sapiens
gcggcgggaggggacgggcgggacctccgcggacagccccgggtgcggaccagcgggcagcggccggcgagaccctccctggatccgcccagagcttaccggaccctgcgcgcccccgtccc

SEQ ID NO: 163126 - DNA, 122 bp, Homo sapiens
tacacttttatgtacccttaaaatatgttcactttaaaaaatgtaaatagttaacaggggcgattgaaagctaactgcccaacaaaggaaacaattctccgtgtgtcccccttctctgctca

SEQ ID NO: 163127 - DNA, 122 bp, Homo sapiens
aatcctgccggctcgggttgatttgtaaacaatgggtgacgtcgcgccgggccctaccaccgcaccggggcgggggtgacgcgcgagcaggcacgggggcaaagggcggcgcgggcggtgac

SEQ ID NO: 163128 - DNA, 122 bp, Homo sapiens
ttctccaaagacgatgcaatgtttataaaactcaggatgagcttgactcacgataacagacggagcgatcaggggaggcaatgttagctgttatgggctaatttatatcccccaccaaccac

SEQ ID NO: 163129 - DNA, 122 bp, Homo sapiens
gcttcctagtggtcttggacaaaaggcagtcttcatgggcagagtctccagcccacctgccggcctcaccaccccccgcagctcttcactctgcatcccaaacacattagccttctccctgc

SEQ ID NO: 163130 - DNA, 122 bp, Homo sapiens
agtcatggacttatttgtgaaaaggtttagtttcttccaagtagtcgcctccttcctccccgctcctctccttgggtcttgatcccttggaaaaagctcatgtccggaacaaatatatgaga

SEQ ID NO: 163131 - DNA, 122 bp, Homo sapiens
gaggtagcttagcagtgcagtcttggcagtttcactccagggacaggtctgttccagagtcgaggctggtccagaaagatggaactagctgctcagaggggcaagctagaaagtagtaaaat

SEQ ID NO: 163132 - DNA, 122 bp, Homo sapiens
gcctggctccaagcctgagagcctatccacctggctcttctgcacattacgtgccaaagacgcctggaggggagtgagcatctgtctagggtggccctgggctgggctctgaaagacaaata

SEQ ID NO: 163133 - DNA, 122 bp, Homo sapiens
cttcccgccactgcgtcggccaatcaggaggcaggcgcccgcccccggcacggcctcctgcggccccgcaactcccaaatgccgagttttcgcgggaaaaaaatcagagcagctggcagcgc

SEQ ID NO: 163134 - DNA, 122 bp, Homo sapiens
tgccgcgcctgcgcacggggtcaagcggggccatagtggaggcgcctcgcctgcacaaagcgcacctgcggacggtggcgctgtggggatagggaggtcccgcgctccctgaccgatgtagg

SEQ ID NO: 163135 - DNA, 122 bp, Homo sapiens
aaagttctaacttttatactcagcatcatgttttagcaactatatcttacaaagtctgaccgacttaatcatatcaactttaatttatgagtcaatgaagtatatttcaggaggaaacatca

SEQ ID NO: 163136 - DNA, 122 bp, Homo sapiens
ttgtggtttggcccagccaaccccacacattccactgacttgggccacactatccaggcccgacatgaccagatctgcttcccgttcaggtttcctgagcgcagtgcttctgagaacagccc

SEQ ID NO: 163137 - DNA, 122 bp, Homo sapiens
cgtcctttccccctgaactgcgatagcactttggtcgtgcatcaagtgagcccacagacgcgggtctctttccaggccccgttacgttctgctggtctggtgctccgccttgcggcgttagt

SEQ ID NO: 163138 - DNA, 122 bp, Homo sapiens
gtttccccgcctgccccggcggcctcgcgcgctcgcggagggctccacttccgccggcagcgtggccacgcctcctctgggctgtccctcggctcctgggcggggccttctgccgcgccact

SEQ ID NO: 163139 - DNA, 122 bp, Homo sapiens
ccccgagcgctggcagcaggcagcaggcagcaggcgggcgcgctgtggctccgcgccgcgcggtccgggctctgttcattcatgattggtactcggccctccgagacccagcccgagcgcag

SEQ ID NO: 163140 - DNA, 122 bp, Homo sapiens
tgggatggaagggacgggagggctgtgggcacttgatctttatcacagccctcagcctcccggcctcctgccagctcccatagcccctggccaggatcctccaagaattcagagcctgagga

SEQ ID NO: 163141 - DNA, 122 bp, Homo sapiens
ccatcgtccgtatttcctgctgggtgaggtcgttggacacagagcactgggtgcgcagcccgagcaggctgccgatggagatgcctatgaacttctggagctgcccgcactgctgcagcacc

SEQ ID NO: 163142 - DNA, 122 bp, Homo sapiens
gggaaggagggaggggagagcggtggcggcggctgcgccgggctgtgagtctctcgccgccggaggaagatgaggctgaagattgggttcatcttacgcagtttgctggtggtgggaagctt

SEQ ID NO: 163143 - DNA, 122 bp, Homo sapiens
aaggaagcctgtctgcccttgctgggctgtggtgggacagagaatggtggtggtggggatcgttatcttgtctgcaaagacgtggcaggatgtggttgacctgaacttcctgtgaatcaagg

SEQ ID NO: 163144 - DNA, 122 bp, Homo sapiens
ggcgagaaggacctgcttccatcagattcacacttgggagaggggcccggcctccaggagcgccaggcagaaagggcacccattaggaagaagaacacagaggccatgggagtgaaaagttt

SEQ ID NO: 163145 - DNA, 122 bp, Homo sapiens
aggaggcagtgcgtggaggaagctcctagccccggagttcgcggtccagggatcttctgtcggtaccagaccggttggcaggtggacacgtgagaaacatttcaggagtgtcagagccacag

SEQ ID NO: 163146 - DNA, 122 bp, Homo sapiens
cgaaactgagagccgaaactaacctggtcagcgctgctctggaaagagatgtggtccctccggcttgccttgcagataaatcctcgcctgcgcggttctacctggagaaggcagcctgacct

SEQ ID NO: 163147 - DNA, 122 bp, Homo sapiens
cgccccagggactcggaacgcccccgcgagtgtgacgcgtcctgcctcccctgcagctcgcggacactcgcacttgcaaggcctggccagcactcttgggcccgccccccgacagtgcgggg

SEQ ID NO: 163148 - DNA, 122 bp, Homo sapiens
accatggggacatttccaagtctgcaggatgccttcctgctccaactgggtccagagccccggagacccctgcagccacagaattaaactgccaagtgcattcccaccacatctcaggccag

SEQ ID NO: 163149 - DNA, 122 bp, Homo sapiens
ccaaattgtgtgcaacattacaaaccaaaacagatctgttttcctactgacctcaatttgcggccaccattactgttgctgagaaaattcttggctctgcatggcagagcgggggctcctac

SEQ ID NO: 163150 - DNA, 122 bp, Homo sapiens
tccacaaccacctgccccatacccttttcagctctggggagatggtggctcctgtggggtcggggattgggggtctccgttcctttcatcctccagcctcgtgggggagtcaagtctccgta

SEQ ID NO: 163151 - DNA, 122 bp, Homo sapiens
ggtgtcataaacaaaacttcctacgatgcagatttgtttactgattacccatgacgataacgacgactactaagacaataacactctccagtcccacctttattgcttttggtaacaataaa

SEQ ID NO: 163152 - DNA, 122 bp, Homo sapiens
cagcagctcccagaagccgtaaagctatcccagagcgaggcaccatacgtaaatcttccgcgtcgctacgtgacgtcagtgcgagcgaccccgggccggctgcgtggagctggcgctgcctc

SEQ ID NO: 163153 - DNA, 122 bp, Homo sapiens
gtgtgagcctctgcgcctggctaaatctgtgtatttaaggaaagaaatcctcagggtttccgggccaggggagacctgctgccacccaggccacccaagccacaggccacgcagatggagcc

SEQ ID NO: 163154 - DNA, 122 bp, Homo sapiens
cgcggcggcaggtgggcgcgctctcgcgggcgggggtccggccgggccgcgcgcctcccccggaactcggccgtgccattcccatgatgcccagccacgggcacggcttccggagtgcggcc

SEQ ID NO: 163155 - DNA, 122 bp, Homo sapiens
gagggaggtcttcagaacggctcttctcagagaggggcgttccccggggatgctgtgcagcgtctccctggggctctgggccaagtggctgcaagactccgggggctggtccagacctttgc

SEQ ID NO: 163156 - DNA, 122 bp, Homo sapiens
agagtgtttgggagaggcaggaagtgggagccacacagtttctggatggggagatcatttcgataggtttatcttgaatagggggataccttgaacccaataccccaaggttagaggtttag

SEQ ID NO: 163157 - DNA, 122 bp, Homo sapiens
agtggagaggaaccaccaggacccataggaaggagatgttctcacagctgtggatgagcccggggaagttacagggacacacaaaggaatccaccaacccactctcccacaaggctccagtg

SEQ ID NO: 163158 - DNA, 122 bp, Homo sapiens
gggttgttgatgtcttagaagcatctagaagagtcaagatgatgagtttggttttatatgcgcccctgagacctctggaggacaaggtgtgtccagcagaatctgtgtggcagctctggatt

SEQ ID NO: 163159 - DNA, 122 bp, Homo sapiens
ttttcttttttaaagaacttagtgttttagtattggcttctattgcattgggtagtgagccgcttcagctctgtaacactaactctggtagatagcatcaggatgaaattgaattgtagggc

SEQ ID NO: 163160 - DNA, 122 bp, Homo sapiens
ggcaaaccgcccccatctgacagcagcagtgaggagcatgcagcctccggcctctgcacacggcgcctcctcaccagcttcggcttcagctggtcctcactgtcgctgtgccccagccggcc

SEQ ID NO: 163161 - DNA, 122 bp, Homo sapiens
atgtcctttcataaaagctgccacccatgctctcttattgagacagtcctcatcccaaaacgatagtgaagtgggacttgtgtccctgccacatcaccccaaaaactgacacatggacatgg

SEQ ID NO: 163162 - DNA, 122 bp, Homo sapiens
ctctgcagggaaacagttggctgcctgagggctcattcatggctgtttcccctggaagggcggcgcaggagcccggttctgcagccctgccgacgccgtgtcacagacacagctcttcatgg

SEQ ID NO: 163163 - DNA, 122 bp, Homo sapiens
caacgcgggctaagctatgcgtccagaggcatgaatttaaatcgcgatttattttcctctcgctctgcacttgcatgaacctcagtttcttaatcttcagcaatggggaggggggctttggg

SEQ ID NO: 163164 - DNA, 122 bp, Homo sapiens
gaaagggcccggacgaggaaggcagggccgcggaccctccctgtcgctcgcggcccggggcgcctcctccccatggcagatctcagcacgttaagatgcgaaggctgattgtcaccaagcgg

SEQ ID NO: 163165 - DNA, 122 bp, Homo sapiens
tgttgtttagttaagggaaaatcacctgttgagagtttcaggttgcaatcctgtaactagcgttacaatgccaggagccctacgagggtaaatctaagagaagcaaagataaggtatttgct

SEQ ID NO: 163166 - DNA, 122 bp, Homo sapiens
ggcagaaccgagaacccggggtgcgcaagggtcccggggttatgctgggcacccggggcacgcaagggtcccaggggtgcgcggcgctccaggaggcgcgcagtgggacaagtgcggcggaa

SEQ ID NO: 163167 - DNA, 122 bp, Homo sapiens
gtggggagacggagcttaacaggaatattttccagcagtgagcaggggctgtatgggacgcgggaggagctcagaggaggcgcggagagtgcccgaggttgggtgagtgcctagaggggaga

SEQ ID NO: 163168 - DNA, 122 bp, Homo sapiens
cgcgcccattggccgccgccgctctccatgcaaataagccgcctgtcgggggcgcgggcgcgcagacagaagcccgcccagtaggggccgccccccgccccgccccccacctccaaccccga

SEQ ID NO: 163169 - DNA, 122 bp, Homo sapiens
acttagaaacccgcagaagtttcagaatatacatcacttcggtaagatttcagcagctaccgcaaacagaagagcaagcagaaagggagatttgcaagagttttaatgagacgaggagggag

SEQ ID NO: 163170 - DNA, 122 bp, Homo sapiens
agccagcagcagtgccatcatcccgtgcccacccacacgccccatccagggtgcccgagacgagcccatctcggactgcacggcctcctgactgatggcagctcaaggacacccgggtcctt

SEQ ID NO: 163171 - DNA, 122 bp, Homo sapiens
cgttgtggcccttgagggtgccacgaagggtcatctgctcagtcatggcggcggcgagagcgtgtgtcgctgcagcgacgaggatggcactggatggcttagagaaactagcaccacaacct

SEQ ID NO: 163172 - DNA, 122 bp, Homo sapiens
tgctgagcatgctcctctgcatgtcctctaccttggccataagcctctggtactgctcctcggccacctgcaagtcgttgttggacgacgccaggctggcattttttgcctccagcatgttc

SEQ ID NO: 163173 - DNA, 122 bp, Homo sapiens
aataggggaagagtttgtggttcccaggggacctgcagcaggcagcaggatccacaggatcgggaggggaggagtcaggagacactgccgaagaatgggacttggagttggggaaatgcggt

SEQ ID NO: 163174 - DNA, 122 bp, Homo sapiens
cctcccggggatgatggtgccacaagggcagccctcccattagaaccccggggtgggcaacgcgagccacgggccgggaaggacgcccaccagccggagtcctctgagcacggtcccgcagg

SEQ ID NO: 163175 - DNA, 122 bp, Homo sapiens
caccagtggtgcgcgcggcgctcgcctcggctccggcgcccagcggctctgctccagtctcgcccttcccggagcgcccagatcagatgcggttacagcgcactagcttcctacttgagacc

SEQ ID NO: 163176 - DNA, 122 bp, Homo sapiens
ctcaatctcctgacctcatgatccactcgcctcggcctcccaaagtgctgggattacaggcgtgagccaccacgcccggcctggccagggtggtcttgaactcccgacctcaggtgatccac

SEQ ID NO: 163177 - DNA, 122 bp, Homo sapiens
ttggcgctcgcggaggaggaaggcggggccgtgaaataaggcccgacgggccccggggcgcgtgcgcggaccgacactgtcagctcctaacgccgcaggttcctcctggtccccgaggcccc

SEQ ID NO: 163178 - DNA, 122 bp, Homo sapiens
tcagcctttctctaagatggtccccagaacgcccagaactccctgtccccgcccccaaaccgagtatgcccctgccccctacctgcacggccttgaagatggcaatgatgccagtaggccag

SEQ ID NO: 163179 - DNA, 122 bp, Homo sapiens
catggtcaccctatccctagaccatatgctgtcttgctcggcatccttcttaacactttccgtttttttctgcccctcagactacaccttgtacttctctacatagtgagataaatgataat

SEQ ID NO: 163180 - DNA, 122 bp, Homo sapiens
gcccttccagcacccattccctgcctcgccagcaggcaccggggccccacttggcgtttgcggatttcagctgaatgggaggcgacacaatgagacaagagcaaaccgtttctcagcgttct

SEQ ID NO: 163181 - DNA, 122 bp, Homo sapiens
cggctccgtgggcgcagccaatggggaagaggagcgcttcgccgctcctccggactctcccgcttcctgcaatgcggtttatcttcctacttgggagcccaccggctgaggccagggggcaa

SEQ ID NO: 163182 - DNA, 122 bp, Homo sapiens
cccacggctctgtcgcagctactcagccctgccttgcagcgtggaggtagctgcagaccacgcctaagtggatggtcatggctgtgttccaacaaacctttatttacaacagcagacagtgg

SEQ ID NO: 163183 - DNA, 122 bp, Homo sapiens
cccaaaaagaaaacccatattcactaactagtcactctccacttccttttcctgcattaacgtacttcctgtctctacaaatgtatctcttctagacatttaatgtaaatgaaattatgcaa

SEQ ID NO: 163184 - DNA, 122 bp, Homo sapiens
cagcaccgcgcccgggccaggacccgccatggcgaagtggcggaggtgagcacctagaggcgaccctgcccggggaacagctggcgcgaccgcggacagagcttcccaccacgcccttcccc

SEQ ID NO: 163185 - DNA, 122 bp, Homo sapiens
aatctccaggattaactccagcagagaggagcttaacaggtggcgaagaagtgaccatcccgcctcgtgtctgtgtctgtccctcagggccagcggcccaggccagcggctccagggccagc

SEQ ID NO: 163186 - DNA, 122 bp, Homo sapiens
ctttaacaaatactaatacctgggtcccaatccctgagattctgatttaaggtgaaacctcggcattagaatttttaaatgctatacccagataactggtaaaacatttccgcgtgtgtctg

SEQ ID NO: 163187 - DNA, 122 bp, Homo sapiens
ctggccttgccccacacacatttggttctagctcctttgcttgggtcttcatccatgcagcgaattccttagccacaggtgtccctctgctctctaactcacagcgagctcgctgcccaaag

SEQ ID NO: 163188 - DNA, 122 bp, Homo sapiens
accccaagagtacgtgcccctcagagactgcagcggctgctgagaggagcacatccagggcggctactgccccaaggggtcgccacctctgggactggcatccgttcaggggccctcggcaa

SEQ ID NO: 163189 - DNA, 122 bp, Homo sapiens
aagtccgcccactgggcctcaggctatggcaggagcaggatttacgaggccctgcctgcccgggaggccacgaatcttcccagcctgcagtactggtgtcacccaggcaggtcagggctggt

SEQ ID NO: 163190 - DNA, 122 bp, Homo sapiens
gccccgcgggcctctccgctcgccccgccgcccacctgccaggggaaggagcgcagtgcacgcgccgccaggaagcggcgctccaaactctgcagcaagagttcggtccccgcgttctcctc

SEQ ID NO: 163191 - DNA, 122 bp, Homo sapiens
cgagcgcccttctccagtcccggcttggaactgaactgtgtgagcacgggtcctggaacccgggcccagaaccggcgagcccaggtctgagcccagagctcagcggtcagcctcgtaggccc

SEQ ID NO: 163192 - DNA, 122 bp, Homo sapiens
aggctgaagtgattagcatcccgagaagccagtcggaggccgggcaaggcggagggcgctcgcggtaggagtgccggtcggggctgcttcagctccggcccaatggggctggggcgagggag

SEQ ID NO: 163193 - DNA, 122 bp, Homo sapiens
ctgactgagtcagcaccctgtgtgcaccataaaccccctccttctgttaactgactaatccggatctgcatttgctcctcagcacatagctcattgccacagcagagtccaacgcaggtact

SEQ ID NO: 163194 - DNA, 122 bp, Homo sapiens
gaacggcatctggagagggaaaggtcacccctccctgacccgcgttgcactcgtcaggaacgtggcacaacctcccagtattaattcccaccgcgccctgtggcggggccctggcagacatg

SEQ ID NO: 163195 - DNA, 122 bp, Homo sapiens
tttcagacacagatagttcccttttggtgaaacttgttgcaatgttccacaaagtgttaccgcatctggaaagtccataataattttgatttatctgcactgacagtcagcagtatgttata

SEQ ID NO: 163196 - DNA, 122 bp, Homo sapiens
agccttcgtccaggagctgaggaagcggggttctccctgaccacagggacccagaagacccgcttctcctttccgcacacccggcctgtcaccctgctttccctgcctctacttgacttgga

SEQ ID NO: 163197 - DNA, 122 bp, Homo sapiens
tgtgattcattttggcaggttgcacaagacttgtcttgcccttcaacaatgcaaagaaagcgttcgacaaaggaagcttcatgagactgccctaccattgccagtgatcctggcaacataca

SEQ ID NO: 163198 - DNA, 122 bp, Homo sapiens
ctaagggagtttccagatgatgagggacatcacctgactgtccttaccacagataactgccgccctgtgtctagggcttcacgctttgtgcgctgagcaccagctatgctgtcacctatggt

SEQ ID NO: 163199 - DNA, 122 bp, Homo sapiens
gctcagtaaaatgacccgaaaacgatccccgactaagcggctctttatcccacagcaaaacggctttcttaagacccatctggtattatctggatcccttggcctgaaatttttgagtgagg

SEQ ID NO: 163200 - DNA, 122 bp, Homo sapiens
gggaaggagagagggtgcccccaaggatgagacacaagctgttgccacatcagcactttgcgcctggacggtcccccagttgtcctggctgcaggcagtccgaacagtccgcttcctggaat

SEQ ID NO: 163201 - DNA, 122 bp, Homo sapiens
ctgcgtaagcaggcctggctaggcccacagtaggccccgggcacattttcagctgcgaagcggaggactagcaaccggtgaggtagaaggagaaccaagagatggtgggagaatgggaactg

SEQ ID NO: 163202 - DNA, 122 bp, Homo sapiens
agggtctagaggagggtgggaagctagtggggctggccgtgcgggggattcgcaggggcgcggggaggatgctggggatggagatacaggaggcggcgggggaggaaagagggaacgggagg

SEQ ID NO: 163203 - DNA, 122 bp, Homo sapiens
gaaaacaaaggggtgtgcgaagaccgggtgcatgtgtacagctgcaaactgggggaaaggcgccaggcttgggcgatgaggatttgttcccccatggattcccttcctgcccagggtccgct

SEQ ID NO: 163204 - DNA, 122 bp, Homo sapiens
gaaggcgctctgaggagatgcaggttgtgtccaaaacctcccacctcggggtctcctgaacgtcccaacaagctccttgggcccttaggcgttaggccaaccccaggcctcggctggccccg

SEQ ID NO: 163205 - DNA, 122 bp, Homo sapiens
ataaaatgatattatcctctgtgaaattaccccagaaacttaaggtacctgatagcaaatcgtattctctcattaagacatagaatcgttgatccttgcactagctttcttcctagtctgaa

SEQ ID NO: 163206 - DNA, 122 bp, Homo sapiens
gttttgagaataataacattttataatgcttttgttggattacacattatgtggaatttgcgttgcctttttgtgactaatattgaataactttgcttcgcttaattcataagtaagaacca

SEQ ID NO: 163207 - DNA, 122 bp, Homo sapiens
agggcggtgtcgctggggcggtgccgctggggcggggcctgcggggtggggctgacggcacggggcggggcctcggggaccccggcaagcccgcgcacttggcaggagctgtagctaccgcc

SEQ ID NO: 163208 - DNA, 122 bp, Homo sapiens
agtaaacaggaaacatgattgtcaagaaggcattaacttgcagtaacaggtgatggaaaccgatcagtggcacaagctatgcaagttaagaggctggagcaatcactttgggtaggaggatc

SEQ ID NO: 163209 - DNA, 122 bp, Homo sapiens
ccaagagaggggagtgtcagaaagcacggggtgtgaaaggggtttgcccttgctactcggcgcattcagcccaagttgaaaagtagaaggttcagtaatgccgccatcccctcagccagtct

SEQ ID NO: 163210 - DNA, 122 bp, Homo sapiens
gaagtgtacattaattactgcagattgtctcctatgcatctccccccaccccctctgcatcgcagacagcagtgctcaaaagggtccgcaaaataaaaatgtgtcgggtaattaaatgggta

SEQ ID NO: 163211 - DNA, 122 bp, Homo sapiens
gacagagcgagaccctaaaaataaacctaaaaaaattaaagccttaatctaatcatgagacgcacttacattactgtagacaaagaatattttacccagcatgtatagaattttaacagctt

SEQ ID NO: 163212 - DNA, 122 bp, Homo sapiens
catgaccttgtcacctgggcccggcgcgcggccacgtggctcgggtgactcgcattgccccgcccccctgcagtgacttctccagtttggcacaccagtgggctttcatgtgacctgtccac

SEQ ID NO: 163213 - DNA, 122 bp, Homo sapiens
ccctggagaacttctggaaggagttctcaggcccgcgctacttacagtgcaggaagcaagcggggcgtgaagaggaggtagaaacacagacctccctagcaaagagggaggcggcgcagcgt

SEQ ID NO: 163214 - DNA, 122 bp, Homo sapiens
gcatggggcagccacgaaggagcttgcaggtgcctgtgggagaacagagcttgggttgcccgcagagtccgggggtctagggggatgatggacagacaggccaggcttccacccatcctgtc

SEQ ID NO: 163215 - DNA, 122 bp, Homo sapiens
ccgcccaccagctgggtgtggtcaccattcatggagggccggctggggccaggctcaccacgcagagtttgccctccggtgtgatgatgcatgagacacagtaggcccccctgcctgtgtgt

SEQ ID NO: 163216 - DNA, 122 bp, Homo sapiens
ggccccgtgcggcgccggagaagctgccagagagatgggcccaggacgcgggacttaggccgggctgtggtcgggggacgtgggggcggcggcgaccaacgcgggagtcgccacgacgggct

SEQ ID NO: 163217 - DNA, 122 bp, Homo sapiens
ccatttctggtattctctctttactgtgtatcctgggggtgatgggaagaagaggagagacgagaaggacttactagtaacagaaaggaaaataatgaattgggaagaggagcaaaggggat

SEQ ID NO: 163218 - DNA, 122 bp, Homo sapiens
gtcaagtgctttccttaaaggctcttcttatccaagagaatatgaagaacaatctcatggcgaaaggtgacatctcaagcaaacattcagatcatccccaggatgctacctgagatgggatc

SEQ ID NO: 163219 - DNA, 122 bp, Homo sapiens
cctctccctctgagctcagcagaaagaaatgtgccccacgcacatttgcctttcatctagcgccctgcacagggtttgaaccaaaagaacttcataaacatgagaagaataaacgatgaaat

SEQ ID NO: 163220 - DNA, 122 bp, Homo sapiens
aggccagcagctgcggaggatgtgccgggtcccccagcactgcctgccggccggcccgcccgccccgcacttgaattctggccggacctcaagccgcctccctgcggggcaggggctgggga

SEQ ID NO: 163221 - DNA, 122 bp, Homo sapiens
ggcccctcacagcccccatacccacacctgctctcacagagtacagctcggagcaccaggcggctgacatggccgaaatagacgcacgcctgaaggccttgcaggagtacatgaaccgactg

SEQ ID NO: 163222 - DNA, 122 bp, Homo sapiens
gaaaacatactactgctgtaattaaatgcaaattttttttagtgcatgcagtattaaagtcgagtttaagccactgaatgggggaaatctagaagttaagtggctcaaaatgaataatttaa

SEQ ID NO: 163223 - DNA, 122 bp, Homo sapiens
gaaactgtcctttctaatcccagagttgctgaaactacagaaaagctagtagaaattaaccgtttgtgtcacaggcggagcaccatatgctgctccccttccctggagaaagaacagccagc

SEQ ID NO: 163224 - DNA, 122 bp, Homo sapiens
tgtggtgtcggccgcctccgctacggagcgccaggaatggattagccacatcgaggagtgcgtgcggcggcaactgagggccacgggccgcccgcccagcacggagcacgcggcaccctgga

SEQ ID NO: 163225 - DNA, 122 bp, Homo sapiens
ctggggcgaccaaacgatacgtcgatgccggaaccgacccgacgccggagccgtcggctccgtccttaccgttgctctccaggtacacgcccccgtcaaaggcggctctgcggccctctcgc

SEQ ID NO: 163226 - DNA, 122 bp, Homo sapiens
gcgaggcggctgcggctgctgtgcgtgccactgacggacaaccccctgcggccccgcccacgccgcatgacgaaggcaggccccgcccacccgtccgcaagccccgcccatgccccgcccga

SEQ ID NO: 163227 - DNA, 122 bp, Homo sapiens
agggggctcatccactcgattaaagaggcctgcgtaagctggagagggaggacttgagttcggaccccctcgcagcctggagtctcagtttaccgctttgtgaaatggacacaataacagtc

SEQ ID NO: 163228 - DNA, 122 bp, Homo sapiens
tgaaaacagagcaaggccgggggctggggtgctgggagaggagctgcagtttggaagagccgcaggacaggtctcataagatgacactgaatggcagactggaaggaggagaccagtgagcc

SEQ ID NO: 163229 - DNA, 122 bp, Homo sapiens
ggcccggagggagtggggagcccgggaagtgtcgggcgtgtggagagtcgataccagcaccgctcaagacagcgctgatagtgccgattgagtttcagatgcagccggagccccagccagtg

SEQ ID NO: 163230 - DNA, 122 bp, Homo sapiens
ggagacggggtggcggctgcagcccgggtagggccaggagacccggtccacgtttgcaaacgcagccgaacgcccaggccgacccgtgccgcccgagcgccgcgctgcgtccgcgccactct

SEQ ID NO: 163231 - DNA, 122 bp, Homo sapiens
ctgagtttctgcaaggtgatcgctggtgactcacagaacacacagctgcagtgcgaccggcggtcctctgcccacagatgcacttattcctaagggaaggcgggatctgggagccagggggt

SEQ ID NO: 163232 - DNA, 122 bp, Homo sapiens
agggagctcccagtcaggcctcctatcgcgcgggtgtggaggtgcggccggcagggggagcgaggaggaagggaaccgcggccgggccaggtgagggagggaggaacacttgccgcgggccg

SEQ ID NO: 163233 - DNA, 122 bp, Homo sapiens
agtcgggcacccgctggccccaggcctgggtctccgcaggctgtgggagccgctcagaggcgctcagcaacaagcccctggggggctgcggggtgcggggagagggcaggagaaggttcgcc

SEQ ID NO: 163234 - DNA, 122 bp, Homo sapiens
gcttagcaaaaaacgcagaaaaacgtgggggcggcagcggagggagtgttggacgcttaccgctggtctcacaaaagaatgaatttgattcctaattaagttagttttcatggtgcattaaa

SEQ ID NO: 163235 - DNA, 122 bp, Homo sapiens
cagtgcctctcaccccaactagtagctaaccatcacccccaggactgacctcttcctcctcgctgccagatgattgttcaaagcacagaatttgtcagaaacctgcagggactccatgctgc

SEQ ID NO: 163236 - DNA, 122 bp, Homo sapiens
tgctgtcccccgagtgagaccatcgagagggcactccgcgtgtagagcattcccgtctcgcgctgaggcgcggcacctgtggcctgccctggctcccgtccctggctcttctcgtttctatt

SEQ ID NO: 163237 - DNA, 122 bp, Homo sapiens
tactgccttgttccatattatttggtgcacattttccctggcactctgggttgctagccccgccgggcactgggcctcagacactgcgcggttccctcggagcagcaagctaaagaaagccc

SEQ ID NO: 163238 - DNA, 122 bp, Homo sapiens
gttgaaggatataaagaaaatcttgtctcacaaagggaagatcttgtggaccctctaaaacggtgtgagggacccttttaagaatgctgttttagggaatgattcatatgactgagctttcc

SEQ ID NO: 163239 - DNA, 122 bp, Homo sapiens
ccaattgctgggtgtgtctgggagttgcagacccccacgtggtgggagatggggagtgaccgtccacccctgccgagggatgtcctgcagagtggccatagatggaaggcctcagccgagag

SEQ ID NO: 163240 - DNA, 122 bp, Homo sapiens
gcgcgcgtagttaattcatgcggctctcttactctgtttacatcctagagctagagtgctcggctgcccggctgagtctcctccccaccttccccaccctccccaccctccccataagcgcc

SEQ ID NO: 163241 - DNA, 122 bp, Homo sapiens
agaaggaaggaaggagggaaggaaggaagggagggaagagagagagggagggaaaaagaacggttcgcgggaaaaagacatcaaataacagcaaagaaatgcagcttctaaagtaatctcca

SEQ ID NO: 163242 - DNA, 122 bp, Homo sapiens
ttttgagcagtgttgcacacttactgtcatttctcttactgttctgccactcctacagagcgcaggccaaggagactacatttcccagaatgccacacgccctttgaccccagctacagcaa

SEQ ID NO: 163243 - DNA, 122 bp, Homo sapiens
catccacatactctggtgaacactcgaggacaaggccgcttgctattattagtaaagggccgaaccgtcctgtcattggtggaggcagtgcttgactgtgcatcgatccaggaatccgatct

SEQ ID NO: 163244 - DNA, 122 bp, Homo sapiens
tagaaccaccaggcttccctttcatttctccaggaaagaaggggtagggaagtgaaagttcggtcttgtgtttcacaggcaccactgaagtaaagaattcaatatttagataattttgtgtt

SEQ ID NO: 163245 - DNA, 122 bp, Homo sapiens
tctcagccagcaagcccaggtctgcagccatttcccattatgaggctgaattaacagacacggaaaaatagaaaatagataagataaggcaatgaaaccatccccagcgagagagaacaggg

SEQ ID NO: 163246 - DNA, 122 bp, Homo sapiens
attacaggtgcatgccaccacatcctgctaatttttctatttttagttgggatgcggtttcgccacgttggccagacttgtctccaactcctgacctcaagtgattcaattacctaccttgg

SEQ ID NO: 163247 - DNA, 122 bp, Homo sapiens
tttccagggggacagtgactttgagaagatccctgcattgcacacaccacaggattttaccgtacagcagaaacacttctgcctctgttcatgaggtgggctggtagagggcgggcgcgtcc

SEQ ID NO: 163248 - DNA, 122 bp, Homo sapiens
aaataatctgtcataaagaagataaaacatggttgtgtgggaataaatgaacgccggccccgtgagcgcaggcagaggctgttccctccaagcccgctctgcaagggcctgggcgccgtcct

SEQ ID NO: 163249 - DNA, 122 bp, Homo sapiens
gcggcctcgccgcgcgccgggaccgggggcctcccggggttgcccacgacccacccggcccggctgctgaacccaacccgggagaggcgagctcggccctgaaaccaaagccacccctcctt

SEQ ID NO: 163250 - DNA, 122 bp, Homo sapiens
atcgtgaactcctgacctcaggtgatccaccggcttgctctcccaaagtgttggaattaccggcgtgagccaccgctccccatcaggggcttttttttttttttttttttttaaatcagtct

SEQ ID NO: 163251 - DNA, 122 bp, Homo sapiens
agcggggcactttactttggaggggcagctaccagagggctctatggatcccagcccagccgtcaggccggacgggtcccccctactggcctgcagtgacccttatgccaggctcggctggc

SEQ ID NO: 163252 - DNA, 122 bp, Homo sapiens
aaggcagggagatccgagacagaaagaccggaaccgaggagggggaagagggcaagaacgcgatctaaaagagaccctcagaggagacagagcccacaaacttgggagaggttttcggggcc

SEQ ID NO: 163253 - DNA, 122 bp, Homo sapiens
agttagagcaaaacagaggtgctgccctttgtgtatccaagtgtagggagtgaattaatccgtgacccactatgcaaaaacatattacataaaactcccagagctcttaggagaggttgcct

SEQ ID NO: 163254 - DNA, 122 bp, Homo sapiens
actatgcaaagcaaaagttacaaaaccaaagcaaagactggctcgtttcagaataatcaacgtttcaggtttaatatgaaataatcgtaaatttgtttatacctaataacatagccataaaa

SEQ ID NO: 163255 - DNA, 122 bp, Homo sapiens
ggctgctggcattcccaccttctagagtgactttcacacttcctgatgagtttcccattccgctcagcaggcccataaataggattgtgcagaggtgcatatgcaagcactttacctgaaga

SEQ ID NO: 163256 - DNA, 122 bp, Homo sapiens
gacattaaaagtataactatcttggtataactaattcatccctaagtgcttgactagagccgttgatgatgactttaagcaagcccagcccctgaagtggtccacactgaataggattgtgg

SEQ ID NO: 163257 - DNA, 122 bp, Homo sapiens
ggggtaccggttggtaggagagacggaccgttgttacataaccattaaactgaaataaaccggaccaaggtggaacagaatcaaggcaccccagcgatggctggcacccctttctagagcgg

SEQ ID NO: 163258 - DNA, 122 bp, Homo sapiens
acagctgggcgacctgaaggtggagcggtcccagctgcgagtcgccaaagtgacaggcggcgaggcctccaagctctctaagattcgagttgtctgcaagtccgttgcccgtgttctcaccg

SEQ ID NO: 163259 - DNA, 122 bp, Homo sapiens
gacttctcttccagggccatgcgcggcccacgacgccggggccccggaggacgaggacgacgaggagcaggcggtggcggcagctccccacgctcacaaggccactgcttccccgcctcccg

SEQ ID NO: 163260 - DNA, 122 bp, Homo sapiens
aggggcggagggccgcctcgccgccgcccgcggggcctggcagccgctcggagggcgccccgaccctggcagctccccagagcgcggcggtgcctcccggcccagcctctggtggctccccc

SEQ ID NO: 163261 - DNA, 122 bp, Homo sapiens
gtggttgttacactgttacaatcattatttctctaaaacaataattagtcacagccagcacgagggaaaggcaatctcccgacagacagaaaaaacctgaaactggttatcagcagcgtccc

SEQ ID NO: 163262 - DNA, 122 bp, Homo sapiens
gctaagcaatatataagaagggtaataacgtattcgctggagacaacaaataattccccacgttaaaataactgattgttttcagaaatttattttttacataaatatataaaacgaattca

SEQ ID NO: 163263 - DNA, 122 bp, Homo sapiens
ttgggatgaagaagatatacatttgtttccacttgttgtccaggtgtctccaaacaaaaacgctgtgttcccagaatacttggaacctttctgactccatactcaggccatgttactgttaa

SEQ ID NO: 163264 - DNA, 122 bp, Homo sapiens
caccgacagacatctgcacgcctgcaggccattgattgaggggactaggcggagtttggccggggctgttggaggagagccggggccacctagcggcccaattccaggggaaaatcgtctgc

SEQ ID NO: 163265 - DNA, 122 bp, Homo sapiens
cttgcaccctgatcaaatctgctggccttagtagctacttagcaaataaggtgacaaggacgaagctggagttggatcactttccacccaagggagcctcatacgattttggagacaggcag

SEQ ID NO: 163266 - DNA, 122 bp, Homo sapiens
caccgtttaccttgcagttgaagccgaggaccgcgacagtcttgctgaaaaagaccccggcgcgaggcttcccccgcacgctgctgaggtgggagagggtgggtgtgagggcggcgcagcgc

SEQ ID NO: 163267 - DNA, 122 bp, Homo sapiens
gggtgcgttgggggcttgagagggtgacaggtcttacgggcagaggcagtggcgggtcggcgcgggcgccggggttcgcggcgaggcaaggaagaatcaggggcaggggcagttgcggggcc

SEQ ID NO: 163268 - DNA, 122 bp, Homo sapiens
aggtccctgagctgactcttcctgtgggggccggaacaaaaggggctcctaagctggccccgtccccctgtcacacggaaggaccaagtgcactgcaaggtcagtgagggtcacccttggcc

SEQ ID NO: 163269 - DNA, 122 bp, Homo sapiens
gagccagtccgcctcttccccgggaagtgcctgcccttccctcctgttagggttggctctcgagcttgtgtgccagttcctgggttggccgtgagagttctacagacaaggaggaagtgctc

SEQ ID NO: 163270 - DNA, 122 bp, Homo sapiens
gtccgcggccagtgcaggcccggaggcgggggccaccgggcagggggcgggggtgagccccgacggccaacccgtcagctctcggctcagacgggcgggaaccacagccccgctcgctgccc

SEQ ID NO: 163271 - DNA, 122 bp, Homo sapiens
ctggtttttgcggggagtccccgggctgtgctctggggccaacgtcctgactttcggggccggcagcaggctgaccgtgctgggtgagttttcgcgggaccacccgggcggcgggattcagg

SEQ ID NO: 163272 - DNA, 122 bp, Homo sapiens
agccccgtgcctccccggagccgaactgctcggaacacagcggggtctccaaacccgcgtcgtcagccatgccgagcttttggatcccagccccgcccctgccgcacggtggacgtggcagg

SEQ ID NO: 163273 - DNA, 122 bp, Homo sapiens
cgtctgtagtagtcatctttggtggccttgttatactcgctgatggcgaagtgaagggcacgctgtacccactcatcattgaggtctgcgttatagatgccacccgggattatcctatcctc

SEQ ID NO: 163274 - DNA, 122 bp, Homo sapiens
ctgtgatgcgcttgtccccatatggggctctggcgtctttctgggtctggaggtccccagcgccctctgccgaggcatctcttggtccggcggtcctcaggctggagggtggagcggagaag

SEQ ID NO: 163275 - DNA, 122 bp, Homo sapiens
cgtctcccggcaaggcacaggtacctctctccgactacctccatcgcatttgaggctgtccgcaggcagcgcctgcgcagcgtgagtcacgcacagcgctcctgcaagcacctgagtgcgcc

SEQ ID NO: 163276 - DNA, 122 bp, Homo sapiens
accgccctggggtctgagttccagcagagccctgggggcacggggagccctgggagcaggcgcagggaagctggaattccagagtctaggtccctgcagagtcctccccagagaccacaggg

SEQ ID NO: 163277 - DNA, 122 bp, Homo sapiens
ccattctaacaaggatgcttcgtttcttcagtcttcgaaggaatcagagcccaaatctcacgactcagagtcctgttaggccaggactagatgtccactcactgaagacagaaatatttcta

SEQ ID NO: 163278 - DNA, 122 bp, Homo sapiens
ctctttaggtttttcagactccatgcaccctgtggaaactgcctttcttgagtagaggtacgttcagcacttcataaaataatcttggagcctccagacacacggatggaggagcatgattt

SEQ ID NO: 163279 - DNA, 122 bp, Homo sapiens
tagtctcttctgctctggctctgttgcccagggcaaccgctccttcaggcgtgaatgtggcggctgcctctgcgaatggacggcgtgggaagaggtcggcagggctggtggggaggtgacct

SEQ ID NO: 163280 - DNA, 122 bp, Homo sapiens
aagccgagtgaaagaccccagttaaaaagcctggaaaaaacaaaaccgggcgagtgtgtgcgtctctgtgtgtgttcctgggaacaacagaacggggcgtgtgtgtgtgtgttcactcctgg

SEQ ID NO: 163281 - DNA, 122 bp, Homo sapiens
gtcccggaagtgaaggggccatgttgatgggtgacccggggagaggtacccggccagaggcgagtcctgcggagtggtagcgcgcacggcctgcgggtgagtgagagaaggaatgagggccg

SEQ ID NO: 163282 - DNA, 122 bp, Homo sapiens
tctcccactaaccggacctcacccccacctccgggtctcccgcctcacctgtctggccttcgggctcccaggctccagctcaggtcctggccacccccgccccgtctctcctccaggtgcgc

SEQ ID NO: 163283 - DNA, 122 bp, Homo sapiens
atctctactgatgagcatgtacccagcttgccaccgtatttattcagttgaacaatttcacgtgtatttttaaacattcgattccacgggttagatctgatctgttagaaggggctctgcag

SEQ ID NO: 163284 - DNA, 122 bp, Homo sapiens
tctccacgatcttgtggcggatgtggttgggcagcggcctgccgttgataaaaacaccgccgagctggttgacgcggccctggccgaggggagtggacactgtgggaaggtgaaaaagagaa

SEQ ID NO: 163285 - DNA, 122 bp, Homo sapiens
gccgctctcctcttctctctcccgcccgcccgcagcgccatggtctggcagtgtgtttagcgctcaccaccatgtgcaccagcttgttgctagtgtacagcagcctcggcggccagaaggag

SEQ ID NO: 163286 - DNA, 122 bp, Homo sapiens
gccagggcacccctgttgacaggtttctcctccctgtgagagcccaggtgttgagtcaggcgtgggagctgggcaaaggcgtcccgaactgtctgcatgcgtcctctggtgtcggatgagcg

SEQ ID NO: 163287 - DNA, 122 bp, Homo sapiens
acaggtggaagcgaggcggggatagtcaaggaagtgaccgtgtcctggagacgcggcaaccgtggtgaccgcagtcaacacagtaagccccagcattcgcattgtaattgagctcattcaag

SEQ ID NO: 163288 - DNA, 122 bp, Homo sapiens
ggtacctgcccccaggtctgggcctttcataagtatcgtagtagttgtaataagggttgtcgtcagagtacttgtaggggttgtaagggtcgtcgcccaccatgccgtccacgcggctgggc

SEQ ID NO: 163289 - DNA, 122 bp, Homo sapiens
tctaaagctgaccccacaaagttgactttccttggtaaaaaacttttcagaaacttgtcacgaaagaagagctgctggtaaaaattcagaggccacctcctgttagctgttctccaggtgcc

SEQ ID NO: 163290 - DNA, 122 bp, Homo sapiens
tgttcttgtacagccattaaaattagtagcacaagcgtgctcaaaacagcctgttatccacgtttctgtgtttagctcagtctagcaaaattgttaaaagtcactttgccagacttccgtag

SEQ ID NO: 163291 - DNA, 122 bp, Homo sapiens
gggtggtcccgaggaccctttccatagacctgggagttcccggtgagcacgcggaaaggacgcggtgggagcggcaggtgcagagggaggacttgaaggttccatccctaacagaggacagc

SEQ ID NO: 163292 - DNA, 122 bp, Homo sapiens
cctcctatgtgccaggtgcacatgcttgcccttacgaagccacatgctggtggaagtgcgcgttttctctttttcctgtgagaatttgtctgctttgggagatggcgacctttccgagtgtg

SEQ ID NO: 163293 - DNA, 122 bp, Homo sapiens
cacccggactaccgatcccagtgtgcaaagcctccaggcttaccttcccggaaactggcgcggtgccctctgggacttgttctgggacttgtagtcttgtactggcgctggcccgcctttct

SEQ ID NO: 163294 - DNA, 122 bp, Homo sapiens
tccagtgtgagtcaccatgcccagctccctggatgatttcattcttttcgggggaagaagcgggagtggagtttcatttaccacctacatgctggaatccctatttgtagcccaggtctttc

SEQ ID NO: 163295 - DNA, 122 bp, Homo sapiens
aatgacggggggtgcaggggagcggccctgactgggactgtacggggacgcatgggggtgcgggcacttgagggaggaagcagcagagggaggtgtgtggatgtgtgtgtgtgcgtgactgg

SEQ ID NO: 163296 - DNA, 122 bp, Homo sapiens
cgatttgatagcagaattcgacagctaactttaaacacagtggagatttacagcgccatacgggcgctccgaatccacgctcacgttgccagattttcccctccctcctcaaatagaattat

SEQ ID NO: 163297 - DNA, 122 bp, Homo sapiens
gccaattctcagggcccgcctctttctcccctttctcggcgggggcctctaccctgactccgccccgctccccgggcactgccccaccacgtgacccggtctcgctcctcctcctcctcctc

SEQ ID NO: 163298 - DNA, 122 bp, Homo sapiens
taccactattaaccaataagatgctttcccaccatcagtagtgtacccccatcctctgctcgtgttcccctacaccttgttaaggtggatccacccagctcagtgaggagtaggcaaagaca

SEQ ID NO: 163299 - DNA, 122 bp, Homo sapiens
tgctgatgaaccactccatgtggcttcctaggcaagcacattcctcaagcattttgacaccggctaatgatttaaagtccctttggctccataaacagtggaggccggcccaaagtgttggc

SEQ ID NO: 163300 - DNA, 122 bp, Homo sapiens
cagcccctggatatgggcagggcacctaggaaagctgaaaaacaagtagttgcatttggccgggctgtgtttcagatgaagaactggaagacaaccccaaccagagtgacctgattgagcag

SEQ ID NO: 163301 - DNA, 122 bp, Homo sapiens
aatgttaaatacaacagttatggcttggctctgatggcaatgaaaagaaagctgtataaacgatgtacacttgtggacaagaacagataggaatgtagaaaccttaaaaatggtttgatctg

SEQ ID NO: 163302 - DNA, 122 bp, Homo sapiens
caactcagatcccggctcaaatgaggctgggaaagctgatgcctgtaagaccgacaaagacggtgcaaggtgaggtgaacgccgctgtgtctgggtgccgggctcccttgtcgagttgaccc

SEQ ID NO: 163303 - DNA, 122 bp, Homo sapiens
tccacatggagttgctgttacagggggcgggaaccaattggagaccggggccctgcctggcgtccgccttcggcagggctctggagagtgtcccatgcccactcacctgggctccccagtct

SEQ ID NO: 163304 - DNA, 122 bp, Homo sapiens
ttcgagtcggtgctgccggggacgctgtgtggatggggtctgtgagtgtgccctcggctccgtgtccggagccctgtggttcttggggtgtatctggccccacccccactgcgtggtgtcca

SEQ ID NO: 163305 - DNA, 122 bp, Homo sapiens
cgcgtagccggaagcggaggcgtggaggcgggtctgaggtttggtgactgcggggcaggccgggggcagctgtctgtctggctctttttgacagcccccagtgcgaaaggctgccagcatgt

SEQ ID NO: 163306 - DNA, 122 bp, Homo sapiens
ctttacacacaatgacaaatgaggaagaacaggaactgaggacctcactaagaggacatacgtggataatcagaggcatagtatattggaggaggggtcttttgatgcttcatcttgtaaca

SEQ ID NO: 163307 - DNA, 122 bp, Homo sapiens
gtagggatgaggacgcgagggcttccggagggggaaagagcatttgaagtgtaaaggggacggccttatattgcccacagacctgagtcccaatccggactttattcctggctctgcaactt

SEQ ID NO: 163308 - DNA, 122 bp, Homo sapiens
cggagctccggcagccaggtggggactgaacaccaacgccgcggggaggcgtcgcacatgcgcgctcctaggcggagccccgcctcccacgccctggatcgtcacttccggcgcgagaggcc

SEQ ID NO: 163309 - DNA, 122 bp, Homo sapiens
ttttttttttttttagagatagggtctcactctgtcgccccaggctggagtggagtgatgcggtcatggcttactgcagcctagaactcctggcctcaagggatcctcctacactggcctcc

SEQ ID NO: 163310 - DNA, 122 bp, Homo sapiens
tccggcccccgcccggggcggggcgcgcgggggcgcggcgcagcccaacccgcacagccgcgtccccaaacaccaccgaggagggaaaacagacggagaaaaaggacaaaacagaaaaatgc

SEQ ID NO: 163311 - DNA, 122 bp, Homo sapiens
gggatgagaagattgagggtgcagagccctgtcctgcagcggggatttgcgagctcaacccggcaccccactgattacaggattacgttggacgaatatttgagcttagtattccctgttca

SEQ ID NO: 163312 - DNA, 122 bp, Homo sapiens
tttatcatccccccatccgaggcccaggatttggctctctgatgccaagagagcaaagggcgtcctggagacaggtggtgagctcctagccacagggattagcaggctcctcgtccgagggc

SEQ ID NO: 163313 - DNA, 122 bp, Homo sapiens
atgaaactgattccactaccccatctctgcaagcgtccagaggcagagaggccaacatttcggggacagcttggaggcgggagatttaggcagggctccttaaacttttatgtgcatgaaaa

SEQ ID NO: 163314 - DNA, 122 bp, Homo sapiens
aagttttaaaatgtatattctgggtctggcccttggaatatagaagctacacgtgaaagccgcattgtgtgtgtgctgctcacagatgaatgtactccatccctaaatgtgaagacctctca

SEQ ID NO: 163315 - DNA, 122 bp, Homo sapiens
ggaaaatccagagaaaacacccaaggtcgtttctgtttgattctggtcattgcattaaagcgtgcaatcagaaagcatgaaggagactgacaggtgtattagtctgttctcacgctgctaat

SEQ ID NO: 163316 - DNA, 122 bp, Homo sapiens
tgacttcaccgtgctgtgtgagcatccgctgaagtcgtatggaaacaccaggatgtggggcggctggaagtctcccgtgttgctggtgggaatgcaacagggcagagcggttgtggaaaaca

SEQ ID NO: 163317 - DNA, 122 bp, Homo sapiens
ccttcgccttctgaactggccaggggctctgttgcttgctcgttgctctcagaccctttgcgcaaggtgctccctcaacccaaaatagaatctcggcccaccctctgtcggtcttcgcccca

SEQ ID NO: 163318 - DNA, 122 bp, Homo sapiens
cgccagccggaggagcagcagtttgaatcccaagcccgcgggctgcgggcgctgattgggcggcgcggcagcacgtcaccggaaatgcgcggggaggcaggcgtcttctccgagacccgcgg

SEQ ID NO: 163319 - DNA, 122 bp, Homo sapiens
cagcaagtcagctctgactccggcggggccggagtgcagggcagaggggaaagaaggtgccgccaaggctggtccttcagtcacagcaaaggccctgtggccagcctaggcgaccccttcct

SEQ ID NO: 163320 - DNA, 122 bp, Homo sapiens
cttctacctatgccctggcctcggagcgagcccgatagcgctggatcacagcagagggagcgaggcggctgacgtcccatcccgaagagatgaatggaattccaggaagctagagtcatgct

SEQ ID NO: 163321 - DNA, 122 bp, Homo sapiens
gacgttctgggctctgtgcctacctcccagctgtgaagaatgggcactaaggcgatgtctcgctcacaaaaccatttttgttgaaaacgataaatcccaggtagggatttacgggggatatc

SEQ ID NO: 163322 - DNA, 122 bp, Homo sapiens
ggcctagtcggatgagacaaacaggccccgggcctcagtttcctcttctgcatatcgggacgaacgcaggacacagatgcgagtgggagtgggagtgctttgcaaaactgggaagcgccacg

SEQ ID NO: 163323 - DNA, 122 bp, Homo sapiens
ctataccttgtccatcatgtagctatctccttaggctgaaaccttggatcaaagggtatgcgtattccatatatgacacctattgtcaagctgacccccagaaaggttttatcctgtcagca

SEQ ID NO: 163324 - DNA, 122 bp, Homo sapiens
aggaattcctccaaatgcttccaaaaatactcattgacaattcaagttgcacttggctggcggcagcccgggcggccttcagtccgtgtggggcgcccgcgtggccttctcctcgtaggact

SEQ ID NO: 163325 - DNA, 122 bp, Homo sapiens
cgggcacccgggtaagtcggaagcgcctaagagtagctgacaccggctgagcgcttggctcggacttcgcgcggcgcgaagtgccacgctgaagagttgatagaaattgggggagggtctgg

SEQ ID NO: 163326 - DNA, 122 bp, Homo sapiens
ccctcgcctcaggtccggggaggcctcccccacaacctcggcccgcaggcccggcgcccgcggcccgaccccactcacaagaggaagctcatcttcggtcctcagaggggaggcgaggggcc

SEQ ID NO: 163327 - DNA, 122 bp, Homo sapiens
gattggagttcggtcgggggagtttgaatatccggaacagttagtggggaaagctgtggacgcttggtaagagagcgctctggattttccgctgttgacgttgaaaccttgaatgacgaatt

SEQ ID NO: 163328 - DNA, 122 bp, Homo sapiens
tgtgacttagcatcagccaatcataggacctcactcctctgcccacagccattggtacagcgaacagcatgtgactgaaactaagccaatcagaattcctccctaggatttccaccccccac

SEQ ID NO: 163329 - DNA, 122 bp, Homo sapiens
aggtgcccaactccgcggaagcgccccttgctgggtagaagagtgggtctcccgccgcggcgcacctgtctcggctgccggctccccgcacctacctgtacgagacctgcttccggaaagtt

SEQ ID NO: 163330 - DNA, 122 bp, Homo sapiens
ttcatgaccttcaccgggaggctgaggtcggagtcccgattttctcctgctgctgtggcccggacatggcgactcccggccctgtgattccggaggtcccctttgaaccatcgaagcctcca

SEQ ID NO: 163331 - DNA, 122 bp, Homo sapiens
tgcttgtgattgcaaaaagttggaaccaccaaaatgttcatcagtaaaagaatcatcggccgggcatggtggctcgtgcttgcaatcccagtactttaggaggccaaagtaggtggatcact

SEQ ID NO: 163332 - DNA, 122 bp, Homo sapiens
agtgcggggctccaatggcgctttctacaaggtacttggctctagggcaggccccatcttcgcccttccttccctcccttttcttcttggtgtcggcgggaggcaggcccggggccctcttc

SEQ ID NO: 163333 - DNA, 122 bp, Homo sapiens
aagccccattatgtgtgtcggatggtgaggaacataaggaagttgttctcctccaggccccgcctcaccatggactgtgccggaggacggtgaggcagaggccggcgccctggaccagcctg

SEQ ID NO: 163334 - DNA, 122 bp, Homo sapiens
cattggcctggaggtggaaggatcagtcaatgacctatacctctggggcaagagccgctccgcagccagagctttgaccccattcccaccagagccctgggatgccccaagccccgcccctt

SEQ ID NO: 163335 - DNA, 122 bp, Homo sapiens
gcctgccccgctagttccccgagtgcgattactttttaaaggctcctttaagcatatttccgtgaatctgtttcttgtgctttaatgttactattaattgataagatcagctcatcaaacat

SEQ ID NO: 163336 - DNA, 122 bp, Homo sapiens
tcaatcccctggtgctagtcctagtcttggttcggaccggccccaaggagcaggggcgaacgtgggcgcctcgtgccctgattggccgacggggcgcgcgcggcctggaggggcggggcgga

SEQ ID NO: 163337 - DNA, 122 bp, Homo sapiens
ggagatcgatctgtacctgcctgtgaacaattaactgaaattactcactacctttgcacccgcctaaggggtgaattttttctttttttctttttcttttttgagacagagtctcaccgtca

SEQ ID NO: 163338 - DNA, 122 bp, Homo sapiens
gtgggtgggggataggtgaggacacagaggaggtcgtgcatttccgggacttatgactcccgtccccatggcctggagcccggagggggtgagccaggtcccctgagcccagagtgggtgag

SEQ ID NO: 163339 - DNA, 122 bp, Homo sapiens
tcccgcggggcaccacgggactagtggtccggccgacgtgggcaactcccgcccaacaaacgtcagactacaacacccaacagcccctttggcagcaccgcctcttaacacagtcaactaca

SEQ ID NO: 163340 - DNA, 122 bp, Homo sapiens
agtgatgccgaggaagacacttccctccgagtcttagtctgcccgcctgtgaaactggctcgtaacaaacccctgaccccaggctcggtcgccttgagcccaagacctcacccaatgccccc

SEQ ID NO: 163341 - DNA, 122 bp, Homo sapiens
gcacactcacgccgtttgacccgtaggcggtgtttacggtgacacggcgcttccgagcaccgtcccacagctgtctgaaagactctgcccggttgacttctgcgtaccaccactggatctct

SEQ ID NO: 163342 - DNA, 122 bp, Homo sapiens
cagatcatgcccatcctgtgcagaaggtcactataggaacacatggcacagggaagaaaacgcccatagaaattcacatggtgcttgtctaaaccgaaggcaggtgagatccacccactgtc

SEQ ID NO: 163343 - DNA, 122 bp, Homo sapiens
cctcgaatgcacccattcctccgcataggttctaaccatttgcccattcacctgaggaatcgagttttgatggacagattcctagaccaatagagaaactaagtgaactgtaccgatgcggc

SEQ ID NO: 163344 - DNA, 122 bp, Homo sapiens
agtcggggaagtggcctggaagaggggctttggagccgggcttcagagccagcaacctcccgaagtgagggaagaaagcctcattctgattgttctctacccagtggtggggctccggttcc

SEQ ID NO: 163345 - DNA, 122 bp, Homo sapiens
cacataattatctccagatgagtcagcttggggaggcggaggcagcggcagcgcggcgagcgtgcagggaggccggagccctgcccggggcgggtcgcggggtgggcgggtgaactgccagc

SEQ ID NO: 163346 - DNA, 122 bp, Homo sapiens
ctctgcggctcttgttcaccgcagagcaaagagcaagctggtgaactctcactcctttcccgggccacaccctctgcctggagcctgctaattcgaggtccagcctccaacccaccggcctt

SEQ ID NO: 163347 - DNA, 122 bp, Homo sapiens
cacaggaagtctccttaagccaagacttgcaacagaagcccggcaagcgggacagaccggcggacagaccgttccacgtggcggctctgcgtgttacctgccccagcttcccttcttcacaa

SEQ ID NO: 163348 - DNA, 122 bp, Homo sapiens
agcctatagtcccagctactcgggaggctgaggtggaaggattgcttgagcccaggaggtcgatgctgcagtgagctgtgataatcaagcaggaggaggagaagccgcaagaggcacagggc

SEQ ID NO: 163349 - DNA, 122 bp, Homo sapiens
gcaaccctaaccacgagttaaccaaaactttaccaagtctgtacagttcttttgccaacacggtatctcttaaatctgttccttagcttcatctttccctagataataaatatcatattaag

SEQ ID NO: 163350 - DNA, 122 bp, Homo sapiens
gtatactggggacctgtggaaaaccatttctaatggtggagtgttaaacaagtggggggccgctgtgtgccactgagagcctggcctctgctctggcttctgtgcctttggagagagacccc

SEQ ID NO: 163351 - DNA, 122 bp, Homo sapiens
ccaagcgctcctcctgttgccccacctgtggttgctgtggactgcacacgacagcagattcgctgtcccctcgttggaggcgaatggtcggaccccgagtggcggcgcccctgataaaaggc

SEQ ID NO: 163352 - DNA, 122 bp, Homo sapiens
cttacccagaccagcatttctgacacctgttaattggcatttgaaagaactgagtcgaggcgggtgggggactccggagctgctgccaacctgtacctgaaccgcggggagtcctgcaaggt

SEQ ID NO: 163353 - DNA, 122 bp, Homo sapiens
ccggtctccagagtcctcccaaactgaaggcctctccccagcctggcacctgccattctgcgttcggtctctacagatctgggaactccagggacctcccaggagaggatcagacagggccc

SEQ ID NO: 163354 - DNA, 122 bp, Homo sapiens
cgctggtccccgaacgccggcggtgaccgtcagctcaggaaatcagacgggaagggtggccggatgggaacctccgccagctccagcttgtccccagagttttcctggccggcgggcagcaa

SEQ ID NO: 163355 - DNA, 122 bp, Homo sapiens
agagagatgggacagccccgtattaacatggccttagctgaccggcttaggccatgccctcgagcaaaatggtacctccttggcttcaattccagtatacaatatggagaaggaagtgggcg

SEQ ID NO: 163356 - DNA, 122 bp, Homo sapiens
cacacaccacccacacagcttccaatcctgggatgtctccacacccaaagacacgttcatcgtcccatcatctaaaccttctctgaaccccatctccccactcatccacacaccctcagcct

SEQ ID NO: 163357 - DNA, 122 bp, Homo sapiens
tgagagtgtgagaaatattttctgttagagacacgaatatgtttcagccgcaacaggctgcgtttcagccggaagagtgaaagggcaccttgaaaacgcaagtttatgaatatgtttctgta

SEQ ID NO: 163358 - DNA, 122 bp, Homo sapiens
tcggtggcctcagggcagcagctgcctggtgaatgttcatggactggatgctctgggaagcgggttgggtggtgagcttctctcttcccctctgaagacgtcactggagtctgggggtggag

SEQ ID NO: 163359 - DNA, 122 bp, Homo sapiens
gagggcaggcagaaacggccgcggctactcactgagccaggactccaggctttccccttccgcctccgccatattgcagccgcccggccccgcggcttcaaaactcgcgagagtctgcacga

SEQ ID NO: 163360 - DNA, 122 bp, Homo sapiens
cacgcacgtgcacggctgtacttacctgtccttccagacacccagacacgtctccatgcacgcacatgcgcggctggacttacctgtccttccagacgtgtctccatgcacgcacgtgcgcg

SEQ ID NO: 163361 - DNA, 122 bp, Homo sapiens
tccgttttagagatgaggaaattgaagcatgttgaggttagataatgggtcggagagttacggagctaggaaatgacatagccaacacatcctgtgagtgtgagtttatgatactcacacaa

SEQ ID NO: 163362 - DNA, 122 bp, Homo sapiens
gaagggacggggcaggtctggagctagccgccctgcttcctctctccacgggtaaacggccgtgcctatgacaggagccctccttacctgcggtttcagttacctgcagtccaatgcaatcc

SEQ ID NO: 163363 - DNA, 122 bp, Homo sapiens
cagggcaaaggagggtgtcgcacgccagggcagaagcactgggtaggacccggagggtgccgggtcccaggtctcctcacacggagcggcctaagccgggcacccgggctcaggggagggta

SEQ ID NO: 163364 - DNA, 122 bp, Homo sapiens
tggtaccgccccgaaatgcgacggaagtgacgtcagacacagcgcttccggcgtccgctccgggtctggacctcctggcgtttggattggagactgtgttctcttcgctgtttagttagcga

SEQ ID NO: 163365 - DNA, 122 bp, Homo sapiens
ttgggtcacatccccagtaggaagcagaggagaggcaataggacatgagcagggagagagcggggaagatgaaggttgtcaccttctttgccaagaaggtggcaaaccccgccccccatagt

SEQ ID NO: 163366 - DNA, 122 bp, Homo sapiens
aatatgtcccagagctcttaaagcacaaaggtcctacatgtaagtaaggctgattccatacgtggctacaatggagagttctaggctgtattcctatgaaagctcccacccccttcctggcc

SEQ ID NO: 163367 - DNA, 122 bp, Homo sapiens
gagaggtgacatgatgtgtccagagtcattcagctcacaggtagtcagaaagagtccccacgcctccaggatcctggtgtttccctgacaccacatcctgagatgactgacaactggtcaac

SEQ ID NO: 163368 - DNA, 122 bp, Homo sapiens
attggtcagctggagtgtcaatcggaatggtgaccgggcgggactcagagcctgaggaggcggggcttttcctccgcccaggaaggaaatgcagaaatgccttcctatgcttttagggagag

SEQ ID NO: 163369 - DNA, 122 bp, Homo sapiens
gcgttaaatccccttttttctaatttccaatctgaggaggaaaataacgtagtaaagggacgcaagagcaaccttgcttcttccacaacaaggcccaggcgccgccttgcaacccggaaatg

SEQ ID NO: 163370 - DNA, 122 bp, Homo sapiens
cagtttacagtggcagccggaggaggacctgggcagtggcgagtgtggctgtttgcatggcggggagaaagaggtggtccctcctgcctgctgctgatgcccacggcctcctgtccccagga

SEQ ID NO: 163371 - DNA, 122 bp, Homo sapiens
gagggagagagggtgggcccacttctgccgcgcttttggtgggagtggaaattagggacccgagctcactggtgacgtagatctcatgtgaccaggagtcgacgtgtgcagaagtcctggta

SEQ ID NO: 163372 - DNA, 122 bp, Homo sapiens
ctttccctctctgggataggctgcagctttgccatgtgagtgaggggagcacccagccctcggctgaactctccagaaaatgaaagtgtgcttcagggaactctttctcctccactccacta

SEQ ID NO: 163373 - DNA, 122 bp, Homo sapiens
tttcagagactgccgtcttttatttataaggagccacaatttttgtttctaaagcatttccgatttgcctttgagttctttggttttatcttgttcagatggagattctgatgcacgcttcc

SEQ ID NO: 163374 - DNA, 122 bp, Homo sapiens
ggcgggcactggaggccaacagcgcctttctcactgtagatggatgttgggtgtgggattcgcaggagtcttccttcttcgggtttggattaagttcctaacgccacttgcacaaactaggg

SEQ ID NO: 163375 - DNA, 122 bp, Homo sapiens
ggcggcaccagcgtccacatcgcggccaggatgttgtagcacttggctttggagccaaaacgccgggccgcttccaggtcaccaaccaccttctgatctcgggcctgcagagagaccagacc

SEQ ID NO: 163376 - DNA, 122 bp, Homo sapiens
ggctctgcagggcctggccgcctcacccaatgctgcccgccatgatgcagcggccggcctcgaagcgttcctggcagcggcagccctggacgttctcatcatggtccatgcccaggttgtgg

SEQ ID NO: 163377 - DNA, 122 bp, Homo sapiens
cactgggaggcaccggtgtggacagtcctgaactccgtggtgtcgggggtggcaaccccacgcccaccagggaggctgtcgagccggccgcactgggggtcagggagcccaggccggtgggt

SEQ ID NO: 163378 - DNA, 122 bp, Homo sapiens
ggggccctggggagtgttgtgaaagcagagagcccgcgagctctctagggcggagctccgcgggggaagcgccggcgatctcgcggctggcgggggcgggaccgcagtgcgggggatgtcgc

SEQ ID NO: 163379 - DNA, 122 bp, Homo sapiens
tacccagggttcagtggcctgggggctgacggagggggtcgcctctgccaaggccccttccggcgcctccctggctcatccagcccacctccctcccacgctggcttacgcaaagtgctctg

SEQ ID NO: 163380 - DNA, 122 bp, Homo sapiens
gcggcctgcgcccgcgtctccctccccgcccgcgcagagtgagggtaaagcgggagaacgcgtcccgtggtctggggtcagaattccagtcacctgaggctgaggagctcgctggctttcgt

SEQ ID NO: 163381 - DNA, 122 bp, Homo sapiens
caggtggccctttgactgtaaaatgtccttggtaaacccaaaggcttattctgttgcctgcgtgtgaatgtttggtagagctatatcattgtctgttaatgtattatattttgagatttttt

SEQ ID NO: 163382 - DNA, 122 bp, Homo sapiens
tcttagggtttagaggaagagtttgggtggtctgcttctccctcactgctaagtcccctgcgcgcaactgggcgtctttacgaggactgcggggccagttctgcggcgggctgggctcgggc

SEQ ID NO: 163383 - DNA, 122 bp, Homo sapiens
ttcttcaaagaggagaacccaaaaaaagagtcaagataagatagctatctttaaatacctcgtgagctgttatgtagaagatgaattagatatactgaattgtcaaggaccatggggtagaa

SEQ ID NO: 163384 - DNA, 122 bp, Homo sapiens
taccttttatccccagtacgaatacaaagataaggtcaaagaacacactcagtaaatacacgctgagctaatgaatgaacgaacgacaatgaggcagtgggtctgagttctccctacagaca

SEQ ID NO: 163385 - DNA, 122 bp, Homo sapiens
gtgcggagtagttggcaaagttgagagcggagacgtctctgggaacagctgtttgcgttccgggcggaggcggcgcgctgagctccttggccttgagccagcgagcctagaaggaggatgga

SEQ ID NO: 163386 - DNA, 122 bp, Homo sapiens
agaggggcttagcacccgggccagcagctgcggaggatgcgacgggtcccccagcaattccggcccacaggcgctgcgctcgatttctcacggggccttagctgcctcccagtggggcaggg

SEQ ID NO: 163387 - DNA, 122 bp, Homo sapiens
catctcagacgatgggcggccgggcagagacgctcctcaattcctagataggatggtggccgggaagaggcgctcctcacttcccaggtgggacggcggccgggcagagacgctcctaactt

SEQ ID NO: 163388 - DNA, 122 bp, Homo sapiens
ccacgaccgaccgggatcctcgaggtgccagcccatggccgagcctgccctcctccccgccgcccagatggagaggctggccccagggcccctagcctcaccgtgtcctcggatcccgcggg

SEQ ID NO: 163389 - DNA, 122 bp, Homo sapiens
gcgcgggagggaactgggtctgcacgcggtgcttgcgggccagcgcaagttccaggtgggcgtgggctgggcggaccccgcactctgagcggccagccggccccaccggccccaggcactga

SEQ ID NO: 163390 - DNA, 122 bp, Homo sapiens
atgcactaagaggcagggtgctaagtcaactgtatcaatgaatccctgcaacggcctcctcgtttccaggtctgctactgaaataaattcaattagtctggtaagttttggtcattagccat

SEQ ID NO: 163391 - DNA, 122 bp, Homo sapiens
ccgctcttcattcggagagtccgcgattcctagagcctcagacttcgtcatcccggtctgcgtgactttatgagattctgagtttctgttcccagcacctgcctttgaaggagaccagactc

SEQ ID NO: 163392 - DNA, 122 bp, Homo sapiens
cttgcctgaggaggggcagatgcacggcggctgcaccccgtggggaggccagcatgcctgcggcagctgaccctggcagtgcgagggccccccatccggaggccgcagcctagcacagtccc

SEQ ID NO: 163393 - DNA, 122 bp, Homo sapiens
gattcccagcagctgagatgactcacgttcgggggtgactcatccaggccaccggcatcgcgtcgcttaaagacaagcctgacctttccccagaagcctcaagaccacagtggcctcccacg

SEQ ID NO: 163394 - DNA, 122 bp, Homo sapiens
gaactacaagtagcacctattcttttttttttttttttttgagtcagggtctcactctgtcgcccatgctggagtgcagtgctaactgcagcctcagcttcccgggctcagaggatcctccc

SEQ ID NO: 163395 - DNA, 122 bp, Homo sapiens
catttactcaatgtgggggtctgacacctcccagctcattttgtccccatcttccccttgcgtcaggtccccacccagcaggaggaggtccgaggatctgcgcgacgctggccccgcggagt

SEQ ID NO: 163396 - DNA, 122 bp, Homo sapiens
cggttacgcgcacgggtgcgccccggcctgagccctgtggctggtgtccagtgcccccgccgggttccagccctgtcgcattccccgactgtcactgctaacaccttcctgctcccgctcgg

SEQ ID NO: 163397 - DNA, 122 bp, Homo sapiens
ggaggcctcaggagtgtcagacccacgtttccggagtccagccttgacctctgccactcacggtcacttaaatgggaagtggcaggcctggggtcagaaacaaggctgctgggccccagatc

SEQ ID NO: 163398 - DNA, 122 bp, Homo sapiens
agcctgctgtactatctctaccacattcagtaatcacatatacatttaacaaatatttttcgagcacctactatgtaccacatcaaagttggtgctccaacaataatgaaatgattaagtag

SEQ ID NO: 163399 - DNA, 122 bp, Homo sapiens
ggggcggcgcctggagagcggagcaggcagcgctttctgcccgctgagtgggtcaggcgccgcccccttgtggtctcggcctgcgggcagccctttggagcgcgcgggaaccggacgcccgc

SEQ ID NO: 163400 - DNA, 122 bp, Homo sapiens
cgcaagccctgcccctcccacccacgcgtgcccgggccccgcccccgttgcgcgcagccccgccccctatcgcgtgctcaagccccgccctggcggcccccggccccatcccgaagccccgc

SEQ ID NO: 163401 - DNA, 122 bp, Homo sapiens
tccagcggtcccctctcttccatcccgccatctctctgaggggcttgcgtctccctgatgcgctctggtgtctgtctgagccatccatcaaggatggcaggctgggggaaacatgaaaaaga

SEQ ID NO: 163402 - DNA, 122 bp, Homo sapiens
ctataatcaaataaacagctgagcagtagtaattgcagcattgtgattgcaataggcctccggtggcttagagtccctgttctgcctgtgactgttgtgccacattggggacgtcatttagc

SEQ ID NO: 163403 - DNA, 122 bp, Homo sapiens
catttgaaaggttcgctgtgggacaagtcctttgctgtctctaggaatcggttggcctctcggggccgtccctccagggtcagcagggccataggtgctggagcatcgagggcacagcacgt

SEQ ID NO: 163404 - DNA, 122 bp, Homo sapiens
aaagagtctgatgacaatctcttcataaaggaagcagccaattacccagggcagatagcacggggttgattttatgttaggtcagtcagcaaatggaccaatcaggtaatttacaaattaaa

SEQ ID NO: 163405 - DNA, 122 bp, Homo sapiens
cctctgctgaagggactgtactctgagcctgctgccctggggtacctgcctccccaaagccggtcagctccacctgtggcagggagatgcccagcggaggcatcctcagccccgcgtcatgg

SEQ ID NO: 163406 - DNA, 122 bp, Homo sapiens
agaattagaaccaaatgcatatagaaatttaggctgtgacaaaggtggcatttcaaatgccgctgaagagaagatgagctatttaataaattgccctggggcagccaggtagacttttggaa

SEQ ID NO: 163407 - DNA, 122 bp, Homo sapiens
caactcttcaagtctcttgttcacatgcatgtcattttaatgcagtttatttgaaacatccggtagaatgttccttcttacccgtttccctaaagcatgagaagaattggcaagtgatgagt

SEQ ID NO: 163408 - DNA, 122 bp, Homo sapiens
gggcgggggtcgcagggcagggcggctcggctcacctccttgagctgctccatctcgctgcggatagcctcatagtccacctcgagctcctcgaactgcagcttgagctggtgcttctcctc

SEQ ID NO: 163409 - DNA, 122 bp, Homo sapiens
gtcctttgtctaaaaacaggcataaaaaggaaatggggcagagtaggcaacagttcttaacgtcttacgagaataaaaaccaaaagcacacatttgaagaacttctgattggcagctccaaa

SEQ ID NO: 163410 - DNA, 122 bp, Homo sapiens
cggaaccggagcggcaggggacggggatggcgagtctgcagtgagctccgtggctgtccacgaggtcacttgtccctctgctgcctggccagcgccaccctcagggtgtcggtgcccaggcg

SEQ ID NO: 163411 - DNA, 122 bp, Homo sapiens
agctcatcgaaatacaatggctggtaacagctctggcttacagcaggtcacaagagcccacgatcatttccactgaacagatgaagaaactgaggcctggaaaggttaaaccaccttgcccc

SEQ ID NO: 163412 - DNA, 122 bp, Homo sapiens
gttctgtaaatctgtgatcctattctgttatttaattccgtgactctgtgttgacatagacgtgacggtgtccctggggcatttactcctaggtgagcttagccaaggcaggtagagaggaa

SEQ ID NO: 163413 - DNA, 122 bp, Homo sapiens
gtgaagatttttaagaaagaacaaagggctaatctatattttgaaatcagtataaaaagacgaacagaatttgagatgtgagcgcggacagctctgctgggccctccaggccctccgcccgg

SEQ ID NO: 163414 - DNA, 122 bp, Homo sapiens
cccacagctcgcgtctgtcaatggaaggtcacatcccagggccccagagaccccacaggccgggctccctcctgggctctgaggatgctggatgggacagaggccacccgctgcccagcatg

SEQ ID NO: 163415 - DNA, 122 bp, Homo sapiens
cccggatcccagccgaggaggtgcgcggtgctgagaggccgtgggagcgaccatagagaacgcgcgggcggagcgagcggccggatgcggtcaccatagagacgggtgactgacaggcagcg

SEQ ID NO: 163416 - DNA, 122 bp, Homo sapiens
ccgcgtgtgagtgggtccgagtgtgcgtgagtgtgagtgcgtgtgtgtgtgtccacggcgcgggccggagcactcaccatctcgccgggggagcgaggccacttcggggtcggattggaaat

SEQ ID NO: 163417 - DNA, 122 bp, Homo sapiens
tgttctggcggcaaacccgttgcgaaaaagaacgttcacggcgactactgcacttatatacggttctcccccaccctcgggaaaaaggcggagccagtacacgacatcactttcccagttta

SEQ ID NO: 163418 - DNA, 122 bp, Homo sapiens
cggaggttcagtcccggggtcagaacctctgggggcgggaccgggaactgcgtgtttaaccgccaccgccccgctcccactccgccccacgcaggtgattctgatgctgagcctgcgatcac

SEQ ID NO: 163419 - DNA, 122 bp, Homo sapiens
ctggggtcgtgtccctggcctcagtttccccatctgcagcatgatgataaggtgacctcccggccccccattccagggtcttggccaaggccctggaatggggaaggggtgtaagaggagag

SEQ ID NO: 163420 - DNA, 122 bp, Homo sapiens
ttcgccgcgtgagttgctttttgcggctggggaggtctacgcttctagagcttgagccagcggggcgaccctgcagtggcaggactcggcaccgcgccctccaccgccggttggtggcctgc

SEQ ID NO: 163421 - DNA, 122 bp, Homo sapiens
ccaaggaactaaaaggtctaccggaaaggatgataacaacaaataggggtggcaggcaatcgcgcttccctagatccaggctctctggcctacatagcaaaggcaaaatcacatgcggaagg

SEQ ID NO: 163422 - DNA, 122 bp, Homo sapiens
tcgggggcgggtgcccacgcgcgagggaaggagcgcggagccgagaggagcggcctgacgcggcagggcctgtcaatccctttacggacagggaagcagaccaatcagaattcccaggtccg

SEQ ID NO: 163423 - DNA, 122 bp, Homo sapiens
acgcgtgtgctttaagggcagagacatctgaagatgctttgccttgccctcttgaggacacgtggcttttacttctaatagtgtctgcgtgttgtggagagagaagaccatgcagctgtgga

SEQ ID NO: 163424 - DNA, 122 bp, Homo sapiens
agagaggaagactcaggaaccggcagctgagaaccaccgcacacgcgtgtgcgggcaccgcgccgccccctgctgagaaccaccgcacacgcgtgtgcaggcaccacgccggctgctgcgag

SEQ ID NO: 163425 - DNA, 122 bp, Homo sapiens
tctgcaatgtaccaccccagggtgctgatgagaactgggggtcaatccagcctcactccacgcccctgcccccaccatccccattcccaccctgggaagcgttgggcaggtagctcaacctc

SEQ ID NO: 163426 - DNA, 122 bp, Homo sapiens
tggttttattcttggtgttccccatggccgaggtggggccgggagtgaggggtggggacgcgggcctcagagcaggccctcagaacaggttcttctgaaggaagaaacatcggcctgtgcaa

SEQ ID NO: 163427 - DNA, 122 bp, Homo sapiens
gacgttgaacaatgattagaagcaaccccagggtccctccatggggtcgagaccaggtgacgatgtgcgccaggcgcgttctcggaaatgctggaggaatagggccgtctggacacgttgag

SEQ ID NO: 163428 - DNA, 122 bp, Homo sapiens
cgacctttgagtacgggaataacttcctgagcgttacatttagcaaatgtatgtgcctctcgtaaacgaccctcccgtttgctggaagtactgccgtgagctccctgattacctgtcctaag

SEQ ID NO: 163429 - DNA, 122 bp, Homo sapiens
cgctggtgtgaaggcatgagggcacacactggtccaaaggcatgagggcacacactggtgcggaggcatgagggcacacactggtgcgaaggcatgagggcacacgctggtgcgaaggcatg

SEQ ID NO: 163430 - DNA, 122 bp, Homo sapiens
gcgcgcggggcggggcgcgaggcaaggccggcactcattggctggaggggggccgcatcacgtggcggcgcgcggagcaaggggcaaggtgggggcgtggggcggagctgcctcccataggc

SEQ ID NO: 163431 - DNA, 122 bp, Homo sapiens
ggcaagaggggaaccggtatcttccatctggtgcgcgtaaaccaagactctatcctgtgccgggtctctcctccccggtccaactcccttacttgtcctcatctctgtccccaaggtccgtg

SEQ ID NO: 163432 - DNA, 122 bp, Homo sapiens
gcttggaagcatgagcgagtccaactccaacaggcgacctgacatgaaagggccctgacccgaggcccctcagcacgtcgtggcagcctcaggctttgaacccaggacttccggttcaaagt

SEQ ID NO: 163433 - DNA, 122 bp, Homo sapiens
gagggcagtggtgctacctgggctcaatgcagcctcaaatgcccaggttcaagcaagtctcgtgcctcagcctcccaagtagctgggactacaggtgtgaaccatggcgcctggctaatttt

SEQ ID NO: 163434 - DNA, 122 bp, Homo sapiens
caccgagcgggtgccggtgcggcgctgggttagtgtgagatcgcgaaataaagtacatctcgcccgtcaaagtcaatgcgagaaactttgtatatagttatgcttcggcttgcgtgtggccc

SEQ ID NO: 163435 - DNA, 122 bp, Homo sapiens
tgtatggaccagatgggtactgctccgaatttccattcaagtctgacattcttttgtcagcgtttgtgtaaccggttttccttgcattcagaggaaagacagcatggaagtatggatgggaa

SEQ ID NO: 163436 - DNA, 122 bp, Homo sapiens
gtgcctgagatgttcctgggcaagagacctttagagacccctgaaagtaaaatgtggcttcggccctggccctcccctccaccctggctgtgtttccacccaaagagaaccattgattccag

SEQ ID NO: 163437 - DNA, 122 bp, Homo sapiens
taaagagaacaatgaatactctatgaagtaaacagtcatcatttgtacttgtggtctttacggaaggagctaacacctgaggagggaaagggcattgcagttgtggttctgtttacacaccc

SEQ ID NO: 163438 - DNA, 122 bp, Homo sapiens
agctctgggcacacaggataggcaccaagaactaacacatcctggagctgcccggagttccgctcctgcgggcttagcaggaaagggtgcctaaggtgagtgcccacttgcgtccgatcctc

SEQ ID NO: 163439 - DNA, 122 bp, Homo sapiens
ggagagagcggcgagaggaagaatattccccgcgagccgggataaggggccccttcggctcggttgacccaggtcagatcctcccgccgaccttcggcccgccctctacaggcggcccagtt

SEQ ID NO: 163440 - DNA, 122 bp, Homo sapiens
ggcgcaagctgtcacccgccgacctgcagagggcccagcacgccctgccccacaggagggcgggatagactccgggatttgtaggattctagaacgtattagatatatgtggtattttcaca

SEQ ID NO: 163441 - DNA, 122 bp, Homo sapiens
tttttcctacagtgttactgagaggcacagagaaatcagttcctcctggtccactggctccgctctcagcactgcagtctcttgtgaccacgctgaagtctcaacgtttcccccttctgagg

SEQ ID NO: 163442 - DNA, 122 bp, Homo sapiens
gtttgtcctgaattcatcccagggtcccggttagccccttcctctgatgcaggtcctcttcgtaagtttccacactcttcctcaaaaatatctgatttactagctttgccatcaacaagcct

SEQ ID NO: 163443 - DNA, 122 bp, Homo sapiens
tgaactcccaacctcaggtgatccgtccatcttggcctcccaaagtgctgggattacaggcgtgagccaccacatgtggcaccaagaggttgcccagccaacatcttgatttttaaccagtg

SEQ ID NO: 163444 - DNA, 122 bp, Homo sapiens
gtaataaacgtgtgagtgcagatatctcttcaatgtattgatttcccttttggatatatacgtagtagtagaattgctagatcatacagtagttgtattttaagttttctgaggaacctcca

SEQ ID NO: 163445 - DNA, 122 bp, Homo sapiens
gccggcagtgcagcgagcagcaatgccgttcagtgactgcacagagccgtgtcccagacacgctgtcagtgccttcaacacggagccggtttgttcattcggtgctttgtttcattaaataa

SEQ ID NO: 163446 - DNA, 122 bp, Homo sapiens
gagcaagaacaagtactctaccaactcaatgacaccgggcgcctgatttccagcacaaagcgtggctccacacaggcagatgagggcggcatgaaccctccacgccaggctgccctgtggag

SEQ ID NO: 163447 - DNA, 122 bp, Homo sapiens
agcccccattgggcagggtcagggagggccctgagctgtcaatggtgtcagccaggggatcgcagggcgggcgccggggttccccatgccctcgcatccgggcactgtggaagaaggagctc

SEQ ID NO: 163448 - DNA, 122 bp, Homo sapiens
agtagaggagggagtctggcaggtcggttctaaatgtaaactggaaactacgcatccgagcgggcaaccatcactggcaccattcgtctccgggaagaacctgtgtgtgtcaggatgcacga

SEQ ID NO: 163449 - DNA, 122 bp, Homo sapiens
ctggacttcctgcgctttgctgtcttcgtcaacggtgaggagggggtggcagtggcagagcgggaagtatggagtcactggtcacacacctccctcgagatgactgctcgcaccctgagcca

SEQ ID NO: 163450 - DNA, 122 bp, Homo sapiens
ggcagccaagttcccaccctgggtcccaggaggcctttgtggcctgggcacccccggactcgccgcgagcaggctcctgggccttgtactgtcccccacaggcctcccctggcgcaggcgtc

SEQ ID NO: 163451 - DNA, 122 bp, Homo sapiens
gatggtaaacttgacctgccgctggtactatccgattgccattttttattcccccttcgccgcccccccaggctgagccacgttgagtaaatgcatgtgcacggtcaggtcagaccccggga

SEQ ID NO: 163452 - DNA, 122 bp, Homo sapiens
ccacgccgggccagaagatgggcgggcgccccggcagctcggccaggggcttggggtagccgcgcgccacagcggccgcgggcccgaagtaaacgccggcggacgacgcgagcccgttgagc

SEQ ID NO: 163453 - DNA, 122 bp, Homo sapiens
accactttcctgagccagcatcccccttgcagcgctgtcacagggaggcttaggcagccacgtggaagccacctaccccgacctttggcagaatttccaaacacaacacagtagctttaagt

SEQ ID NO: 163454 - DNA, 122 bp, Homo sapiens
tgtcatttgcactgtcatgatgtgctggttgaaactgctgtgagctctaagcttggctcccggtttaaataaagcaccagattgaagcatcttcactttctttgcatttactgtcaatatct

SEQ ID NO: 163455 - DNA, 122 bp, Homo sapiens
agggtacaattgctcccatctttgtctatgttttcaggcctcttaggaagatgacacacacgaacacacacacacaccccagagagaattttgtaggctgaagagaacaaaggtttggctca

SEQ ID NO: 163456 - DNA, 122 bp, Homo sapiens
acaggtgggaagcgatgggagcagcctaggccacctcctcctccgcctcctcctcgaactcgccctcctcggccgtggcgtcctggtactgctggtactcagataccaggtcattcatgttg

SEQ ID NO: 163457 - DNA, 122 bp, Homo sapiens
gcggccccttccttccaagccgcgccccggtgacctgggctgcgcgaccacgaggaagcccgagaactccttggcccaagtgagacaggaaccagggcaacaatgaagagaaagacactcgg

SEQ ID NO: 163458 - DNA, 122 bp, Homo sapiens
cctcaggcgcccagcggtgctgggcggggctggggcacgaccgggagcatgcgcagagcgcgcgtttcgcccatcgcgcacgcgcacacacctgctccgcccccacgctgcgtgccgctgct

SEQ ID NO: 163459 - DNA, 122 bp, Homo sapiens
tttctggtcctccacacggactgtatagggctcccgtaaaactggaaggcagaaagaggacgtcagtaaggcacacggtcaacaggctcattctgagagtatctcactgtaatatatacact

SEQ ID NO: 163460 - DNA, 122 bp, Homo sapiens
aacatcaacttcctattctgtttgggatatcctatcccttcctgtgtgtaatcttcctaacgtcaacagctctccttaaatcaataaaatttcaaattgatattttatatttataatcaccc

SEQ ID NO: 163461 - DNA, 122 bp, Homo sapiens
gttaatatttcttcagggccaacgatatgctaagcacctgttaagcctgagcaatcctcacgactcacaaggtgagtgagctgcccagggtcagtcacagagctgagaagtgccaggtctgt

SEQ ID NO: 163462 - DNA, 122 bp, Homo sapiens
atctccacttgtgtaagtgctttctcatctcctctgctctccgtagtgcccagcacagagcggcttttatgcagtgtactattgtgaccctgaggatgttatggctttgctttttcctcagc

SEQ ID NO: 163463 - DNA, 122 bp, Homo sapiens
attttgcctggaatgtgagtaaaggggcacgtccctgactcctgaaccggagtggtctcgcgatgtcacatggctgtggcacacacgcggttctatttatttcttctccatcatgggtaggg

SEQ ID NO: 163464 - DNA, 122 bp, Homo sapiens
gcgcgcccgggcccacaaagctcctttggacgctcatggcagccccttggtggaggaggtcgggtgcccaccccctccccgcccactgcggaagccggcgacccacggagctcgctctcggc

SEQ ID NO: 163465 - DNA, 122 bp, Homo sapiens
cgatagacacctgttgccgacctcaggagctgctgccacagctgctgctgcagcagcagccgctgctgctgttactgcagcttccacttcatattacgggcgggatcggagccccctgcgtc

SEQ ID NO: 163466 - DNA, 122 bp, Homo sapiens
agcgggcgcggctgcgaggtgcgcccggggacgtggagacgtgcgtggagcgccccctggcggtccattagccgccggcctttcagaacccttgatcagcaggcggtccaccccattctaaa

SEQ ID NO: 163467 - DNA, 122 bp, Homo sapiens
ccgcccccgcgcgcccgcgttggcgcccgcgcgctccctccgcaggggttagcaagattgcgctcattctcgccccggctgctccccacccgctcgctgctctggggtaccaggtccgcggc

SEQ ID NO: 163468 - DNA, 122 bp, Homo sapiens
cctcagcgtctccagccacagaagggccgtggcctgccttcgccctcctcacccgtgtcccggggccacgtttgaactttaggccttgttctgacttcattgaaaccctcctgaagtgcaga

SEQ ID NO: 163469 - DNA, 122 bp, Homo sapiens
tcttccttattgctagggccttgaataaagtcttctttgcctgtttaactccataaagtgcgatttttctttgataatgtcttaggatctcctcctctcaacattctgctttagaaaaccag

SEQ ID NO: 163470 - DNA, 122 bp, Homo sapiens
ccccgccgcaggccccgccccggccacaggcctctctccagggtgctgaaccctgcgagccgtgttcacaagacctgcccgccccgccgccctgccgggagtcaagaaacaccgttttttgt

SEQ ID NO: 163471 - DNA, 122 bp, Homo sapiens
gccccaagagagaagtatcagaggtggctggagaggcagccgtgcatgcggagacggaagcgtgctgcagacacggtcaccctcacggaaacagctgtgtgtaaccacctccatgcacgctg

SEQ ID NO: 163472 - DNA, 122 bp, Homo sapiens
gcatcaccgggcatgtccaggtgtgtaccattcctccgagcaccaggatgtcccttaaggcgtccgtgctctggtgtgtgtcccagaaatagacacgaccctcggtctgagcgcccctgcac

SEQ ID NO: 163473 - DNA, 122 bp, Homo sapiens
gactgcgtgcccgaaggccatgaggacagcgggtgtgggctgggcaggggctctctgtctcgggtggcacgtcactgccgggagcaccccctctactcgcctggcctggtatgctgtatgca

SEQ ID NO: 163474 - DNA, 122 bp, Homo sapiens
tggggacactgacaaagtcatcccctctcaggagagtgtgcaactggccagccaatttcccggagccatcaccctcacccactctggtggccacttcattccagcagctgcaccccagcgtc

SEQ ID NO: 163475 - DNA, 122 bp, Homo sapiens
tgttcccacagcctggctcggggcctgcccaacacagatggacgcttcccaaaggctgtgcgcgccatcgctgccacccggctgtgccgaggcccgcggccgtcaggaccccagggaccgca

SEQ ID NO: 163476 - DNA, 122 bp, Homo sapiens
cccgcatgcagcggttgcaggggttgtgttctttgcatccatgaaagtattggagctggccgggcgcggtggctcacgcctgtaatcccagcattttcgaaggccgaggtgggcggatcacc

SEQ ID NO: 163477 - DNA, 122 bp, Homo sapiens
gcccctctcgggcttgcttcgtcttggtcaggatgtctcttcctagggcggcctgggcctcgatttctgccagctgtgtctttttgcacgcgttctccatgtccatgaagtgcagcttttcc

SEQ ID NO: 163478 - DNA, 122 bp, Homo sapiens
tgaggtcagcgtttatcctccagatcttttgcctagacggccgcctcagtttccccctttcggccccttccggctattcccggttgaacccgccgctttagaattcccttctcatacccctc

SEQ ID NO: 163479 - DNA, 122 bp, Homo sapiens
cgaccgcccctcctcaacctgaaccgtttaatatattattggtctattcaaatgactaaccgtcattggtcgttcccagccctggcggaaaaagagggaggggcggggaagaagacccagcc

SEQ ID NO: 163480 - DNA, 122 bp, Homo sapiens
gcctttggccttagtctggatttggaggtgggattaaggccctcacagctgctgttcagacggttatgaaccaagacttcttggccttttcttaaatagctctaaatttgggttggacacct

SEQ ID NO: 163481 - DNA, 122 bp, Homo sapiens
acatgattttcaatggctgcaaatattgccaggaccatctgcttgctgaatgctggtgtgcgagctggcagaacctccatgtgctccaggtctctgatccatacgtggagaacgcacaccca

SEQ ID NO: 163482 - DNA, 122 bp, Homo sapiens
ggagaaagacaggtgaggcggagcggaggataagaaaccgaatgggagagagtcgagagccgagatttaaaagcatcttgcctaattggacgcagatttataaattaatttttaaaagaggt

SEQ ID NO: 163483 - DNA, 122 bp, Homo sapiens
gcggctcatcctgccaggcatctccgaggaaagtttgctctccggaaaagaagaaacccgcgcctcctccgaggagcctaggagcggcctctgaagccccaagggtctggagactgatgtgg

SEQ ID NO: 163484 - DNA, 122 bp, Homo sapiens
cagatattccccaatcaccaaaggccaccgagcatcctcggagggtccggcacctccctccgccccagctcaggctgccacggctgctcctcaaagaaccctaggttgtgtccggcccaggt

SEQ ID NO: 163485 - DNA, 122 bp, Homo sapiens
ccggcaccccattcagagccagcggaggaatctgaaggcatggggagggcggggtggagccgaggttgcagagaggctggaccctgaagcctcaggagttcaactggcacggggtgcgggga

SEQ ID NO: 163486 - DNA, 122 bp, Homo sapiens
ctccaggcggaggcagccagaccgtaccttttgatacacagcctggacggcaggtaggcccggtagccgtcggtgatgtacgggttgtccttgagggacccggggatctgctcgtaggtgta

SEQ ID NO: 163487 - DNA, 122 bp, Homo sapiens
agccgcgccccctgcgctggcggagtcggaggagcctgcgctgggccggcggggggcgggcgcttggggagggcggagagagggcccgcccgccgggacctttgctcggtccgggcgcccca

SEQ ID NO: 163488 - DNA, 122 bp, Homo sapiens
ttattttgataaagatttcattgctgcttattcaatagtaattcaacgctggcatcaagccgctgctccgacaggatgtggatcccatcatttaaaatgctaggcatcagctccgggagagt

SEQ ID NO: 163489 - DNA, 122 bp, Homo sapiens
cgcgcgcctgtgtgtttgcggctgaaacccgacacctcccgctggctgaggtcagggagccgggagcgagccagtggcccgggagtgggcggcgttgcgtttgggtgtgtcctcggcggcga

SEQ ID NO: 163490 - DNA, 122 bp, Homo sapiens
cgcctgtcctccccagcttggcagctcagactcaggcagagtgactgcaccaagtgggaccgaagtcgaaactgtggttttcttccgtggcggtgattctttttcaaagcctcattaaaggg

SEQ ID NO: 163491 - DNA, 122 bp, Homo sapiens
gcaaggcaaccttacagacgacaggaggcgctctcaagtgggctcctctgcggatcccagcgtctcagggacggctccgcgatcccacaatacatcggcggcccggagcagtcgagaaccga

SEQ ID NO: 163492 - DNA, 122 bp, Homo sapiens
aaatcttcttaatgtgaagtattttaaaaaccttgggagcgcgtctggccggccccgccacggggccgcgcggggacgcacacaggtggacgcgtggactgagcccgggtgcccatggcccg

SEQ ID NO: 163493 - DNA, 122 bp, Homo sapiens
ccccctccagcgtccgttttcgttttgtgcaggtcgaggcggggacttggcgccgtcggccgctcctggatggcggcttggaaaagccacctgcggccaaactccggggcagtggtgcggcc

SEQ ID NO: 163494 - DNA, 122 bp, Homo sapiens
gctgggcgctacctttcacaaaagaccagggaccccaacgcgcccgcgaccccagagggccggtcctgtatttgttcctgggtggaaggagaataagaacgggattaattttacttgctttc

SEQ ID NO: 163495 - DNA, 122 bp, Homo sapiens
catgggcaaggggtagaggggcaagttggccaccgccgccgccgggggtggtgggagagccgctccgggggcgggggccggtgggggagggaggggcgggcagccgcgccgccgcggcactt

SEQ ID NO: 163496 - DNA, 122 bp, Homo sapiens
aaacatggaaatggagcaagcaaaacattactgtctacttctgaaaatgatagacctgatcggaagtcgggtttgaatccaggagcctgctgtcagtcttcatttcaaattaggtctcttaa

SEQ ID NO: 163497 - DNA, 122 bp, Homo sapiens
ccaacagctattcccagtttatctacacccagcctctgaggtgcttcgcctccacacctgcgactggccagtgcctagttctggaaaccttatttatggactatacttaaaaaaaaaaaaaa

SEQ ID NO: 163498 - DNA, 122 bp, Homo sapiens
gacggcggccgccgccgccagcgactgcggcagcagagaggcacggagggcagagtaggacgcggcggccgcggccgcggcagaggtggccacagcgggaggccccgccagcctcccgggag

SEQ ID NO: 163499 - DNA, 122 bp, Homo sapiens
actcggagcccggggtagaacctggacttcaaatctctgcactcccggccgggtggtgggcgcatatcctgggtagcctctaggaagcgctagacacatgtaagtggttccttttccgcggt

SEQ ID NO: 163500 - DNA, 122 bp, Homo sapiens
tctggcagacgcccacgagccctcagagcactgttgtgcccgatggccccaaactggccgcgccccgaggaccatctgcaaaagatgagggcagggaaaaaggatcgaatccttccagccgg

SEQ ID NO: 163501 - DNA, 122 bp, Homo sapiens
ggctgccagccggggactggacccttggaggaccttgagcagcggggttggggcagaccacgtcctccctttcctcccagcgcatggacacacgcaaaatcagtgtaaaataatcagtgtaa

SEQ ID NO: 163502 - DNA, 122 bp, Homo sapiens
agtcagtgtggatgagaactaactgccaattgtcatatatgtcaaataaagctataaacccgctaaaaataattgtgacggctcctctgaaagttgaatatacaattactatatgactcact

SEQ ID NO: 163503 - DNA, 122 bp, Homo sapiens
acctcaggtgatccaccctcctcggcctcccaaagtgctgggattacaggtgtgagccaccgtgcccagacacaagtggcaactgagacttaagagacatgaaggggcttggctaagttgca

SEQ ID NO: 163504 - DNA, 122 bp, Homo sapiens
cgagtggtgggagaaccagccgactggagcaggcagcagcccaggtacccactctgtgcccgcgctcctacggggcctctcccggagcccttccgtgcgcctcagccctggtcgcttctggc

SEQ ID NO: 163505 - DNA, 122 bp, Homo sapiens
gccttcctcgccctgcgcgttgtcaggcgtgtaattggggaaactcctccccgccgggaccgcctcggaggcgctgccaggggacagccgcccagctgcccccacctcccagcacagcgcac

SEQ ID NO: 163506 - DNA, 122 bp, Homo sapiens
actcccgatggggagacccctgggtggagggtcgggggtgagaggcggctctgagacccccgaggcctgggcacacgggcgtcgtgcccggctggcatttgctgtcttggcctgcatgcatg

SEQ ID NO: 163507 - DNA, 122 bp, Homo sapiens
tcctcggcagtacgcgtgtgcggcgccaggagaggacagctccagtgctgatgttggagccggttagcgaaccccaagagtgcagagtgtggagcgtggagcgccgggactgtgcacgcttg

SEQ ID NO: 163508 - DNA, 122 bp, Homo sapiens
ggaggctgaggcatgagaattgcttaaacccaggaggtggaggttgcagggacctgagatcgtgccactgcaatccagcctgggtgaccaagagagaatctgtctcaaaaaacaaaaaagaa

SEQ ID NO: 163509 - DNA, 122 bp, Homo sapiens
atcacgaggcagcacgctgacaaccgctgaatggtgggatgggcagatgagccccttttgcgttctaaagagaagtcctgtggagtaccaagagctgggacgttatcaagaaagaggaattt

SEQ ID NO: 163510 - DNA, 122 bp, Homo sapiens
ggctcaggtgcggttgagtcaggggtgacataacttgctgctagtgttggacctgggtgacgggcaccagggtcccctggactattctctttccttcagtttgaaattttccactataaaaa

SEQ ID NO: 163511 - DNA, 122 bp, Homo sapiens
cagggtcctgcacctggagagtcatccagtgccccctcggtgcctgggcccggagcccaccgcgcctgcagcaccaagggccattctgaggatctgaaaggagaggtcagaccctgagcccc

SEQ ID NO: 163512 - DNA, 122 bp, Homo sapiens
ttagtgatgtgtgtggggatttactgggaaccacaggaattcttggaggtcttgaatcaccgtaggatttcccacactgatatgtctgctgcttcagtcttgatgcctgcttgataaaccac

SEQ ID NO: 163513 - DNA, 122 bp, Homo sapiens
ggttctcagtgtctctgagcaggcaggatctggcaaactgaaggtggacatacatactggcgggaaaaattatcttcttcagaataatttagaaaaatgagccaattacaaaccgtcaactt

SEQ ID NO: 163514 - DNA, 122 bp, Homo sapiens
aaattaacccagccaaagcgttggggttcaagcgagcgactggaccataaatcagcgtcgcggtggcgtcgggaagctgagcgctcggaggtgcactcagctgcctctgggttcgcccagtc

SEQ ID NO: 163515 - DNA, 122 bp, Homo sapiens
gggaggagaaacgtggcatgcatgaacggagaaatgtggcgtgcatgaacggacaccacgcgagatagggaggattcaggatgtgatcttatttcagcatctttataagtgatcaagtaaaa

SEQ ID NO: 163516 - DNA, 122 bp, Homo sapiens
cctctggctgtaagtaaggctgtggtctgttctcttttcggtgtaggcggagggccatcccgcttcagagccctcacttcacacacaggatgttccaatgtggatgatgcaattcttatcac

SEQ ID NO: 163517 - DNA, 122 bp, Homo sapiens
cactttgcaccatgcatgatggatgactttgctgtccagtactgtgtagtgcatgtggctcgtcaaattgagatgatagaattgccagttgtcctggtttgctgcgattgtctgttttagca

SEQ ID NO: 163518 - DNA, 122 bp, Homo sapiens
aggggaacgagttctctcattaggcacctcctataatgtatataaaccatgttttaaaagcgtacgttaaaaataacaacgctgtatatgcttaactttgtgagttaaatcactcaaattct

SEQ ID NO: 163519 - DNA, 122 bp, Homo sapiens
tgaactcctgggctcaagcaatcatcctgcctcagcctgccaaagtgatgggattataggcgtgagccgccgcgcccggccaagactccatttattaaaaggctaaagaattttgccaggcg

SEQ ID NO: 163520 - DNA, 122 bp, Homo sapiens
tgggactgactttcaaaagagcgtccccctggctcaagaggccggcgttcgcggagatgtcgtcttaaagggctgtcccccaagcgtgtaggccgcgcacgggtctccttagcgggcgggca

SEQ ID NO: 163521 - DNA, 122 bp, Homo sapiens
gcaggggaaggcttgcggcgggctgctgcacggattggctgggtgcggaaagtgatgtgccgtgtcctgtcattggccgaaagagtctcgttttgatgccacccgggctcagattggcccag

SEQ ID NO: 163522 - DNA, 122 bp, Homo sapiens
cgccccacggtgcggtgtgggtcccatccactggcactgtaaaccctcaggaccccggggcgctgggatcgcagcagctgcccccgacagcgctgcaggcaccagcgaaatgcgctgcgccc

SEQ ID NO: 163523 - DNA, 122 bp, Homo sapiens
ggcccacccataaggttcacatatattctctcaaatcccctcctccagttttggcctatccgctgtgattttgcaaagatgtgatatgaaattaaaggcgaatagtctaatgtgcatctggc

SEQ ID NO: 163524 - DNA, 122 bp, Homo sapiens
ctacagtgtggcaagggcctcctcattgggtttcctgcctcaacctgtcccattccactgcgtcctcagcattactgtcaaattcattttcttaagtgcagctgcagtcaggccactcccct

SEQ ID NO: 163525 - DNA, 122 bp, Homo sapiens
ttgcagaggcagcaatggaaataagagttggtctttatgcaggaacatgtatttagaaaacgctttggtattctacagggctgggaagagactctgttcttttgttagccaggggtaaacag

SEQ ID NO: 163526 - DNA, 122 bp, Homo sapiens
tccaggctgccccgtttgcgcctgagccgggaaagagcaacccatcccgtcgccccagcccgcaaggactccgacaccccagactttccactacgtctgcaaatgtggaccgcgtgattgac

SEQ ID NO: 163527 - DNA, 122 bp, Homo sapiens
attctagccacaatttcaacatcccatccccgtgacattagggaatgataaatcagcaggcgggacagttcccctgtacagactggtacgggcggaccgggctctgccaacgccctcgctcc

SEQ ID NO: 163528 - DNA, 122 bp, Homo sapiens
tgaggggtgacagccccccacacccacagccgcgccggcagggaggggcagaggggacagcgagccccaccccagagggtccggaatgccgatgcgccacagcctgagggccccagtgttaa

SEQ ID NO: 163529 - DNA, 122 bp, Homo sapiens
gacagaggaggcaacagcctgccagccagactgtgggagggcgtagagggccagggtgcgcgccagtgggtggcaggcccaccggtcacgggaccagtagtagatcaggatgcaggcgatgg

SEQ ID NO: 163530 - DNA, 122 bp, Homo sapiens
gttgggggagggggagacgcttatcaggcggccgctgggctaggggccttcttccgctgccgcggtacacccagagctacccccgcctctccccgggaggaggaaggacggtacagagggcc

SEQ ID NO: 163531 - DNA, 122 bp, Homo sapiens
cgccgcccaggcacccggttcccgcgagtcccacccgcgcgaccaggcgcgggccgcgcgcgcccccgtgtgtcccgtcgccgccacagcacccgcggctccgcccagactctccaaggaag

SEQ ID NO: 163532 - DNA, 122 bp, Homo sapiens
accccgcagtcccggtcacttcaggcctcagtttccccacctgctgcttgacaactgtcccggagttttggagcccgtcttgatagtttctggtctcgggttcaggcttgggccctttaggt

SEQ ID NO: 163533 - DNA, 122 bp, Homo sapiens
gaggcaggcctaacttgcagctcccactcggtggacagagcagcctgtgtaaagccacatcgtgaacttttgctccaagaactaccaaaggaacatcccaggcaagcctagagaatccacag

SEQ ID NO: 163534 - DNA, 122 bp, Homo sapiens
gtctcggtgctgtgctagcctgatagaagaattgggcagtcttgagccaggtatgatgctcgcctgcagtctcagctgcttgagagacagacagtaggattgtttgaagccaggcatttgag

SEQ ID NO: 163535 - DNA, 122 bp, Homo sapiens
agagccagcccgggcagggcttccctcggggggcccgttccacgtccgctcacctcccgccgcccctgctgtggcccctctgacaccagccagcctgggcaaggcggagcccctcaccatcc

SEQ ID NO: 163536 - DNA, 122 bp, Homo sapiens
aatgatgcttacccatgtggccagggacagagacgatgcaggttgagagcgagaacttgccggccacaacgtcacttcctggttaggacaggggtttggggtagaagcatccgcagacacca

SEQ ID NO: 163537 - DNA, 122 bp, Homo sapiens
cctggccaggacctggccaatcccaggcctggggccctggtctggttcctagttagcgggcgggtgtaaaagcctggaaaggggcgatgcctggcctgaggagttgaccaatcccaggcctg

SEQ ID NO: 163538 - DNA, 122 bp, Homo sapiens
ccgctcgggttcttcgggggctgcggacctccagggcttgcttactccggggtgcggggccgggggctccgtccccagctgcagcaggaggggccccaccccgggagcggtgggcggcaggc

SEQ ID NO: 163539 - DNA, 122 bp, Homo sapiens
atgtcactttggtaaatgaaagaactgaaaaactgcctcaagacacccacatacggccaacgcccgctagcctttcttcctcccacagccccactcacgtgggcctccaaacagcatttatt

SEQ ID NO: 163540 - DNA, 122 bp, Homo sapiens
ttcaggcttggcatcaaacaacccttgggactcagggcatgactcttcagtgagattagtcgtaacctaagaggcatctctggctactttcaaattatttccattgcaaaagatactgaatt

SEQ ID NO: 163541 - DNA, 122 bp, Homo sapiens
agctttctccagaggatcggaagaggagaagacaggatggtggcggttcccggggctcaacgaatagctaaagtgagattcgtcgtggacgttggtttccgagtggcttaggttcagcttgg

SEQ ID NO: 163542 - DNA, 122 bp, Homo sapiens
ggtcagctcaagcaggctgcaccggcctccgatctccttgtccagcctcggagtgccctgcgggcaggtcctgctggcgcagcagccctaagccctaccaaaccctccgggttagggaagcc

SEQ ID NO: 163543 - DNA, 122 bp, Homo sapiens
cgccttctccccctaggttcccgcctccgggccgcgcgggcgccctcccgggatcaggcccgctccaaggagggaggctgacgggttccctgtgggcccagacccccagtactctagcatcg

SEQ ID NO: 163544 - DNA, 122 bp, Homo sapiens
cgcctgcgcgggaggcagggtggcggggagccggggctaggacggtgtgtggggtccgaacggaactcccaggctgtagcgaaagcgtgacagggccggaccctgaagctgaatgaccgcta

SEQ ID NO: 163545 - DNA, 122 bp, Homo sapiens
gtgtgacccgggcagacacaggctgcccccacacttctggactctgtgtcagggcgcacacgctgacagcatggctaactttctgggggccggggacatctgggagaagcagaatgaaacag

SEQ ID NO: 163546 - DNA, 122 bp, Homo sapiens
gtctgcttatgcccattttcaacatgagaaaactggggcccagagatgctgagttgcctacgcacagtcacagagctggaaagtcagaaagtcaggacttgaagtgagggctgtctgcctcc

SEQ ID NO: 163547 - DNA, 122 bp, Homo sapiens
cgcttctgcgctacgctcacggtgaagctcctggtgccatagagagtcccccggttctcacgcctgcaggcttcagccccagcggcagcgggcgcacccggtccgaacacggtgtcggagct

SEQ ID NO: 163548 - DNA, 122 bp, Homo sapiens
aactcgctgaagttcgtggccccaagacatgcggagaacccgcgtctgcagggctggtggcgtccagcacagggcagggtcctggtgtcctcgccccacaaggctcccccagggtggcccga

SEQ ID NO: 163549 - DNA, 122 bp, Homo sapiens
atcagctgcctttccctggcccgggtgccgtgtttgtaaactcggctgcttggtgcggctcgggccggggtaaagggcgcctcccagcagagcctccctcgtctctgagctggcctctccag

SEQ ID NO: 163550 - DNA, 122 bp, Homo sapiens
gctaggagctgggagccactgacgcccagggacagaagctggtgctgcagagaggggcggcgcagggagtccctcttcttttcctttttaaaataattgctttactgagatataactcacac

SEQ ID NO: 163551 - DNA, 122 bp, Homo sapiens
ggtgcacgggaagcgctttttctctccagcctgcggatggggcggcccacaccaggagggcgcagaaactgaaacaggcgcccgcttggcctagaggcctccagggtgcccaggcctcctcc

SEQ ID NO: 163552 - DNA, 122 bp, Homo sapiens
ggggatcgccgtggatgcgctggtgctgcagcagattggagcgctgccggaagctctggccgcactcagcgcaacggaaaggctgttcgcccgtgtgcactctccgatgctcttccaggcgc

SEQ ID NO: 163553 - DNA, 122 bp, Homo sapiens
aaaaatcaaaagaggggaaaacccctttcccatctgagaccgctccaccctcgccagttacgagctgccgagccgcttcctaggctctctgcgaatacggacacgcatgccacccacaacaa

SEQ ID NO: 163554 - DNA, 122 bp, Homo sapiens
ctcctcaattcccagacggggcagctgggcagaggcgctctcacttcctcccagatggggcggccgggcagagacactccccacttcccagacggggtggcggccgggcagaggcgctcctc

SEQ ID NO: 163555 - DNA, 122 bp, Homo sapiens
tccgtggccatctttagcatctcagagtgaattaaatccccctttctaagggcattttcccgtgaagctttattctctgtgacataaggggagagggatttttagagaacctggggtggcgg

SEQ ID NO: 163556 - DNA, 122 bp, Homo sapiens
atatcttcagtgaaataattgcaaggcgacatttcagggtaatttcctaccgcgttttaacgacgaataaagaagatataaaagtgtcatttatagagaaactccagcattttgttttcttg

SEQ ID NO: 163557 - DNA, 122 bp, Homo sapiens
ccctcctccaggaacagttccgccgcgaaggcttcctctagggccaccaggctgaggactcgcccaggacatggactggtctctcagacccctgggccaccatgtaggccaccactccaggc

SEQ ID NO: 163558 - DNA, 122 bp, Homo sapiens
ctccatcagccccacacggactcgcggcgcattataaacactgtaatctggtgtcagccccggcactgattaaaggcccattagacacattcaggcctctgtgcagcactgattagggcgtg

SEQ ID NO: 163559 - DNA, 122 bp, Homo sapiens
attatgattttttatagatcacatctgaacagaaaggcttcacttaagatcttgattctccggagctataattcatcttctttctccaataccacccacattcttaaaggttatttagcttt

SEQ ID NO: 163560 - DNA, 122 bp, Homo sapiens
gcgggacttcgggcttgatgggcgttgggggtggccttcctgcgggcaggctctctgtgtcgcaacactggcggggcgggccaaatcggccagagctctgcccccagaggacgcggctaagc

SEQ ID NO: 163561 - DNA, 122 bp, Homo sapiens
taccttagtgacttatccatgtttacagaagagtttggtggtctcctggtgccgagggcccgagcatcaggttcagcgagagcagcagcggccgtggacaccgcagaggccaccatgagggc

SEQ ID NO: 163562 - DNA, 122 bp, Homo sapiens
attgttgtcccctgatcaggttaggaggcagggattttctcattctctgttcactgagatcgaagcctttccatggttctgcttaattccacatgtcagtcccacttgacaagtgtaatggg

SEQ ID NO: 163563 - DNA, 122 bp, Homo sapiens
aaagctctaggtttttgcttggagacctcactggtccgaggctggccaagccggggactgcgtggcgttcagcactcctgcgcctccacagcctgggtgtgggcaaggacaggaggccgctg

SEQ ID NO: 163564 - DNA, 122 bp, Homo sapiens
gtggcacagcttttttaggggaaaataaaaaagatcatgggtcttgccctcaaagtgtgacgttaatagctaacatttttaagaactttttttggtttacacggtgctttaatgtacattct

SEQ ID NO: 163565 - DNA, 122 bp, Homo sapiens
tcaaccattcttcccacagcataggttactgccctcgccattcaggttgccctccttcagcgaacacactgcaatttttaaatggccctctcgagatgttttactcagagctgaatgcaatg

SEQ ID NO: 163566 - DNA, 122 bp, Homo sapiens
aatactgatggaacactcattatgtccctggtactgttagaggttctggggattcaagaacgaataaaacatacaaagatccagcaatctagtagattttacaatctagtgggaggggactg

SEQ ID NO: 163567 - DNA, 122 bp, Homo sapiens
cccgcccacgcctagggtaccatctgcccgcctgtgctctgcgctgagtgcccagccagccgcaaccccacagatgaccacgacgttgacctgcctgtttccactttgcaggaaaggagaca

SEQ ID NO: 163568 - DNA, 122 bp, Homo sapiens
cttgcctgtgttattttgctgcacagtgagcttctgcacagctgtagctaaatatgttaccgtgttcccgatggtaacatcttacctgcagcagatggcctgacttctgatgagggataagt

SEQ ID NO: 163569 - DNA, 122 bp, Homo sapiens
cgggagggttgaggctgaatcacgcgcagcctgcgggcggcggaaacgtccctagagcctcgccgccctgggacccgggctgcttcctgggagaggattacattttctccctgctccacttg

SEQ ID NO: 163570 - DNA, 122 bp, Homo sapiens
gcactgctctccagctcagccctaactcttaggagagttgtggcccagagcctcctgtgacggaaaggctgctggtgagcaactcttgagggcctgttcccctctggtgtcctgaattcttt

SEQ ID NO: 163571 - DNA, 122 bp, Homo sapiens
caacaagcaccagatttatgtgcactttgaaagaagcaccttcaccattggctttttaagcggcgctgtcgctagggagcggctggtagggcgagcagcctcggggagcagcccgggctgtt

SEQ ID NO: 163572 - DNA, 122 bp, Homo sapiens
gacccctgctccaagatgcaaatccacagctttggatcagtttgtaagtgtgagtaaagccgaaagtaatgcatgatacagatgaggtgttcacatttaattctgctaaaatgacaccatga

SEQ ID NO: 163573 - DNA, 122 bp, Homo sapiens
ccgtcgcctcccggagccgcccgccgcgtcccccagcccgcgccgccctgcgcggcccgccggcctcctcacctatcagatttcctgtgcgcatcgccgcgcgctcctcccacctcctaaat

SEQ ID NO: 163574 - DNA, 122 bp, Homo sapiens
cgctccaatccaggtaggcggctgggcgcagggacgcgggtgaggagggcggcaggtgggcgagctgcccaaaccccactgccagggtgtcccgtgccctggggagggggcgtccaggcctg

SEQ ID NO: 163575 - DNA, 122 bp, Homo sapiens
cagtgacgggaaccaatgagctgccaactcgcgcgtctccggcgtgactgccgagattgacgtggaggacacgtcaaattgattcccgcacgctgcagcctcccggtcagacgaatttctcc

SEQ ID NO: 163576 - DNA, 122 bp, Homo sapiens
ccacagttctgctttcattcacttccccggaaggttctggctggctgcccttactgctcacgtggctttcattccaaaacgcaattcctcacttcagctttttaaattctgatgacattggc

SEQ ID NO: 163577 - DNA, 122 bp, Homo sapiens
ctttttcagacaagcatgacatgggttttcttttcatttcttctgttctccagagtagatcgggcttgtgacacctgtgtgtgtaccttcactcaatattatctttctggaacggagcagaa

SEQ ID NO: 163578 - DNA, 122 bp, Homo sapiens
tttggccagactctccagctcccctgggtaagggtggagggccattcccagcccaaggggcgccatgtcctagacaggtgtttgaggtccggcaacacttcatagagccagcaagagatgac

SEQ ID NO: 163579 - DNA, 122 bp, Homo sapiens
attgggaaagcaatgtctgctcctcccgcttctgctcctcgcagcctggaaggtggggagcggccagctccactactccgtacccgaggaggccaaacacggcaccttcgtgggccggatcg

SEQ ID NO: 163580 - DNA, 122 bp, Homo sapiens
gatggggaggcggtgaagagcctctggggtggaagtggtccagccaaggctggtctccatcgccttctgctggcaaaaggaagagttgctctgaaatccctcctggaacctcccagaggctt

SEQ ID NO: 163581 - DNA, 122 bp, Homo sapiens
aaccggggctgcgcacagcgcttgcgggccagcgcgagttccgggtgggtgtgggctccgcgggccctgcactgggatcgcctggccagcccgcaagccctgggcagtgaggggcttagcac

SEQ ID NO: 163582 - DNA, 122 bp, Homo sapiens
ttctgacccagttgcaggcagagtctgggattagtctggtcatgtcaggcctgtggtggacggggcgagcggccggcttcctctgagtctcctggccacctggggaagacatgggaagccac

SEQ ID NO: 163583 - DNA, 122 bp, Homo sapiens
caacaaagagccaggacccaggaagaggaccctcctgagtgaagactgagggtaaacccccgctcaaagaggggccacagaatccagcttagtccctcctgtcagccctggaagaccccagc

SEQ ID NO: 163584 - DNA, 122 bp, Homo sapiens
cccacccctgcttaccagccttgccccgccccgccccctcctcccacctccttcgcagcccggccccctgaagtcgcgccctgtgcctggccccagcctgcgtcccctcattccccagtgct

SEQ ID NO: 163585 - DNA, 122 bp, Homo sapiens
gtgtgagaactgggtgtcggtgctgggaccctgtagacactcaatgtgagaactgggagtcggtgctgggaccctgtagacactgagtgtgagaactgggcgtcggtgctgggaccttgtag

SEQ ID NO: 163586 - DNA, 122 bp, Homo sapiens
tctgggatctgtgtctcttggctaccgtgcctggcacacagttggcgctccatgaatgcacgcacaatgaagggatggccctgcctggaatctgcctggtaggcgtctagactctggggccc

SEQ ID NO: 163587 - DNA, 122 bp, Homo sapiens
agctggcagggaccctgccctatgggccatcggaaagacaggcctgatgggcagcattttcgggggtctgagccccaactcggccagaatcaccctcccgggctgaagcccctcttgctgcc

SEQ ID NO: 163588 - DNA, 122 bp, Homo sapiens
atgcagttacttcaattacaagtgccctggggactgaggtgaacctggggtgggggaccacgtctttactacatattgggatccctgaggaatgaaattaccttcttcagtgagtattgctg

SEQ ID NO: 163589 - DNA, 122 bp, Homo sapiens
ttgcgtagtaaccccgcccatgaagaggactggaatactgaaaaactgcatgaaactaagcgctgtgggttgggcggggtggctcacgcctgtaattccacactttgggaggccaagttggc

SEQ ID NO: 163590 - DNA, 122 bp, Homo sapiens
ggctgccacgcaggctgggcttgggggcgggagccaggcccaggtggggcgtgagggccgcgggtgcagggcaaggctgacagggagtgagggaggaaggtggagggcggtgatcagagggc

SEQ ID NO: 163591 - DNA, 122 bp, Homo sapiens
ccaaccctcaaaaaagcacttggcagtgtctatggaagggtggcatttaaatgaggccaacgagtctgatggtgaaagggcctaacggttactgagaaatcaacagtattgtgatgggaaaa

SEQ ID NO: 163592 - DNA, 122 bp, Homo sapiens
ttcctcctgtgtcctgttactgctgaggcagacctgccgggccagctgagcaactttcctcggagtgctgcctggcgctggctaggaggcaaacgcacgcgggaagagctgctacccattcc

SEQ ID NO: 163593 - DNA, 122 bp, Homo sapiens
cgtgttatatgcaaatactgcttcattttatatcagggatttgtgtaccttgaaggctcccggaaccaatcccccatggataccaagagataactgtacttattgatgctaaaggaacttca

SEQ ID NO: 163594 - DNA, 122 bp, Homo sapiens
gcattgctggctctgccatttactcccgtcatgaccttgagcagtgattgactctcctgccgggtttctacaatgggaacagaactggagtttacattcatgtatcgctgttttctggagct

SEQ ID NO: 163595 - DNA, 122 bp, Homo sapiens
tggacggctgagtctggcatttcctgagaagctggagatgtggtctgtgccctggggaaccggttagagggcagcggagggttcctgccctccttcagggcaggagggagcaaggctcagag

SEQ ID NO: 163596 - DNA, 122 bp, Homo sapiens
tgaggcggagcgtagctgttcctggatcctgggcctggctcctcgacccgcccctggaggcggaccccacttgacttaaactctggggcccgggaggccgccggttttctccccgcttgccg

SEQ ID NO: 163597 - DNA, 122 bp, Homo sapiens
ctcaatttctcaccaagcattagctgccttcccgcggggcagggctcgggacctgcagcccgccatgcctgagcctcccacccactccatgagctcctgtgcgggcccgagcctcccggacg

SEQ ID NO: 163598 - DNA, 122 bp, Homo sapiens
tgcacctgcagcgcccgccgccgaagacccgcggagtcggcggttccaacccagcgccgccgcacgccgggtgccttctcaggtcccacccggagcctcgacgctcttccttctgcgtcgga

SEQ ID NO: 163599 - DNA, 122 bp, Homo sapiens
ggtgtctgatttacgtggagcccagagattggttcgaccaggggtgacgtttacgtagcgcgcagggaaggctggtcaccccaccctaatcttgttatgcaaataggcttcccacttggcag

SEQ ID NO: 163600 - DNA, 122 bp, Homo sapiens
gccccaaagcagaatgaagggagtgtggggtatcagtcacccatccatctctgacccacgcgttacacaggggcgggttggtcatatggattctgatctgaaggacgggagtagggggtggg

SEQ ID NO: 163601 - DNA, 122 bp, Homo sapiens
cgcatcattaaaagatgtcctttttatgccagcctggtcaagaactattatgttgttgttcgggtttttttgtttttgtttgtttgttttgttttgagacggagtttcgctcttgttgccaa

SEQ ID NO: 163602 - DNA, 122 bp, Homo sapiens
ttccatcagaaccgcccagaggcggacgctgccttcctggggtgacggagcagcaggaagcgttttcggatcctggaatacgtgggcggcccgtgggaggggctgaggcgcagtttcctact

SEQ ID NO: 163603 - DNA, 122 bp, Homo sapiens
agaaacatttcagctgcagctgtctcccttgttagcattgagaggcatcggagaggtcaacgccgccccatgccactttttgcacattcttccctcagccggcctccccgcaagactcaggg

SEQ ID NO: 163604 - DNA, 122 bp, Homo sapiens
ggagatgaaggcggcgcacagggcagaacggcagacacagggctgggaaggtggcagggccggactccagaacctcagctgagcgttttcttctcctgtgtcccagggatggtgtgaagtgt

SEQ ID NO: 163605 - DNA, 122 bp, Homo sapiens
agcccagcagcatcatcccggccgccgccgccatttcactctgtcggagacactgaaggccgaggtcgccaccgatcctcctaatcgacggagcaagagaagctggcagatggtcgtccaca

SEQ ID NO: 163606 - DNA, 122 bp, Homo sapiens
cccacgcgcgagaaggaaacaagcgccgcgtactccctgtcgctccattccgtattttcccgccttcaagctcgcaccctctgcgcatgcgccgaccccgcccctggccagctgcgctcccg

SEQ ID NO: 163607 - DNA, 122 bp, Homo sapiens
gaggaggagacccacaggaacccacctgcagagaggagcggacccacaggaacccacctgcggagaggaggaacccgcaggaacccacctgcaattacaatctcacgcccaccaaagacccc

SEQ ID NO: 163608 - DNA, 122 bp, Homo sapiens
atgaaggatgagacaaacctggatgtgagtcccaactctgctgtgtgacctgagacaagccgtgcctctgagcctcagtctcctcagctctaagaggggcactcccatggccctgtcaaagg

SEQ ID NO: 163609 - DNA, 122 bp, Homo sapiens
ctcgcctgtttcttgccctccagccccgctcctgcatagactcggcccccgtgattccggcgttctgcctctacccctggctccctagtcgcgcacactcccgtggctgtaacagtttattg

SEQ ID NO: 163610 - DNA, 122 bp, Homo sapiens
tataacccaggccatatagtcaggcagactttggcgaaactgtcagcgagggcagctcctcgattcggcccctttgactattgtctccagtcctgaaaccctcgcccagggccgctccgccg

SEQ ID NO: 163611 - DNA, 122 bp, Homo sapiens
cctaacgggcacgaggtgatgcctcacgtctgcacttgtgtctcctgagcagtggttggtcgtgtggagcatcttgtcatgtgccgcttggccattggtttatcttctctgtacaagtgtct

SEQ ID NO: 163612 - DNA, 122 bp, Homo sapiens
gctttctgggtaatgtagtttcccaggttccaaggccgtaaagagagagattcccaggggcgcttcggaaggaaaagcccagctccacctccggggccctcagggaagcctcctgacccgca

SEQ ID NO: 163613 - DNA, 122 bp, Homo sapiens
acctcctccacctgggggagaagagcataataacgtcatttcctgccctgaaagcagcctcgagggccaacaacacctgctgtccgtgtccatgcccggttggccaccccgtttctgggggg

SEQ ID NO: 163614 - DNA, 122 bp, Homo sapiens
aggcacggcgcttgattgacatgagggcccgcccaatcccagtgcggcagagaccgttgtcgcgtcagggaccggggaagggggcgactgaacctatcagattgggtccagagtgggtttcc

SEQ ID NO: 163615 - DNA, 122 bp, Homo sapiens
tctgtctctggaattcaccctggagctgtccctcccgtttctttcaacctgttttatttgcgccagggtctgggtctctgtctcgtcctcggattgtatctgtgactgccaatgctctgttc

SEQ ID NO: 163616 - DNA, 122 bp, Homo sapiens
caacaagcttgtaggtcagaagcttcaggttccctttgatggattagctccctgcttggtcggctgtgtaaggtctcaagtctgtgcatagtatttacttaagtcagtgatgtagccacctc

SEQ ID NO: 163617 - DNA, 122 bp, Homo sapiens
aagtgaaatctaattcacattcacataaccataaccgcaatcgatcctgtaggtggagagcgattttagcaatagtgacaccttgtggcattatctgccatggctcattagccaggaaggct

SEQ ID NO: 163618 - DNA, 122 bp, Homo sapiens
ccaccccccagagcccagccaacggtaaataggactgtgacctgggaatcagaccgttcccgagcgccccctgtgtgtggtgttccttgggtggtggggaccgctgtgttcagcccgtcctt

SEQ ID NO: 163619 - DNA, 122 bp, Homo sapiens
tccgaggactttcccctcctagggcgggagacacggcactccctataccggcgggagccgcgaggacttggtttttccagtcgcccgtcgccaccccaggagggggcctctgcccgaccccg

SEQ ID NO: 163620 - DNA, 122 bp, Homo sapiens
ccccgggcagtgtgtggtcggattggaaggcaagcccaggtctgcctgactcaaacactgcgctcttcttgctgcccatacccactcctctctttcccaacttcatacatgcatctgtccct

SEQ ID NO: 163621 - DNA, 122 bp, Homo sapiens
caggggaaaaggaaaaggcccaatcagcagaaagtccacagctgaaggacccggatgaagcgagcctaggactttgaagtgcaagcctcgccaattgtagagcagtcaccatggcgacaaga

SEQ ID NO: 163622 - DNA, 122 bp, Homo sapiens
cagcaatggagcgtgcaaaacaccagtgagcttctgtcttgctggagggtcggctttgggcggaactggctttgttgaccgggagaaacgagatgggggtgaagctggagatatttcgggtc

SEQ ID NO: 163623 - DNA, 122 bp, Homo sapiens
tccccgtctctccccgcccctccccgtccctcccgccgaagctccgtcccgcccgcgggccggctccgccctcacctcccggccgcggctgccctctgcccgggttgtccaagatggagggc

SEQ ID NO: 163624 - DNA, 122 bp, Homo sapiens
agagcatttaatcttaaatgtcaagcactgtccttctagtctcctgtgtattatttcacgcggataacaaccccatgaggtaaagtttacatgggaactaaggacccagacagattaaataa

SEQ ID NO: 163625 - DNA, 122 bp, Homo sapiens
gcgccgcgcccagaaccaaggagcacaagtccgcagtgcccatgagatcctcatgctggccggcgcaggagccatcctcggcctctgcaggtcctcgtgggaaaccgcgggggcacgtgggg

SEQ ID NO: 163626 - DNA, 122 bp, Homo sapiens
cctctgagacctgggggcaggctgtgcttggagtccccctaggccttggcgtggtgggaacgctgtacccagtgaccccatcctcgagaccgtacctaggcagttgttgtgctgagaccccc

SEQ ID NO: 163627 - DNA, 122 bp, Homo sapiens
tctgggagctgcaagcgcgggccggccagtcgtccgcgcgcggctttttcttcaggacagcggaggcacaccgtgctttgcggttcccggaagtccttcaggcctcagacctgtcagcccgc

SEQ ID NO: 163628 - DNA, 122 bp, Homo sapiens
gaatcaataaaacctattttctttataaactaccctgcctcaagtgtttctttatagtaacgcaaaaaaaaaaaaaagcctaatacagaaagtatttcactgtctggcttccatgatgcctc

SEQ ID NO: 163629 - DNA, 122 bp, Homo sapiens
gagggaagagttagccccggttcccagccgcgggtcgccagttgcccaagatcaggggtccggctgtccttctgtcctgctgcagactaaaggtctggccaatgtcttgccccaccccgcca

SEQ ID NO: 163630 - DNA, 122 bp, Homo sapiens
tgtgacaatgccatccctctccggcaggtgggccccgcctgccctccacctcccgtgctgcgtgcacacggtctgggttggctggaggcacagccacagtccagctcccgaggcccgtctca

SEQ ID NO: 163631 - DNA, 122 bp, Homo sapiens
acagagctgttgtttcaggataaaaaatgcccttgtattccacgttccagttcagaggcccgtctgttcccaagagcggaggcgtcagccgcatgagtcccaccggaagccgggttgccggg

SEQ ID NO: 163632 - DNA, 122 bp, Homo sapiens
ctccctgctgcccactcctcacctgcagcaggaggaggccaccgctggacatttgagggccgtggcccagccctggcttgggcaggacttaggggtgtagatggagatgtggctcccattcc

SEQ ID NO: 163633 - DNA, 122 bp, Homo sapiens
gcacggggcaaatcaaaactcaatcccaacagcgttaactggcattttaggccgaagctccggattcggaggctggggaggaagtagctagcgctggcctcggctgcctggcacgacccgcg

SEQ ID NO: 163634 - DNA, 122 bp, Homo sapiens
agtttaccctgtggaggatgatcagatataatgtttgtggaacactaaatgtgcagcatccgctgaacagggtgaaaatcattttcaaatagactggagagtggccatgccagaggcacagg

SEQ ID NO: 163635 - DNA, 122 bp, Homo sapiens
acaggggccgcggccgctgagctgtgcgaagttgtgtgcagcacacagcactcgggacggcgctgggccggccaaacaaaaacatccgccgattccactaactacacaaccacctggcgaca

SEQ ID NO: 163636 - DNA, 122 bp, Homo sapiens
tcagcaagaggtcaaacactgatggtgacctcctagtgcatgcactaagctaaaacataacgggtcaccacaccttgctgctggtttaatgaatccttccaccatttaataatctagagagg

SEQ ID NO: 163637 - DNA, 122 bp, Homo sapiens
cgcaggctgggcccaagctggaggaggccaggagagggcacgctggcttagccttctacgcggcaatcccgcccaaccccgggtccggaaagagcactgtctctggagtccacggacagaaa

SEQ ID NO: 163638 - DNA, 122 bp, Homo sapiens
atccacctgtctcagcctcccaaagtgctgggattacagggtgagccacagagcctggcccgaaactgatggagttttaacagaagctaaaggagaatatataagcttaactggttatatta

SEQ ID NO: 163639 - DNA, 122 bp, Homo sapiens
ctatctccggctgcacggagcggctcagagagccgcaatccactccaacgccccccttcccggcccaaagaaggatttgatagcagctctgttcaaactagataattatatcttttcaagtc

SEQ ID NO: 163640 - DNA, 122 bp, Homo sapiens
ccttatcagcacagttaatctgtggatagcaagagaaaaagatggatggccaaacacatccgtgcaaaagaggggctatgcaggagaaaataccatcactctgaatgcttccaagccccagg

SEQ ID NO: 163641 - DNA, 122 bp, Homo sapiens
gtcgtagaatgttgagtatcctactttcctacctcgcttttatttgcgcgggtttaaatgcgccttaacagaacccgtgcaaaggcttgcctacttgtctggctgcaccggatgagtagagc

SEQ ID NO: 163642 - DNA, 122 bp, Homo sapiens
tggggagcaggcagatacacggggcagggcggccagaccggggggcacggtgcagcagaccggggtgacaagggagatggcagatatggcagacaccggaggctggggtgcctgcagacagg

SEQ ID NO: 163643 - DNA, 122 bp, Homo sapiens
ggggagacttcaagacatggactcgcatgctcattttctagtcacctctgttgtttgagtcgatgatgtcacttcttcatggtggtctttgccagcacagaattgggaggtgagtcaatgca

SEQ ID NO: 163644 - DNA, 122 bp, Homo sapiens
cgcgaatgtcccgctcccccgccgccccgccccgtccggattctccctcgcctcttctggcgcggccgactgcgctgcgagtgaagaactccccgtttcctagatgccagctcctgagctca

SEQ ID NO: 163645 - DNA, 122 bp, Homo sapiens
cctctgtttttgaattgaaggtggccagttcctcagcctccgctgtaagctgcaagaaagcggaggaagctgtattattggctgatggtgctggggcgctgtaagcctgtgagggcatcggg

SEQ ID NO: 163646 - DNA, 122 bp, Homo sapiens
ggccaccctgtgtcgtcgctgtgcgagctgtatcaccagtggcaacttctgcatttgcctcgcttagcttgtgtgttttcgcctgcgcaaatgttctgcctggattcttctagaaaagttca

SEQ ID NO: 163647 - DNA, 122 bp, Homo sapiens
aactgtcagacactcctcccccggcccgggctgcccgccccggaagcatcctctcaccgccggaagctgaactgactcgtccgcggccgctctaccccaacaggccgccaccagcgagagtg

SEQ ID NO: 163648 - DNA, 122 bp, Homo sapiens
gtggcagagctcacatagtttggtcttggtccaattaggcttggttcatttcagccagaccgcagcaaagaaagtgaaattgctctgcaaattcaaatgagcagatttttgagatgccacat

SEQ ID NO: 163649 - DNA, 122 bp, Homo sapiens
tgtgtatttcctccccttccttcgcccagagccactgtgagaatgggctacagaaagtttcgaggcagtaaagccagttgttcacccagaacatctgactgccataaaaattatggtgacga

SEQ ID NO: 163650 - DNA, 122 bp, Homo sapiens
gaaatagattctttatttttaaaaatctccaattgaatcagaggttaacattatgtccaccgtggagatgctgattcattctgtgtgtgtgtttacttttctacaaatgtccctcttgcatc

SEQ ID NO: 163651 - DNA, 122 bp, Homo sapiens
ttcacactgagccctttattccaattctgggtgagaataactgcaaggaaatttctcagccggctcagttgataaggcacagagctctggaatatatgttgattcagccacactttcccagc

SEQ ID NO: 163652 - DNA, 122 bp, Homo sapiens
gatgctaaaagcaaggaataaaagttgaaaatttggaaaatgtctcaacaccgtcaccagcgccactcgagagtcatttctagttcaccagttgacactacatcggtgggattttgcccaac

SEQ ID NO: 163653 - DNA, 122 bp, Homo sapiens
ggccaccgccgccgcccccgccgggcgagaggacgctggccgagcgcgcctacgccaagccgcccagccaccacgtgaaggccggcttccagggccgccgcagctactctgagctggcggag

SEQ ID NO: 163654 - DNA, 122 bp, Homo sapiens
ttctcaagtttctcttagtcgcttcttgtctatttgaaatctgtaactttaaacaaaccacgcttactcttccttattctccctgtaaggtacaattagaatagaaaagtttatgaaagtgt

SEQ ID NO: 163655 - DNA, 122 bp, Homo sapiens
tgaacctggaaaaagggcttcttactaggtagctgtgcctggcatttccgagatttccaacgtgcacccgccaactccgccgccctaatcgcagagctgcccgagccgccgactccccggca

SEQ ID NO: 163656 - DNA, 122 bp, Homo sapiens
gccctgcgcacttggggcgacggggccaggcgcgggggacggctgcgggctgggagggcgcgcggaggagacaccgctgaggggacgccgctgagggcgccacgcggggggcgcggctgagg

SEQ ID NO: 163657 - DNA, 122 bp, Homo sapiens
taaacattcatccctagatacagcctcccgtctctgtgctccccctagaggtttgggcagcggggcactgaagaagcaattcgcaccaacatcacacgccctgcgacggggacaaggggacc

SEQ ID NO: 163658 - DNA, 122 bp, Homo sapiens
tggagctctgcctgcgtgcgggccaagggctaaaccttggacaggttctttcacttactccgcctgacaaccctgcgacgtgataccattatccccacttcgcagatcaaataaacggagtc

SEQ ID NO: 163659 - DNA, 122 bp, Homo sapiens
agaaggaattttccctggcggccatgacctaatttcaaggttctggcagctgaatgcaggcgactgacagccaaggttttcctacttagcatattaatcacctccatttttagcatgcagcc

SEQ ID NO: 163660 - DNA, 122 bp, Homo sapiens
cccagtagcaaatctagaacctgcatcttaaggcaaagaacgatgaaccaccataaattccgtgggcctttgagaagccgaagggtgagctgattggaggaaggatgggaagacgcccgatc

SEQ ID NO: 163661 - DNA, 122 bp, Homo sapiens
ccgcgacgtcggcccccaggggtggccctgtcgcccccagcgcccgtccccggccagccccgcacctgcagcagctcctgcgcgttggccacggcgatctgcactttcacctgctccattat

SEQ ID NO: 163662 - DNA, 122 bp, Homo sapiens
ctaagctgtttaccctgcctaccttgcttttcctgtggaaacctcattaagtctgtggcccgtgccttcctcccactcttttttgcctcctgaccaacagtggtacttcccccgtgtggcat

SEQ ID NO: 163663 - DNA, 122 bp, Homo sapiens
atttcaccaccgcaatcagatgacagatatgccactggcaaagctgcattcacaagcagccgtggccaccctaagtggggcagtaagaggcttcatctaccacgtgaccagcacaaactaga

SEQ ID NO: 163664 - DNA, 122 bp, Homo sapiens
cttccttcctcctgctggccagagacacattttgcatctgcaaggcatccggagatcagccgcgaactctcctcccgagcggacgctgcggagttgcagccgccgcccccggcacctgcgcc

SEQ ID NO: 163665 - DNA, 122 bp, Homo sapiens
gttgccatctacaagaccagcatagcaataactgcccccttggagcggcaggttcggcttcgcggggacagccagcctcacaatgtcatcttgcaggtagctggaaaacgtgaggggccagt

SEQ ID NO: 163666 - DNA, 122 bp, Homo sapiens
ggacgttctgcagattatagcgcccagctcatgtccagcaccgccggaggtgaagtggggcgagctggtgactccttaacccttcccgaaggtgtagactggaagaagccagggtcttcatt

SEQ ID NO: 163667 - DNA, 122 bp, Homo sapiens
aaagctgggcaaattttctggtggccggaccctccccagagtggcttcagttggggagcccgtggcagactgccctgcctgctccacctgaccccggagtcccttgggacagcaggactggg

SEQ ID NO: 163668 - DNA, 122 bp, Homo sapiens
catccccggacatggagcaggcacccaggccttgcactgcagccccaatgctgcccgtggcgatcatggatggcgggtacatggcaaaggtataatcttggagaggaggaaagggaaccatg

SEQ ID NO: 163669 - DNA, 122 bp, Homo sapiens
ggcaagaactggccctagccccgcgcagccctgcggcagccccggcgacacgaggagccacggcagccaggggggaactgcccagaatgtggctcacctgtgtggacctgatggggccgggg

SEQ ID NO: 163670 - DNA, 122 bp, Homo sapiens
cggaactgctggcgctgctgccactcgtagagctgccacacggtgccatcccggtgcgcccggcgctcttcactcgacatcttcaggtggctggctcggtcctgcgcatacttgtagtcact

SEQ ID NO: 163671 - DNA, 122 bp, Homo sapiens
ttcgaccgtacctcttctctcggggggccgacaaacaggggtgctgcgcctgcgcgtccccggcggcagcgggctgtcctctaagcgcctgtcttccggctcctctgcatgctgggatacgg

SEQ ID NO: 163672 - DNA, 122 bp, Homo sapiens
tactctttttttttttttcctccctggtaagatgccaacgcctgttgaatgaattaagcacgttttagtgggatttaagtccggcctcgcagaagttgattgattgcattattttctaggag

SEQ ID NO: 163673 - DNA, 122 bp, Homo sapiens
caaacatgcagccctcagagctccacccgttttccccgttaggcgggaatgaacttggaccggccaaaggaagtaacaacgtcagcccagccaggagaggctgtgcaaagagtcctgggccc

SEQ ID NO: 163674 - DNA, 122 bp, Homo sapiens
tgacccaggaagtgcgagtgtgtggattagggggtttcccacacagagaagcaactgaatcgcgatgtgtgtgtctgcgctggggaaggagactcattatctggagctcggcacatgcaaat

SEQ ID NO: 163675 - DNA, 122 bp, Homo sapiens
gttggatgagattggtcctctcccaactctgaccttgaaactgatactgaatctgagcagcgtctgtagacacctgtgccttgccttctatttctagccttgaataaatcctggacttttat

SEQ ID NO: 163676 - DNA, 122 bp, Homo sapiens
aatctaactgccctgcctgagctctgagtcaagggtcctactttggctgccagccagcgacgacttcaagggtaagatcctatgcgggccgtaaggactcttcccctccccctctcccactt

SEQ ID NO: 163677 - DNA, 122 bp, Homo sapiens
gctgaacaagactaggatgcaggcaaaactagactttctcctttttctcacccaatgtgccggacccccgcgtggagcctgggcggcagtgggctttggacccattccggtccctctctgga

SEQ ID NO: 163678 - DNA, 122 bp, Homo sapiens
cattcgggaggccgcaagcctggctatcatgggcgtctgcaagacctcccagcagggctgcggagggcgagcggcccaggaaggctccttccagcacctgaagggggaacggcacagcatgc

SEQ ID NO: 163679 - DNA, 122 bp, Homo sapiens
gggccccgccccagcggccagccccgccccgcccccagcggccagccccgcccccgagcgcggcctccgcccccagcggcgctcatcccaaggctgggcggtctaagcctgcacggggctgc

SEQ ID NO: 163680 - DNA, 122 bp, Homo sapiens
ctttcttgctagcaagtcttcccggagcatctgaaggatgatggggaacgttaaaaccatcgtgaaatgttggaaacgacagaagtttctccaggtcttgctggggaagccattgtgcatct

SEQ ID NO: 163681 - DNA, 122 bp, Homo sapiens
tctatttgtccttccttacaatagctgaaacacgggtccacgtgctggggctgccaaattcgtgatgcaaaaagatgagatggtgaattattgggataagtcttctttctctttcccccggg

SEQ ID NO: 163682 - DNA, 122 bp, Homo sapiens
ggtgagagccaccgcctccgcaatcccccgcccctcggcaccgtcgctcagcgcgctcgccggctccctattggccgaggcactcgccaatcctggtgaagcggccccgtgagttggccctg

SEQ ID NO: 163683 - DNA, 122 bp, Homo sapiens
ggaatgccaggcagaggggacagcctaggcaatggtgtggaggccatcatgcacagggcacgttctggggtggtgaaattgatctatcacatacaaaacagaatcagtgagttaaagcattg

SEQ ID NO: 163684 - DNA, 122 bp, Homo sapiens
ggggaggcgcgtcccctcacagcgcagctctcgggtctgaggagggccgggcagggcgtgcgtctgtctaggtttgaattaaaggcgactcacaggaaataaggccatgccactgtggtagc

SEQ ID NO: 163685 - DNA, 122 bp, Homo sapiens
gaagctctcagggaaatgtctgtgaatcatttaaagatgctctctggtggatagagaaaccgcagtccaaaaacagatgggtgtatatttgctttgtaagcaaagggcatgtatcatactcg

SEQ ID NO: 163686 - DNA, 122 bp, Homo sapiens
cgtggggccggctcgcctcctcctgggctcgccgggatgtggcctccgaggtcgccgcggcgctttcctgcccaagctggcgctgccggagcgcccgggccccgctcccctcacgggcctcg

SEQ ID NO: 163687 - DNA, 122 bp, Homo sapiens
tgtgttttgcaaaaatattctcttggctttgataggcaaatacttcttgacttacctcttcgtagtaagagatgtgtaaatcactagagtcttagatttgaacccaagatctagtcaactac

SEQ ID NO: 163688 - DNA, 122 bp, Homo sapiens
ggcgtaggatactccgaaccaggtgtgggatatagtttcgtggtgcgccgttttttaagccggtctgaaaagcgcaatattcgggtgggagtgacccgattttccaggtgcgtcagtcaccc

SEQ ID NO: 163689 - DNA, 122 bp, Homo sapiens
tcaattaaaagcaggaaacccattcctctcctgggctctgggagcttcttgatgcaaagtcgcagcagaaatgggcttggccggctccccttagccctcccctcagaatggaggtctggagt

SEQ ID NO: 163690 - DNA, 122 bp, Homo sapiens
cggctggctggttctggggctgctttgccagcaggcagccttttctcagctgcctttcttcgcatcaggtggcggcggctgatggcccgtgtggcctttgcccttgaggattagcccagcag

SEQ ID NO: 163691 - DNA, 122 bp, Homo sapiens
tgtgctaggcatgagacaataccagagcattctttccagggctcactgtcacagtcaggccggtacacaggaaaataattacagccgtataatgcttgcattttaataaaagcatgggctag

SEQ ID NO: 163692 - DNA, 122 bp, Homo sapiens
tttgtgtccagggcatagccgatctccttttcgttttcacgagaactgcgacttgggcctcgggcactaggcgagcccaggttgtggcctaacagcagatcgcctcgggagcttggctgcag

SEQ ID NO: 163693 - DNA, 122 bp, Homo sapiens
gcgtcgggacccgccagcgcgcgggcaccgcggggcccgggacgacgccccctcctgcggcgtggactccgtcagtggcccaccaagaaggaggaggaatatggaatccaagggggccagtt

SEQ ID NO: 163694 - DNA, 122 bp, Homo sapiens
atatttttaagagtacattttgccacgctgtctcgcgtggggcctctgcagcagctgagacgtttggcagtttcttcaagacttggagtaaaacctcgcctgagatagaatctaaatacact

SEQ ID NO: 163695 - DNA, 122 bp, Homo sapiens
atgtgcacgaggtttatgtgtgtgtgtgcgcgcgtgtgtgtgtgtgcgtgtgtgcgcgtgcgctctcgtcctcagctcaaagtctgcgtacggcagtgttggaaattatttcataggagtaa

SEQ ID NO: 163696 - DNA, 122 bp, Homo sapiens
actgttaactttcgagcctgcgagcaggaggcattctgattatctgttcatttctagaaacgcttgagccagagggactgtttgttgcctagagaacaaagctaaaacatcggaatgaaatt

SEQ ID NO: 163697 - DNA, 122 bp, Homo sapiens
tccaagactgtgagaggaggaacctctgttgtttggagccacgtgcagtgattttacagccgcctgggaaacgcatacagtggtcctgtgctcttagcctttcattgaaagagtccacatgc

SEQ ID NO: 163698 - DNA, 122 bp, Homo sapiens
tcgacagtttcatccaggccaagagcacgggcacagagccccccggtgaggtccggcttgcggacagcgcagcctctaggtgcattgagcccctgggaaggcccggccctgagcctcaagtg

SEQ ID NO: 163699 - DNA, 122 bp, Homo sapiens
ccggcaacgctcacgtttgcacaagctttgcaataagcccagacggtctggcacaacaaacgctaagcgtgtgggtccagactgtcaccccatgggcagagaaggggcccgctaacaccacg

SEQ ID NO: 163700 - DNA, 122 bp, Homo sapiens
gaagcacaccagtgggcagtgcctgccggtgaggaatgggcgcgtggggcaggggtgggccgacacttccaaggcactccttttagtaccatcctgattcttggccatatacatgaaacagc

SEQ ID NO: 163701 - DNA, 122 bp, Homo sapiens
gggccaggagcccagggcacatcctctagtagaccctataggaccctgtgccagttagaacgtgttgaactgcaagtaatggaaactcaccttcaacggagcaaacatcaggggaaattgac

SEQ ID NO: 163702 - DNA, 122 bp, Homo sapiens
acctcaggtgatccacccacctgggtctccctaagtgctgggattacaggtgtgagccaccgcgcccaccccgattaatatatgttttaaaacactgattagacaggcaacaacaccgggca

SEQ ID NO: 163703 - DNA, 122 bp, Homo sapiens
cctggcccagctggatgttctcactctctttgatcacgtcaggagtgatctggaatgtagcgttcttcatggctgtgagtggatggggagggaagggtagttggggttggcctgactccagg

SEQ ID NO: 163704 - DNA, 122 bp, Homo sapiens
ctgttgctcttggtggacgggcccagaggaattcagagttaaaccttgagtgcctgcgtccgtgagaattcagcatggaatgtctctactatttcctgggatttctgctcctggctgcaaga

SEQ ID NO: 163705 - DNA, 122 bp, Homo sapiens
ccagctgggtcacactggtggctgggaaagaccaagaagaggcagaggaagaggtggcaccgatgataaaaatccattcaagaatttagctgtgacacatctacagcaggttcaaatctctc

SEQ ID NO: 163706 - DNA, 122 bp, Homo sapiens
ctttggaagggaaagtaactggggcgcccactggaagcaggattgggttgagagctaggtcggccaccgagcgccccactgggtggcgcgtgggctccgcgcgcaggcagggagggcggccc

SEQ ID NO: 163707 - DNA, 122 bp, Homo sapiens
cagctccccgtcttggaccgtgacagcacttctgttctcgagagctgtggattggggaggcgacggcaaccccagggccaaggggagagtgagggtagttcctctgatgaggatggaagccg

SEQ ID NO: 163708 - DNA, 122 bp, Homo sapiens
gtttctacaacaggaacctccactctggtgccctgggagcctgggaaggggacatggatacgtattacagacacataactcatagtcactcattggaagactgaggcaggaggatcacttga

SEQ ID NO: 163709 - DNA, 122 bp, Homo sapiens
ggtcgcccgggggtcctcgggtggcccccgcccaggggcggccgcgacctgtctgttccccgccgggccggcgacctgcctccgagacgctcccctgcccgccccccaccttgcttcctgcg

SEQ ID NO: 163710 - DNA, 122 bp, Homo sapiens
cgccttgcccgagaagggggcaccgactcacagcccgagtgggctctggaccgggcctaccgcgatgcgcgcgtggaactctgagggaagagttagccccggttcccagccgcgggtcgcca

SEQ ID NO: 163711 - DNA, 122 bp, Homo sapiens
cacgctacgctaaaagttccacactcaattctagcgtctcggctctggactaccaagttccggagcaagcagacagaccacctctttacgttcccgtaggccacgctccgggggcggggctc

SEQ ID NO: 163712 - DNA, 122 bp, Homo sapiens
cgaggagaacattgtatgcacagggttttgctcaggaaagctagcagcccgaaagcggcgcgttttcttcagcagcgggtcccgcacgcgagagtgctgccagcacgctttctgcctccttc

SEQ ID NO: 163713 - DNA, 122 bp, Homo sapiens
tggacacaagcccctctgtaatggtgtgcctatcaggggtcagggatccagcctggtccacggtgaccccggcgggcaggttcggcacagtttacttgctgagcgcttacagagtgttcagt

SEQ ID NO: 163714 - DNA, 122 bp, Homo sapiens
gtccctagatacgaagttcgaatcgatggaaacgtagctcaaaaggcgacgccaacaccccggagaaaacactgagctactccaaccacagtggcgcgccaagtaggaggcggtacctgagg

SEQ ID NO: 163715 - DNA, 122 bp, Homo sapiens
ttgtgctgagctaacagagcccatgagcatcagcggtgaatgaggggcagccatgggctccgacagagcctggcttctgcccttcccaggaagcctggacttctctaggctactgttgaccc

SEQ ID NO: 163716 - DNA, 122 bp, Homo sapiens
gtgctgtagtcaactcataccagcctgcaagagctgatgattaaattttcagaacttttgcggggtgattgtcaaacacagccatattaagaactgcattatagggcctgggcctgttggct

SEQ ID NO: 163717 - DNA, 122 bp, Homo sapiens
cagcccaggttcacggggaggacacagcattttctctcccattgcctttatattcggcagcgcctctgacctctcccccacccccatctctgaccctcccaagccagcccttgctcagccct

SEQ ID NO: 163718 - DNA, 122 bp, Homo sapiens
tttgggaaagacaaccacattccaaatactggctccttcctgggcctggggaggggactgcgatcgcggttacccggcacttctgtgttcatgtgtgtacaaggtggtatgtagcccacgca

SEQ ID NO: 163719 - DNA, 122 bp, Homo sapiens
tgaatggcagagggtcgggagagcgggcgagcagtgccactgcctgagccatgtgcccatcggttcactcacccacctcaccccctattgagctgggaatgccaaggtttgtggggctcgga

SEQ ID NO: 163720 - DNA, 122 bp, Homo sapiens
cagctgtgctgggagctggggaagagctgtccaggcagagcgaacagcatgtgcaggtgccgtgagggaaaagagattgatgtgtccctggaactgacagaaggcagtctggttggagggtc

SEQ ID NO: 163721 - DNA, 122 bp, Homo sapiens
acctgcccagcgcccacacagcacctgatatgggaaatggacctcggtcaggtggctctgcgaaaggctccccatggtgagcacagctgccagcagctccggtcacgtcagcaccgcttctg

SEQ ID NO: 163722 - DNA, 122 bp, Homo sapiens
cccgggcacacgccggcccccgccgcctgccaccctgcctcccgagcccgagcccgagcccggcccaagggcctatgaccgcttccccggggactcacgggactactccacggagctgagcg

SEQ ID NO: 163723 - DNA, 122 bp, Homo sapiens
aggctactcggaataacttacagtatttaatttctgagcaagttagagaccagcatgcctcgagtccctcagtctcttcctgttgacggatgtacctctctctgccttctatgtatcgtgag

SEQ ID NO: 163724 - DNA, 122 bp, Homo sapiens
gactcagaagagcactgcaggatcagggcacctggataaagctctcagttctgtcagcagcgacacatgtgctgccttgaattctactgttctgagcttagatttcttcaatcaggaaacag

SEQ ID NO: 163725 - DNA, 122 bp, Homo sapiens
gggagaaactcgggccacgtgactgtctgaccacgtgagccgcgtcgccgcgacctcttccgctccctaggccctgggacctcccggtcccttgcctgcttccggctttcgctcgcttccat

SEQ ID NO: 163726 - DNA, 122 bp, Homo sapiens
caaagtacgacaaatggctgtgctgtgaagtaccagaaagccccaatttttggtgtatgtcgcccacttttcctccaccagagactaagatgtcatcccatagctaagagaacttagaggga

SEQ ID NO: 163727 - DNA, 122 bp, Homo sapiens
aacccggtgggggtagatccttgccattttccggccctgtaccccactggaaataacatgcggtggtcaagggcatccacctctttaggcaaaagcatgttttcagcccagagacgattcca

SEQ ID NO: 163728 - DNA, 122 bp, Homo sapiens
accacaaggtattcaatggaatccagaaaaagcaccttccagattcctttctgaaaccagcgtctctcagaacctgagtgctgtgttggttgttatttgagtcccttcaggggaccgcaaag

SEQ ID NO: 163729 - DNA, 122 bp, Homo sapiens
ttttctcacaatctcattcaatttccacgcaggcctgttcatccctcttagtggctgctccggagtagtcaaccaagtgtaatctgatagggacttcttcaaaacttgctccggccttcaga

SEQ ID NO: 163730 - DNA, 122 bp, Homo sapiens
acttacctccccgcccccacgccgaacccgggccgagagcgcggtggaggccgcgcagtgcgcttccaattgggactgagcaaatggaggaaaaggaaaccgcctttcagttcaaccgactc

SEQ ID NO: 163731 - DNA, 122 bp, Homo sapiens
tttcttccctgaccagctatgctccagagtcctttctttgttccctaacagtcctggttccgtctcaggttcccacatttctcccttttgatctctgtctctctgttcagatggctgtcaca

SEQ ID NO: 163732 - DNA, 122 bp, Homo sapiens
aaagaacctttccagtggttagcatagaggggacatactggaagtcctcaagggcaaaaacgtcagagcaaaaggtcaatttcatttctgtgtagtcccagttgaattgtggacttttctaa

SEQ ID NO: 163733 - DNA, 122 bp, Homo sapiens
ctgccgtggaccaggtgagccatacgtcgccatcaaggcctacactgctgtggagggggacgaggtgtccctgctcgagggtgaagctgttgaggtaattcacaagctcctggacggctggt

SEQ ID NO: 163734 - DNA, 122 bp, Homo sapiens
gctcccatttaaaagacaggaaaggtgaggctcacagggtcacactcgctgagatcacagcgctgcaaacttgtttctggccgcagaattgtttccggcgctccgagatgcctttcttgatg

SEQ ID NO: 163735 - DNA, 122 bp, Homo sapiens
ataatgaaaataaagtcaggtatcagcaggacacctgctggtgaccctcaaatcatatgacgtggtcaactccaccttcatgggtgacactaaagaacatattttggagaactggctgtgcc

SEQ ID NO: 163736 - DNA, 122 bp, Homo sapiens
acctctgcggttgggctgcatggactccccgcggcggctggccccgtcgcgcaggctcggcggcacatacttccctgtcttgttctgcgtggcctgcaccggctctagctctggggaccaaa

SEQ ID NO: 163737 - DNA, 122 bp, Homo sapiens
aacactccagaaaaaggcatgaagagccctatacctgccagggcgactttgacctagacccggtgacccggttcctagcgctgcagccctacccgccccccgcccgcccccgccttgcacgg

SEQ ID NO: 163738 - DNA, 122 bp, Homo sapiens
ctaccgccagtttcttcagagtcagaagctaggcccacttcaccacagtatgcattcagccggaattgtagcctgccaagaccctgtgggtccttgggggtgtgctgggcgtctttcagttg

SEQ ID NO: 163739 - DNA, 122 bp, Homo sapiens
agaggcggcgcggctcgggccaaacgcgtcatgcacagagcgctcgcctctgcgccagggcgtgaaatgggcacagtcatgcaagcctcccgggggagcgccaaggtgaactggaggtggag

SEQ ID NO: 163740 - DNA, 122 bp, Homo sapiens
tgggtaatcttggaggctccttccatgccctagtattcctgggttatatatgggtttaaacgtgaagtacactccccatccttcaaggccaattcagtggctgctctgggaagctctaacag

SEQ ID NO: 163741 - DNA, 122 bp, Homo sapiens
cgccgggcgccgggggagaagcgctggcagctggtgcgctggtgagtgggcgccgggcggcgcggggcctaatgcgggagcgaaccccgaggcccggccggcgcgggaagcagcggggcgcg

SEQ ID NO: 163742 - DNA, 122 bp, Homo sapiens
tgtcactggtcctctctggctttgggcctgggcatacgtcactcctgaagcctccagccacggtgtctgttgccagagctgtgtgctctgagccctcctcatcctgaccccaagcctctcac

SEQ ID NO: 163743 - DNA, 122 bp, Homo sapiens
gaggggaatccccgtgctcgctcgggccagtgggaagtttccatccgcgcagggacggtccggggaagcactggaaacagcaggaccatcccgaaactgcttctgcagtgggaggcgccggg

SEQ ID NO: 163744 - DNA, 122 bp, Homo sapiens
gtggcgtctccgctgtagtgttctgagttcaagttgcctcggaagtcccagttggggatacgctctcgcgcaccaggtacgcctggtgtttctttgtggtttttcggattctttttggggag

SEQ ID NO: 163745 - DNA, 122 bp, Homo sapiens
tgctcacccacaattcaaccttcccatgctcacccacaattcagccttcccgtgctcacccgcagttcggccttcccgtgctcacccgcagttcggccttcccgtgctcacccgcaattcaa

SEQ ID NO: 163746 - DNA, 122 bp, Homo sapiens
aaatatcctgatgggaagaaaagtcccagaagatggtatttcccttgtgcactagtaaaacgagcaacacgatgaatgtgtaaatttgaacagctggaagtttgtggtcacattaatgttaa

SEQ ID NO: 163747 - DNA, 122 bp, Homo sapiens
tgaggggactcaagaggctgaccagtatgctgatgagaaaaccaaagacgtaccatttttcgaaggacttgaggggtctatagacacaggcataacagtcagtcgggaaaaggtcactgaag

SEQ ID NO: 163748 - DNA, 122 bp, Homo sapiens
cttagtattctacataaaattaccagccacacccgtgctccgtgtgttatggcaaagctacggcaaatctgggagaggactcagaacatcgaacatctcagatttcataacccttcaacccc

SEQ ID NO: 163749 - DNA, 122 bp, Homo sapiens
tcccacctggggcgagtgcgcgcacggccaggttgggtaccgggtgcgcccaggaacccgcgcgaggcgaagtcgctgagactctgcctgcttctcacccagctgcctcggcgctgccccgg

SEQ ID NO: 163750 - DNA, 122 bp, Homo sapiens
cccctgggatgcctgcccttggtggccccaccaggcggcagctgagcagtggaacggaagcggagcccagcaggcccggtgcggcgggaccaatgaatggagctgcgggaggaggaggaaag

SEQ ID NO: 163751 - DNA, 122 bp, Homo sapiens
cggccgagcgaaaggggtttaaagggcggctcttaaaggggccgcaggaggggcccgggccgacagaggcactcaccccttccccagccgccttccattgcgctcacccgggcgctgggccc

SEQ ID NO: 163752 - DNA, 122 bp, Homo sapiens
gaaaaccgcaaatacacacaggccattgtgactctggcctggtgggctctaattttctagcggcggtttgtacacccaagccggctgcaagggttaagtaaacttcgtggctaaggatgact

SEQ ID NO: 163753 - DNA, 122 bp, Homo sapiens
gagcctccccatggtgccttttcatcccggctcagcggctcggcccccggagctgcagggcggcctcagtggcagccaaagctcatgggatggggtcccattgtccacctgacgcgagatcg

SEQ ID NO: 163754 - DNA, 122 bp, Homo sapiens
tgctcctaaaaaaaaccttcctgggctgcccactgtggagtctgggtctcggagacaggacgggggccaccccagcctctgcccaggccagctgggactctgtgcacaaagaacccaggagc

SEQ ID NO: 163755 - DNA, 122 bp, Homo sapiens
ccggaatctgtgggcggcctgcgggaggggctgaggcgcagttccctactcacccaggtccgaatccaccgcggtgctgtttccagcgagtcagattccagatcgcgctccagcctggactc

SEQ ID NO: 163756 - DNA, 122 bp, Homo sapiens
gagtacccaaagaccctctgctcttcattcagctgaatgagctgctgggctggccccaggcgctggagtggagagagacaggcaggtaagttggatgcaggccagttctgtgggatccttcc

SEQ ID NO: 163757 - DNA, 122 bp, Homo sapiens
caaaccttaaggaggggatcctggatcttcagttaagtgggcgacacctggagtgaggggcggggcatatgcagagtaggtgcggcctacaagccaaaaaggagaaagagttggaatggtgg

SEQ ID NO: 163758 - DNA, 122 bp, Homo sapiens
gctgggtcatttctgtcccctgagaccccagagaggatagaggttgggaggctcgtatcccgaccccagggtctccattggcccgagccctccgggctgcttcagacactgccgtaggtggc

SEQ ID NO: 163759 - DNA, 122 bp, Homo sapiens
ttagcaacttctaagacaggcccagcagctgacatgacaaatacaaaagctggacaccatcgggataacgggaacatcattctccccccagacaaacccaaggtgccacgtgtgtgcatggc

SEQ ID NO: 163760 - DNA, 122 bp, Homo sapiens
aggtccaccatgtcaagcagaggaaaggccatccgcagctcatccacggtgacgacatttcggaagcccagtctggagcaagctcaggaagtaatgctggacagttcttggggaagatgcct

SEQ ID NO: 163761 - DNA, 122 bp, Homo sapiens
ttcggtggtcaaaggtgcaggtgtctgtgtgcccctctcacgctgacaggagctgcaggccgggtgaaattctgcaggcacagcacaggggagggagatggataggggaccagcccaggggc

SEQ ID NO: 163762 - DNA, 122 bp, Homo sapiens
ctagagctattggccattggtacatctcagaggaattttttttctttctctccttttatccgaaggcacctactcgatctaattctacacgcagccactgatgttcattctgcctgtgaacc

SEQ ID NO: 163763 - DNA, 122 bp, Homo sapiens
tgtacggcatggtctctgagccctccgggggccccttctgctcctcattcccctctccgtcgtactcgtccgtcccgtagctgaagtctgagacaaggaacaagaaaggccactgagaatcc

SEQ ID NO: 163764 - DNA, 122 bp, Homo sapiens
tgttcttattgttggactgctctgaattttaaaggatgtttatgtaataactcataatgccgttaaaaaatgagacatttcaggctatgtagtttcagccaaagctttagtgtactatagtg

SEQ ID NO: 163765 - DNA, 122 bp, Homo sapiens
gggcgtttcgaacgctgcagttggcagcgaatggagccacagcgccgacctcttcagccgcgattcctgctcaggagtgacaggaggccccaggcggctgcagaaccttcctgagacaggag

SEQ ID NO: 163766 - DNA, 122 bp, Homo sapiens
tcttgatggagccgctttcaaagtcagccattcggtcactggtctcactgatgtgtgactcgctgtccatttcatggcaggaaaactcggcggccggggagttctggtagctggggcaggcc

SEQ ID NO: 163767 - DNA, 122 bp, Homo sapiens
cctgaggggacttgggctcctcttagcattggcaggcaggaataaacttccggctcagatcgagctatgcctgatgctgccttaagccttatgaggtcgccacggaaccgcaggtgaggtga

SEQ ID NO: 163768 - DNA, 122 bp, Homo sapiens
cccggaacgtgagctgtctctctctgacctctgctggctgcttcacctggagtctgagtccgactcatgtagcacttcactgtccgcgttagtttagccttcactgtcagcaactcgtcacc

SEQ ID NO: 163769 - DNA, 122 bp, Homo sapiens
actccccgcgactcccctactcggctcttagaatgactgggagtaaacaatcctccgattcgaagctgtgcgggaggcggctccagcgagtacacagtcagttgctccttgcttagggtcct

SEQ ID NO: 163770 - DNA, 122 bp, Homo sapiens
gtttcccactaatgttcaatggttaacctttcagaaacacaattcagtgttctaatttatcggtcatatatacataaagctgcaaaacctcgtataaagcagttacctgctgaaatcttagg

SEQ ID NO: 163771 - DNA, 122 bp, Homo sapiens
ttgtttttaaaacctgtcactcgggaggcttaggcaggagaatcgcttgaaccagggagtcggaggttgcagtgagccgagatcgtgccactgcactccagcctggtgacagagtgagactc

SEQ ID NO: 163772 - DNA, 122 bp, Homo sapiens
aggccaggggcctgtgaatggatatgtacctgtcgatggctgtgaggaacaggctgcccacggaggcagtgaaggaggccgtgaccccacccagtttgaacagaaacacgttgcggctatct

SEQ ID NO: 163773 - DNA, 122 bp, Homo sapiens
ttttatagatgtctagaaatcaggagtccagagaccagcaggttgcacaatgacctacagcgattgcaaaaggaactcacaactgcagatcttaagagccaagacctgctgtgtccacttct

SEQ ID NO: 163774 - DNA, 122 bp, Homo sapiens
cactcagcacaaaagaggcaaataaactaatgcagcagctcctcatcctgcggggccaagcggctcagtgtcctgattcctcactccaaggccccttcacaagccgtctacattgcacctgg

SEQ ID NO: 163775 - DNA, 122 bp, Homo sapiens
gcgggcaggacactggagcggcaggcagtgcggacccgccgggcagccgtgcacggttgtcgtcctcagcggcaggagccagtttgttgctcagggccttgtctttttacaaagagccccag

SEQ ID NO: 163776 - DNA, 122 bp, Homo sapiens
catgtgtgatccaggatgattcacttccctgtatggtcctgtgagaacactttcgccttacgcattttctattactatcatggccaccagtggaatgcagatatttagtctctgctcactcc

SEQ ID NO: 163777 - DNA, 122 bp, Homo sapiens
ttaagccagtctgaaaagcgcaatattcgggtgggagtgatccgattttccaggtgtgtccgtcacccctttctttgactcggaaagggaactccctgaccccttgcgcttcccaggtgagg

SEQ ID NO: 163778 - DNA, 122 bp, Homo sapiens
aagaagggtgcctggcatacagtaggcacgcaaggaagatcagctttgttcctgttcttacgttcactgcccatgtgaagagcacgtcaggtgccatcacctgcaagctcgccgtggcgcag

SEQ ID NO: 163779 - DNA, 122 bp, Homo sapiens
caggacggtcttgtaggctcaatgtgtgtgtttcatcccaggcgcggccggcatagcgctcggggtgcgggtggaaataatagcagcagtgttagcgccttggtaagcgcgctcctaagtca

SEQ ID NO: 163780 - DNA, 122 bp, Homo sapiens
tgcctcggccacaacctcccagcaggatagcccgcggtttccaatctgcgaaaggaggaccgctaagccagaaatgccaagccaagcgatcactgccacgccaagcagccaccgcaaagcct

SEQ ID NO: 163781 - DNA, 122 bp, Homo sapiens
agccttcactggaatctacccctgaggagctctgagtccaatgagggaggcaaagacacccggggacacctcagtgtaactgggcctatgagcaacagaggagaaccctgaataattggaga

SEQ ID NO: 163782 - DNA, 122 bp, Homo sapiens
ctccccgccctccttcctgcagggattatgccgcgacccctattgcttgggaggttaccacggcgcctcgcacctcggcggctccagctgctccacctgcagcgcgcacgaccctgccgggc

SEQ ID NO: 163783 - DNA, 122 bp, Homo sapiens
ccctgtgtatccaacaggactgtgggtaggaaccagtcatgacagttaatgacggtaaaacgtcagtgagctcttagagacaggagcaagaaactgaaacgtaaaaatgattcttgttatgg

SEQ ID NO: 163784 - DNA, 122 bp, Homo sapiens
acacacacacacacacacacacacagacacgtacgcacacacgctgccgtaccccgagaccgccatccaaacaaacgaacagagactctggaaagtgaacacagcgccacgcataagaacag

SEQ ID NO: 163785 - DNA, 122 bp, Homo sapiens
aggctgcaggcagaaagggacaagtgagtgcgcctcggggactgagggggccctcgtgggcgctggagaagaagcagaggccgagcctgagccgtttgctccgtcccccaggcgaatgcgag

SEQ ID NO: 163786 - DNA, 122 bp, Homo sapiens
gaaaacgggaaagtccctctctctaacctggcactgcgtcgctggcttggagacaggtgacggtccctgcgggccttgtcctgattggctgggcacgcgtttaatataagtggaggcgtcgc

SEQ ID NO: 163787 - DNA, 122 bp, Homo sapiens
aacagaaagagaaattctttggtttaaataaactccttgcgggccaggtgtggtggctcacgcctgtaatcccagcactttgagaggctgaggtgggaggatcacaaggtcaggagtttgag

SEQ ID NO: 163788 - DNA, 122 bp, Homo sapiens
tatttttagtagagacggggtttcactgtgtcagccaggatggacttgatctctcgacctcgtgatccacccgcctcggcctcccaaagtgctgggactacaggcgtgagccaccacaccag

SEQ ID NO: 163789 - DNA, 122 bp, Homo sapiens
gtgactgggcgctcagttaatactcagccgcagatattaatccctttctatgcaaagagacgatggattgtgagccctgagaaatcaaagttgaaactcagccaacctcctgccctgctcgc

SEQ ID NO: 163790 - DNA, 122 bp, Homo sapiens
gacagaaaggaagcccagagggaccagcattgtaatttgcccaaagacacagcatgagtacgtgtggcctccaggatccacacccacacctgcccaaatcttatcacctaaatctcatcatc

SEQ ID NO: 163791 - DNA, 122 bp, Homo sapiens
gtccgggtaactaatggcaaccgggcggggtgagcccgctctgcaggaactcctcgacggcgaaaaactacgactcccagggtgccccagggcttagcccagctttcccgcccgcccactgg

SEQ ID NO: 163792 - DNA, 122 bp, Homo sapiens
tttgaagacatgaaggtctctgacaacctcatgagaagatactgaaaacatcagtcttgtcgtataccttatctcccttgcctggcatatacttccatcaactaaatgatccaatgcctgta

SEQ ID NO: 163793 - DNA, 122 bp, Homo sapiens
gtgtgatgtcatctatatgaacttctagaacagacagggctcctctatgctgatagaaatcggaacagcacggcctgcaggggatggggaggacaggcgatggagacggggatcagatggga

SEQ ID NO: 163794 - DNA, 122 bp, Homo sapiens
caccccgagcgccggcgagcggcgcggtgagaccctcgtgcaggtgagcccggcgcacggcggcccagaatcctggaccccaggagaagcgtctacggccccgacaggtgggcgtggcgaaa

SEQ ID NO: 163795 - DNA, 122 bp, Homo sapiens
acaccaggtggcgtcgcgcctttgctttcctgagccttctgagtaaggtaatgtggtgtccgtggggcgacgcctgcgcacaagaccgcgtcgggcctcacttttcccaggccttctgggta

SEQ ID NO: 163796 - DNA, 122 bp, Homo sapiens
tgagcccaagaagtcgaggctgcagtgagccgtgatcccaccactgcattccagcctgggcgacaggagtgagagacttggtctccaaaaggaaaagaaaaaagaaaaatccctcatggact

SEQ ID NO: 163797 - DNA, 122 bp, Homo sapiens
ccaactgtgtctttgtagggtgtgctcttaacttctcaccagtgatgagtcattactaatcgccaatcatcacatgaagccaagatgccccttaagggagtagctaagtattttagcaaatg

SEQ ID NO: 163798 - DNA, 122 bp, Homo sapiens
ggagccaacgggactgggttttggttgggtgcagcggaggttgcgtcaggggtacctaagcggtagcggcgtgggggtggggtgtacttggtccaaagctctgggctcctctggcgggcctc

SEQ ID NO: 163799 - DNA, 122 bp, Homo sapiens
cctagctgcctccggctgtcaccaggaggaatgaacaccccgcagctttactcaagagctcgcctgaatcctgccctaggctggagcttcccaggcggccagggactggctgccctccatct

SEQ ID NO: 163800 - DNA, 122 bp, Homo sapiens
ccagaagatgataaaacaattatagaggaataggcaaccaaaattgcagatttgaagagacgtgtggaattccttgtggctgagaatgaaagattaaggaaagaaaataactaaaggctgaa

SEQ ID NO: 163801 - DNA, 122 bp, Homo sapiens
ttctgagcagagggcggcaccctgccctctgattggtccaaggaaggctggggggcaggacgggaggcgaaacccctggaatattcccgacctggcagcctcatcgagcttggtgattggct

SEQ ID NO: 163802 - DNA, 122 bp, Homo sapiens
tcagttgagtgcttgaggttgtcttttcgacgtaacagctaaacccacggcttcctttctcgtaaaaccaaaacaaaaaggctttctattcaagtgccttctgtgtgtgcacatgtgtaata

SEQ ID NO: 163803 - DNA, 122 bp, Homo sapiens
gctgtttctaccttcagaatataaacagaatcagacaatttattataacctgcaggtgaccggtctaagtcacctgcatttctcccttataacaacaacctcctaactggcctccctaattt

SEQ ID NO: 163804 - DNA, 122 bp, Homo sapiens
ctgcccccctcacccccacctacatcccttgccccaggttttccatcccgaatccgactccgccccaacctatacgaaggtgggccctcgggacgtctctgcaggaacgcagctactggggt

SEQ ID NO: 163805 - DNA, 122 bp, Homo sapiens
acaatggatcagtggtcttagattccgctccaatatttgaagttttttgttcttcggcctcggcaaatgctctctggttgagatgaagggaaaagacacagagacgcaaaagctgtgactgc

SEQ ID NO: 163806 - DNA, 122 bp, Homo sapiens
ctaggctggtctcgaactcctggggtcaagtgatccgcctgcctcggactcccaaagtgccggggttaccggcttgggccactgtgcctggccgaacaaagctatttgacaatattaaagaa

SEQ ID NO: 163807 - DNA, 122 bp, Homo sapiens
gcattctcgcctaaggactggaaagaatcctacaaaacaagctttggtttcattttccaacgccctggcctgagctcctgcagcccgaggacctggcctggcgtgggggatttgggggatgt

SEQ ID NO: 163808 - DNA, 122 bp, Homo sapiens
catgttggcaatgtttgggtcctggttcttacatcccagaagggaagttgcggcactgtgcgagacagtctgacttctgacaagtaagagagatggcggggccatctgggtggggcgggggg

SEQ ID NO: 163809 - DNA, 122 bp, Homo sapiens
ccgtaggagcagggcgggcggggaaagcgaggtttaactaactccgcagctatattcttccgccgcgaggtaaagagtcccaacccaaccccgggccctaggatttccagcgaccctgtaat

SEQ ID NO: 163810 - DNA, 122 bp, Homo sapiens
gtgggcagaccaacggctgtgggctgacttttcactttgcgtcaggtcgaggtctcaaagcgcttgtgtttgggagcaccaggaacacagtcgaaggatgtggggcctgctttggggctggg

SEQ ID NO: 163811 - DNA, 122 bp, Homo sapiens
gggcagggggagctgcgaggagccttttttttttttttttttcctgcgcagagccccttgcgtgacacacagtaggcgctcaatacatgtttattttcagttgagtgttgcttcagctttta

SEQ ID NO: 163812 - DNA, 122 bp, Homo sapiens
aaaagcacttagcagtgtgcatgacacaatatgtcccataaatgtctgtatgtggaagtgcggtttcttttgctgtaaaatgggggtgattacccctaccctgcctaactcacaggtgacgg

SEQ ID NO: 163813 - DNA, 122 bp, Homo sapiens
gataataagagttggctgttgttactgctgttatttccaccagagtgagtctctgagggtcgtctctggctccctgcagcaagcctggttcatggttcccttactgcctcctctcagggtct

SEQ ID NO: 163814 - DNA, 122 bp, Homo sapiens
ccacaggtgcgaagggcccagggacagggggactgtcatttgaagtccgctccgggacaccgctgagaaccaacgggccctattagcacttagccaggacagcagccatgcaggtgaactgg

SEQ ID NO: 163815 - DNA, 122 bp, Homo sapiens
aaaaaaaaagaaaaagaaaaagaaaccctgctcactgaaaccaacgcttctgtctttgtacgggccgtcgcttccatcatcctgcggtaagcagcatgcccaaccgaaaaaacaaagctcgt

SEQ ID NO: 163816 - DNA, 122 bp, Homo sapiens
ctgcccattcaggatatgaaggggcagatggtggttggcatgtgttttccctgccagtgccgtcctaaatcagttccagctagtgaccatttgtgccagtggtgccacaggcacggggaaga

SEQ ID NO: 163817 - DNA, 122 bp, Homo sapiens
cttcttccttcccactttcaatcaattcatctattcttttcctttcttcagactgcagctcggctttgctcttcctggatctccttcggacagggtagaaatccgtaagtttgtgattctgt

SEQ ID NO: 163818 - DNA, 122 bp, Homo sapiens
tccgctcggggggaaggaggctgcaagtgcaggcggcccgggggctgtcacaggactcagcgccgggggcggggcgcgggaggccccgccccggccccaccaggcccctcccctcgtctgtc

SEQ ID NO: 163819 - DNA, 122 bp, Homo sapiens
tgagcagctcaccttctcctaagctgaaatccagtcttccccagtcctgtgtccagtgttcgttccattattggcaccaagatttactgtggaaaatattacatagaaaaactgataaaccc

SEQ ID NO: 163820 - DNA, 122 bp, Homo sapiens
cctggctggcggtctccactgatagagccatcagtccgattaccacggttacggcggcggcggctgcgattacgacgttgaggtcttgattcatcttctgtagggtaggaaaaaaccagagt

SEQ ID NO: 163821 - DNA, 122 bp, Homo sapiens
taaggatctgatacgatcttttcctaaattgctatgctgaggcctttttgacggtttgtccgccatcactttcagaggcgctccgcgcgaaccccgaaaatctgtgcaaaattctcagggtt

SEQ ID NO: 163822 - DNA, 122 bp, Homo sapiens
cagggggggaagaggggctggctctcactaccctcctcacggtgggtgcctccccgcctgcgactgtggtcctaagagccagggtggaaagaggggctagctctgagttcccgcctcgcggg

SEQ ID NO: 163823 - DNA, 122 bp, Homo sapiens
gaggcagtggtgggcttggcatctgcctccagaccctaggctcttcccaccaatccggagcgcctcggatgggaattggatacatgtggaatgtcagaggcccagagagggtgtgagacttg

SEQ ID NO: 163824 - DNA, 122 bp, Homo sapiens
agaggagggcatggacccacatgagaacctgataaaagctaggccgggcgaggtggcttacgcccataatcccagcactttgggaggcggaggcaggcagatcacctgaggtcaggagtttg

SEQ ID NO: 163825 - DNA, 122 bp, Homo sapiens
ttctttgtggtgatggaacagttctgtatcctgatttggtgatggttattcaaatctacacgtgataaaatttcaaagaaccatgtacacatacacctatacatgactgcatgtagaaacca

SEQ ID NO: 163826 - DNA, 122 bp, Homo sapiens
agggtccgggccgcctcacctgcaggtgaacttgagggcgaggagcagcgcgcagccgagcgccacggccccgcagagcagctccggccgctggcgcgccatgaggaaggcgccacgcagcc

SEQ ID NO: 163827 - DNA, 122 bp, Homo sapiens
cggaattcaaatacgtacaattcaacataatgaattgaactgaaattgaacacctgcttgcgtaaacctagtcggctcgagttgttctggttctggattggtcagtctagagttccaggggt

SEQ ID NO: 163828 - DNA, 122 bp, Homo sapiens
ttcaacgggtaaagaacaccattctgttctctgaacgcaggcccccagcctttcaaaattcgtactcacctctgccattgggatagagaaggcagatctgaggtgttcttaaacgcgctgtt

SEQ ID NO: 163829 - DNA, 122 bp, Homo sapiens
ttattcaaaagaggtcttacagcaacccaacgtctcatcttcccatagtaaagatgacggcgccttgaggtaagctacaggcaacaccacttccgcgtttctcttgcgccctggtccaagat

SEQ ID NO: 163830 - DNA, 122 bp, Homo sapiens
gagcagggagtgcctgttgccagcgtcctgctattaagctgagcagatagctcattgcctcggtgccctggctgcctcttataccaggcacggtgccccaccccttctggtccagccctgcc

SEQ ID NO: 163831 - DNA, 122 bp, Homo sapiens
aaccctgaggcaccctcacacacctcggctcttgtgaacactagtgttcctgccgaagcacgcctacttaccccgctgagcagagcctgagcctgcaacctccagagacctggggaaagcca

SEQ ID NO: 163832 - DNA, 122 bp, Homo sapiens
tctggcttggaaagaagggcagacagctccagaaatatcgaggaacgtgggccacgcctccggggcggccaccaggcggtggcaccagaaggtcagcagagacagagcataaacagcagcca

SEQ ID NO: 163833 - DNA, 122 bp, Homo sapiens
cggggctgcgactgggggtgcagacatcccccaccgccagggtggctggaaccggagcgacgtcccagctggagaagttggggggagtgcgggaggctgcgggtgaggcccgcgaagcgccg

SEQ ID NO: 163834 - DNA, 122 bp, Homo sapiens
ttcgagtcccggggcctttgcccttgctgttccctctgccgcgagcactcttccccctcccgtagccggctcctcccattatttagctcttggctcagagaggcccccagcacccaggcaca

SEQ ID NO: 163835 - DNA, 122 bp, Homo sapiens
taaactttcttcgaagaactagcaggctaatttattccagagcaaaatgccctgtgaagccgcttgctcacgggtgggtgtggcctcagagagggaagaagccgtccgctgggaaaggcact

SEQ ID NO: 163836 - DNA, 122 bp, Homo sapiens
attttctggttcataataacagttatctctaagggctggctctgggaccagcaaaatcctcgatggttgatggtgggtgtggtgtctcctctaagagagagtaggtgctgttatcccctttc

SEQ ID NO: 163837 - DNA, 122 bp, Homo sapiens
ccggagtacagggctaagcgctcagtacacagggtacgaaccaatcaatgcaagaatgaacgtgccaccgggtcttgcaggcttgagaagtgtttctccaagctgattttgctttccgtgcc

SEQ ID NO: 163838 - DNA, 122 bp, Homo sapiens
cgaccctgggccaggagccatggcccacgcctacaatcccagcactttggaagaccaagacgagaggatcacgtgagcccaggactttgagaacaagtcccagctactcgagagctgaggtg

SEQ ID NO: 163839 - DNA, 122 bp, Homo sapiens
gcgaaggcagctcccgcctccccagtgcctacgcgaatttaatcccagagcgaacagacgcggagccccgggagactgcttcatgtcagagatgaattgtacgtaagtgaggacagggtttg

SEQ ID NO: 163840 - DNA, 122 bp, Homo sapiens
acggcacgtcacccgggtgggacacgggtacggcacgtcacctggatagggacacgggtacggcacatcatgcgggtgggacatgagtacagcgtgtcattagatagaggggctttctcttc

SEQ ID NO: 163841 - DNA, 122 bp, Homo sapiens
ctcattctccaagcttcatacagagtctggaggccctgcttggaggaggctgtggaaggacggggctgccctcctgttccagtggcagtgactagagggtgtggagtccctggaagcacagc

SEQ ID NO: 163842 - DNA, 122 bp, Homo sapiens
aaattcaaaggaaagtgtacggttattgtttgaataaagggaaatgcaggctggggttaacgtagccactagcacatgattcatgtgcaaggcatgtaaacagatgaagccattctgggtag

SEQ ID NO: 163843 - DNA, 122 bp, Homo sapiens
agacttttaaacgccaaactgaggcgtcggaactttgctccgcgggcatcgaggagccatcgaaggttctcagcaggtgagtggcctaactggattggtcactgcagtgatccaccttacaa

SEQ ID NO: 163844 - DNA, 122 bp, Homo sapiens
tgccaagcgcacggccccccgtgagccctgtgccggaggcgagctcgtcctggctttcgccgtgaccttgacaaggcacagggaggcaccagcaacaaattttgtctggaagatagactcca

SEQ ID NO: 163845 - DNA, 122 bp, Homo sapiens
gccctagcgatcgcgcaccctggaaggggcagtgtggtggggagcgcgggcgtgtgtatgcgcgtgtgcgtgtgtctgtctgtccatctgtctgtcccaaggatgtatcgggggagatgatg

SEQ ID NO: 163846 - DNA, 122 bp, Homo sapiens
tactcatcttcaaagccactgaaagctttctcagatccccctctcagagcaggctagtgacgattcacttcctggtgccagtgttgtgcctcataggctgggttcctgatggcaggggctat

SEQ ID NO: 163847 - DNA, 122 bp, Homo sapiens
cccaggtgatccaccctcctgggcctcccaaagtgctgggattacaggcatgcggcactgcgcctggccaagaagcattctctttagagacaggactaggacaaggatgtcctctatcagtg

SEQ ID NO: 163848 - DNA, 122 bp, Homo sapiens
ctgctcctcccgcactatcgattttcaattgacctccgcctcccactttacacttcagagcgctcagcggcctccacacctcctgagcaaggaggaaagccagctgggcgcggggcccctgc

SEQ ID NO: 163849 - DNA, 122 bp, Homo sapiens
agagcaaaaagagaacctggaagtgttcccaaatttaacatctgcaggcagataggatgacgaaatgtattagtactgaggaataactttctcccgtcttcttggaaaacatctggggtatt

SEQ ID NO: 163850 - DNA, 122 bp, Homo sapiens
tacctcggagtgtgctgcccagacggacttgtgaatagctgcgtctgtccccatagttaacgggagaaggaaacaccaggagaaaagaaggaaaagacaggaaacgggaagaggagcagagg

SEQ ID NO: 163851 - DNA, 122 bp, Homo sapiens
ctgcttccaggtgcttctcttgaggtttcctgattcagcgagactggaggtgggacctgacgaagtggttggtttttagtgttctcaggagtgtggatgttttaataggtgttgggtcctca

SEQ ID NO: 163852 - DNA, 122 bp, Homo sapiens
tcccagcctgagcttccagtttcatttataaaaggggtgacgtggccgccttcctgcaggcgctctgaaggtggcagattacacagaggtggtacgactcatacaggtttctgcaaacgggg

SEQ ID NO: 163853 - DNA, 122 bp, Homo sapiens
aaaggcataaggggccctcgggaaactgaagcctacgcagttggtcagttcagccagggtcgcatgcataaaataccagttacaagcaaaaccccaaactggattctgcctccaggtcagcg

SEQ ID NO: 163854 - DNA, 122 bp, Homo sapiens
gatatttctaaattatctagatcttccttgaacatagactccagagttaccgggacgcagcgttcccattccactgggcagccatctatacgtgaagtgtcattgttggtggtttgggagtt

SEQ ID NO: 163855 - DNA, 122 bp, Homo sapiens
gcacagggggtcggggtgctgtgcggctgccttggaggtggaggggggcaccctgagccacgcatgggaaaggcaggaaacaggttctctcctggagcctccagagggaaccagccctggca

SEQ ID NO: 163856 - DNA, 122 bp, Homo sapiens
ctgccgcccgctgcagttcgcctcgcaggaggtggtgccgtacgggcacttccgccgcctcgactacttctcagaagagaggagcgcccgggacctgctcaagcgcctggaggcgccgcggc

SEQ ID NO: 163857 - DNA, 122 bp, Homo sapiens
ccccaaggtccccgccgccgctccagggccgcgcagccaccgccgccgcctctccttagtcgccgccttgacgaccgcgtccacctcgcaggtgcgccagaactaccaccaggactcagagg

SEQ ID NO: 163858 - DNA, 122 bp, Homo sapiens
tgggctgatgccagaaacagcgtggaaaacaagtctgttttccaagaggggctattaccacgaattatgtttaaaatgacagcatcaaagattaaaccatcattgtatataaacttaacata

SEQ ID NO: 163859 - DNA, 122 bp, Homo sapiens
ggcagctacagctgagggagcaggcctggttagagatttctcacaggtgttctccagacccgaacactgtagttttatgtagattgctcccctcttgggaaggaagtagagctgttttgttt

SEQ ID NO: 163860 - DNA, 122 bp, Homo sapiens
taacacaaaatacacaggaggtggctctaactctggtcagactgaaggcccatggggagccgaaaaaagaaaacaaactctagacggtctcagtggcccaccagcccaagctccactttatc

SEQ ID NO: 163861 - DNA, 122 bp, Homo sapiens
cctcactgatcccatctcgtgcgagataaaagggctcaggaacgcttgaggaaacaaagtcgcggcccccacacagtcaccgttcggggccggttgatctttccccccggagctcccatagt

SEQ ID NO: 163862 - DNA, 122 bp, Homo sapiens
ttgcctaggaaactgccccactccgggttccctggggtcccaacggtcgatgggtcttggcgccatctgccggacacagtaccacactgcttctgaagctcctagacccggagtcccacagc

SEQ ID NO: 163863 - DNA, 122 bp, Homo sapiens
gtgagcaacagagatagtctttattcaaacgcagagagatccataacatggaaacactgacgcttccgaaaccgccccatttattcacttctcaagtggcccccgcttggatgcgccctcgg

SEQ ID NO: 163864 - DNA, 122 bp, Homo sapiens
gatttgctttcgaggaatgcttttgtgcaattcgggtcactgacttttacacaacagtcccgcagactttctcttgtttttttctctccaagggcagactttgacgacactgcgacatactc

SEQ ID NO: 163865 - DNA, 122 bp, Homo sapiens
tttttaaaattatttaacccctgggggcagagactgaggagggaggatgataagggatcccggactctgtatgattgaaataaagagaaataaacaaatctagcagctctgagtcattctga

SEQ ID NO: 163866 - DNA, 122 bp, Homo sapiens
gctgctccagtcttccctcattctagttaagattaagaggcccaatcggagaattatcctcgcttccaaggcacagtaaagcccactttcttcccccaaatcccctaacacgagctcaaatc

SEQ ID NO: 163867 - DNA, 122 bp, Homo sapiens
tggggactgaaaacattcaaggcttggcaaaagggcccagaaattaaatcatctaaaaaacgaagtgtttgaagccgacatcagtcacatgggcaaaggccaacagcaatggcagaaacaag

SEQ ID NO: 163868 - DNA, 122 bp, Homo sapiens
ggaaggaacacgtcatggctctgttgtctccccatcggcctcgacaaggacaaacatttccgctcccggcgcagagttagggtggggcttggatgacttcctcagttcagggctatgtgcgg

SEQ ID NO: 163869 - DNA, 122 bp, Homo sapiens
acatttgggccggaactgtgttttactgaaagttgggtggggtgatgactttagtgaatgcggttctatttgcaagttaattcccgttgttaacatcagaagcatctctgcttttaggtagg

SEQ ID NO: 163870 - DNA, 122 bp, Homo sapiens
atgctattaattatcgcttcgttacaccaggcactccttaaaatggcacagagtggctctcgaggcctttgcacatgtgcatgtatttggagacatcctcccccattacaacatgatataaa

SEQ ID NO: 163871 - DNA, 122 bp, Homo sapiens
cttccccagggaggaatctgaagaactgtctacatgatcagggaaacgcaaggaaaactgcgtggcaccacgcgtaccccatagaagggccagaatcccaagcactgacaacacattcggga

SEQ ID NO: 163872 - DNA, 122 bp, Homo sapiens
caatagaggaagctattttaaaagcttagactggaactttgaatggtagagacaggaaggcggggaatatgattagattcatttgagagagagatttaacaggatttagtatcttgatttat

SEQ ID NO: 163873 - DNA, 122 bp, Homo sapiens
ggaatgagcgccttggtttagcactttactgctccactcaagctgtagacattttaggaacgcatgttcaggtatggtttgtgttcttgattgtatgggacatgagatcatggctcaataaa

SEQ ID NO: 163874 - DNA, 122 bp, Homo sapiens
tgtggccctcaagcgaacgctccgtgtcattactgcgcttgagacgctcaggtaccagctcgtttgtcaatcagcaccgagcatttcagttgtcaaagacgcagaggtctttgtgcaatgac

SEQ ID NO: 163875 - DNA, 122 bp, Homo sapiens
gcggcggagcgcagagcccagcgaccgggagcctgagtgcacgcagcccgagcccacgggcgactgacagctctgcaggagagattgcaacaccatcccacactgtccaggccttaactgag

SEQ ID NO: 163876 - DNA, 122 bp, Homo sapiens
gggcgcaatgttactttttatgcatcaagcacggataacacatacagcacataagcaggtcgacagtgtatctgcggtactgggatttcacggggaaaggagatggggacgtgtaaaaagcc

SEQ ID NO: 163877 - DNA, 122 bp, Homo sapiens
ggtgctgagattgaagagaactagtgttcacgagagctcgcggcggttggaaggctctcgcgagagcgtcttgagaattctggccgggggcccaagccgctcggtctcctgtcttcagcacg

SEQ ID NO: 163878 - DNA, 122 bp, Homo sapiens
gttggcggcccggctgggtaaggcgctgctcgagaggaaccaggacatgagccggcagtacgagcagatgcataaggagctgacagacaagctcgaggtgaggacctccctccagggatggg

SEQ ID NO: 163879 - DNA, 122 bp, Homo sapiens
ttcaggtgatccacccacctcggcctcccaaagtgttgggattacaggcatgagccaccacgcccagcccagctagaggttttgaggtgggattatcagcaaaagttttctgtttctaactt

SEQ ID NO: 163880 - DNA, 122 bp, Homo sapiens
ccagccttcagccaggattgagagccaagtgtgcagtgggccctgcctcttggcaccgttcggtcatccacagtgtgcttgttcctctcgtcccatacaaaggccagggcagggggtgcagc

SEQ ID NO: 163881 - DNA, 122 bp, Homo sapiens
tgtgtgcattacagagcaagataattctgaatgaagactttaaacattacacatgctggacggattctgggtctgctctttgtgcaaacaaaacaagtgactaggttttgcttactatccat

SEQ ID NO: 163882 - DNA, 122 bp, Homo sapiens
gcccgaccgcttcccggccgacctggacctcgacatgttcagcgggagcctcgagtgcgacgtggagtccatcatcctcaacgacttcatggacagcgacgaaatggacttcaacttcgatt

SEQ ID NO: 163883 - DNA, 122 bp, Homo sapiens
ggtgaccacagcggctggccctgcccagaaatgcacatctgcttggccacactgagggggcgaggtcagtcccagaccactttgagcagctgggcaggcctgcagagagcctctggggaaac

SEQ ID NO: 163884 - DNA, 122 bp, Homo sapiens
gctgcttcatcccggacgagagcttccactgccagcacccgccgtgccgcatgagcatcgcggagcttgacccgtccatcgctgtggtacgtggcggccacctgagcacacaggcatttggt

SEQ ID NO: 163885 - DNA, 122 bp, Homo sapiens
attgggttaatatgccttaaaatactacccatcagttatctttctctctcctctctgtagcgtgcgcaggggtgcgtgcgggtgcagcaccgcgttccttccccggcccgcttccctcctgg

SEQ ID NO: 163886 - DNA, 122 bp, Homo sapiens
gcaggttagtggcaggaaagtgcatttgtaacacacgtttgtggaaatgtggtatgcgcgcgcactgggagccgcgtttctttgggacacttccctacgttcagcgaatacagggcatcact

SEQ ID NO: 163887 - DNA, 122 bp, Homo sapiens
ggatgctcaaagccacagtcgacaatggcccggagcaactctggcttgagcaggaagtcacgaaagccagagctgtggatggagacataggagcccttgacatccttcttggcaggggcctc

SEQ ID NO: 163888 - DNA, 122 bp, Homo sapiens
ccttttatggagcctgggagcgagcgctgttggcgttgcatgccgaaaatgtaagcagtgcgccctctagggtgcccattcgggatctattttagaccaaggctcttagacaacatgaagat

SEQ ID NO: 163889 - DNA, 122 bp, Homo sapiens
ctgtaagtccaatcaaacctctttcttttgtaaattgctcagtctcgggtatgtctttatcggcagcatgaaaatggactaatacacggcccttatgggaatttgcagccccaattcatttc

SEQ ID NO: 163890 - DNA, 122 bp, Homo sapiens
taccttgggctggcagagggcactcattctgccacagcctcccagggaggagtccaggctcgggcaggaggccggaagacaaaggagagctcctcagtagggcctcaggcagcccgaggccc

SEQ ID NO: 163891 - DNA, 122 bp, Homo sapiens
ccacctgcagtgcacctgcagcagcgggttccaggagacaaggggagggacgctgccagtcggggagccccacgcatcctgaagctgacaggagccccatttgttttctgcaaacacagcaa

SEQ ID NO: 163892 - DNA, 122 bp, Homo sapiens
tgaaaagatttatttagaacgaaaaaaaattgcaacaaattattggagcctaggagtttccgatgcctacctttgagatccctttagttggctcaccagaagcccctgctgtgatatgcttc

SEQ ID NO: 163893 - DNA, 122 bp, Homo sapiens
gcagtccggcaggacggctgctcggaaaacttcggactttttcggaatggctcgggaaaccgagggtgggaagcctcttcggctctttccggagactgctaggggtcgggattcttcggaga

SEQ ID NO: 163894 - DNA, 122 bp, Homo sapiens
gcctccgcagggcagggctcggcacctgcagccggacatgcgcgagccacccctcctccccggcaattggctcctgcgctgccctagcctcccggacacacaccgcccctgctcggcggcgc

SEQ ID NO: 163895 - DNA, 122 bp, Homo sapiens
ctgctgggagccaggtgcagagcagcagccaaggtgcgggcagtttgggccatgccatgccgccccctttctggcccttttcagctcaggggcttcggggcactgcgtctttcttcctcagc

SEQ ID NO: 163896 - DNA, 122 bp, Homo sapiens
gagagcgggtcgcgggagctctgggacaaggacccagtgcccttgccccggagcagagggcgaactgcccctcgcagttgggggccgcgcctgcccggcccaagtgcgcctttaggaagctc

SEQ ID NO: 163897 - DNA, 122 bp, Homo sapiens
tgccagaggccggggcggctgcggcctccagaacagcgtcctcccagatccgaggggagacggtgacacgagtgagcccacagtctcctgccatgtacccacaccgtccctccagcacagca

SEQ ID NO: 163898 - DNA, 122 bp, Homo sapiens
attagcttccagacctcagccctggccctcgctttactgtacagtcagaactggtttctacgcctcgcgagggtgggaggtcgtgtatgggaggaggaccgcttcccaccagcctcgttggg

SEQ ID NO: 163899 - DNA, 122 bp, Homo sapiens
gatggggaagcgcactgccgtcatttcctagtgtcaacgtgtctgaggaaggcccggcctcgccgagtatgctctccagcagcgtgaagacaaggggccctatcaacagctcaagccgaatt

SEQ ID NO: 163900 - DNA, 122 bp, Homo sapiens
caaaaacaaattctggctgctgtaggctctaattatcagaagactgttatctggaagcttcgggctctcaaatatcagacatcccaataacttaccataaaaatacaagctcttagttttga

SEQ ID NO: 163901 - DNA, 122 bp, Homo sapiens
ggagccgcctgcgaacaggaggttccaaagggagcagccccaggtggcaggggcgcaggccgccgcgccctgggaggccccccgagcacaccagccactctgtcgcctgcgggcacggggcg

SEQ ID NO: 163902 - DNA, 122 bp, Homo sapiens
acattactactcctttgtttaaacaacttcagtgacaacccaatgcatttcaagtaaatccgaactaccatcatcatccggtccccgcatgccagacccggcctcctgctttgatttgccct

SEQ ID NO: 163903 - DNA, 122 bp, Homo sapiens
gacttgtagcccaaactaatcaggagactgctctagcccttatcagctgggttttgggtccggccaagtagcccaactggtgaacgtgtctatatttgtaacactcattcagtgccggggcc

SEQ ID NO: 163904 - DNA, 122 bp, Homo sapiens
gtgctgcttgtcccgggcgtccaggtctccgctcctgcgcgccaggcagcgctccacctccgcggcgtcgcctttgacagctgccctgtggatcttctgcaattcggagtcccggattcggt

SEQ ID NO: 163905 - DNA, 122 bp, Homo sapiens
tggctcagtgctggtgcacggtgagggagacccagggttcggtgcctctcagcggggacccgcggctctcaccagtggtctcgcgtcactgcgcagcgcagggtcttcttgaaggtcttaac

SEQ ID NO: 163906 - DNA, 122 bp, Homo sapiens
caacccctccaggtcatgtcagctgatgtgacaacggcgacattattctcccagcaaggccggatgccagtttagggcatgatgttggcgacgctctggaagagagaaggagagcaggggtg

SEQ ID NO: 163907 - DNA, 122 bp, Homo sapiens
ctgcagcctcggagtgagttcttggctgtagtcagttttcagtaccgttagtgacgagtccggtggggcgcggccaggattaggatgaatcatacaagtgctgggtggatcctgtctttacc

SEQ ID NO: 163908 - DNA, 122 bp, Homo sapiens
ccctgggctaggcttctcttctaggtgggtcaataactcttcacagcaatctgtgagacccgaacctcactttcagggcctcaagacccaatccccatactcacacaaaatcagggattgct

SEQ ID NO: 163909 - DNA, 122 bp, Homo sapiens
tggacggctctctgttgctgctgtctctgggacatgctcacctgaccagaccagcccagccgtcctgtcctgccagctctgctgccacctctgacaggtgtgcctgcccccatctcttctga

SEQ ID NO: 163910 - DNA, 122 bp, Homo sapiens
tctcctgggctgtgacccaggactgatctactgtactcttaggtgagcaggaaacccaggcgtcttaggtcaccaataaccaggtccaaatgcttaactcagaagggagcaagcaggcagag

SEQ ID NO: 163911 - DNA, 122 bp, Homo sapiens
gtggaggagccgccgcgcgctgattggtcgctagaaacccatttattccctgacagcccccgtcacatggatggttgtctattaacttgttcaaaaaagtatcaggagttgtcaaggcagag

SEQ ID NO: 163912 - DNA, 122 bp, Homo sapiens
ctaagttaagcaaacttttaacacagtgtaaggattgctcccgcttggaggtctttgggccgcttcaggtatagactattgtcttcagggtctcaccattcacgacagttcgggaggagaac

SEQ ID NO: 163913 - DNA, 122 bp, Homo sapiens
tccctccgggccccacccctcctgcaccacgggccacccagcagccggaaaagcagcagacgcccaacaagaggccctgggagagcctccggaaagcccacgggacgcccacgtgggtgaag

SEQ ID NO: 163914 - DNA, 122 bp, Homo sapiens
gtcggacgtggggttggagtcgcacaccaccaggcacttgccctccagcacgatgggctccgtctcattctgcccgcgggccgggcccgccagccacgcagcccccagcagcagcagctcca

SEQ ID NO: 163915 - DNA, 122 bp, Homo sapiens
agggccaccctactttctcagctgaagagtggtaacactgaggagtggttttggtaggtacggaattttgcttggttctgagtcagttctggggggaacagttttttgaacacagcggcaca

SEQ ID NO: 163916 - DNA, 122 bp, Homo sapiens
tgccgaaacctacaggccaacagacctacaaacctgcaaacagacaagggaccgaggggacggagtgcttggtggacggaccagcacccgggacactagaacctttcttttctcggagtctc

SEQ ID NO: 163917 - DNA, 122 bp, Homo sapiens
atctgtttattgacaattccaggtcattcctaacacgccgcagcagggctctgtacagtccggcccggtggggaggagggagggaaggcaggcacacgaagacacaggtatgtcgggaagtg

SEQ ID NO: 163918 - DNA, 122 bp, Homo sapiens
ccttaaaggaacccaaaatgtataaccttagaggagacccaaggccacttaaagaagcctcgttttactgaaccacagcatagctgatcgctgatgcaccctcagaattgcatatttatact

SEQ ID NO: 163919 - DNA, 122 bp, Homo sapiens
tgcgcacgcgcaggttttccaacagccccaggtacttcacctggtggcggatcagcacctcgtcaaagcggcctggggtagggggagcgccgtggtcagcgggctggcgctgacggcctgtc

SEQ ID NO: 163920 - DNA, 122 bp, Homo sapiens
gttagagataaccaggtccacatgcacttgtgtctttctgtagtgtgaggcctttgttgacgttatttcagtcacaaaagccgggaactgctggtgcttcccgtcactcgggtagtcccagc

SEQ ID NO: 163921 - DNA, 122 bp, Homo sapiens
tagtgactgaggttggcatttccttggaggactggactgggatttgttctggttcatagacgcatattcaactaatgtagacttaccatctcttctgtgccaggcacttttggttttttttt

SEQ ID NO: 163922 - DNA, 122 bp, Homo sapiens
gcagccgtaggtggccgggcccgagtgggcctccaggtgactggccagggccgcggccgacgcaaagaaggtcccgcagtcgcactggtacagggtgtcttccgagggctcggcggccgccg

SEQ ID NO: 163923 - DNA, 122 bp, Homo sapiens
cgtgtgcccccctccggccaggcctgtctgcttgcgattcctgcccactggccagtctgtcgctcagcaccattcgtggacacccttgcatgagtgcggctccacctgcccttgcctggtgg

SEQ ID NO: 163924 - DNA, 122 bp, Homo sapiens
tgcggggcatggtggggaggtttggcccgcggcagggcgctggagcgggtggggggcgggcgcctggggcgcggggcggcggcggtgggagatgctcgcctcggctcggctcggctcggctc

SEQ ID NO: 163925 - DNA, 122 bp, Homo sapiens
ttgacagaggccaacaggtctgtgagagaccttcctgaagcactcctcctcctccagggacgacaccccgcgattcctcctcctccagggacacttcaaatccctggacgacgccccgcgat

SEQ ID NO: 163926 - DNA, 122 bp, Homo sapiens
caacacgtttctcagctctcgggtgatctttaaggcagaagctggctctccgcctgtcggcgcgcgtccccggtgtttacggccggtggggccgtaccacggggacgccccagccccgcccc

SEQ ID NO: 163927 - DNA, 122 bp, Homo sapiens
gtgggcgaacagacacaatgcaaaatccatgacagagcctgcgctcactccgaccacaagcgggtgaacacgcccaacccaaaatccatggcagagaccgcgctcactccgagcacaagcgg

SEQ ID NO: 163928 - DNA, 122 bp, Homo sapiens
cgcagacgcacaaagcacaccgatgctgcgccatgatagggccggcgccgcagtgtcttccgggaaacatagtctttaggcgtaaaggcagcagcccggccttgaagccggatctcgcgatg

SEQ ID NO: 163929 - DNA, 122 bp, Homo sapiens
ttcttatatccatctcctcatcccccgttcacgcggtctttgttttaggcaggtcctaatcgttcctctttgaaacaattttatgctctggtaatctgatccccttactgttggggttacct

SEQ ID NO: 163930 - DNA, 122 bp, Homo sapiens
aacacggtgaaaccccgcctctattaaaaatacaaaaaattagccgggagccgtggcaggcgcctgtagtcccagctactcgggaggctgaggcaggagaatggcgtgaacccgggaagtgg

SEQ ID NO: 163931 - DNA, 122 bp, Homo sapiens
actcaatttctgttgtttaagccacagagtctgtggtattttgttatggcacagccctagcgaactaacacaatggtcatatgaacattttactgtcccctttcacttaaatggcattatgt

SEQ ID NO: 163932 - DNA, 122 bp, Homo sapiens
tcccttttctccccagggcacactacaaagagtatcttgtgagcctcatcaatgcccactcgctggacccagccaccttgtatgaggtggaagagctggagacggccactgagcgctacctg

SEQ ID NO: 163933 - DNA, 122 bp, Homo sapiens
ggaccagcttaatgccagtgcccactgctgcttacaggctggggtacttacaggtatgagcgaaaggggtctgggcagtctggcttgctacccagctggatattgataagacagtcccgtga

SEQ ID NO: 163934 - DNA, 122 bp, Homo sapiens
gtaatatccagtgatttttctaaagaggaatcagtggttatattatacaaggggtgtgtgcgtgtgttttgggtggtgaatacagagcagcggttaggaccataagaaataagagaaatgga

SEQ ID NO: 163935 - DNA, 122 bp, Homo sapiens
gggatgacaaccaccatggccagctggtttgtttcaatttgagtgacaaaatttaggaatcggggctccagcttttcactgcagacatttattgtgggtcatcttccctaaggcaccagcag

SEQ ID NO: 163936 - DNA, 122 bp, Homo sapiens
tcgaaggcgacttcttgtggtcggatggcgtccccctggtgagaggccccagtcgaaccccgccgtctagctcacttcctctaagcacttctgttccctaccacccccacccctcccgaccc

SEQ ID NO: 163937 - DNA, 122 bp, Homo sapiens
cacaccctgtccaggtgccgcgcacccaccccacacccatcccatagggctgcttcccctcggggtccaggaggaaacaaagtctgaggggttagatttgttgtgactaaagagttaagtgt

SEQ ID NO: 163938 - DNA, 122 bp, Homo sapiens
ccacctgcgcagagaataggctgttcacctgcaacggcggctggcgccgggggaggtgggcgttctgggagaggaggagcccctggctgcatggctgtgccgtgggtggtgccgtggacctg

SEQ ID NO: 163939 - DNA, 122 bp, Homo sapiens
gcagcctgagtgggttagcgcggctcccaggctgcaaacggagatgggcagtgctgaagccgcggtcgctgttaaagagaagggcagcgtaaccagaggggagatagtgcgtgctgtggctg

SEQ ID NO: 163940 - DNA, 122 bp, Homo sapiens
ccaaggctgggggtcccgggttcggaggaggcggccaaggtgcaggccgaggctggcgagcggcttagggacgtggctcgcccgccaggaccagagcgcgcggaggggcttcggggaagttt

SEQ ID NO: 163941 - DNA, 122 bp, Homo sapiens
ggctcactcctccagcctttgctgccctctctggggagacacccgtgaagagtctgggggcggcacagagaggaggacgagagggaatggcagcgggggatacaagggcagggcacactagg

SEQ ID NO: 163942 - DNA, 122 bp, Homo sapiens
cctgggataagggcatgtggctctggcgtggcgggactgcgtggctttaggatgaggctgcgctcggccctgggcgtgttctcatctcctggagcacggtgcccaccttccccaccttcccg

SEQ ID NO: 163943 - DNA, 122 bp, Homo sapiens
ccgcccgcctatttaagtgggcggagacagtcgcgtgagttcagtggacccacaatctcccgcgcaattaaccagacccgcccctttacacatgcgcatacgtcagcagttgacagttgctg

SEQ ID NO: 163944 - DNA, 122 bp, Homo sapiens
cgaggcatggagactgaatttcaaacgaggcaaagtaaatagaccttgcagggtggccaccgtcgagtatcccacatccaactcactgactgttgaaatcgccacaaaaacacatgtctgat

SEQ ID NO: 163945 - DNA, 122 bp, Homo sapiens
ttacattttctccctagaaatggagtcatctatgcatttcttacttacctaacatggatacggagagtggtgagaaaggaaactatagaaagtgtatcagctttacataagaattatatagt

SEQ ID NO: 163946 - DNA, 122 bp, Homo sapiens
gtgtcctttatgcactggattgccagtcccaaactgaaccccaccattcccaggctcccccgcaccccgcgagccctcagctaatcccctacctcggacctgcgcagtgtcagctctgcgca

SEQ ID NO: 163947 - DNA, 122 bp, Homo sapiens
tctctagagcccccaaccagagtcctccagcccacccgcgaggctcgcgcacctgcgatgcggccccactagcagggacccgcccacctgtggcgctacccctgcctctgccgcctcccgca

SEQ ID NO: 163948 - DNA, 122 bp, Homo sapiens
gcaatagctggtcagaagtgggagcagctgagaaaatgagggaaaacagaaacaaactgtcgggccagaggcagagggggctctcagagacagagaaagcaactttgatcagatgaggttgg

SEQ ID NO: 163949 - DNA, 122 bp, Homo sapiens
tgtgtccagatggtcagtctctggtggctagcctgtcctgacaggggagagttaagctcccgttctccaccgtgccggctggccaggtgggctgagggtgaccgagagaccagaacctgctt

SEQ ID NO: 163950 - DNA, 122 bp, Homo sapiens
gggagaggcgggcctgtgtggcggggatcgtgctgtaatggagcaggggcggcggggacccggaggtgagggctgcgagggccgcccgggagggtccgggctgggaaaagggcctccgccgg

SEQ ID NO: 163951 - DNA, 122 bp, Homo sapiens
ttcgtcgggatccccgcaaggatgagtgctgccagagagtctcacccgcatggggtgaagcgttcagcctccccagacgacgatgtaaataataatggcggagtggctgagggttgaggcct

SEQ ID NO: 163952 - DNA, 122 bp, Homo sapiens
caggccctgaggcactccacccccaggtgctgcagacacctgtgccctgcttggtttgttcgctcgacaagtctgtgagcgcctcctttgtgctgggtgagggtgtcaccccagggagttcc

SEQ ID NO: 163953 - DNA, 122 bp, Homo sapiens
ccaggccggagcgagcgcgtcccaaccggttcacggccccaccccggcatctgtgccggccggccagggactcactcagacttttatgttttaaaagatttatccaggccgggcgccgtggc

SEQ ID NO: 163954 - DNA, 122 bp, Homo sapiens
tcgctcttttctatccttttgtcttggcttgaatgtcacctcttctgaagccttctctggcgaccctggccatcttatgtcctacttgttatttcttcaaaatcgtactgccttttgtatgt

SEQ ID NO: 163955 - DNA, 122 bp, Homo sapiens
ggtcctggagcaccaggttgaccaggaacacctggttctccatcaattccctgaggtccacgagggccctggaaaacaagccagttaaaattagaacccactgccaaatatacacttagtag

SEQ ID NO: 163956 - DNA, 122 bp, Homo sapiens
ccctagccctgtgtcagctgccttcacagccagggaggaagtcaccttgaaagaagcggccgctgggctgtgcggctgcggcagaggagagggccagccacagcatggtgtccgcgccctgg

SEQ ID NO: 163957 - DNA, 122 bp, Homo sapiens
gcccaccgtgaacaaagaagaccggaaccctcgcaactcgttttgacgttttctggtcggcggtaaaagctcggttcccggccctcccggaagttgttgcacagttgtttccgggaagcggg

SEQ ID NO: 163958 - DNA, 122 bp, Homo sapiens
tcaggagagcccatgatggggcggcgcgtgtcgtagccgagaagactctgtcatcgccggcgacctcctggaactctctcttgcggtttgcagccagatcacttcccatacacgcggcagcc

SEQ ID NO: 163959 - DNA, 122 bp, Homo sapiens
cgataggcagcttccctttcttgctacgctgcaggatctcatttgcctctttcaacatcacgcctgctggagccaccaccagctcgatccttggcatcatcacctcactgaggagggtgttg

SEQ ID NO: 163960 - DNA, 122 bp, Homo sapiens
ttgaggaccagcctcaagggcttctctacatacccctcatagaagtgtttgtctgacttgcgctccttgtgcttcttgcccctgtccagctggccccggtgcccgcccccagagccaggagc

SEQ ID NO: 163961 - DNA, 122 bp, Homo sapiens
cgtggctgcgcacatccaggacacagggcgggcgacaggggatgcaggcccacgtggctgcgcacatccaggacacagggcgggcgacaggggatgcaggcccgcgtggctgtgcacatcca

SEQ ID NO: 163962 - DNA, 122 bp, Homo sapiens
tggcaagctggctgtacatagtgttggagggtggctttttattttgttttgtgttgttttcggcttgtgacagctgtttgaaaatcatctgttaccaccatggtagccagttactagatgaa

SEQ ID NO: 163963 - DNA, 122 bp, Homo sapiens
accccgttccaggtggatcccagcatggcaggccgcagtcaaaacctccaaacacgacaacgactccgaggcaccgcacctcccgctgagaaatgatgacttgactgaacattgaatagggc

SEQ ID NO: 163964 - DNA, 122 bp, Homo sapiens
tcaccttagtaaaacgttatgaaattatttgctaaaagagtcactttctgagtgtcttcacgtagaagaatttactcattgttgacatggtttcaattttggttacacagaaatgaatgcgg

SEQ ID NO: 163965 - DNA, 122 bp, Homo sapiens
agaggctcccgagtttgtgccacagggctgctgcgggcagtgccgctgcataactgacaacgaaggcggtagggtgacttccccagtgcagtagcctggtgctatccgcggacccgggggct

SEQ ID NO: 163966 - DNA, 122 bp, Homo sapiens
gcagctccgcagtcggaatggacgtgctccaggcgccctctatggtccgaaagcggaatgcggccttgagcagcgcccatctcgctcctggggtgtgggggcaactctgggggcgctgggcc

SEQ ID NO: 163967 - DNA, 122 bp, Homo sapiens
gccggaagttaaactgcagaaagttgttccctagaatgactgcctactcccaagaggaagcgtgggcgagcggtgttctgcaaaatgggctctccggcagcggatctgcgcagaagcgttcc

SEQ ID NO: 163968 - DNA, 122 bp, Homo sapiens
cgtcgggcggattttggagctggtgaagcatctgctctgggaagggagaggcagaagggacgcttggaattaccgaggaccaggcccatgtggcagagtagctgctgtcctagaatgccaac

SEQ ID NO: 163969 - DNA, 122 bp, Homo sapiens
gaggcagatggcaaggttccaaaacgctgaaattggcatttttctcagctggagcctttccgtgggcaggtgggtggggaggtctgtggggtacagacgtccctgaacccactacgcatgga

SEQ ID NO: 163970 - DNA, 122 bp, Homo sapiens
cgtctctgaatggcggggcagttgcagcatcccacttggcaagggtccttgaattacctccgcccccgccctgaccccgccctaaacatcaaacttagaaactcatctttcagcagcagcgg

SEQ ID NO: 163971 - DNA, 122 bp, Homo sapiens
tttgcgaggcgaagaactggaatttagagggtctgggcctgaccttgtcacagctaacgacgggggcatccttgagtcctgacaaagtcacatgcggaagggcggttgcgtgtagtaagtcc

SEQ ID NO: 163972 - DNA, 122 bp, Homo sapiens
gattcagtctccttgacaaatatactgcattgtaccggatgagtcatccgagggttagtccgcattttataggcctgttgtgtcattactcacattcaacatcctgcttctcaaaagtggaa

SEQ ID NO: 163973 - DNA, 122 bp, Homo sapiens
gccccctcccagacccggcccctcacactgcgttccccctcccgcgcaaagggggcggggcggaggatgcaaatgaacctcgtgtaggccacggaccgctgtttcctttctccttggtaggg

SEQ ID NO: 163974 - DNA, 122 bp, Homo sapiens
attccccaagctgagtgttcggccatagcccttcgggactacaattcccaggagggcgcacggcagcgacgtcggcgtcggctgcgtaagcgtccacggcggcgggagcgccaggggcgtgt

SEQ ID NO: 163975 - DNA, 122 bp, Homo sapiens
ctacgctcttccagctgtcggacctgggaaattctcctgtgctaaatcccgtggcgctcgcgggtgtcgccgcggtgcatcctgggagttgtagttttttctactcagagggagaatagctc

SEQ ID NO: 163976 - DNA, 122 bp, Homo sapiens
gccaaatgcaacttccgggcaggagagggaatttcggagccctaaactgttgtccatctccgtaagtgaccagacgtctcagtaaaataagggccaggaaactggacgtgtaatccggagta

SEQ ID NO: 163977 - DNA, 122 bp, Homo sapiens
tataaatcgcctagtggctgcttcacgtattgaagaagaacatgtttgctgtctgttctgcggatgcttctctgatggccggaacacagctgcgaaaagatttcgtagagtgactcagagca

SEQ ID NO: 163978 - DNA, 122 bp, Homo sapiens
gggtgtcggcgcctcattcgggtggagctgagccggagacaggtaaccgtgcgctgtcgccgcgcccgtcccagtgccgggtgtcgcggcgcttggcggcccggggttggagatcgcggtaa

SEQ ID NO: 163979 - DNA, 122 bp, Homo sapiens
gcgagagcgcgggacgtcttcccgggactgcatggtggagatggcgacgggcgctgacggcgagaaaggctgcaggaccaggctctggctcctcctcaaccttccctcgctgacgctaagac

SEQ ID NO: 163980 - DNA, 122 bp, Homo sapiens
gggatagctgtccaaggtctcccccagcactgaggagctcgcctgctgccctcttgcgcgcgggaagcagcaccaagttcacggccaacgccttggcactagggtaagtgaggcgccaggag

SEQ ID NO: 163981 - DNA, 122 bp, Homo sapiens
cacccggagacccgaccacccgccacgcgatcacgtcggggctcctggtccagcgtccgccggctcccgcggctccggccccaagtccgagccccaggccagccaagcccgcccctccgccg

SEQ ID NO: 163982 - DNA, 122 bp, Homo sapiens
tccgactctcttgagaatttctcaacgattgctcatgcctgtcagtatcagtgcttccatcgttccatctttgattcacttctctttcctttctatttactcccaaaatggagtcattcatc

SEQ ID NO: 163983 - DNA, 122 bp, Homo sapiens
ttgacttaattaatgcgcagcagcttgcaggaaaaaaaaaaaatcctcgcttctctgtttcgggtgtgagtgggccattgctctccctgtaaggagctactagagacgctgaggcaggagaa

SEQ ID NO: 163984 - DNA, 122 bp, Homo sapiens
ccggggagactgcccgaccccgcactaggcgggggctctgccaggtccgacgccgggctccggggccccagccctagacccctctcaggacagccacgggagtatccaggaggaagcgaggc

SEQ ID NO: 163985 - DNA, 122 bp, Homo sapiens
cctggttcctcgtgcgggtggcagcatgggtggtggagccctttctcagcaactgggaaacgggggagggagaaattttggattgaggctgccagatggagggcaagttccccaaaatgcac

SEQ ID NO: 163986 - DNA, 122 bp, Homo sapiens
ccccgcatggcctggtgggcacgagggaagatgcggtcatggggcaatcccatgctgtcccgggctgggctccacccacagacgtgcagctagagtgtccccgaggagctgagtctgcccag

SEQ ID NO: 163987 - DNA, 122 bp, Homo sapiens
ctcttctcacattgacaaactaagctttccatgcagaataaagacctctcaatatgggggcgattatgtgttagtgattcaatttccacattccctggctttcagggccttcacaaatctcc

SEQ ID NO: 163988 - DNA, 122 bp, Homo sapiens
atgagtggccagaagtggcaggtgttacagtggatcctgctggactctgcaggtctcaggcgagcctgagagtagtcggccttgctgctcactggcaggctgaccaaggcaagtcatttaac

SEQ ID NO: 163989 - DNA, 122 bp, Homo sapiens
tgagccgggtcgagctccacgctggcagcgtctgagagctgtcctgggccggaggtggcgcgaaccctgtgcggcctagagtgggcctggggtaagcctgtcggcgccgctgccgagccttc

SEQ ID NO: 163990 - DNA, 122 bp, Homo sapiens
tctgcaggtcttctcagtacagcatggtggctggggcaggccgagagaatggcatggagacgccgatgcacgagaacccggagtgggagaaggcccgtcaggccctggccagcatcagcaag

SEQ ID NO: 163991 - DNA, 122 bp, Homo sapiens
gagcctgcgccgcggcgtctgcctctgcctgcctcaggacttcgcggcggagtcacggtccgtccctgtgcctgctgccagcaaggggatgcccttccccacagctgtgtccacgcggggag

SEQ ID NO: 163992 - DNA, 122 bp, Homo sapiens
gcctgtgtgggtttgacacgtggggtcccctggaggtgcaggcagaagctctcctctgtgcggtccctgtccaagagtgaagaggaggccctccgggttggccaagacgctttttgttgcaa

SEQ ID NO: 163993 - DNA, 122 bp, Homo sapiens
gtgggtgggcgtgtacattagtgacggccgtaccggttaacagtgagaacggtgggtgggcgtgtattttagtgacggctgtaccggttaacagtgggaacggtgggtgggcgtgtacatta

SEQ ID NO: 163994 - DNA, 122 bp, Homo sapiens
tccccactcatgtccatggcctcatcctggacttggcaaacagggcccgccccaggacttcgcacggctgtccttgggccacacatctgggcgattcggggccggggctcctcttcctggac

SEQ ID NO: 163995 - DNA, 122 bp, Homo sapiens
ggaggaacttgagatccggacttctaagcgccccaaccagtttcgggctgcagcggccatcgcttcaaggggacccaggactttgggacccccctgtgctcccacctggagggagtttcatt

SEQ ID NO: 163996 - DNA, 122 bp, Homo sapiens
tttgtaaaatcttcggggtatcacagaggtgctgaatgcgtggttacatcaatgaaaaaacgcccactctttgagcctcctgaaaaggaggccacaggacccccgggcgccagggcttggga

SEQ ID NO: 163997 - DNA, 122 bp, Homo sapiens
tacttagcaaaactctactgggggatcaggagacagaatgcggggcaggtgaaaaacccacgtacaactgctgaaataaaaacaaactaaattatatttatgtgtatcgttatttttattag

SEQ ID NO: 163998 - DNA, 122 bp, Homo sapiens
gtttttggcaatggcttctgaaatgtggtatcccagttgcctgtggtgcctgagatggttcgaggtgccaggagctacgttaccagagcttatttggtcggtttttagaaaaatagaatttg

SEQ ID NO: 163999 - DNA, 122 bp, Homo sapiens
tgtagactcttttctcaattttatccaaagactcaagtaatgttggtgctttaagaagaccgtctagcttgtagtggactgagtcagacctggagccagtctcttctctcaagaggtgtgac

SEQ ID NO: 164000 - DNA, 122 bp, Homo sapiens
gaagcaacacgcacggtctgctgaaaccacacggctctacggagcagctgtgctggagaccgggcagcagagacgcccttggccccggtgacatttctaacagcaatggtgagtgtgtctgg

SEQ ID NO: 164001 - DNA, 122 bp, Homo sapiens
gtgtaccctggacacagctgggaacctggcaccacagctctgccctggctgttctcacaccgaggagcaggcacacaggaaaagatttttgtaaaccgatgaatttgttttccttaaatttt

SEQ ID NO: 164002 - DNA, 122 bp, Homo sapiens
gtcctccctgctaagcccttcattctgaatttctaaaagtaaggggatgtggtgtgtgaccgtgacacggtgaccaagtctgggaagctggctcccctggccacgctctgccgtgtctgcca

SEQ ID NO: 164003 - DNA, 122 bp, Homo sapiens
tttttttttttttttttttggaacaacccgcttttgcctccgattggccgctgccagtcacgcggcccgcgggcgggacggaattggagagctttcacttgctgacctggcgtcaccaccgc

SEQ ID NO: 164004 - DNA, 122 bp, Homo sapiens
tgctagcccaggctggcagttggggcagttaggaccagactagcatggtcctcaaacttgcgcaggtgaaggaacagaaaggtgtgtgtgggaaagaacgccattaagccacttgagctggg

SEQ ID NO: 164005 - DNA, 122 bp, Homo sapiens
tccctctggccctgaagccctgggcttgatatgacctcaaggcacccagacctgtcctcacgcgggccgtcctcccgtctcccaggaagtggcagtgagatttagtggttgacaggatgctg

SEQ ID NO: 164006 - DNA, 122 bp, Homo sapiens
accagaattccagggagaaagcctcaccccaataggcaattgctgtgtagcggtcaatttcgtgagtcacaatgcaggagaaaatgtcagaaggttctggtgtgaagtttaagtaagaaaag

SEQ ID NO: 164007 - DNA, 122 bp, Homo sapiens
gctccccacgccctccttagatccctgtgggtgggggccctttaatgcctctctgagaggcggactcttactctgcaggtgcctcacagccaggaagttcttaatgtctagcccaggtacag

SEQ ID NO: 164008 - DNA, 122 bp, Homo sapiens
tggtgtatagagaacaaaaaacaccacagtactatcgtctatcattggatgaagtggctccggagatgtgagtgttgggggtgactagggaagggaagactggggaaatggaaggaagtgtg

SEQ ID NO: 164009 - DNA, 122 bp, Homo sapiens
cctgtcggagaggctcaaggccggcagaaggtttgcattaggatcgagaaagccgaccaacggacagatctacctaccttcctgcgggagtttgaggttgccaggggggaagccactgcagc

SEQ ID NO: 164010 - DNA, 122 bp, Homo sapiens
agctttagaaccccacggcctccaggcccgccctcccctcggctccagtaccctacaccgcgcccctggcccacggccccaaccctcaccacgccgcagcccaggcaggagttgccgttctc

SEQ ID NO: 164011 - DNA, 122 bp, Homo sapiens
ggccaagagggcccataaaaacaaagtgagcattttttattctgcattttggagcctcctcgttcccacaccctgtggcaggttttgcccaggtcctcagtcactgccctagcctctgacaa

SEQ ID NO: 164012 - DNA, 122 bp, Homo sapiens
tgcctctcgaggaagacacctgcccaggccggccgcagaagaggtcgcacagcttgccgccgcccagggtttcagcgtgcttcctgggcctcgtcatcgaattgttcggctgacggctgcgt

SEQ ID NO: 164013 - DNA, 122 bp, Homo sapiens
atccaggttaagatcaaagacggggaaagccgaatacggctggggcctgagccgcgaaagcgctggacaggccccaggaggccttctgcccccacccgcaccccaggctagtgtcgcagccc

SEQ ID NO: 164014 - DNA, 122 bp, Homo sapiens
ggagccacatttagcctgccacagccattgactactgttatgggttgagttgtgtccccccgaaagatatgttgaagtctaacccctagttgcttagaattttgccttctttggaaacaggg

SEQ ID NO: 164015 - DNA, 122 bp, Homo sapiens
tgcccttggccctgaagaagctatgagctggaggggtttgctgaccacacccaactgagccgcatgtcccttctccaggggcaggtgcaaggcgagaacttactcgtccactgccatcctaa

SEQ ID NO: 164016 - DNA, 122 bp, Homo sapiens
gtggagccggagcgcatgctcactgccaccgagagccgcctggactacccggaccacgcccgctcggcctccgactacaggccccgcccctggggctgagcctctccgccctcgccctcgga

SEQ ID NO: 164017 - DNA, 122 bp, Homo sapiens
tgcaagcagggtatgtttttatctactgtgaggttcctggggcggagatgtgcagtggagcgagaacttcctgtgaccgtgacattgtctaggtggtgagcaggtgtgggggtgtggagaga

SEQ ID NO: 164018 - DNA, 122 bp, Homo sapiens
gttcagatccatcattgaggtttttatgagagaaggctgtcttgaaggaatgctttatctcggtttgcacatactgcaagtcaaccagagttagagggagctgccatgtttgtgctggaagt

SEQ ID NO: 164019 - DNA, 122 bp, Homo sapiens
cgaatattttcaggtggcagatgcaggaagaattttctgaccttccccagaagcaggtcacgagaccctcatgtgagagcacgtcacgagaccttcatgtgagaagcaggtcacgagaccct

SEQ ID NO: 164020 - DNA, 122 bp, Homo sapiens
agccacaggccaggctgcccctctgaccccaatgcatcagacctatgcagaccaccccaacgtggccacaggagtaccgctgcccctccagatgtggccaggcaccctttgtccccaggtgg

SEQ ID NO: 164021 - DNA, 122 bp, Homo sapiens
caccccgaccttgtctttcccgaagggaatggctcctccggcgcctcaacgcacagaaaacgcctgcctccagctgagcgcttttgccagctttctccaaccagtgaataagggatgcacta

SEQ ID NO: 164022 - DNA, 122 bp, Homo sapiens
aggggagggtaagtggcagggcaagcaaggcagcagctgaccattccaagaattccctcccgcatcccgatcttccacctggagaaccaacggcgcagccagggaagtcgaggcacgcccac

SEQ ID NO: 164023 - DNA, 122 bp, Homo sapiens
tgaaaccattagtccatgtgatgacagctttagtgcatcctgtgaaggatctggaatgcgcgatatttaggtgtttccagggtgttgggtgggggtggggatgccgtccgctgtccggagtc

SEQ ID NO: 164024 - DNA, 122 bp, Homo sapiens
cgcatcccacaaagccacgtaaatccaaaagcagtccgactctcgatagtgaaacacatgcggtaaacttgaatggaaagatgtttatactgcctcggatagagacacgtaaatgaaaaagc

SEQ ID NO: 164025 - DNA, 122 bp, Homo sapiens
ttggccctgaacggacgccgtagccaagaggttgggcggatgttgtgagccgggtcgctgcggccgaggctccgggtgagtgaggggcggcagggctctgagcctggcgggttccggctatt

SEQ ID NO: 164026 - DNA, 122 bp, Homo sapiens
gaggccggtggccgcggatcctggacgcgcttccctcctgcctgtggtttccctttattccggcagcgctgtgagtccacccttcactcataggagccacatccagaaccttctcctggggc

SEQ ID NO: 164027 - DNA, 122 bp, Homo sapiens
gctgaaagaaaggaattaacttctttctggctcaaagacatctggaaaacatatgacctccgtcaatatctctaacaccaggtcccatgattcaaactacacacaatcagtaagaaaaggaa

SEQ ID NO: 164028 - DNA, 122 bp, Homo sapiens
ctgcttagcagggccagattagcccccatctgtcctgtcaagtgctggctggggacgggccgctgcagaaggctctatgtgcctgaatgctgtggaagggaagagaagggagactggcaggc

SEQ ID NO: 164029 - DNA, 122 bp, Homo sapiens
acggttccgcagggggccgctgtctgcttggatctttcatcaggtcccaggcagagggtgcgctctctactcagcttcactccttgggacagaagtgtggctgctgatcctggagtagggaa

SEQ ID NO: 164030 - DNA, 122 bp, Homo sapiens
gactttaaaaactgttaattaaatgggaaactcaaaggtataaatataataaaatgctaccgctttgtgttatctttagtgattgtctttgtaacatgttttcttattacagtgacgagtat

SEQ ID NO: 164031 - DNA, 122 bp, Homo sapiens
aaaggcagggtatgtgctgagtgttacaggtggaaggccactggaggtcgctccaggagccgcggggatttacctctgcctaacagggctgctcaaggtgatggtcgacaccccactttcct

SEQ ID NO: 164032 - DNA, 122 bp, Homo sapiens
acctccccggcccaggtcttaccatcacagcgtcacaaactccaggtcgcctaggcgctgcgcaggaagcgcttgccagccccggacttctgcgcgcgctgcatgcccattggatgtgctca

SEQ ID NO: 164033 - DNA, 122 bp, Homo sapiens
taaatagagaaatcaaattgtcatatccaatctcaactcacctctcacctggccccagggcgcccctctttctttataactatgtgttcctctcccccattttgtgcctctcactttcacct

SEQ ID NO: 164034 - DNA, 122 bp, Homo sapiens
tgccaaactttcccccatcccactccatggctggcttggctctgaggtctaacccgtgggcgctcagcgtctccctatgctggaacacgcccctcagtgtgcgcacacctcttcgtaagcag

SEQ ID NO: 164035 - DNA, 122 bp, Homo sapiens
gcgggggccggccctggacaacgagggcaggcaccacggaccctgctcagaacccgcccccgcctgaaggcaccacagtcacaaggccgtctctccagtgggaaggggtcagtgcccaggcc

SEQ ID NO: 164036 - DNA, 122 bp, Homo sapiens
atgcagctggatggctctgctgtccgctcgccgggcccccacgtgacctactgcgcgggccgccgcctccaccgcgcccaggccccgcccccgtgacgtctcatcgccctctgcctgtccga

SEQ ID NO: 164037 - DNA, 122 bp, Homo sapiens
aaaacataatagcggtagtttgttgttccatcctttcctgtgattatggaataatgaatgcgacaattcctggggcgtggtggcttacgcctgtaatctgcgtggatcataggatgtcccat

SEQ ID NO: 164038 - DNA, 122 bp, Homo sapiens
aagctccacggccgccaccgccccgccccgtcgcgtgccattggttcggcccgcgaccagcgcgacgccgcctagccgcaattggctacataacctgcccgtcagcaacgcgcctaacgccg

SEQ ID NO: 164039 - DNA, 122 bp, Homo sapiens
ccttgaacaaacaaattctcctattttcttttctaggttttccagaaggaactgggaaagcgaacaggaaccgttcaggtcctgaagcggtcaggccgagagctgattgagaatagtcgaga

SEQ ID NO: 164040 - DNA, 122 bp, Homo sapiens
aagtgcactcagggtttgaatcaacctcttggacaaaacagatgcaggcacacgcaacaccggagatgtggcgtttcaggagaagccgcattccagaaaccgctttagggcacagtttcccc

SEQ ID NO: 164041 - DNA, 122 bp, Homo sapiens
agtcactgagcatcactgagtgatactattcactgagatcaaaccctcatgagggaggttcgggaacaaagaggattctgaacataatgatatgaagtacatttgggtagcccagggagaga

SEQ ID NO: 164042 - DNA, 122 bp, Homo sapiens
gccatcgcggggcaagttgattcctgggccggagctgggcactcatccatccacagtctccgggctggggtcggggtggggatgacgcgagcagagagggagagtgccccaattagtggtgt

SEQ ID NO: 164043 - DNA, 122 bp, Homo sapiens
gactggtttcagtgttccggaccgagtcagaaaggcgcaggctctgctggagcgagagaccggccctgcagtgcaggatgctccggtggacgtggccgagcggctcccgggcagcgcggctt

SEQ ID NO: 164044 - DNA, 122 bp, Homo sapiens
cactcggagggacacacccagctctgtaaggggccggggcgcgggcccagtacaggtctgcgcgcccgcagtctccgaacgctcacaggaccaggccccgcccgccaccccgcgccagcccc

SEQ ID NO: 164045 - DNA, 122 bp, Homo sapiens
ggccggggggcgagggcagccaaggggtcccaggcgggccggctctgtctgaccgcgcggcggccccacctaggtcctgggaccaggacaggaaatggttcgagacctgggatgaggaagtc

SEQ ID NO: 164046 - DNA, 122 bp, Homo sapiens
tcacgcacgtgactccatcatccacaactacgggctgcagctcaacgagggccgcacgggcgatgagttcctgctgccgttcaccatgtcctccaaccaccgcgccttcagcttccaccaga

SEQ ID NO: 164047 - DNA, 122 bp, Homo sapiens
ccagctgtgccattttggaacagattgagggcctgcaaaaacaccatttgttgccagtaccggatattgtaggggtgctcatcaccctgttaccatatttttgcacttcttaacattgcata

SEQ ID NO: 164048 - DNA, 122 bp, Homo sapiens
tacggtggtggtcttggaggggtggtggtcttggggggcgcggccccagccccatcttttcgcggggctgcttctgtccgcccgcacgggggaggggaggaggaggcggaggcggaggcaga

SEQ ID NO: 164049 - DNA, 122 bp, Homo sapiens
gtccgcgatgacatgctgtgtgcggggagcgaaaatcacgactcctgccaggtgggccctcgcgtcccccaccccaatccccggagcctggccagcgagcgcatccctcatcctgacccccg

SEQ ID NO: 164050 - DNA, 122 bp, Homo sapiens
cattatcacaccctccagggtgaggccggcagataaagagtttggcccctgtgcccccaccgttcccatccccacccatgtcaggctcccagctcaggcctcgaggtcaagtcctgcctatc

SEQ ID NO: 164051 - DNA, 122 bp, Homo sapiens
gagggaggcgcggccgcagggctagggatcgggctccggctggggctccggctgggactccgctccgctcccccctccgccaggtctcgccgctgcgccccgccccctgccccgccctggcg

SEQ ID NO: 164052 - DNA, 122 bp, Homo sapiens
acggtgatcactgcatccttgatgggctgctctacagatgacaacagaaaagggtcccgccggctccataccttagatgagggcttctaatctggtcactaatgacattttggactaggtaa

SEQ ID NO: 164053 - DNA, 122 bp, Homo sapiens
gtacggaaaagtctcagaaacaagccagctcttcctggaaagaaaaatcactgggtctctcggtggccaacagcagaactccagctttttatttgagactcacagccttcaaagcagcacgt

SEQ ID NO: 164054 - DNA, 122 bp, Homo sapiens
gactccggcacgaaagtcagccgcatgaagcgaggcaggcacaggcaggagcccgagttccggaccgagatttcatgggtccggcccaccccgcggtcagggtcggagggcaggctgacgga

SEQ ID NO: 164055 - DNA, 122 bp, Homo sapiens
gtaagttcgtcgttgagggtgtggcatcaacaccactgtctccctggagagcaggcagcccgcggtgggcgggggctcgcctcccccatcctgaggtacaggagactcacatgcccgattga

SEQ ID NO: 164056 - DNA, 122 bp, Homo sapiens
attcagctgcacacaggaagacgcgctgcaatgtgcaggacccctgaaaacactgggctgcgtgaaagggtcagtgaccacgggttgtatgattccgagtgcacgaatgttcaggacaggag

SEQ ID NO: 164057 - DNA, 122 bp, Homo sapiens
ttcgaaggcagccccagacaggggctgggggctggaggctcctcatgcagctgctggccgcgggatccatctgctgtccgctgcacgcctcggtcctttcaaagatttgattctttatactt

SEQ ID NO: 164058 - DNA, 122 bp, Homo sapiens
cagctcctccgggatctaccgcgtgatgctgggccagcataacctctacgttgcagagtccggctcgctggccgtcagtgtctctaagattgtggtgcacaaggactggaactccgaccagg

SEQ ID NO: 164059 - DNA, 122 bp, Homo sapiens
cattgggggtggtgttggggagagcatcaagcacaaatacctaaaggtgtgagacccaaacgtattttggttcagcaaatagttgcattgctggcagtagaatggagttgggggagtggcaa

SEQ ID NO: 164060 - DNA, 122 bp, Homo sapiens
ccaggaagccagttggaaggagcgcttcaagagcccggcttctcaggcctcacatcctgccgcagacccaccgcaggtggcactatgaaaaggatgcggcattaacagtgggcgctgcggca

SEQ ID NO: 164061 - DNA, 122 bp, Homo sapiens
gcagatccccgtgcacgggtcctccgcacacccttgccagcccgcagggattgttcgccgcgttggtgactccttcccaaaatgggaataaaagatcgaaatagctagtaagcatgcaaagt

SEQ ID NO: 164062 - DNA, 122 bp, Homo sapiens
ctgtctggggcagggtgggggcggctgtaggaggcctggtgcagggtgggagccggctgtcgggggctgtttggggcagggtgggggctagctatggggggcttcccggggcagggtcaggg

SEQ ID NO: 164063 - DNA, 122 bp, Homo sapiens
cttccctgcgcagtgaccgtgccctggcctggcgccctctctgtgcagcagctctccacccgcagcttcgggtctctcccagatggtgcgggaaccacgagaaggtcatcaggggagaatct

SEQ ID NO: 164064 - DNA, 122 bp, Homo sapiens
ctacccttggtctggaatctggagttgggcggtagggtttgaaccccgggctccagtgcccgtgagttttgggggcttgggtttgctggccgcccctcaggtctggaatctgagctgctctt

SEQ ID NO: 164065 - DNA, 122 bp, Homo sapiens
gttttcttggggagatcctggccaatgattgacggagcaaggcagtagtacaaggggctacgcatttcctgatgcataatttttgccctagcacttccagttggacttcagagacttcgcca

SEQ ID NO: 164066 - DNA, 122 bp, Homo sapiens
gggtccccagcaggttaagaggctggtactttttcaggcaaatagcccactgactacatacgaggttgctgccatatctgaaaatgcaaacttgagataactcattatttacaacgtacttg

SEQ ID NO: 164067 - DNA, 122 bp, Homo sapiens
ctgacacactacgcaatcctatatgccaggatgtggctttacatgcagaaaacagggacacgatgttttcatgaagcaaaccaaagaaaggacaagaccgtcctggctgctgagcgcaggtc

SEQ ID NO: 164068 - DNA, 122 bp, Homo sapiens
ttggcttgaccttgtgcccttaggtctctttcagctcctggtgaaccccatgaacatctacgaagaacagaagattatgttcttgtacagcttggtgggttagtgctgggcaaaagccagga

SEQ ID NO: 164069 - DNA, 122 bp, Homo sapiens
gcggaaaaagatgagcgcgctctgaagcaggagattcacgagctgcgagggcgcctggagcggctggagcaggtgagccaagcctgctgggtggggcgaggccagacgtcactgtcaatacc

SEQ ID NO: 164070 - DNA, 122 bp, Homo sapiens
tgaggagaaggaggtgtcagccaggccgggaccctcctccagggccgcagatggggaggacgagtcccccagatggaaagggctggaagcccccggggacccacctggagatcttggcacac

SEQ ID NO: 164071 - DNA, 122 bp, Homo sapiens
attttaagataactacctcagcttgataggaaagcttgctctgcccggggttgaggggtacgggtctgagggcaacagaatcgacagcctcaagtgggcaaagggtggccaaacaggagtgg

SEQ ID NO: 164072 - DNA, 122 bp, Homo sapiens
cagcagcgctcggcccggagcagcaggaaggcccctctgtggagcgcccgccgtctgctccggggtggttcagtcactgcttgttgacatcaacatggcaattgcactcatgtggactggga

SEQ ID NO: 164073 - DNA, 122 bp, Homo sapiens
agggcgctagtggttgcgctctggaagcgcaggtccgggctgatggcctgggtgatctcgcgcaccaggcgctggaagtgcagcttgcgcaggagcagctgagtggacttctggtactttct

SEQ ID NO: 164074 - DNA, 122 bp, Homo sapiens
gaagaaggcccgcaagtctgcaggtgcggccaagcgcaaagcgtctgggcccccggtgtccgagctcattactaaagctgttgccgcctccaaggagcgcagcggcgtatctttggccgctc

SEQ ID NO: 164075 - DNA, 122 bp, Homo sapiens
ctaggttcctagcatggtgctggaaatgagaaattaaggaaagagaagtgttgccagtgtcgagttgcatcgggagagggaacgttcagtttataaagaagctatgcaggatccccattcca

SEQ ID NO: 164076 - DNA, 122 bp, Homo sapiens
gtgtacttaggggagaaagaattaattcaaatgcagggtctgccgcttcaggtccatttacggaagccgcaatcctgcactatgaccaccagggggagcgctaggcccatccctgcacaggt

SEQ ID NO: 164077 - DNA, 122 bp, Homo sapiens
tccccggcgacgcgcgggtcctcacgcgctccctcacttcctgcggcttttggtccctcccgctcgccgtccctttagttctgcccacttcgcctccgggttgtcagggcaaccgtagcgac

SEQ ID NO: 164078 - DNA, 122 bp, Homo sapiens
tctcattcgtttaccagcgtttctgggtcacagtgcgggggtggagcccagtctggtatccgaccccggacttagaaggctataaaggcctgagtctgtccgccctgaaagtaggtggagga

SEQ ID NO: 164079 - DNA, 122 bp, Homo sapiens
catttggaaacttgtggccatgtcccttggaaccaaggccaggaagtggatggagcaggacgcctgggcaggcgtggccaggagacttaccacttgccgacaatcttgctgacgtagccggc

SEQ ID NO: 164080 - DNA, 122 bp, Homo sapiens
ggaaaaaaagtcttttggtctcaacataaatgggttctgacctgcagtttcaagccaatacgttacagtaagagtaaatgtagggtttctcccagttttatctggcagtcccaaagtcagga

SEQ ID NO: 164081 - DNA, 122 bp, Homo sapiens
cccaagaacgtgagagttctcctagatcgggaagagatttttgcacaactcaccaacatacgctccctgcctaggacagagtttggcacggaacaggagctcagtaaacatcggatgaaaga

SEQ ID NO: 164082 - DNA, 122 bp, Homo sapiens
catcaaaggcagatattgttatggcagaggatcagggaactgaaaaataagtcatggaaccgtcaccaagcaatgatggttacaacttttgtttgttgtttggttggtttttgtttccttaa

SEQ ID NO: 164083 - DNA, 122 bp, Homo sapiens
gtggtgcaatctcagctcactgcaacctctgcctcctggattctagtgattctctagtctcgtgcctcagccaccgagtagctgggattacatgcgtgtaccacaatgcccggctaattttt

SEQ ID NO: 164084 - DNA, 122 bp, Homo sapiens
aatgatgaaattgactacttcatgacacatttctcaaaatgtatccctactcttaaatgacgcatgactgtttttgttgccttcagagaacatagcttcctccaccaggcttgctgccctgt

SEQ ID NO: 164085 - DNA, 122 bp, Homo sapiens
tttgtatctttccagacaattagtgatttgctctgatggccctcctgttgggccttttaacgttctctgtgtaaataatcctaggcagctgtgctggtcacgtgtggccttcaaaggcaggc

SEQ ID NO: 164086 - DNA, 122 bp, Homo sapiens
ccctcagagcctggacctgggcatctaggcgggagtggggatgggcctttggcaccattccgggcctggcagaggctcccagcccgagggtgagcctaaggatccctccccgccgtgcctca

SEQ ID NO: 164087 - DNA, 122 bp, Homo sapiens
aagacgcaagaggcggtgctcgccttagtgtggggaacgcgaggctttgcattgtcccctcgtggtcggaggagtgccctacaggctggcggctaggttgcgacttggacaaatcggcggag

SEQ ID NO: 164088 - DNA, 122 bp, Homo sapiens
atcagtgccaaaggtgctgggggtcgggcccagcgcccggcgcggctggaatgggggcggcgaggagctcctcctagccagccgcagggcgggaactgcccaaacgcaggtcgcagcctcac

SEQ ID NO: 164089 - DNA, 122 bp, Homo sapiens
gaacctgcaaccttcccgtctctttcctaccacccgccgccgttaggaatcttcagatcccgctgtaaagaatggaggaaggaggagccatttatcctttaccaagatggcagcctcctggc

SEQ ID NO: 164090 - DNA, 122 bp, Homo sapiens
ccccgctctcccgccccctcccgccccaccgccgcccgggcccctccagccgtccagaagcggctgcccgggacccccgggtcctgcccagctcgggccacacgctcctccctgtcccgccg

SEQ ID NO: 164091 - DNA, 122 bp, Homo sapiens
cacctgctccctaacatctatttttaacccctagctcaatactcacagcaccttcgcagtcgttcatggacaagtgcatgaacacagtgacaaaaagtttgagacacactgtatgcatcccc

SEQ ID NO: 164092 - DNA, 122 bp, Homo sapiens
caccgatgcctttcctgctgatgccttgcccaacgccttgcccaccgacgccttgcccaccgatgccttgcccaccgatgccttgcccgccgacgcgcccaacgccttgcccgccgacgcct

SEQ ID NO: 164093 - DNA, 122 bp, Homo sapiens
tttttttctttttcttaaacctacccattatatgttagtgttcttcttggttccttcctacgctaccactgttctaactgcattctctccctgcatgatcttatttactcctattttaattg

SEQ ID NO: 164094 - DNA, 122 bp, Homo sapiens
ccgccaacccagcggctgcagcggctgcgggactaggtgggaacccggtggcggccgcgtcgtcgctgagtacaccagctgcctcatctatctggagcccggcctccatctcgccaggctca

SEQ ID NO: 164095 - DNA, 122 bp, Homo sapiens
cacctagatgaggccctggcacccaagctggggcccccggaatctcacgttccctttactcgccaggcatttcggggcaaaacgaagcggagccccccaaacccccagacctaaccaagttc

SEQ ID NO: 164096 - DNA, 122 bp, Homo sapiens
ggtaaacaggaaggaggagcctgagctcccagttctggatttgggcactggggaggcagccgagagtatctggggctgttctgggcttctctggaggaaggaggaggctgggggactggatt

SEQ ID NO: 164097 - DNA, 122 bp, Homo sapiens
cctccaggccaagagggatccttcacccgtgtctggtgagtgaggagcgctgttggccggcgcgggggtggccgcggggagcagcaacagtggaggatggatgagtgaccctgagagttacg

SEQ ID NO: 164098 - DNA, 122 bp, Homo sapiens
ctctcccaagacaagggtggcgtggtgccccggggcaaagactaagtcgctgtacagcctcgaggagcgagctgctcagcaaaagcaaaagagaagggctctcgggtggcggggacagaccc

SEQ ID NO: 164099 - DNA, 122 bp, Homo sapiens
tctagtgagcatttcataagtaccagagattgttacatgcattattttatttcatcctcacgataaccctacaaagaaaatcttacctttgttttacacaggggaaagtgaggcttagagcc

SEQ ID NO: 164100 - DNA, 122 bp, Homo sapiens
cctccacgtcagggatcaaccctttgctggtgaacagcctgtttgctggaatggacctgacgagccttcagaatctccagaatctccagtcgctccagctggcaggcctcatgggcttccct

SEQ ID NO: 164101 - DNA, 122 bp, Homo sapiens
ctgagctttccccaaaaggtcaacagaagcaaagtctggcctgagcaaacagactttgatcgatagctccacaaccacagccccctccagccggcctggctctaccaataccaaggggtttc

SEQ ID NO: 164102 - DNA, 122 bp, Homo sapiens
agaatagccccctctggctctccagagattgattcattaggcagggttgtgtttaggtgacgcccacaaacgagaacattcatagcagccatcatttctcagtgaatgcggtcctgtaaatg

SEQ ID NO: 164103 - DNA, 122 bp, Homo sapiens
caaaatgaatatacccaccggtgtgaattgacaatgtggtccaaagagcaaggcaggaaacggagtccagatcctcaaaatggtagtacagggcataaccactaggccacctatcagttcag

SEQ ID NO: 164104 - DNA, 122 bp, Homo sapiens
tgataaaagtgtttttagggaatccgggcttatgagaaacatttcattattatttgggaacgagaacagttgtttttggtttatctgagaacaaaagtggttttcatttttaaattgtgtaa

SEQ ID NO: 164105 - DNA, 122 bp, Homo sapiens
taatttcagtggaacactcagccggcgatctgcgcctgccagcacattccttccacacggcgcatgattcagagcatcactcggatgctttggatttccagttttgagaacaccttaattgt

SEQ ID NO: 164106 - DNA, 122 bp, Homo sapiens
aaagctgttttctgctttctttccctctcttcctccccctttcctgagctcccagctgctcgacctcttgcgtaactgtgagagagcgctgagttttttgatgggctccagatgtggagcag

SEQ ID NO: 164107 - DNA, 122 bp, Homo sapiens
tttgggagtaaaattggttatgaaacaaaaacaataacaaagttgcttttgaagactatgcgttaaaatggtagtggtagttatatttttaatttttatgggtacatagtaggtgtatatat

SEQ ID NO: 164108 - DNA, 122 bp, Homo sapiens
gtcaccaaccagaacgtctgttgactttgatatatgaagatttaactcacatctctgactcgccgtagaagtatacctgtgagatgattttaaaggcaccttttcctttcctctatttgtat

SEQ ID NO: 164109 - DNA, 122 bp, Homo sapiens
ggccagagggattatcccacttaatagctccacagatgcgcccagaagaatgtggacgcgcgacaggacgggctgaaaggctgcaggaggaagcaggcagccccggctcctggctttaccat

SEQ ID NO: 164110 - DNA, 122 bp, Homo sapiens
ttttgtttctgtcctccccttctctgccataggcccttcagttccctcagctattgaccccggactgtcccaatcccagccccgcaaggacctaggcaaatgctcccccttctttctaggac

SEQ ID NO: 164111 - DNA, 122 bp, Homo sapiens
tcctagatgagagtttagccattgccggagtgtgagcggagtttgcactgagcaattaaacgatatcacccatgtggtcccatgttcctcaacttgtcacaggttccaagcacttaacagtc

SEQ ID NO: 164112 - DNA, 122 bp, Homo sapiens
gcgcccggtggcgtccatggcggcgaaggcgacactcaggcccagcggccgcggcagtggcgagtctcggcacaaccgttggccccgccgccgatttgaatagcatagagggctgcgcggat

SEQ ID NO: 164113 - DNA, 122 bp, Homo sapiens
gcctcgggccacactcccgggatccccagggactggcctgggactaccgggggtggcggccgtggctctggctatggggagggaggcagagccgcggggcaggcgtggggtctgctgtgccg

SEQ ID NO: 164114 - DNA, 122 bp, Homo sapiens
ccactgcgctttcaggctgtccacagacctcaccaaaccccgcggggctgggagcagccgcgcgcaatccgctcttgggagccctgggagctggctgtgcccctgtagcatcggattccaca

SEQ ID NO: 164115 - DNA, 122 bp, Homo sapiens
tgtaaatctccgccaatttcggtcctaatcatcattataaacccttcctctgcccgctcccgcgcctcacctcgctggcaaaacagcccctggcatgatcatcgcaccggcctgcggggtca

SEQ ID NO: 164116 - DNA, 122 bp, Homo sapiens
tcttgccttagagctacctcctcctgcctggatttatatccaaagcagtaagggagtttgcgccactatgtaaataattttccaacattgcttgttggggcaggtgtcagagcttcgggaag

SEQ ID NO: 164117 - DNA, 122 bp, Homo sapiens
caacttgtgaacaaggaaaagtgagggaatcagtatacacagtagcatgtaccctgttagcgaccactaaaacaattgctttaaaactaatacttcacggcgcggtgggtcacgcctgtaac

SEQ ID NO: 164118 - DNA, 122 bp, Homo sapiens
ctttgtaaagcgggcgcaccacgctgtgcttgctattcacgcacttccaggagtctcccgcgaggctccacgtcctttcggggccgggggctcccagggcttgcctttcagggcagggagtg

SEQ ID NO: 164119 - DNA, 122 bp, Homo sapiens
tcaacagaggcaggggaaacaagctccaagagtttctgtcattgttttgatgagcagccacggaaagcctcaaccctgctctgtcttggctgatgccaaaattactgaagacaaaatgtacg

SEQ ID NO: 164120 - DNA, 122 bp, Homo sapiens
ttaattaaccccccgggagcgtctcaggcctccccccgggagcgtctcaggccccgtttacgctgagtgtctggggaaagacgtggtttggttttgtttttctagtaacccagatgaaatgt

SEQ ID NO: 164121 - DNA, 122 bp, Homo sapiens
agggagcctgggggatggcagttgaggttcccggagcagacgcagccttcctggtggccgcggctgcccctgaatttgagggcagccgcagcacacccagcaagtcggacaggggcccctcc

SEQ ID NO: 164122 - DNA, 122 bp, Homo sapiens
agtgtgtggggggggaaacgtccctcttcccatctgtggcagcgcccgcccgcttcgctccgaggtcccccatgcggtgagcgtgaacccttccacagcacctctcggcgccccctaccccg

SEQ ID NO: 164123 - DNA, 122 bp, Homo sapiens
tgctcaagggtgctttctgatccaaacccacaatgtgacataaatctgtcattttgattccgctggggtgtacatctgaaaacccaaaaagtgaaaaaatgaaattagcccaggtattaacc

SEQ ID NO: 164124 - DNA, 122 bp, Homo sapiens
atcccctgctgccatctcctgcacccttagggcacagtgggcatctcgggagctgctcagcggacagactagggtgaggctctaactccattcttggagatgaagggaactggggaggcttg

SEQ ID NO: 164125 - DNA, 122 bp, Homo sapiens
aaggagattccagactctcctgaactcagaggtgctgttccactctcttttttcccccttcgcctcctccaccccacagacttgactcttgtcattagctgagcttgcctggacttactggg

SEQ ID NO: 164126 - DNA, 122 bp, Homo sapiens
ggaaagtgccggaagtgaactgggggatccttgcctcccaaaacagggatgggctctgaacgccccaccacggcctgctgccacgcgcgcctctcgctgcaggagcggtggatccaccgatg

SEQ ID NO: 164127 - DNA, 122 bp, Homo sapiens
agaaggcggtggggtcgccgggggagggcaacacctgcgtcccttttctgcgggaggggacggtgcacccccggaattgatatgccccgggagactgctttcccgtaggtcggagcctcatc

SEQ ID NO: 164128 - DNA, 122 bp, Homo sapiens
gctgaattgcttttgttagccattcttagcatatccttagtagcaagaactatttaacaccgcactgtaaacaccatacctctcacagggagagcaaggacaagccattcatatttcttttc

SEQ ID NO: 164129 - DNA, 122 bp, Homo sapiens
atgggaagacactccataggtgaacagttggtatcaggacgccatctgtccccagttcatcgctggcccacatatgaacagccctggcctgcaactcttcctaccttcaactctcaccttga

SEQ ID NO: 164130 - DNA, 122 bp, Homo sapiens
cgcttaagttggagggggcgaggccgccaggggcgccgcggtcagcttgccagcccggcgcgctttgttctcaggtagctgggctccagcagaggcagccggggaaaaggactgggaagccg

SEQ ID NO: 164131 - DNA, 122 bp, Homo sapiens
cgctccagcccaactgagcgtctctgattggccgccagctcagcttggaacgctggggtgcgtggcgtcatatccgccgggcccgccatcttgttcccaggggcagttggcggaagagatcg

SEQ ID NO: 164132 - DNA, 122 bp, Homo sapiens
cggaagagaggcggaaagggcagcaggctccttacccagaccagcgaggggaggtcagctcgtcgcggggtgtggctcccgtccggggactcccgagctcattacgggtggccgtgtgtagc

SEQ ID NO: 164133 - DNA, 122 bp, Homo sapiens
gaggaggcagtaaggtaggtgatggttccttctcccttccctgtttaggctcttctgagtcgagtggggccaaagcagccctaaggcccataatgttaaagatgttactggtacccattgcc

SEQ ID NO: 164134 - DNA, 122 bp, Homo sapiens
ggcccgccgccggccttcggggccgtagcggcgcgcagggcccgcagagaccgagacctgcgcactacaactcccaggaggcctcgcgaccagaccgccgaggggccactagagaaaggtgc

SEQ ID NO: 164135 - DNA, 122 bp, Homo sapiens
cagtctcctttccaaagcctgcaaggctcctcctgagctcccttttacctccttttgcatcgtactcctcttggcccacctggatgcagtcctgtccctagatccagcccagtggctttcct

SEQ ID NO: 164136 - DNA, 122 bp, Homo sapiens
cgccattgtttagtcgtgatgctctcattttctctgaatcaacaattttctgctcggctccgcgccgaccggcgaacgcggggcttttcctcgcccgcctgatgacagcagagcggcgcgga

SEQ ID NO: 164137 - DNA, 122 bp, Homo sapiens
gatatgcagaagacaacagggcctttgtgtggaaaggcatccgtgaattaacaccaatggcggagagcaggcagtagggaagcggccgcggtgggcgctgttccgcaccccgtgtggtctgg

SEQ ID NO: 164138 - DNA, 122 bp, Homo sapiens
atctaagtgggaggcttgaaggaatgagtactggagtctttgggggactcccttcccttccgacagcctcgactctccgccccttccctgcctgcccgcgggcccctttaaccgggtggcgg

SEQ ID NO: 164139 - DNA, 122 bp, Homo sapiens
ggctctcagtgaatgaatgaatgcacagcacgaacctgtaatcaaggaccaagcgaactgcgggaggcagggttgctcctgagagcaaacagtgacctagttaacctggcgacaggcgtgaa

SEQ ID NO: 164140 - DNA, 122 bp, Homo sapiens
acgtagaggcgggaaccagctggttgttagggcaactgacctctgcgacctaatggaggccggaaatcgggtctggtttgccctctagagcgggaatgaagcggtgcacggtggaacagtgg

SEQ ID NO: 164141 - DNA, 122 bp, Homo sapiens
cccagagaggtcacaccttccctcctggtgttcccgggagacaggctcagccaggggcgccggtcctgcccaggaccagccaagtgttaggagcagagtgaggacaagtcatggcaaaggaa

SEQ ID NO: 164142 - DNA, 122 bp, Homo sapiens
acaacgaggtaaaataagttgtttagaggccattcttcacggagaccggctgcccgctggcgtcgcgtgcccttggacagagcgagcgcctatgcgagataactccggggaagctcaaagtc

SEQ ID NO: 164143 - DNA, 122 bp, Homo sapiens
ccgtgtttgttacggttcgagctgagcttttgctcgctgtccaccgctgctgtttgctgccgtcgcagacctgccgctgacttacacccctctggatccagcagggtgtccactgcgtttct

SEQ ID NO: 164144 - DNA, 122 bp, Homo sapiens
ccactatgttcagtctagtgagtctgagcaattaactcacattttgaatttcaagtctctcgccttaggcaaaacaccaccacctgatgctcaccagaggggcgtgacgcggcagctgggca

SEQ ID NO: 164145 - DNA, 122 bp, Homo sapiens
ctcttccccctctggctcttaggacccccatcgcaggggggtgaggcaccccccgcgatgcggggagtaagagccagcccctcataccccccgccggctcttaggacccacatcgcaggggg

SEQ ID NO: 164146 - DNA, 122 bp, Homo sapiens
ataagagcgcccactttggcagcatatatactaaaattggaatgatacagagaagattagcgtggcccgtgtgtaaggatggcatgaaaattcatggtgtcccatataaaaataaaataaaa

SEQ ID NO: 164147 - DNA, 122 bp, Homo sapiens
cccgaaccggagaaaaccttcggcggggtccttccgggttttgtgtcgaatctgcggcggcgacccggcgccgcgtcacgcggtggtgaatgtgcggcagcacgcgcgccgcgtcgtttacg

SEQ ID NO: 164148 - DNA, 122 bp, Homo sapiens
gtactgcttctgcctgaggactccccgccggggtcctccctgtcgccgtctgcgcctccgcgccctgtgggccgaggccccggcgctcctcgctcagcccaactcccaaggcccagcgggtc

SEQ ID NO: 164149 - DNA, 122 bp, Homo sapiens
ataatgttggaatgtgttcagtcatgtttaccatctctatagtatgatatatgataatatcgcagattactcagtgtcaaaaacctggcataccttgtccttatgatgttgatgagtcaatg

SEQ ID NO: 164150 - DNA, 122 bp, Homo sapiens
atggtgtcctgttacacagaagcctgctggccgcaggaacaggaaatagccttttgtatgcgggttcaggctttgctcccattgacttgtttcctcccgtctgcatcaagttcagcaccctg

SEQ ID NO: 164151 - DNA, 122 bp, Homo sapiens
attcatatcttcatatgttttcactccacacaacaataagggtatgaatgagaagtttctcgagtttacaaaacaagagttttatctgcctgacgtcacctggttcagccctcaggtaaact

SEQ ID NO: 164152 - DNA, 122 bp, Homo sapiens
acagtaagcaattctgggcagcctatgtcagactttaccctgagttccaccttgcgcctgcgttggctttttttttttttttttttttttttgaggcaagagtctcactctgttgctcaggc

SEQ ID NO: 164153 - DNA, 122 bp, Homo sapiens
gggtggtacccaaagaggcgctcagatcactggagctggagctcagtcggcggtcttctgcgggaactgcacctatcccggagcatctctggccctcctatttcactgaactcgccttcctc

SEQ ID NO: 164154 - DNA, 122 bp, Homo sapiens
cctcacctcaagttactcaagaccatcatttgagcaatcctccgttttgttctactgcatcggttttccctttctactgaagtattctcatcagaacaaaaacttcctaagatagctcacat

SEQ ID NO: 164155 - DNA, 122 bp, Homo sapiens
tgcatctgcaggccaagggccctccggcattcttttcttaaggctgcatgatagtttgtccgagtcacctcctccggcctgctgcacttgtgccaggcaggtgccgaggggccctcttctgt

SEQ ID NO: 164156 - DNA, 122 bp, Homo sapiens
agttttgggatagatggaagggtaaagagggtggttagtgccaaaaggaaaaaaggatggcgagccggagaagtcattgcataaagacggtgaggaaaagatgttgggaaaaaaaattgggg

SEQ ID NO: 164157 - DNA, 122 bp, Homo sapiens
ggaggctgaggtgggaggatcatttgatcccaggagtttgaggctgcagtgagccatgatcgcaacactgcacaacctgagtgacagagcgagaccctgacactaaaacttaagtacattta

SEQ ID NO: 164158 - DNA, 122 bp, Homo sapiens
agtggtagggactgtccagaagtttcttgggcaggagctgggggcaggagctcagtgcctcggattatacaaggaagtccccagctctctttgtggctaacatgattgcctccctgaaattc

SEQ ID NO: 164159 - DNA, 122 bp, Homo sapiens
cggggacaccacggtggaagggggcgatgtggtgtggcagcacgtcccggacgtcggcttcgcagtgttcccagtgtgagctgcgtgcgtgcttccgaggccgtttccccctcagctgggct

SEQ ID NO: 164160 - DNA, 122 bp, Homo sapiens
ataaagagcacggtcgggcgatgtggttcccaagccaggaagtacgcctgcgcacgcggccgccaggaactacatttcccagcatcttctgcaaagcgccctcttgagctgcgtctttcacc

SEQ ID NO: 164161 - DNA, 122 bp, Homo sapiens
tcacgaaactggttcccagcaggaccaaggagggcatctccctgggggctagcaggcacccgggcgctcggggacgccggcacccacctggacggggccttcaggttgctcttccggaggaa

SEQ ID NO: 164162 - DNA, 122 bp, Homo sapiens
accagcctggtcaacatggcaaaaccctgttctatgaaaaacacaaaaattagccgggtgcggtgggcacccgtgttcctagatacttgggatactgagacaggagaatcgtttgaacctgg

SEQ ID NO: 164163 - DNA, 122 bp, Homo sapiens
taggcgcgagcggcctctacaggtccggtgcgcgtggcggctgccgcggcagtgaggtcgcgctttcctatgcctcttttggggacccatctgagctccctggccgcagctcttagcggcat

SEQ ID NO: 164164 - DNA, 122 bp, Homo sapiens
agcatggaggttcaaagaaattcagagcaaggagcagatgatagtcctctctcatgtttccggttgctaacagtggagaggaacctcactgctccccagtgacctgcgaagcctcagctgag

SEQ ID NO: 164165 - DNA, 122 bp, Homo sapiens
gcgcggagtccaggaacttgttaagagtttggggctctggcggagcgctctggcccccgccgctgcgagggcaactctccctgggtgcgcacacccacgcccccgcttagccaccggtggat

SEQ ID NO: 164166 - DNA, 122 bp, Homo sapiens
gatcgggtctaggacttcgcccggcccctgccctccactacttctcatgtcggactatggcggcagtgaccttgtgggataggagagggtatctgtcatttcacttctgcgagaaaaacatg

SEQ ID NO: 164167 - DNA, 122 bp, Homo sapiens
atggcaagtgggatggccgggaccagagagcgcgggccagagccagttcttaccaaggtgcggccgcccctgtccgggtgcttgtcctgcgatggcaccacaaacccagtcagaggaaggcc

SEQ ID NO: 164168 - DNA, 122 bp, Homo sapiens
agcatatccgagagcaggcccaacgcggtggggcgcgtgctctgctgatccgcagccatccgggttcagcccagcctggccagcagctgcgggtcaccagccagagccatcacagggcgggt

SEQ ID NO: 164169 - DNA, 122 bp, Homo sapiens
ggagagggcagaggagcgtgcagagatgcgtgcggaggtgtccgaactaaaatgtggtgacgtggcaaagaactcaagaatgttactaacaatctgaaatcgctggaagctgcatctgaaaa

SEQ ID NO: 164170 - DNA, 122 bp, Homo sapiens
cttgtgtggctctgtccttcttttcaagtttgagggggttgtggaccatgtgaggctggacggctcacatgtcagccgccaggctcttagttacagacatggcaaacttccatcatttaagc

SEQ ID NO: 164171 - DNA, 122 bp, Homo sapiens
aatctggaagtatgaaaatatgattacaagttccattcattatttgtgttctgtggttttcgtattgttcttgaaatttacttcctgcctgcctgaagttttgtattatgaatttagtgtca

SEQ ID NO: 164172 - DNA, 122 bp, Homo sapiens
gagacgatcccgtccgggatcccatccggctcccatccggaggcgatcccgtgaaaggatcgcgtccaaaataaaaggacccgagacctatgcttatgtaattcctaatccgtgatcttttc

SEQ ID NO: 164173 - DNA, 122 bp, Homo sapiens
ctgcatggatgcctgccagtgaggcagtgacagccctgggaggctggtcaccgagatgcccgcccctgctccctctggtggtggccgtgtacaccatatgcccctcaagccaggaaggcaag

SEQ ID NO: 164174 - DNA, 122 bp, Homo sapiens
cccggagtccacgaacggcgctgggccgtggcaagacgagctggccgcccctagcgggcacgtggaaagaagcccggaaggtctggaatcccccgtggcaggtccaagcaatcggagagaag

SEQ ID NO: 164175 - DNA, 122 bp, Homo sapiens
cggcgcagcctcctcctgtgccactggggcagccagtgtcttgtcccttacctgctttgacgcggatgttggggctccggatcttgccggcagcgttctccgcggtgcagaagtagtcattg

SEQ ID NO: 164176 - DNA, 122 bp, Homo sapiens
ttttttgtacttttatacacctctgtctaattcaggacattttcttcacccgggaaaaagcgttgcccgcctcagcagtcactccctagtcgtcccccagcccccgggcccccgaacacgct

SEQ ID NO: 164177 - DNA, 122 bp, Homo sapiens
cggagcaggcggggtgaggagctgcggtctgtgagtcctctcccgccaatgggtggaccgcgctggcggccgcgagctcgcggagctggtgagttcctcaaagagcggtcccacaacctttg

SEQ ID NO: 164178 - DNA, 122 bp, Homo sapiens
tagccgcacagactgacaatctcggcacaaagaggagacagccaaggtccgggccagggacgggagcaaggacaggggcgaggagacacccactccccaagtctgagcccctcagtcaactc

SEQ ID NO: 164179 - DNA, 122 bp, Homo sapiens
ccctcccctcagcctggacccgggtccaggtgtgatacccaccttgaagacctttggtggcgaagtgcaggtcgatggggtgggaccagtaagccatgtcccctatctgcggggtgtccact

SEQ ID NO: 164180 - DNA, 122 bp, Homo sapiens
cggtgcattgtgccaccagcaggccacagctgtggatcttggaaggcctctggggtcccccgggagcaggggagtgggtgtgggggggaacggatggtggtgagagggacagaccaggcagg

SEQ ID NO: 164181 - DNA, 122 bp, Homo sapiens
cctattattcggcgcatgagctggagtcctaggcacagctctaagcctccttattcgagccgaactgggccagccaggcaaccttctaggtaacgaccacatctacaacgttatcgtcacag

SEQ ID NO: 164182 - DNA, 122 bp, Homo sapiens
tcagtcgactcagcgcaaactggggcgcgggacgtaggggaattacggtagccgcgcgggcgctaccacctggaccggccgggatgtaccaacggcgccgcccggctgggaccggggagagg

SEQ ID NO: 164183 - DNA, 122 bp, Homo sapiens
ccctgcatctaatccagcacccacccgtgaatgctacctgaaaaatttcttttgtgactccgttcactgctcccaccctggcctaagccactgtgagaccaagttgcaatcccaagaaaccg

SEQ ID NO: 164184 - DNA, 122 bp, Homo sapiens
tggcagagactcaaaggcaagcagaggagtgggaaagctttataatggaaaaaaggggagcgtttatgtatgccctggttgcaggctgttagcatggggaaactgtaggcatgctaacaaga

SEQ ID NO: 164185 - DNA, 122 bp, Homo sapiens
gattaaaattattcacaaaggaatccttttgcttaatagagacaccttgaatgttagggtcggaatgatgacaatagcaggaatagaggtaacatctatggaacgcgttatgttcatgggac

SEQ ID NO: 164186 - DNA, 122 bp, Homo sapiens
cccaagcattcaatccctatggccaaccttgcaaaactcaggcagtggagtctctgagcccggctgtcctcagtgtgctcagagaacacccacctggtaggtggggaccctgccttgtcctc

SEQ ID NO: 164187 - DNA, 122 bp, Homo sapiens
tcacttcccatcttgctgggagacagggcttttgccaagaacgggcccctggggattcatcgggcgacattttcatgccactggcataaataaagacttgtaccaaaggctgccattctggg

SEQ ID NO: 164188 - DNA, 122 bp, Homo sapiens
gtagtaaagggtatcagatggcaaagttgggaccttcataaaggcgtggtggcgattctccgcaatcgccggcagcctatgacatcagacaggaacgcctgggatgccgcgctgctcctggc

SEQ ID NO: 164189 - DNA, 122 bp, Homo sapiens
ggtccctgctgaatatatagagacctcaacagactgccccgggctctgggtgggccaaggcgaaggcttcccatcaccacaggaagcgggggcttgcagggaaagtgaatgggcctatggcc

SEQ ID NO: 164190 - DNA, 122 bp, Homo sapiens
tcccactgtgccctctgcacacatggctccccttcaccctccaccctaagcaggagcagccggaggccccaccagaagcagattctgttgccaggcttcttgtacagcctgcagaactgtga

SEQ ID NO: 164191 - DNA, 122 bp, Homo sapiens
agcccccgggagcggcgcgcgccgcggggggcggggggcggggggcaggggagggggccgcgcctctgacttaatgctggaaccatccacgtcacgtgtggccccgtgcgggttaacccctc

SEQ ID NO: 164192 - DNA, 122 bp, Homo sapiens
gaggggccggggcggagctaagatgcggaggagggtgacgcactagctctccagttcgcccgttcctggcctgacccccaccaaggcccataccgcagtaggctcctcgggctgcccctcgg

SEQ ID NO: 164193 - DNA, 122 bp, Homo sapiens
agtctggctgcttgatggattgcgcgtgaggtactggccacttggtcctgagggtgtgggcggtgagtcccgagtcccaaccgcggggccgggctccccacgcaggtggtgctgggctggtg

SEQ ID NO: 164194 - DNA, 122 bp, Homo sapiens
tggttcagtgattagagctgggcctaatcagcactgtgtatagaagttggtttttactttcgtttgctattgctgcagaattcaagtggttcaatattgataaaaccaaggtaacaaagagg

SEQ ID NO: 164195 - DNA, 122 bp, Homo sapiens
tgtctgcgtctccatctctgtctatgtctgcctctgcgcctgcacctgcgtctgcatgtgcgtttgtgtctgtctgcgtctgcgtccgcgtctggatctgggtctgtgtctgtgtctgtgtc

SEQ ID NO: 164196 - DNA, 122 bp, Homo sapiens
gctccgcggtgccccgccctcaccgggctctgagtgctcttgcccgtccggccccagccgcggcccgggaatctacgtcacccgaaaagcgactataaacgccggcgcctccgtccccagcc

SEQ ID NO: 164197 - DNA, 122 bp, Homo sapiens
tcgtggatcaggaagggggatgcaaactcactgacacgaagctgccatctatttctgcagcgctgttcgctcctaatgcaatctttgctctttattttgggaggttgcatttttttctctcg

SEQ ID NO: 164198 - DNA, 122 bp, Homo sapiens
gtcattggtccggggccccgcagtaaccaggggaactgcaaacagtgtagaggccgcttccggttcgagctcccggaaccgccgcctctagggatggacggtgagtgtctgtgggcccctcc

SEQ ID NO: 164199 - DNA, 122 bp, Homo sapiens
aacttccctcgcatcctaaccgggacctggtggagaggtctgggcgggggcggagacacccggaggccgaccttccgccgaggcggtgcaggaaggaacgggagagggagaagtttggtagg

SEQ ID NO: 164200 - DNA, 122 bp, Homo sapiens
tcactgtcacaggtgagctccctgtctcggagtgcctcttcttggttacaccatgtaggtcgcgtccctaccaagggatcctgctttcctgttctccgttgattggacacgggttggacatt

SEQ ID NO: 164201 - DNA, 122 bp, Homo sapiens
aaccaagtcccgtgagtaactaggctaaggcactcaggccagtcctcggggagcacacgccgcccatctggctcgcaccgcacagctcccaacagctgagatgcaatgccaaggactttctt

SEQ ID NO: 164202 - DNA, 122 bp, Homo sapiens
gacgggcgggcatggggggagcgccgagcggccccggcggccgggccggcatcaccgcggcgtctctccgctagaggaggggacaagccagttctcctttgcagcaaaaaattacatgtata

SEQ ID NO: 164203 - DNA, 122 bp, Homo sapiens
agagctggtattcatttacacataattatcttataccgtttggaataagaatttggggcacgttagcaaaccaaaaggctcagaaagacgtcgtgatatttagttcttgtctccctctacaa

SEQ ID NO: 164204 - DNA, 122 bp, Homo sapiens
cacacttgcacacacatgcacctgggacacctgtctgtgcaaagcacacccacaggagcacgtatcgatactgacagatgcagtcggtacgttttcccacatgacaatcctgggcaggactt

SEQ ID NO: 164205 - DNA, 122 bp, Homo sapiens
cctcgggctgtaaaaccatcacgtagccatctaccggggggaccgaaatgcaggtggcctcgttaaaacacctgccagcaagaaatggggaagggtcagggctttgggagccgatcttggag

SEQ ID NO: 164206 - DNA, 122 bp, Homo sapiens
tccttatatgaaactaatatgtatctcccagattgtgatgaggattacaggcacaagatacgagaaaaagcttgctgacagaaatcactatacctgtataagataggaggggagggcttgcc

SEQ ID NO: 164207 - DNA, 122 bp, Homo sapiens
agtcttttcttgcagtggtatcttttctttgggttacagtgttgttcatcctttctttgccgaaagaatgaatcccagtgcttcacaaggttaaaggaaagatctgctggtagtgtttagtc

SEQ ID NO: 164208 - DNA, 122 bp, Homo sapiens
cagcaggtggcctctcaatggctgaaacttccaaggtatctgcagtcagtctgctaacaccgtttttctcccctgctgctgcagcaagacagagaatgggtttgtaacaggggacaagataa

SEQ ID NO: 164209 - DNA, 122 bp, Homo sapiens
gcaagtgaccgcaccctcttactgcatgcgggccttgccaagagcctgcagagggcggggcgggctctggggacagcctggactctcctgcctgcccccaggtgcccccggcccagccacag

SEQ ID NO: 164210 - DNA, 122 bp, Homo sapiens
gggacgaggcagccggggaacggcagaaattcccagtcaggaccccagggaggttagggccggccctggcccctcacaccgacttctcaggaataaaccagccggggctttcagcggggcgg

SEQ ID NO: 164211 - DNA, 122 bp, Homo sapiens
gttaggttcccgccccggccccagccccagccccagcatcagctccggttcctctgcagacgttcagccccttcggaaatgtaaaacccgggaagcgaaagctgcggcgacctcccagagcc

SEQ ID NO: 164212 - DNA, 122 bp, Homo sapiens
gagtgctttctgcttctcaccacccctgcagttttgccacgctggaccactccaccatcccgccctccatcctgatcatcataacagctgcatgtttctgccattggcccccgtggtctctt

SEQ ID NO: 164213 - DNA, 122 bp, Homo sapiens
cttgggaggggacagcctgaccaccaccctctgttcagagggcaggtctgaggccaggggcgcaggcgtcgtggggagcgtggaagccacctggccagaccaccgagaggccaggggtggag

SEQ ID NO: 164214 - DNA, 122 bp, Homo sapiens
acgcctagtgagaacgaggagaatgccgggacccttccgcgcgcggctctttgcgcgccgcgctcatgttgctgggcacaaagctccgcccccacaaggccgcctctgggcggggaagagcg

SEQ ID NO: 164215 - DNA, 122 bp, Homo sapiens
ttccctggcagtaggcttgttatgaaatcattgactttctatttgcctctggggcttaagcgaatctgttaccctcaaataacctatctgatctcagacaaatgccaaacagagctcagttt

SEQ ID NO: 164216 - DNA, 122 bp, Homo sapiens
cgcgcagtcactgtttccagcgctgaagacccaacagtgaaggagacgaggcaggatatgcgattgggccccgctctcggatcctgtgtccaccaagcacgccgctggggagcgagtgagcc

SEQ ID NO: 164217 - DNA, 122 bp, Homo sapiens
ctggtcctgttgtagtggattccacctaaccttttattcctctcatccctgtccagctaacgttctctcactgttcagcatatgtacgtcaaagacagaagtgcatgaagacatgtgtaaag

SEQ ID NO: 164218 - DNA, 122 bp, Homo sapiens
tgagaggcagtggcctcttgagtgaacaggggaggccagtagatgccccagatccagagccgtggctgcaaatccagcaggaataaggagggacaaccacagcctcctcatccatgtgtcat

SEQ ID NO: 164219 - DNA, 122 bp, Homo sapiens
gtctgtctggctccctggctcttccatctggctccctggctagtccgactcccctctccccgcaagaacttcattggcccgccagccagctctcacctcacgcagaaaacacgggacacagc

SEQ ID NO: 164220 - DNA, 122 bp, Homo sapiens
gggacccaaattatcccttgatactgcccccctattatccactattaagctttaaaaaggcgagagattaaatattgtgcccacattttacagtcattcgcgttcccgtttcaaattaaagg

SEQ ID NO: 164221 - DNA, 122 bp, Homo sapiens
gacgggacccggctgagagccccgactgtgaagaggaggctcacggcgcctacctgggaccgaccctgactgtgaggaggagactcacgggacctacttgggaccggatcctgaccgtgagg

SEQ ID NO: 164222 - DNA, 122 bp, Homo sapiens
ttagttcagttgagtagctccggggacccgggcagcgagagggcaggggcatccgccggccgggaggcggactcgcactttgcctcaactctgagccccatcccgagcgcaagggagagggc

SEQ ID NO: 164223 - DNA, 122 bp, Homo sapiens
caacagagccgagtatgtgacctttcccaccggtgcttttctttcaaagtggacggtgggcgcggagcttgctatgagagcgcttgtcctccagttattgtgtcgagcgctttgttatcact

SEQ ID NO: 164224 - DNA, 122 bp, Homo sapiens
gagcagggaccacgctcatcaaaatccattattgggctaccttgggctctccgcagtagccgagcttaacatgattctccactgcagctgcctctttgaagcggatccgtgaagtagaaatt

SEQ ID NO: 164225 - DNA, 122 bp, Homo sapiens
cgtgtccagttcggtgtggccgcgctccagaaaggcgcgcacggccgcggcgctggcgggcgcgtccatgcggcgccccatctccatggtgcccagcaccgaggcgacccgcggtggcggtg

SEQ ID NO: 164226 - DNA, 122 bp, Homo sapiens
gtgactatcaagaaagagagcgggaggaataaataggcttctttgtgtgagagagaaccacggacatgaagcaggcctctcaggtatggcaggatgcctgctttatgtccaggttgactttg

SEQ ID NO: 164227 - DNA, 122 bp, Homo sapiens
acgcttgccctgaccctgtggctgccccatatccccctgcccaggttaaccactgggttccgtgttgtgctgtggaagcccatggcccagagacccaagaacatgattgcagtaagaaaatg

SEQ ID NO: 164228 - DNA, 122 bp, Homo sapiens
agtggccaacttggaaaatctgacagtgagttggaagtggattcctgcggtggctgcccccgctccccaccacgccccgtcaatgtcaccttcaaagtcaactgtgccgtctccattaacat

SEQ ID NO: 164229 - DNA, 122 bp, Homo sapiens
agcgcgcctgcgcccccgctgccgcgcgcctcctcgtcctcgagccgctgcagaaggaagcgcagcgtctccacgcgctccgcggatgcctccccttggcacagcgccccaagcagggcccg

SEQ ID NO: 164230 - DNA, 122 bp, Homo sapiens
ccgcccgccgccgccggaagcagcgagaggggcgcgcccgccgcccgcgcttcccggccccgccctcctgccccgtccgcgccccggccccgccccccggcccaattgcgccccgggaggag

SEQ ID NO: 164231 - DNA, 122 bp, Homo sapiens
gtcctgggattaaaggcatgaaccaccgcacctggccctggatgttattttataacctcacgagcttaacttacattccctactttttttatgatctgatcaaaaaatgctccactctgctt

SEQ ID NO: 164232 - DNA, 122 bp, Homo sapiens
gaaacaagaagccgtcgatgataacttcttccccatgaatccggtgtgtgtggccccacccgcccgagctctgtcctaccttatctgaagttctgccaagagttttctgtaaatgtaatttt

SEQ ID NO: 164233 - DNA, 122 bp, Homo sapiens
gaaaaattacttaccctaaaattttcttctgatttctggagaccgaggagtttaccacttcggctcctgcagccatttactgacagcagacatacccaagcaaagcaaactttgcctttctc

SEQ ID NO: 164234 - DNA, 122 bp, Homo sapiens
ctgcaacgagagccgcggcggtgagggggcaaggccaagaggccacggttcgcgtttcgccggctgcagaagttgttgccatacatttcaaatgtgcatttcctacgtctcacgctctgtct

SEQ ID NO: 164235 - DNA, 122 bp, Homo sapiens
accgagccctgcccaggtggacgcttgcgagagcattacggcgatggttatgtaggctgccgttcttcccctcccaagcacctgctccgcatctagcagtcgctcgccgccagtctccaacc

SEQ ID NO: 164236 - DNA, 122 bp, Homo sapiens
ctctggaaagctctgctgtgctgagaggtgcctggatgggtggccttgctggctcatgcccgagctccagagaggtttatatatactggggagccagcccttcatgggggaagacagaggtg

SEQ ID NO: 164237 - DNA, 122 bp, Homo sapiens
aaaccgttaaaccgcaggttgggcctggccgttggcagggaagtgggcagaggggaggcccggccaggtcctccggcaactcccgcgtgttctgcttctccggctgcccacctgcaggtccc

SEQ ID NO: 164238 - DNA, 122 bp, Homo sapiens
cactcaaggggaaaccactctcagaaccaccatctctcactgcttagtgatgtgtcctcacgagttggcagacttctcccccaatggtaggaaccgagagggacctggcttcactcaccatc

SEQ ID NO: 164239 - DNA, 122 bp, Homo sapiens
tggcgagcgagccgctcccttacctctgtccagggtgagcggctggaccactgtcaatgtcgccatgtctgccgtgggagccgaagtgacgctcggcttcagcatcagcaaccgctcgtagt

SEQ ID NO: 164240 - DNA, 122 bp, Homo sapiens
cgcagcagccgccgcggggccagggtctgcgttggggccaggcgcaggccgggactgggccgggcccacagctgtgagcccccccacaggcgggcagccagcacgaagaggctcgggcccag

SEQ ID NO: 164241 - DNA, 122 bp, Homo sapiens
cataatacacaagcgccaggagaggccaaagaacctttactccaggacacaaatgtgtgacgactgaaatcaggaagatttttctatcagcacccaggtcttagttttcacctctagttctg

SEQ ID NO: 164242 - DNA, 122 bp, Homo sapiens
cctcacgaccatgccccaagttcgctattaccatgtccactttctccaataagacaccgacgcttagaaacttgcccagattcacccccgttactggcagagcagggactggaacttaggtg

SEQ ID NO: 164243 - DNA, 122 bp, Homo sapiens
gtttgcagcccccagggggcgccagcagattaaacctggaggtctgggggctggaggtcccggggtatggagaggggtctccacctgctggaagtctccttctccctcctctctctgttctg

SEQ ID NO: 164244 - DNA, 122 bp, Homo sapiens
tgctgacttcacgagtgaagctgcagaccttcgtggtgagcgtcttacagctcttaaaggcggcgcctccggagttgtttgttcctcccggtgggtttgtggtctcactgacttcaggaatg

SEQ ID NO: 164245 - DNA, 122 bp, Homo sapiens
ggccgcaagtcttcagccggagcccccttgccagcctcttctcgccttccactcctcccccgccccctcgttgactaggaagaaggtccctggtggcatccggaaaattctaggattgcccg

SEQ ID NO: 164246 - DNA, 122 bp, Homo sapiens
aagtgggggtgtctgaatcactctcaccaaatagagatcttccctttccctggcccactccgtgtcctgagctggtcttagggcctcgcccttgcttgagaggcctgatggggcaagcctgg

SEQ ID NO: 164247 - DNA, 122 bp, Homo sapiens
tggctctggtcacaggagccttctggaccacgagccacatctctctaaaaagtcccgggccgttcatggggctgcaccttcccgtgctcggttaatttatgcatcttccagactacacatta

SEQ ID NO: 164248 - DNA, 122 bp, Homo sapiens
tgccatttctgtgtgattaacgctgccccctagataggcaatgggcgggtggggcgggtgcgtgcaggtgcctgggccctgggtctgcaccgtgggtgggctctgcacagccacttacctgg

SEQ ID NO: 164249 - DNA, 122 bp, Homo sapiens
catgcccgctctgcagcactcggccctagctccccaactcagatcgcgctcccaggcctacggcctgccccgaggccacaacccgacccaggccatgccatccgatccagaccctttctcgc

SEQ ID NO: 164250 - DNA, 122 bp, Homo sapiens
catggcatctcacaaagacgttccagggaccctctttagggaagcacgtccggtagttaccgttctgttctctccaccgttcccctgagcagttgcagcggggccgggccctggggtgggtc

SEQ ID NO: 164251 - DNA, 122 bp, Homo sapiens
agcttcctcgcgtcctcttcctggacgcggggcgcccaccttagtcatagcccctggtcccggcactgctcacgccgtcggtttccccactgcccaggctccctcagcccgaaccctgcgtc

SEQ ID NO: 164252 - DNA, 122 bp, Homo sapiens
tgacgccgaccttctcacgccgcctcaggcaggtcactggtgtgctcatcacctccctgccggaggagcccggccacacatgcccgtcacacgccaccaactcccacagttacctctgcggg

SEQ ID NO: 164253 - DNA, 122 bp, Homo sapiens
ccgctgccgtagaaactgggcccatccgcggtgccggtgcaaggtgcggccgtggggaggcggcggggccgggccgccgggagctgggagccgcggccacatcggtggagcagggcgaggcg

SEQ ID NO: 164254 - DNA, 122 bp, Homo sapiens
tggaagagagagagcacagaccagagggagaggggcacactgagacacaagctgaggctacggtgtaaactggaggatggagcaacagatatccatttccaatggcccaggggttccagaac

SEQ ID NO: 164255 - DNA, 122 bp, Homo sapiens
aacatgtgcctcccgttccagcatctggctgcccgggggaggaaggacacccggggcgggcgccccacgccgatgggtccatggtgaaataaaaaacagtgctcacggctgcgtcccgtatc

SEQ ID NO: 164256 - DNA, 122 bp, Homo sapiens
agggcgaaaagggggtccatttcctggcatccccagaactcactgagcacgagcactggacgatggcccatcatggcgacgcgatgcagagccgggtacccagagctgggggaaccggcaga

SEQ ID NO: 164257 - DNA, 122 bp, Homo sapiens
tgcattcctatttacttcatcaaatcactgctttgaaagagctatttgatgtcaaagatgcgttaagattttatagacgctcccaatgcagcttttaaagattctccctttgaacccaaaac

SEQ ID NO: 164258 - DNA, 122 bp, Homo sapiens
gataggcgccatctatcggaaccagttggggtgacaatccccccacccccaagccctgagcggacatgcatcactagcccataatttaggcaattttgtttaaagaccactggtatttcctg

SEQ ID NO: 164259 - DNA, 122 bp, Homo sapiens
ctcggcggcggcgtccagggatcgcgtccggagctcccaaccggataccccccccaagcccgaaacggcgctgcccatcctcatacagtcacctcagtccagaaaacagcgattttaatttg

SEQ ID NO: 164260 - DNA, 122 bp, Homo sapiens
ccaagcaacaaaaccagcaaccagatttggcaggaggggagacaatgcttggagtggaaacgtcagcccttccccgtggagggatgactgcttctgagaacacagtgttcagagacaagaga

SEQ ID NO: 164261 - DNA, 122 bp, Homo sapiens
gccccgcctccccactcaggccccgcctccccactcaggcccgtctcctcactcaggccacgcctccccgcccagtcccgtctccgtactagggcttgctccaagccctgcttcctcgccca

SEQ ID NO: 164262 - DNA, 122 bp, Homo sapiens
gagggtgatggctgcggtgagagcagcagcctcagacacgaaatgctcagagcgaacctccgcggcgcggagatcgcaagggagccccagcctccgcgcggccccgcggcgcagcacacggc

SEQ ID NO: 164263 - DNA, 122 bp, Homo sapiens
ttgaaagagaggtaaacccgctgcagacagagaaaccgggtattgaggctgctcatcgctcgcaacccgggaggttggctgagtcaacccagtgcagcagaagcaaagcgcgggctaaggct

SEQ ID NO: 164264 - DNA, 122 bp, Homo sapiens
aaatgggggtgggggggggcgcatggtgggctctcatcttttcttcgcgtcaaaattagccgtttaaattagaaccacgttgggagcgtaggtgacgccaacgttgcggcaccagtccgggg

SEQ ID NO: 164265 - DNA, 122 bp, Homo sapiens
agagatcctggccagcccggtctcaggcaaggccatgtagaatgccgggagtgataattgcgtattgtttcatgactgcaagcctgtgtccaggtggctccttctcctggaacacccttccc

SEQ ID NO: 164266 - DNA, 122 bp, Homo sapiens
tacactgccctgtgccaccccctgcaccatcgggccgcctcgtccccaggccggacccgccgggccattgctgctgtcctgagtgctgccctgttgaccggcatccccttctactggtggct

SEQ ID NO: 164267 - DNA, 122 bp, Homo sapiens
ggccctggaggatgacgagccgcagccggaggtcagcttggaagtggccagtgacaatggcgtggaaaaggggggctccggggagggaggtggggaggaagccccactctcaacctgcagga

SEQ ID NO: 164268 - DNA, 122 bp, Homo sapiens
tgagcccggcctcccttttcatcaggacgggaaggtgagtcggcggcctggccgcagaggcgccggagggggagcgcggcggtggtagcgtccaccttccgccaggcgtgacgtcacaggcg

SEQ ID NO: 164269 - DNA, 122 bp, Homo sapiens
ctccccgccgccggggaggggcagcgggggcgctgcgggggctgcttgtctgggctgcaccgggtgggcggcgggggacgccggcaggagggagtcgggggtacccccgccggcctgccctg

SEQ ID NO: 164270 - DNA, 122 bp, Homo sapiens
cagtacaggagcctagggctaacactcgggtgtaagacatcgggacaggcgtcgtgacgtcgggacggcagctatgacatggggtctggggtgtgcccacagcaatcacatatgtacaagcc

SEQ ID NO: 164271 - DNA, 122 bp, Homo sapiens
gtaaacaaactgaaagcctaattaaggagtattcttcgtaacaaacagctgagtgtcagccgatctgagcagtggccttcagccaatcacaggcttcctgctgatcagtccgcatccaaata

SEQ ID NO: 164272 - DNA, 122 bp, Homo sapiens
tgatgctgtctcactgggagacgctggaggccaaaaggacatagggaagatggtgtcctgcggccagcctttctgatgaacaacttttgggagtaacagatccggggaccccagagcacggc

SEQ ID NO: 164273 - DNA, 122 bp, Homo sapiens
catgatgtccgggtgagaagcttccttggcaggttgccagggccagcctgcgagcactggcgccggggacccgcgcgcccgggaaggggcggggaggtgggcggagcctggcaacctgggga

SEQ ID NO: 164274 - DNA, 122 bp, Homo sapiens
ttgtactgctgtgagagcggtggttggaatgttgtgccccagcaacatactttccgtgctcggtcgcctgcagtttgttctcattggccctgtacagaggtatccgcattgtgtgttaaata

SEQ ID NO: 164275 - DNA, 122 bp, Homo sapiens
tgctggatgaggctcaactcgggggcctgggctgttgcactggggctggactggggatcacggaagagggccaggcccgcgtgggtctccagggctgtgctcaggggcgtggtcttctgcag

SEQ ID NO: 164276 - DNA, 122 bp, Homo sapiens
ggcgtcgacctgcccaaggccatcgctggcgggtccgcctgtgtctgcgccctggagccacggccagaggacaagaagaagaaaggcaaaggcaagaggcaccaggaccggggccagtgacc

SEQ ID NO: 164277 - DNA, 122 bp, Homo sapiens
agtctccacctcacggcgtgggggtggggtggcccagcattaacaaagcctcaaacaggccgtctttgttccagacaaagggtcagcatggtgccaccgctggaatatggcctttagcatcc

SEQ ID NO: 164278 - DNA, 122 bp, Homo sapiens
gccgacaacgtcgtgtgtagactcaacggccctgaaatgcgcttccgggaaaggtcaaaacggtcggcgtgctgtgacgtgcattttaccacaatggaaagacccgcacgctcctttctcga

SEQ ID NO: 164279 - DNA, 122 bp, Homo sapiens
ccgcgcaggggaaagccaggcgctggcacaccgcgggcgcgggtttctcccagtcggagtcgccagaaataaagcgctagctctcggtgtaatggaaactcccgaaatccttacaagcaaag

SEQ ID NO: 164280 - DNA, 122 bp, Homo sapiens
caccttctcccacgtctttggtcagcagtgccaacttatgcaagcaggtaggaattgcgtcgtgtgtcatgtgcccagagaatgggaagtggagcgttatcccgggtccccaaaaacagcgg

SEQ ID NO: 164281 - DNA, 122 bp, Homo sapiens
cgtagaaggcagtgaggtagtgcttttccttcacgaacacagtggggaagaagtcacgaacgatggtgaaaccgtagaagggtgcccagcacagcacataggccgtgagaatgcacatgagc

SEQ ID NO: 164282 - DNA, 122 bp, Homo sapiens
gccttggcagcaaatcctgtaggctgtcccctgccttggttgtctcgatgttccgctcagcgctggggaaataaatcgaacctggtgcacacccctcccccaggttgtaacacaactgcccc

SEQ ID NO: 164283 - DNA, 122 bp, Homo sapiens
ggaattctctttgttaggaggtggaatgaaagtgtccagcaaactccagccagcagcgttcgtcccttgatttagagggctatgatttctacaaagtggcccgactggcccgcgaacacgca

SEQ ID NO: 164284 - DNA, 122 bp, Homo sapiens
ctctctcccgagagggcgggcaccaggcggcggccgcagccgcaggaatatgctggaaggcggcgggcgggcgcccgcgaggtgctgaaaggacagttcccgccgccgaacttagcccgcgg

SEQ ID NO: 164285 - DNA, 122 bp, Homo sapiens
gggcgtctggctgtggagctgaaggaggcgctgctgaggagttcctggacgtgctcctgacgctcactgcaagtcgtatgacaattggtcgctaaccgagagaaccttcctttttataagac

SEQ ID NO: 164286 - DNA, 122 bp, Homo sapiens
cccgcacacggcgcaggctgatctgcgcacacccacaccggccaggcacatgccacacaccgaaatgcacattcctgggagcgcgggggatttggcctctacagcaggcacgtcctcacacc

SEQ ID NO: 164287 - DNA, 122 bp, Homo sapiens
cgcagcagggccagccccggcggctggaaggcggcggctgggcctggacgtgggtgtgggcgcccccggcctccccccgcccccgcaggcgccccccacccccctagcaggcgccccggtcc

SEQ ID NO: 164288 - DNA, 122 bp, Homo sapiens
ctgcctcccaagctgttgcggggtcctctggggtgagggcaaggtttgtggagcagcatccgcctggctcctgctgcagctcctgcggtgttggtctgcggcggcctcggcagctctgctcg

SEQ ID NO: 164289 - DNA, 122 bp, Homo sapiens
cgtcgcagaccatccctatctgcgtcctgggcagctgcgggaatccaatgagacaaggaccgggagtgcagcagggtggggggctgccctcctgtgatggccaggctcggctcactgtgtct

SEQ ID NO: 164290 - DNA, 122 bp, Homo sapiens
accagcccatggtcgcgggttaaacagtacgagctcttccaggatattggtctccccgggcggcagtcctgcattaaagagtgtttccaaggtggaagggaggccgtttgaacgcctcgaga

SEQ ID NO: 164291 - DNA, 122 bp, Homo sapiens
aacctggagaccaagggcccaggctggagcgcagatgctgccccgagtgaagatgaaccacgtgctctcctgcagccacccatgtggtcttgtggccccgcgtggtctcgtggagtaaatgc

SEQ ID NO: 164292 - DNA, 122 bp, Homo sapiens
agaagtagcgcttggggaagtggcgctcgggaaagtggcactcataagtaccttacgctacgctccctgactttcctgtaggcttaaaaaccctccaaatcggccagatgcagtggctcacg

SEQ ID NO: 164293 - DNA, 122 bp, Homo sapiens
gcctcctgggttcaaacgattcttctgtatcagcctcccaagtgtctgggattatagtcacgtgccaccatgctcggctaatttttgtatattttgtagagacggagttttgctatgttgcc

SEQ ID NO: 164294 - DNA, 122 bp, Homo sapiens
aggcaaagcaacggaagttgaagagactttgcaacagctgcaagagtttcactcccggtgcggagaagggtagcggagctaggctaccccacccgggcggcgtccagcagccaggtccctgc

SEQ ID NO: 164295 - DNA, 122 bp, Homo sapiens
aacccaccagaaggaagaaactccgaacacatccgaacatcagaaggaacaaactccagacgcgccaccttaagagctgtaacactcaccgcgaggctccgcggcttcattcttgaagtcag

SEQ ID NO: 164296 - DNA, 122 bp, Homo sapiens
aggcattgctgccatgtggctgactctgtccctttcctggttaaatagacaaggggtgggcgtgggggaaggggatagagtgcctgtgcgggtgacaaggaagtttctggggacacgctctc

SEQ ID NO: 164297 - DNA, 122 bp, Homo sapiens
cctgggacgtccgggggcctgtgacccggaggcgctggggctgtcctgggtcgtcacatgcgagaaatcgtctcaccccagccagtgtgacggagtgagagcaaaagaaagttttgatagca

SEQ ID NO: 164298 - DNA, 122 bp, Homo sapiens
cagacatgactgcattctgaaggatggatggattttccttccacccagtttgtttgcagccgttcctttgcctacagctctctttccaaccaggcctcagtgtttctgcttcctgagcctct

SEQ ID NO: 164299 - DNA, 122 bp, Homo sapiens
aatcacttggcagttgagtttcttaaattcttctgccctatcactgaaagcaatgatctccgtggggcacacaaaggtgaagtcaagagggtaaaagaagaacacaacatattttcctgggg

SEQ ID NO: 164300 - DNA, 122 bp, Homo sapiens
tgaagtgttccgatttgtgaaacacaagaatcagaaaatgtccactgtcttcttgcactgcgttaccaagctctgcagagcagatgactgccccttccttatgccggtatgtttttaaggaa

SEQ ID NO: 164301 - DNA, 122 bp, Homo sapiens
gcgccggggctgggagaggaatcgccggggcggggctgggtgcgggggcgcggcggagagcggatcgcccggggtgcgtgcgggcgggcggggaagcctgcggacgcgcccgggcgcccccg

SEQ ID NO: 164302 - DNA, 122 bp, Homo sapiens
tctctgtaacaacaataaagaaaatcccaacctgagagggtgtcacgaagattcaggggacgtagctggggtactggcacacagcaacagcattcttaggcctcattaacgtggtgttctta

SEQ ID NO: 164303 - DNA, 122 bp, Homo sapiens
caccctctccagcaggggagcctcaccttctctagcagggccttcacctcccactcctggcgctgcttccggcttctgtatggattactctccaggccatcgaagttgggctcaccggcccc

SEQ ID NO: 164304 - DNA, 122 bp, Homo sapiens
tcacacccacctagggcagggacacaactcactctggacagggtacagtcacacccacttcgggccgggcacacgcgaactcacccaccctcacactcccagcccggcccgtcggcgcgcac

SEQ ID NO: 164305 - DNA, 122 bp, Homo sapiens
cctacgtggcccttgccagggtctggtttaagtggcacctctgctgcgcttcctcggcggcgggggaggtgggggctgatccaaagctgcagagaaaccgacttcggcgctgaacaggcgga

SEQ ID NO: 164306 - DNA, 122 bp, Homo sapiens
gtgagtgcgggcgcggggcggggcggggttcccaccggccgcccccgcccacccgcctgccggccacaccttggcctggtaggtctgctccagctccagcttgtagagccgcacttgctcgt

SEQ ID NO: 164307 - DNA, 122 bp, Homo sapiens
taaagagtggcctttcattatggaattatttaatccccgccacttcaccgctggcaccgtcgaggtctgggggcaggtctgactggtttcctttaccttagtgaagccggcggcctgcaccg

SEQ ID NO: 164308 - DNA, 122 bp, Homo sapiens
acaattcaagaaaactgtgatccaggtgtcccgggctagaatgctgaatgcttgtttccacggaaatgttatacacacacacacacacacacacacacacacacagtctggatctgctgtaa

SEQ ID NO: 164309 - DNA, 122 bp, Homo sapiens
tgagcccacccgtcctatgttaggctgcattagactcacctgagaagcttaaagtgaagtcgtcaggcgtgtgcaccgcgcccaggatgcaatctcacatgaatttctttatgtctccccca

SEQ ID NO: 164310 - DNA, 122 bp, Homo sapiens
tcatcagccccttcctcgtggttagttagtggagactgcagtctactctctttcactgttcggggactgctaccctgcctccttggagtccgagcttcactggcacaaagaccctgaaccca

SEQ ID NO: 164311 - DNA, 122 bp, Homo sapiens
ggctctggcacgttttgggggaggtgcctgcaggacccaacatactcaatgagcttccagcgcaatgtccgatcgctcggggccgactgccaagggaaaggatggaaagaagtattcctcgc

SEQ ID NO: 164312 - DNA, 122 bp, Homo sapiens
ccatgagggtggcgggtggatggagcacgtgttcactgtgaggctcccttcgggcacaagcgacggggggcagagcccctgctttccgtagctcgctgctgccagtgagtttcttactttgc

SEQ ID NO: 164313 - DNA, 122 bp, Homo sapiens
gggaaataacagctaaaaacaggagtgtcccaggaagccaaggtactacgatcaccatgccgagtatcttctcccccgccccctcaaaccaccggatatctgatgttctccacggcagaagc

SEQ ID NO: 164314 - DNA, 122 bp, Homo sapiens
cggccgaggcctggaggcgaggtaggagagtaggcttaggctgtcagaggaaaaaacgggcgatgtgaggactaagtatggatctcaggaggggacaggaaatattgagaacaccaccttac

SEQ ID NO: 164315 - DNA, 122 bp, Homo sapiens
gggcggtcggcctgggcttcccccggagcgcccgggagagccagattccaccgaggaacgcggcatccccgggatcctcccgaactgggctggcctctccctggggagccccgcacgcctcg

SEQ ID NO: 164316 - DNA, 122 bp, Homo sapiens
gggtaactctgggtggatgaggccacatcctgcagccctctggtgaggttcttcctgttgcgtgctggggtttaaacctggatctgtcttgctctgaagcagaggctctcacctgggagcag

SEQ ID NO: 164317 - DNA, 122 bp, Homo sapiens
cggccctcgctcgcctcgcgccggcagttttgggcctacacctcccctccccccgccagccgccaaagacttgaccacgtaacgagcccaactcccccgaacgccgcccgccgctcgccatg

SEQ ID NO: 164318 - DNA, 122 bp, Homo sapiens
gcaccagcctgaccagtacgggtaggtagcaacacaccccgacttgctgcgggacctgggcgttttctctgaaactgttaacgatcgtgccgtctggccgcgaaaggaacacccaaaccaag

SEQ ID NO: 164319 - DNA, 122 bp, Homo sapiens
tcgagccgttgcaggagcgccgccgcttgctgctggcttccaaggagttgcaccaggtggcgcacgacctggacgacgagctggtgaggccagcgcaggggcctggggcggggcggggcggg

SEQ ID NO: 164320 - DNA, 122 bp, Homo sapiens
gaaggcgcagccgggccaagaagggcgccgctgtctgctgggtggggtccaacaccacagcgcagtctagtggccggaggagccaaggaggcgcggggtggagactgggccgagcaggggat

SEQ ID NO: 164321 - DNA, 122 bp, Homo sapiens
aggccgaggagacgccgggcaggtcccagcgcgtgagccaaagtcggagggctgggagggcgccgggatcccctcagcccacgcccggcattccccgggctctgcaccgtccgggattcgct

SEQ ID NO: 164322 - DNA, 122 bp, Homo sapiens
gccgcccacaatcctcctccaggtaaatccctggcctcattactctggggctctttaagtcgccggttcctggcgaaagcgccagtcacttccgcctctttttactgggattcttccgctct

SEQ ID NO: 164323 - DNA, 122 bp, Homo sapiens
gctacttttatgagcgataacactcactgcgaagatctgcagcttcactcctgaagccagcgagaccacaagcccacagggaggaacgaacaactccagacacgctgccttaagagctgtaa

SEQ ID NO: 164324 - DNA, 122 bp, Homo sapiens
actaggacacagtgtgaaaggtgctttcacgaattctatattaaatatcatcatggtcaacgcttgatctggtttaaaaattgagtcactgttggtatgtgttaccttggaagttgggttta

SEQ ID NO: 164325 - DNA, 122 bp, Homo sapiens
ttcattttatattatgacagtgtgcaaaaaggtttgatgaattaaagagcagtggaagctcgcctgttgacaaccagtataattccctaatggctgctggagagagtcctgttgaaacttta

SEQ ID NO: 164326 - DNA, 122 bp, Homo sapiens
ggcaggctctaggacagtgggtgtccccccaaatcccctcgtatccagatgaccaggaggcggctccctcccctgcccccagcccccagcctccagggctgtgccaagtgtggggatctggg

SEQ ID NO: 164327 - DNA, 122 bp, Homo sapiens
attaataaaaggcatagagattaaaagagaagaaagaaaagtgcctttaagcacagaaaacgtttgtctatgtagaacatctgaaagagggctgggcacagtggttcacacttgtaatcaca

SEQ ID NO: 164328 - DNA, 122 bp, Homo sapiens
atagggttccagcagaactggaaggtgggcgagacaggccctgcgccaccatttgagcagcgctgggatataaaaccatctgctagccctctccttgcacgtctggggctggaaaaagtagt

SEQ ID NO: 164329 - DNA, 122 bp, Homo sapiens
cctggtgcctgcgaccgttctcactgagcatgtgcagacggcggtgcgcatgctctgttgcggtccgcttcggtttctgttgcgggacccggggtgtctcctagcgcaaccggaactagcct

SEQ ID NO: 164330 - DNA, 122 bp, Homo sapiens
cacttactatctgcaattccagcatcagatactcacccctttagttaaggtttccactcacgctgccccctacccaaggccacgtgcgcgcgtgagcagtcgctagtcctggctgagaatga

SEQ ID NO: 164331 - DNA, 122 bp, Homo sapiens
ggacgaggcccagaaggaacagtgtggccccgtcagtgtggagtcctgagcttaggcagccggaaccacttgccccctcactgtatagctgggacgagacctcatccctgtaagccccggtt

SEQ ID NO: 164332 - DNA, 122 bp, Homo sapiens
gcgtgggcggggacggggcgtcttgtcgcgggcacctgtgcgcgtgggcgggcgcgcactcgccagcgctttgttcgtgaccggccttttaagggctgtctcacccatcttgtctggctctg

SEQ ID NO: 164333 - DNA, 122 bp, Homo sapiens
tgtgctaagatagttggctagctatatgcaaaagaataaaactggagccccacttttcaccgtatattaaaattaactcaaaacaaattgagaatttaaatgtaacccttcaagctataaga

SEQ ID NO: 164334 - DNA, 122 bp, Homo sapiens
ccacatgagtattgtctgcaattactaagtgcagaatcccagaccaaatcaagacatcaccgagctgacagtgcattgtccttaagcagccatggcttcccctgaagacaaaggggaactct

SEQ ID NO: 164335 - DNA, 122 bp, Homo sapiens
agagagaaaaggaggccaggcacagcggctcgcacctgtaatcccagcactttgggaggccgaggcgggagccccggagttcaagaccatcctggtcaacacagtgagaccctcatctctaa

SEQ ID NO: 164336 - DNA, 122 bp, Homo sapiens
tgggtgtgcacgcatgtgtgtgcacgtgtttgtacatgcatatcatttccaaggaagcgtcgttcggggagcaggtttgctcttcttcaccctttcctccgacttgctggctggagggggaa

SEQ ID NO: 164337 - DNA, 122 bp, Homo sapiens
caccaccccaacctggtctttaggagtcaggagttagtccagggcttgctggggagttggcgcagtgactgagcagcccccatcttcctaccagggcgtgggtttgcccagatgtacaggtg

SEQ ID NO: 164338 - DNA, 122 bp, Homo sapiens
tcattcagcggttccgggaggtctgggaagcccacggcctggctggggcagggtcaacgccgccaggccgccatggtcctgtgctggctgctgcttctggtgatggctctgcccccaggcac

SEQ ID NO: 164339 - DNA, 122 bp, Homo sapiens
agctgcaggcagcccgagaacagacggagactaagcttgaacgaggccgccttgggagggcggggcggggcgggatttctcctgaacttcctgcatttcctatgaccattttttaaattgtt

SEQ ID NO: 164340 - DNA, 122 bp, Homo sapiens
actctcctgagctgtcatcagttcccccggctgtagtgacttttcatggacccagtagtccggataaccaggtccccagctacctcgccagtaatggagtcagaaaaccaaggcctcagtcc

SEQ ID NO: 164341 - DNA, 122 bp, Homo sapiens
gtttaaccttgggcaagctaggtgacctctgtttgcctcagtttcctcatttgtgaagtgcggataataatagtacctacctcatgtcatcgttttaaggattaaatgaattaacacattta

SEQ ID NO: 164342 - DNA, 122 bp, Homo sapiens
ccgggaggaggccggcgcctatcagtgtgaggtgtggaacccggtcagtgtcagccgcagcgagcccatcaacctgaccgtgtactgtgagtcctcctggccccactggagatacccagtgt

SEQ ID NO: 164343 - DNA, 122 bp, Homo sapiens
caccccagccctacccagccctgtccctcaccgcagccttgtagatgtcatccatgctggcggctcacaggacagcttgctggggttgccagccggcccttgacttaaatagccctgccccg

SEQ ID NO: 164344 - DNA, 122 bp, Homo sapiens
ggcccgctcccccggtggcccttggggatcaaagcgtgggccgctctccgggagggcgggcgggggagggggtggtcgggttgtgccattggggtgtccggaagcttctcagccagggtggg

SEQ ID NO: 164345 - DNA, 122 bp, Homo sapiens
ctccaagggccgggagcaaaggcaggcgggggctgcagcctctcaccttcacacctcggacgcggaactccgcaagggccctgctcatcttggtggcggccgtggggtggtctttgccgtgg

SEQ ID NO: 164346 - DNA, 122 bp, Homo sapiens
cttctctggatttcatttccctttcaaatgtgcatgttctccagagcccccttagatcttcgctaaagatattcagaatcgatttagttgtccttactccttgattatgtattcatcttcct

SEQ ID NO: 164347 - DNA, 122 bp, Homo sapiens
tctggaaactcagtcaacccagaactaacattcaaagctgatcagagagtaaagctctttcgaaagaagaggaagtatcatctccacttcctcaatcctaacgttcttccttctcattgtta

SEQ ID NO: 164348 - DNA, 122 bp, Homo sapiens
cacacccacccgggcggccagaggtcgggacactccgctgaaaatggccaggaggcttggcggggtgggcagcggtgagtggggtcagcttcgtggggttctccaacttaggggtgcaggcc

SEQ ID NO: 164349 - DNA, 122 bp, Homo sapiens
ctaaaacagcgccccgccctcatctccttttccaccatgaacactgagtttctggcaaggcggggttgtggtgtaggctgcttcactttctggattgatttgtcagggctgcctttgttgct

SEQ ID NO: 164350 - DNA, 122 bp, Homo sapiens
cacataatttgcagggtcaagtacaaaatgaaaatgtgatctcttgttaaatatttttaccgaatttcaagatggcagcatcagcgcggggccctgtgtgactgcacaggttgcacatccat

SEQ ID NO: 164351 - DNA, 122 bp, Homo sapiens
caataggctgtcagccagctaaggctctgcagaagaatctgcttctgggttcattcaggtcgttggcagtactactttcattctcaaggtttacatgtggtccccctcatcttcaagccagg

SEQ ID NO: 164352 - DNA, 122 bp, Homo sapiens
tgggaaacttcgggggtggggcgggggcggggcaccgggtcaggactacattccccagcacgcatcgggcgcgcgctgtgcgtttcgggaaatggagtccctcccggggcgccagacactgg

SEQ ID NO: 164353 - DNA, 122 bp, Homo sapiens
tcgagtccgcctcaggttcccggccccctcacaggcggactccgggagagtgacgcggcgcggctcccaggtgcaggccgggtgactctgtccgcccctgcgccccccgcactagtggcaca

SEQ ID NO: 164354 - DNA, 122 bp, Homo sapiens
ttattagagtcagccaatcaaagctcgagtgcggaggctggcccaaacacctgacccgaacgtcacgtggtaatagtttactccctccttccagttcctcctgcgcaacaaacaagatgaag

SEQ ID NO: 164355 - DNA, 122 bp, Homo sapiens
actggctccgcaggcagggaggtctcgcccaggaaatgctctgttggcctcggcttcctgcgcacgcagctgggcccggacccagggttggagtcgagacgtacccgggctggacgaccccg

SEQ ID NO: 164356 - DNA, 122 bp, Homo sapiens
tggattgactttatgcaatgccaggcaaagcaaaaacaatagaattttctgcagtaatcacgcaatatctgtttagatttttgaaaatttaaactaggttgtagattcctccccaccccatc

SEQ ID NO: 164357 - DNA, 122 bp, Homo sapiens
caaaacgctcattctctctttgaaaggacctgaccaaaccaggactttggagttctcacccgactgagccactgaacagaaaaatccaggggaaaatccctgacggggattagaatgaactt

SEQ ID NO: 164358 - DNA, 122 bp, Homo sapiens
ttgcattttgggagagtggtccctgaccctcagcccgagaggtgagagggagtgaagatacggaagcgcctttccctggcgcccgaagaacagaaatgtctccctgtctagcgcccattctc

SEQ ID NO: 164359 - DNA, 122 bp, Homo sapiens
agagggcgtgcccagtggccaggtgcaggcggtggggcaagtaacggcttttggtagccccgcccctccgacccgccctctccgcgcctgcccattttcgttccctcgggtctgtaaccctc

SEQ ID NO: 164360 - DNA, 122 bp, Homo sapiens
cggcagagggtctgtggccccagaccgcggccctgctgacggtctcctcccccagacacccggcctttgcgcagccggtccctaccctggaaggagaaaatcaatccgcgccggctgcggcg

SEQ ID NO: 164361 - DNA, 122 bp, Homo sapiens
gagaccccccccccccgcccaccatctctacaaaaaaaaaaaaaagactccaaatcagaccggccagactagatgcctagagagatgtgtgggcacacccagagccatgtcctccgccaggg

SEQ ID NO: 164362 - DNA, 122 bp, Homo sapiens
ttgtcttaaagataaagcctaagccacggggactgcctcctcctggactctggagagaggcgggagagattgcaggggaaaaaaggcttcttcccgcgtcttctgagagatttcaccagttc

SEQ ID NO: 164363 - DNA, 122 bp, Homo sapiens
tgggcagtggcggggcacgcaggcggcgatcagaggctgtcccgtcctctccgggggccgcggctcatcctgccaggcatctccgaggaaagtttgctctccggaaaagaagaaacccgcgc

SEQ ID NO: 164364 - DNA, 122 bp, Homo sapiens
tcccccaagcttccttgtttgtggccgagcgaccgcggagcgtggcacgttcaggaaggacgagtcgccccacggcggggaaccggcgaccggcggcagccccagcccaaccccggccacgc

SEQ ID NO: 164365 - DNA, 122 bp, Homo sapiens
gctcagtgtgttttctggctcttgcaaatgcaagacctccagaaaatcagaaggctccaccgccttgtcccttcccccactcacacctccagctgggagaaaagggttaaggattattggaa

SEQ ID NO: 164366 - DNA, 122 bp, Homo sapiens
tgcgccccccggcggcgggcggagaggcggggtcggctcagcccccggagccagaggtcacgtggcgtcctcagcttccaatcgcccccgcccaccataggaattgctctttctggaaagtg

SEQ ID NO: 164367 - DNA, 122 bp, Homo sapiens
ctcacgtgtgggttcacctgcacacactcacatgcacactcacacgtgggttcacccacacgcgcacacacacagagcacactctggcgcatgcatggacacagtcaggcccgtgctctctg

SEQ ID NO: 164368 - DNA, 122 bp, Homo sapiens
ccgcattcctgcactgataagacagaaatagtccggcggcccggggtctgcctgttgactcggcggggacggggccgcctgcctttccaagcccgctgtccaaacagcgcagataagcggcg

SEQ ID NO: 164369 - DNA, 122 bp, Homo sapiens
tctggggggctggaggcaccacttacctcagtcactggccctgtctttgtgccccaggtccgaagccccagaaggactctgtctcagactgggccattgtgttgatcactctcactttggtg

SEQ ID NO: 164370 - DNA, 122 bp, Homo sapiens
ataaagcaactaaacagtcactgtcccgattattgttctctggcgttttacctaccagcccggtactgcttccagatgttttgctaccttttttttttaattaaaaaattttttttataatt

SEQ ID NO: 164371 - DNA, 122 bp, Homo sapiens
tccctctggctctcgggctttcagggctgggagcctccaggacactccccttccaggctccgcccgcgcccgccccgcgcaaccctccccgcgcacccctctgcgctgatgtcacggcgccg

SEQ ID NO: 164372 - DNA, 122 bp, Homo sapiens
ggagtcagatcctggctcctttgctggctaaaactgtgaccttggctagggtgacctctccgagcctcagattcctcatctgcaaaatgggcttagtaatgtctgttgtctgaggttcttgg

SEQ ID NO: 164373 - DNA, 122 bp, Homo sapiens
gcgtaggaccctccgagccacgtgtgggatataatctcgtggtgcgccgtttttttaagccggtctgaaaagcgcaatattcgggtgggagtgacccgattttccaggtgtgtccgtcaccc

SEQ ID NO: 164374 - DNA, 122 bp, Homo sapiens
agtccagttcctaggagccctggttttgagacagcaccacctccgaattccctcaaagggcgttctgaactcactgagcaaatccggctggctttcatgtccctctagccatttcttgccgc

SEQ ID NO: 164375 - DNA, 122 bp, Homo sapiens
cctgcctggtaaacatgacctgagctgggcacgcagccgtggcctggacttccgcagccccggaccccctgcacatccacgcagtcgccttgtggggggctcaaggaaacaggagctgtcct

SEQ ID NO: 164376 - DNA, 122 bp, Homo sapiens
ttaatgtcactgttggcgcggatgaggtgtgaatctgggtcttgcgtctgtaacgtgcgccggaggaaagggccttctttctgtttcatggtccccagcaaatacttgggcagtacaggaat

SEQ ID NO: 164377 - DNA, 122 bp, Homo sapiens
tctttaacataaaggtttgataaagaacttagggattaaaaaaaagatggagttttctaacgtgaggatgaagtctacacttcagattaaaaagggttatgttgtatcctgctgtcttgtgg

SEQ ID NO: 164378 - DNA, 122 bp, Homo sapiens
tccaagcagagggcagcacctgtcccctcggaggcgctgccagcgccctccctcctcctccgcagggcgcgggacctctatttatatcgcccagccagcacaggcccatattgggcagtggc

SEQ ID NO: 164379 - DNA, 122 bp, Homo sapiens
ctgaacacgctgtgcatgaaggagggggccactgcagggagagggtgcggggctcagggccggggcacactgtccccaccaccggggggacacgcagatccctccacgctggaggccaggag

SEQ ID NO: 164380 - DNA, 122 bp, Homo sapiens
ccctttaggggcggggcgggcatttttggtctcctgtcccagcgtccaggcctgagcccgcgcgggttggctgggcgccctgctttgtaagtaaccaatcttgctggattctgaggactatc

SEQ ID NO: 164381 - DNA, 122 bp, Homo sapiens
gctgtaccttgattgctatgttggcagtcatgtcatactctacccgctgggtattaggatcggtgtcacagggtgagcgtagacctactgcagtatgaaaactaatatcatgctctccatcc

SEQ ID NO: 164382 - DNA, 122 bp, Homo sapiens
ctcctgtacagcttcgccttctggagcctcaggcggaatcgggactgctgggaagctgtgcgggggcgggtccagcaagccctggcaacggagatcttcccagacgagacagagcgaccgtt

SEQ ID NO: 164383 - DNA, 122 bp, Homo sapiens
ctgggcaacaggaaaaaagaagaaaccacagattagagaaatctcggcggtcaggaggcccggggtctaagatgtaaagaggtaaacagatttagggattgattgtctgctggggtgggttg

SEQ ID NO: 164384 - DNA, 122 bp, Homo sapiens
gcggccggctctcctccgtcttgagggggcctcctcctccccacctaagtctcctccgcgcgcggtaatgctctgggcctcaggaaagaccgcgccccttcacgatgtctatttcttgcatc

SEQ ID NO: 164385 - DNA, 122 bp, Homo sapiens
cccatgtgccaagtggagttcgagctgcgcggccctcaagcagctgaagggtcccgtgagcgatcaggagaagctgctggtctacggcttgtacaaacaggccacccagggcgactgcgaca

SEQ ID NO: 164386 - DNA, 122 bp, Homo sapiens
gctgcagccacatggcagactttccttgagagcagagattgtctctgccagtggctacctcggtgcctggccatattgggcactgacttatctgagtcagggaaggatcttagtgctgggtc

SEQ ID NO: 164387 - DNA, 122 bp, Homo sapiens
aggcttggtggtcaccccgacgccaggcggactccaaggatacggtctgggcagcccccacgcagagcctcctcccgcgacccaggaacccggcaccctctgtggggtgggcacagtgggtg

SEQ ID NO: 164388 - DNA, 122 bp, Homo sapiens
ccttttataatctcagcatgatgtgaagtttggtcttctttaggagagaggctgtgcccccggcacattctttgtatgtgtgtgttgctctttgtggcaaagtacgaaagttaagtgtatcc

SEQ ID NO: 164389 - DNA, 122 bp, Homo sapiens
cactccataaacacttgaggaaagggcactagaacagagtcacaagacgcaggttccgatcggcaccggggcaccactttgctatagccctttattgtgtctgtcttatcttcccatgagac

SEQ ID NO: 164390 - DNA, 122 bp, Homo sapiens
cgctccctgcgggccggcccgcgccaggcgctgcgcaagcgcttccttactgcacttgggcgaccaccccaagggggcagcaagcttatgatccctgtttcctgatgaggaaactgagcctc

SEQ ID NO: 164391 - DNA, 122 bp, Homo sapiens
gtcactcagggcctgagagggcgggtcttaaacattatccaatcaggcacgcagctggagcgacaggacggtttccggaatatggcggggcgtttggctcttgctgcagccagagctccagg

SEQ ID NO: 164392 - DNA, 122 bp, Homo sapiens
tgggagctgatatatctggatgccattgctaatcaattcactcattatcttattcttaaacgtctgtaaatcatttttagaaatagtgtctgctttggcaatcagtggtataatattcacct

SEQ ID NO: 164393 - DNA, 122 bp, Homo sapiens
ggactggatgaccagcggttttgttgggagtgaatgcgaggagatttctgctacaagtgccgcgttattatgagctacaaggtcagactatacatcgcaggtccccaaagcctatggacctt

SEQ ID NO: 164394 - DNA, 122 bp, Homo sapiens
ttgtggtcccagctacttgggacgcggaggcgggagggaggatcttttgagcctggagatcgaggctgcagtgagctatcatcccaccacagcacttgagcctgggcgaaagggcaagaccc

SEQ ID NO: 164395 - DNA, 122 bp, Homo sapiens
aggagcggcctgtggacgccgggaggcctgcgcaggcccagctggcggccagggcaagtccggtgcccagagcacagtccagtgtctcctcaatttcttgggcccggcttgcgcccaaagag

SEQ ID NO: 164396 - DNA, 122 bp, Homo sapiens
cagcccctccccgtcccgcaacccgcgccccgaccagcgcccccagcacctctccaccctcgctctcgagcagtctccacgtttgtctcagaggagacccactttgctccccagcgtgggcc

SEQ ID NO: 164397 - DNA, 122 bp, Homo sapiens
acagtctccataaattattttttgatccttcttctgttaaagcagaaagtcaaccatgtccgtacctttctagttcataccttcttttaattttttttttcttttcaatttgaagagagtgc

SEQ ID NO: 164398 - DNA, 122 bp, Homo sapiens
tgtgtgaggggctagtggacacccctcacagccctcaagtcagtggccactccccagtagcgaggatccacttacaatggtcatgtcccggcgaggagggggtctctgcctcatctttggtg

SEQ ID NO: 164399 - DNA, 122 bp, Homo sapiens
cgttcgcgacggtcgccaggggcgcctcccggcgcggcggggcgggtgcagtcacgacgccgcgactccccgcaccccggctgggccccccgactcccaggatctgggatcgattccaggag

SEQ ID NO: 164400 - DNA, 122 bp, Homo sapiens
cagcgactgctgcgacggatggtgtaatgggctgcgagccgggggccggacaagcctgagcgtcacatcactgactgtgccgccacgccattgggccgggggagggcggcggccgcggccag

SEQ ID NO: 164401 - DNA, 122 bp, Homo sapiens
ggcctggttatcaaactgatgtagtccccggagtcttctcaaatgcccacagagctggcccgacagaaacagtaaagtgttgggattagcaaggggtcaagaagcagaaagccagctccatt

SEQ ID NO: 164402 - DNA, 122 bp, Homo sapiens
ccctgggcaccacctctgctcagcaggactgggcacccctcagccccacatcccctcctccgggcactgggtgtccctgggcaccacctctgctcagcaggactgggcaaccctcagcccca

SEQ ID NO: 164403 - DNA, 122 bp, Homo sapiens
cagccacgaaggtggtgagccacctgatcgagaagctgccgggcagcgtgggtgagaagtcgcccccagccgaggtgctggtcaacatcatagctgtgctcaacaacctggtggtggccagc

SEQ ID NO: 164404 - DNA, 122 bp, Homo sapiens
cagggatgctgagctcccaagcacagagcccagggaagctcactgaccttccccatccctcgctgaagggggccggcttcttcccgtgcccctgtaaccgccaccggcctctgcgtccaccc

SEQ ID NO: 164405 - DNA, 122 bp, Homo sapiens
ctgggactcgcagccccagaaccgagagagaataaacaggtgtttgcgccgccgggtctgcggtacctgtcaaggcagccctagcaaaccgatgcgtgtttgcatgtgtgaatgcgtgtgtg

SEQ ID NO: 164406 - DNA, 122 bp, Homo sapiens
tgacagaaagtccccaacaagcaggaaccgggatgtcagtgacatcccccagccatgctccggggcctgcctctgagtagcacttaggctcagggctgcctgcctggcttggccccagcccc

SEQ ID NO: 164407 - DNA, 122 bp, Homo sapiens
cgcccgttattctccaggtggggtgccaggggcccgttattctccaggtggggtgtcaggcgcccgttattctccaggtggggtaccaggcgcccgttattctccagctggggtgccaggcg

SEQ ID NO: 164408 - DNA, 122 bp, Homo sapiens
gagttcctcagattagacttttccacactgggaaatacctgaaatggaaggacaggaatccgaatcaggaaacaaacctgattacaaaggggctatttcacttcagagtgggtctcagttcc

SEQ ID NO: 164409 - DNA, 122 bp, Homo sapiens
gctcagcaccccagtgtggcgggcgccccagtgtggcgggcgtcccagtgtggtgagcaccggccaagtcagtttgggttgggctgcaccctcgtgcctgggacacccaggaagacccacct

SEQ ID NO: 164410 - DNA, 122 bp, Homo sapiens
gtcaggtgcgcgcggtcgtgacagtgccgggaggtcaggtgcgcgcggtggtgacagtgccgggaggtcaggtgcgcgcggtggtgacagtgccgggaggtcaggtgcgcgcggtggtgaca

SEQ ID NO: 164411 - DNA, 122 bp, Homo sapiens
atgttgccacttcatagacatccaagcagagatgccaagtgggcaggtgaacctggacttcgggagagatgcccaagccagaaagataaatgtggaagtcatcagcatcaaaggtatttgag

SEQ ID NO: 164412 - DNA, 122 bp, Homo sapiens
caggtgaagttaatgttggccgctaggtggcaatcacatgtcttcaataaccgaagacatcgcaggcctgagtaactggccttcctggtgagtttcatcagtccatccactgtcagagaatt

SEQ ID NO: 164413 - DNA, 122 bp, Homo sapiens
ctgggattacagacgtgagtcaccctgcccggccgcctgttcactttattacttggagaccgtattccattcccataacccaggggaggaggcacgcacgagccgacaccagcaggtggggc

SEQ ID NO: 164414 - DNA, 122 bp, Homo sapiens
ttctgctgtagggacctgagggaactgtagactgagtcacagaccccagactctaccccccggttccctagaaatctcacctcattcccaagcttcacacccatctcccgggccactcgggc

SEQ ID NO: 164415 - DNA, 122 bp, Homo sapiens
caagccctgggaaagactggccaggctgagagagggacccgtcctcctctgtgccaaaggcgggagcaaatcctggtgctgtcgcctttggatgtgagtcctggaaatggcgggggtgagga

SEQ ID NO: 164416 - DNA, 122 bp, Homo sapiens
tcacctcgggccataaaccaggggacagcaccacctcctggccggcagagatgtggcgcccgcttggtgtccggcttgcagaacccagcagccgcctcggacgtcctgagctgccagcctct

SEQ ID NO: 164417 - DNA, 122 bp, Homo sapiens
cccttgagcctcgggcttaccggaggagaagcggcagagtggcctctgcagcggtacgcccgctgcataccctcaaacaccagagacccacctgggccatgcctggaagctgggacagcccc

SEQ ID NO: 164418 - DNA, 122 bp, Homo sapiens
tcccgtccttcgctcgctgcctcgtttgcttgttccagtacccacgcagctagccagtcacgtcgcagctcaccactttgtctggccgggccagcgaggctgccttataacccgccggggcc

SEQ ID NO: 164419 - DNA, 122 bp, Homo sapiens
aaacacaagcactgaagctggaagcgtccccatcaatttctgtggctgccagcacagaaccgcaggaagtaacacagcattgtcctactgatgctctcacctggggtctgccctcatgtcca

SEQ ID NO: 164420 - DNA, 122 bp, Homo sapiens
ccagaagttagttgtgggacattccctgagctccagtcctggggatgtttattctctgggcggagggtgagaaaggaaacaaagatgttgcaatccactccacgaacgtcaaatgcgtcatc

SEQ ID NO: 164421 - DNA, 122 bp, Homo sapiens
cagtgggagtgaatagtggattaggggagtcctaaatatctgggtgttagtggatattaacgacagtcattgggagaaatagtggacattaccaagaatataaatgggcaaccaggagagtt

SEQ ID NO: 164422 - DNA, 122 bp, Homo sapiens
tgtcacggcggccggccagcctgcccacccgccggcgccaaggtcttctcaaccccgcggcggaaggatgccgggctgggcctcccaggctcctcctgggcctacctgcaaggcagacggga

SEQ ID NO: 164423 - DNA, 122 bp, Homo sapiens
cgccgctgttggccaaagtgcagagcttggcgctccagatctcctcgcgcagccgcagcgcgctttccagggcagccccagctcagactccccagcgccggcctttacaccgcttcctcctc

SEQ ID NO: 164424 - DNA, 122 bp, Homo sapiens
tctcgcgcagggtccggcctgtcaggcggaaaatctcgcgagatcggagacgggggatgacggtctggaggaggggagtggtgtcgggtaaagggggggaagctgggcagcggccgggctct

SEQ ID NO: 164425 - DNA, 122 bp, Homo sapiens
tgttatggagtggaagaaagtgaggttacatttccccaagcctgcctagcgggtgcttggcgctcgcagatatgctggccgttgctgaatctcggggaccaagtctctggatgaaatgcgga

SEQ ID NO: 164426 - DNA, 122 bp, Homo sapiens
cagggttctcaggatagctcctcggattcccccaagccccgcccccaagaccgcctggcccgggagtggagtattgtcaccaccctgtctccgaatgcagtgttgagggacagaagcagagc

SEQ ID NO: 164427 - DNA, 122 bp, Homo sapiens
acacattacaccaatatcaacttcctgcttttgatattgtactataattaagatgtaacccgccaggcacggtggctcatgcctgtaatcccagcactttgcgaggccgaggcaggcggatc

SEQ ID NO: 164428 - DNA, 122 bp, Homo sapiens
tttacggtttgtagtgataacctcttcagaaaaagagcaggcgtcctgggccggggcaggcgattggtactaaaatggtaatttttatgttatgacggtttggaaaaaactgtcataaaaat

SEQ ID NO: 164429 - DNA, 122 bp, Homo sapiens
ggcctgaaatccaatttttaattaaagcattgcaacacaaggtcttccagtatctggatccgcttgtacctttccttgcctcgtttcacgtcctcccacccccatcttctagcgacttcact

SEQ ID NO: 164430 - DNA, 122 bp, Homo sapiens
cagaacgagcatcgaggtgcgcgggggcagcgggaggaggtgccgcctcctcggggtcggcgcctcccggcagctcttggtatctgtgcagctcggctccttccttgggagtgttcggaaga

SEQ ID NO: 164431 - DNA, 122 bp, Homo sapiens
ggggctcaacaccgcccagcagggtgggttcgggtgccgtgagggcccacaggcggccgccgcggccctccacggcccacacggcccccgcagggcacagccttacgcagcccttgcgttgc

SEQ ID NO: 164432 - DNA, 122 bp, Homo sapiens
catcgctcccagtcacctcataatgacctttgctctttgaccccaatccaccaaaggtaccgaatttcagcttcccgtgtttccctttaactttcccaccttccagagacacttccccacct

SEQ ID NO: 164433 - DNA, 122 bp, Homo sapiens
tacttttttgcttccagtgcaactacagaatgcttcctcctggtgatgatggcctatgaccgctatgtagccatatgtaatcccttgctttatccagtgatgatgtccaacaaactcagcgc

SEQ ID NO: 164434 - DNA, 122 bp, Homo sapiens
ctactgcacctggtcctacctgcccaataagtgttttaaattaaatgcaaattattttcacgcatgcctatcaattcatatatacaatattaataaatcttatttctttatttttggataaa

SEQ ID NO: 164435 - DNA, 122 bp, Homo sapiens
tgagctcaggagttcaatggtcttgaaccaggctgttcacctgagcaacacggtgaaacccgtcctctaccaaaaattaaaaaaaattagctgggcattatggtgtgtgtctgtagtcccag

SEQ ID NO: 164436 - DNA, 122 bp, Homo sapiens
gacaaagaattgagatagtaaggataatttcaatttcaggtcttggctgtgcaaggaagccgagagacatgagtctctaagagggcacgatattgagagggttgttatctttctgtcagcgg

SEQ ID NO: 164437 - DNA, 122 bp, Homo sapiens
cagaggatgataccaaactaccactgcctgtgataaggagagctaaagatgaaaggattccgggagtaaggtgcagagtatacagtgcatgctgaggataacagccactcagattttaaatg

SEQ ID NO: 164438 - DNA, 122 bp, Homo sapiens
gaagtgtgccccattcagatcagtggggtccagggggtcgggcccagcggggagtcccaccgcctcccattctgagaggccgttgtaaagctttagcatcctgtgcgccttccgccgacgct

SEQ ID NO: 164439 - DNA, 122 bp, Homo sapiens
cgccgccgcaaactcctagctaagagccacctgcatcccgcaggcgttgcgcccctcacccgtctcccctaggccgagttcgctgggctgcgcccaggtccagcatctctcccgcccaaagg

SEQ ID NO: 164440 - DNA, 122 bp, Homo sapiens
cttgctgacccgggccgggggcgtgtgctcctcctgcagcggacggaagatgctgggccacgcaagtttccctgggcttggttaaccaccccaaagcccatttccagaaggaaagggtgttg

SEQ ID NO: 164441 - DNA, 122 bp, Homo sapiens
cccatcctgcacctgtccaccccaccccaacaccctggaagccactgtcaatgattagatcgggtctcggaagggaagtagccatcacaccattaaaaagcctgtggacctttttctgttgg

SEQ ID NO: 164442 - DNA, 122 bp, Homo sapiens
ctcagatcgtcagttacaatctgaagcctgaacagttcagtttttgcccgttgcatccctcggaggcactttgaaatttattcgagtttacatcccctcacttctttctttctcttactctc

SEQ ID NO: 164443 - DNA, 122 bp, Homo sapiens
tgagcgcccgattggcgcccggctcgccgagctcccagcgcgtctcgctccggctccccgcgcctccagggtacagaaaacagagtgttttgtagagctccagggtcctaaaggtggggact

SEQ ID NO: 164444 - DNA, 122 bp, Homo sapiens
tcactgcatagagcacatcccggcgggagcgttagagctgagggatgcctgtggctgagccgagggagagccggagccaggaaagccactgattgggcccaggggggcggcgatacaaagtc

SEQ ID NO: 164445 - DNA, 122 bp, Homo sapiens
gaaaacagtgtcccttggcttaaaacaaatggtgtcctcttagtctcccgtcccagtgggcgttagatgtcggggcaggcggctgcacacttaattctccgcgggggcattggcctgtctgc

SEQ ID NO: 164446 - DNA, 122 bp, Homo sapiens
ggaaacagaaatcaaaaccacaattagataccacttcatacccataagcatggctagaatcgaagatagagaaaattggcctggtgcggtggctcatgcctgtaatcccagcactttgggag

SEQ ID NO: 164447 - DNA, 122 bp, Homo sapiens
gatgggaagacgcgtgggagcctgggggatctcgggagagccgcgcaaactcgcggcggacgcagccagcacccgcagccagcacccgcacactcccacccataccccggcagcccgccaag

SEQ ID NO: 164448 - DNA, 122 bp, Homo sapiens
ctcgccaaacacggggtgaggggtccgcagggacggctgggcaggaaggggccgagtggccgcacgccccactcaccaggacaggcacagcccactgacatcttcacatcgcccgcctctgg

SEQ ID NO: 164449 - DNA, 122 bp, Homo sapiens
tgggatgtgaacactgggcaccgagtcatccagaaataaatcccaggcacggtgggaggccggggtgggaggatcgcttgagcccaggagtttgggaccagcctgggcaacacagtgaggcc

SEQ ID NO: 164450 - DNA, 122 bp, Homo sapiens
gaggccacatccttgctgaggtccttttgtgttaatcgcctctccttatcactgctgcttcggagtgtaggaaagggagaaggagagtagggtaatctgggccaaaagacttctcattctct

SEQ ID NO: 164451 - DNA, 122 bp, Homo sapiens
ggtgcttgcagaacagcacgcagaagcttatgtactgcccacaacaatcaccaacttggacgtggtagttgaagcaatgagtcttatgaggtccctcaagatgagcgggaagaacaaagtgg

SEQ ID NO: 164452 - DNA, 122 bp, Homo sapiens
attaattgatcgattgagtgattggttaacggacagtgtccgatgactcatataatcccccggttcgagtccctttaggccgcagacgtttcgcgccttctcgggtgtccaagtcgcgcatc

SEQ ID NO: 164453 - DNA, 122 bp, Homo sapiens
cgcaggagctgcagccgccgccttcgctggagcagccgaggggccggtgccacctttgctcgccccctcactaccatgtacagtgtgcgctgcaagaagaaggcgggagatgcatgcacacc

SEQ ID NO: 164454 - DNA, 122 bp, Homo sapiens
tagggctggagacggccccgcctctctccctgccaatcagtccctcttcgcgcctgcgcacgcaccgccctctcccgaagccccgccccggtcaccgccccgaggctgtcccggacggttgg

SEQ ID NO: 164455 - DNA, 122 bp, Homo sapiens
tccctaggagcaactggggaggtttagaatctgtggccactacctgcatgactcctaaaccgtaatttctaatctcgtggctaatttgttagtcttacaaaagcagtctggtccccaggcaa

SEQ ID NO: 164456 - DNA, 122 bp, Homo sapiens
tgcagacatggggaagagacgcgggaactccaaagtcgctgggtctgcgcaggtgtgtgccgcgatcctgtgaaggtcaaggcctcctgtgagggggagtcgtcctggaatgcgatggtgaa

SEQ ID NO: 164457 - DNA, 122 bp, Homo sapiens
tttcttgggttcagtagaaaaggtgatgaggtggctgttctgcactgttcaatcatgagccgaaaatgtgctggctttaaaaggtacccaatggtgggctttggaaaagtgcaactacaacc

SEQ ID NO: 164458 - DNA, 122 bp, Homo sapiens
cactccctggtgcacacatgccttcctgagtctagatgcctagaggtggaggattgcagacgaagagggtgggcaccatttcatttctaaagtaggacaagacaactgaacatccccccatg

SEQ ID NO: 164459 - DNA, 122 bp, Homo sapiens
aggaaggaggcccggggcgaacgtattggactgggaaattaaatgctggctccagccttgcgcgacgcagcgcacgtccagagctggagagaagaaaggaaacttccgttttctccagaact

SEQ ID NO: 164460 - DNA, 122 bp, Homo sapiens
ccggctcaggctctgggatcccgcggggacgagggcggagttggcgagtttggctgtcagcggccggtgttcctgcaccgccctcgctgcagcgccgcgcgccattggccgccgcgcgccgc

SEQ ID NO: 164461 - DNA, 122 bp, Homo sapiens
aaacaggcaaagaacccggtgttaccgggcaagtgagagcccgcagggctgcccggaggacgaatcacataaatcgctcaggcgccaacgaagaccatcagacctgccagtgcccgtgaggt

SEQ ID NO: 164462 - DNA, 122 bp, Homo sapiens
gagggatgtggccaacaggcccaggtcccagtgttaggaaggagcaggcccggccgcccgcgaggcggaaccaccaggtgggccaccttccctaccgccaccccgaggttccagtggacatc

SEQ ID NO: 164463 - DNA, 122 bp, Homo sapiens
agtggagggagggcctgtcactctccagcacgcacaccgaggagtggagggagagcctgtcgctctccagcagaagcaccaaggattggagggagggcctgtcgctctccagcaggagcacg

SEQ ID NO: 164464 - DNA, 122 bp, Homo sapiens
gcagtggacggttaggagcacttggtgaagtaaaccacatcccaaggtcaacactgggtccgttccccattctggctgggcctgggcttccttactgccctgatggggatgacagctcctcc

SEQ ID NO: 164465 - DNA, 122 bp, Homo sapiens
gtcccgaccccggccccaggcggactctgccgggatcggccgagcgccaggcgcaggacacggtcctccaaggtcgcagttttggtgttagcggggtgagaggctctcctgcccagcctcca

SEQ ID NO: 164466 - DNA, 122 bp, Homo sapiens
cactgtatgccgtcttttggaaaggggtggtgtgcttggaatatctgctcagtgcaggcgcgtggcagaccccagacgcgtggcagaccccagacgcgtggcagaccccagacgcgtggcag

SEQ ID NO: 164467 - DNA, 122 bp, Homo sapiens
gcaatcgttcaaggaaccacagccgagcgccgaaaaacagctcaactcctactcaaggtccggctcctgtctgaggcgtaaataaacaaacccagatcataagccacgggttaaaaaagagc

SEQ ID NO: 164468 - DNA, 122 bp, Homo sapiens
gcggtggcgctgggaaccactgtgtcagccctgcggctagggcggggagtggaggacccccgggctggctctcggacctggacttggggcttccgactgcattttctccccagcccgcttta

SEQ ID NO: 164469 - DNA, 122 bp, Homo sapiens
ccccgggcatccccatgaagaacatcaggacatcccggcggcaagaaaacagcacgacaccgacgcggagcgcgacaccgacgcggcccactcaccatgcgcacgcgcttcagccgctcctc

SEQ ID NO: 164470 - DNA, 122 bp, Homo sapiens
ccgatctttacatccgaacaccctcaaagtgccgagcttggcgggtccacctccccactccgaagcttccccgagggcggagtgaggactccacttgtgtctcccacgcaccgcgtacagct

SEQ ID NO: 164471 - DNA, 122 bp, Homo sapiens
actcctgcgggccaaagccgtgtggctgctgtactgcctgaagaccgagcatcctgaggacgacgtgcagagcaagcagtggctcacccatttcctcgaccaatttgccaacgttaagaaca

SEQ ID NO: 164472 - DNA, 122 bp, Homo sapiens
gcaaagactgaggatggagaatctgtagctattctctcttccaggggctggaccttgagccgctggccttcctgagtcaagttcacttgcagaatttaaaggaacagcacccccttttccac

SEQ ID NO: 164473 - DNA, 122 bp, Homo sapiens
gaatagaatctggtatcaagacagataccagggagaggaggctcttcaaaatcccaggcacgtctggccccctaggagactcaggaaaaagtctccagacttggaacctaagctggactgcc

SEQ ID NO: 164474 - DNA, 122 bp, Homo sapiens
gttccaaagagttacggttcctcatttactggagaaagtatagatgccagaagggtagctcggctgctaacagcaagaaattacccagcccacatttccagtctaggtgtggtagtgctttg

SEQ ID NO: 164475 - DNA, 122 bp, Homo sapiens
atctttctgatctcaccttctgtcttcacatggctttctttatccctgcaagtgtctgggcgtctctactcttcttacaagaatggtggttatgttagaatagagactcaccctactccagt

SEQ ID NO: 164476 - DNA, 122 bp, Homo sapiens
cagctaaagctgagatagatgtgtccgggaaggcagtcgtcgccagacaagttgtaagaacgaatttaaaaatctctgcaaagacatccgagagggtcgacggtagatgtggtgattgggag

SEQ ID NO: 164477 - DNA, 122 bp, Homo sapiens
tctaggaacccgaggactcagggttgttattttagttcttggaatcaaaggaacttgaagcgtagtcattcctaaactaagttaaaccagaactagcgctttcagcaatgatgtaatttgat

SEQ ID NO: 164478 - DNA, 122 bp, Homo sapiens
cggcgctgggcggaggcagcggctcggggactgggcgagggccctgggcctgaggaggcgcggccgccactgcgcccagcgcctgcgcgacgcctggctgctgggccccggggcagttcagc

SEQ ID NO: 164479 - DNA, 122 bp, Homo sapiens
gagggggtcctacccctcccgaggacgcgacgcaaaagccagtagactcacgacgccccccgcatgtcacacgacaaggccagcagggccgccaccagagggcaccagcggctgggacccgc

SEQ ID NO: 164480 - DNA, 122 bp, Homo sapiens
ctacagtgttgagtgcttttttactgggagaaaaatcctagcagaacctgctactctgggcgcattaggtagttttatgcaactatagtattaagagttttattggaagaaaaaacactgtc

SEQ ID NO: 164481 - DNA, 122 bp, Homo sapiens
gagatctgtggaaaaagaaatggagaattttattcctattaaaaacaatctgcaggttggcgagatgtagcctgcagtgtaaaatgaaagcatgctttgaagggggtggagggtagagagtt

SEQ ID NO: 164482 - DNA, 122 bp, Homo sapiens
catggccacagacatctgcgtcagagataggaggtctcaatgccacgggcaggggcaactcggactgtggggcgtggaaaggactggggaagactggatgagaagggtagaagagggtgggt

SEQ ID NO: 164483 - DNA, 122 bp, Homo sapiens
cggggcctccacctcgcccatcctgggtgccggcctggggagcaggtaaacgggcttgagcggcgcacagccccaatttgctgcaggaagtcccgcctcctcccacatccactagaaagttt

SEQ ID NO: 164484 - DNA, 122 bp, Homo sapiens
gtttctctatgaaacatttgggatccggccacagttctcctggcacgttgacccgtttggcgcctctgccacgacgcccaccctatttgcgctggcgggcttcaatgcccacctcggctccc

SEQ ID NO: 164485 - DNA, 122 bp, Homo sapiens
cggcgacggcagcaggacgtaggtgctggacgcgggatgcagtggcgcgcgggctttggtcggtctgggggtcgttctcgcctcttcttcacactgctccggaggcgtgttttaagactgat

SEQ ID NO: 164486 - DNA, 122 bp, Homo sapiens
ccccgcgccgccgccggggattcaaacccggcccgcgccccgccccctccgcgctggccccgccccgcaacgtgactcggccccgcccccgtcgcactggccacgccccccgcgctgccctc

SEQ ID NO: 164487 - DNA, 122 bp, Homo sapiens
ggttccagtctagagcccatatagcaggtgggctttaagagataattatccagctcagaccgggagtgagacgggactgttttttcattctaatgcctctctgggcctgataatttaaaggg

SEQ ID NO: 164488 - DNA, 122 bp, Homo sapiens
gaccgtttaggtgagtggaatagccaagaacatttcggcaaataacaaaaacaaaacgtgcggtcacttgtgagtggatgagaactgtgaggaaacagcctctcagcccggttcgtttccgg

SEQ ID NO: 164489 - DNA, 122 bp, Homo sapiens
atcttttctcattctgcagcctttccctggtgacctcatttgcacttaagattcaactgccgttgctcacgaacaccagagtgattttctagcctaaaactcttaaaacgtattttgagatc

SEQ ID NO: 164490 - DNA, 122 bp, Homo sapiens
agataaggtctcactccgttgcccagactttccctggttctttattctgattcccacaatcgtcccgagggggcaggccggagcgggtcttgaaaatacacatttgcacatcccttctagtc

SEQ ID NO: 164491 - DNA, 122 bp, Homo sapiens
ccctccctgggggagcctcaggcatcgcccagagggattcccggtgctgggggtggcccgcgcgcgctgcgcggggcggcccggcccctccttccttcccccgcccctcccagccgccgccc

SEQ ID NO: 164492 - DNA, 122 bp, Homo sapiens
aggggagaagagccgaagacagcacagacttgagcggcggcgccgcgggaggcactagagcgggcccgagcgaaacataaacaaacgcacgcacacccgagctcgggctctgaccgcggctc

SEQ ID NO: 164493 - DNA, 122 bp, Homo sapiens
tccgcccccatgaacccccttcccacaagggggttcccactgcgcacgcgcagtgtttaacggccggtcaggaacccaacaattagtcccttctcgtccgagaggaaactctgtgagaagat

SEQ ID NO: 164494 - DNA, 122 bp, Homo sapiens
tccacagagatgggttgaggccctgatgtgtatctgggggttcacgtctctgggaacttgcgccctgccccagcctgctgccagccctgggtgtggggaccacagccctagcgagtctcccg

SEQ ID NO: 164495 - DNA, 122 bp, Homo sapiens
ataattctgtaaaagttaattctaaggaattcaagtcagggttaattaactttaaatgtacgctgcaagtcataccaaatgtatttcacgttggtttctctgattattcatggtctttatac

SEQ ID NO: 164496 - DNA, 122 bp, Homo sapiens
tgggaactcctgccttcatcccaggctagccggcacccagaacccatcccagaccctgtacgtagcccccagatcactagctctgtctgctgtcacctgccggaggggtctgtgggtggcag

SEQ ID NO: 164497 - DNA, 122 bp, Homo sapiens
agtctgtcttggaatgaatgatcgtcggaacggagcttgatcaaaccactcagcagtaggcgtcgcccactttcttattggttggttttggttctcaagagtaggaaagttaggtagtccgc

SEQ ID NO: 164498 - DNA, 122 bp, Homo sapiens
agatctgggcctgtctcaatgggctgctttccacttcaattaaactgcaagccaacaacacgccctgttcccaggcttcccaggcaaggctgccctgctggggtggcatgccaaggtttcgg

SEQ ID NO: 164499 - DNA, 122 bp, Homo sapiens
ctctgggctgtgaattgaattctcagtcctgtcactcacaggaacaggagaggataagggcgaccacgaggagaagatgtactgagtcttattagtatgcaaggcccttcttgtcacattgc

SEQ ID NO: 164500 - DNA, 122 bp, Homo sapiens
aaccggggacaggaagaactggttcagggaaggtccgaaaagggatgccggggtcgaaggcgccagggccaggggatgccggcatcctgatcagggtgtcaagccctgagtagaagaagcga

SEQ ID NO: 164501 - DNA, 122 bp, Homo sapiens
ggggcagggctctctgtgtggcccttctcaggagagagccgcaaacgcattaagaaaacacgtaacagatgggcacggtggctcacgcctgtgatcccagcactttgagaggcagaggtggg

SEQ ID NO: 164502 - DNA, 122 bp, Homo sapiens
cctccccgcggaattggaacccaacagccgcagagcgctcttggaaccatgtgctgctgccgcctccgccgccgccgccgctgcctccgccgccgcccgcgcgccgcccgcgcgccgcgcta

SEQ ID NO: 164503 - DNA, 122 bp, Homo sapiens
tccacgttgggacccggaggggagggatggcatgcccttacatgggactcctacccccagcggggcagctggccactctgagggcagttttgcacctgcctcctggctggaaagtgagttcc

SEQ ID NO: 164504 - DNA, 122 bp, Homo sapiens
cgaggaccgcgggcggtgggcctccccccgagaggagggagacccggaaggcggtgggggcggggagtggagctgacaacctgtcaaatccactttgggacgaactaggtcacgcgctccgc

SEQ ID NO: 164505 - DNA, 122 bp, Homo sapiens
cccgaggacccgccgcactgacaggtgagcgcggacgcacccggcagggatgtgagtgggcggagggaagagggccgcaaaccaacccaggacccgctcagttccacgcgcggcagccctcc

SEQ ID NO: 164506 - DNA, 122 bp, Homo sapiens
ggagagatcgtaaggggcctcggagcaagtccatggggcgtgaggagggctggcgtcctgcgcacagtggaaggactggccttaggaacagggacagtgattccactcagcatagccaggga

SEQ ID NO: 164507 - DNA, 122 bp, Homo sapiens
cgactgcagactctgtggttctcacaaccacccgtttcctctgacggcatcacagaccgtcgaggagccaccttccccaagttcctgtttctaggggagcagctgctgccttgtcatgatcg

SEQ ID NO: 164508 - DNA, 122 bp, Homo sapiens
acttacctgcttctttgaacatcatcaaactggggaacagaatcactcgcaatgaggtcccggaatgtggcaaatcaaatccacacaggaaccccaaactgtaaaaagtacaaactacatgc

SEQ ID NO: 164509 - DNA, 122 bp, Homo sapiens
tcgcgggacgccggcgtggtgtgctccggtgaggtcggaaccgcgtcccccatggcccgtcgccacgggatcccgggcgccctgactctgtctctccacagggagcctcagggtgcggctgg

SEQ ID NO: 164510 - DNA, 122 bp, Homo sapiens
acgggtggagcccagggctggtaatcggatcgcattttgccatagccagcactttaaccacgagggagtcaaaaagtcaccatctgaagacggaagtgaacaacatttgaagaagagtcctt

SEQ ID NO: 164511 - DNA, 122 bp, Homo sapiens
ctttcaacctcaagttctaccagatgaccgggcacgactttggctgggattgagcagacccgggctatgtaccttacccacgtggcttatctattgacagagattatatgtatgtaaaatgt

SEQ ID NO: 164512 - DNA, 122 bp, Homo sapiens
aaagaattcttttcatcatcttggaatgctgtccttgggattcagctgacttccctcaatcgggactcatacatcaagaggtcaggagtataattatctcagctactgtgaagccacagaaa

SEQ ID NO: 164513 - DNA, 122 bp, Homo sapiens
cccccgggaccccggaagctggcaggcagctcctcctctggctttcctctctgtggactgcggtttcattttttcggcctctctcagcgcatctgtcccgtctccttctcctttcccctaca

SEQ ID NO: 164514 - DNA, 122 bp, Homo sapiens
agcaaatccagaccggaaggcggagcggacacctgagtggcgcggcccgcgcccagccgccgcctcctcctcggcgggagcagcgcccttagcccaacttcccggctccagccccgctcgcg

SEQ ID NO: 164515 - DNA, 122 bp, Homo sapiens
ttccctggaaggaagactccagttaccttccctggccgtgagatgccagggagcacggagcgggagagaagagagctgctgtggtcctgggactgactcgagaaatggaggctgtgattctg

SEQ ID NO: 164516 - DNA, 122 bp, Homo sapiens
ggtgttttcagcaggtcctgtttgcccactttccatttgtaattctcaagtgtaacagttcgaatgtagagactggctgtgaaagtggattgggattttaagacaaaaagtattggacagca

SEQ ID NO: 164517 - DNA, 122 bp, Homo sapiens
atttctggaggagctcagtggggaggattggggggaatctgattttaagaaagaaagcaccgaaggggcaattattaattttcctcgggtttggaatcaccctctggacaagagaacgggcg

SEQ ID NO: 164518 - DNA, 122 bp, Homo sapiens
atgccaaggatattagagacagaaacagaccaaagcttcgaaggcgcccatccccacacacggggatcgcctgtcacatcacatcaaccttgcttgtctcagagggaagaccattgaaaagt

SEQ ID NO: 164519 - DNA, 122 bp, Homo sapiens
ccaggaagccccggggccttcaccgtctctttctccgggtggtctttgctgcgccagcaccggggacctagcccagaggaactcaccgcctggctgggaccgagtcacctctcccactttca

SEQ ID NO: 164520 - DNA, 122 bp, Homo sapiens
cgcccgccccgcgccctcacccgcgggaggctgctccagccgggctgggctgctccccgccgcccgcagctgctgggccaaaccgagtagacccggctccttcgagcctgtgcgcgccggac

SEQ ID NO: 164521 - DNA, 122 bp, Homo sapiens
ggtctcctcgagcctgtgcgaaacctgcaggtgtgagctgccgggtggccccccatcggacgcgtttgtggtcagctgtgagacccagatctgcaacacacactgccctgtggtgagcgctc

SEQ ID NO: 164522 - DNA, 122 bp, Homo sapiens
acccagggggtccactccaggacagactgtgccgtgagtaaccccctgagacaatggagacgagagactctagagggagggtgaccaactgttccactttgcccaagactgataattcttct

SEQ ID NO: 164523 - DNA, 122 bp, Homo sapiens
gacagttaacttttccaaatgaggggccatctgttaacacttgtactcacaagaacaaggcgaaatattaaggagttaaagagagtaggtcttcagacaaattcacaaaaaactgccttcag

SEQ ID NO: 164524 - DNA, 122 bp, Homo sapiens
gggtggggctcgcaggctgcagaggaaggaccgggcggaggggttgcccggcttcctacccgctagatgtggcctggggagctgcgttttgttcttgggaatacagattcccaggcaccgcc

SEQ ID NO: 164525 - DNA, 122 bp, Homo sapiens
aagtgactgatgtctggatgatgcttgggtggggcggagtgggctagctccatttagccccgccccaaggctatgtttatcttcgtttgaccgaattggtttcaccgaaatatggatgatgc

SEQ ID NO: 164526 - DNA, 122 bp, Homo sapiens
ataaaaaacaacaacctcacaaaatgagcagtcagggaaagagctgtggagggatggccccggcccaggctgaggaggccccagcaggcacagcccccatcaccactcacgtaaacagcact

SEQ ID NO: 164527 - DNA, 122 bp, Homo sapiens
tgccagtccccggaggaacggtgaggacggcgctggcctgggcagcacccctggcgaccacgccgatggtgggaccggggaaagccatcctccctccacactgccctgagccggccggcagc

SEQ ID NO: 164528 - DNA, 122 bp, Homo sapiens
cattaacatttatgtattgattacatattgaaatgatcatatcttatatgtagcaggggtcggcatgctaagacctgctgcagcctgcaggctaagaatttgtgtgtgtgtttttagatggt

SEQ ID NO: 164529 - DNA, 122 bp, Homo sapiens
cccctgccccactgccgccgccctgtctcccaacagtaagagtgcttgtcagcctcctggcggcaggtgctgcggcctgcgaccacctgagccaggcaggtgatgctaatgcgcctcagggc

SEQ ID NO: 164530 - DNA, 122 bp, Homo sapiens
ttccccagcccaagcccgcactgtggaccccagaggtcggaggggagcccggcgacaccgcgccccttctgcagcccacccctggctggagcacccaccactcgtgccttagcacattcctc

SEQ ID NO: 164531 - DNA, 122 bp, Homo sapiens
tccgcattggcccagcccggctccacgccatctttgtgcggggccgagtgtttgcgaacccgggctgactatgtgaaagaggggtggtcccacctctgcaacgcagataaagacagaggatc

SEQ ID NO: 164532 - DNA, 122 bp, Homo sapiens
taacacaaagcaccatgcttactactagagaagattaaaattctctaaaaaccttgttaacggagatcacaggttgaagcatactgcagctctactcttggaaggctagctcagtctcagac

SEQ ID NO: 164533 - DNA, 122 bp, Homo sapiens
ctgctggggggtgtagttttcagtttgggatggtgaaaatgctctgggacttggtggtggcggctgcagaacagcatgactatgaatgccactccactgcattttcaaatggctgaaagggt

SEQ ID NO: 164534 - DNA, 122 bp, Homo sapiens
gctttggggagcctggcttttaaaaaagacccgagaattgatgagtcggagacaccagggcgcttccctgacagcccagcctggacccaatcacacggtcccatgctgtttctttctgagca

SEQ ID NO: 164535 - DNA, 122 bp, Homo sapiens
ataaccctctggggccgggagcagggagcgagacgctgagcttctgcgcctgcgccctagcgccggctgcagcctcctcacttcgagagcctgctgtttccgcggatgctttaccttgccaa

SEQ ID NO: 164536 - DNA, 122 bp, Homo sapiens
tgttgtagaagaggcaggccacttcgaagggaatatatgctcctagtgtcattcatcaggcggtaggtaacttctaggggaagaggaagcacaccagagtgggaaaggaacttttaggggct

SEQ ID NO: 164537 - DNA, 122 bp, Homo sapiens
tccggttctgtaagtttaccaaagatctcgcgagacctatgtctctcggagcgagaggggcgcggagtttgagcgaggggagtaaactgggaaataaatttatggctagtgtcacctagtgg

SEQ ID NO: 164538 - DNA, 122 bp, Homo sapiens
agagggtcagtaggcttggggggccgccgagggccctagagggtcagtaggtttgggggccgccgagggccctagagggtcagtaggtttgggggccgccgagggccgctgctctctagcag

SEQ ID NO: 164539 - DNA, 122 bp, Homo sapiens
ctgggtctgcagcagagcaggcgcctggttccaccgtttccagggcaactagctgtcaggcgctgtgaggctctgcagacacagtccctctcgggtgagtgagggggcttcaggcagccttc

SEQ ID NO: 164540 - DNA, 122 bp, Homo sapiens
cggcgtgccagcgcgagaccctttgccacccgccccccccaccgcccttttgcgcctgcgcgagacccccagctaccgcacggttgtccagaggacagaagatccgtcttctcattgggcag

SEQ ID NO: 164541 - DNA, 122 bp, Homo sapiens
ttcctttcctttagacattcctgactcatagtaacctgaaggtagaaaatgttggtagaacgtgtgcatatcaacaagtaaaattaaaatggttgggttttatgaagcatctccatttctga

SEQ ID NO: 164542 - DNA, 122 bp, Homo sapiens
ttcctttggaatgtatgagacaggggcactcgagtgacctcagaatgtggttgtgagtctcggtcaggaagaacaaagcacactaatctccctggacggtgggtattctgggcaggtgtctc

SEQ ID NO: 164543 - DNA, 122 bp, Homo sapiens
gggactcttcaacgaggggcgctagcctggcccgactgggcgagtccccgcgtccctgcccgttccgtcgctcagttccacgacacgctcccctgccgccccgcctgttcgcgggtgggtgg

SEQ ID NO: 164544 - DNA, 122 bp, Homo sapiens
tactttgtactccagcaccattggccgatcaatatttaatgcttggagattctgactctgcgggagtcatgtcaggggaccttgggagccaatctgcttgagcttctgagtgataattattc

SEQ ID NO: 164545 - DNA, 122 bp, Homo sapiens
ttagctctttcaaccttccacgaccggcctctccgctgccctatcagcaaatcatcgggccggtgcctgccagtccgggccaatcccgaacacatttactttgagcgggaaaagctcagaag

SEQ ID NO: 164546 - DNA, 122 bp, Homo sapiens
ctcagcagcagcagcgtcacccagtggctataaggccattgagcttcaggaggtgcctagcgcccctgctggtacctctctccccactcctgagaaagagcaaatatctccaaaaacaggag

SEQ ID NO: 164547 - DNA, 122 bp, Homo sapiens
ttcaagaccagccttagcaaaatagcaagaccccaactcttaaaataattgctggccaggcgtggtggttcacgcctgtaatcccagcacattgggaggccgaggcaggcagatcacttgag

SEQ ID NO: 164548 - DNA, 122 bp, Homo sapiens
ccgtaacttaaactacacttcccagaagcctcctcagccagggacttccgttgtcgtcagcggaagcggtgacagatcatcccaggccacacagaggccggcttggtcactatggaggagat

SEQ ID NO: 164549 - DNA, 122 bp, Homo sapiens
gtcgcggatacttctcacagcgaagcagcagctcccagaagccgtaaagctatcccagagcgaggcaccatacgtaaatcttccgcgtcgctacgtgacgtcagtgcgagcgaccccgggcc

SEQ ID NO: 164550 - DNA, 122 bp, Homo sapiens
aaaacaagctctgtatgagaactaggagtctccagggattcgtgtctgagttcctctctgcgaaggagcttgctggcactggtctgtccgaccccggggtttacagagactcaggttcccag

SEQ ID NO: 164551 - DNA, 122 bp, Homo sapiens
cacactccgtcgcatgcctgcaaacacgtgtgtgtgttgcccatatgtgggagtgagggtcgcccgggggccctgccaggccgggtcatggggcttctagatctttcggaacggtatcctgc

SEQ ID NO: 164552 - DNA, 122 bp, Homo sapiens
agtgttgacattacctgctgcacgtgctccatcttgcatctctcagctatagctttggatcggtatcgagcaatcacagatgctgttgagtatgccaggaaaaggactccaaagcatgctgg

SEQ ID NO: 164553 - DNA, 122 bp, Homo sapiens
caattcacagctgggctacccaggggaagatcaacccttattctgtacaggttggcaggccggatattattggcaagtgaatgtcctcctaaaatatagatggtgtcatttttggcaataga

SEQ ID NO: 164554 - DNA, 122 bp, Homo sapiens
agtcccagacgcccaggggtcggtcgggcaagggaatgggctggttagtggccaaggagccggggcccaggagaggcgcggggggtagatgggtggtaagactgggatgtggagaggagcca

SEQ ID NO: 164555 - DNA, 122 bp, Homo sapiens
agcgtgatttgtgaggctgagccccaacagtccaaagaagcaaatgggatgccacctccgcggggctcgctcctcgcgaggtgctcaccccgtatctgccatgcaaaacgagggagcgttag

SEQ ID NO: 164556 - DNA, 122 bp, Homo sapiens
catgacatacctatcggcagagcccggaaatcaacgcatcacgtacctatcggcagagcccggaaatcaacgcatcacgtacctatcggcaaagcggtgtctgtgctgatgccagcaccaat

SEQ ID NO: 164557 - DNA, 122 bp, Homo sapiens
ccccactgcgaagagagtgggcaaagtcatcggagagcagactctctccagccctctctgcggctcggatccacttgacctcgcccggcgctggtcgcctccagctgctccgccttcggctt

SEQ ID NO: 164558 - DNA, 122 bp, Homo sapiens
ggaatcagtcaaatttccttatgttttccctgccctgtggcccactgtctcccatcctctcggctgtgaggccagatgggcaccacggaacatggtggattctgacctgagagaggtgataa

SEQ ID NO: 164559 - DNA, 122 bp, Homo sapiens
ggtgatccacctgccttggcctcccaaagtgctggaattacaggggtgagccaccgcacccggcataggatagatttttatattgtttatggaggttactattctagccattttatgacaat

SEQ ID NO: 164560 - DNA, 122 bp, Homo sapiens
tctttcactctacttttggatttctatctatatatctgctgcccaagccattaaattctacgaggtctcaaagagaaaactcacctttgcttccactggtctgggcactgtctgtggctgtt

SEQ ID NO: 164561 - DNA, 122 bp, Homo sapiens
tttcttttgatctgcttctcttcctgttttctccccatatattcagcataggtttggatccgatagctttctgcatatttgctggtattgacagctacaaggaaaagaaaaaaaaataaaat

SEQ ID NO: 164562 - DNA, 122 bp, Homo sapiens
ttagggctcctgttggaaaccgaccctatctggggagcctgtctgggccactcccattgccggagaactctcctggggcggggagatggcccaggtttgtggggcttgaaagcttacacagt

SEQ ID NO: 164563 - DNA, 122 bp, Homo sapiens
ggctgcgacggcgggtggggcccagtgccatgcggctggaggacgaggcggccgcccaggcgctgatcggtggccgggacctagtggtcattggcttcttccaggtgagccactgggcatgg

SEQ ID NO: 164564 - DNA, 122 bp, Homo sapiens
gcgtggtacacgcctatagtcccagccactccggaggctgaggtgggagaattgcttgaacgctggaagcggaagttacagtgagccaagatcgtgagatcacgagatcacaccactgcact

SEQ ID NO: 164565 - DNA, 122 bp, Homo sapiens
gtcctcggacttgagccatggccttccccacgatccctggcggcagtatcccagctcctccggctgggcggcgagccaaaactcatagtttcgctcctctgtactccactgaagggaggggg

SEQ ID NO: 164566 - DNA, 122 bp, Homo sapiens
cattcctgaccctctggccctttctgagcaccagcatcctggtgctccgagaaactgtctcgtgcccttggaaactgtgataaacagttcctaggcccacaacagtctcccctgtggtttcc

SEQ ID NO: 164567 - DNA, 122 bp, Homo sapiens
caagatagaaaggggattcactgcagttagtcagtagacacacacaaacccaagtagtaacgggatacaatataataatgaattagttgaatgctttgataaattagtttgacatgttactt

SEQ ID NO: 164568 - DNA, 122 bp, Homo sapiens
tagagtccagatgcggagggaaagacgtgatctccgaattccgtgatgacaggtgggcagcggcagctggaattacacaccagtcccacagctgtggttttaagcactaatattttacaggt

SEQ ID NO: 164569 - DNA, 122 bp, Homo sapiens
ataattgttgaatagattaatgaataaatatttcagcaagaaacctaactcatggggaaacgtgtgattagaaattgaggttagtaattgaagctcagtgtgcactaagtaaaacatcccaa

SEQ ID NO: 164570 - DNA, 122 bp, Homo sapiens
gctctggtctatgtttaagaggatttgatataatcaaaatccagagtgcaacatgaggtccggtactaaggagcgtatcgttgtctgagaaacagttgcgtctctctgtttcctggggcaga

SEQ ID NO: 164571 - DNA, 122 bp, Homo sapiens
tttggccaaccagtcccttaacgtgtctggggcatgtcgctgtgtccgtctgcgtctgtccgtgtgtccccgtggtgtgactgtctgcgtggttgtttctctgtgtggccccgtgggctgct

SEQ ID NO: 164572 - DNA, 122 bp, Homo sapiens
cgccttgcccttcatcctcaaagactcattggtcccattcccctcgggccccgcccttcgcgtgcttgggccatgcccgtccgaccgcgctgcttccgccttgcagcaccccctcaacccct

SEQ ID NO: 164573 - DNA, 122 bp, Homo sapiens
cgtcatgctcaaatctgtccgtgaaaatggccagagtgactctttctaggaggaagtggacgtctcacaagatattacatgcaggaggcttggcggtgcccacacatcgtggctgcgcccgc

SEQ ID NO: 164574 - DNA, 122 bp, Homo sapiens
tgtgacctggtcagaacagctggtagcccatgtgcttccacccccaccttctctccgttccggactttcaggtcacgacacagggaggaaaagaaggctatgctgggagtggagcctcagag

SEQ ID NO: 164575 - DNA, 122 bp, Homo sapiens
gtgagaggagacagggaagtgcctggctgaggacaacctaaaaagaggtgccctgggtcccggtgctcaaacgtgagaccacgttcatgtgcaggaaagtgtccctggtcatgggtgcattt

SEQ ID NO: 164576 - DNA, 122 bp, Homo sapiens
caggtttgagcaaccactgcaaccagtcccctccctgccaccttctctgggcctcatccacggtgcgctaggcctgcgcacatccgtgcgtgtgcatgtgtcacccccacctcaggtcctcc

SEQ ID NO: 164577 - DNA, 122 bp, Homo sapiens
cttccctcagagcatggtggtgggggtggggagtgggcacccaaaggccagggacacagtcgaggccacacacctgtaacctggatgccaggttccttgggtggccccaagaccaccaacct

SEQ ID NO: 164578 - DNA, 122 bp, Homo sapiens
aagtccaaggttgtactactcaccaaatgacagccaataagttaagagacaaggtgttggcgcaaagaaagcaaccttatttggagagccagcaacctgagaagatggtggactagtaatgt

SEQ ID NO: 164579 - DNA, 122 bp, Homo sapiens
atcaggaagtcaaagccacacagccgagaagcggcagctggcatctcggaggccgtcacgcgctgtcactccgcgcccttcggagttgcagctaaaataccaacttcaacccggggccggcc

SEQ ID NO: 164580 - DNA, 122 bp, Homo sapiens
ggtttccctccctgtttacccagcagtattttttaaaacagaaatcagcgtgtgggtaaccgcagctgtgagttactagctctggctgtgagggctggggtggggggagtctcttcagagcc

SEQ ID NO: 164581 - DNA, 122 bp, Homo sapiens
tggcgcttacccccacccccgggtccgctcctggctcgcgctcagcctccccagactattcgcaaattgaggatcccggacacagagtgcagagaccccggcaagcctactgaaagccagcc

SEQ ID NO: 164582 - DNA, 122 bp, Homo sapiens
cctccgtccttggacgggatgggcccttgctgggctattggcgcccccagggctgcagctcgcccggcctccgcagtgccaggtcgacccccagcgcctacacccacgcgggttcagacctg

SEQ ID NO: 164583 - DNA, 122 bp, Homo sapiens
atttcatcagaaaagttgtccagggataggttttatatcccaggggccagcaagacatgccggttagcacaccctgtttcctcactttggttgagagtgccaaatgaatcatgttgttagca

SEQ ID NO: 164584 - DNA, 122 bp, Homo sapiens
tcacttttgaataacaatggcctcctttgaatctttaaggtaggaaaccacttttactttcgttatgtttaatcagtctagaaacttccttgcattgaagttgtatttgtcttgttttcttt

SEQ ID NO: 164585 - DNA, 122 bp, Homo sapiens
gcttcttcccgaagagtttgctgaaggtgccctgcaccgtctgcttctttttcatgctgccgcagcccgcgcgggcgccagggaaggaccttccctccctcgccctgccctgccccggactg

SEQ ID NO: 164586 - DNA, 122 bp, Homo sapiens
tgggtagaagggcgccacggtcaggaacctgaggatgtcggtggtctcaggtaccagggacgcgggtggcaagttggacctctgcgtggcagaccgggcggcagtgtgactctgaacatctc

SEQ ID NO: 164587 - DNA, 122 bp, Homo sapiens
aatgtcgcacggccgggccccgctgtgagctagctctacaatcttctgccgggtggagtccggcagtggccgcccgttgacaaagacaccaccgagctgattcactccgctgtgacctgagg

SEQ ID NO: 164588 - DNA, 122 bp, Homo sapiens
atctgaatttttttatttttttgagacagtgtctcggtctgtcatcaggctggagtgtagcggcacgctctgctcactgcagcctcaacctcctgggctcaagtgagcctcctcttatcaga

SEQ ID NO: 164589 - DNA, 122 bp, Homo sapiens
gccgagacgctggactgggcccggggtccgccctgcgaggccgccgattggcggaggtgccgggtccgccaagccccccagcagaacgctcagtgtcaatccgggggtgagagggcggggcg

SEQ ID NO: 164590 - DNA, 122 bp, Homo sapiens
tgggaggtcacatcagtgtcccccacaggccaggaggggaaggcggagaggcggggatcccgcctgggtgcaaggggactggctcatacacgcacgcacacacgcacacgcttgcacgccag

SEQ ID NO: 164591 - DNA, 122 bp, Homo sapiens
ctgggtcggggtccatcggtgtctgggtcagcgtctgtcggggtctgggtcagggtccgacggggctgtgagctcaggttccagccgcccttacccactggttcccaacagagccgggggcc

SEQ ID NO: 164592 - DNA, 122 bp, Homo sapiens
tgggttaatgaggtttattttattgatccagtacatactgtttcagaggatgctatgtaccggcactgttctaagaactttaaaaatattaactgcatgacatagatattatcatcatccca

SEQ ID NO: 164593 - DNA, 122 bp, Homo sapiens
ggggaacttcgccacttgtttctcaggaggtgactgcgtcctgctaatgagtcaaggcagcgactttcctttgtccccatatttttctcttcctctctcttgggactctgctcaggggttac

SEQ ID NO: 164594 - DNA, 122 bp, Homo sapiens
tcaacgatcaggccccagagacagtacaggagggtcgcctctggaaactgccggctactacgcagatagctgtgaattagccaaatagccgcccggaccctgtacccgcaccagggcacagc

SEQ ID NO: 164595 - DNA, 122 bp, Homo sapiens
cacagccaggaagctgggtcctccttgatgaatgctggcggagagccatgcagcgcgcagcggagagcagttcagcatctctagtcccagctgagaatatggtcccattatctcccagctgc

SEQ ID NO: 164596 - DNA, 122 bp, Homo sapiens
aactagatgattgattttccaaatgtgttccctaaatgtgttccctggggaataagggcacgagaggctgcctattctatttcaaacaaatccccttcactacagtgtatttgatgagttgg

SEQ ID NO: 164597 - DNA, 122 bp, Homo sapiens
tcgcggctgcgcactttgcacttggcgcccagccctggcagatcgggacgcaaacacacacgcacccacggtttacaagaaagactcttcaaaggaaaactaaatggggggtggtcgttcta

SEQ ID NO: 164598 - DNA, 122 bp, Homo sapiens
cagccactggagcacctctctggacccacaaagtatgctcaggcccaacactgccctctgcgggagcctgcttggcctctccattgctgtgcaagcgatttcagcctggcccaaagagctcc

SEQ ID NO: 164599 - DNA, 122 bp, Homo sapiens
ccaggcttgccaggggctttccagtcgcagaccccgcgtgttcgcagactctgccgccggcgaaactacatttcccagcgggccgcgcgccctccttccggcaggtacccctcaaaacccgg

SEQ ID NO: 164600 - DNA, 122 bp, Homo sapiens
ttcaatttattgttccgctcagttgtccccacctcctgaagtctgaccaatcagaagcaccgccattttgacctttcaccaatggaaagacttgggactccctctgggttggactcaacgag

SEQ ID NO: 164601 - DNA, 122 bp, Homo sapiens
ataacaggatgtgtgactaaagctgttgacctacgaccagctaactcacctcagaacctacggagctgctgacgttacttctcattttctttctctttccccttcctctctttgtccttatt

SEQ ID NO: 164602 - DNA, 122 bp, Homo sapiens
atcggtgctaagtgcctcacccagagcatttaatctaatctgtaaaacaatcccaaaaatcgggttttattctctcacctattcataggagagaaaacaaagttaagtaacttaaccagggt

SEQ ID NO: 164603 - DNA, 122 bp, Homo sapiens
tttctgagcaacacttttttttttctttaaatctcaatctgttcttgtagtggatccttccgagttttgaagaaaattaaaactgatattttctttagggtagctgcctgcttgcttggata

SEQ ID NO: 164604 - DNA, 122 bp, Homo sapiens
actgcctctcactttccaatggcacagattacaaaagtaaagaacaaccaccaccaacatcggtaactccctgtattctcatttttctgtttaatctccacaacagccctatgagggtggct

SEQ ID NO: 164605 - DNA, 122 bp, Homo sapiens
gtattcctcgctcaacctgtttgatacgtataagggcaagtccttagagatccagaaacccgctggtgagagtcctgcaaagatgcttctgatggttgaaagctaggcatgcatggggcata

SEQ ID NO: 164606 - DNA, 122 bp, Homo sapiens
ctgtccggaggacccttcacccatgatcaaatgcattcatccattcatatgcaaagctcccgagcttcctttcaaggtttttgctcaaatgtcatgtgattcaaacactctcttcaggtttc

SEQ ID NO: 164607 - DNA, 122 bp, Homo sapiens
atatcatagaaagaagaccccagggctttccgagcagaatggcaaaggagccctgaagagcgagcggaaacgcgtgccaaagacctcagcgcagcccgtggagggggccgtcgaagaacggg

SEQ ID NO: 164608 - DNA, 122 bp, Homo sapiens
tggcccgcctccaagtctcacctctcacgaacacgtaggagctggcggccgtggtgccctcgatgcgtgccttgatgtacttgtagtagcagacgtagctgcctgtgtcgttggcatgtacc

SEQ ID NO: 164609 - DNA, 122 bp, Homo sapiens
aagggcttatctgggtatcaggcctggctgagtcctggatctgcctggactggctggcaccgcgcggggaggtctcagcctggcctctccctctcccagcctgtcgccatccccacgtcccc

SEQ ID NO: 164610 - DNA, 122 bp, Homo sapiens
ttgctctgcttttgcaaagcggctgagctgcgcaaagcaagcccaggcagtgtgagaagccgagtgaatcatggccgggcgggtggaggccggagaggctccaacccggtcaaacgctacgc

SEQ ID NO: 164611 - DNA, 122 bp, Homo sapiens
aatccaggacaggggttcttagaagagtcctctctggtaaacaataaacaagtgctgttccgtctgcctcgcggtgcccccacacctgcctggccacgtcacactggcagatgggacgcggg

SEQ ID NO: 164612 - DNA, 122 bp, Homo sapiens
gaaaaggaatgattacatatggcctatacatacaggatattgtctcgcctggtaatgaggcgctcacgaccattagattggtctttgttcagcttatccaaactccttgacatacgccacct

SEQ ID NO: 164613 - DNA, 122 bp, Homo sapiens
gccggaagctttcggataacaacttccgctcgggaagtttgtaaaagtctgggctaccggcgcggcgtagtggatgcagcatcctagtggaggacgcccctgtggtgagtgcgcccgtgtcc

SEQ ID NO: 164614 - DNA, 122 bp, Homo sapiens
agttaagggcctggcgtctccctccctgaagacgtggtcccagccgggtgtcctgacgctcggggttcaggtaagaacccaagcgggcatttatcctttgggggcaggcacggccggtctgg

SEQ ID NO: 164615 - DNA, 122 bp, Homo sapiens
ggaacccacaggtcgccagcttacagcgtgggagctgtggaaggacacatggagcagaggcggctgaggaggtgaaaggctgagaggaggctgcagtgaaacacctgaggaaggctgggcag

SEQ ID NO: 164616 - DNA, 122 bp, Homo sapiens
tgctcactttagggggctcaattctccactctgctcagtccctacagggaaagctcaggtcgggtctttctgagggtccaccagccatcctaccctctccctgcctggcacatgcctgccag

SEQ ID NO: 164617 - DNA, 122 bp, Homo sapiens
ctgatctgcatctcaacagctggctctggagcaagcaaagggagactaagggaaacagagcggagcagggcaaagaaagccgactgaaagtgagaaatgcaggaaatgtttcccatctaggc

SEQ ID NO: 164618 - DNA, 122 bp, Homo sapiens
gccccgggcgttgcccagtgaggggcagtgggcaagggagctcgtagaatcctgggtcagcggggtggggcgctgggtaagtggacagggtggtatcttgactgaggacgaaggggcagaag

SEQ ID NO: 164619 - DNA, 122 bp, Homo sapiens
gaggcggagtgcaaatgatatgaacaacgtcactagttttctcctaaatcttatgagccccgcctcccacagtagtttcacttctcagtttaatccggtctgagttaacttcctgacccagg

SEQ ID NO: 164620 - DNA, 122 bp, Homo sapiens
ggggcaccctctgtttcgtcctgacaaagtggactgcccatggttgacagcctgcgtgtccggggtcgcctgggggtgagggtgggaaggtgtgggagggacggaggcactgccttctgctc

SEQ ID NO: 164621 - DNA, 122 bp, Homo sapiens
aaaagcctggtgagtaactttatctgtcatggcccatttcaatgccctcaatagtaaaaccggcgaatgtggagacccatccttaatgaagagaccagtttggtcattcttactattttcca

SEQ ID NO: 164622 - DNA, 122 bp, Homo sapiens
ttcgccctcaactgagggaaatagcaacttttgggatggtcagcgctggtcccaggaatacgtttcctggcagggtggggagggcgtgaatggagactctcttttgttttaaatgatgcagg

SEQ ID NO: 164623 - DNA, 122 bp, Homo sapiens
ggggatgcccttggggcctgagacccgggcggtttccgaagcgaagtagttacccagaaccgctccctaccttctccccgcctccctgtctttctgcccctctgtcccctgcagctgctcgg

SEQ ID NO: 164624 - DNA, 122 bp, Homo sapiens
gcgcggccgggctgagagtgggggcggggcggaaggaggcgagagggaaaaggccatccgcgcgactgcccgattaaaaacagtcctgatcgtcttccctgcggcatgccgatgccctcagc

SEQ ID NO: 164625 - DNA, 122 bp, Homo sapiens
cctttttcagaacgcctacttcgggtcaagcttgtgttagggaatgccagagaagggcaccgccttgaacaggacatcatccatccatccctaaaaggacagtttcactcatttattcaccg

SEQ ID NO: 164626 - DNA, 122 bp, Homo sapiens
acaaaggaagctcctcagcctccagtcgccttttcgtgcatgcacataggtcactgatctcgcctactgataagtttcccaggaaccccattaacagggaaaaatccacatggcctctcttg

SEQ ID NO: 164627 - DNA, 122 bp, Homo sapiens
ggagggggcaggcagccagaaggaggcaagaaccaaaaaaaaaaaaagaaaaaaaaattccgaagcgcccgcagcactgagcccgaaccggctcagtcccgccgtctctagaaagttctgca

SEQ ID NO: 164628 - DNA, 122 bp, Homo sapiens
ccccttccgctgccgctcccgcgtcgcctggactctcgctgccgccgtcgttgctgctctcgctgccactccccagggtgcctagcttcacgtccccatcaccagccgccatcactgcccgc

SEQ ID NO: 164629 - DNA, 122 bp, Homo sapiens
aacacaccatttaagggtttccagcagccagagaaggatgagttagctgcaacacacgtgcgtaacagaacagagctactggggggaatgacagcaacttgaatacgtataaatgttaggta

SEQ ID NO: 164630 - DNA, 122 bp, Homo sapiens
gggagaggcagaacacaatgagacatgggtctgagctaaagtttccccttaccggttttccgggctccttgtctctccatggctctccctgaccatgcgggctacctcagggaagccagctt

SEQ ID NO: 164631 - DNA, 122 bp, Homo sapiens
ccagcccggagcgaccccggcaccgcccagccagaaggggagaggggagactgaccatgacgatctccagcacttcattcttgctgatggtcccgttaccgtccacgtcgtagagggagaag

SEQ ID NO: 164632 - DNA, 122 bp, Homo sapiens
cgtgtgtacggactcggcggccccgatgtggagctgcatcgtgtgggaacttcactcgggcgccaacctgctcacctaccgcggcggccaggcgggaccccgcggcctggcgctgctcaatg

SEQ ID NO: 164633 - DNA, 122 bp, Homo sapiens
gtgtgtggatgaatcagtaggcaaaatacatttggggtggcccatcatacctgcacaagacgactttgatatcctagaagagaaagagaaacagcacagcctcagcacttggctgattccca

SEQ ID NO: 164634 - DNA, 122 bp, Homo sapiens
tggggatgagaagtgagcagagaacagggtgggccacgaagtccagcaggcagtgtgggccggcgggtggttggcagggtggtcctcacgcctcgcccctccctgtgccattacagaggttc

SEQ ID NO: 164635 - DNA, 122 bp, Homo sapiens
aggacacgcacctttccaggggcctctgtgtcccgcactgtgtgtgagtggaccgcagcgcgcagccacatgccctggctgccatgggccagaccgcctccacctcccccgcccgcctggcc

SEQ ID NO: 164636 - DNA, 122 bp, Homo sapiens
tatctctaaagtaaggagaggaaaaagaaaagtatgtgtcagaagtgggattcgaacccacgcctccattggagaccagaatccccaccgcggaggaagcttagcttgagtctggcgcctta

SEQ ID NO: 164637 - DNA, 122 bp, Homo sapiens
gtgaatggcagttccctccttctaggtgctcaggctgaaatcctagacgcccctctttctcgcttgctgcacatttcaatccaccagcaaatcctgttgtctctgctttaaaaatgtacgtg

SEQ ID NO: 164638 - DNA, 122 bp, Homo sapiens
gcccaaggaatcgaattccttccagtccttctaagcagtccagggaaaccaatttaaaagcgaacacaacaaaactaacagaccggcaaaatctatctttgaagcgccgcgggaggcacaat

SEQ ID NO: 164639 - DNA, 122 bp, Homo sapiens
gatgtagagcgccaggggcgcggtggtcagcagaatcaccaatggctgcccagagaagagcgcgtagagcaggcccccgatgctctgcccggctatggtcttctgcacgtctgtgggggtgc

SEQ ID NO: 164640 - DNA, 122 bp, Homo sapiens
aattatctttaaaatatttacatgtgtgtttaatttcccagagttttgccatctgttacacgctcggtactgctggagttcagcagctgtgggcatgaagaagcggttccctgggaccccgc

SEQ ID NO: 164641 - DNA, 122 bp, Homo sapiens
aacgaacgaatgaacggcgctgcagagccctctccaggcggaatgaaagtgcaaacccagcgtttcgggcggcagagtggcgggggccacctggcgcggccgcgcggccagggtccggtttc

SEQ ID NO: 164642 - DNA, 122 bp, Homo sapiens
cccccgcgcgttgccgggagacggcgcccaaccttcctctgcagcgcccctaccgacccgcgctccgcagctcctgagggctttcgagcccagatggtcatctgagacgagaggtggcggcg

SEQ ID NO: 164643 - DNA, 122 bp, Homo sapiens
gagtactgcgacgcagcccggagtcggccttgtaggggcgaaggtgcagggagatcgcggcgggcgcagtcttgagcgccggagcgcgtccctgcccttagcggggcttgccccagtcgcag

SEQ ID NO: 164644 - DNA, 122 bp, Homo sapiens
gctcccggaactccacctcccagaaggcagcgagaaccgcacatgtggctaatctttcagcggaaaaggtgtcgcgcacgcgcagagagcgcggctccggcgcagactcggcgcctctcctc

SEQ ID NO: 164645 - DNA, 122 bp, Homo sapiens
acctgcgcccagcatcccccagggagggcgtctctcataacctcagagaagcactgagcccgggcagccgcgccacctacagatgcaccagacgtggccagctggactcgtgtgtgtgagtg

SEQ ID NO: 164646 - DNA, 122 bp, Homo sapiens
ttctagcgtcaaggtagaagcccccagctggcgtctggggcagccctgagggaggtgggtcgtcgggttggcggatccggcttgggcccgccccgccagtgtcggcgccgggtgcgcaggga

SEQ ID NO: 164647 - DNA, 122 bp, Homo sapiens
cagcggggggctggggggtggcatttcgaagtccacgctcttgttgaagtcagtctctgccgtcaccttcttgggggactgactcaggagattgttggggggtggccacacaccctcatcca

SEQ ID NO: 164648 - DNA, 122 bp, Homo sapiens
ccttgtcaggggatgaaggtgaaagacagaacccgcggtgacacaggctcccctgccccgcggaggagtcaggccatcagaaaggcccctatgtcagccaggcgtggtggttcacacctgga

SEQ ID NO: 164649 - DNA, 122 bp, Homo sapiens
gtggaaggaggctggctgttaagctcttctctgctgcatacaatatacttgtgactgtaccgactgtcagatagcaggagcacatggctgctgctcattagcaagtctaataccaaatcgtc

SEQ ID NO: 164650 - DNA, 122 bp, Homo sapiens
aggacagacgagaccatggtgcatggtacaggttgaatcgtgtcccctccccgcaaaattcgtatattgaagtcctaacccccagcacctcagaatgtgaccgtgtgtggagacaggttctt

SEQ ID NO: 164651 - DNA, 122 bp, Homo sapiens
catggcagctgggaagggagccccgttgagcccatcggctgaaaacagatggcgacttagcgaacctgagctgggccggggctgcaagccagtgctgctcgagaagacgaaccgcctgggcc

SEQ ID NO: 164652 - DNA, 122 bp, Homo sapiens
cgaggccgacacctactggtgcatgagcaagctgctggatggcattcaggtgagcgcccgcgcccacgggacacagcccacgcccacagcccctgcggtgaagagagcctgaggccttaggc

SEQ ID NO: 164653 - DNA, 122 bp, Homo sapiens
catctcaggaagaccctcagtgtttactgaacccccattacacctccttgcagtaagaatcgatggtactgaatcactcaatgtacagaccaagccaggtctcacccacaaatcaggagcac

SEQ ID NO: 164654 - DNA, 122 bp, Homo sapiens
agagctgcttctgaggcagtaagaaaagcaagagtattgggggaggatgcagccaccaggcgctaggaacaaaaaacaagtaagactccggccctgcccgcgagatgagggtggtggagtga

SEQ ID NO: 164655 - DNA, 122 bp, Homo sapiens
ctgcggacgccattttcttctgcacttctgtctggagaggtctgtagccactgagggccccggtcggggccgctttgcaggtccctagtcaggaccgagcaggggagtaggataggaatccc

SEQ ID NO: 164656 - DNA, 122 bp, Homo sapiens
ccctcggccccaggcggcgtcacctgcgatccctgaagccgttaccagttgcgccacctacggttggtacaggaaggggcccccactacctctgcccccaggccgacccctgcaaagccccc

SEQ ID NO: 164657 - DNA, 122 bp, Homo sapiens
gcaggccctgggggagaatcagagcccacaggttctggagggaccctggcccacacaccccggcgctcactgccctcccatcacggcaagaagatgcgcatggctcgatgtggacactgtcg

SEQ ID NO: 164658 - DNA, 122 bp, Homo sapiens
gagagtctgcaaaatgcaaacgccttattccctgtcctgcgtgtgtgttcccagtgtgcacgtgagaccctgccttcagtgcagagggagaggggagggaatgggagaggggaacctatttc

SEQ ID NO: 164659 - DNA, 122 bp, Homo sapiens
gtatctctctccaccccgggccgcgctccgggagggaaaagggactgcagaccccctgtccgtgctccctgctgagacgccagccttcttctggaggccccttgtttcgcgtccctacccta

SEQ ID NO: 164660 - DNA, 122 bp, Homo sapiens
cttctcgggattaacctgctattatgtcccggagcccttccctgcaatgggcttcctcagcgacctgtcagcccggctggactgcaacccgcgtccggcgcccctcccgggccaccgccccg

SEQ ID NO: 164661 - DNA, 122 bp, Homo sapiens
aactcagtgagatcagggattttcctttttctactttgttatagccagagtttagaacaacgcttcacacaatatgcattcaataaatatgtatcgaataaatacatgaaacaacaaagcag

SEQ ID NO: 164662 - DNA, 122 bp, Homo sapiens
cacctgtaatcccagcactctgggaggccaaggcgggctgatcacttgagctcaggtgttcgagaccagcctggccaacatggtgagcctgcgtcacctggcttctggcacacagctcggcc

SEQ ID NO: 164663 - DNA, 122 bp, Homo sapiens
ggaagtgcatgtctgtgttctggctccgattgggaaaagctgcttaaccactgtaagttacgggttggataagtgacatatacgactggtgtcaattggcaaccaggcttcacagtttcatg

SEQ ID NO: 164664 - DNA, 122 bp, Homo sapiens
cattggacaactcgttgtgccaagccttcgccttcttcatgtccttctttgggctctcctcgacactgcaactcctggccatggcactggagtgctggctctccctagggcaccctttcttc

SEQ ID NO: 164665 - DNA, 122 bp, Homo sapiens
gcgtggatcttcaggtgctcggccaggttggagctctggctgaaggccttgccacagtcccggcaggcgtgcggccgcgcgcccgtgtgcacgcgccggtgctccaggaaattggagttcca

SEQ ID NO: 164666 - DNA, 122 bp, Homo sapiens
atttaagggaaggaaagccatcggggagggggggagaggcaggtgggggaagagcaaatgcgaggatggtcccggggtgctctcggcaccaactgcagtgccctcgcccagccgccgggccc

SEQ ID NO: 164667 - DNA, 122 bp, Homo sapiens
ggggggccggtcctaggccaagttatcgtccagtcacctgcaggggtcactgtttggtcccgttgtcgtgccatcctctgccctggcttgccctcttctccgcatctgtgggccgcgcggta

SEQ ID NO: 164668 - DNA, 122 bp, Homo sapiens
cgcgggcgacattgtccttgttccggacgtgccagctcttcttgggcaagatattcatggcgtcgtagctgtccagggactggcacgcccgcctctttgcacttccgattggcgagaggatg

SEQ ID NO: 164669 - DNA, 122 bp, Homo sapiens
ctcagaatgagcggtacccaccctattgtgggggtggtggcttcttgctgtcccgcttcacggccgctgccctgcgccgtgctgcccatgtcttggacatcttccccattgatgatgtcttc

SEQ ID NO: 164670 - DNA, 122 bp, Homo sapiens
aggaagatgaacacactgtcacttcatctccccagactgtgcccttcaccccagcccctacggaaagatttggggagaaggatctccgagccccagccccccacttcgctcccagacctccc

SEQ ID NO: 164671 - DNA, 122 bp, Homo sapiens
agatattagaaattatatcacaccccttgcgatatgtggagtaatatcaccctctccccccggatattatggaccatatcacagtggggtggacaccgctgcgatgtgggaaataatattat

SEQ ID NO: 164672 - DNA, 122 bp, Homo sapiens
gacccttccaccttacccctccaccaaggagctgggactacaggtgtgtgccatcatgcccggctaattttttctagagacggggtctagccatgttccccagaatggcccttttcctgttt

SEQ ID NO: 164673 - DNA, 122 bp, Homo sapiens
gtctgggctccagccagcagccatggtgtgtgtgacctggggagtgagtgtcagaggtcccggggtagacgggagtatttcatgagtgggcagcgggagagggacctgcggaggctgcctgc

SEQ ID NO: 164674 - DNA, 122 bp, Homo sapiens
ctcagaacgggggccagggaaaagaatcccgaagcagagtcttctcagaaccggggcgcgcgccagaatctccaagattctcctggatagagagggtcgaagccacaagacgaggcagaaag

SEQ ID NO: 164675 - DNA, 122 bp, Homo sapiens
gaagaggagatgaagggaagtgaaaggcggaatcaaaagtggggagggtctttgcggggccgcagtctttggaattgcgggcgataaatcaactaagtctctttaatattgtctttcagaag

SEQ ID NO: 164676 - DNA, 122 bp, Homo sapiens
taccttcaacagctaacattcaaactcgacagcagcagccacacctgagaccagcagaagcgctgaactcccatacatactaagcctctagctaagtctctctgaaaatttcagcctcatct

SEQ ID NO: 164677 - DNA, 122 bp, Homo sapiens
gcggaccaggtgctcccggatgcaacccaagaacccggaacgcgcctggcacacaggaggcgctcagctcgtgttggggaattcaggcagggaagaaagcatggataggcacgaggtctccc

SEQ ID NO: 164678 - DNA, 122 bp, Homo sapiens
gccgccagcgccgctgcagtgattcctcgtctccatctagcgaggctattgtgtattgggcgcttaattatttattcaccctggaggccgaggattcccacttccatggggttttggccctt

SEQ ID NO: 164679 - DNA, 122 bp, Homo sapiens
atccccttatgctgtattttctaccactgatagcaaactcgtaactgcatgggtaactaacgtgggtaaaagttatggtttcactaggccacatcccctgcctgcttgcagaccatgtgtgt

SEQ ID NO: 164680 - DNA, 122 bp, Homo sapiens
atttcaagtatgaaagatctaggctgttctcatattagatggaaacttaaaacacctgaacgttagctagtaagaacagtttcctgtaatttagtatttactggaagcattgtgtgccatgc

SEQ ID NO: 164681 - DNA, 122 bp, Homo sapiens
gtcagatatctgctcaaatatgacattttcagccaggcgtggtgggtcatgcctgtaatccgagcactttgggaggccgaggcgggtggatcacctgaggtcaggagtttgagaccagcctg

SEQ ID NO: 164682 - DNA, 122 bp, Homo sapiens
cataacataaaatttaccatcttaaccattttttagtgtattcttcagtggtattaactgcgttcctattgtgtaaccattgccaccatccattgaactcttttcatcctgcaaaactgaaa

SEQ ID NO: 164683 - DNA, 122 bp, Homo sapiens
acctgcagtgttggcttctgactggaggacaatgacccagctgatccttctgacgtcttacgttcacagagaacagcagccaacacatcctgtggctcaaaagctgtagcagcattttttat

SEQ ID NO: 164684 - DNA, 122 bp, Homo sapiens
agtgagaacatttcgccagattgtggctctttaggcgcggcacacacgtggtttttgatccgtctcatcaaaagacttggaatgtccatcgcggtgcggcagaaggtggtggttatacagct

SEQ ID NO: 164685 - DNA, 122 bp, Homo sapiens
gcggccccggccgcctccgcgagggcaccatggaggtgaatgcaggtaagaaccggactgcggcgggtgggggatggccggagggagcgctcagagcccgcggggcactttggggggcggcg

SEQ ID NO: 164686 - DNA, 122 bp, Homo sapiens
acatactaaacaatttactatgtttattttctaggtttgtcctctcacttttagaagatacgttccatagggcagggatttgttttgttcactgatgtatcatctcaagcacctagaatagt

SEQ ID NO: 164687 - DNA, 122 bp, Homo sapiens
tctcctgcacgctctggtaggcactgaggttggtggtgaaacccagctgggagatggaggcgcccttgtcccgcagcactcggtactcctcccagcagtagtagatgccgtatgccagcacg

SEQ ID NO: 164688 - DNA, 122 bp, Homo sapiens
gcttcacaggcttgaagtcattcaacccctgcgctctgtgctttcacgcccttgcacttgcggtccctcggcctggaatgctggtctgtttaagccctggaggcagctcctgtgctgtctca

SEQ ID NO: 164689 - DNA, 122 bp, Homo sapiens
aaccaggaacagtttgtggatctgtgcatcctgctaggcagtgactactgtgagagtatccggggtattgggcccaagcgggctgtggacctcatccagaagcacaagagcatcgaggagat

SEQ ID NO: 164690 - DNA, 122 bp, Homo sapiens
aactccttgctctattctcttatcccgtacttggcagaggatcccaaaaccgctcgaacacggatgcactggtttcctgcaaagctttgtcctgggttcggtcattctccatcaattattta

SEQ ID NO: 164691 - DNA, 122 bp, Homo sapiens
tctccagccctgagctctctgcggcctaatgtggacgggcaagcgttgccatgacagcgccgcgggtggggatgcgggaggctgagcgcaccggccagctagcccctttgtgcggcgggggc

SEQ ID NO: 164692 - DNA, 122 bp, Homo sapiens
catgtgtgaattttgtttctctgtgactgcttgtcagccatagggatagggcgtgcggttcgattcagggcttgactggccctgggagcacgaggctgagctctccttctctggattcattc

SEQ ID NO: 164693 - DNA, 122 bp, Homo sapiens
gggacctgcagcccgccatgcctgagcctccccccaccctccgtgggctcctgtgcagcccgagcctccctgacgcgcaccgccccctgctccacggtacccagtcccatcaaccacccaag

SEQ ID NO: 164694 - DNA, 122 bp, Homo sapiens
cgtcttcgctccagcacttccagagtttcctgcaggcgcctccgtcaccaggcggccttgcgtccactctgcacactggaagtgggttcggccctgaggccccgcaggagggccgctcaccc

SEQ ID NO: 164695 - DNA, 122 bp, Homo sapiens
ttgagagagtgactgtttctcagtttcctgtcatgcaaggtgtattcccctcgctctcctcgtgccaatattctgcatcaggctgcaggatctcagacaggacatgagcaggggtgcagctg

SEQ ID NO: 164696 - DNA, 122 bp, Homo sapiens
ggccaggggacgcacacccggatacgtgttaccatcggctacggccccatggccaggggacgcacatgcagatacatgctaccatcaggtacagccccatggccaggggacacccacccaga

SEQ ID NO: 164697 - DNA, 122 bp, Homo sapiens
aacatggtgaaaccctgtctccacaaaaaatacaaaaaaatagctgggcgtggtggcgggcgcctgtaatcccagctactcgggaggctgaggcaggagaatcacttgaacctgggaggtgg

SEQ ID NO: 164698 - DNA, 122 bp, Homo sapiens
ttttttctactccatggtgagctatggcaggcataacttttaatgatggaaacttttggccgggcgcagtggctcacacctataatcgctcctttgggaggcctaggcaggcggatcacctg

SEQ ID NO: 164699 - DNA, 122 bp, Homo sapiens
ggaaggcctcaggaagcttccaatcatggcagaaggagaaagcagagcagggaaatcacacgacaaaagcaggagcaagaaagagagaacatggcaggaaggtgctacacacttttaaatga

SEQ ID NO: 164700 - DNA, 122 bp, Homo sapiens
gcaacccacccccatggagggacactcaggtggtttccagtcacttgcacaacattgttgcgtgcgtgggccttccgggcccggaagaaactgcgttcgcgtgcaacattaaacaccccaca

SEQ ID NO: 164701 - DNA, 122 bp, Homo sapiens
aaccacgaaaatagggaatctttgttacaggctagttgtgagcgaatcctcctttgtccgcgtccggaggaaaatcaggtttattcttcagagagggcagcttggactttaggaagtgcctg

SEQ ID NO: 164702 - DNA, 122 bp, Homo sapiens
cttgaaacaacaggagccaagtccactgccaacccctggtctgcaggagaaaggctggcacggtgactggaacacgtgtccaccatgaacctgcctcccaggatcctgagcactgtgttccc

SEQ ID NO: 164703 - DNA, 122 bp, Homo sapiens
gtctctccccgggtttcaagaatttgagaaacacacctcttaaagatgaaatcagctgtgcgagagtgtgaggcccaggaaacctgggagtctgctgtataaatacagcaagtggctcacac

SEQ ID NO: 164704 - DNA, 122 bp, Homo sapiens
cacatgcctcagcaagtcccagagagggaggtgtcgagggggacccgctggctgttcagacggactcccagagccagtgagtgggtggggctggaacatgagttcatctatttcctgcccac

SEQ ID NO: 164705 - DNA, 122 bp, Homo sapiens
cagggcagcgaggaggagccacagggctgagctcggttgcggcgcagccccgccgcagtgcgcaaagccatattcgcgaagtctctgaggctgagccagtggcgtaaggggcgccgagcgct

SEQ ID NO: 164706 - DNA, 122 bp, Homo sapiens
tgatctttagaggctgcttaagttgacagtgacctagaatgaaacagccgggcctgactccgattccgggaattcttggtggactgctaagaactgctcccataactcacgtaaacatccca

SEQ ID NO: 164707 - DNA, 122 bp, Homo sapiens
actcagtgtccagaaaagcaaagacacaacccaatgtgaacacaggctaatgttcctggccgcagaggccgggaggagctgggagcacccaccggtagtggcgtgcgggagtggctgatcat

SEQ ID NO: 164708 - DNA, 122 bp, Homo sapiens
cgccggccagggaagtggaatggcctctgcaggttacagaccgcccttgggtcctgccgacgaggtgggcggatggggaaactgaggcggggggcgagcaactgctccaaagtggtcgaggc

SEQ ID NO: 164709 - DNA, 122 bp, Homo sapiens
gtggaggaggcagagttgtcaggggccaagcccggcgcgatctggccagttcttggggagcgcggacctgggactgcagagaggcgttttgaagagtgctgcgcgcacctgcctctcggaga

SEQ ID NO: 164710 - DNA, 122 bp, Homo sapiens
caaattgttgcccacctacctttttttttttcttgagacagggtctcactctgtcacccacgctggagtgcaatgaagtgatcaccatgctgggttaattttttattttgtgtagagatgct

SEQ ID NO: 164711 - DNA, 122 bp, Homo sapiens
ctgcctggccgcggcggggaagatgttcagcgtagagtcgctggagcgggcggagctgtgcgagagcctcctcacttgggtacgtgggggccgcgggccggcgggaagaccccctccccccg

SEQ ID NO: 164712 - DNA, 122 bp, Homo sapiens
gggcaggaagctcagcagctgggcaggggcctggacacagggctgcccgtgcagaagccacgtggtcctgctctcacattttccctgctgttcagagccagccaaagctgagggcatatgct

SEQ ID NO: 164713 - DNA, 122 bp, Homo sapiens
cgtacccgccgccaactctgttatttatggtgtgaccccctggaggtgccctcggcccaccggggctatttattgtttaatttatttgttgaggttatttcctctgagcagtctgcctctcc

SEQ ID NO: 164714 - DNA, 122 bp, Homo sapiens
agggaatctttgggaaatgacttctaaaattgccatcaccagctagagtactcatgaacacgctgactactgggaccctcaaccttctttctcaaggtggttctgctatacataactgtgcc

SEQ ID NO: 164715 - DNA, 122 bp, Homo sapiens
cgaggagaccaagagcttcctctggtggacgagcaacatgatggtgctgggcggctcctccgcctacacctgggtcaggggctgggagatgaagaagactccggaggagcccagccccaaag

SEQ ID NO: 164716 - DNA, 122 bp, Homo sapiens
gattacattgaataactaaagttttattatgggcacctcctctcaatcctgccagtgtctcgctataactgtttcatttggagagaatgccagaagtctgaacttgaggcttctcatgaatg

SEQ ID NO: 164717 - DNA, 122 bp, Homo sapiens
ttggtcccaaattccccgggccgcggctaattatcgggagcttgatgttgataagtaaagcgccggagtgcgggcgaagcatgtgtggggctccgggtccctgtctccgccgccgccgcccg

SEQ ID NO: 164718 - DNA, 122 bp, Homo sapiens
tgtgggaaataaaagtgtctttgctttaggatcttttgcagtcttttgttcatgtttattcgactaagtcaaagcaagagtggtcaggcatttggccagggtgcaagatctgggtgggatca

SEQ ID NO: 164719 - DNA, 122 bp, Homo sapiens
tctgtacagggggattgtggtgagtgagaatcaaggccaccttgtgtgttttctcactctcgaatgcaagtgggagagggaaaatgactcgggacgccattgtaacggttcctggaagctgg

SEQ ID NO: 164720 - DNA, 122 bp, Homo sapiens
gagccacgtcctcacacctgcccccttggcctgcaccccaggggaccggctgaacgagcgcgtggcctaccaccggctggccgccctgcaacaccgactgggccatggcgagctggcagagc

SEQ ID NO: 164721 - DNA, 122 bp, Homo sapiens
tgtggcctcagtgacccactgccccaagtggtgctttcagagaattgattcagccatctgcgcccaggccacgtgtcccgatctgggattagaaaatatgggtccattcctttctagaaagg

SEQ ID NO: 164722 - DNA, 122 bp, Homo sapiens
tctgccctttacataagaccctgcctgacccagcctcgaaggaaaacccatccccccacccgtgctggtgtttggagctcagaagtagccctcccagtgaccccctgccaggcctctggtga

SEQ ID NO: 164723 - DNA, 122 bp, Homo sapiens
cctcacagcggcgaggcagatggaacaataaatcacaggcgccgttgactgcctgcagtgcgctctccacagctgtcacttttttgtctctttggttttagctgacatggtttgaggtccac

SEQ ID NO: 164724 - DNA, 122 bp, Homo sapiens
cccgagcggggagcgcggtggcgcccggcgggagaagccgactggagcgcggccaccgctcggagctgcagtgcctcagtccggttctccggccagaagtccccattgttccgggtgcgatg

SEQ ID NO: 164725 - DNA, 122 bp, Homo sapiens
cggcccggagccgcccgggccccagggccccctcactggcgccgcggtcgccgccgcccgcgcctcacggaccccgccgccgccatcttgctccgaggcccccggaggccctcgggacgccg

SEQ ID NO: 164726 - DNA, 122 bp, Homo sapiens
tggccgcgaagccccatctccatcgggactgcttggtggagccgccttcttcaccgacgtcgctgttcctcggatctgggagccaaatgctttgctagagctggtaaaatggaaccaaatcg

SEQ ID NO: 164727 - DNA, 122 bp, Homo sapiens
gagacgggatggttcccaggaggccgacctggagcagggcctggggatgggcgggaagagcgctccaggcctagggaccgccctgccaatgaccctgcggaaagcaagccactatgaagtgt

SEQ ID NO: 164728 - DNA, 122 bp, Homo sapiens
cagccccttctcgtagttctctaaggcagatactgagcactgacactgaagagcctgaaacgaggggactccgcctcagcatgctttatagccgaggttaaggcacacgcagttcctggact

SEQ ID NO: 164729 - DNA, 122 bp, Homo sapiens
ggcgcactccctgtggggcttatcgtgccgtttgggagcggcacgggactcgatggaggacgggtggggctaatagtatcggcgcgccgagaggggctgaaacagctggacccgggatgggg

SEQ ID NO: 164730 - DNA, 122 bp, Homo sapiens
attgcctttttttttttaactcagtaaaattccctagaagagattcatctaagctatatacgtcaacacagataggttttattgctgagtagtattcagtggtatgtatgtaccacagttta

SEQ ID NO: 164731 - DNA, 122 bp, Homo sapiens
agcctgcagagtgagaagaggtaaggaaaggatgaatgggcaatggagccagcccaggaccgggagctggtcctctctaacagcgaccccgcccgctttagctgagcgacccggggcaggtt

SEQ ID NO: 164732 - DNA, 122 bp, Homo sapiens
gaggtctctttcccttcatgtgcagacctctgttcaggaagccgatgtgacaccagcccccgcagaaaccacagctaatgcatgctcaggaccccagtattccttttggaggggcaaggagt

SEQ ID NO: 164733 - DNA, 122 bp, Homo sapiens
cctcctccaaaccatccaggtcatcagagacaaggagagtctgagaaaccgtcccagcctcggggagcctgaagagacagaacgagtagatgccatgtggcttccaggaagagattgttggg

SEQ ID NO: 164734 - DNA, 122 bp, Homo sapiens
accaggagagaagtggttcttggcctgcggcagttttacctgtccttcccggggttgtggcgggggtggggggcagtgttttttgtcactactgagggatactgtgggccagggactactaa

SEQ ID NO: 164735 - DNA, 122 bp, Homo sapiens
cttttaatcacttagcattgttataggatttaaatgtaaaacaaaagggagaggcacaaacgggtgggatgcctaatctggacccagcccagtgattacattagctgggcactgattgggtt

SEQ ID NO: 164736 - DNA, 122 bp, Homo sapiens
acaccccctcctctggccgcagccgaagctcccccttccgctgcacatcctcgctcaccacgcccacggtgcagctgcccccatgggccaggtctatactcaccacccacgtgtgtctcccc

SEQ ID NO: 164737 - DNA, 122 bp, Homo sapiens
tggaagcaattaatttggaggaggaaagagtctaagtaagatgcctaacagatcttggtgcgttgacaaccttgaaacttgatgttaatggacaggtacaaagatgaagatgagctgaacag

SEQ ID NO: 164738 - DNA, 122 bp, Homo sapiens
agcagctatctggggaagaaggtgttaaacagagatgctaataaattgtttctgtatgagcgagcagaaaagtgaacataatattttagaacaaggattatttgggagacaaaaccattact

SEQ ID NO: 164739 - DNA, 122 bp, Homo sapiens
caggaagtctctcatctgggggtgttgggcagtgcttcagcaggacaattcctccgccagcgccccacctttaaacaggtgtgcctgctcaaggcttagttgatgttgccccatgcagttgc

SEQ ID NO: 164740 - DNA, 122 bp, Homo sapiens
gttcttggggagaaaggtgattctgcttccatgtgaagttttgatgtttaacaaattcagcgttgttgttgttattttcaaccagatctgattctctctgctgtaattattctggtttgatt

SEQ ID NO: 164741 - DNA, 122 bp, Homo sapiens
tgtggagatgtcggtgtgcctggggcgtggcctcctggagggagccagtgcggagatgcccgtgtgcctggggcggggcctcctggagggaaccagcgtggagatgcccatgtgcctggggc

SEQ ID NO: 164742 - DNA, 122 bp, Homo sapiens
tcctctgcatccaaacagttgctcaataaatacacagcttagcatggggaatgagccctccgtagctttcgagttacaagagcaccatcttctggcgaaatattttctttgtagggagaatg

SEQ ID NO: 164743 - DNA, 122 bp, Homo sapiens
caggcgcctgcactcctcagcccttgggcggtagataggaccgggtaccgcagagcagggcgcggtgcccgttggggaggctcggccgcgtgggagcccaccacgggaggctcaggcatggt

SEQ ID NO: 164744 - DNA, 122 bp, Homo sapiens
aagctgctggctccatgggcttgtcctgaaatagtaggctgttgtaagttttgtggcctccgaagttctgcatgcgaagtaccctgttgtccaggtcatgttaagtgtcctgctgtgtgctt

SEQ ID NO: 164745 - DNA, 122 bp, Homo sapiens
ggggacgcggacggggctccgggggcagctctgcccccagactggcttgagggaagccgtcggtctccttggggctcttctccctccgccgctgcacccctcctcgcttttttttttttttt

SEQ ID NO: 164746 - DNA, 122 bp, Homo sapiens
acagctcccagcgtgagcgatgaagacgacgggtgatttctgcatttccatctgaggtaccgggttcatctcactagggagtgccagacagtgggcgcaggtcagtgagtgcgcgcaacgtg

SEQ ID NO: 164747 - DNA, 122 bp, Homo sapiens
gcgtggccgtcaacggactccttcgggattacctgacccggcaccccccaccggtgcccgcggaggacccagctgccttctccatgctggcccccctagaccctctgggccacaactatggc

SEQ ID NO: 164748 - DNA, 122 bp, Homo sapiens
aatcctgccgggtcggagctgagctggggcgcagggctcgcagaagccaggtccgcggaccgcgcatcctccctccagcccacctccagtcctccccgcccccgcccgcccccactgtcccc

SEQ ID NO: 164749 - DNA, 122 bp, Homo sapiens
tagggtcccggaagggcgcgggtgtctcgaaggagccccacggggtgggaataagtagagcgcagcctggggtctcctactgggggtctcgagctgggactgcagttcctggagaaaggagg

SEQ ID NO: 164750 - DNA, 122 bp, Homo sapiens
gcctacggacccaggccaggtgggagtctgcactcttcaaggggcctgggctgctgctcacgggtattaaagaactccgcgttgttcatggctgaggcgatgcattaggaagatcctggacc

SEQ ID NO: 164751 - DNA, 122 bp, Homo sapiens
tgtgcatgcctgtgtgtgcgtggtgtgtgtgcatgagcgagtgtgtgactgggtttgccacgaagcagtcaccatctaaccttgagccaaagacctggaggtggtggtccgtgctgctgttt

SEQ ID NO: 164752 - DNA, 122 bp, Homo sapiens
tccgccacgatctcagctcctcggtgattggtccatttggagaggcctacgaaaaactcccggcctgagtccgggaggccgcggaggtttgagggcgggagtgagttagaaacaaggctcca

SEQ ID NO: 164753 - DNA, 122 bp, Homo sapiens
cttccattgtattcacctcagttggaaaagtaccagcaaggagactttggttactgtcctcgtgtgtactgtgagaaccagccaatgcttcccattggtgagtgttgaagaagggaaaggaa

SEQ ID NO: 164754 - DNA, 122 bp, Homo sapiens
gggcatgtctacttcatatggactcacaaatcctacatatgattgtaatcatctgaacgacgttctgaacatgttgagaatcttggcagttcaggaggttcaagaaggcattaggaaaagat

SEQ ID NO: 164755 - DNA, 122 bp, Homo sapiens
cccttttagtagtgccttggatgttgggttttggcatgagttgacccagaagaagctgaacgagtatcggctggatgaagctcccaaggacattaagggttattactacaatggtaggtgat

SEQ ID NO: 164756 - DNA, 122 bp, Homo sapiens
gtcaccaggtgaagcaccatgcaagtgggaccatgctccccctgatgacacccttctgctcgggcatgttcccgaagtctgtggccatgccagccagcacacaggtggagccttgacgcttg

SEQ ID NO: 164757 - DNA, 122 bp, Homo sapiens
attccgggagactcggcacctgggaggggtgagttcctctacaggcagagggagcttcaacgtcctcctaacttgggaagtaaggggaatacaatttcacagtagctgtgcagccttgggca

SEQ ID NO: 164758 - DNA, 122 bp, Homo sapiens
gagtggcctgcgcgctgaccctgcccttcatctgccggtgagtgggaagtgggtgccttgcggggttgggggaggagtgctgtgtttcccaggcccgttgcccaccttttgaaaggccctct

SEQ ID NO: 164759 - DNA, 122 bp, Homo sapiens
tataagggattatggcctccatttaaagaaatgctccacagcaaatgatggtgatgagagcggtggggagggaagcctcacactgccggagcctcaccgtccgctctgcacctttccagcta

SEQ ID NO: 164760 - DNA, 122 bp, Homo sapiens
tgtttctttcaactctttgcttccaaacatgtcctgacaaaggtgtgtcatggtttacagcgttactccacccttccaattatctgacacttgctggatttaaaaaaaaaatctgcctccag

SEQ ID NO: 164761 - DNA, 122 bp, Homo sapiens
gccgcggcgggctgtggtcacaggtgggcggctgcggcgagggagcggccgagcggagcccgggtcccggagactcctgccgtcacgcccggggctccgcgtagcagagatcgggagacgcg

SEQ ID NO: 164762 - DNA, 122 bp, Homo sapiens
ttttttgtttgtccactctttttttttttttcctttccttccttgcagggagaaggtcaccgtgatgtgatggaaaggcagaaatcaatggtggctggctcctcagtgatatgagtcaatcc

SEQ ID NO: 164763 - DNA, 122 bp, Homo sapiens
ttcctccacgtttgctgtgaccaacagggaggacagggcctgggactgttctcccagatccgccactccccatgtccccatgtccttcccccactaaatggccagagaggccctggacaacc

SEQ ID NO: 164764 - DNA, 122 bp, Homo sapiens
cctgatttctcttcagcctgacgctcttttcagttaacggcaaggcggtgcacccaagtccggtggtgtcctacctggtgacctcctacctgtgctgggacgccagcgacttgatgctgcac

SEQ ID NO: 164765 - DNA, 122 bp, Homo sapiens
tgcaggccagaaacgcttctacagtgaccaacaaaacaatgaaacacatatcaaaagggacgggactgggaaccgggaaacggtaaaaatgccaacgagaaagtccagcaaatctgaaacac

SEQ ID NO: 164766 - DNA, 122 bp, Homo sapiens
gagtcacaatgtttttggacttcagtctatccagtgagaagataggaaacacagcagcagcggctaggttcaggaatgtccagaaagtgaatagaattattaaagaaaaaggggcttggttg

SEQ ID NO: 164767 - DNA, 122 bp, Homo sapiens
tcgccgcccgcgccgggtccgcgcagcacgaagaagcgcttgtggccatgcttctgcttgcgcaggtagccgcacttgcgcacgctgtggttgttgttgttgttgttgttgttgaggttggg

SEQ ID NO: 164768 - DNA, 122 bp, Homo sapiens
tttacattgttccaggaaatcatccttccaataatctaattcatttttttctagaggctccggtgccaataaattacaaaaaatttaactggaatcatttttaaaccccaaaatcccacagg

SEQ ID NO: 164769 - DNA, 122 bp, Homo sapiens
aatgggtttgtaaaatgggttcaagttactcacgcctttctacacagtcatgatttatgacgtcagagatgaactggaatataggctcctaggaaatattctcccacaggaaagtacaggct

SEQ ID NO: 164770 - DNA, 122 bp, Homo sapiens
ggaggctttccagcaaagtcccctgagagccaacactcaattccaggagagcatgggaaccgtgcgtgggcccctctgccgtccgcgtgcgccctagcctgaataaccgcgcccacgcctcc

SEQ ID NO: 164771 - DNA, 122 bp, Homo sapiens
ttggcgtcaactacattcctgcatgagttcacataatcctgacagaaattctacaaggtgcggattgttttctgatttatcacagaggccttgaagcctagagaaggtaagtaatttgcact

SEQ ID NO: 164772 - DNA, 122 bp, Homo sapiens
gttgccaaaagaaagagttcattggactgcatggtagaaagcgacccaaaacgccacttccggaggtgatttgctcctctgtggtatttcccggtcgtctctgctttatgccctctctaccg

SEQ ID NO: 164773 - DNA, 122 bp, Homo sapiens
acaggagacaggatgaccctgcacacatttaccagaagacaacagggtgctctcctgacacgctgcttaagaacgtgtacagacacaagatgtaggaatgcagggccgaagatgttaaactc

SEQ ID NO: 164774 - DNA, 122 bp, Homo sapiens
cctgtgcgctgctgagctgagctggggcgcggcctcctgtctgcaccggcagcaccatgtcgctcacggtcgtcagcatggcgtgcgttggtgagtcctggaagggaatagagggagggaga

SEQ ID NO: 164775 - DNA, 122 bp, Homo sapiens
cagtggcttgggagggtcagacctgggatgggctggggaacaggtcccgccccagctcaccggctcactgccccccagctgcgcttgagccggtagatggggttagattgcagggcggacag

SEQ ID NO: 164776 - DNA, 122 bp, Homo sapiens
gtttcatctcctaggaaacggcgggggcagcaggcgggcctacggccggcccagagagggcgtggcctcgcgggaaatccccgccaattcccgcaggccccgccttccccggggcggggctt

SEQ ID NO: 164777 - DNA, 122 bp, Homo sapiens
agggaaaaaaaatttaaaagcccgtgctttccagaagagaatgaagcggcggcggcgtcccgggttccctgctcgggtctcgatgttacagctgcccccgccccgtctccccagcactcaca

SEQ ID NO: 164778 - DNA, 122 bp, Homo sapiens
gcccaaaacaaagggtgggtatggagcagtgtccctgatgggaaccattgttttctcatccgaaagtctttctcccacagcccaagaacaattgagacaaatacattcaaaggtcaacagaa

SEQ ID NO: 164779 - DNA, 122 bp, Homo sapiens
acccgttgccttagtttttgtagccacctttgaggcgccgggcttggtttccacggaggacgccttcttgttgagcttgaaggaacccgaggctccggtaccctttgtctgcaccaacgttc

SEQ ID NO: 164780 - DNA, 122 bp, Homo sapiens
ggccgcgctggcgatcgtctgggtcggatgaagcgagctggagtggaaactatgtgccctcgatgggtctcgtgggggcgccgatcgtccacactgagcgatgaacccgacggagttctaaa

SEQ ID NO: 164781 - DNA, 122 bp, Homo sapiens
aatcagcctttcaaccaggctgtaacgtgcacagtggaatatgaaagctgacaaccgagccggtggtcttgcagtggctcgggggagggaagcacgcactggcccaggtccccgtgggggct

SEQ ID NO: 164782 - DNA, 122 bp, Homo sapiens
cacagcccaggccggtgtagacagcacagcccaggccggtgtagacagcacggatgcagccgggctccagctgctcggccatgtccgtggcctgcagaattctaagaaaaacaatgacaggt

SEQ ID NO: 164783 - DNA, 122 bp, Homo sapiens
tttgacaaactgtgataaagtcttttcctgcgggccttctcagagacttgaatatgctcacgcatggaggaggcagctggaaaaagccacttttgaccacaggatccttattccaggaagct

SEQ ID NO: 164784 - DNA, 122 bp, Homo sapiens
gtatgaatttacaaacaggacctgaccattaagagcctgccaccaccaatgacccagatgcggtaaagcttgcaaaaccttgacgccctttgatgctcacagcaactgaggtggcaggcaga

SEQ ID NO: 164785 - DNA, 122 bp, Homo sapiens
aatgagaggtgttgctgggagaggaactgaatgatttagcacaatggtaaggcagcatatcgaccaccaacagcaggaggtggggggccgactgacagtggcttttatagcctctgcctcct

SEQ ID NO: 164786 - DNA, 122 bp, Homo sapiens
gtcagagggaattttatcctgcacatctgttgcttgacaaagaacttcccaatcctcctccgagccctccagtccctagcccagttcgcccgggcccgcccctagcaacaagatcgcgggga

SEQ ID NO: 164787 - DNA, 122 bp, Homo sapiens
cctgagtgaaagagatgtgctttcagcaccacccgctgtcccccctcttcctgcagcaggcgccacgaagcggcccctaacagatctattgaaaagcaattctctgtcctcttttcctctcc

SEQ ID NO: 164788 - DNA, 122 bp, Homo sapiens
cctactccagcttacactggaagttcatgtccagaaagtcccgcgcgctctggaatgcctcgctgtccatggtgccggccggagcgggcgcctgcatggtggggagggagggagctggctaa

SEQ ID NO: 164789 - DNA, 122 bp, Homo sapiens
ccaggaggactttcccccgcggattgtggagcatccttccgatgtcatcgtctctaagggcgagcccacgactctgaactgcaaggcggagggccggccaacgcccaccattgagtggtaca

SEQ ID NO: 164790 - DNA, 122 bp, Homo sapiens
cccacaagatggcggagggcaagtagcaagggggcggggtgtggccgccggaagcctagccgctgctcgggggggacctgcgggctcaggcccgggagctgcggaccgaggttggctcgatg

SEQ ID NO: 164791 - DNA, 122 bp, Homo sapiens
ttggctggttcaggctgtgctcaggggcccaggcgtggtttgtggccttggtgagcatagcgccctcccatcgttgcagcggggcccttcctgtggcctcctgcacccgtgcttgtgtctgc

SEQ ID NO: 164792 - DNA, 122 bp, Homo sapiens
accagtgtgcacacacaggcgcccgactgtgggcggggacgccggcccttccacgctgcccgtggggatgtaaggtgccccagtccctggaaagcagccaggccgtttcttccaccacagtg

SEQ ID NO: 164793 - DNA, 122 bp, Homo sapiens
cacatctcggaatcaatattctccccaacaaaaaatacatatgtgattatcccatggccacgtacctaatcctggggtagagaaaagtacagaggaggaagcgctccatcattggagcacag

SEQ ID NO: 164794 - DNA, 122 bp, Homo sapiens
gactcccgccgcccctccctgctatgtgaaccagcgtcggaggggttaaaatttctgtagcgcgcccccctccacccccacccctggctggtacaaggagggccggtttgtgccgtacctgt

SEQ ID NO: 164795 - DNA, 122 bp, Homo sapiens
ggggaagcaggcagagtgaggtaataaactagggtgctctttggcgtttcttgctgctctcgtgattgttctgtgtttgtgcaaggccgactcgagatgttgactcagagcttcctccccac

SEQ ID NO: 164796 - DNA, 122 bp, Homo sapiens
cgaaggcgcagcaggcctgcgcctgtcggaggacggcagatctggacgcgaccgcgcgggcgtgcctgggtcccgcttcctgcccatcgagggcgacttccttcgggctcagctgtgagctc

SEQ ID NO: 164797 - DNA, 122 bp, Homo sapiens
gtcagagtgagcccgcagaagggagagcctcttcatgacaggtccgtgaggtgattcggacgcacaagggtaggacacgggattctcttcagtgaaaactactttgtgaggccttaacgcca

SEQ ID NO: 164798 - DNA, 122 bp, Homo sapiens
caccctcggtgaatccttggtgatgattttggcaactttgggaataaatggcaattcccacgggcttggcactcccagattcccatctgtgatttcgtgtgtcccccagagccccttcatcc

SEQ ID NO: 164799 - DNA, 122 bp, Homo sapiens
cccactcgcgtctccgcccggacctgcgacggtcccgcccccttgacggggccgcgcgggcgagttccatgcctgtccagcgctgagagctgccggccaacttcgcggtctccacgtcgcgc

SEQ ID NO: 164800 - DNA, 122 bp, Homo sapiens
atctgtaatgaattctcgtgttcctcccacagtgggacctgaaccgccaaaccgcacctacgagcaaacggtaggcgctccataaatacttgttgatgtgggtgccatcgtgtagatgacgg

SEQ ID NO: 164801 - DNA, 122 bp, Homo sapiens
ctgctctcatgagttcagcgctcagtgggagccaggtcccaaaagtgaacttcagggtcacgcgagaagcacgtgtacgccccacaagggcgtgatttcggggatttgtctttttttttttt

SEQ ID NO: 164802 - DNA, 122 bp, Homo sapiens
tcaccctcttaaacccgcttcacagacctggctgaaactcacatccaggcgaggcgctcacgtgacccgttctaaacgcgtcatagggacacgtggttctagatacttctccccctcccact

SEQ ID NO: 164803 - DNA, 122 bp, Homo sapiens
cagcccacctcatagtcaagagacaccctcacctgccggggctgctccttcagggtcagccgtgtggggaaggagcccagagccgagacgaagccccaagccagcctcacagcccacacccc

SEQ ID NO: 164804 - DNA, 122 bp, Homo sapiens
tgcctccaaccccaacagccccctgtccaaccccatgcttcccggcatcgggcccccgcccggtggccccagaaacctgggccccacttccagccccatgcaccggcccatgctatcgcccc

SEQ ID NO: 164805 - DNA, 122 bp, Homo sapiens
acattacgctaagtaaaatatgccagtcacaaaaagacaaatactgtatggttccacttacgtaccgcaccgggagtcatcacaattcatggagacagaaggtacaatggaggttgccagcg

SEQ ID NO: 164806 - DNA, 122 bp, Homo sapiens
ggcgcccctcccagctgcccgtgtccctgcgccgctcagctcctgccgcagggctggccgcgccaagcgcgcgtcctacccaaagccaccagccccgcggggaagggactcgggctgtgggg

SEQ ID NO: 164807 - DNA, 122 bp, Homo sapiens
accggggggtgatattactccccgcatcgcggggggcgtccgcccccttgcgacgggaatcgtaatacccaggtggggagagggggttgatattactccccgatttttcctaggatcttttc

SEQ ID NO: 164808 - DNA, 122 bp, Homo sapiens
ggttggctctgcaacttgtgttggccacagaatgtagcagaagtgacaggatgccatttccgggtccaggccttaagtggcctagcatacttccacttattttcttgccactctatgcaact

SEQ ID NO: 164809 - DNA, 122 bp, Homo sapiens
caccagaagtcaggtagctgataggccatcctgtgggagaaggtcgtgatgggagaaggtcgtttgacccttatagcaaacaccatgtgaaggaggtatccacctttagtccttttgtgact

SEQ ID NO: 164810 - DNA, 122 bp, Homo sapiens
ggcgtttgttctcaccactctcgttcgccttaatctgagtggttgtgggtgagcggcggccggggcagcggcttcccctggacctggtgttcggtcctgaacccctgggcaggcctcccctt

SEQ ID NO: 164811 - DNA, 122 bp, Homo sapiens
ctcctgaataaagtctgctttactgagctttaataaggaccatgaatgatttttcttgaacgcccctcctcatgctttctcacatgggtctgtggggagggcagctgcctctaatggccacc

SEQ ID NO: 164812 - DNA, 122 bp, Homo sapiens
ctcactcctctttcttcggccacttaatccgtactcctctggctgagtctcggctcgggccgggcaatctgtccataaatggagaactcagctcaggcctgaccaatcagggtttgttttcg

SEQ ID NO: 164813 - DNA, 122 bp, Homo sapiens
ggagggagatgggggggtggcgacgacggtgggggggggagcgggaagaagggggagtcacgccctgcctgcaaggggagcctccctcaggcccctgggagaaggggactgaatgcgtctgt

SEQ ID NO: 164814 - DNA, 122 bp, Homo sapiens
acaacagccccaggccagcctggaatagaaaatctggaatgaaaacacaggagccccccacgcgtccgacgcagaggcgcgggtgctactctcagcaccgccgcgccatcccggggcggacc

SEQ ID NO: 164815 - DNA, 122 bp, Homo sapiens
gtctgttcgcgagtttcgcccttgaatgagtagtctctacctcttccgtacttcacgtctcgctgtgttctggttcatgcctatcagcctgcaaacgtgctgcagagccttctaatttaaag

SEQ ID NO: 164816 - DNA, 122 bp, Homo sapiens
agccggctgggcggggaagccctgagccggggaagtcacgtggggcgtgtccggaggcgccgcggggcctggcgggaaggggctggcgggctgctgccaggtgtacagccgcccacacacac

SEQ ID NO: 164817 - DNA, 122 bp, Homo sapiens
ggtctagcactgtgccaggctgtgattatctcattcatctttgccagcattcggggtggccgataccccattttacagatgtgcaatttgtaagtcatagagggtttgcacaatgggtgcgt

SEQ ID NO: 164818 - DNA, 122 bp, Homo sapiens
caacgctccgcctgcatggctcaggctgacgactaaacatgtccacgtgaatgcaggcgtcgaatgcccaagtacatgtgaatacaggtgtcgaatgcccacgtaaacatgtacatgtgaat

SEQ ID NO: 164819 - DNA, 122 bp, Homo sapiens
tacgccctgttcgcaggaggccgagccctacatgcaccgggccgggactctgaccagcctcgagagtagccactcagtgcccagcatgtccatcagcgcctccagccagagcagctccgtca

SEQ ID NO: 164820 - DNA, 122 bp, Homo sapiens
aagaagtagccaacattcactagccataactctatcacatggcccaaagaggttaggaaacgtggtcttgctgtatgtatgtctagaatgaaaaagcccagtgctgtccctagacctgacac

SEQ ID NO: 164821 - DNA, 122 bp, Homo sapiens
gaatcatgaccctccacttctgtttccttgggcttctcagagtgatctcacccctgtggacggtctgcaaagatcattactcttgacctcacttctgcctcctaagctgagccgtgcagttg

SEQ ID NO: 164822 - DNA, 122 bp, Homo sapiens
atatctgaacattatttaggtactctttcagaaagaattttgacttgggagattgtatagcgtggttgttgagaggatagactttgttattagtcagatcttggctcaagtccagtcttact

SEQ ID NO: 164823 - DNA, 122 bp, Homo sapiens
aaggaatgggaatgcacagactcagaggtaaataatggcaaataatgagcagcctccttccgttcacacccattttactggtattgattcaaggttcggctggatgctaggtggcaggaagg

SEQ ID NO: 164824 - DNA, 122 bp, Homo sapiens
aactggagcatctgcttgcttcctctgacctgccccctggactcatgttgtcattcttctcgctcaacctgtctgcctagggaagaagccctggactgtgtttccccaatctcagtattccc

SEQ ID NO: 164825 - DNA, 122 bp, Homo sapiens
ctttggcctttgtttcgtgggctgtttactgactttcgctcccagttaaatcttccaacccgaagacatccttctgaagtcagcagcacagattacacctaaggggaggcgactcggccttc

SEQ ID NO: 164826 - DNA, 122 bp, Homo sapiens
gttttcagtcttgctagaagcaggtctggtccccagaaacaactagagacaggcccaggccgggacaagcaggctagggggcatcatgggaggtgtctcagcttatctcctccctcttgcgc

SEQ ID NO: 164827 - DNA, 122 bp, Homo sapiens
gcgtgtacgtgtgtgtggaaacagcctcacctgtggccttctccacatcctcagtggtcacgttttggacattggcgctcactttgaaggtcactgctggtccgagaaccctggaagggata

SEQ ID NO: 164828 - DNA, 122 bp, Homo sapiens
ctttgctatgcgcatgcgtggtgaggccggcctatgacaaactctgcaggattttaaagccgtactacgggctggggtgccgggaggcggggtacactctccttgtctccccttctctaagt

SEQ ID NO: 164829 - DNA, 122 bp, Homo sapiens
cgggcggcggggctcgaggggctggtgggacagggggtcaccatgatgcggccgggtggccgctttactaccttcaacgcccgggctgcggcgggcagcaaacgcgcactcgaaagtgcgaa

SEQ ID NO: 164830 - DNA, 122 bp, Homo sapiens
gctgcttccggaatagaatgaaatccagctcgttaagcttcgcggggaggtgtgtccacccgccccgcgccgactccggccgcactgtcgcacttcactcgcaccagccagtggccaaagtg

SEQ ID NO: 164831 - DNA, 122 bp, Homo sapiens
cgccagacgtgtgtgtgtttttcctacacatgttcccagctgagattgaacaaggccacacggccttcttgcttcagggctcaggctgtgaagaagtatccttttcatggtcgcgcgtcttg

SEQ ID NO: 164832 - DNA, 122 bp, Homo sapiens
ctacctgcaggggccgccgcgcctctcagcgccacgccgccgccatcttgcatttcaaaccggctgcacttttcagggagtcaactctgacctgtgaaccctaaacccggaaccgctcggcg

SEQ ID NO: 164833 - DNA, 122 bp, Homo sapiens
aaggagctgaagctgaaggagggtgctgagaacctgcggcgggccaccactgacctgggccgcagcctgggccccgtagagctgctgctgcggggctcctcgcgccgcctcgacctgctgca

SEQ ID NO: 164834 - DNA, 122 bp, Homo sapiens
ccgcagcggcccgtcctgagtcccggggcctgccgggagttgtagttctggtgggagtttcgcgctgcctgctggactcgaagcgggtctgggagaacccagcctaccttctttcctcctcc

SEQ ID NO: 164835 - DNA, 122 bp, Homo sapiens
aacaggagaggctgagtgcgcggcatcctccatcatggaaacgcatctcgcaccagcacacgcagctggcttttccactacttttgcccgtcgatggcaccacccagcttttctctgggtgg

SEQ ID NO: 164836 - DNA, 122 bp, Homo sapiens
gagcaatggctaaatcagtttttccatcatctgcagaactagcctcaatatgcacacatgcgtgcacacacacacacacacacacacaccccagaggaccagatacagcctgcagggcccct

SEQ ID NO: 164837 - DNA, 122 bp, Homo sapiens
gcaaagctcctgccctggggttccatgggtccctaggcccgagcagaggagtgggctaaccgcgtttcccccgcccggcaggtggtgatcgagtcggacctgtacacgcaccagcccctgga

SEQ ID NO: 164838 - DNA, 122 bp, Homo sapiens
gggagggcgccacaggagacagtgcttaggaatttgatgtgcaactggaatgaggccctgcgaggcctgagagggaactgaccctgaaagacgcttgctgcacaactgtcaacagacttcca

SEQ ID NO: 164839 - DNA, 122 bp, Homo sapiens
gggcagacaaatgagaggcaaatcaggcaggtggggcactcactcggggatggtcttggacgccatctcccgctggaaggccagctggtacttgaggctctccacctctttcttcatctgtg

SEQ ID NO: 164840 - DNA, 122 bp, Homo sapiens
gaatggtctccaggcacccctggccttggaggtggggtcgtccccgaaagacagttctgacgcaggccgtgtggccacgtgcttcttgcagatggagctgtgtgggcgagctcctcccagct

SEQ ID NO: 164841 - DNA, 122 bp, Homo sapiens
ggaattcatcccccaaacacacaccccctctggttcccacatgggatgaaagctgtccaccgtttccagctcgacacagttgctgcactgggcactgctgcccacgctggggcttggctgtg

SEQ ID NO: 164842 - DNA, 122 bp, Homo sapiens
ggcggctgtgggcggaaaacccaaaacttccgatgggaccaagccttccgtggcttcacacgcaccggaagggaatctgggtcagccctccctccaaaggagacagcacggatcctcttttt

SEQ ID NO: 164843 - DNA, 122 bp, Homo sapiens
aggttgtaatgagctgagatggcatcagtgcaccctagcctgggcaacacagcaagagtccgtctcaaaaagaaaaggaaaggacagtgtagcttttcaaattcaaagtgtgcaatgtggca

SEQ ID NO: 164844 - DNA, 122 bp, Homo sapiens
ccccctgagcctcaccagttgtttctccatgtcctcgtcccggggtgagctgacgaagatcgtgttctgcatcaaacccacaaagcaccagaaggtgtctgactcatccaggacctcggcca

SEQ ID NO: 164845 - DNA, 122 bp, Homo sapiens
ctcgctaattactgaaaaacactccgctttgctcctgcccaccctcccccgccccccatccgatggtcataagcaccagttgaaacagatgaacctgatttcaggtatcaagtgggtagagc

SEQ ID NO: 164846 - DNA, 122 bp, Homo sapiens
acccccagccgtctgcgctcacgctctctgcagcactcgactccagggctccgtttctaccgcggaggcaaaccttggacttcaagtcccaggaagcaacgcgtgtccgttttccgggcgcc

SEQ ID NO: 164847 - DNA, 122 bp, Homo sapiens
ctacatccctgctacccatcatcaaccaggggtagccttccacttcagttctcaggctagcgtgaattcatcatcaaaattgtaagatctaagtatgcccatgatctaaggcatctctttca

SEQ ID NO: 164848 - DNA, 122 bp, Homo sapiens
tgctccccctcccccactgagccactctgagtgcgggcgacgcttccctgggttccttctcgccttctgagaaggcttctgtcgacctgtggcttcagtgggacctgagctcatccccgaga

SEQ ID NO: 164849 - DNA, 122 bp, Homo sapiens
tcagcgcccaggcctgcttttcctaccagacctgccttcagccccctttgtgccgcgggacgcccagcggcacgacgtggagctcctggagagcagcttccctgccattttgcgggacttcg

SEQ ID NO: 164850 - DNA, 122 bp, Homo sapiens
gcaccgctgccgccgttgccatccagtccgcagtgggcactgccctcgtctttgaggggccggctgaacaggaaaagccagggttctctgtgtcctagttgagggaggcttgctgaggcttc

SEQ ID NO: 164851 - DNA, 122 bp, Homo sapiens
acctctgtcgggcagggtgggccgctgccgcagcctgagcaccaagaggggccggggaggcggagaggctgcccaatcccctgggcctctgccccagagcaagccggatggaggcgagaccc

SEQ ID NO: 164852 - DNA, 122 bp, Homo sapiens
gattaggttgagtcagtgctaacctaattagcccctgattcctgaggtagcaaaaagtctcggtggaaaaactttcccccattctcacccttcctcagtcatcctgggagcgccattgtgtt

SEQ ID NO: 164853 - DNA, 122 bp, Homo sapiens
aacagatggccataatttggttttgaggaaaaaaaactaaaaatttgacatttgggacctcggttatgataaaagttccataattcacactcagggaagaacatctttcatgttaaaaattg

SEQ ID NO: 164854 - DNA, 122 bp, Homo sapiens
gggtgctgggactttccggtggtcactgtcagagaatccccaagcctggggacatggccccggctggagggaaggagggggagcggatggaaacagaaccaacacccgcaggacgcagctcc

SEQ ID NO: 164855 - DNA, 122 bp, Homo sapiens
tggggtcctcagatgtgcgactgaaggccaccaacacctcaggacccgagatactggtctcgagttctcaaatagccctctcttgcagtccctcctggacctggattttgagaccccaaatg

SEQ ID NO: 164856 - DNA, 122 bp, Homo sapiens
gccgccgccgccggttctgcgccccccgcggactcctaacgcgcccgccccctgcacccccgaggaggaccttactgggttgactgccagcccggtgccttcgcccactgcaaatggccttg

SEQ ID NO: 164857 - DNA, 122 bp, Homo sapiens
ggccccccgcccagtggccaggaaggtgtgagcgcacgatgggcagtcacgccgcacacacgctctgctcatgtccctccccgggaccctccgaccgggcacaagggcagctgtgagggcaa

SEQ ID NO: 164858 - DNA, 122 bp, Homo sapiens
cctctaataaagtgcctagccagcactcttagaccgcccaaccttcccagctcttccttccgaggcggctactcgatgacatcacatccacttccgcttccgaaggcggcctcttttcattc

SEQ ID NO: 164859 - DNA, 122 bp, Homo sapiens
gtgtccctttggcggggaacgccagccagaaagcaagccaggttgtgactagagttggggcgctttgcatcctgggatgtgtagtcgcgctcctctaccccgttcccatcgcagaagtaatg

SEQ ID NO: 164860 - DNA, 122 bp, Homo sapiens
tcttgcaggtgttcactctgcactccagcttctctcaatgcgccctgttgcatcctgccacgtggcctttgcacatgctgctcccactggtatgctcttcagatagcagctaaggctcactt

SEQ ID NO: 164861 - DNA, 122 bp, Homo sapiens
cgcgtgccgcagtcccggcctgtgtaccccggccaacacatgcagcggccactctcacagcggccccggccacgacagtccccaggacagctgcgcacaccgcagtcctcgccgctgtagcc

SEQ ID NO: 164862 - DNA, 122 bp, Homo sapiens
gaggcggagagccacccaagaaaggtggcggaggcggggagaccctgcgggcacggctcacgcgcacatccccggcttccccgggctccgcgccttcccaagagccccgttgtctccggcgt

SEQ ID NO: 164863 - DNA, 122 bp, Homo sapiens
acttaaccatggatgtaagagacatccccaaggaggatgcaaaccatgcagcccttttgccgggcgcggtggctcacacctataatctcagtattttgggaggctgcggcgggcagattact

SEQ ID NO: 164864 - DNA, 122 bp, Homo sapiens
gataattaaatgacatgaataccgtcgaagatacctgcctgatattccaaaatggcccaacggagccctgatcgcggcgttcctatgttgaggttttaacttcgattttaagaggggtcctg

SEQ ID NO: 164865 - DNA, 122 bp, Homo sapiens
tacaggcccgagggagcagcccaggaagtggccccagcaggagccccagaagttcctccccgtgtccctcctccctggggccagggccccctccagcaaccttgcttccactggcagggggc

SEQ ID NO: 164866 - DNA, 122 bp, Homo sapiens
gcagagccagacgatccccacacgcttcctgggagacccggctgcaaggccaggctaatgcgcgctccgacgtctctgtgccaagccggggcgcaagctcaacccccatctcaagttcagcc

SEQ ID NO: 164867 - DNA, 122 bp, Homo sapiens
cctgagcttaggctattcgagggtcccctgatcacctgccctctgcacggcgtagtgctgcggccacacgtatttgccagtgacttacattatacagtcaccgggtccctgccccgcgaggc

SEQ ID NO: 164868 - DNA, 122 bp, Homo sapiens
ggtgggggggcaggggggggtgcggagggcgagccgaggcccggggcggcggggtcggggcgcggctggggactgggcgcggggacccgcggagctctcccgggcctcccgctcccggctcg

SEQ ID NO: 164869 - DNA, 122 bp, Homo sapiens
ctgggtaccagagactggggtctgcaaccaggcctgcgtgactgaacacagaaaacgccccggacaccggactcccgacaggcccctggtgacaccattgagtgtgtggtcaccgacaccca

SEQ ID NO: 164870 - DNA, 122 bp, Homo sapiens
cggggcccgggtcgcctcagctttgttcggtcagcggggcgcggggacgcggacacttaccgtacaccccagcgaggaaaagcaagagcaacgcagacctccaccgcggagactcttttgtg

SEQ ID NO: 164871 - DNA, 122 bp, Homo sapiens
tctcctcgttttcctcctcctctggggtgcacgtcaggtcgctcagggattcagactgagcgcgctgagagaaataaagataaaaagcatcgtcgctatagccaattccaggaagcctgtca

SEQ ID NO: 164872 - DNA, 122 bp, Homo sapiens
ccacattccaggcacttctcaaaaatggggtgcactgggttctacataaaagcattaaagcgaagttaagcaatctctttatgcctaagtttctaggtctaccaaccttatcgggacaacgc

SEQ ID NO: 164873 - DNA, 122 bp, Homo sapiens
atcgctgattggtccttctgcttcaggggcggagcccctggcaggcgtgatgcgtagttccggctgccggttgacatgaagaagcagcagcggctagggcggcggtagctgcaggggtcggg

SEQ ID NO: 164874 - DNA, 122 bp, Homo sapiens
ctgggttttctgggggtggaggggtgcagtacgctgctggaagctcgtttctctttccaccgttgtgtgcctcgggctcgcggtcaacggggctggacgaggttcagaaccctccagagcgg

SEQ ID NO: 164875 - DNA, 122 bp, Homo sapiens
cctaatttggtagttttgagaattacatttattatatgtattatcaaagatggggattatcgaggtggagaaagctcatggccactgtcatgtgaaagtgtaggaacctgaatttgaactca

SEQ ID NO: 164876 - DNA, 122 bp, Homo sapiens
gccgaatttgcctggggaaggggaaatccgctctggcccacatctgcgcactcctagttccgcccctcagcctcaatgtttgttattgttgttcgggttcaggttgcttctgccccgcccca

SEQ ID NO: 164877 - DNA, 122 bp, Homo sapiens
tcagattttggagcatgttggatttgggatactcaccctgtacatccttagatccagaatcgttactggaatagacagaagaaactggcagaatccccatgttgcttcccttactcgtggaa

SEQ ID NO: 164878 - DNA, 122 bp, Homo sapiens
ggccgagccccctgggaggcgggccgttctttgctagccgctgtcagggcaccctgccctcgccctgtgaaatgtggaacgtttccaagtttgcctccacttgtattcaacacttaggaaag

SEQ ID NO: 164879 - DNA, 122 bp, Homo sapiens
atggtaaatagaaaccaggttggcattaacatacaaaaccatcgttaggaataataatctcgaacaagacccaaaggacttacagcaaaaagaacataaattaaaaagcccttataaatcag

SEQ ID NO: 164880 - DNA, 122 bp, Homo sapiens
tcgcaaactgatttccaagtccgttgtctgatgctgcgagacactatccgtttgttacagcgaattgggggccgatgacgctggaggtggaagaagccgcggttctgtttcttaatggcgaa

SEQ ID NO: 164881 - DNA, 122 bp, Homo sapiens
gtctcacaacacacaaatgctcagcattgtgttccggttgtctccaggattcagtagtcacgagctgtgcaggtgtgtggcctaggagcaacaggctgggtgtgtggccagctaagccatct

SEQ ID NO: 164882 - DNA, 122 bp, Homo sapiens
gcccaggatagtgcccccaacctgcccccccccccccccgctgctgcaggcagcgcagcccgggatagcacacctaaagtagtgacgcccggaataacacccctaccggcccccggccgcgg

SEQ ID NO: 164883 - DNA, 122 bp, Homo sapiens
tggagaaattcaaggaatggctgttgtaatgtacatttcacgcttagcctttcctccccgcgctgggaagaagtgctgcgcaccgcggctccgccagggggcaggagaagtcacattacaca

SEQ ID NO: 164884 - DNA, 122 bp, Homo sapiens
gtgccctgcggcaagctggtggggggcggggggagggcttgttagtaaatgacccagaagcgccccaccccacaccccaccacaaggacttgtccgggccgggccgggctagatgccgagat

SEQ ID NO: 164885 - DNA, 122 bp, Homo sapiens
atcaggaggatcaaagaatcacatgtataaaacaatgaaagggtaaaagtaggatgacgacgtgagtcaatcaagttaatagcccaagaggggccaagacatgcccacgtgagcagagaaac

SEQ ID NO: 164886 - DNA, 122 bp, Homo sapiens
cagcaggaagccgaggcccatggcaccgctgacggccctcagggacagcgactggatctgcgccatcgcaaaggggctctcgctggggttgtagcggaacttgctcactgcagtaggggaca

SEQ ID NO: 164887 - DNA, 122 bp, Homo sapiens
aatgtggagaggccgggaagtgcgccaccgggagcctgcgcaggaaacggaggggcgctgcgggggaagagcgctggcatccagccacccatcccagagaagctgcctggctggctggcagg

SEQ ID NO: 164888 - DNA, 122 bp, Homo sapiens
gggctctcggtatactcagagatttaattttcattagtcagccatgaagccaaataggaccggattgtgcaaagcccagtcctgtcataaagtgttatttttcttttttcccccaatccaga

SEQ ID NO: 164889 - DNA, 122 bp, Homo sapiens
atgtttccatcacacccgttaattgaacaatctaagcccggcctcagtgcaggtggcggtcgtgggcctttcccaggccccagaatcccatggaagggctgttctgagcagctgcttggaga

SEQ ID NO: 164890 - DNA, 122 bp, Homo sapiens
cttcatctgattcattccggggtcccacagaagagttcttggtaggagctggggttcagccggagggctctgaagccaggctgtctgcattggaatcctggctccaccagtgggcagctctg

SEQ ID NO: 164891 - DNA, 122 bp, Homo sapiens
tttgccgttgtcgcggccgccgccgccgaggcttacccgggaatgtctgggcccgcgcctcgcggcccccaagctccacgctgcgcccgctgtcccggcctctaaaggccgccacgtccctg

SEQ ID NO: 164892 - DNA, 122 bp, Homo sapiens
ggcgcgcgcggctcctgtgcttgcttcttattggcggacctggccctgggggcggagccgcggtgaagcaccgctcatccgggctccaggaccggggcacgcggttctccctgatcccggag

SEQ ID NO: 164893 - DNA, 122 bp, Homo sapiens
acgtgactgacagacattgtaaccaattacaaacttgaagtgaccttggctttcgctgtacgtcgctaccggagccagtaaaacagcatttcagacgctttttttttgcgacggagtctcgc

SEQ ID NO: 164894 - DNA, 122 bp, Homo sapiens
ccgcaggccagcgagggcagcctgagccgcttcccgccccggcgaggaccgtcgccagcccgctgctctagcaggaggcggttccacagcgcacccggcagcccagccaccgtcagcaccgc

SEQ ID NO: 164895 - DNA, 122 bp, Homo sapiens
cttggcatcctcagtggcctccctgcttccgaccttgccttttgtagtctgtacccaaaacggctgccagagggatcccattacaacgtgtcacttctctgcttaaaaccctcccatggctc

SEQ ID NO: 164896 - DNA, 122 bp, Homo sapiens
ctgtgccccggacggtaggaccggtgatgggtctgaaaggcagctccatccactcctggccgtgcgactttggggacctggcttcctgcctaagccccggtttccctctctatagaatgggc

SEQ ID NO: 164897 - DNA, 122 bp, Homo sapiens
aataggaggataaggtatgaggcaaaacaaggctggagtcaaacaaaggcgccgttgcatcgcagattgcaacctgaagcggctcccggctccctggagagtaacccggagagacggacagg

SEQ ID NO: 164898 - DNA, 122 bp, Homo sapiens
ctccacatctcgatcccatctgcaaagtcccctttccatatgaagacgcggtcacaggctcgagggtgtggggggtggatgtgtctttggcggccatgatttagcctgccagacttaataag

SEQ ID NO: 164899 - DNA, 122 bp, Homo sapiens
agagcccgcctggctcttccccagttgcagggacaggtctgaagcacgggcttcaggaggcggggagtgggtgggtgggcttcttaccttctctgcccgctctgcactcgggaaggggctgt

SEQ ID NO: 164900 - DNA, 122 bp, Homo sapiens
tgggggtgcctcacagcctcaccttgagttggccctggaagccacggcagaagccctgcacgtagcgctggatggcgggcgtgaggtaggcgtcggcacaggccgtgtgcccccgagggacg

SEQ ID NO: 164901 - DNA, 122 bp, Homo sapiens
cgcggcttcgcgaggctccagcagctcccccagcctctggcttcggccgcgctccctgctcgctcctcgcctaccagccccgcgcgcgccccagagaagttgtcaccagcgcggctggctct

SEQ ID NO: 164902 - DNA, 122 bp, Homo sapiens
cctagaatgtcgcttttaaaacctctccagatggacctgacgattaggcttgggatctaccgccctcgcctgcccccatacctcagctgtttcataactgctcccagaagaaggaagggcag

SEQ ID NO: 164903 - DNA, 122 bp, Homo sapiens
agaagcgctccgagctcggcatctggagcagttcaaggcagcagcgagcaagtccaaagacgcaggagggagggtggggtggaggagtagagagaaaacagaagccgtctacagaccctttt

SEQ ID NO: 164904 - DNA, 122 bp, Homo sapiens
ccgccgtccccgtgcaccccagtgatggccgccgtccccgtgcacaccagtgagggccgccgtccccgtgcacaccagtgagggccgccgtccccgtgcaccccagtgagggccgccgtccc

SEQ ID NO: 164905 - DNA, 122 bp, Homo sapiens
gctttaaaattaaaaaaaaaaaaaaagaggggcacagcaggaagatatggattccagggccgcacttaccactgactgatttgtgccttgagcaggcaacaaacctagtacagcacaggctc

SEQ ID NO: 164906 - DNA, 122 bp, Homo sapiens
ttttctaagctctagatttagttttcacatggatacctctggtgttttaattctggcttccgcttttggttagcagttgtgacttagatttcttatctacaaactacttctgaagcctggtt

SEQ ID NO: 164907 - DNA, 122 bp, Homo sapiens
gcggggcccggagctgttgggttgcagaagatgcgtgcgtgacgcagggtgaggggcgcccgccgcgcctgctgcgcccctcgaaaggcagatggggccccctaaaaaaagaaatcaagaaa

SEQ ID NO: 164908 - DNA, 122 bp, Homo sapiens
gccttcttgggcttggggctctcctcgcgtccccggggtgtttgggacttggtcgggtcgcgtctcgcctggttttagggtctccggggctctgagctcgcccactcggcctccctgcaccc

SEQ ID NO: 164909 - DNA, 122 bp, Homo sapiens
ttaaacgtgcccgagcttctggcgttaaacatgccctggaggatttccgcacggatatcacgcacctccctgcaaccgtacaaactgcgtgcttactgactggaagctttgtcaacacgctt

SEQ ID NO: 164910 - DNA, 122 bp, Homo sapiens
tacaggcgtgagccaccctgactggccgttcataaagttttgaggacatgtagcatgttacgtttcagagaatcaaaggcatccaccatttcttttttgatctctcaattttgtgttcattt

SEQ ID NO: 164911 - DNA, 122 bp, Homo sapiens
tgatagcctccttgatagcatgctcagaacctcctctcctgcccaagggtgtgctcaccccgcgttgcccaaacgctgcacctacatacccgtccacgagtgggaaactccgcatcagggcc

SEQ ID NO: 164912 - DNA, 122 bp, Homo sapiens
atctacaccttcactgatacttttactgagaaactttggcccctcttctacccaggcatccgggctggacggaagaatgctgcaccacttaccatcaggcccccaacagattgggagtgaca

SEQ ID NO: 164913 - DNA, 122 bp, Homo sapiens
caggagatgagcagttagctgggagcacaaacggcatatggctgccaggctctttctggccgacaccacagacggagggaaaggctgtttcccccatgctgcagctctcgcaagctgacaga

SEQ ID NO: 164914 - DNA, 122 bp, Homo sapiens
aggtgacctggcggctggcggggcttgactgtgcagaccacagtgaggtgcgcttgcgggcgccgggacagctgccagcaaagctgagagcagaaaacatcatgcgcgaggaggtggggaag

SEQ ID NO: 164915 - DNA, 122 bp, Homo sapiens
cgatgccatgtccttcccgggtcccaacgtgctggggctggagactcatctaggggattccggggaggagggatcttcctctctggaagcagcagaacaaatttcagggactcaggagtcca

SEQ ID NO: 164916 - DNA, 122 bp, Homo sapiens
tggacctccctcttcacttctctttttatttgtgaagcctacctattattcacatttcatcgcaagccccatatttttaagattccaaacagagattatctaaaaattctataatacctaaa

SEQ ID NO: 164917 - DNA, 122 bp, Homo sapiens
cctccattttcttgtggccagctgtggctcatctctggtcactctcagcggtcaggtcttcggatcgtcttctctgagtgacccccactccccgtctctccgatagcacccagttctcatcc

SEQ ID NO: 164918 - DNA, 122 bp, Homo sapiens
tggcaggttcctgcccttccttgttgtcccggttcatcttctgctccttgagcagggagccgggcaggttggaggcgtacttaaagccagggccacgcttttgcttgtaggccaaaaagaga

SEQ ID NO: 164919 - DNA, 122 bp, Homo sapiens
acacgcctcctacttacctgagcggcccgggtgccgcagcagggcgctgacgagtcccgccgagccccgccgcccgggttcaaggccgccttcacgcccacgattccttgttttttgggcag

SEQ ID NO: 164920 - DNA, 122 bp, Homo sapiens
cagaggtgaagtttgaggccctccccccacccaccccacacgcacgcacgcacgctagaccgtttgctgcactaggaattcgagcttgggccccactcgcccaggtgtgaacagtggctgat

SEQ ID NO: 164921 - DNA, 122 bp, Homo sapiens
agtccagcccacctatccctacggccacagctcgccccaccccccaacccccggccgaggcggcggaactcacgatcatcttcttatagagaccgtaatgcaggaccaggctatgggtcaat

SEQ ID NO: 164922 - DNA, 122 bp, Homo sapiens
ctccccagccccgcctgacgctgcagctgggccggagactcgccattggattaaaaatagcgtcgccagtccgccccaagcccgcggtgcccgctcccgccccgcagcccgctctccccgcc

SEQ ID NO: 164923 - DNA, 122 bp, Homo sapiens
actcctaagcttctcagcttcaggtggcatttgctgactgtgctgctgatatcaaatctgcgtatgaaagccaacccatcagacagactgctcaggattggccagccacctctctcaactgt

SEQ ID NO: 164924 - DNA, 122 bp, Homo sapiens
tctcctcctcctcttggatctgtaactggttcttcacgggagctaggttctcggtcttggcgttgtagttccgaaagcagacattgagcttctcatcaaattcatttacgaggtcctccatg

SEQ ID NO: 164925 - DNA, 122 bp, Homo sapiens
actccagacagagaccatgtggcaggaaggctgcctggttctgcacatctggccccttcccggggggttcctccccaacagctgtcctcctcgggctccctcgccaaacagaaggccaagct

SEQ ID NO: 164926 - DNA, 122 bp, Homo sapiens
agagccccccagccggcttgggagcggagaggattctgggctcggcccctggagggagaacgcagcccccctgagctctgaagcagcaccgggctgtggctcagaggggcgggcagctcctt

SEQ ID NO: 164927 - DNA, 122 bp, Homo sapiens
ccagccgtgtcacagagcagcgtgggctggagactaagcgcggggtgcaagggcttcatgcgccctagggaggaggtcactgtgggcaagaggtggagtggggtgtatggaacagccaggca

SEQ ID NO: 164928 - DNA, 122 bp, Homo sapiens
tctgaggctggccctacggtgagtgtttctgtgacatcccattcctacatttaagattcacgctaaatgaagtagaagtgactccttccagctttgccaaccagcttttattactagggcaa

SEQ ID NO: 164929 - DNA, 122 bp, Homo sapiens
tagatatgcacgtgaacagaatctgcgcagtcggctagatgtgcttgtgaacggagcctgcgcagtctgctccatatgcatgcgtccatcccagtggagaaccttacccttttattgttcgt

SEQ ID NO: 164930 - DNA, 122 bp, Homo sapiens
tcgctgcccagccccggggagggaggcggggccgcgaccccggcgcgggtggggcgaatgcgttcccagcgggtagcctgggactggtgcagagttccaagcccacggccccggtcgcggcc

SEQ ID NO: 164931 - DNA, 122 bp, Homo sapiens
atcaatatttatcaattcttcggcggctcagaatgcgtgctggggattcaatcaatttagcggcaatctgagcgcggcattgcattttgagcaacttcaatatgtctgccggtgtttggggg

SEQ ID NO: 164932 - DNA, 122 bp, Homo sapiens
tgacagggggcgcacgggggcaggggtctggtccccgggtcccgcagcagagcagtttcgcgttcgagctcttatcggcgtggggggggggggcggtgggacacgcgggcgcgtgcactccc

SEQ ID NO: 164933 - DNA, 122 bp, Homo sapiens
tcatcgacacttcgaacgcaattgcagcccgggttcctcccagggctttgcctgtctgagcgtcgcttgccgatcagtagtccccgggggtgcctccgggctcctcggggtgcatggctggg

SEQ ID NO: 164934 - DNA, 122 bp, Homo sapiens
gccaggcgtcgcagcgacccgtctgtgattgtgaacccataaaagtggctggtgggaggccgggcagaggcagcggcgggctcggaggggccctgaaggacatgccccgtgaaagtggaggg

SEQ ID NO: 164935 - DNA, 122 bp, Homo sapiens
ccccagggccggccccgccggggcctccgccttcaccgacacccgcaggccccgtacggccgccatcgctgcctgccggccgcaccactgagagcccgcccctcacggccgccggctagagc

SEQ ID NO: 164936 - DNA, 122 bp, Homo sapiens
cgccagggaaaccgacgtcagctgctgagctcagcggttgctggagggaccacaggagggcgggaggagcgacccctcccccatttcccggcggaagtgggggaacggcccactctcacact

SEQ ID NO: 164937 - DNA, 122 bp, Homo sapiens
ggaggagggcgggaggatgtgggaggcaagaggaaagggagaaaggatggctgtgccccccgcctccccgcagccccccctgatgctcccttagagcgggcggaggacaggaagggagcctc

SEQ ID NO: 164938 - DNA, 122 bp, Homo sapiens
gcactacgctgtttccttgttcctgctcaagctaccttacaaaacccggctgctgtgccacgcctggcggggcatctccccatttcacacgtggaggccgccccttcctgccgtctcctcgc

SEQ ID NO: 164939 - DNA, 122 bp, Homo sapiens
aggggtccagtactgaaccctctccaggtctgaggtggggaactgcgtcttgtttaatttcggagcttgtggggaccacacagccccttccacggccgattccctctgcacggttccacttt

SEQ ID NO: 164940 - DNA, 122 bp, Homo sapiens
ctgctgtcatgccccggcgggggttccctgtgtttcttcctggctgcagtgcgaggcagccggtcttcccaccaggtgcctgtgccctcaggtcctgactcagtttccccataggctgcgtg

SEQ ID NO: 164941 - DNA, 122 bp, Homo sapiens
tcagagatcatgtgctgaagtctgcccagtctttcaataggcataataggaaatgccctgcggtgggtaggagggttggggatggcatgcgggaggtgttgggtgtgtatgggacactaaca

SEQ ID NO: 164942 - DNA, 122 bp, Homo sapiens
ccgccccacaggacccgcccgcccgcccctatgaccaacatgagctggagcttcctgacgcggctgctggaggagatccacaaccactccaccttcgtgggcaaggtgtggctcacggtgct

SEQ ID NO: 164943 - DNA, 122 bp, Homo sapiens
gcgcagggcgcaaggtgcacggggccgagcgtgcagtttgggaggtggcacagttgggggcggcggggatcagggcagcgtcctgggggttctaggttgggtctccagattgggtccccgac

SEQ ID NO: 164944 - DNA, 122 bp, Homo sapiens
gcggcggcggcgcgcgggtgagcgggtgagcgtgtgagcgggcgggcgggcaggcgagtgcgccgggtattggcagctgaggagtggaggctgggcagctccgactccctgacgccagcgcg

SEQ ID NO: 164945 - DNA, 122 bp, Homo sapiens
agaattcttgacattagtcatgacctccttagggttgaggctttgaaaaacttaggcaggcgatgagtcaggcaaggcccaagaggaggagaaagaacacaactacaaacatgttgctcagt

SEQ ID NO: 164946 - DNA, 122 bp, Homo sapiens
gggggcgctggcaaactgctgtttgagaccgagaagcgtggtgggtggagtcacgtcacgcggcctgtgagcgggaggaagggcagctgcgctggaggggccttctgggaaacgtccttcca

SEQ ID NO: 164947 - DNA, 122 bp, Homo sapiens
gaaggttctgctgacagcggctccattataagcgctctggggcccggaaataaataaccgcgcgcacgaggcgccgccgccgccgccgccgcccggaggaaatcaggggcgggcgcggaggc

SEQ ID NO: 164948 - DNA, 122 bp, Homo sapiens
tatcagtttccaagttctttctagcctcaaccagtttctgtctctgcttgttctgcagcccgctgaactacatttcccaggaggcgtcggggctgcgccgtacaacttccggctgtaaagat

SEQ ID NO: 164949 - DNA, 122 bp, Homo sapiens
gtaatcacaaccagcggtgggagctacagcacactgatcctcctaaatgaatctaatttccggttttgttttttcaaactactccgcttgcttaacaagtgcgcgggctgtaggcagcacgg

SEQ ID NO: 164950 - DNA, 122 bp, Homo sapiens
ccaatttccagaattgttttcatcttgcaacactgaaatctgtctcgttgcacaactccccgtgcacctccttccctcagggtcttttgcaacctccattccattgtctgagttcgtgaatt

SEQ ID NO: 164951 - DNA, 122 bp, Homo sapiens
gcaccggcaggagagcggcaccgtggctgccgcagcgcgcagaggctgtggaggggcttacggctcccagcccacgggtctcagacccaggggctgggcccccagcccccagtcccgatccc

SEQ ID NO: 164952 - DNA, 122 bp, Homo sapiens
acggcaataaaatactggcaacaaaaacacttaactcatcaggtgatgctgaggattaaacgaatatacacatacatatatttcttagagtaacctagctattattcatttgtaaatggata

SEQ ID NO: 164953 - DNA, 122 bp, Homo sapiens
gccgcccttgtccaccactcccacagctgtaaaataaagcggcctgcatgcttcctacagcgctttcctcgctcccatatacgcacacacaccccatcttccagccagttcctaactcgcgc

SEQ ID NO: 164954 - DNA, 122 bp, Homo sapiens
gcaagactgtgaagttaggctctaaaaatttgagataatgcaagcagaagcagtggctcacgcctgtaatcctagcactttgcggggctgaggtcagaacttcaagactagtttgggcaaca

SEQ ID NO: 164955 - DNA, 122 bp, Homo sapiens
gcccctaagccaatagatgaaactcgtagtttggaggaagactgcgacagcttaggccaccggaaaatgacccagaagttcaacttctgcgctctccggggaggctgggtcagagctccagc

SEQ ID NO: 164956 - DNA, 122 bp, Homo sapiens
tgggtgtattttgcggtctgtacaagaaaaacaaagtacggagcgagcgtagagttctcgcgccacccgaactagaacgtgggatgaggtgggaggaagcgcctctggtgcgacgtaacatt

SEQ ID NO: 164957 - DNA, 122 bp, Homo sapiens
ccatcaacggttgagaagcacaattagaaaagggcctttgtatggcttcaccctgccaggcggcctaattgatatttaggtcgacctcaattcaagtccatgcagagccaaactgaagaaga

SEQ ID NO: 164958 - DNA, 122 bp, Homo sapiens
gctcccttgaatctggtcacctgcagccttctatcagaacttccctcctgggtgtccagccgtatccttccagcattccttggctctgacacgtgcttggctttaagctctttgttggcttc

SEQ ID NO: 164959 - DNA, 122 bp, Homo sapiens
ggtctaatatccagaacttataatgaacttataaatgaacaagcaagaatcaaacaaccccgttaaaaaatgggcaaaggacatgaacagacacttttcaaaaggagacatacacatagcca

SEQ ID NO: 164960 - DNA, 122 bp, Homo sapiens
caggagcccgccgcctctgtttacacacagaggaggtgtcgtctccagtctagacaagggcgctaataacgcccataaaaggcggcctctccagagatgctctggcaactccgctcccgcgc

SEQ ID NO: 164961 - DNA, 122 bp, Homo sapiens
ccccaaagtcaccgacagccttacctagacctgaccttcctcacccacgcgccctcgtcccggaaggcccgccctctacccggctccaagctcgcgcaggcaactattacggggagcagtag

SEQ ID NO: 164962 - DNA, 122 bp, Homo sapiens
aatcattaggagcaaatatagtactaatgttgtatttttcttttcaagaattatcttcctcgtgaaatgcttagaattcactttagagtcatggggaatgatgaagggatactagaatgtgg

SEQ ID NO: 164963 - DNA, 122 bp, Homo sapiens
ctccacctcctggaatcaagtgattcttgtgtctcagtctccctagtagctgggattacacgttcgcaccaccactcccagctaatttttgtatttttagtagagaccgggtttcaccatgt

SEQ ID NO: 164964 - DNA, 122 bp, Homo sapiens
tgtcaggcagagcgctggcgagatttcgagattcctgatacaggcaaggtccgaggcagccggggaaccggcgggcttccacgcgggggccccagtgcgccccgacacgcgcccaggccccg

SEQ ID NO: 164965 - DNA, 122 bp, Homo sapiens
aacctttgttcctggactaaaaccaaatggcttttaaaacttttctctccacaacagcctcgacaaggtggtttggagcaggtattatgcccagaatatttacattctggcagttatagcat

SEQ ID NO: 164966 - DNA, 122 bp, Homo sapiens
cgctgacgtcaacactcagctttttataggcggacgccggttgggcgggtcatgtgactgcgctgcgaaggcggggcgaagggacgccgcgcaagcgcacggaggcgtgtccccccgcccgt

SEQ ID NO: 164967 - DNA, 122 bp, Homo sapiens
accagaaggaagaaactctgaacacatccgaacatcagtaggaataaactccggacacgccgcctttaagaacggtaacactcaccgcgagggtccgcggcttcattcttgaagtcagtgag

SEQ ID NO: 164968 - DNA, 122 bp, Homo sapiens
agtcgcggtgctgagagtttgacctaaagctcggcagtgtgacagcaacgccagcatccccgcaccccaggactgtgacgcgagggaggaggacccagtgaatgaaaagggactctgggcag

SEQ ID NO: 164969 - DNA, 122 bp, Homo sapiens
ttgtcaacctctctggttgccaacgacctcgagaatggggttgtggtccctgcgtcagggcggttgtgctgaaggctggatgagggcacgtaggtgaagctcagtgcttggcacgaggtgct

SEQ ID NO: 164970 - DNA, 122 bp, Homo sapiens
ggggcgggccctggtgacagcgtcctggctgggggactttggggcaatgggctatgggggcgcccttgggtgccgcccgggacatgctggagttcccacaggtgagttaaagggcgctcggc

SEQ ID NO: 164971 - DNA, 122 bp, Homo sapiens
tgattcctccagtgaaagggttggcatttgagaaagtgctttgtgaaccgctcaacaccgcgtagaccctgttgcgctttaatactttgatccagccatattttgccagtgtcttctgtggg

SEQ ID NO: 164972 - DNA, 122 bp, Homo sapiens
aagggcgctcagtgcggcgttcttgttgcagatgattctggaaggccggtaggtgtcgggcgacatttgaccttcttcaggtgcttagaactaagtgtctggaaacatgatcctttcgcgta

SEQ ID NO: 164973 - DNA, 122 bp, Homo sapiens
tgtctcccttaaatagaactagccaggagaacagcactccacgtcggcagccggactgaacgaggggagtatacactgcgctgcccagggtttgggaggtgcggtgtcctagcctggtgccc

SEQ ID NO: 164974 - DNA, 122 bp, Homo sapiens
agccgactgaccggcaagcacagacctgccctgtgctttcttctcttcagcaaccgcagccggggtgtctgtcttcccaggtgcagccgagtctcaattctgtttcagaaactatctcaggg

SEQ ID NO: 164975 - DNA, 122 bp, Homo sapiens
aaattgaaaaggaaaacactaattgagaggcaagactgctttttgtacttgacttgcaagcgtatcctctgtttattctggcatattcctggtcaaagtcagcttccacatacagttttaaa

SEQ ID NO: 164976 - DNA, 122 bp, Homo sapiens
cgcctccttcagctgatccgagatccggcgctgatggagcgattagcggcgattagagcccggcgtgcggctaatcctcctgctgagggacaggtgaagcagccataggggtggaggaggga

SEQ ID NO: 164977 - DNA, 122 bp, Homo sapiens
acgccagtgaaccacctgggcttggaatccagagccccggaacaccttgcagtacttgcccgaagcaacgcgccaacagcgggagggagacgcagacgcgaagaccggcgagaggatgtgcg

SEQ ID NO: 164978 - DNA, 122 bp, Homo sapiens
tgcactgtccgcacactacattttcgtgtgtccatgcacgtgaagagagagggaagccagcgagacagggtggaattggaatggcacatctacacagagctgagggatcagcacaggaggag

SEQ ID NO: 164979 - DNA, 122 bp, Homo sapiens
cagggttgacgggaaacacacacacacacagtgcagaaccattccacgaagctgtgtatccggaattggttccctctgaagagttcctggtcccggtcctgccgcggaccttcacggcatta

SEQ ID NO: 164980 - DNA, 122 bp, Homo sapiens
tcttggagatgtgttctctggaggctccgggtgacgatgcttcctgccccttctggttcccggcggctggacgccccagggtgggtggatcactctgtctccgtgttcacgcagccttgttc

SEQ ID NO: 164981 - DNA, 122 bp, Homo sapiens
cagcatctttgcagccgtagccccttgtttctctctgtggattgcagaccagggacagctcggctgagtggctcctaaagatactttccaaacctcccagttaactctgtttcatggggtta

SEQ ID NO: 164982 - DNA, 122 bp, Homo sapiens
aggaagctcatgcgagaaggaagcctccagcctggaataggggacggagctggagccacacgcgcagcctgggtgagccacgcacccctcaggaccaccaagaactgcccagccaagtgagc

SEQ ID NO: 164983 - DNA, 122 bp, Homo sapiens
tgggatgtggtaagtcaaaccaggaggtggagtttgtgggccatgcgagctcctgactgccgctgtccctcctcccaccatgctgtggtcctccagggaaaggtttggccctgggctcacaa

SEQ ID NO: 164984 - DNA, 122 bp, Homo sapiens
gcggtgctgtctggagccgtacggttcgcgtttggggcacaggggcccctcttgctggtgcggatgggaaaggcgcggggtcgagtcagcgtccctctcgatgttggtttcttcgttttaca

SEQ ID NO: 164985 - DNA, 122 bp, Homo sapiens
catggaaggaacgcagggctcctgagctatcctccaatatgggatgcttcctccatttcccgcagacaacactaccatgcacctgtcttagatgcctgtgaattccctttaactgagggtgg

SEQ ID NO: 164986 - DNA, 122 bp, Homo sapiens
attaccattttcttaagaggacaccgctccttcctcttcaggagacttggggggactcttcgatcgcgacctggatttggattccctcttggacactgggggaggactcctggaccgagacc

SEQ ID NO: 164987 - DNA, 122 bp, Homo sapiens
gtgtccccatcaccgcgcgcactgcgcggccccgcaagttttacaggcgctttgtggggacgtgcatatgttggggttagggatcttctaggaaggcctaatctgcatgcgaacccccaggc

SEQ ID NO: 164988 - DNA, 122 bp, Homo sapiens
ttggaggggtccctggatcctgagcgagtgttcggtcatttgcctttccatagacctgggcgaagaagcgagaggtttgaggagtgactgaaatcaagacctgaggccgttagaagaaacac

SEQ ID NO: 164989 - DNA, 122 bp, Homo sapiens
agtgagaagccgaggcacagactgacaaggggaagcaaagccactgtcagacagaggacacgcgtgtgcacacggaaaccccacgagtccacagaaacaccgccatggccaaggcgggagtt

SEQ ID NO: 164990 - DNA, 122 bp, Homo sapiens
gcctgggcgcacgcgtggctgtccaagctgagcgcgggggcggggcggggccgagaggggcggggccagccagagacgcggggcgcggtcctggcccgggagagggtactggggttccggcc

SEQ ID NO: 164991 - DNA, 122 bp, Homo sapiens
ccggaggctgacttccggtgcactcctgcgcgtgtgcacctctctctgtgtgcgtgttcgcgcatgcgcgccgccgctgcactgccctcgcttcctgtgcgtcctcaggtcaccgcttgctc

SEQ ID NO: 164992 - DNA, 122 bp, Homo sapiens
gttggggcctgttccaagacactggggaggggctgctagggcctgcttgagccaggtggccgaggggcgtcaaagggtctctccggttcggcgaatgcgtactgcagcctgctgtggcctcg

SEQ ID NO: 164993 - DNA, 122 bp, Homo sapiens
cggacggggaactgggctccctagccctggcgtttttggtgttgctgtcccagccagaatcgcgtctggccggtgggaagccgggaactccagccccctgtaggagaggagaaaggagcgag

SEQ ID NO: 164994 - DNA, 122 bp, Homo sapiens
gctgatctgacaggaggcagagctcaggaagtaatgcttgccttcctgagtactggactgcgccttggggtttggggacccctgctctacattacagagaatcctagtgaggggcccctgag

SEQ ID NO: 164995 - DNA, 122 bp, Homo sapiens
cctaaggccggttctctatggtcgacatcgcccctttgtcccgaatttcctccgggaggacgctctggtgggatccaagcacttcccccgctgcgtctgtggtcgcttttaggtgcaactgg

SEQ ID NO: 164996 - DNA, 122 bp, Homo sapiens
ccgccacgtgacctctcagttgctgacactagatagggcgtggctgcggggcgggcccaccgctgcaggggagagaggggatggacagtaggctgcggttgcgcgcgccggatgtgggcccc

SEQ ID NO: 164997 - DNA, 122 bp, Homo sapiens
ttgtaaactccaggaggggacttaagagacagaacagggaagaaaagtggctgagcttagcgacaggccggcctcagaagtgacattccccccgccgacccctgccccccgcccagtgtcct

SEQ ID NO: 164998 - DNA, 122 bp, Homo sapiens
ctgcaggtcatccaccgaggaaaattgcttgtcgcagctctcgcacacatagtgggtcgacgtggtcatgtaatgcactgtcaggtgctgcaggagggactcctgggagtcaaagtcctctt

SEQ ID NO: 164999 - DNA, 122 bp, Homo sapiens
cctctcccagcaaagctccagggttggaaagagtcccctggcagggaattggcaccccgtcgtgcccatcctctctctctgactgcctgctggaaatgcccccatctccctttgagtcctcc

SEQ ID NO: 165000 - DNA, 122 bp, Homo sapiens
gcgaggagccgcgtcttcaccaactgttcacgctcactctccgcggctcggagactcagccgcccttccctgggcactcattggtaagtcctcggaagcgtggaccaatcaaaaccctcctc

SEQ ID NO: 165001 - DNA, 122 bp, Homo sapiens
agttctggttcttgaaggagttatctcaaataatatctcatcccttttcttcgggacaatcgaagcccaaaatgaagagaagagcttcctctccagcctaaaactctcctaaggttccattc

SEQ ID NO: 165002 - DNA, 122 bp, Homo sapiens
gtatgaccattatccagaacaggaaaatgaggcacagaataactaggtttcctattttagcgtaggcctggaattgtaattgctatttcagtgcagagtgtataatatagttgggattatat

SEQ ID NO: 165003 - DNA, 122 bp, Homo sapiens
cgtagcgcaccgccgcccgccacaccgggaccttcccctcgcactagcccgcccccaccccgcctccatctcgcgctcccagccgcagacacgggcgcctctgcactctcaacccctcaccc

SEQ ID NO: 165004 - DNA, 122 bp, Homo sapiens
tcttgaccaacaggaaggtggtgggttgtcctttccacacccctccctctgaggtgtgggcgtgggccagggctcaccagaggccccagagaagcacttaattctacagcctccttcctaga

SEQ ID NO: 165005 - DNA, 122 bp, Homo sapiens
gtgtaggtcgccagcacgctggacggtatgtttcatccggagaactcgaccattcggtggcggcggctgttactggcggcagcgggcctgtctgcttgtgaggatcagcttctgaagctcct

SEQ ID NO: 165006 - DNA, 122 bp, Homo sapiens
ggaccaatcagcgcgctgagctggcggagctgggcgcctaaatggcccaatggggggccgcgcgggatcagagcccgccctgcctcctggcgccgtcgcgggggtggggactttctaggcca

SEQ ID NO: 165007 - DNA, 122 bp, Homo sapiens
ggaaccttgggagccggtaccggaacgctcggaaacggcaccaaagtacgaatcctagggcggaaaagcgttaccaagacactcgtccccagagccgcttcctgggactctctagcctccta

SEQ ID NO: 165008 - DNA, 122 bp, Homo sapiens
cctggacggagagacagagacagacagcgggtcagcgggggcggggggagatgacagacacgttccagcagatcccaaagggtggcgggcatttgtcccgtgccgttttagaggctgagctc

SEQ ID NO: 165009 - DNA, 122 bp, Homo sapiens
ttcaagcgattctcctacttcagcctcccgagtagctgggattgcaggcatgcgccaccacgcccagataattttgtatttttactagagacaggggttctccatgttggtcaggctggtct

SEQ ID NO: 165010 - DNA, 122 bp, Homo sapiens
gtactaggccaaaacaagcgaagcacccgtctgtgtgaggcagcgggtctggcttacaggcggcgcctcagggctcgctccccctccgagcgggtctcactcccagagcggggctcgcccgg

SEQ ID NO: 165011 - DNA, 122 bp, Homo sapiens
cttgtggcccgggcctgaagcagcccttttggggctgatattcaagaacccaccgggcagcgagcctcctaacatgcagacccccgccagcaagcagaagctccgggggagttgagtggggg

SEQ ID NO: 165012 - DNA, 122 bp, Homo sapiens
tctctctttctgcttccagggtaggtgggacttgaaattcattttaatagaaggaattttcgtggatataatctacaaccgattttgctctgcgcaggtaagatccgttttcagaccaaaac

SEQ ID NO: 165013 - DNA, 122 bp, Homo sapiens
tggaagatcacacctgccctttcccagggaggctgggtggcaaatgcaggtggtggggctcgcttcatttatctctctttagcccggtgcaagttgcaatgcctttaggagtgtatatttgc

SEQ ID NO: 165014 - DNA, 122 bp, Homo sapiens
ccggctaatttttgtatttttagtagagatggggtttcaccatgttggccaggctggtctcgaactcctgacctgaggtgatccaccaacctcggcctcccaaagtactgggattagaggca

SEQ ID NO: 165015 - DNA, 122 bp, Homo sapiens
ggctggggctggggctggggctggggctggggcccgggccgggtctggcctgggaggcttcgcgtctgcacctgcgggagcccggggcgggccgacggggcctccgcttgttacttttgtta

SEQ ID NO: 165016 - DNA, 122 bp, Homo sapiens
ggtgatctgcccacctcagcctcccaaaatgctggaattacaggcgtgagccactgcacccggacaagggttttaactacagaagatggtgtggggatatataatcagatttaagtttttaa

SEQ ID NO: 165017 - DNA, 122 bp, Homo sapiens
tgtgtgctgcatactgggatagaaagataaacaagacaaagtccctgacctgtttttatgcgggagatagacattgaacaaataattacaagtgaggtgagaaatgtccagcaaacctatga

SEQ ID NO: 165018 - DNA, 122 bp, Homo sapiens
gtattgctagaaaggagtcacaccataggtcaaatagtctcttctgctcataagcttaaacggaaggggaacccacaagctggttggagatgaatgacctcaatttgagagctcttcacccg

SEQ ID NO: 165019 - DNA, 122 bp, Homo sapiens
tgcaccgatgtgtgtgtgggggcccgctcgctagaggaaactgaggccaggatgactccgcgcatgcctagtacctgaatgggcccttagggttctgacctcgcttacctgttctgggcccc

SEQ ID NO: 165020 - DNA, 122 bp, Homo sapiens
gatgggggttgaagatgcgactcattttggagacgtggtcgttgtcacagtctaggtcctcgtcacctggctccatgctgaacttcctcttgctggggctgattgggggagggccggtgcgg

SEQ ID NO: 165021 - DNA, 122 bp, Homo sapiens
ggtgtggctagaggccgccccttggcgccggcgccgacgcgcgggctcaggccccgcccccgccccgcccccgcggacgccgggttccctcgcctcaaggtccaactccagcgccgcgggcc

SEQ ID NO: 165022 - DNA, 122 bp, Homo sapiens
gccccgttccaagccatttcaggagggtggccctgcttccgaggagccggagtcagtggccggataagcagagccactcgggagtggtgaggcccggaagggttagcccggtgggcggcaga

SEQ ID NO: 165023 - DNA, 122 bp, Homo sapiens
tccaaagacacccggttctgcctcgcaggccgagggggagtgtgcgtgggggcaggggggcgcagcgaactcccccacgctcggagttcagcccagcgcccgaagtaaacttccttaccgct

SEQ ID NO: 165024 - DNA, 122 bp, Homo sapiens
agagtcttctctaaactcccccggggaaagggagactcccttccccagtctgctaagtagcgggtgttttcatttgacacttacgctacccctagaccacggtccgcctggcaacgggcatc

SEQ ID NO: 165025 - DNA, 122 bp, Homo sapiens
tggatttgtgaggtccgttttaacttcccttgaaaagcgcatcatgtgggcgggggcaagcgcctggctgcgccggggggcaccacggtgctgcccatcacgggaaccgtccggggtcggtc

SEQ ID NO: 165026 - DNA, 122 bp, Homo sapiens
actttgtcaatttggcttcatggctatacttactattgagctaaaattatccttttaaaacgtgaatcagtttataacactcctctgctcaaaagtttccagtggcttccaccacaattagg

SEQ ID NO: 165027 - DNA, 122 bp, Homo sapiens
aggaggagccgctgagccaaggacagagcggcgggctcccagctcagctggcggataacgcgcgcggccgggaaggcggcaggcgggcggcaggcgggcggcaggcgggcggcaggcgggcg

SEQ ID NO: 165028 - DNA, 122 bp, Homo sapiens
aacacgctgcaagcacgtcaaggtagtcggagtcccctaacaatggataaattcgtcattcgaacgcctagaatccagaatagccctcagaagaaagattctggaggaaaggtttacaagca

SEQ ID NO: 165029 - DNA, 122 bp, Homo sapiens
ccttcggaccgcgcggcggggcctgccctgacccctggcggcgggcgggggaggcaggcgcgccctgcagagtacagaggggtgtggtgtcctctgcgagatcctcttaaaaagctggctac

SEQ ID NO: 165030 - DNA, 122 bp, Homo sapiens
tggagcgccagaggaggaacgagctaaaacggagcttttttgccctgcgtgaccagatcccggagttggaaaacaatgaaaaggcccccaaggtagttatccttaaaaaagccacagcatac

SEQ ID NO: 165031 - DNA, 122 bp, Homo sapiens
gaggccctcaccctccctgcctccttccccttcccacagagtgaagtccgaggccatcatcgcccgccgtgaacccaaagaagaggcggaggatgtaagcagctatctctgtacagaatcgg

SEQ ID NO: 165032 - DNA, 122 bp, Homo sapiens
ctccggaaatgcgtcagagaactgcctcgagcgcgttttccgcgcagatccgagaattcgcgagaatctccgcccagccagttcaggccagggcggtcagagacaaagggcctgggtttaag

SEQ ID NO: 165033 - DNA, 122 bp, Homo sapiens
ctgtgcagctgcgggctcgctcgggaaacccaaagtcacacgaaagcggcagcaccaccgcggctgggatatcgtctcccaacatggggagacaaaatggccgccacgccccgagccgaaat

SEQ ID NO: 165034 - DNA, 122 bp, Homo sapiens
ataaggctccgcaatggtctgaactacaattcccacaatccagggcgatttccgctttgtcgcgtttcctcaaggctccgccccatttcccatctttcttttcagtccttgcgcaccgggga

SEQ ID NO: 165035 - DNA, 122 bp, Homo sapiens
gcgggctgaggatgcgcagtgaagacatccaggcacccaggctggtgctgggcttggttccgggtctttgccccttggcaggtgtgagcgtctccttgggagcaaggaccagggtccctggt

SEQ ID NO: 165036 - DNA, 122 bp, Homo sapiens
gtttatgagtgacccagaaggcttctagctcacaatcgcacgatttcaggacgaggctgccggagaagcgctggcgaccgaggatgggggaaggacaaagaggaagaggaggcctgggaagg

SEQ ID NO: 165037 - DNA, 122 bp, Homo sapiens
cccaggaaactgcatcaccccccacactgcaaggcaggaagtctgcacaccaggaatcagcgttaaccgcacattaataaaatgcagtggttttgattggcatcccattttcctattcacat

SEQ ID NO: 165038 - DNA, 122 bp, Homo sapiens
gaagttttgtgggtgaagagtcagattagggctatattccaggctgcctcttcaccagcccgttaagcagacatttctcatcctaaacgcatgtgaatctgaggtccttgaaaaaccaccct

SEQ ID NO: 165039 - DNA, 122 bp, Homo sapiens
ccacttgtgcctgtgggcagagcaggtggtagaggggcctccaggaaagggccggggacacgggtgtccagcactaagcacagcgcactcagccgcagcctctgtctgtctccccacccgcc

SEQ ID NO: 165040 - DNA, 122 bp, Homo sapiens
aaacggcgtgaggatggtctgggaagcagtgatgtcagaagtcagggaggcaacaggcagcgtgtgctcctccctggacggccccttcatcatccaaactggcaggtgctctgggaagagtg

SEQ ID NO: 165041 - DNA, 122 bp, Homo sapiens
aaaggcaaactgcgagccttctcgggacgccctgttcccaccacagcccttcacacaatgcgtctaacagcatttaaggaacacccgccacgccaacgatcctgctggaaccgcccagttca

SEQ ID NO: 165042 - DNA, 122 bp, Homo sapiens
tcagataagggaataaaggtaggctgcccaacccagcagtcggcagccagcagcggcaaccgactcagttcctcttctacactttggaaggtttggtttttcgctctatgcaaaaaatcttg

SEQ ID NO: 165043 - DNA, 122 bp, Homo sapiens
agtcaatctgatgatgtaggtaaagcacttaaaactggtctggggcctggcacagtggctcgtgcctgtaatcccagtactttgggagtccaaagcaggaggatcccttgagcccaggagtt

SEQ ID NO: 165044 - DNA, 122 bp, Homo sapiens
tacccctggcctcagtctctggtgggcccagggctatggaggggcgcattcgagaggtagcgtggcctgtgcttgtaaacctttctaaaacattgtgatttttcctcaacccttgttatggt

SEQ ID NO: 165045 - DNA, 122 bp, Homo sapiens
cctgcgaattgaagctgggtgctgctagtgctgggggcaggcgtgggggagtcgcggaggcggggaggggggctgggcagaggttggaacgtctatttttagtgagggttttatagagtgga

SEQ ID NO: 165046 - DNA, 122 bp, Homo sapiens
gattggccccagccgccctggtgactcgacgcacttccgccccgggcgcggctcgggccacgcccacctgtcctgcagcactggatgctttgtgagttggggattgttgcgtcccatatctg

SEQ ID NO: 165047 - DNA, 122 bp, Homo sapiens
tccccaccgccacctgtttgtcctggtggccacgggctctgtatggttgggctgggcccccgtgctttccactgcccagcctgggtgtggccacagcactccagcgtgtgccagggaccctg

SEQ ID NO: 165048 - DNA, 122 bp, Homo sapiens
caggaggtcacgtctttcattcagacgctccaatgcttttcatttcagtttgttaaagaacgtgttttacaggaagttctttacagtaatttcatgccagacaccaggtttcttcgatggta

SEQ ID NO: 165049 - DNA, 122 bp, Homo sapiens
tccttttggccacaaggtttagcccctcaccgtgtcctggcaggggctgcattgcccgagcggggagtctaccacagagagcgcactggcgtccctctggcttaccctcctgactcacggta

SEQ ID NO: 165050 - DNA, 122 bp, Homo sapiens
cactccagcctgggtgacagaccaagaccttgtctaagaaaagaaaaaagaaagatgggccgcccagagtctaaacggaccctgagtttctgaataatgacacactgaagtgcacccacggc

SEQ ID NO: 165051 - DNA, 122 bp, Homo sapiens
ctttttttttcaaacccggagctgcactgggattggtggactgggcactcacgtggttaacggtcgcgggaagccgcggagcccgaacctgagactggacctgaggagacctcagcctcggt

SEQ ID NO: 165052 - DNA, 122 bp, Homo sapiens
ggccgtaaaaggcagacaaaagccctagcctcctccaatcggagggctcgagcttcagctcgctcccgcctctctcgcttacacgctcactctcttctccaataagcgggctcgaaaagggg

SEQ ID NO: 165053 - DNA, 122 bp, Homo sapiens
tgaactcctcatctcaagtgatccatccgcctcggcctcccaaagtgctgggattacaggcgtaagccactgtgccggctggttcagcccattttaaagatgaggaaatcaagactcagcag

SEQ ID NO: 165054 - DNA, 122 bp, Homo sapiens
aacatctttaacagctgtaacacacactgtgaaggtccacggcttcattcttgaagccagcgagaccacgaaccctctggaaggaaccaactctggacacagcaggacgtgagacttctacc

SEQ ID NO: 165055 - DNA, 122 bp, Homo sapiens
gggtgctgggagggatccgctctctcccaggccagctccactcctgttccactcaggctccggtcctacagtcctactctgactccagagtccttgctgctgctcggcggctgctgcttctg

SEQ ID NO: 165056 - DNA, 122 bp, Homo sapiens
aggctataaatatgagcccagattgtggtgagcattggagccagacagaggaatttgaaccgtaggcaattgaggatgcattgtggactctcaagtagagtaacaatcttcaaaatccatta

SEQ ID NO: 165057 - DNA, 122 bp, Homo sapiens
agctggcgccacttcctagaagcctggagggcaggaggaaaccaccagggcctccccccccgtggcccggtctcctcagtggccagggcttagcccacacccaccagggcggatgccggcag

SEQ ID NO: 165058 - DNA, 122 bp, Homo sapiens
aggtgagcggcaggcgagctagcactacagcctgagctccgcctcctgttacatcagctgcggcattacattctcataggagcacgacctttattgtgaactacgcatgtgagggatccagg

SEQ ID NO: 165059 - DNA, 122 bp, Homo sapiens
cctacactctttctatcacagaaatgtcctgggacctttcacgcatttatgacctccccacgctccatgccattcttctccttgacattgtatgtttgtttcaatgtttacttcagagaggt

SEQ ID NO: 165060 - DNA, 122 bp, Homo sapiens
gtggactccgggggcccgagccccctcctcgcgcgccctcacttccaagcaccctgatttcgtcaactttcgggtttgccttgttcattatgcaagccccagcaccagctagttccagcaga

SEQ ID NO: 165061 - DNA, 122 bp, Homo sapiens
gcaaatacagcctatcatgaatagtcctctcatacgacggtgaaaaccataaataaatggcgcaaaaacctctttgcacgaaaatacgcccgttttctgcagcctttccccttctgtaccct

SEQ ID NO: 165062 - DNA, 122 bp, Homo sapiens
tgtcctggtatcttaccaagctttcatttgaatttcgctggcgagtaatacagttgagcacggggtttttggccgtgtggatgccctcatttgtgaaatgccttttcaagatctctgctcat

SEQ ID NO: 165063 - DNA, 122 bp, Homo sapiens
ctggcttcagttctatggccactcaagaattggctcgcatctgtctgccaggacagagagcgtcctgagggggctggtgtgtgtgttgtgtgtgtgtgtgtgcacgcgcgcgtgcatatgtg

SEQ ID NO: 165064 - DNA, 122 bp, Homo sapiens
aaatggaaaacttcatctttccaactatttaaaaaaaccacaggattttatgatagcaagcgtacaaatacactgaaagaaatttattttcagattctatcaaaaaggatgcaggaagtcag

SEQ ID NO: 165065 - DNA, 122 bp, Homo sapiens
gacgtcactgtctgtgccagtgtctcgggcaggggctggcagggctgcccaggaggctgtcggtggggcagttcctcatgaatctctgagctgagtttgtaaaagtgtgtgagagtggggaa

SEQ ID NO: 165066 - DNA, 122 bp, Homo sapiens
agtatgtaattgtttcattgtttcttcatcctgtgatgctaaagccgtatgctcataaagcgcaggcacaccggtagaaaaactagaggggtctggagttcctaggtgaaccccagcagcct

SEQ ID NO: 165067 - DNA, 122 bp, Homo sapiens
ggtgccttggagccgctgctctcgcctcccttctccacctagcggcggtgtttcacaccccggagtggctttttggggataaaggcacaaatctttgccagacctcccgccaggccccctgg

SEQ ID NO: 165068 - DNA, 122 bp, Homo sapiens
tgctgggaattcctgcagggcttaaataattccacagagggcaatcatacctgtcatgcgcggttcgcaggcggcatcgagagatgcacaggcctccgtattttctgtactaatttgccaca

SEQ ID NO: 165069 - DNA, 122 bp, Homo sapiens
ctcagatccaaacccgcactttattcctgggtacctgaaaaataactactagctggtcatcggtctccctccgctccactcgctcccatccacggggcaccgttttatgatctaaaaattgc

SEQ ID NO: 165070 - DNA, 122 bp, Homo sapiens
ggagcgcagcatcctccccggctcgctagctccctttgttcatctcgctcaaccaggctccgcactgccgcctggccctcgctcccagagcttctctaaggatatgggatggacttgggagc

SEQ ID NO: 165071 - DNA, 122 bp, Homo sapiens
ttcttatgcagtttggccacgaaccccaggacttccatcttgctgatttccaggttgcttcggggaccccaagagaattcatattctggtggattggtgtgaggcacccgcctgtaactgag

SEQ ID NO: 165072 - DNA, 122 bp, Homo sapiens
ctctaggccccagggacgacagtgtgggaggctggtgggtgcatgggggctgcccagccacgtgcaagtttctgtggggggatccagaggaggcacccggctgagcaggagatgggaattga

SEQ ID NO: 165073 - DNA, 122 bp, Homo sapiens
tgggctgctttcgggaccttcaggttgtcgcaccttcgcgggcacctgcggctgctccagcgtggggaccaggcttcccacgggctccattgggagctctgccccggcttggcctccgggcg

SEQ ID NO: 165074 - DNA, 122 bp, Homo sapiens
gggatgtgcctgttgctgtcgctggcctctgagtcactaaagcctaagctccttgagggccgggtggttgctgggcccgagtctgtgccccagccctggcccacgcctgccctcagtagccc

SEQ ID NO: 165075 - DNA, 122 bp, Homo sapiens
tctagctgctgcagatattagtcagcaatttcattcagtttcttggatctctctcacactcgatcctcactgtatccttcacagaaatccttctaccctctctttgtccatcagctcctgca

SEQ ID NO: 165076 - DNA, 122 bp, Homo sapiens
gatcgcagggcggggacgggggccgaggggagaatgcaggagaaaagcgggccggggcgacggggaacgcaaagcttttaaattagtaatcaaacgcagtaaaacggagcaaaaccagcccg

SEQ ID NO: 165077 - DNA, 122 bp, Homo sapiens
aggggagcggggctgaggaggatctgggcgggggctcctggaacggggcggcggcggggccgcgttgaggggaccgcgcgtcccgggctggcacgagccagcagcggaggtgcccgcggcgg

SEQ ID NO: 165078 - DNA, 122 bp, Homo sapiens
taaacgagggcaccactggtccggagttgcacttgttcgctccctcctgggctctggcagcgctgcatccccggggttgcttcgggttcgggcccaatagcagagtcagagccgagacgcat

SEQ ID NO: 165079 - DNA, 122 bp, Homo sapiens
cagggtctctgccggccactctgaattaagcgctcctgttcacaggcagatggtgcagaccgtgcccctggggctcaggcaggtccagagagaggagagagcagagagcaggccccggcctt

SEQ ID NO: 165080 - DNA, 122 bp, Homo sapiens
cctactgttgcgggggggggggtgacccattcacgtggtggggggaggggagcgagtggacgagtccattcttatattcccttgaaggggtggctcgaatgcacctggctgggggggacgct

SEQ ID NO: 165081 - DNA, 122 bp, Homo sapiens
tctcagtaacggtccatttagtaaactaaaggcctccccatttggggtctcaacgatgcacgcagatgggagataaacttaaggccaccgagacgcttaagcgacacgtgcctggcttctgc

SEQ ID NO: 165082 - DNA, 122 bp, Homo sapiens
tgcaactctgtccctgatgggaagggatcgcagttgcctaactgccaaactgcaacaacccgggaagagtgtgagcccaattagattacaagccctagagcaaaggggatcacaaacctccg

SEQ ID NO: 165083 - DNA, 122 bp, Homo sapiens
tccatgcaggcatcttcagggagccaaggctcccctcgccaagtcctgccaggcatggggcgctgaatggtggccccaactgacccccacagctgtgaatgtgacctttgttgggaagaggg

SEQ ID NO: 165084 - DNA, 122 bp, Homo sapiens
aatgacattaactgtgatttgttgaatccttactacatgccaggtctcatttaatcctcccggcaaccctgagaggaggaatggttgccagaattccccatccaggtttgtgtgactccaag

SEQ ID NO: 165085 - DNA, 122 bp, Homo sapiens
agtaaacttatccagaaaataagacaaaaatttaacttcatgctatagctgcaaagttttcggaaagcgggatttaaaacttccattgtaactttaactagcggtcatgtcaaatttcacaa

SEQ ID NO: 165086 - DNA, 122 bp, Homo sapiens
cacatggcctggttctgagaagcggcaggcagggtggccgttgccatgtcatgtgacacacggcctggttctgagaagcggcaggcagggtggccgttgtcatgcgacacacggcctggttc

SEQ ID NO: 165087 - DNA, 122 bp, Homo sapiens
cctctagttaggtttctggggacccaaggacccaactttaatgacagtaatttatgtagccgttagtgtagaatcgtcgctagcaggcagacggccccaacagcgaggaagaaatgtaaatc

SEQ ID NO: 165088 - DNA, 122 bp, Homo sapiens
tttggggagcagggcccacgactagaacaaagttaaccctaccggttcccgccacggcttcggcacatttcaaaaaaccaggcgcaggcaattgagaaatacgctgccggctgaaacagcct

SEQ ID NO: 165089 - DNA, 122 bp, Homo sapiens
tgtagaggaacaaaattctcactctgctgctgactgtgtgaccttggctgaaccatatgacggctcccagcctgcacttccttacctgtgtgatgggaatgatagcagtgccttcttcacaa

SEQ ID NO: 165090 - DNA, 122 bp, Homo sapiens
acacagctcccagggacagacccccctttccctgccccatcctccaatcatctggctgtgcgtccctccagagacacgcctgcaagtggtccacaaacactcctctagagggcctgctcaga

SEQ ID NO: 165091 - DNA, 122 bp, Homo sapiens
aaacatggatcaagaaactgtaggcaatgttgtcctgttggccatcgtcaccctcatcagcgtggtccagaatggtaaggaaagcccttcactcagggaagaacagaaggggagattttctt

SEQ ID NO: 165092 - DNA, 122 bp, Homo sapiens
attcggggtggggccattgggatgaaccgaaaataacacttattgaattgcagttcttcccggggaagaatcaaatgagtgaatttcctaaattgaacttgtcccaaaggcatcttagcatt

SEQ ID NO: 165093 - DNA, 122 bp, Homo sapiens
gagactatgtcctctgccttctagcctggtgttcttccttgcatcatgccccatactctgcgtaataaaaatacagcgaggcctttgaactgtaaagaaacagacctgggcaggcagggtgg

SEQ ID NO: 165094 - DNA, 122 bp, Homo sapiens
acacaccaattggacgccatggcctggccagcactcaagacaccaacccacagcatcccacgcggaaatgagcaactctcactcacagggacagacagcagggctcccacaaaccctcaagt

SEQ ID NO: 165095 - DNA, 122 bp, Homo sapiens
tctctagtgtaaagcctgtggggatctcctaactagtactcctgccttcagtcttgctgacgccttactgccactgagtcatctttctaaataacaaagctctgtcactccccagcccaagc

SEQ ID NO: 165096 - DNA, 122 bp, Homo sapiens
gcacagccggctctgcatgaattgctctttctccattgcaatttccctgtcttaacaagtcggctctgtctaggcagccggcaagggtgggcggttatagtttcacaactcaaccccagcca

SEQ ID NO: 165097 - DNA, 122 bp, Homo sapiens
atgagcctaaggcagatggaacagcagctcaggcattccttctttatcactagttttacccgcagtggtcctcttaagcttctttgatgttgctttgttgccatattagagtccattaagtc

SEQ ID NO: 165098 - DNA, 122 bp, Homo sapiens
tccgccctcatggattggtggttggtatcagctgctccaccttttctaccatttactgaacgagttgaggaaaaagggaaggagtctcgtctttacatccttattttctttttttattggtt

SEQ ID NO: 165099 - DNA, 122 bp, Homo sapiens
agcagcccctgtggttggcagcaaagttcagcttggctgggcccgctgtgaggggcttcgcgctacgccctgcggtgtcccgagggctgaggtctcctcatcttctccctagcagtggatga

SEQ ID NO: 165100 - DNA, 122 bp, Homo sapiens
tagcggtccaaatgtagactccgcaaagaggctaagaagacctgtctacccgggtgcgcgcgatggggtcagggtgtaagaaccaggagcctcatagaaacctctgcttggggtccaaagcc

SEQ ID NO: 165101 - DNA, 122 bp, Homo sapiens
ctgtcgaggggagtgggggaaggggacttgtgtcctaggcgcctccacgttcagatctagcggagctgggggtcccagaaggagctgctcttgaagggctttctagaaccgcggacagctcc

SEQ ID NO: 165102 - DNA, 122 bp, Homo sapiens
tgcgacatgcccactgtttgcatgcgacatacccactgtgcacctgacatacccactgtgcgcgcgacatacccactgtgtgagtgcgacatacccactgtgcgcgtgaaatacccattgtg

SEQ ID NO: 165103 - DNA, 122 bp, Homo sapiens
gaaggctatttgggggggcccggggggatctgcagcagcgtgggtgaggtctccatgatccgcaccagcagccggtcgatgtagctctccagctcctgcacatgctcgtcccgctggctcag

SEQ ID NO: 165104 - DNA, 122 bp, Homo sapiens
cacacctgtgttccaacactcgtctttgataagaattgtgaccacccacccccccaaccccgcccaataagctacataaggactcaatgagaaacaaaaattatctaggtcaccttaactgg

SEQ ID NO: 165105 - DNA, 122 bp, Homo sapiens
cagctcggccgcccctgtctccatgtcgcctcccgccctaggtacgcttcacacacacagcgccgcctcagacctgccgactggccacttccggcgtccgcagccaacggctccgccggacg

SEQ ID NO: 165106 - DNA, 122 bp, Homo sapiens
catctgctccccttctataaataggtatcacttttctcttgatctcttttctctttaagacgaatcttaagggcagggatcataacacacattaagaacagcattcaatgaagcagtacaaa

SEQ ID NO: 165107 - DNA, 122 bp, Homo sapiens
cttcatgctgaatcaccagggggtcccacatggctgtcccaactccatcaagctggagtccgagaggtggcaggcaggcgggcaggggcttaggaacacgcgaggcagccgcactctaagtg

SEQ ID NO: 165108 - DNA, 122 bp, Homo sapiens
tattgtccctgcccccagctccagagcaggaagaaccggcccagggcaaggtctgtaactcggggatcaaagggctgctgctgcagccaagcctctgcagagcgaacttgagctccctcccc

SEQ ID NO: 165109 - DNA, 122 bp, Homo sapiens
gctgagctcaccagagttcgggatgaatgagaaaatgaataaggattcacagtacagtttcgctccctggtccagctcagtcctgtgccacagaaagtggctgataactcttttccaatagg

SEQ ID NO: 165110 - DNA, 122 bp, Homo sapiens
aaagaaaatagccatagagtgactgaggaggagtttcttagacaagcttgtcagtgaaagcgtctctgaagaaggggcatttgaactgagtcctgaatgatgaaatgaggccagccaaacaa

SEQ ID NO: 165111 - DNA, 122 bp, Homo sapiens
cgtctccatatcccattgattcattgaaaacacaaacaaagctaacaggagcacgaagcccgccagcttgccgcaagctccacgagggggaacatgtgtagcacggggaacagctgtgtggc

SEQ ID NO: 165112 - DNA, 122 bp, Homo sapiens
gtttctttgttttgtttttccatgctctgtaagcacccctttattagccacgtaaggaagcggatttggggatttcgctgtttccccctgaacggatccgggaaatgaagggctcattctag

SEQ ID NO: 165113 - DNA, 122 bp, Homo sapiens
aagaatagacagtgatttaaccccctccttcctcctctacagcccgatccactctgttggcggctgcgccttgccttgggtgcagtgggacgtgtccctcccatgtttcccttaattaggag

SEQ ID NO: 165114 - DNA, 122 bp, Homo sapiens
attcgggagagctggaatgatctgatgtgtcattccgtacttgggtgaggaagccgagcacgcagagttaccgctcagggcaggacctgggctgcacctggtatcagggcccacgtgagaga

SEQ ID NO: 165115 - DNA, 122 bp, Homo sapiens
ccacctacccacccgctctgttcttcaacaccaattttcttttaatgttggtttgtttggcggggaggggggaatagggagctatttttatgatttatagcatctgcttgatctccaagatt

SEQ ID NO: 165116 - DNA, 122 bp, Homo sapiens
gaggccaaaggctgaacccaatggtgcaaggttttacggttcggtcatcctctgtcctgacgccgcggggccagcgggagaagaaagccagtgcgtctctgggcgcaggggccagtggggct

SEQ ID NO: 165117 - DNA, 122 bp, Homo sapiens
tgtactcttaacagttgccaaaattgggtttactattctagcccattccttcggaaagcccggaagctcagaaccctcaaattgatgggttttgtttgtctgttgggtaaagggggaggagt

SEQ ID NO: 165118 - DNA, 122 bp, Homo sapiens
aagtggcactctttcaaaagttattatggaataccctgtatgaagggaagccagaatagtcgtgtgagtcctgactttacacaagaaagtagagggtattccaagtgtttgcaaaatggagg

SEQ ID NO: 165119 - DNA, 122 bp, Homo sapiens
gaggagcaggcgatgggcagaggccgacaatggggtccggatcatgacgacccagcctcccgaagagggggttgaagtcacgcgactctgagaccgacgcgccacgcaagggggcgccacgg

SEQ ID NO: 165120 - DNA, 122 bp, Homo sapiens
ctgccaccgtaacctcaaccactttgagacctatgaggcctgcatgctggcctgcatgagcgggccgctggccgcgtgcagcctgcccgccctgcaggggccctgcaaagcctacgcgcctc

SEQ ID NO: 165121 - DNA, 122 bp, Homo sapiens
tgtccatcctcaccagcgcgctggcccgttggcttcttgctccgctttgtggtgggagcacggacttggagctcccttgggtggccctggatggagccaggccctgcacagggatccttgtg

SEQ ID NO: 165122 - DNA, 122 bp, Homo sapiens
aaagaaacaaggactaaatgtgcaaaattgccaagcagttcttgaaacattttgcacagccgagaagtcaaacaacattcagtcttcagcacctttgcccttctttggcaatttctttcact

SEQ ID NO: 165123 - DNA, 122 bp, Homo sapiens
aaaaaaaaaagaaagaaagaaaaagaaaaaaaagaaaaaagcaggacaacttaactgattcgaataaaataaaattagggccaggcatgatggctcacacctacaatctcagcactttggga

SEQ ID NO: 165124 - DNA, 122 bp, Homo sapiens
tggaagcagaggaggtacgtctcagccagagtctgctagaactgtggcggcggcgagggccggtctggcaggaggccccccagctacctgtggacccacatcgggacaccatcctcaacgcc

SEQ ID NO: 165125 - DNA, 122 bp, Homo sapiens
cttgtagcaagctcctgggggaggcagttctggatgtacacctagccactgcggttcaggcgtttggaagttcttgtgtgctggagatgtggctggagtttgtctcacagtggaggcaagga

SEQ ID NO: 165126 - DNA, 122 bp, Homo sapiens
tctgttctgggcacgcctcccccgggcacccaggcctggccagtacgactcacgcaacatcgcgcttttcctgtagtgcctcacgttctgccatggaattttcttttgcttgcatgatgtta

SEQ ID NO: 165127 - DNA, 122 bp, Homo sapiens
tctcctggtgaggtcgggctgtcggcgccctggccggctgccttatacctgctggcaccccgccctggccctcgcccgctcagcagactctgcgggtctgagtcaccaggcagccgggctca

SEQ ID NO: 165128 - DNA, 122 bp, Homo sapiens
gggggaaaacttgtacagtaaaagaagtccttaggatgctcagtgctttcctaagggcaacgtgggagcactaaggaagcagtagtctcctcagggagtggttgggaatggttcccagagaa

SEQ ID NO: 165129 - DNA, 122 bp, Homo sapiens
caacggagaactgacgagactgtttccccactgacgggtctgtaagagttgggggctgcccgccgcctggtcagtcacgctatgcagctcttaggttgaatcctgggctgccctggctacca

SEQ ID NO: 165130 - DNA, 122 bp, Homo sapiens
gtggatgcgtcttacccgaggccgggccgcctcgcccgctctagtccagcggagcccgagcgcctcggaccaatccccagtgattatgcaagacagcggaccaatcagctccgccagctcat

SEQ ID NO: 165131 - DNA, 122 bp, Homo sapiens
ctctctgagagttggggtcccccagcactgaggtgggggtgctcaccttcagtgtggagacgacctcgtcgccgttgtccttggtggcgatggcataccgcatgacgcggtcagggtcgatg

SEQ ID NO: 165132 - DNA, 122 bp, Homo sapiens
attttatatacataccctaatttttaaaatctatattcagaatgatggacatttaggttgcgttcatcactgaaacatcctccattaattcttttttctttttattttttactctagcctcc

SEQ ID NO: 165133 - DNA, 122 bp, Homo sapiens
gggtatgagaatcccatgggcaaactctaaattgtctagcacatattaggaactcttaaacggtagctgttgtcacgaggaatgggcttgcaagctctggctgcccagcagaaatgcactga

SEQ ID NO: 165134 - DNA, 122 bp, Homo sapiens
gggagcgcctggcggtgctgtgccgtcagatgagccagctggaggaggagttgggcaccgcgcaccgtgagctgggcaaggcagaggaagccaactccaagctgcagcgcgacctcaaggag

SEQ ID NO: 165135 - DNA, 122 bp, Homo sapiens
cagtgatttcttgatgcccatgccaaggtcaagaaggcagatgcccatgggtgcatggcacggaggccagccaggaggtccccctagctgctaccctttcagagggagggggccaagaagga

SEQ ID NO: 165136 - DNA, 122 bp, Homo sapiens
cgcaggctctcggggcttggtgctgctgctggaccacaccttgagaaacaggctctgggacgggagagctgcggtgccgaaggaaagaggaaaggttcccatgcggggccacagactgagtt

SEQ ID NO: 165137 - DNA, 122 bp, Homo sapiens
cctggaatagtctggaaggaggatgcaaactagaatgtaaaatgcaaagccctttctgggcggaacgtaggatttcatgctgatggcccacaggacagtatagaaatcttctccctttctat

SEQ ID NO: 165138 - DNA, 122 bp, Homo sapiens
ccagtggcatgggtctctgagagaatcattaacttaatttgactatctggtttgtggatgcgtttactctcatgtaagtcaacaacatcctgggattgggacccactttctgggcactgctg

SEQ ID NO: 165139 - DNA, 122 bp, Homo sapiens
tctttctccctcagtggcacctgcagctgttggttacgttttctcccttgtacgcacccacggcactttctcctggtttgttgttctctctctggttgaacccagctctctgcctgtgccac

SEQ ID NO: 165140 - DNA, 122 bp, Homo sapiens
atctgctaattctcagagcacaggtagctcctccatggcaatgtgccaggtgcagtgctacgaacatcatatacatcatctcattaattctgcgtggtgaccttgggagaggcacagatggg

SEQ ID NO: 165141 - DNA, 122 bp, Homo sapiens
ttccctaagtctttacacaatgaatatagtaatggggccactagtcgagggtggtaggagcggcggagactcggtaatatactggccacgcctactctgccctgccagtctcttctcacgtg

SEQ ID NO: 165142 - DNA, 122 bp, Homo sapiens
cccacgtggagggtggtgtgtccaggggctatgtgagctcacacactcacagggaaggaacgtgggggttggcacacctgagaagtgggcgggaatcaccccacatgcccgcggcagggggc

SEQ ID NO: 165143 - DNA, 122 bp, Homo sapiens
gcctaggggaggaggagagggcgcaggggcttgggaagacgcccccgtcccgcacccctgcgccccagccagcagctgcggcggtcaggagcccactggcccgttctcccgccccctgcccg

SEQ ID NO: 165144 - DNA, 122 bp, Homo sapiens
aatgaatgattgtaaatatttcttagcagtcaaagtttatctgggggaatgcagaggcctcgttagtcccttttagagaggtagaaagttgtagaattaagtttatggtaaaaggatttcat

SEQ ID NO: 165145 - DNA, 122 bp, Homo sapiens
aaataaacagttcctcaggtttaaattgcatgccattccgagcagcgtgatgaagtctcacgccgtcctgctgtctccttcctgggatgtggcttgtccctttgtccggtgtgccgatgctg

SEQ ID NO: 165146 - DNA, 122 bp, Homo sapiens
cacacctccatgaagaactcgcaactatgtctctctcgaaacattattaagtaacctatacgtccagtatgaccctaatttttaagggatgtgtatatgtaattaacacagagcggaaggac

SEQ ID NO: 165147 - DNA, 122 bp, Homo sapiens
tttgtgtgttagttgacctgcctcagctttcccatgatgaccaatctcagggaaactaatcgatttggagagaacacataaaagcaggcacaagattcatctgccccctttcagccagactg

SEQ ID NO: 165148 - DNA, 122 bp, Homo sapiens
cgcttttctctgcggtcatctcgtcctttgtctttgtcttcccaatccctttggcgttctcgttctttatccctttctctcgctctttctcgttcccgttctcgctctcgctctctctcccg

SEQ ID NO: 165149 - DNA, 122 bp, Homo sapiens
caggagcccagcgccgcgctgcggggcctgctgggacttgtagttcgcaggttcggggtgcgcaggcgcagtgccgagtttacctctgcgcgcgtcggggttggtggcggcggctgcggcga

SEQ ID NO: 165150 - DNA, 122 bp, Homo sapiens
gccgcctccttttctgagtggggagcttagagatgctcaggagggacctccccgattctgcgattctgagcatcaattttggcaggaggctagatagaagtagcaattgacattcatcaccc

SEQ ID NO: 165151 - DNA, 122 bp, Homo sapiens
aggatctccactgcacctcaattttgcacatgaaatgtttgtaaaggccagagaaattgacgagatagcaggtttctgaagtttttgtggtctattgtaactattataacaactcttatcaa

SEQ ID NO: 165152 - DNA, 122 bp, Homo sapiens
gggcacgctcccccgggagtgcttccgggacagggggcggggtcgccggaagtggccgtccgccgtccgctgctcgttgtttaagcggctgacgggaaggagaagccagagctccagcggcg

SEQ ID NO: 165153 - DNA, 122 bp, Homo sapiens
aatttttccaagacattcaaggtaacattgtcttttaaaatctgtgaaattttgctgcggcgcaaataacctcttgcccattgtatactggtctttgctcaatgaaagctttctaatggtac

SEQ ID NO: 165154 - DNA, 122 bp, Homo sapiens
cgccgctgtcccctcctccaggaagctggtcctgattgaggggcagaggactgccagcttcgccggtcaaccgcccggtatccccgttcccccaaccacagggctttagggaaatgcccgct

SEQ ID NO: 165155 - DNA, 122 bp, Homo sapiens
gcgggcgcgcgcctgcccccgcccccgcgtgcgtgcgtgcgtgcgcgcgagcggactccgcgcccctccgcgcctcgcggccgccgctccttgcctgaccgcttgctccccgcccgcccgcc

SEQ ID NO: 165156 - DNA, 122 bp, Homo sapiens
ctatatgcccagcatgtgtgacctaatttatcctttatcacaggcctatacattaaatatcgttattatccattttcaagctgaagctctgtatggttaaaaaccttgctcacaaccatact

SEQ ID NO: 165157 - DNA, 122 bp, Homo sapiens
atatttcctgcagtttttataaaagtgcaagttcctgtatccgacccatgatgtgctgaccgggagctctggcagtggtatccggggtctgtgtgtcgaccctcactgtcaacaacagggag

SEQ ID NO: 165158 - DNA, 122 bp, Homo sapiens
ttctgtcagttcccaaaggtcatcttcccagagagaccctccctgaccctgggtaaactgcgtctccctatgctgctccagccagcaccctgttgactcccctcacaatgctaacaagcatc

SEQ ID NO: 165159 - DNA, 122 bp, Homo sapiens
cgtcactgtattgtcctcctcggcaccgagcgatctgatccgccgagccagaaagacacccgatgggggagagaagcaaagtggaaaaaaaccgacgtccctgctctccagaagggagaccc

SEQ ID NO: 165160 - DNA, 122 bp, Homo sapiens
cagcatggggactctgaggttctggctgggaatctggagagggggaggggatgtcatcaccgctttagccctatatggccttttagagtcaacaactttgacctgtcatgtccagggaggca

SEQ ID NO: 165161 - DNA, 122 bp, Homo sapiens
cctcccgcgcatgtccgtcccggctggctcagcgccgcgggctcaggggcccggacatcgcgcaggcgcctcttgctggctcgcgctcccgctagcactctgcctcgcaccggaccgccgtc

SEQ ID NO: 165162 - DNA, 122 bp, Homo sapiens
attcacagattaaagctcggaaggttcccagtcttcccaaaggtactcttacatagactccgttttagtccatcagtagtctcggactaggaaaagagaaatcctgagaaagactgtaaata

SEQ ID NO: 165163 - DNA, 122 bp, Homo sapiens
aagatgtgctccttgttccaaatctttgtgacacggagccccagcccggggtgtctggggcggaggcttgactcaggcctcagtcagcagagccgtcaccgggagtgcggacgtcaccgtct

SEQ ID NO: 165164 - DNA, 122 bp, Homo sapiens
agtagtgagtggtgttccttgacaccttttgctaccgctggaccacgatccgcttggtgacgggcgtcttcccagacgctgccgtcaccgctagaccaaggagccctctggtggccctgtcc

SEQ ID NO: 165165 - DNA, 122 bp, Homo sapiens
cttctggagggaaggaacactgcatcctcacagggcagaagacagaagggcaagagagggcgagccccatccatcaaaccctttatagtggcattagtctattcatgagggctctgccaaaa

SEQ ID NO: 165166 - DNA, 122 bp, Homo sapiens
gatcggtgtcccagaatatgtcctgagaagcaagcaggaccaagaggtaacccgggtcagcgagtgagggagtggtatggcgcaccatctatctgtagtcacggggtcctgccttctccctg

SEQ ID NO: 165167 - DNA, 122 bp, Homo sapiens
tcaacagtgagtaagatgtatgcaataagagaacagataacttctcaacaatgtgcatgccgtttgtgtagatgttcagaactacatatgtgtgaatatcactcccaccttacacacgcaca

SEQ ID NO: 165168 - DNA, 122 bp, Homo sapiens
ggaatcctggggtctggctggcctgccacagcgtttaataatagtaacagtgagtgtaagcgtttccatccttcctgtctttgggcagaagaaaggaaagaggagggagaggagggagagga

SEQ ID NO: 165169 - DNA, 122 bp, Homo sapiens
gctcaggctgtgaagaagtatccttttcatggtcgcgcgtcttgtgtttaaaacaggccacgcacagtgctgacacgctatctgatgtcctaagcgcaaggggaggggaggccctctcgcga

SEQ ID NO: 165170 - DNA, 122 bp, Homo sapiens
caggaactcagccacgagcctattaaactgaatcatgtactccttcaccatgatgtgggccgcgcggaagcccagggtgccgtcctcgtccggctgctcatagaagcagtcggaccgcaggc

SEQ ID NO: 165171 - DNA, 122 bp, Homo sapiens
aacagatgattaaattggagagggaaggggaggagagggaccaggcttatttgttttttacgtaagatatgagagtcatgaaaaatagttttcagcttgttacagaactctcctaagatgtg

SEQ ID NO: 165172 - DNA, 122 bp, Homo sapiens
ccggagcgggcaggaccgggagaccccccgccggcttctttctgtgcccccgaggccggccggcctgcctttcagggagcctccccacgggcagcggcttcgtggccttaaactttgccatc

SEQ ID NO: 165173 - DNA, 122 bp, Homo sapiens
tccccatccggggttctacctcatggctccctgataccagatctctgtccttgatctacccgctagacttggccccaggtccccagtccatgactccccagcccagcctccatcctgccccc

SEQ ID NO: 165174 - DNA, 122 bp, Homo sapiens
gggagacgtggagtgcaggtactgtgcgatctgggggcgcggcgcctcggctaccctcctcgtgttgtcttccacgctataatgcatggaatataatatatattatatggaatataatatat

SEQ ID NO: 165175 - DNA, 122 bp, Homo sapiens
gacagatggtggaggatcctccagaaacaaaacctcacctcgcttcgacatcttgaacgccggaaaaaagaaaaaaggaagtcgattcaaaggacactgggatatgaactttaacgccccgc

SEQ ID NO: 165176 - DNA, 122 bp, Homo sapiens
ccagattcagggtcaggctcagtgatcagagtgagagttcagtgtatggaccagggtcagcgctatctgttcccagggtcagggctcagtctatggcctgaataagggctaatgtgtgtcca

SEQ ID NO: 165177 - DNA, 122 bp, Homo sapiens
tgattcatttgcaactcaactcagctttggaactcctcagccctgagtttggtctttagtcgcctctgagaactttaattcctcgaatataaagtgcaggtgttaaaagcttttgtctcata

SEQ ID NO: 165178 - DNA, 122 bp, Homo sapiens
cccgcgcacaggagagatcccccttttgaattgcagagggggaccgacactcctggagcacgcacacggcccttttcactcatggtcgggagtctaacccatcctttctctgataccctacc

SEQ ID NO: 165179 - DNA, 122 bp, Homo sapiens
ccgaagctggggagccgggggcgctctcccgggccgcaagcaggcacggaatttgacgcccgagaggcagatggtcctggctaggactcctgattcttctcagatggaaacagtttctcccg

SEQ ID NO: 165180 - DNA, 122 bp, Homo sapiens
aaagttgacgttttgactctcccatatccaagatttggactggtcctaaaacctgatcaccgcaggggtgggcttccgacggcccccacgcgcgtggcggatcccaacacctacctaggaaa

SEQ ID NO: 165181 - DNA, 122 bp, Homo sapiens
gtgtcccggccgcaagattttttaaaaagctacaatttgaaagagaaatctcaccgcccccggtttttagggtttttacctcagacgagcattagccccaaaattaggggactgtgcacgcg

SEQ ID NO: 165182 - DNA, 122 bp, Homo sapiens
agcgtggcgtgtggcagaatcgcaccgccccggctccccagcccaccgccatgcagggctcgcgtgcgggaaaactaatatgccggcgtttaagcctgtgcccctctgctgggtgtaactgc

SEQ ID NO: 165183 - DNA, 122 bp, Homo sapiens
tggtgtcacaatgattggagggtgcttccagcattggcaagggaatgagggagtcaggaacgctaaaccaccttgcacagttgagacctgtgcccaccctccatggtggatgtttacttgtc

SEQ ID NO: 165184 - DNA, 122 bp, Homo sapiens
cttgggacagggccaggtttccacttaagtaaaacatggtggggtgtgttttgtaaagttcgagtacgtgggcacaattgtttacagtggattaaggtttcaacagaatttagtaatgacta

SEQ ID NO: 165185 - DNA, 122 bp, Homo sapiens
gatacatcttgatgccaagccctctttatatgtctcacttcagtgtggccattttggactcgtacactaaaggagaactgagcataactgtaaatgtgtgggccaagtggcaggtgacttag

SEQ ID NO: 165186 - DNA, 122 bp, Homo sapiens
cacttccttcctttcttcccagcccaggacccagacctggacccaccccaagctgagaagcgttgggcaagtctgggctccctcactggcaaacacctgggccttctgcgggaggaaacgct

SEQ ID NO: 165187 - DNA, 122 bp, Homo sapiens
agctgggcgtggtggcgcacacctgtaatcccagctactcaggagcctgaggagcagaatcgcttgaacctggttcaaggattcagcggaggttgcagtgagacaggatcgagccactgcac

SEQ ID NO: 165188 - DNA, 122 bp, Homo sapiens
aaatgtgtcaaagcgcctttagaaacttactaaatcatcagtttccttacggggtcggcacgcttgtgcacaaaatgagaaaggtaaagatcagaaaggttgcagcacaactctaaagccac

SEQ ID NO: 165189 - DNA, 122 bp, Homo sapiens
cccagaatcccagtaagtcgccaactctccaagccaagagcggtctgacctagttgatggcgaccccgcgggagagggaattactccgcgaaaggtcgagggatcaaggtgctgggggaagt

SEQ ID NO: 165190 - DNA, 122 bp, Homo sapiens
tacagctcagagagtctgaattaaactatactatgtgtgctttttcagaaatacacaatacgctttaataaagaataggatcagttcctgaaaattcacaaactactctctgcatttttagt

SEQ ID NO: 165191 - DNA, 122 bp, Homo sapiens
gcggggacagagggaaggggcggagactggctctgggccctgggctgcaccctgaccggtcgctgggcgctgtctggctcctgatgggtcccggcggcggggcggggcgggcctgggcttgt

SEQ ID NO: 165192 - DNA, 122 bp, Homo sapiens
ttttctttttccttttataatttgaagaggagaaaagaactccgctgagcaggcccgggacggcgaagtgccaccagctaccccaacaaggacgtctccaggggaaagggagttggaagcaa

SEQ ID NO: 165193 - DNA, 122 bp, Homo sapiens
caaaaaggataacagcccctccccaaaacagattccctcctcgcttggggggaccagtcccgttgtaaaaccgacaaataacagcaggattaggaattccggctcaggattcacgcagccag

SEQ ID NO: 165194 - DNA, 122 bp, Homo sapiens
acttcagtcttaactgtgtgttacaaagtttgaaagagagggttccctatgaataagaagcgcacttgaaagaacagctgtctggtctaacctctcactggtgcttcagaggaggaaaaaag

SEQ ID NO: 165195 - DNA, 122 bp, Homo sapiens
caagttcctagggtgggccgaggacagagcgcctcaggcatcgtcggcttcccacggctgcggcccaggcccagcctgcggccttggagccattcgctccaagccccgacaggccgcgaccg

SEQ ID NO: 165196 - DNA, 122 bp, Homo sapiens
ccgcgaaccagggggaagcgggaggccggcggagcatgagagggggcggcgggaggcgagcggggggagccccggaggctccaacaacttcccagtcctgcggggattccgagttccgaaca

SEQ ID NO: 165197 - DNA, 122 bp, Homo sapiens
cggctcgctgttaaccgtcaaaccgtcaaagcatttgtggaggaacctggggcaaagttccgcgccgggttctccagctgtgggttcatcagcttagcccaccactcccacgtaacaccagt

SEQ ID NO: 165198 - DNA, 122 bp, Homo sapiens
cggggtgagcacggttaacaaaccctacagctggcggatctgtgcagacataattgcacacgaatggcgggggagccgggaaaccaggaagaaataaaatagataacaagcgaagggaaaag

SEQ ID NO: 165199 - DNA, 122 bp, Homo sapiens
cgcctcccccgtgccacctcctcaggacgcaccgcccctctttgtataagcttaattgaccgaagctgagcgtctaactagtttttcaagtcggaagctcccctgacgttctcaatggggtg

SEQ ID NO: 165200 - DNA, 122 bp, Homo sapiens
tgcagcaaagttttcccgggattgaggtgacggtcaaggccaaagcagatgccctctacccggtggttagtgctgccagcatctgtgccaaggtcagtaccctactagccatggctggcttc

SEQ ID NO: 165201 - DNA, 122 bp, Homo sapiens
cctcggctcccggctgggcacgccctccgccgtcctgtttgtagttcccgctgtccccagcgtcctattgttcccccgtagcatcagtggccgcaggactacaactcccgtcgagccctgcg

SEQ ID NO: 165202 - DNA, 122 bp, Homo sapiens
gtgagtgacagaagaggattcaaaactagacagtgtggatccaggcttgtgcttctaactcgatgtcatactgcctctacagcaaatatagtacaggtgagacccactgtccttgaagctgc

SEQ ID NO: 165203 - DNA, 122 bp, Homo sapiens
ctcccttcccaccccgcccgcgcccgccgcccgccgcccgcctcccgggcacgcgctgcacgaacggcgcccggagctggtctaggcaaacacctgtcctgccttggctccgcgagatttgg

SEQ ID NO: 165204 - DNA, 122 bp, Homo sapiens
atggaataaccacaaatcagagaggagtcacaatagcagctcttggtgcagactgtataccgatagtttttgcagatccagtcaaaaaagcatgtggggttgctcacgctggtaagtatact

SEQ ID NO: 165205 - DNA, 122 bp, Homo sapiens
ggccctcctcagttatacagtcacccagcaaaaatcccaggccctcttcagttaaacagtcgcaaggaagttaattctgccaataacccaaatgggcttgcaagtggattcttccctggctg

SEQ ID NO: 165206 - DNA, 122 bp, Homo sapiens
aatgctgggaataagctgctctatggaggcagaaagcagactgggggcagccggaggctgcggagagagggagctgggagtgaatccagggctccttttcagggtgatagaaatgttttgca

SEQ ID NO: 165207 - DNA, 122 bp, Homo sapiens
ccggccccacaggactgatcaggctcacgtggccgaccctcccagccccctaaccccggtcgggcccatcacccagagccccaaacgcaccctcgcggcgcttcagcggggtgggcgtggtc

SEQ ID NO: 165208 - DNA, 122 bp, Homo sapiens
ctaaccgcccagccagctgcaggctccgccttcccgccgccacagttaatgtaactctcgcgatgctcccgcacagccccacgggaattgtagttctcgcactatcgcagctcgcggggtgg

SEQ ID NO: 165209 - DNA, 122 bp, Homo sapiens
tatgttgttgggcaaatcattttagctcaagcctcaatctcatctcccaggaaggagacacgttttaggatagccataccccattctttgaaagagctgggcagtttaggaagtttctatat

SEQ ID NO: 165210 - DNA, 122 bp, Homo sapiens
tgacttatagacgacccgctccgcgagagactgacaactcagtcctgcgggctttcggggcgcccagaccagtccttagccagaggatctggggctgcacagctcccggaccctggaggggg

SEQ ID NO: 165211 - DNA, 122 bp, Homo sapiens
tcatgaatgaagagtggctggtcacatggcccggtcaccatggcgacggatccccgcagacgaggtaggcatcaaagtcacatgagaaccccggaaaactggctgaggtatttatagaagca

SEQ ID NO: 165212 - DNA, 122 bp, Homo sapiens
gcggcgggggagctgcggaggccgcggagtccgatgttgagggagaaaagggcgaggcggcggcaagtgttccagggcctggtggggcccaggtcaaggcagtaaacctgcggccaccgtaa

SEQ ID NO: 165213 - DNA, 122 bp, Homo sapiens
ggagtcgaggagcgtttttgtcattcataagccatggtgacaaatccttgacatcattcgcggttcctatcgatcagctccgtccgcggcaccagaggacaaatagaaatcatttgtctgtc

SEQ ID NO: 165214 - DNA, 122 bp, Homo sapiens
cactgcatgctgggagttgtagtctcccggggaggcctggtctggtaggaccggggcccccgcggcatgcagggagttgtagtcgaagggctgttgagactccgcctctgcacttatagtag

SEQ ID NO: 165215 - DNA, 122 bp, Homo sapiens
caccgagtccgcaggcgaacctaaagttgactccccccggggaagttgcacggcgactgacggccccagtgacgcgtgcgctcccggcccgagttgggatggcctgccggctgcacctaatg

SEQ ID NO: 165216 - DNA, 122 bp, Homo sapiens
ggaggaggcgggggatgcaggagagcctggcctccccagcttgccaggcacaaggctgagcgggaggaagcgagaggcatctaagcaggcagtgttttgccttcaccccaagtgaccatgag

SEQ ID NO: 165217 - DNA, 122 bp, Homo sapiens
ggccagctggccgcaggcagctctgcttagagctgggcccacccctgctcggtgtgggtgcggcagctgtggtcctgccccactctcaggactctgagcagcttctgcctggcctgtatgca

SEQ ID NO: 165218 - DNA, 122 bp, Homo sapiens
ttcccttgacacgtgggagagcaatgtgacacggctttgctgctagatggtgaagactggcgatgaggtgataatgatagctagcatgttttgagtgccatgtcccaggcatggtgcctgat

SEQ ID NO: 165219 - DNA, 122 bp, Homo sapiens
ctgctgggggctgcgttcgggcgaggaggggagattctgtctcagaggcctcgggctgcacgttcttccgggccgcgcatttgcagcccacagcaggccccagccggcccctctggagttgg

SEQ ID NO: 165220 - DNA, 122 bp, Homo sapiens
tgctagatgcttctccactggtctgcgggctggacccaggcctgcagtttgccatacttgcgcccctgctgtttgggaaggatctgtgctgtaagcctcgcggccatactacgactgtcaga

SEQ ID NO: 165221 - DNA, 122 bp, Homo sapiens
tggaaacggggcccctctgaagggcgtgggcagccggtgcctgcagagcgtggagagctgcggccgcctcacctgacacaattgggcagcgatttctcaggtccaaagagcggaccccgtgg

SEQ ID NO: 165222 - DNA, 122 bp, Homo sapiens
ttgagctgtttctaacatggcatgtataaattgccacacccactgtcttctgcccactggcggcaaatcctttgtgttctcataggtcaaaagaggactcaggaaatggaagtaattatttt

SEQ ID NO: 165223 - DNA, 122 bp, Homo sapiens
atgcgcaaggctgtctctcgcagccccgccttccctcagcttgaaacacctgctgcttcgcggcggtggctttgtgccacttttcccagggcttgggcatcattctggacccatgttcggtg

SEQ ID NO: 165224 - DNA, 122 bp, Homo sapiens
cgcttccccgacgcgctgggttcccggagcgcagagcccagcgttagcgggtgggctccccgaggccccctgccctcgccgggctgctccagggtgtcgctcctctggctgctcccgaaggg

SEQ ID NO: 165225 - DNA, 122 bp, Homo sapiens
gcttaatattctaaataaaacaggatccctagttagggttggcttattggggcacaaaatcgccttcctggtaaaagcacaaaaagagagaaatgatatgtgatctttgtatcccttggtct

SEQ ID NO: 165226 - DNA, 122 bp, Homo sapiens
ggcgcagcaggaatttggccgggacccgggcgctattcgcggctgctgactcgcggcggccggctgcctttcgctcatctctattctggggccgttgggtcaccgcgctccgccggccccct

SEQ ID NO: 165227 - DNA, 122 bp, Homo sapiens
ctgagcaaaggtccggggagagaagaggctcggtctgcaagagttgtcatttgttggctgcggtgagaccacgccccgtcgccctcccacacctgaccccgccctcccgcgtccattgggaa

SEQ ID NO: 165228 - DNA, 122 bp, Homo sapiens
aaaacatggagacacatggtggcgctacaggataagacgaaaacagtacataggctggcacggtgagcttcgctattcaggagaacagaaagcatccaacccactgaaaagacaggcattaa

SEQ ID NO: 165229 - DNA, 122 bp, Homo sapiens
ggaatatgtatcttgacctcatcttcttcctccttccagtctcctattagaatctcccaccggtcaaccccaaccagaagccagagggcagtgggggtccattaatgtgatccacattaggg

SEQ ID NO: 165230 - DNA, 122 bp, Homo sapiens
tgtaccaccacatttgggaggtagcctctgcaaccaatgtggaatgtaattgcaagataacgtggtgagatctgttatagcacataatttccatggactgaaatgtgcttttgcattcagat

SEQ ID NO: 165231 - DNA, 122 bp, Homo sapiens
accctcacatcattgcagaacgcactaaactagagcctgccgtcgtttgggccaacccaacggaattgctctcccttgtaatcataaggacctaaaactgaacaggtaacatacccaacatc

SEQ ID NO: 165232 - DNA, 122 bp, Homo sapiens
ccctttccctggacagatcaggccggggcggtgggaggcccgcctcaggtcagggcccagcgtgtgatgtaggggccggggcaggccagggtttgtttgtggaggcgctgtctgtccctctg

SEQ ID NO: 165233 - DNA, 122 bp, Homo sapiens
gtaccagccctgaaatgtggccctgaagccagccaggaaggccagggaaagagtgtggcccgatgactcatctttgccttaggacaactgctggtgtgaggaaaccagtgggctctaaaagc

SEQ ID NO: 165234 - DNA, 122 bp, Homo sapiens
aggctttgggctagatccggccccccaggccgctgccgcccccaccgcggtccttggaaacggctgtcgagccacgaagtggacattttagccctaagactacaactcccaaaatgccctgg

SEQ ID NO: 165235 - DNA, 122 bp, Homo sapiens
ccgccgggccgtggacgaccctggcctggtgttcaaccagctgcccaagatgctgtaccccgagtaccacaaggtgcaccagatgatgcgggagcagtccatcctgtcgcccagcccctatg

SEQ ID NO: 165236 - DNA, 122 bp, Homo sapiens
tgatattccagcccatagattctctctgtgcttcactctggtgaccaatggaacattttccgttaaaacctggacaaatctgagactcactgataccgaagggcaagtcttggcattcaaat

SEQ ID NO: 165237 - DNA, 122 bp, Homo sapiens
gccccttctcctccaggcgctccagtttcatggaaaggcttccctatgaaactgaaaacgcgctggtaagaaggagaaatgcgaccggactgcaattcccagaagccgtcgcaggccctcag

SEQ ID NO: 165238 - DNA, 122 bp, Homo sapiens
aactttacagaaaccctgcggcccgtgcacacggggccggacccgtcgccagcgccagtgcgccggccgtgattagggccacctgacttcgattatcctttgtgctccagcctgtcagtgtt

SEQ ID NO: 165239 - DNA, 122 bp, Homo sapiens
gaggctgttgagggcccccatatagtaagtactcattgaaacacattaattaactgggcacggtggctcacgcgtgcaatcccaccactttgggagactgaggtgggaggattgcttgagcc

SEQ ID NO: 165240 - DNA, 122 bp, Homo sapiens
tcgtgtgggtgcgcagcatcgtggcttctctctcccaggtacttgcacagccatcatgggcgcccacatgggtgagctccaggtcgtggggccctgtgtgggtgcgcagtcctgctgggcgc

SEQ ID NO: 165241 - DNA, 122 bp, Homo sapiens
gtgtagagggtgggagtcacctcagtaactgtgtactctgcaccgcgccacagttcacagcgcccagcccttgcggatttcatttgctaaaatcctgggaggtcgcctccttattcctattt

SEQ ID NO: 165242 - DNA, 122 bp, Homo sapiens
aagtggggagaccctctctcaaaacaaacaaactttaaatttctgagtgataaacagcatcggccgcctccgggacctgctcgggtggtacactgcaagctgcggagacttaagaaaagggc

SEQ ID NO: 165243 - DNA, 122 bp, Homo sapiens
tatctgcagaatgagccagccaaccctgcgctgaaccaaccatcctcgctcgctccccagcgtgtgctgcaaacacccggccacgtcccaggtcaccctgcaggtgctgtgagggtcgtgga

SEQ ID NO: 165244 - DNA, 122 bp, Homo sapiens
agcccagcacacggggcacgcagcgcagcagaggcagcatcgcggaaacgactgcgaacacgtgcagatgcaaaggacaacccaggcctaggcgccccgcgacctgaggcgccgccggaagc

SEQ ID NO: 165245 - DNA, 122 bp, Homo sapiens
gggactaggggatgaggaggatagggagatattggtcaaagggacaggataaataagttccggagatctattgcacagtatgctattcaaggtgcatttttagttaataataatgtatgtat

SEQ ID NO: 165246 - DNA, 122 bp, Homo sapiens
gtcctggtcaaatcatattccgggcttttgaaatagtgggcgctagagcaccgcctttggcgtccgccagccgggcgcagaggagggagaccccgagccggggaggggcggaggagggggcg

SEQ ID NO: 165247 - DNA, 122 bp, Homo sapiens
tacccagtagagagattgtgaaagggaaaataaataaatatgaaagctgtgtttagaggtcgaatctgtttagtggtaaaactttagggtctgttttctccaaagactgaagaatgtggcca

SEQ ID NO: 165248 - DNA, 122 bp, Homo sapiens
caagcacccctgtccactgatgctgacttatgcaagtcaacacaccaaatcccacagccacggcttttcagaaaaataggaatggattcttctcccaagttcatacaattgagggtttttga

SEQ ID NO: 165249 - DNA, 122 bp, Homo sapiens
aagctgaaaaatgtttaaagcgatgtgatcaaagagatagctgcacttgtctctgccgctcgcctgctacatacttcaacctttgtcgaactaaaatgaatttaaaggtttattacagccct

SEQ ID NO: 165250 - DNA, 122 bp, Homo sapiens
gcataaattataggggttgattagaccggggctctgggagagggaaaggttgagccgccacgggccccaagctgcattctgagctgacgagagaggcgcctgcaaacgcaggcgaggcccgg

SEQ ID NO: 165251 - DNA, 122 bp, Homo sapiens
ggaacttttatttactgaataaattcctgcacagcctgtgttgctggggccgggggctgacgccagggttgccaggagcagctgccttactgaggggatggtttccggattaacgtgtgaat

SEQ ID NO: 165252 - DNA, 122 bp, Homo sapiens
aagttgtaaaaggtctcaaaaccatgctctgagatgaatggctacaggagctgggatgctcgcctggaatggaagacggaagagtgcaggagaccttgacagctgatttgggaaatgcgttg

SEQ ID NO: 165253 - DNA, 122 bp, Homo sapiens
agcctatcatgtggctgagccggttttacctttaatctctttcacgtttgccctcagcctcgcagaatgtccgggatgattcacgcgccatcacatggggcaggcagtcatctgttttatta

SEQ ID NO: 165254 - DNA, 122 bp, Homo sapiens
tgcagaagagaactccagctggtccttagggacacggcggccttggcgctgaaggccactcgctcccaccttgtcctcacggtccagttttcccaggaatcccttagatgctaagatgggga

SEQ ID NO: 165255 - DNA, 122 bp, Homo sapiens
catcgcaggcgcttcgcaccccacgcgaggcgggtactgagagccagctcctctttcccccgtctcttaggactgccatcgcagagggggaggtaacccccgccaggcagggactgacagcc

SEQ ID NO: 165256 - DNA, 122 bp, Homo sapiens
ccaaatcattaacatcgtcaatctggcagtagctaatttaaatagcacctgatgttgcaacgcctcccttcgtttccccagccaatcagatccaggcttcggctgacagatggtcccataaa

SEQ ID NO: 165257 - DNA, 122 bp, Homo sapiens
gtccgtgcagggtgacacatttcagagctccagaggctgccttttgggtcggtggggtcacggcagcctttgacaggtggacagaaggaggcttggaaagaacagagccaagcatttgttcc

SEQ ID NO: 165258 - DNA, 122 bp, Homo sapiens
ggcctctggtccaatcccagtcctcctcatgaatatgtatgagtccccagttatcagctgcggctctgagcctcttcctccctgctcaaccccccaccgctctcttccccacacaaacatcc

SEQ ID NO: 165259 - DNA, 122 bp, Homo sapiens
ctcacccagtcccaccgccttacaaccagcctgctcccttaaagttatcccatgtctcctcgacgacgtcccctgtagactcgccacccattgcctctcaatcgcgaccgtgacaggaagaa

SEQ ID NO: 165260 - DNA, 122 bp, Homo sapiens
gtccaggcccctcccggggtccgcttggagatcccacagccacagggcggccgcgaagctcgtcttggccctgagaattcactgcggagcgcccgcccggcactgactcccggctccgcaca

SEQ ID NO: 165261 - DNA, 122 bp, Homo sapiens
tcctgcctgtagtgtgtgggctggggttggtgcgagcttccagcttggccgcagttggttcgtagttcggctctggggtcttttgtgtccgggtctggcttggctttgtgtccgcgagtttt

SEQ ID NO: 165262 - DNA, 122 bp, Homo sapiens
gttctccccagtgcagtcttgatgttctgagaggcgctggcaattccacgcacctatgtccgcaaaaagcaggatccattcactttagagaagtgccctcaacaggcgcggaggaagacgtg

SEQ ID NO: 165263 - DNA, 122 bp, Homo sapiens
tcccttatagaaaaccatgaattttattttattttttgagacagggtctggctctgtcaccgaggctgaatttaatggctggttcacagctcactgcaccctcaacctcccaggtgcaagca

SEQ ID NO: 165264 - DNA, 122 bp, Homo sapiens
ttcaattcattcctgcctaaaactaagcctggttaactgaggtagactctgggaattacacgtgcaaagagtcaggttttccaaagggcgatattttgtcatttcagatatggtaaagtaaa

SEQ ID NO: 165265 - DNA, 122 bp, Homo sapiens
catatgcagagagttcacactggtaactctaatcgtagcaatcagccagtcgggtgaaggcgattcccaccgttcattcttccaactcaatatgcattgagcgcttctttgatccacttgtg

SEQ ID NO: 165266 - DNA, 122 bp, Homo sapiens
tagggtttacacagtggacaaatgaatatctaacttcagagtcaccagtgtgctaggttgcgtgctagtcaacccagtaattccttccagatccagcttccctttttcatttcctcagatac

SEQ ID NO: 165267 - DNA, 122 bp, Homo sapiens
agcagtgacttcagggcttgggctactctggcttaacgggaccagtagcagagcgccgcccgtcctgcttgctgctgggtccggttgccgaggcggaaaagtcgcaagctccttcagtcagt

SEQ ID NO: 165268 - DNA, 122 bp, Homo sapiens
ctgggtaactgttgggtcagaaactgttcaggtagcagctgttgtgccctcccttggccccgccgctcggagacgccccgccccctgccttgaacggccgcccggccccgccccagcgccca

SEQ ID NO: 165269 - DNA, 122 bp, Homo sapiens
ctcaagtccgctgtatggccagaaccttgccaggacctcggtcactgcagttccagcaggcgggcgaccagtgtcaccgtcgtccggccaagccctcgagccagagctccatcgccttcgcc

SEQ ID NO: 165270 - DNA, 122 bp, Homo sapiens
tcgcggctctcaggcagggtacctggatcggcttaattatcaggctggatgtagatctggcgctgggtcagcacttgagagagctccctctgcaactgcttaaacttttggttgtcagggat

SEQ ID NO: 165271 - DNA, 122 bp, Homo sapiens
tagcagtgggattgctgtatggtaaatgtatatttaaacatttataggaaactgggggcacgaagactttcagtaatactggtcgaatcaatggtgcccaggaatttgcatttttgagacag

SEQ ID NO: 165272 - DNA, 122 bp, Homo sapiens
atcaaaacccgtcaaggtccaggaaactgtccctcaaatctagtcttacccacccctcagcggcctcagctaagctaggcctgggcccgaacaagtcccaggttagggttcgacgcgaacca

SEQ ID NO: 165273 - DNA, 122 bp, Homo sapiens
ccagcttcttagcttccttgcagattacgatcaatgcaagataaaacctgagctggccaacgcttagcttttcatttaaagcctttggccgcaaaaccagttgttcctgagccttttacccc

SEQ ID NO: 165274 - DNA, 122 bp, Homo sapiens
acacaggcttcgccaaaggccctgacacttagggctttttcactgctgcaaacgttggaccggcttgtgagaaggagtacagttaatctaactttggtatactgtatccagagaccacagag

SEQ ID NO: 165275 - DNA, 122 bp, Homo sapiens
cgtgctcctcctaagccggaaggagcagcaggcatgtctggtctggcccaggcaaccaggcggcagcggtccaggttacccttccaagggctggggccctcgagggctccgttttttctcag

SEQ ID NO: 165276 - DNA, 122 bp, Homo sapiens
gcgctcaatttttttcttttcaaaaaaagctgatgaggtcggaaaaaagggagaagaaaccggcaccctctctgagaggcaacagaagcagcaattgtttcagcgaaaaaagcagcaaggga

SEQ ID NO: 165277 - DNA, 122 bp, Homo sapiens
gcacctccgggctaggaggttttcccaggctcgcctcattgctcctgcacctgcagggttcgctggaccctgggcgtcccgctgcccggaacacaagggtagggaagggttgttactgggtt

SEQ ID NO: 165278 - DNA, 122 bp, Homo sapiens
tgcagaactcggtcaacagaaaacgaggctgcgaagaggctcaggctgatgtcctggagacgtggacgggtccccatgggcaggcccagccccactgcctagcccagctgctgcttcactgt

SEQ ID NO: 165279 - DNA, 122 bp, Homo sapiens
gacctgggtggccgcgtcatgaaaatcaacaccgaggtgcggagcttcggacctgtgtcccgcagcggcttctacctggccttccaggactatggcggctgcatgtccctcatcgccgtgcg

SEQ ID NO: 165280 - DNA, 122 bp, Homo sapiens
ttacgaagcaatggactcccttattacttcgtttcccaaatagggggtgggacacacaaccgagggagtatgaggaaaacaacttgcgggtcttcgagccacttgcgtctttctgtgggcga

SEQ ID NO: 165281 - DNA, 122 bp, Homo sapiens
cccgcccgcaggcacgaacaactcccgacgcgccatctttaagagctgtaacactcactgcgaaggtctctggcttcactcctgaagtcagagacaccgtgaacccaccaggaggaacgaac

SEQ ID NO: 165282 - DNA, 122 bp, Homo sapiens
tgctgggagtgaggccaaagataggggagtggcctgggagtcgggagggcagacagactccgcctctgacacctctgggtggcataatcaggtaaatcaggctctccaagctggcttctcct

SEQ ID NO: 165283 - DNA, 122 bp, Homo sapiens
tttgcatattttgaaagctatgcatacagatgccaaaagatacatctttaaaaaactttccgaaagattcgccagaaactagtagccagtgactacctttaaggagaggaactagggttcac

SEQ ID NO: 165284 - DNA, 122 bp, Homo sapiens
ggacgccacaaagccccagggccgcagcactgcggcagcaaccagggcccactgtgggcccgcaggagcctgaggcagctcccggagttctcaagccctccagtcaagcggggcctcttccc

SEQ ID NO: 165285 - DNA, 122 bp, Homo sapiens
ctcctcacaggatccagacgcggttcccatccgtccccagccctgcagggcacacgcgcgcgtgcacacgcacgcgcttacactccagctcacactcgcgcgtcctcactccctgcacccca

SEQ ID NO: 165286 - DNA, 122 bp, Homo sapiens
cctgtgtgcgccgaactggttggcggcgggggcgtgctggcgtgcttgtgtgactgtgggcgaccatggcacgcagaccgcctccagctcccgctggccctccccaacccacttctcagttc

SEQ ID NO: 165287 - DNA, 122 bp, Homo sapiens
tggtggtcacgcccggccagctgtggccgcatccctgtcggctagctcgggtctggcccacggtgactgttacccctggggaatggggcaggtaagaatcagagccaagcggggacccagcc

SEQ ID NO: 165288 - DNA, 122 bp, Homo sapiens
ccttttttttttattttttgagacggagtttcctttgtcgcccacgctggagtgcggtggcgccaactcactgcaacctccacctccctggttcaagcaattcgcccacctcagcctcctga

SEQ ID NO: 165289 - DNA, 122 bp, Homo sapiens
gaaagcagcagcagcatctggatttcacaaatatttgatgacactgactgtgaggtttgtcgaaagaaaagaggatgagctaatcatgggtaagaatgagattttttttgttgttttacgta

SEQ ID NO: 165290 - DNA, 122 bp, Homo sapiens
accctattcttgggatccaaatgtttcaatcctttttacttctgcagctgtgtgctctgccgtcatctctaagaaacaaccataccactgaatgctactgtgtacttacaaaccacactcat

SEQ ID NO: 165291 - DNA, 122 bp, Homo sapiens
cgagccggaggctgggacgcagctggacgcagctgggcgcggaagcttggggcggaggcgcgtgcccgccttcccagctcagccccggcagggctcccggctccagcccactgggagctcgc

SEQ ID NO: 165292 - DNA, 122 bp, Homo sapiens
ctcggaaagaggcttctcacagacgggagagttcctgcagacagaccacgggatggggggcgggggctgtaaaaggctttggaagccacacgatccgccacacggctgaacgtgaaacctgc

SEQ ID NO: 165293 - DNA, 122 bp, Homo sapiens
aagactcagccccagacagcctggcgccagggtgggacgtcatgcgttcacacagggatgcgtgtcccaggcaacctttcctcgggcagtcaccggccggcgactgcctcccccaccaatga

SEQ ID NO: 165294 - DNA, 122 bp, Homo sapiens
gcagagctgcggagggggccggattctaggaggaaccaatgaaaagcctcactcggcctccgctcctcccacttcttgctgaggtcaaaggcctgcgtcagttgcactgtagcctcggcagt

SEQ ID NO: 165295 - DNA, 122 bp, Homo sapiens
actaagtgtgttcaccttccttcatctagctgccagtgcacactgaaatggcttgcattgcgggcagcaggaaggatgatgatgagaaatacaaaacccctataaccacaaagcggtgtgca

SEQ ID NO: 165296 - DNA, 122 bp, Homo sapiens
gaaggcagggtggggtccttgccacggtgggacccctccatctgacgctaagaactgcagcggtggtttctactcttggcctttaggtgccgtgtccccaggggccttctgtttcccgccta

SEQ ID NO: 165297 - DNA, 122 bp, Homo sapiens
ccccgtgggccgagtgcaccgactgctccgcaagggcaactatgctgagcgggtcggggccggcgcgccggtgtacctggcggcggtgctggagtacctgactgccgagatcctggagctgg

SEQ ID NO: 165298 - DNA, 122 bp, Homo sapiens
tcctgacttagaggaagggatatttacttagcaagcctgtacgtgccaagctgttctaaacgctgaggatgaacaaaccagagttcctgccttcacggtgttcacactagcgggcagaagac

SEQ ID NO: 165299 - DNA, 122 bp, Homo sapiens
aaataacatgtagacttgcccttctctttctctaatactctttccccattggtggttgggcgactggattctccaggctttcctgatgcagagcactgtgtgggtcacagctttggggatct

SEQ ID NO: 165300 - DNA, 122 bp, Homo sapiens
gcagcaagccatctccgggaaactgcaaaggctggtaaacagttctcgttgcacacgcagcgttcccaggccttcctgcttatcaggcccatatggtgccccctgccagccggacaccacca

SEQ ID NO: 165301 - DNA, 122 bp, Homo sapiens
ctgattcctgttcatcctttaggtattgctatgggttgaactgtgcctcccccaaattcccgtgttaatatcctaacccccagcacctcagaatgtgaccttatttggaaatatgatcttta

SEQ ID NO: 165302 - DNA, 122 bp, Homo sapiens
ccttcaaaatgagtctcacagcacggtggacgtgcgcaacgggaaaagctcccaagcaggcgcagcccggctaggctgctacaggacggcttcccctgccaacgcgcacacggcacaccgcg

SEQ ID NO: 165303 - DNA, 122 bp, Homo sapiens
aggccggctcctcagcctcttaccgcgagagctcacaatgcgaagaggcgaggccagcagcgttctcgcgagaacggtgctctccgcccaggggtgggcggggcaccgaaggagaaggcagt

SEQ ID NO: 165304 - DNA, 122 bp, Homo sapiens
gccgtgaaggagctgcagccgtggacctggagcaggcacagcgagccagggtgcgaggcccggacagctctgagcggaacagcgagccacctgcagcgtccagctcgagacagtggctcctt

SEQ ID NO: 165305 - DNA, 122 bp, Homo sapiens
ttgtttggttgtttttgttttttttctaaagaaaataaaggaatcaaagaatggttactccgtaggcagagcagcctctagagtttttcttggagtggtgtaacatcaaaccagggctgggt

SEQ ID NO: 165306 - DNA, 122 bp, Homo sapiens
ccccgaggcggacgccagagggcgcgcgccccccactcctgcccgcgtcggggccgcagccgcgctccgccctttgcctgcagagcgctgggggtttaaagtcctgaacccatgcacggctg

SEQ ID NO: 165307 - DNA, 122 bp, Homo sapiens
tcctggatgatggtcccgcctggaagcacgtcgcgctgcacggagggtgacagcaggaggcgtgccacgtcgccgcctgcctcggacacggcctcggtgggcagcggcgagaaggtgccaga

SEQ ID NO: 165308 - DNA, 122 bp, Homo sapiens
gctcagcagatttaacagcccacttatcactcatggaagatccctcctcctgcttgactccgccctctctccctctgcccgctttcaataagaggcagagacagcagccagaggaaccgaga

SEQ ID NO: 165309 - DNA, 122 bp, Homo sapiens
aagagccttgtgtacttctgtcctctctctcagaaccctgccacatcatgtaaacaatcccggactagcctgctggaggaagatagactgtggaacagaattgagttccacaaggctccaga

SEQ ID NO: 165310 - DNA, 122 bp, Homo sapiens
taaccattactggagtgacccttctggaaggctagggcactttaataattcaagccaattcgtaaaaggccaagattttgtatacagtttaaggggcatgcaaattagctttgtgatgatgg

SEQ ID NO: 165311 - DNA, 122 bp, Homo sapiens
tcccacagcccctccgctcctcgccgtctcgccttcgtccccagcttacccagttctgcgcgttattgctcagtttgactttcttgcacaggctcccggggatctccatgaccgcggagcgc

SEQ ID NO: 165312 - DNA, 122 bp, Homo sapiens
cctccagcacgaagccttgggtgaagttaatcttcattcatcatttctgtctctcctaatcgatctctcgcccagtgtctctccttgtccctctccctccctttctctctctcgtcctctcc

SEQ ID NO: 165313 - DNA, 122 bp, Homo sapiens
aggacagggcttcagggaccttagggccgcccccagcaccgggggaggtggctgcctcagcggccgcgctggaagggccctcgaatgccattcacaggagcagcccaggaacccaggggcct

SEQ ID NO: 165314 - DNA, 122 bp, Homo sapiens
taaggaaaaagccagactacgtagagccttgtagaccctcacatggcctgtggagggttccgaattccactgactaatatattacctccctcaaacacatgccattggtcttgtcactggga

SEQ ID NO: 165315 - DNA, 122 bp, Homo sapiens
ccaggacggaggttttgacttctctgtgtcaggagatggacagaatgatccttacctgcacgcatcaaaaagcacgctggccccagagtagctgtttaaaactcgcaggtacctttttaaaa

SEQ ID NO: 165316 - DNA, 122 bp, Homo sapiens
ccgatgagcataggaagtggctgccaacgctctggcggctgctcgtgctgccgccgctgccgctgctgttcctcgcatagggctggacagagctagtcccggtttcagcacctccggcgctg

SEQ ID NO: 165317 - DNA, 122 bp, Homo sapiens
ctcccgtggagatctactcggtccgcctattaaacttgagacgctggggtcccgcggagccgctgtgtcaggctctaaagaggttttacatttcccagaggaaagcgctctatgggctttaa

SEQ ID NO: 165318 - DNA, 122 bp, Homo sapiens
gcaggcagcgcgggccgtgctcctccactctgctgaccgcgtctcgccgggccttgcagccggcacagtcttcactaccgtagaagaccttggctccaagatactcctcacctgctccttga

SEQ ID NO: 165319 - DNA, 122 bp, Homo sapiens
atgaatacattgcaaagtttttttggccccggcgaggggtgtcagattgagtgctctgtgcgcatgtgcgaaggtgtccaaactgacaatgctggggagatgaagatagtgtgtggctgctt

SEQ ID NO: 165320 - DNA, 122 bp, Homo sapiens
tttcctgggaggaactgtctcagatttagcttgtgtgtgttttggacagaggctccacagcggtggctcttgaggaatcctcaccagtttgttctcttccctctgacaagcagcacctgagc

SEQ ID NO: 165321 - DNA, 122 bp, Homo sapiens
ctactcattttcaaagacagtacaaaagcaataaatgaaactcaatgaaaagaagcacatcgttgtaaaccacatgccatttttgaggtcctagaataatcatgaaattagaaggtggtgtc

SEQ ID NO: 165322 - DNA, 122 bp, Homo sapiens
ctgggccaccgccgctgagaggagccgggcgcgtcgccgccgccgccacctttataggcccggacctgctctggccccgcccccgacgcaggctccgcccggcctcaccccctgcgcacgac

SEQ ID NO: 165323 - DNA, 122 bp, Homo sapiens
acgagaaaaggcggaacctggtgaaactggtttcccgctgctgccctcattttgcttcgccgaacgtcctccctgtgttatgacgtctggtgtcccacttgactgggaatccagaaacaggg

SEQ ID NO: 165324 - DNA, 122 bp, Homo sapiens
gaactccactatttttgaaccctaggcccctggatccacaggacactggaagttatcttccgtatttgcagaagccaatagaaacaactcatttagtatggcaaagctgcccatgctaatta

SEQ ID NO: 165325 - DNA, 122 bp, Homo sapiens
cccctgctcagtcctgaccacataagccttggtcacaggtgtaggtggagagggcactgacggacactgccctaaggtgcagtcctgaggcacttaggtgggcgcctatctaggccatgctt

SEQ ID NO: 165326 - DNA, 122 bp, Homo sapiens
cgccgcagttcggagcaggccgagggggccgggctgcagggccgcgccgggccagaagggcgcgccctgggcagcgcggacgcacgcagccggctcctcccgcgccccgctgcaccccggca

SEQ ID NO: 165327 - DNA, 122 bp, Homo sapiens
ttgttgggacagaggagccctggcctccaagtttgtctttcccagaaaatgctgctgggacgtcaaggaaggcttcttggaggagggagcatgcgaggtcgggtgttttttgttgtttctgt

SEQ ID NO: 165328 - DNA, 122 bp, Homo sapiens
tacattttaggggttattccttttaatgtgattatgctttgacaatacataataatttaacgtgattattgtctaggacaatactgattgtaacagcttgtgaagaaggttcaatagagaaa

SEQ ID NO: 165329 - DNA, 122 bp, Homo sapiens
tagacaatgtttctgaacttggactgactttctttgcctcctgtgcctgcgttattgtcccgggactttctgaatgcattgctcatcatcatggtatcctatacaatattgctctgaccaag

SEQ ID NO: 165330 - DNA, 122 bp, Homo sapiens
gccccaggcgccgtctccccactctgcgcgccctcggctgcggggtagcgggcagccctgcgctgccggccgcctagcctgcaccccccgccctgggagggaagcctcgctccagccgcgtc

SEQ ID NO: 165331 - DNA, 122 bp, Homo sapiens
ttcttccccgccctccacccaggtaatcaggcccccggccggggtccgaggaccagtggccggcccagaccgcagtctccaggctccagctccccgctagcccctagctggggccccgggcc

SEQ ID NO: 165332 - DNA, 122 bp, Homo sapiens
gctctgctggtcactgcagttgtcaggaatgtttcgcctcagaggcaaacggcttagggccgtctcaacttggagacagaaaaacccacctcctactcctggctcagacctttgctttctta

SEQ ID NO: 165333 - DNA, 122 bp, Homo sapiens
atcatagagggaaagactcctcgttcctggcccagaaatgagatgagaaatccagggccccgtacaggaaggcctttcgcaaagtccagactcaattgccttcgcagcccttaaagtttcct

SEQ ID NO: 165334 - DNA, 122 bp, Homo sapiens
taaaaaaaatctagatcatggaacagaatattaataaaaatagccagcgtttggtgatcacgttccatcttccagggcttttagcaaataatgtgcaagtatgaaaccctgtgagatatgca

SEQ ID NO: 165335 - DNA, 122 bp, Homo sapiens
caaggagaaacagagctgtggtcaaatccacagagccatgtaatactttgaggtccaagccgatctgcactgggacggatcccagatccacataagaagaattacccctcctatctgccccc

SEQ ID NO: 165336 - DNA, 122 bp, Homo sapiens
ccagcgggcacgcgggaatggagctaggcgccggcagggcaactgggcatgctcagaagccgggcaggttttggtctcaagcacgcagcctgtgcattacaccagctctctcagtccgggga

SEQ ID NO: 165337 - DNA, 122 bp, Homo sapiens
ctgaaaatgtaatacatttctttcttacctggttgacactgattacaccttcttccttgacgattaggcacacacaggcactggccactgattgggtcacaaatggtcccaggtaatgtccc

SEQ ID NO: 165338 - DNA, 122 bp, Homo sapiens
tcttcatgaatcatcagccataaaacaacagcaggacaggggttgcatccttctctctgccgctacaaccagcaggtgatggattggacgtggtggctacaaaacgcagatgaaggtcagca

SEQ ID NO: 165339 - DNA, 122 bp, Homo sapiens
ggagctgactcgtctctctcttctttcccctgcaggaatcttccgataattctgccgccgcgactttaaccgtgcgcaaggcgagagctcgaaacaaacatcacatctaaattaaaaaaaaa

SEQ ID NO: 165340 - DNA, 122 bp, Homo sapiens
attgataacaccactgctgttgattatttttcccctaaataagtcctggattattgccctcggcattactgtattataccagctagcccttgactttacctcactgaagaggttaatattat

SEQ ID NO: 165341 - DNA, 122 bp, Homo sapiens
taattcatcggtaatgggtatgaacagaaaaaaccaccaagcagcactgggcagctctaccgtcgtcgggcataacgggtttcctcgcggagccgcgtctgacgcggcagccccccaggctt

SEQ ID NO: 165342 - DNA, 122 bp, Homo sapiens
atctagggtgggtagcgtggaactgtgaaaagagcaatagctttgaaccatgaagaccagcgttcaaatcccggctctccttttttctcattgggtcattttggggaaactacttaatagtt

SEQ ID NO: 165343 - DNA, 122 bp, Homo sapiens
cccttgcccctcacttcatgttctcgacgttgcgtcctcgcacggcacacacagggatggcgagcacagccaggaagaggatccagccattgtagaaggccatcttgaagaagtacttggca

SEQ ID NO: 165344 - DNA, 122 bp, Homo sapiens
gggctgggtccgcacacgcccccggagcggtagccgaagctgcgtccgcaggagccggctcggaagccacctacagctatccggggcccgcaggagcccaggttgcagaggctgcggctgcc

SEQ ID NO: 165345 - DNA, 122 bp, Homo sapiens
ggctctgagtgccacagagcggccggaagggctgtctggggaagtgagtgggagtgatggcgtctcagcggcttgcgttgagtttccggatacacagcctgtgccccgggatggaggtgtcg

SEQ ID NO: 165346 - DNA, 122 bp, Homo sapiens
ttccagcagagtacccattcaaaccaccgaggatcacatttaaaacaaagatctatcacccgaacatcgacgaaaaggggcaggtctgtctgccagtaattagtgctgaaaactggaagcca

SEQ ID NO: 165347 - DNA, 122 bp, Homo sapiens
tcaccacacaggacattggctgtgcacagccacttgtttattgcagctggagaccacatgcggtgtgtttgttgatcagagcagcgctcacctgcctctggttactggaggagcctgtcaca

SEQ ID NO: 165348 - DNA, 122 bp, Homo sapiens
aaagtcttgaacatggcgttcccttttggcaataggagctattatctagaataaataaggcgatttgttctcttattgcaatatgccactaacccaagactggggtaactggagtgacttat

SEQ ID NO: 165349 - DNA, 122 bp, Homo sapiens
cagccaatgccagacccggtgaggagcagccaggctgctgaccatcagccacttagggctcgcctggcctggagaaaggtgacatcatcgtagctgggaggtttccgaaggcttcaccaatg

SEQ ID NO: 165350 - DNA, 122 bp, Homo sapiens
ctgcgtaggagtccgagctcccgaggtcgcctaagtgcaagcagaagtgagcgtggcttccgggcagcgccctcctcaggggcgcggcttctttctcagttcaaagcctttccccgaatctc

SEQ ID NO: 165351 - DNA, 122 bp, Homo sapiens
acacagagagaagaaacagtcaacacaccatgcgagcagactactgagacagaagcccatcggtccacatgtgttaaaaccacacatggggatagccacccaagctgcccggcatgcagtga

SEQ ID NO: 165352 - DNA, 122 bp, Homo sapiens
gtcagaggtcatgacttctaaggtttctccgctctggcctggatacaatgtccttttccacgtgtataacaaactatgtattattttcagtcatcccaggtgcatgttcccagctgaggttg

SEQ ID NO: 165353 - DNA, 122 bp, Homo sapiens
gagcaataagcaattatagaaaagcaaacaagagaacaatgatgggctatcattcaactacgcctacagcttaagaggtgagctccctggtgattgaaactgcttgcactcctcagttgatc

SEQ ID NO: 165354 - DNA, 122 bp, Homo sapiens
gtatgggcacacctgggcagggtgcctttccagaccttgtagatcacatcaggaggcaggcgtgatgcagagaagagagcctcagctgcgagccagtgggaccacatgtttgctgcgtcccc

SEQ ID NO: 165355 - DNA, 122 bp, Homo sapiens
ccatcggggtccgccggcgccgaggaggggcctgggcgtgtgccgagcctccgcgcctctcgcagctggtttctatcagcagtctggcctgggcagcccccgaggaggaaaccagctcagag

SEQ ID NO: 165356 - DNA, 122 bp, Homo sapiens
cgctgagcgaggcggagaaggtgtacatcgtgcatggcgtccaggtagctacagcagcggcgttgggtcggccgccgggttcagcctggccctgcgggtcgcggcctgccctgggtttgcca

SEQ ID NO: 165357 - DNA, 122 bp, Homo sapiens
tgcctggtgtggaagtgctatcctttttggaagagtttaaactgaggctgggtgacttcccgtctggtttcctagagaattcttaaatgattgggaggctgaggcggatggatcacgaggtc

SEQ ID NO: 165358 - DNA, 122 bp, Homo sapiens
agggcttcggctccaggggccagcagctgggtccaccctgagggagagtccccaggtgagcgagaagctgctggacggaccccagagagcccccggccggccctgcccccacttcacctcca

SEQ ID NO: 165359 - DNA, 122 bp, Homo sapiens
gggcacagccgcggggtcaacagcctgcctgtccctcctgctccgactgcctcccatgtccgtgtcgggaacgccctcctgaaatctgggcacaacgagagctctctgtccctactcggcag

SEQ ID NO: 165360 - DNA, 122 bp, Homo sapiens
accggcataaagggcctcaggtgggaaaaccaaacctacccaaggataagacagccagttcggggaggagggtggtggggaccgggaaagagagcaacaaaccgggtagtcagcccaagaga

SEQ ID NO: 165361 - DNA, 122 bp, Homo sapiens
atgtccagtgagcattcattgagtgcctgttgcatgcaggcacgaggcccggggcagacgcggaaagtgggtagcagcgtttgtttgcacctgacacccggtttgaaaaccacccactttaa

SEQ ID NO: 165362 - DNA, 122 bp, Homo sapiens
ggtgcgcgtggaatttatggacaacacgagccgctccagcatccgcagtgtaaaaggccccgtgtgtgagggggacgtgctcaccctgttggagtcagagcaagaggcctggaagttgcgct

SEQ ID NO: 165363 - DNA, 122 bp, Homo sapiens
ctgggctcagggtccaccagctcacccgggtcgaggggcaatctgaggcgactggtgacgcgcttatccacttccctcctcccgcctccccctggggtggcgctcgctggtgacgtagtgag

SEQ ID NO: 165364 - DNA, 122 bp, Homo sapiens
actgtttttttcccgaattatctgcagaccttttaattttatgtgtgaacacagcagtcccgttgaactctttacttgtcccttactcctccccactcccgcccagctttctcgatgctttg

SEQ ID NO: 165365 - DNA, 122 bp, Homo sapiens
agccttccatgcttccccctccccaggcttgggggcagtccccgaagggctgtcccaggccgccggtgaccgagaaaggggcatttctaagttatttgattcacttcctttcccaagatgtc

SEQ ID NO: 165366 - DNA, 122 bp, Homo sapiens
cacgtgcccagcagcacgtggaaaatgcgtctaatgtttgggggtaggagcttgggtggtcgaatgggctgcccaagcttgcctttttgtcaagtagggttttcaaggagacttcaagtgag

SEQ ID NO: 165367 - DNA, 122 bp, Homo sapiens
cctctgccccagtcccctccttgcgtcagtcccagtgagggataagcgcctggcggaaggcgcagggaggtgtttctctgcttcaggagtgcccgccggcccttgcagctgctggaagaccc

SEQ ID NO: 165368 - DNA, 122 bp, Homo sapiens
cttctgagacagccccagccaccccacacacagtgaggcctggctgcagcggtgttattccgcgcttgcggcaaagagaacacactttcttgatttggcggatggaagacggaggggggagg

SEQ ID NO: 165369 - DNA, 122 bp, Homo sapiens
cgcccaccgctttctccagacccccgcaaggcctgcgcaccacgccgcggcactcctgcccgctgaccccgtacccagaggccgcagctgccgcagctcccgcagctcccgccgccctgtca

SEQ ID NO: 165370 - DNA, 122 bp, Homo sapiens
caaatgagaatgagaatgtctacctttccggattgcagtaagagttcaaaagaatagacacgaagcattgagcatagtgcttatactaagtgttgaaaaaatggtggtcatgttttagtaat

SEQ ID NO: 165371 - DNA, 122 bp, Homo sapiens
tcaaaattgtgaaaaagaagacaaagagaatgaactcttacaatttatagagtgacatgacggaaaactaatttggggctgaagtttattaaggctgaacctaactcatttttataaataga

SEQ ID NO: 165372 - DNA, 122 bp, Homo sapiens
cctcttggagtgagatgactctccggagagatttagtcgtcaccctcgcgtgtgaggctgcgtcacaccccagggatgtgtctatcaagatggaagatcttttacacgctcttgattttgtt

SEQ ID NO: 165373 - DNA, 122 bp, Homo sapiens
gctggggccctatggccccgagtggcaggagaacccctacccgttccagtgcaccatcgacgaccccaccaagcagaccaagttcaagggcatgaagagctacatctcctacaagctggtgc

SEQ ID NO: 165374 - DNA, 122 bp, Homo sapiens
agtgccagttgcttctgcagctgcagggctgcatctgggccccagtgctgatgcacgctccgcctccagatccgcattgtcaccagcttgttggaaaaacagatgttattgtcctctgttcc

SEQ ID NO: 165375 - DNA, 122 bp, Homo sapiens
ccatcacctgggggtgaagatttcagcatatgaatttgtgggggacgcatacactcagaccgtagcgcaagttggggacaaaagctctgagtgtcagcagggttgcactggcttggaaatgc

SEQ ID NO: 165376 - DNA, 122 bp, Homo sapiens
gcagccttgctggaggctgccctgcggaatctgagtgaataagggaaacagcaacagtcacgttggggaaaagctgattcggacagcgccactggttcctttaacgcacgaccctcaatgca

SEQ ID NO: 165377 - DNA, 122 bp, Homo sapiens
cgtcacgtggatgaacctggaaaatgccaaattcagtgaaagaagccagacacaaaaggccgaacattgtaggattttgtttatatgaaatgtcagaacaggcaaatccagagacagaacgt

SEQ ID NO: 165378 - DNA, 122 bp, Homo sapiens
tgcaagcctctctctgaaacttcatcagttgctgttgcagaacgttactgctttcctaggcgggggcttgtctgggcctcttccaccgtgaatggaaaaaaaaaggcagtttcctttggtag

SEQ ID NO: 165379 - DNA, 122 bp, Homo sapiens
gctcgcgctcagccagctccagctccggccaagactctgacaccgctgccgccgccatggcgcctcagctgctggcaggcacccacccaccagggtgcttccggggcagcgcgcgccacttc

SEQ ID NO: 165380 - DNA, 122 bp, Homo sapiens
gggacaaataagacccactcctcatagaaacaaacctcataagatcttaagaggattccacgagataatatgtgtaaaatgttagcatcttgtctgaccctagtggttgctttctacgttag

SEQ ID NO: 165381 - DNA, 122 bp, Homo sapiens
gtagacgcacgcacacacgctcacacacacacagaggcaggcaggcaggcaggctgaacacgctggctgggaactgctgtcggagccctctatagcaggagaggagagggagaggagaggag

SEQ ID NO: 165382 - DNA, 122 bp, Homo sapiens
cccatagatcctcatcaaaacactgtgctgcactttcgccacgtttcccacgcggcaccccggtggattttcccgagctctgtcatggggcacggttcccatccctcgtctctagccagcgc

SEQ ID NO: 165383 - DNA, 122 bp, Homo sapiens
gggcggcgatggctggggtgtggggaaagactcccggcgggcaggacatcacgaacgtcacgttcttggggacagaaaaccagtcacggcggcagcaacgatgtcctgtgtatactgtgtag

SEQ ID NO: 165384 - DNA, 122 bp, Homo sapiens
aaaaaaaaaaaaaaaaaaaaaaagaaaggggaagaataaacttacaaactttctcatcttcgtgtgtggcagacagaataacagcccctaaagaagtccgggtactaatccccagaacttgt

SEQ ID NO: 165385 - DNA, 122 bp, Homo sapiens
tttccctttttggtgggacagagccccaggagaggcagagagtgagggaaagggcctggccggcatgcacagataggatcacggtcctgggagaattcctgctcttatagtctaacctacca

SEQ ID NO: 165386 - DNA, 122 bp, Homo sapiens
gaataatatataaataaataaagtgtaaaatttattgtgattgtgtttgacagcagatatcggagaaaattgctggatgagccaaggaccccaagggcgtagcaggatttagggaggagaag

SEQ ID NO: 165387 - DNA, 122 bp, Homo sapiens
ccaagtgcgaccactggcggctggcactgccgaggcggagagcggcgctaacttatagcccgctttggggcgggccgggggcggggccccgcgggaaggcggcgacctgggaggccacccat

SEQ ID NO: 165388 - DNA, 122 bp, Homo sapiens
ggcgaggggaagggggagggggcgctccctcgcgcaccagattatttttggctccgcagccggggctgctcgctgcttgtcgcgcgctcacacacacacagacacacacgcacacacacaca

SEQ ID NO: 165389 - DNA, 122 bp, Homo sapiens
caggttggcctaatctgctccattagtttgcatcataattaatttcttgtcattagtagacgttcagatggctaattgattctgctccttcttctaggtttatttcaatctacagaggaccc

SEQ ID NO: 165390 - DNA, 122 bp, Homo sapiens
tgatcccaccactgtgtgtccaggcatagatttctctttaataatcttacccaggctgggcgcagtggctcacgcctgtaatcccagcactatgggaggccgaggcgggcagatcacctgag

SEQ ID NO: 165391 - DNA, 122 bp, Homo sapiens
gctggggcatgtagttctccgtaggcgggaggcgcacggtgctgtcgggaaagttggtctcggaaaactacagccgccctcagcgcgccttccgcccgcatttcttcgcagtgcattctggg

SEQ ID NO: 165392 - DNA, 122 bp, Homo sapiens
ggtggtgcacactgggaccctcaggctctctgtgctgggagggtcagagccacgtggatccgagcacacacagacctgcttcctggacgacctgtgggtcccaagaccaaatggggtctagg

SEQ ID NO: 165393 - DNA, 122 bp, Homo sapiens
actccctgccactgacttcggttaccttggagacagcgaggcgctctccctcgtgggtcgcgcgcgttccgcttcctctctgctgccaagcggtggcggctgaggcgggaggtggtgggggt

SEQ ID NO: 165394 - DNA, 122 bp, Homo sapiens
tcagtttaaaggaattaactaaattggatgccattggaaagtgcagacagctcagagatccgtggtgtgttaatctggtactttgttatgtttcagaacttgctcaagcctcctgagcacac

SEQ ID NO: 165395 - DNA, 122 bp, Homo sapiens
aatgcattgacattttttaaggggaattggggctcgccgggggcgggagcgctcttgtcacgttatcttcccaggcgctgctggagaagaccctgcacaccgcgcatgtgtgagtgtgtgct

SEQ ID NO: 165396 - DNA, 122 bp, Homo sapiens
tctgctgcgctgcgagggcttgaccgccatgtttgaagcgggcggaaaaaaattatggggcgtgcagtgtcacgtgactgctcggatttttgtcacgttgtctgtggatcctttcttatttc

SEQ ID NO: 165397 - DNA, 122 bp, Homo sapiens
cccgccggagtcacagccccctcctgccgcgacctcgcctgacccggctgtccgggcacccggaggcaactaaggccgccccctgcccagatgccggcctgcctctcagcttgacttccctc

SEQ ID NO: 165398 - DNA, 122 bp, Homo sapiens
tttgcagagaaggaaggagggatccttctagaaaatgccccaaaggaagattccacttggcgcaggcatcaggagttatccaatgtgacttccaaagacgccttgaaaaggttttctgctaa

SEQ ID NO: 165399 - DNA, 122 bp, Homo sapiens
ccggaccggctgctcctgcaggacatctgctgagtccagaaggaatcagtgcacgacgcccgcagagccccaaatgccctgggagatcagcaggacttcaaagacaagcaggggcctcggtg

SEQ ID NO: 165400 - DNA, 122 bp, Homo sapiens
ggcagaaatacgaggaggagatccgccgtctctataagcagcttgacgacaaggtgagggcggccaggcagggcactgaggcacgccaggtgggatgagaggtagacgatcaaagaaaatcg

SEQ ID NO: 165401 - DNA, 122 bp, Homo sapiens
tgaagtggttgttgtgtgatcaaaatacaggatgctgtaggtcacgcccgacagaagggtcggccgctgagggtgcctctgcctgctggttcctgctgaagattgttgcggttgctttcgaa

SEQ ID NO: 165402 - DNA, 122 bp, Homo sapiens
tgaggtgcagagagggggctgggagcggctgaccctcggtgtctccgacaccatcacacccgtcttgtctccctgacatgcctcagttccaacctgccatcgtcatgcgacgctcaccacac

SEQ ID NO: 165403 - DNA, 122 bp, Homo sapiens
gaggaggcggtgagtgccccacgctcaggagtgcacccggtggagggggatatgtacacccgcctgggaggggccagaacccagtccacactctgcccgcatgatctgcctctccccaaaac

SEQ ID NO: 165404 - DNA, 122 bp, Homo sapiens
ctaggcccccgtaggtacctgagtgtgtgattcagttgacccttccatccctcctcactccgagtttgggattctgatgttcttcccttctcttccccgagaaccttgctggaggaaggtct

SEQ ID NO: 165405 - DNA, 122 bp, Homo sapiens
cggtgtgaagttactcagccgctctgagcctgtgtccttgcagccaaggtaggtaacgatcgtacctaccacatgaggtggtcatgagaaaacgacactcacgaagcactcgagcgcacctg

SEQ ID NO: 165406 - DNA, 122 bp, Homo sapiens
gcggatccccagcgcgcaaccaccccccgcctgcctgcccaaagcaccgggactggagcacggagacctaccagggtaagttggcactccttggcccttcaagcctcaactgcagccccatg

SEQ ID NO: 165407 - DNA, 122 bp, Homo sapiens
gcagcccttgctggctcttggcacctcctcggcctcgctggcgcccactctggccgcactcgaggagccccttggcccgccactgcactgtgggcgcccctctctgggctggccgaggccag

SEQ ID NO: 165408 - DNA, 122 bp, Homo sapiens
gggaaagaacatcgtctgcgtggggaggaactacgcggaccacgtcagggagatgcgcagcgcggtgttgagcgagcccgtgctgttcctgaagccgtccacggcctacgcgcccgagggct

SEQ ID NO: 165409 - DNA, 122 bp, Homo sapiens
aaaaaaatgtggctactagaaattttaaattggacgtgttgttcacaattttatttccttcggacagtgctggtccgaattaaatacatgcaattaaattacaatgcatgcaattaaataca

SEQ ID NO: 165410 - DNA, 122 bp, Homo sapiens
tctcgccgctgttctttgcaacctgcaggggccggtgtatgtccggcgaggagccggggccgctgcgggtgcgtgcaacccccgaaggagacaatccctccacctcggggcgaacccggggg

SEQ ID NO: 165411 - DNA, 122 bp, Homo sapiens
gtgaagccgggagcccctcgcgagttggcacagggccccgtctcagggtttaggagcgaacggggaaatggaagacaaaggaaatggggggacatagcaacccctattcttgtaccctgtag

SEQ ID NO: 165412 - DNA, 122 bp, Homo sapiens
tcacccaggaaaggtggaactgaaaataacggcacacacacgaccgtggctgggaaatcgcgccgctgcctccacatcagatgtggggccgcttctatcagagtgatggagccatccctcac

SEQ ID NO: 165413 - DNA, 122 bp, Homo sapiens
gagacccccccacaacccccagccacacgcaggcagtaggaacccgggagatgggacgagcgccgaagggttattagcagatgcctcgagccccctcgagccccgcagagtgggggaggatg

SEQ ID NO: 165414 - DNA, 122 bp, Homo sapiens
gccctgccgctgcacacgtgcgtggccagcagataaagtcttccttgttattgtgggcagcgtagctgcacctgcggtgaggccggcactgctgaagagatgtcaattcacagagcttgact

SEQ ID NO: 165415 - DNA, 122 bp, Homo sapiens
gctcgtggtcctctggcgccctctgctggccgctcacgcgcaccgccaccacgccgggcccgggcctgcgccgctctcacccgtcctggcccaggaggtcgctgtcccttgcccgtggccag

SEQ ID NO: 165416 - DNA, 122 bp, Homo sapiens
atatgcatgagccggttggaacccgggagtgggaagcccgtgcagaattcgtcccaccgtcggcaaacaggcgcggcccagcactcaattattcatgaggcttgcagatgaggggcccgccc

SEQ ID NO: 165417 - DNA, 122 bp, Homo sapiens
tgtgccatgagcattttcccatgttattaaaaataatattcggccaggcgtggtggctcacgcctataatcccagcactttgggaggccagggtgggcggatcatgaggtcaggagatggag

SEQ ID NO: 165418 - DNA, 122 bp, Homo sapiens
tcatctccgttccattctctctctaaggctccaccacctgctagacgctctcctgcatcccgcctcacccatcgcgcctgccggttctgcctcccgcatgcttttgtcttccttccagttca

SEQ ID NO: 165419 - DNA, 122 bp, Homo sapiens
acattatgagattttttttgagattttgttttgttttgttttttgtttttttagctcattcggtatcattaatgttagcatattttacgtggggcccaagacaattcttcttccaatgtgtc

SEQ ID NO: 165420 - DNA, 122 bp, Homo sapiens
catggaggaccccagaaataagtgttgatgccgatgcccgatttaagataagtctaaaggcgctggctatccccttagggcccagctgtctgggcagggcgaggctgcgctggcgatcaaac

SEQ ID NO: 165421 - DNA, 122 bp, Homo sapiens
gaggatgtggagaggctggaacgcttgcgtgtcgctggcgggaatgtgaaacggcacagccgctgtggtagaccctctgctggcttgtcaaaaactccaaaaggaatcaccacgtgacccag

SEQ ID NO: 165422 - DNA, 122 bp, Homo sapiens
ctccttcccccagctcacttggagtcatgctgattttgtttagtcaatgctctgacagatcgcctttggtattttttcaattgtacctaggcttatctctcggtcacagatcaccttgagaa

SEQ ID NO: 165423 - DNA, 122 bp, Homo sapiens
ttcatctcactagggagtgtcagacagtgggcgcaggccagtgggtgcgcgcacggtgcacgagccaaagcagggcgaggcattgcctcacctgggaagcacaaggggtcagggagttccct

SEQ ID NO: 165424 - DNA, 122 bp, Homo sapiens
gccaccgctgctgctgccttcgctaccgcctgcgggggagccgggcgggacccgggggggcgggctacgctaatgaggctactgcataatcatgagctctggcaaggagggctcgcgtctcc

SEQ ID NO: 165425 - DNA, 122 bp, Homo sapiens
cgtgatccgcccacctcggcctcccaaagtgctgggattacaggcatgagccaccgcgtccggcctaaatgtcacttagtacctttgatataaagagaaaatgtgtgaaagatttagttttt

SEQ ID NO: 165426 - DNA, 122 bp, Homo sapiens
cctcccttgagacctcctcgccacgccccgcccttctcgaccctagactccaggctggagcggtggggacagctttgctgaccgatattaaaccgcgagaactgtcgcacgtgaacaccatc

SEQ ID NO: 165427 - DNA, 122 bp, Homo sapiens
gcacgatttcggctcactgcaacctccgcctcctgggttcaagtgattctcctgcctcagcgtcccaagtagctgggatttcagtcttgtgctaccatgctcagctaattttttaatatttt

SEQ ID NO: 165428 - DNA, 122 bp, Homo sapiens
tccttcacgatgccggacctcctgaaaagctcacctgggtacagctcaggatcctggcctcggctcgctggccctgacaggcgggtggtcagggtgacacacggtgggaagaacacacgccc

SEQ ID NO: 165429 - DNA, 122 bp, Homo sapiens
agcgattctcctgccccagcctcccaagtagttgggattacatgcgcccaccaccacgcccggttaatattttgtatctttatatagagggggtttcaccatgttgggcaggctggtctcga

SEQ ID NO: 165430 - DNA, 122 bp, Homo sapiens
cgcagccgccccagtgagaccttgtcgtaggacacggtgaggggcagctcggtggtggagcggtttatgacctgatgaagaaagccacactgagggccctgccctcatacccttgcacccag

SEQ ID NO: 165431 - DNA, 122 bp, Homo sapiens
cttcatgccccagattactagacagaaagtggaatcatctcctttaatcaagcaaattcccgtctcataatggggctgtgggaatttctctagaggacatcatttagggaaaaacaaagaag

SEQ ID NO: 165432 - DNA, 122 bp, Homo sapiens
ggcgcggagacgtggacgggaggagaactgtgaattctcaagcccgtagtgtgggcggggcgcggagcacccaccaaaccaccacccgacacgcagccgacgggatccccccctttctcccc

SEQ ID NO: 165433 - DNA, 122 bp, Homo sapiens
aggacctcggcgttaggtgggaccgcaaccaacaaggactacagttcccagcgggcagagcgccaactccaagtgaaggtccggttgctgggcatgctaggagttgtagtgtcggccgcctt

SEQ ID NO: 165434 - DNA, 122 bp, Homo sapiens
tgaacctcggtaacacgatgctaagtgaaagaagccagtcacaaaggatcccattttgcacgattccatttacgtaagatgctcagaatgggcaaactcaccaagacgggagacagattagt

SEQ ID NO: 165435 - DNA, 122 bp, Homo sapiens
ttaagatacaattgctcaggttcaagcacctctgacagtacctctgtcataggagtgcctcgcggtcagaacaaatttatagacaaaaatgtaatgtgatgtacagaaattggaagtgaggt

SEQ ID NO: 165436 - DNA, 122 bp, Homo sapiens
caacatggtgaaaccccatctctactaacactagaaaaattagctgggcgtggtggctcacgcttgtaattccagttactcaggaggctgaggcaggagaatgtcttgaacctgggaggcaa

SEQ ID NO: 165437 - DNA, 122 bp, Homo sapiens
gtcggcctcttcgtgtcttacctggggcttcctcatggtctggtggttaggttctaaaggcgaagtctttttctctttttttctttttttgtatttttagtagagacggggtttcaccatgt

SEQ ID NO: 165438 - DNA, 122 bp, Homo sapiens
ggtttcggcagtggcatccggggccagggtagcggccgtggactgggcctgggccagggccgcagagctcgcggaggcaaggccgaggataaggagtggatgcccgtcaccaagctgggccg

SEQ ID NO: 165439 - DNA, 122 bp, Homo sapiens
gcaacctagactgtatttctaaggctctttctggacattcaacttgtcaagtcacatgaacgtattaaaatacaaatgcctgggtcccatcagacttgctgggtccaaagcaaggttcagat

SEQ ID NO: 165440 - DNA, 122 bp, Homo sapiens
acagggaggggctcccgcggtgctgtaggtcaggaggggtctcaggcagctcaccttgaacgcgcgaaaaggccatagggagccacgaaaggttccgggaagagggctgggcacacccagac

SEQ ID NO: 165441 - DNA, 122 bp, Homo sapiens
ccgagggcacccctggaggaaattctcgaggtgacctggacagggcgggctgggcgaggacgctcccggggcctggaggcggagtcgggggcgggcgcgcgcagtcatctgactcggtgact

SEQ ID NO: 165442 - DNA, 122 bp, Homo sapiens
tcatatgtactgcaaataacttatgtgacccaaactacatcaatgcgtcctaccacaccacgcctcatactgaatgggcctcccatatgccccatctctgcggctgggatctccagatggag

SEQ ID NO: 165443 - DNA, 122 bp, Homo sapiens
gaagactccccccttcaccgaggttacctaccaaatccgccatagggtgtggtccagggtcgagttatcacagacctgtctccccaaggtccccgcgtcgcgttatctaggcagaagcgctg

SEQ ID NO: 165444 - DNA, 122 bp, Homo sapiens
agccttagggatgcaggtgtgggaattgcaggaaaacccgaggctttgtttgttttcccccgactgaccctgtttccctccagtttacctaactgccccctatccccgctcctacctgttgg

SEQ ID NO: 165445 - DNA, 122 bp, Homo sapiens
ggatcatcagacaggggttcagctaacagttccctgtaaacctaaactgtgcagtgctgtcgctccacagaaggtagattttcagttcctctgccaagaacagatgagtcagagtgtgggga

SEQ ID NO: 165446 - DNA, 122 bp, Homo sapiens
tggaatagtgttggaaaagcattaagatgttccattctctttttgtttatagacaaaatgcgtaaagtgctaaagcgctgacaaagggattggatggggctcaatcctctgaattagattct

SEQ ID NO: 165447 - DNA, 122 bp, Homo sapiens
tggcgacggtcttctgcaaacgacagagcgcaagccttgcccctggaattctagagccgccgcaaagataggaactcaaaacgacccgagccccggagccgcagcccctcgggacggtcacg

SEQ ID NO: 165448 - DNA, 122 bp, Homo sapiens
ccgctgggggctggagttagccttgggacccctacttcttgcctgctatgacctcgaaagcgcttatctgtttgacatgagggataaaaatgcttctgttttggagtagggtcgtccttgtg

SEQ ID NO: 165449 - DNA, 122 bp, Homo sapiens
aaacctgaccctaaagtgcccccagcgcccggtgggaggctggatgggcccacctgagctcgcgtggggcgcggacggaggcattctcgctgcccggcacccgcacccaaaagaccctcgca

SEQ ID NO: 165450 - DNA, 122 bp, Homo sapiens
cttgctgtctcggcctggaaaagccctttaagttgctgtcagtgcccaggcaattgggagcggggcccccactctgcagtttttcaaattgcttcccaagctgagaaggggtttgcgcgcgc

SEQ ID NO: 165451 - DNA, 122 bp, Homo sapiens
gctggaggccggcaaagccaaggtaggagagcccgaggcaaccgggcctgcggtgggaggcggtggctagcacggggtgggagggggcctgggaagcggagttcgccgcagccccagtgcac

SEQ ID NO: 165452 - DNA, 122 bp, Homo sapiens
accggggaagaaacttgtctagcccccaagaaccaaacttgcctggggcgggatcatttgcggggaggagcgctgggctcgccccccggctctgacgttgaccaatagaaaggcctgggggc

SEQ ID NO: 165453 - DNA, 122 bp, Homo sapiens
caggccattagccttataggtggagagagggaagaagtggtcaattgcaaaggtgctacccggacctggaactaaaaccagacacagactccctgctgagactttgtgcaatacattctatt

SEQ ID NO: 165454 - DNA, 122 bp, Homo sapiens
cagctggggcgtggactttgctccagcagcctgtcccagtgaggacagggacacagtactcggccacaccatggggcgcccactgcacctcgtcctgctcagtgcctccctggctggcctcc

SEQ ID NO: 165455 - DNA, 122 bp, Homo sapiens
cagaaccttaaccagctctattctcactatcccagtaaaatgatgttaaaaattagacctcgtgacatgagagaagaggggaaattaattacagattacaaagaaattgtgggatctaagtt

SEQ ID NO: 165456 - DNA, 122 bp, Homo sapiens
cagctcacatctaagcgtacgctctgtgccagtccttaggtaaaatgttttactttgtgccgggagcggtggctcacgcctgtaatcccagcactttgggaggccagacggtcggatcacct

SEQ ID NO: 165457 - DNA, 122 bp, Homo sapiens
aaccttttttctctgattctcagtcttgggtatatttggggattttagggtttaggctgccgccaagaagactgctactgttatcatactgaacagatgctgccaactcttaagctccagat

SEQ ID NO: 165458 - DNA, 122 bp, Homo sapiens
cgaggggggaataggctgaggggctgggggcgaggtgggtagatccttcacagggcttggcgctccctgtgttttgaggggcaggaccctgcaccaacctccacgaaggcatcagtcaggtc

SEQ ID NO: 165459 - DNA, 122 bp, Homo sapiens
tccttcctccttctgcgctgagcctcttcccggggcaggagcacttctcaggttcatgggcggggtcaggcccaggacacctctctgtcccctcctctctcagtcctgcctccttgtccctc

SEQ ID NO: 165460 - DNA, 122 bp, Homo sapiens
aagtcgctgataacgaccagtcaatcattagagaggagactcctcgtcctgggagaaagccgatttgtcatctcttaaaccccagggcatccagcgtgaaggaggtagaactaggccggccc

SEQ ID NO: 165461 - DNA, 122 bp, Homo sapiens
ttctagcggcctccttcctgctagtgctgtcctgccccgggggctggctggctgcttcctcggccactgccaccaacctgtccaccagagcttctaggctttctggccttctgagagaacag

SEQ ID NO: 165462 - DNA, 122 bp, Homo sapiens
gaatcaggcttctgtgggggcatctgggctgtttcaagtagagcaacaggacaggtggggcgattgacagtggactgtcttagaaacctcaagtcctggggaaatgcagcccttctttctac

SEQ ID NO: 165463 - DNA, 122 bp, Homo sapiens
tggcaagtacattaagtggagttttgcctctgcttttatttctgatgtctttcagtggagcgccaagtaatgcacatgaaatgctcccacagacacaggtggagctgtcccagtactgatca

SEQ ID NO: 165464 - DNA, 122 bp, Homo sapiens
ctggagtgacaggctgctcgcacattgaaaggacactacctccagggatcaatgacttttcgtggccttgaaattcacatagaagcagggcgtagtggctcacgcctgtaatcccagcactt

SEQ ID NO: 165465 - DNA, 122 bp, Homo sapiens
gtgagctggcctggcccaggcccagccctgcctcccgccccttctccccacagtggactccgtctgcctcaagtgggcaccccccaagcacaagcaagtcaagctctccaagaagtgagcag

SEQ ID NO: 165466 - DNA, 122 bp, Homo sapiens
atgtaactctcgctgatgcataaggaagacctgcagaaacgctgcagacacaaccccacgcgggaggcatgcacacgacacccctcccacacctacctgggatcccccaagaacccagcacc

SEQ ID NO: 165467 - DNA, 122 bp, Homo sapiens
cccctcactgcttggcttgctctgcagactgtgggctgcgacctctgttcgagaagaagtcgctggaggacaaaaccgaaagagagctcctggaatcctacatcgacgggcgcattgtggag

SEQ ID NO: 165468 - DNA, 122 bp, Homo sapiens
gacctcatgattcgtccggccttggcctcccaaagttctgggattacaggcgtgagccaccgcgcccggccgagtggtggtatttttaaagaagcacaggccatacctgaaaaaacaataaa

SEQ ID NO: 165469 - DNA, 122 bp, Homo sapiens
gggccgctgtgtgtctttagttgccaaagcgactcggcaggaaaacaggccttttggtggcgacagcagtgtgtccttgggcgcctgctgtcagcctggaacaccattctggggccatctgc

SEQ ID NO: 165470 - DNA, 122 bp, Homo sapiens
attttctctgttcattggctcttcacttgttgcttggtgttttccttagtcttctgagatcggttgcttcattagttgttcaaaaaatatttattgagcacttagaatgtgcaaaacactat

SEQ ID NO: 165471 - DNA, 122 bp, Homo sapiens
agtcctggaagggcgttcgtgtaaacaaagcaggcagatagcttcaactctgcaatgaggcgcaacctttcccagatcaaagcctggatcacagagacagccctgaagaactgagtgtcctt

SEQ ID NO: 165472 - DNA, 122 bp, Homo sapiens
tgggtgtccccccaatcttctgtgaggaaattgtgtagactttgcattaaggcaaccaggcgttctcccctccccagcacacaccagtgatgcctgtcttcccggttcccaaagtcaccccc

SEQ ID NO: 165473 - DNA, 122 bp, Homo sapiens
ctgaggaatgtcagcctggtctaccaaggtttatgaaagcctggcatatagaaatgatgtcgttaatgcacaaatacctgcatcctgtcttgaactccctctaggggccaccatgtgtatca

SEQ ID NO: 165474 - DNA, 122 bp, Homo sapiens
ctttaaaaggaaagtgttcagttgtccattcattcaaacagttttgtgggcaggaaaagccgggaagaagctgtggactgggagaaaaaaaaaaaaatcactgggcgggtgtgtggggtagg

SEQ ID NO: 165475 - DNA, 122 bp, Homo sapiens
ctggccgctgctgggatggggctcggggcctgggatggcctgtaatcagctttttcttcccggcagcgccgcaagcgtcctattccatactaccggcccagcccctcttcctcctccagctg

SEQ ID NO: 165476 - DNA, 122 bp, Homo sapiens
agcgtgtcatcaatcccgggccacggccggagctgggtcgcgagggagatggcggctccacggctccccgatgctgacacagatcgctgtcccctgcagctcctcgaacccctgagagaaat

SEQ ID NO: 165477 - DNA, 122 bp, Homo sapiens
ccgaacactgcacgccgctgccctagggcgccctggagctggacccgctgccagaaggcccgcgctgctcagctggtttttgttgtttttgttgttgttgttgttgttgttgttgttgttgt

SEQ ID NO: 165478 - DNA, 122 bp, Homo sapiens
ccaaggaggcggtggtaggagggacctctggagccactgctccctggggttgggggaaaccggagcctggtcctggcagggcttcccaggggcccgggcaggggcagctgtccagaactgtc

SEQ ID NO: 165479 - DNA, 122 bp, Homo sapiens
gaacacaagtcggcctttagcactctccacgaccctaggtcaatcccgcactacaggggtcgcctataggggctggaacctagaggaatcctggagaaggaattatttcctgaggattcctg

SEQ ID NO: 165480 - DNA, 122 bp, Homo sapiens
tctccatgaactttcagatagttttcacagtggagatggttcttggttttccatgagtttcgagtcttgtcctatgtatctttttgctgagtttacatttctggatggagcataagtgagct

SEQ ID NO: 165481 - DNA, 122 bp, Homo sapiens
cccctcattaaaccatccacctgacaccagcacatcaggcctggttcacctctggggtcacgagactgagtctacaggagctttgggcctgagggaaggcacaagagtgcaaaggttcctcg

SEQ ID NO: 165482 - DNA, 122 bp, Homo sapiens
cggagcatgtgcagacccgcaggcgctaaggtgctctcagtccgggggccttctgggcagcggtgactgtcaccccaagagagacctttcgggggctcttgccgcacctctgctgcgtcgcg

SEQ ID NO: 165483 - DNA, 122 bp, Homo sapiens
gggaagggtgcggtactgacatgttgatgctggcctctgggatgttccgcgtcctagctccgcacagctgggtatctcactcagtcgccacctcggactcctcggtccgacaacgttggccc

SEQ ID NO: 165484 - DNA, 122 bp, Homo sapiens
cacacgctccacacctgtggcacactcctgtgagcttacaggccttcgatcacacgtcatcgcacacgccccacacctgtgacgccctcctgtgagcttaccggccttcaatcacacatcat

SEQ ID NO: 165485 - DNA, 122 bp, Homo sapiens
gttgcggtgcccgggctcggggggctgcagcagctctggggagtggcagggcgggctgcccgcggcgctgtgctcgctgtcggtgtcgctgcccttcttgccgccgctgcccgagcccgccg

SEQ ID NO: 165486 - DNA, 122 bp, Homo sapiens
cgcgcagtcctggccgtccatcaacgtgagtggggcgcccgcgttccgcccaccccggaccgggccttgagattgagaccccagcgcctcaccctccgttgagggccttgcccctttcgggt

SEQ ID NO: 165487 - DNA, 122 bp, Homo sapiens
acagatcagttaaatcagaatcttcgaaggtatcagacacgggtgtttctaaagctcctccgcgcccattctctcctctgggaattcatgtgtagccaggaatgaaaaggtcttagtacaag

SEQ ID NO: 165488 - DNA, 122 bp, Homo sapiens
cttcttcctccatatgtgctacacctggccagcaagggaaccccctctgaaatcagtgcccgggttctgaccaaacccgatcatgcaggatggataggagatgaatcgtagaaaaatggagg

SEQ ID NO: 165489 - DNA, 122 bp, Homo sapiens
aaattcctattcagaaatgatgtgtagatcccatttcaaaggctgcttcctgcccttgtgcgctaggatttgattttcatgtgaagggttatcagtgccattccagccagccttccatgctg

SEQ ID NO: 165490 - DNA, 122 bp, Homo sapiens
gcagccctccatgcctgagcctccccaagccctcgccctgccgtgggatcctgcgcctcccgggcctccccaaggagcgccgctccctgctccacggcgcccggtcccatcgaccacccaag

SEQ ID NO: 165491 - DNA, 122 bp, Homo sapiens
gcagcagttcctgaagaaggcgctgcaggggctgcgcaaggacttcctggagctgcgctccgccggcgtggagcagctcatgttcatcaaggaggacctcatcctgccgcactaccacacct

SEQ ID NO: 165492 - DNA, 122 bp, Homo sapiens
cgatgccggtgccttccagtaaccccgcggctgggggatgtctgggagccgcagcctgaccgccggcgcggggacgtgagccagtgctggccgggaagccgcgagcacggcgactgggcccg

SEQ ID NO: 165493 - DNA, 122 bp, Homo sapiens
cctttgtggttggggaaggaaatgggcttgatggggaagaagtgtgtgcggagaactttgcggagcatgttctgagcgagacagcaaggtcgtgagcaaacgcccagcccctcaaagctaca

SEQ ID NO: 165494 - DNA, 122 bp, Homo sapiens
atttctggattggggcatgggattctgcatttcctgccagctctcaggtaatgctcatggcgcaggtccctggaccacactttgagtaactgagccttacagttaaagtgcatgttgccagc

SEQ ID NO: 165495 - DNA, 122 bp, Homo sapiens
tccgccggagaggtgcgccggggtcagagcgccgggacccgacgcgcggctcccaaagggcggcaggaagagcccagctgggctcagccacagttatcagcaatctgcgggcagaggatgtg

SEQ ID NO: 165496 - DNA, 122 bp, Homo sapiens
gactgcctatcagctgaatagaatatgtttaacctgtgtccaaggaaaggtttcttcccccgctctgtaataagtgctgaattctctttccacagagtgacgctgatgggacggaagcaaga

SEQ ID NO: 165497 - DNA, 122 bp, Homo sapiens
cctgagaaggagggcagggctgatgtcggacgtgcgggatgccagagtcgggtgccaaggcgcctcctcgacctcctcgcaccagcgtcccccgcccggtttccgcctccgcccgaagtggg

SEQ ID NO: 165498 - DNA, 122 bp, Homo sapiens
ggctagagaagagtctgaaggggatcccatctctcaaaggcatctttacgccgcagtggccgctgcacctctccctgctctttgccagagcaactgggttaaggcaagaagacattgaggga

SEQ ID NO: 165499 - DNA, 122 bp, Homo sapiens
ctggaagcaaacaattcagtggcatttaggaccttcacagtgctgtgcaaacaccacctccgtccagtgcaaaaacatttcgtcaccccaaaaggaaatcccagacgcattagctctgccgt

SEQ ID NO: 165500 - DNA, 122 bp, Homo sapiens
ggttgagcaactagcaacagagtcaagaagtgggaatgtgagatgatttgtctttttacacgcacagaaataacttatttaaattgctatgcctgtcattgggttcgggcctttggatctag

SEQ ID NO: 165501 - DNA, 122 bp, Homo sapiens
cccccatgccgcagagaccgcgcaggtgggagggacccgagactggcacagtggagacggcgaagtcctagggagagcgaagggaggtattcaggggcgcgggaggggtgatggggtatctt

SEQ ID NO: 165502 - DNA, 122 bp, Homo sapiens
tgcacccaacgtcagggcgcgatggagtgaagcggcgacgaaggtggtacttccgcgttgcgctgcccgagccgagagcgcggccaaggccgctcccccacccccgggggcacttggaggac

SEQ ID NO: 165503 - DNA, 122 bp, Homo sapiens
ccgacccttttttgcagtctcaggacgggcgctttggagccggccccaggcagcgtgtgtcggtcgcctagtctggagaactagtcctcgactcacggtgagggaatggaccgacacgggta

SEQ ID NO: 165504 - DNA, 122 bp, Homo sapiens
gtctcgaactcatgggctcaagcaatcctcccactttggcctcccagagtcctagggttacggtcgtgagccactgcagccagctgtggttcttaagtattcttaagaacactttttttttt

SEQ ID NO: 165505 - DNA, 122 bp, Homo sapiens
atacatctgttttccattttccaaagttttgttgttgtcacctctacttatctttctcttcgcaggtttatatctttctttaaaattttttttttaatttaaaatttaaaatttaaaatttc

SEQ ID NO: 165506 - DNA, 122 bp, Homo sapiens
ccactgtgccttgttgtctgctggggggccatagctggcactgcccaccgtaaaggccctcgcacattttcccccttcctgtacacctcggggccagcatcctcaccttcttcaactgacca

SEQ ID NO: 165507 - DNA, 122 bp, Homo sapiens
gtttcaagatctgtagttgcagaaggtatattctgcccaagtctaagggcagaagatcaacgacacagcttgaagacaggcagaaaaagtgaattctccttattcagcctttcggttgtatt

SEQ ID NO: 165508 - DNA, 122 bp, Homo sapiens
ctaagctctgtcgcggtcgggtgggtgtgcgtccgccgccatcttccagcccctccccctcggcgagtgctaacaccctgcactctgctgctcttcctgtttgcaactagtaaatctgttta

SEQ ID NO: 165509 - DNA, 122 bp, Homo sapiens
tccctggctgcgtagagggaagggctggatctgaaagcggagggcggggagttgccccgccgcgggccccacctgcccaggagctggggatgcctctccagaatgacccccgatctccgtgt

SEQ ID NO: 165510 - DNA, 122 bp, Homo sapiens
tccactgcgccccccaagctcactcccccacccagcacacctatggtcggtgctttcaggcgctcctgcagccgccactggatcttaggctccagcagaggaaatgcagggagggagtcgat

SEQ ID NO: 165511 - DNA, 122 bp, Homo sapiens
tgcctatagtcccagctactcgggagcctgaggtgggagtatcatttgagcccgagaggtcgagggggcagtgagccatgaccccaccactgcactccagcctggtgacaagcaaacaaaaa

SEQ ID NO: 165512 - DNA, 122 bp, Homo sapiens
atttacaataaagtgggataagtctaaatttagaggatgacaaagtgctataagaacacacggagaggacacctagctgtcttgaggatgttagataaagtatcttaaaggggaagcaatgg

SEQ ID NO: 165513 - DNA, 122 bp, Homo sapiens
actgcagtctcagtttcagatcccagcgcctcgtccctgcccactgccctcggccccgcccgcctgcattggcagtgccctggccccacccacccgtgtcagcaccgcccaccgccctggca

SEQ ID NO: 165514 - DNA, 122 bp, Homo sapiens
accggcccaatcatgttgctgctggggtctctccggtgcccagcagtggttgtcagtaagcgggcggcactcccttccgatacgtcttttcttttttcatttttgagacggagtctcgctgt

SEQ ID NO: 165515 - DNA, 122 bp, Homo sapiens
agaattctatcctctgaaaagtgagtagcacataaatgctcattttgaggaattacaaagcgaaccccagggtcaccacctcccaggttgacacacattgtgaccgctccattctttccact

SEQ ID NO: 165516 - DNA, 122 bp, Homo sapiens
cgcaccggaagttttgaaatatcctgtgggcttcccacaggcaaagtggttttccctccccgcggctctgcgggccctccccagggttcgaggacctccgagtttgctgcgcccggggccgg

SEQ ID NO: 165517 - DNA, 122 bp, Homo sapiens
cgggccaggagctctggggcccttctggagcacccgggagccacctgtgcacttctcagtcgccacggccccggtgcaggcctggcaggagaaggatccccgcggaaatgcctctactaact

SEQ ID NO: 165518 - DNA, 122 bp, Homo sapiens
gctcgtccccaacccccgctgtgggggaacctaccctgtggaagcctgtattggtccactcggccgctgcagactaggtggctcgtaaacagagttcacttctcacaggcctggaggccaca

SEQ ID NO: 165519 - DNA, 122 bp, Homo sapiens
tggcctgccggagggccacggccccgggtgatgccgaccttcttcctcccgtccctcccgcgtgcaggtgtgctcactgtgacccttttgcctacgcgtgtcaaattcccaagccagtgaaa

SEQ ID NO: 165520 - DNA, 122 bp, Homo sapiens
atgcactcaacaacctaaggacgcaggagggttccggggatggtccgaggtgaggggctgcgccacagacgaacgccttgcgctgctggctgcttttacccatctccgtggtgcagttggcc

SEQ ID NO: 165521 - DNA, 122 bp, Homo sapiens
cgggccagtggctgcggagggtgtactgagtcccccagcagtgctggcccactggcgctgcgctcgatttcttgcgaagccttcttgggaaggccttggctgccttcccacggggcagggct

SEQ ID NO: 165522 - DNA, 122 bp, Homo sapiens
agtggagctgggtagggaaggaggttccagacagaggaacagcctaagaagcatgcgatgcgatgcagactgggaagaaggccaacatggcctcagcagtgggagtggcagtgaggggcata

SEQ ID NO: 165523 - DNA, 122 bp, Homo sapiens
accatttcactctttagaacctgtgtagtctttctttttctatgtagaaagccatctaatcgtttttgtttttgttttgcttttgtcaactaaccgtcactgtagttgcccacttaccccca

SEQ ID NO: 165524 - DNA, 122 bp, Homo sapiens
ctgctgcctgcgtgttctcctctgtggagatgagcctgggatccagaaactttctgagcacggctgtcagctgtgctgtccttcctccttttgtgctgagcctcttcccggggcaggagcac

SEQ ID NO: 165525 - DNA, 122 bp, Homo sapiens
agagaaggagagaagggttcagagaactaaaactgaatatgaaggtggagaaagatgggccgtatttcaagttctgaggccacagagtcacagctgtaacaatggttcttttagaaagataa

SEQ ID NO: 165526 - DNA, 122 bp, Homo sapiens
ccgctgatagcgggctcacaacgatgacgtagcgaggagcggaaaacgcggtaaccaaggcggccccaggcgcgcacttccgcccggccttccaccggtccaggtctgcccctccgcagcga

SEQ ID NO: 165527 - DNA, 122 bp, Homo sapiens
gcgcctcttcccgacgtttggttgctacgtccgggcctcggcgcccacacaagatttccccggagagaaatgtgtcctgtaccttgttgactcgcacgtccaagtcgagtccctggttttaa

SEQ ID NO: 165528 - DNA, 122 bp, Homo sapiens
gctactgcacccggccgcgcggacccgagcgctgcagctgcctccagccccggagcgcggcgctccgagcccctggtgggtgtctctggctccaagggaatcacggctcaattagggacctg

SEQ ID NO: 165529 - DNA, 122 bp, Homo sapiens
gctgctccgccgggctgctgatgactgtcggctggctgcttctggcgggcctccagtccgcgcgcgggaccaacgtcaccgctgccgtccaggatgccggcctggcccacgaaggcgagggc

SEQ ID NO: 165530 - DNA, 122 bp, Homo sapiens
gacccgggcctcccagctctggcctcctgcatccaccccgccccgacctcaagctgcttccggaatagaatgaaatccagctcgttaagcttcgcggggaggtgtgtccacccgccccgcgc

SEQ ID NO: 165531 - DNA, 122 bp, Homo sapiens
attaatgaaagtaacaactcctggaagggactctagcactgcctgtgaaaactagaaacccgtcatcactcctaggaaagaaaagcaccagggtcgggctttgcatgcaagctttgtcatgt

SEQ ID NO: 165532 - DNA, 122 bp, Homo sapiens
gatgctcggagcacctgagctcctgaggcaaaggcttacccttgtagcatagtgttgcctcgtttcctggtggttttgttgctccagctctttaaaagcctcccttactcagtgccgcctcg

SEQ ID NO: 165533 - DNA, 122 bp, Homo sapiens
ccctgtccaggcagcatgcctccttggttatccaaacagtaagaagaaatgcaggaacttcgtgatccacacgcgtgtggatgaccctggcacacagcgttcccgttaaattctaagtgtgg

SEQ ID NO: 165534 - DNA, 122 bp, Homo sapiens
gcacagccaggatggggatggagattcctctgcccaaagcaggggttcctatttccagaacgctttgtacctggaggtcaagaatgaggatgttttctttcagaggcctgctcaaacactga

SEQ ID NO: 165535 - DNA, 122 bp, Homo sapiens
acaattaaggagaggggtgaggctccctctccatctgggtaattgtgttctcattaagagcggatgcgcccgggctctgagcattagcgctccagtgcagcttggaaggcatgctcccagct

SEQ ID NO: 165536 - DNA, 122 bp, Homo sapiens
actccttttcaggaaatctccgggtgcttcctggtggcccccgggggaagctttgctagccgcctgcccctgttcccggaaacgaggcctgctgggcggactggcagtgcgtccaccgcgag

SEQ ID NO: 165537 - DNA, 122 bp, Homo sapiens
cctctcctctgcccccaggacacttccactgctagatggaaaccccttcttcagaaagctcgctctgacacatgctgtccccgttccccatcacacaagccctctctacaagtcagttgggg

SEQ ID NO: 165538 - DNA, 122 bp, Homo sapiens
tgtaggtgagaactatagggttttggaattctcgaggatcattgccgctgtagcagtgaccgtgagttttggtgggggaggggcggtgggggtgggtcttccagcggtgagtgatcggcatg

SEQ ID NO: 165539 - DNA, 122 bp, Homo sapiens
catggacggggccttctcgtggtgatgacagtcgcccttggtctggtgtctgcagtgctccgaggaccggccctgcccatccctggcgttcactcctcagcttcctcccatggggtgggcgg

SEQ ID NO: 165540 - DNA, 122 bp, Homo sapiens
ccaggcatccgagcggcagctgttaactttcgtgatctttggcgcccccttctgcaggcccgcggagcagcagccgtctcgactgccgtccctctcccgggagcgcagcagcctctttcttt

SEQ ID NO: 165541 - DNA, 122 bp, Homo sapiens
accccgttgatcagtgctcctcagcctccaaagtgctgggattacaggcatgagccactccgcccggccacattttttgaacaggtgatgagacctactctccgtgtaaacttaccacagta

SEQ ID NO: 165542 - DNA, 122 bp, Homo sapiens
cggcggcggcggcacggcggctgggccgctcagtcccacattgtccccgggagaggcggccgctcacaactgcgagtgacatcagctgcgaacaatgaggggtttgacaggcgcggagcccg

SEQ ID NO: 165543 - DNA, 122 bp, Homo sapiens
tgaataatatcattttgaatcacggatctgtcagtaagaaaacctgcttctgcttcatttcgatgaaagggctttgagaatttctgcactgggtaggaatggaatccagcctcctgtgtacc

SEQ ID NO: 165544 - DNA, 122 bp, Homo sapiens
attaatttttttagcctcagattcttcatacatgaaatagtaatacttgtctcacagaaccgtgagcatctaatgagttattgtacaataaccaacctatcactaagtccttcacattgatt

SEQ ID NO: 165545 - DNA, 122 bp, Homo sapiens
cctccagggctccgatcccaagaccccgcgttggaggaacttgagatccggacttctaagcgccccaaccagtttcgggctgcagcggccatcgcttcaaggggacccaggactttgggacc

SEQ ID NO: 165546 - DNA, 122 bp, Homo sapiens
ctaagacgggcctggcctgaacagatcaggccacagttagcctgttcccaggacacttggcggtcattagtcccagaaaaggaatcattgcatttgatcctatgagaagccaagcatgcttt

SEQ ID NO: 165547 - DNA, 122 bp, Homo sapiens
gagctcccgggaagcttcgcgctggtggagcgtctgggccaattagacaaacgagggcagcggaaacagtgcaccactgttctcgggtgccagaaaccaaacaaggtcacctcccccagcgc

SEQ ID NO: 165548 - DNA, 122 bp, Homo sapiens
tgctgctgaggctctggggtcagtgggctccgccgaagggagcccggccgcaatgtgcctcggggcttgtaggatgcccagggagcccaaagcccctctggcagtaaccacagctggccgga

SEQ ID NO: 165549 - DNA, 122 bp, Homo sapiens
tcatgacactgaccatctctcggcagaacccaccagagaccagtagcaagggctctgattcggaactaaagaaatcacttggtcctttgggaattcccaccccaacgatgaccctggcttct

SEQ ID NO: 165550 - DNA, 122 bp, Homo sapiens
actggctgacccctcctcttccctcccactctccctccctctggctgatttgtacaaaatcgcttcattaaaataactgaaggctggcagggcgcgttggctcacacctgtaatcccaacgc

SEQ ID NO: 165551 - DNA, 122 bp, Homo sapiens
caccagctctgcccggcccagacgcctgctgaggaggcggccaggggttgaggcctagggcgtgctccccatgctccaccctgtgagcatgtgctctgggtgcactgtgcccagtgcgtagg

SEQ ID NO: 165552 - DNA, 122 bp, Homo sapiens
cgagaagagaggagagagaatcaagtattagttccagttcctaaggtctgttcaattctgcgaacaatccaggcatccttctggactctctcagagtccatttactttctgttacgcacttg

SEQ ID NO: 165553 - DNA, 122 bp, Homo sapiens
atgtggcagccacatgggtttggccgtggatgcatcctccattgcccacagaaccagagtcgtccccccgactctgtggttttctttctctgtcggccgcctgcctgcctcctccaccggcc

SEQ ID NO: 165554 - DNA, 122 bp, Homo sapiens
tttgcgcagggggagcgagggggagccggacctaatccctcactcgccccctccccctcccgggccatttcctagaaagctgcatcggtgtggccacgctcagcgcagacacctcgggcggc

SEQ ID NO: 165555 - DNA, 122 bp, Homo sapiens
gccccagggctccaggcggtgcttgttcctcagcctcttctccttcctgatcgtggcaggcgccaccacgctcttctgcctgctgcactttggagtgatcggcccccagagggaagaggtga

SEQ ID NO: 165556 - DNA, 122 bp, Homo sapiens
acttacgttgctctgggggtcgatggcctgcagcagccggtccctgatctgctgcggagacgccggagccgctgtcattgcctgggcgaggcggggggttgcggccgggccagcgggcgggc

SEQ ID NO: 165557 - DNA, 122 bp, Homo sapiens
ggtccgtgctttgcctcccccggctccgaggaaacgcgccaaggagctgaggaaatccggcgcagactctcccagctggcaccaaagccttccgcttcgccgagatcctctcaggtgctctt

SEQ ID NO: 165558 - DNA, 122 bp, Homo sapiens
taggggagaaacgtcccctcaggagggcatggacaccctggcagccttgctgaagggttgcgggacaggcccgggatgccaggggcccacgcactttcccataagacgctggcccgcagcgc

SEQ ID NO: 165559 - DNA, 122 bp, Homo sapiens
cagagaaagaaacagagctgaggctccacccgtgcacccgccccacccagccacccagcacgtccacgagccacgcgccaagggcagttctggtttccacagataagcatttaaggaagaat

SEQ ID NO: 165560 - DNA, 122 bp, Homo sapiens
ggggctgtccttccctaagaactcggctcagggttacaatatgagggcatcccggtccgtcgaggaggagagaggcctctggatcacccaggccatgtcacccataggcagtggcccaaaga

SEQ ID NO: 165561 - DNA, 122 bp, Homo sapiens
gctgaggcataaatggatgtatgtctgaatgagtggacagtgaatgaataaatggttacacgattggaaacatgagtgaatggataggcaatcaacttagcacagagacttagaaatgattg

SEQ ID NO: 165562 - DNA, 122 bp, Homo sapiens
aagctgggccgaggggagtagggtggggacgggctactcactccttcaacaggatgacatcggccagcacaccgaacatctggtagagcccagaagcctcattcacgcgccgcacgatggag

SEQ ID NO: 165563 - DNA, 122 bp, Homo sapiens
cgggccgcgcttcattgtcatttctggagagtgttattaatatccgccccgtgggtgcggcgctgtgtatttccagagaggggactcggggcccatcagggccgggggagtggagccggcag

SEQ ID NO: 165564 - DNA, 122 bp, Homo sapiens
ttaacactttgacgttcttttttctgacgtgcagcactggtggtccggttcctcaccaaacgattcatcggtgactatgaaagaaatgcaggtgagacaatgcatttgagaaaaattctgtc

SEQ ID NO: 165565 - DNA, 122 bp, Homo sapiens
ccatcaaagttatccttcctcagcccatgctgttgtgcttgatttaatccatttggttctcgatttggaaacaaaaagtattttttggagctcctttctgtctgggttaatcttccttggaa

SEQ ID NO: 165566 - DNA, 122 bp, Homo sapiens
gtgctcataagtttggagctgtactctcagctactcggggctggtccttgattttggctgcgctcgcgcacgctcccccttttctggccgccaggtcccgccttctaaatttccccaggtct

SEQ ID NO: 165567 - DNA, 122 bp, Homo sapiens
acggaaaagctcagagccgccttcagcagcgggcggactgtgaccctcccagggcagggccggctgtttcccccggaaacgcagagaccccgcaggccctcgcttcctgcctgccccctccc

SEQ ID NO: 165568 - DNA, 122 bp, Homo sapiens
ttcgacttctccacgcgcttcatcacgcggccggccaagtgaggcccggagaccccggcccgaggcgcccaggcctgagccccatgcctcccagcaaccagggcccgcgggtgtggccccca

SEQ ID NO: 165569 - DNA, 122 bp, Homo sapiens
ggagaaggcataatgaattggagaaataaaaatcatggttaacattgatagaatgcttaccgtgtgccaggtgccgtcctgagcactctacctgtgttagctcattcagtcttcctgacaat

SEQ ID NO: 165570 - DNA, 122 bp, Homo sapiens
gttgctaaccaacttcccaaggcctcccatttacagcaaaagagtcaaattagactcacccgtttctctacaatcccccatggtactcagcccactacgtggcccaaagcacagggtgtgtc

SEQ ID NO: 165571 - DNA, 122 bp, Homo sapiens
tgggtgggtaaggtcagggcttctgattatgaggcatttcttccgttcctggcgctggaccgaggaagccctttacggatggatgccatccttacgctcattttacagatgaagacatcgag

SEQ ID NO: 165572 - DNA, 122 bp, Homo sapiens
atttatttatttatttatttatttatttttattttactttgagacagggtctcactctgtcgcccaggctggaatgcagcagtgtgatcagagagcccaggttcaggtgattctcccacctc

SEQ ID NO: 165573 - DNA, 122 bp, Homo sapiens
actggctgatgatgcggtcggtctccaccggttcctttttcacttcaaacttcatcagatcgaagtcattaacatattccatggccaggggactggtgggcaggtcggagttgctcattgcc

SEQ ID NO: 165574 - DNA, 122 bp, Homo sapiens
cttcctgggtttaggtggtcccagaaaatccagccctttggcatctgaactgggcctccccggagttcccactggtggcacaggcatcctctgccacaattcaggacacagggtttagctgt

SEQ ID NO: 165575 - DNA, 122 bp, Homo sapiens
tggaggtcctctgatacccagtcctggtcttttaacattcagagttgggactagtctatccgctttttttttttccagacagggtctccctgggtcacccaggctggcctgcaatgatgcga

SEQ ID NO: 165576 - DNA, 122 bp, Homo sapiens
aaatgccgagccccgttttccctttccctccccgctcggtcctgcgcccaccccgtcccgcgctggccactcaggcaagctgtaaatggatataggtaaagatgcaggaggtgatggagaag

SEQ ID NO: 165577 - DNA, 122 bp, Homo sapiens
gaagaaggccagggcagaggtgtggtgatgtagctgctgggaggacagagctccgagtcacgtggcttgggcgggcctccccttcctggtgtccacagaagcccaacgtcactagctggggt

SEQ ID NO: 165578 - DNA, 122 bp, Homo sapiens
ggcaccggaaccctgatcccggagctgctgaaaagttggacagctccaggctggcacgcccgagctgtgactttcaccaaaaccactccagccagtcaggagtcagacctgtcctcttgatc

SEQ ID NO: 165579 - DNA, 122 bp, Homo sapiens
cccaccccactctcctgtcccaggttgggttattctccatcaaaagtcctcctcccttgtcgcccgccccccaacctgcttgggtcccaccctcaccccacccccggccagcgcctggacaa

SEQ ID NO: 165580 - DNA, 122 bp, Homo sapiens
cacggcgacggccggcaagcacgcaccgcgcagactcgctgtggtggcgtgacccggaagcgctcgccgaggcccctccttgcccgccgatatctctgccgggtgactagctgcttcctttc

SEQ ID NO: 165581 - DNA, 122 bp, Homo sapiens
ttcattgtagaacattgggaaatatataaactagaaagaagaagaaatactccctggcctcgggcccccacatgctcggaggagccttgcaaagttttatgcccaggtgtgtcttcactcag

SEQ ID NO: 165582 - DNA, 122 bp, Homo sapiens
agccggggacggaggcaggaatcctcttctgattaaactccgaacagcaaatgcattttccgaaaagctgctggataaatgaaggcaggacgcgcctggcccgccggtgccgagcgctagaa

SEQ ID NO: 165583 - DNA, 122 bp, Homo sapiens
aagagtcttgctcatcacatcccttagctcaggattttccccaagagatgcccagacaaccgggacaggcagaggaaagtcacgaaaaggtggtcgctggtgactcatcagccgggattgaa

SEQ ID NO: 165584 - DNA, 122 bp, Homo sapiens
gaaccaacctgcagaacacacacagggtcccctggagaggacgcggggacttccagggcccgactcctgtgagtcacagccccgcagctgctgcgccacccccaccctgactcatgcccctt

SEQ ID NO: 165585 - DNA, 122 bp, Homo sapiens
ttgtaccagataatcacactcagcccccagtgaatgtgctgactgcggcgggggaggagccgacagatcagcgttgtttctgtggagtctgtgaaatattgattgctgtgggggaaaaacag

SEQ ID NO: 165586 - DNA, 122 bp, Homo sapiens
ttcagttccagagtagaatagaggtgatgtttctggtgtcacatgttgctacagtcatgtcgtcagccacactattaattctaaagatgaactttggaggaaggaacacagggagaagtcat

SEQ ID NO: 165587 - DNA, 122 bp, Homo sapiens
gctacttttttgaaaagtcctcagcttcccttgcttttcttttttctttcttttctttttcgagacggagtctcgctctgtcaccaggctggagttcagtggcgtgatctcagctcactgca

SEQ ID NO: 165588 - DNA, 122 bp, Homo sapiens
gtcctgtcacccggccgtcagggaagggcactcctcacacaccaggttggccaggacagccgaggttaaaacctggcttcatggtttcggccagttccaggtccccagaggacagcggccat

SEQ ID NO: 165589 - DNA, 122 bp, Homo sapiens
cctcgtctgtgtttctgcgtgctttccgctcgtaggcctgtcacctcaggctttcgctggcgtggctgtgacctttaggggcgcagtgacccccttgcctgcaggagttgggcgtacagacc

SEQ ID NO: 165590 - DNA, 122 bp, Homo sapiens
ccccgcccgccccacccgggaggcgcacacccacatatccggggaagcctcccgccgccccgccaaccttcaaacgcacaagggccgtgcaagtgcacacgggctacgccgagacctttcac

SEQ ID NO: 165591 - DNA, 122 bp, Homo sapiens
tgaaagtatacgccacaatcacacctgcgggaaggaccaggaataaatttcacaattctacgtatttcccagctttaggtctgagagtctacacttctggtgagttgcatccaaatacacga

SEQ ID NO: 165592 - DNA, 122 bp, Homo sapiens
gagtgtgaagaattacataaacagccagttagatctcattagatttctgctcacagccctcggagcccaagcgctacagcagcagcaacagcaagaggaggtggaggtggaggaggaagaga

SEQ ID NO: 165593 - DNA, 122 bp, Homo sapiens
ccgcccggccccggctccctagcttcccgctccctcgcgccctcgcccccaatcccggctcggccctcgctccccgcagcctcccgtgccccccgcccgcggcctgacctgcaatggcggcc

SEQ ID NO: 165594 - DNA, 122 bp, Homo sapiens
gccccaccgcccctactcacttgagtcggaggcgggagcacgtaccgcaggcggagctagcgaggctgggctggagggagggtccagggagtccgagatcccaggcgaagcgcgcgccggtg

SEQ ID NO: 165595 - DNA, 122 bp, Homo sapiens
gttgcttggtgtattttagagcgattggtgcattttacaatcctcttgctagctacagagcgctgattgctgtggttttacagtgcactgtttggtgcattttacaatccccttgctagcta

SEQ ID NO: 165596 - DNA, 122 bp, Homo sapiens
ccttccccgagagcaaccaggcaaatcggggaaggttagaggtgggggacctgcctgagccgggacaaaaaactttggagctagggccttctaaccctggagacttgccgactccggggcgg

SEQ ID NO: 165597 - DNA, 122 bp, Homo sapiens
gatccctcgaagcttcggggacaattcagggccatttatatggtcacccaagctccttagcgacctctgaacccacgcagcctggtaatctccaatggccacagtccagcgtgcggcgcaca

SEQ ID NO: 165598 - DNA, 122 bp, Homo sapiens
agcctccagctcttcaggcatctcaggcaggagagcgtgttggggccgggactctcctcccgtggacctgacaactctgccttccccggtgtggtctcgctgttccctttgagagtgcgatg

SEQ ID NO: 165599 - DNA, 122 bp, Homo sapiens
cgcagctggatactctgctccaggggcaggagagcattaagagctgcagcaacttcacagcgcaggccctcaaccatggcacggagaccgaggtcctactggtgaagaagcagatgagcgag

SEQ ID NO: 165600 - DNA, 122 bp, Homo sapiens
ccggaaccgcttttgtggtctccgagacactcatttgctgtcctggtttccaaagctccacgtgctcagcgccgaaaacttgcaaatcatttgctgtacagatgtttaggggtcgcctacta

SEQ ID NO: 165601 - DNA, 122 bp, Homo sapiens
ccccgggcggggtctcagcgcccaccagctgtgccttcagggcttgggtgttcgctgcaacggcaaccgcgtgagcctcactcccacggccaaggggctagggcagggtggatgcaatcgcg

SEQ ID NO: 165602 - DNA, 122 bp, Homo sapiens
tatcaactcacaccccaatgtatacctctcatctgttcattttagtacacattgttcactcgatacgtatgttgtcaatgtgaatgtctttcacatctttttaaaactcttcctgcaatcaa

SEQ ID NO: 165603 - DNA, 122 bp, Homo sapiens
tgccccccgcgtcccccccgcctgcagtaactgacaggaaggggcgggaggcggatgggccgtgacagcttaatggcttcggttaaagcatcctctgatcgtgctggcgctgggagaggctc

SEQ ID NO: 165604 - DNA, 122 bp, Homo sapiens
agagagccgcctctgtttcccgatccacgcgggcggctgcagaacccctgcgggggtgagcgtggagacccccagccgcactcacctgcagcaccctgccccccgcagtcggcgcccgcctg

SEQ ID NO: 165605 - DNA, 122 bp, Homo sapiens
cgggaggcgcggagggccgagctggggtgcgtgcgagcgggcgccaggaaagcgcggggccgccctaggggctaggcctttctttaaacagtgggaggcccacgaagtgtctgaagcccgag

SEQ ID NO: 165606 - DNA, 122 bp, Homo sapiens
ctggacccggacgggaaagggaaaatcaacaaggagtagtgagtgcccgggcggccagggcggcccggcttccggggaaccccagtgatctcatcctgtcccaaaagggacagtcagccacc

SEQ ID NO: 165607 - DNA, 122 bp, Homo sapiens
tttttctaactcctagactacacagtcctttctgcttaaaatactctgtgattggcctggcgcggtggctcacgcctgtaatcccagcactttgggagctgaggcaggaggatcacgaggtc

SEQ ID NO: 165608 - DNA, 122 bp, Homo sapiens
ggaggcagggtccctggtgggcagatgggagcaggtgggcctggggagccgccagccttccgcccccacgtgcaggcatgcccgccaggagggcctgtggagaggccgccccgcggtgtgtg

SEQ ID NO: 165609 - DNA, 122 bp, Homo sapiens
gaatcttagcaggcgtcgaattcagctccccagccagcccagtgggaatctctggcatagcgcccaggagtgattggctgaggctgcacaaaccccacacggaaaacattgctgggttcaga

SEQ ID NO: 165610 - DNA, 122 bp, Homo sapiens
ctttgggaagtcgaggcaggcgggtcacttgagggacccaatagggttaagaaccactgacgtggccgggcgctgtggctcacgcctataatcccagcactttgggaggctgaggcaggcgg

SEQ ID NO: 165611 - DNA, 122 bp, Homo sapiens
ctccatcgtagggttgttaagtgacttaacatttgcttgcaaagaacttaggaaaagtgccgtgtacatagtaagaacagtttgtgaatcatcataaatacacgagaccagaatttcaaaac

SEQ ID NO: 165612 - DNA, 122 bp, Homo sapiens
agagcctgggctactggtgttccagagcttccttaggattcctcagttttaaaaatgaaacgtaaagataaccctgtactatcaataagcataataaagatggaaggagggagctttccgat

SEQ ID NO: 165613 - DNA, 122 bp, Homo sapiens
gatcttggatcagttgcttaaccccataccaaccttcaattttgtcatgtataacataatcgagttgggagaataacgctggaaggactaactgccataatcagtgagattactaaaaggtt

SEQ ID NO: 165614 - DNA, 122 bp, Homo sapiens
gtcagcctgggccagtgggcccccaggggtacaatgggccaccaggattacaaggattcccgggactgcagggacgtaaaggagacaagggtgaaaggggagcccccggagtaacgggaccc

SEQ ID NO: 165615 - DNA, 122 bp, Homo sapiens
ctgaggcgacaaaccagaccaaacgcccgcccaagctgttccgagcctccggggggagagcgagcccaagctcctctgcaccgcttcctcatccgctcgctgcacctggacgcggtcggcgc

SEQ ID NO: 165616 - DNA, 122 bp, Homo sapiens
gtcatggtggcggcgacgatggcattgagacgtaggcactgggcgcaggatgcagcggcgcgcgggctttgctcggttcggggatcgttctcgcctcttcttcctccaaattttgtgaactt

SEQ ID NO: 165617 - DNA, 122 bp, Homo sapiens
aagtgaagttttggagaatggaaattataagcccaaaccccagtgaaaatattgcaaagccggaaataaaactgggaatctcaacttgccatgttctattatccacctataaaagcacaaaa

SEQ ID NO: 165618 - DNA, 122 bp, Homo sapiens
cttcaagctctgagcctactattaagaagtgccttctttctggtccggcgcggtggctcacgcctgtaatcacagcactttgggaggccgaggcgggcggatcgcctgaggtcaggggttcg

SEQ ID NO: 165619 - DNA, 122 bp, Homo sapiens
caaatcaactgccattgtctgctatggacacacgatgtggaaattgcagcaggcatgcttcgtttttggcagccctgtcccacaccctattattagagttcagtagtcaattctcaggggaa

SEQ ID NO: 165620 - DNA, 122 bp, Homo sapiens
tttcatgtgtaactggagctgcacgctgaagacgtaatttaacactctgcagtggggcctcggcttggtgcctccctatatcctgccaaatgctctccccctccatcattctagttgccccc

SEQ ID NO: 165621 - DNA, 122 bp, Homo sapiens
gcgagagacaatgtcagtgtccactgggtctgggcttctccctcccaggacccgccaccccgtggaacaggaacatagcaccgagcagggaagagacctggccttgacccggagaagtcccg

SEQ ID NO: 165622 - DNA, 122 bp, Homo sapiens
gtgtggattcttgggatacggtcgggggcggatccccctgtcacgggttgtagaaattgacgcagcgttttccgatgtgcccacctgcttgaggaaggaatagtggtggagacggacttctt

SEQ ID NO: 165623 - DNA, 122 bp, Homo sapiens
gcctagtttcccccagtggtgatgcagaattagtatacaccctcagccaggaagtcaacacgggcacatccaccgacgtgattcaggttccgtgtgacatgtgctcgaatgtgcatgcatat

SEQ ID NO: 165624 - DNA, 122 bp, Homo sapiens
cctaaagcagtgagggaccaaggatcccaacacccacccatggaatgcatgcccctgccccggagacgcctgggcctcagccttgcccagggagcttaaaaggaggctgcctctggatgtct

SEQ ID NO: 165625 - DNA, 122 bp, Homo sapiens
ttctcttccgactttgggccaaagccttgtccggagatcacagtgtctcgctcggggacacgccctctctaggcccagacttggtccccactggagttcccagcccccctccccgctgcggc

SEQ ID NO: 165626 - DNA, 122 bp, Homo sapiens
cctgcgctacccagagcctgacatggtagacatcctcaaccgcactggccaccagctcgccgacatgcttaagagctgcaacttcagtgggcatcactgctccgccagcaacttctctgtgg

SEQ ID NO: 165627 - DNA, 122 bp, Homo sapiens
tggttattgggtttccttaatagcctcatgtggaggggctttgttgaaggcatttttattcggctttgacagattatagtccccatgtttccctaatctcttctttaaaatattttaggaag

SEQ ID NO: 165628 - DNA, 122 bp, Homo sapiens
ggagtcgccacgcgaggctggaggggtggccctaaagcccgtccctctggcttggagctgcgggtccccgccctcgagccggagcgccgcgctggacacccgcggggtgggggctcggctgg

SEQ ID NO: 165629 - DNA, 122 bp, Homo sapiens
ggagccggccggggacgcgggcccgagggtgtggcggcctaggctggcccggtccccaagcgggcaagggctttgtcccgaggcctaggaatggcctctgcctgacccactcccttcctggc

SEQ ID NO: 165630 - DNA, 122 bp, Homo sapiens
tacccggacctgtccttgggagactactccctgctctggaaagcccacaagaagctcacccgctcagccctgctgctgggcatccgtgactccatggagccagtggtggagcagctgaccca

SEQ ID NO: 165631 - DNA, 122 bp, Homo sapiens
ggcatggggaagaacctgaggcccggaagaggcagcaccgagaggcggagactagcgcggcgggcctgggtatgattgggctgcccgcaggaggggggcggggcctagccccagactgggtt

SEQ ID NO: 165632 - DNA, 122 bp, Homo sapiens
ccgtccccacctgctcacaaggcgcagggtgtacagcggcgggtgaccgctagatggcggcggagcgcctccgaccacctgggtcgggggtgtgtcggggatgtttcctggagagaggggag

SEQ ID NO: 165633 - DNA, 122 bp, Homo sapiens
tgcatctcagaaaactgaagcccagaggcccagcggccttcccagagccacagcctgggccggacagagcagagctggtgcgggacctctcaccgcccaccctttaagcaaacgcttggaaa

SEQ ID NO: 165634 - DNA, 122 bp, Homo sapiens
tgaccctgccctgcttaaaattctctcagggctctgatttgcgtcaggataaaatccaaacgccatcggccttgcgcggttttcttccagttccagagtgtcagtcctctggccgatctaaa

SEQ ID NO: 165635 - DNA, 122 bp, Homo sapiens
ctgagtatgaagtatttactctcgtcatcctcgtaactctcgtcaccatattctatctaacgcctgcagctcctggtctcaggaacttcagttctcgggcagtttcctcttcatatgtgtac

SEQ ID NO: 165636 - DNA, 122 bp, Homo sapiens
ggtaactgtagccccagcctcagcctccagggcttccttgtgtctgttggcacagagcctcgaggttccacggcttcctgcttgtcctccttgccctctgccttcccgcctttgccctgctc

SEQ ID NO: 165637 - DNA, 122 bp, Homo sapiens
ctgagatctgccaattttacttaaagacggggcgtctttgtcgaggaaaagcaggaacggcggactttgcatttagtgcgcactgtggcacccaattttggctggatatttggagcagaaaa

SEQ ID NO: 165638 - DNA, 122 bp, Homo sapiens
ggggacgcggggcgcggggacggctggcgagcgagcgagcgggtccccgcactgcagcggcgccgccctccacgcccgcccccgcgccgcgcgcagctgctgcacccccaacgccgcccgcg

SEQ ID NO: 165639 - DNA, 122 bp, Homo sapiens
gcgggtggccgggtggctggccgatggatagctgggtaagcggacagggcgccagtggcccggcagcgcgcacagcatgcgccccggcagtttggaggaagagttgccggcccgcagaggat

SEQ ID NO: 165640 - DNA, 122 bp, Homo sapiens
ttaaagaacaatggtttttgatagccttataattactatattctaataggatgctgagcacggccttggccggttaactctatttgcttagtcattcgttcatttacacatgtatttaccca

SEQ ID NO: 165641 - DNA, 122 bp, Homo sapiens
acacgcatgtttctggtaaatccttaagacttaaaactggtgggtatttttaattttaatcgctatttccaaataggtgtcaaatcagctctccagagaattctgaagcgcagctgaaatga

SEQ ID NO: 165642 - DNA, 122 bp, Homo sapiens
tctaggacagaaagtgccaaggactgcccctccctggccccagtctgaactgggcgctcacggctcatgcgtttcatgcaagacggcaccagccacagtgcatcacagcctgatttaaaatg

SEQ ID NO: 165643 - DNA, 122 bp, Homo sapiens
acagctcgtcttgccctgtccgcttctggctcagtcctcctgagagttcatgtcacttaacggagcctgtgagagtggaccgggatggccaaaacactcagtccacacaaacaatggccgca

SEQ ID NO: 165644 - DNA, 122 bp, Homo sapiens
cctataaacaaagagaattggaaaaggaacgggaaactaacatccaggttttgaaattgccgaaaaaggtgaggatgtgctacatgttcagacagaacaaagacacgcatgtcaaagatgca

SEQ ID NO: 165645 - DNA, 122 bp, Homo sapiens
cccctgggcctcacagtgggcactttaccccgggttggatttcatggaggcccctccggccgtgttgtccgcagggtacgattttatgaaggctctgagttggtggctgactctggcgtcac

SEQ ID NO: 165646 - DNA, 122 bp, Homo sapiens
tggtttcatattaaaatcactaatctaaccagcctgaatatgatcacctgtgttttaatccgcagcaaactaacaatcagtgaagaaatgacacatattacactgttggcatttacagaaag

SEQ ID NO: 165647 - DNA, 122 bp, Homo sapiens
gggaacacacagtgtgtccgcgtgattgccagtgcgtacagggggaacacacagtgtggccgcgtgattgccagtgcgtacagggggaacacacagtgtggccgcgtgattgccagtgcgta

SEQ ID NO: 165648 - DNA, 122 bp, Homo sapiens
tttgaaagcaaggatcaaccaaagtaaggctcaaacgtgaaaatctgttttcttccctttcgtcccattcttagtatacctctccttgccctcattacagttgcccttgtctgcagtttctc

SEQ ID NO: 165649 - DNA, 122 bp, Homo sapiens
cgcatgcgtttcgcccacccaggcccgggcgcggttaggggtgactcccacgatccctagcggctgcagagtggaacatggcggcctccttgccgcttgcgttaccagagtccacccggcct

SEQ ID NO: 165650 - DNA, 122 bp, Homo sapiens
gctgggcgtggtgtcacatgcctgtaatgccagctacttgggaggctgaggcaggagaatcgcttgaacccagattgcgccgttgcactccagcctgcgcaacaagagtgaaactccatcca

SEQ ID NO: 165651 - DNA, 122 bp, Homo sapiens
tgaccatcaccccgccatactcttcagcaatctcccgcaagacctggcctctgcggatgacgaagtggcggtggtgcttggggtccaccagcatggagtcttccaccacattatcctgcagt

SEQ ID NO: 165652 - DNA, 122 bp, Homo sapiens
agtttacagaagttaccttacactataatttggtttaagtcagccgagatgagtggagcacgaaaagatggcattgagttgatttacagacacggggcatgaagctactggactatgtttgt

SEQ ID NO: 165653 - DNA, 122 bp, Homo sapiens
ccagtttgatgacaggttggtagggctccaccttggaattttaggccagagagaaaaggtcggagcccctctctgtggtacctctggggaaagccagaaacaaggatgcaaagaatagtcca

SEQ ID NO: 165654 - DNA, 122 bp, Homo sapiens
gcctcctcagacgctcccgaagggccggtgtggcggcggcggcagcggggccgggaccggcgcctccctcaggcctccactcattggacgagcagcgcgtgacgtcagaggcgtgctcgctc

SEQ ID NO: 165655 - DNA, 122 bp, Homo sapiens
aagcttgtgtagacatgaacacaataacttgttttgcctataaatacacattactgtttacgacgtcccagctgctagcagggtcaagggactaaaataacctcagcttttccatttcctct

SEQ ID NO: 165656 - DNA, 122 bp, Homo sapiens
acaactcaagaatattatctcttaggaagacacctgttttgttctacctgcaaatcctaccgctgagcacggggcaaggactggcccaattcctagggcctgtttaggaatccagccacgtg

SEQ ID NO: 165657 - DNA, 122 bp, Homo sapiens
ttctattggggcaggtgtgttttcttaatgaatttttaaaaagaaattttaagtgtttgtcgtagctactgtttctctgtagtacaattgacacttgaacaacgcagggtttaggagcactg

SEQ ID NO: 165658 - DNA, 122 bp, Homo sapiens
taaggaaatgaatataaaataatgaatccaaaatgaggtccgagaatgaatatttaaaggcgcccttaacctagggtccacagtcccctgtagctgggaggtgggtgcgcctttgggccagg

SEQ ID NO: 165659 - DNA, 122 bp, Homo sapiens
gcaagtcccatggaaggacggggaatcctttactctaatttctccagctgcattttgttccgtttatctgcagaaaaagaaagaaaaaaaagaaaaaaaaagtttcctttaatttggtggag

SEQ ID NO: 165660 - DNA, 122 bp, Homo sapiens
aactgcacagggcttgggaaggctgtctgacttcagatccttcaggccctcagacctcaccgttcaaggtcagactgactgggaaaggagtgggagttttcctggggcgtggagtgtggaca

SEQ ID NO: 165661 - DNA, 122 bp, Homo sapiens
ggatcacaacaacatagaattcaaagagattttagtggttatcttgtcaaatttcagaagcgagctcagtgtcctcattgccagagtgtatgtatgagtgccacagatcaaagagaggagca

SEQ ID NO: 165662 - DNA, 122 bp, Homo sapiens
ggaagcgcagcgctagagccgcgggcctgggagccgggctcctccacagtcctctcccctcgcaaagggagatctgatctgctcagtctctaggtaaatattcgaccgattctgcttttact

SEQ ID NO: 165663 - DNA, 122 bp, Homo sapiens
gggaatcatgaggatggtgagaaaagacaggagagaaagccgggagagaggatagaggggcgttctcgctgcgctgcgtgtcagctctggtaagccgtctagcatgtcattagtggggacct

SEQ ID NO: 165664 - DNA, 122 bp, Homo sapiens
cgattgtattgaaatctcctgaaatcccgaacagggattggcccagtcggcttctgaaaccgaggccggggaatggcaggaatggggggcagagaggatcggaaagaagagtccttccccca

SEQ ID NO: 165665 - DNA, 122 bp, Homo sapiens
gttctcgggggcggggcttgtgtttttacttccggatcccacagctatgacaccggaagccggaagcgtggtagggaagggcgaccgcgaaactgggactttctcggagcgccggggcccta

SEQ ID NO: 165666 - DNA, 122 bp, Homo sapiens
cctcggccagcccagagaggggctctcacggtgcagcggcgggccgaagggctcctcaagcgtggccagagcggacgccgccgtcgaggaggcactgagagcgagcgagggccgccagcacg

SEQ ID NO: 165667 - DNA, 122 bp, Homo sapiens
gtgtgtgtgtgtgtgtgtgtgtgtgtgtgtgtgcgcgcgcgcgcgcgcgcgcttttgagccggagtttagctcttatcacccaggatggagtacaatggcacaatcttggctcacagcaacc

SEQ ID NO: 165668 - DNA, 122 bp, Homo sapiens
tctttaaaacgctttccaatctgatagagagctctggcgtattcgctcaagtttccgtggcgggtctagggctcctgaagccccacgggtctcactgctacccacatggctattaccgcaac

SEQ ID NO: 165669 - DNA, 122 bp, Homo sapiens
ttctcactggcggatgtgggtgggtcgcctcctcacctctagggtggccttgtctcctttcgccttgggctgtgttactctcctcacctgggaagtggggggtgagcagggggctggcatgg

SEQ ID NO: 165670 - DNA, 122 bp, Homo sapiens
ggataaggaggtaggggccataaaactggagctgattcctgccaggccgttttccagcagcgagctgcagagggacaaccccgccacggggcaacagaacgcggatgagggcagcgaaaggc

SEQ ID NO: 165671 - DNA, 122 bp, Homo sapiens
agtttaattaatatcaggagaaactctctcaccagtcttttctgaattgtctgaactatccgtaccttgtcctgtgtttatcaaatgtccataggcattaatgcctgcagtcactgtctgag

SEQ ID NO: 165672 - DNA, 122 bp, Homo sapiens
gcagcacacgctgcacgcagtgtgacagcacagcaccaggactgaatgagtgacagctcccgaccaccagcagcacgggccaaccccacacacgatgccagtcacagacgagcacagtcagg

SEQ ID NO: 165673 - DNA, 122 bp, Homo sapiens
gctgccccagttctcactcccattgagtgtcgggtttctagagaagccaatcaatgtagccgcggtcccggttctaaagttcccacgcacccaccgggactccgattcttcccagtcgccga

SEQ ID NO: 165674 - DNA, 122 bp, Homo sapiens
gccgctgctgccaccgccgcctcccgctccttgcgggcgtcctcgatgaggctctgcctgcgcccaatgaaccgcggggactgtggggacaaggggcacccatgcctcctccacctgctgag

SEQ ID NO: 165675 - DNA, 122 bp, Homo sapiens
gtggtgctgctggagattaactaggaaacccgagtggcgctaattataactcggggcttccgccgagcctccccttcccaaaaaatagagatggagtctccgcgggagggggcgtcctgggc

SEQ ID NO: 165676 - DNA, 122 bp, Homo sapiens
gaagaaaataacttggagttttagtattagcgacaaggtaatcgaattctgaattttggacgtaggaccatttagaaaacaaaagacctgagtgaagactgtcattggtaggtcatgatcct

SEQ ID NO: 165677 - DNA, 122 bp, Homo sapiens
caaatgccaccatgcttgatgcccgggggctgcacgagcccagaggagctgcctgaccagcgcgggaagccgagagggcttgctgctgctgggatgtaagtctcaggtgggacctctctgtg

SEQ ID NO: 165678 - DNA, 122 bp, Homo sapiens
tctgtggcattgacagatgcttttggggtgtcgttaagcagcatgttgtgaccatgtccccgtgtttgcaccgtaagacacgttgccatggttgagtcggatgttgtacaaattaatggtgt

SEQ ID NO: 165679 - DNA, 122 bp, Homo sapiens
tttatctgagattagttgaatccacgggtatgaaacttacgaatatgaacaacgaacaaccgtgatgcaaatgagaaaatgagacaacagtcctcatggcatttttgttaaacaagccgtgc

SEQ ID NO: 165680 - DNA, 122 bp, Homo sapiens
cagccccaccaccatgctagggctggaattgtcattcctcacatggggatggagatgagacgtattttctaatttggaaatcagaaaccattgtaagaatgttatagtggttgttacattgt

SEQ ID NO: 165681 - DNA, 122 bp, Homo sapiens
ctaccagatcttggtagggagatttctgggagtggtgttcccagtccaggtgtgctgggccgtcttctgtgttgagagcaacatctgcagtgggcaagccccagacagactatagccctcgg

SEQ ID NO: 165682 - DNA, 122 bp, Homo sapiens
gaggctggggctcccacccggatttggagcagggtcgccgcggcccagctgacccgccggcgtttgtacgttgtgtgcccactcagggagccatggacaactgtttggcggccgcagcgctg

SEQ ID NO: 165683 - DNA, 122 bp, Homo sapiens
gggcaggcccgggaagggttctgacttgggaaaagtcttccccagacggctcccctaaaccgttcctcggagcctctccctccccaactagctgcaggcggccaggtctcgggtggggagcg

SEQ ID NO: 165684 - DNA, 122 bp, Homo sapiens
gttctcccagcactgatggcgtcctctccccgcaggcggtcaggccgggtccagcactgccggatccgctccaccatggagggcgggaccctgaaatactacttgactgacaacctcacctt

SEQ ID NO: 165685 - DNA, 122 bp, Homo sapiens
atgtgctgtcagggtgcaaaaccacgtcgtattgaggcagttgatataaaggatgttccgcgaatgactttttcccactcatggcctatactatcaaaggggagaggtgtggggtttactga

SEQ ID NO: 165686 - DNA, 122 bp, Homo sapiens
agcacaacctgtagctccagcgtctctgtgctgagatgggtgatcgggccttctgggtgacgcaggtgtgtgtgacaacacaacctgtagctccagcttctgtgtgctgggatgggtgatcg

SEQ ID NO: 165687 - DNA, 122 bp, Homo sapiens
ctcacaaaacagggtttttctccagccaggaagggcggcgagacccaggcaacttggacccggttagggacctgtgcgggatgtgttttctgaaacttttacacaggaactccagggggcgg

SEQ ID NO: 165688 - DNA, 122 bp, Homo sapiens
gaggtgtgtgtgcgagcgcaggcacgcacaccgaggggacgcgcactctgcctggcttcacgctgacgccattggggaggggcacaactctgagtttacctgtcccctggcttgaagtctcg

SEQ ID NO: 165689 - DNA, 122 bp, Homo sapiens
cgcctcctgccacaccatgggcagcgcagaggacgcagtcaaagagaaactgctgtggaacgtgaagaaggaggtaaagtcgagtcaagaaccccggggggctcgcgccctggcccgcgcgg

SEQ ID NO: 165690 - DNA, 122 bp, Homo sapiens
cctgcattggaaccgggctgagctaacacttggcttaccggcactgtcactgccagggcccgcgcgaccagaccctggccctccccgggacccaaggtcatctgggcccaggaaaaggccct

SEQ ID NO: 165691 - DNA, 122 bp, Homo sapiens
cccaagtttgggacggcgcgtcccaagggtttctggaagttgtaacctgtgctccgagtgcgtaggcgcaggaacccttcgggggaatccctttagcagggagcgtatattgaagagtgcgt

SEQ ID NO: 165692 - DNA, 122 bp, Homo sapiens
aggagcagccgggcaggtcgccggaggtgcaggcccgggcgatggcgtggctgatggcggcggccgacagcgcatacacgaaggccgactcccgggtccctgagggtgggaggggaaggtca

SEQ ID NO: 165693 - DNA, 122 bp, Homo sapiens
gccagctgtactgagttctcatccacagaggccaggcatggcccagcctggagccgtggccgagggcttccctagatggttccctttgttgctgtctggctttcccgaatctttttaggcca

SEQ ID NO: 165694 - DNA, 122 bp, Homo sapiens
gccacccatccgccttaaggaaggctggcggggatgcgcgggcccgggagtccagggcgccgccaccgggaacgcgccgcctggtttctaaggaactgggggctctggaaagggaggggcgg

SEQ ID NO: 165695 - DNA, 122 bp, Homo sapiens
tttgagaggctccgggtgggtgctgacctctggcttcaaggctgcaggctccctggggcccgggttgggatgcctcccctggggaggtgcctgatgagagagaaagcaccctgctgcagttt

SEQ ID NO: 165696 - DNA, 122 bp, Homo sapiens
agggaataatccaggaatatttgataatgaaaagtgggacccagctggtcctctcagctccgtgtttgtgcagttaagtatgaaaatagatcataaacacacaaatgccttttgtttcttta

SEQ ID NO: 165697 - DNA, 122 bp, Homo sapiens
ggtccggctggccctttacgctcctggcctcatccctgctcatgtgtcccaggatgatggcgtctgcggcagcagcggaggccgagaagggatctccagttgtggtgggcctgctagttgtg

SEQ ID NO: 165698 - DNA, 122 bp, Homo sapiens
ctgtgacctgcgggtcttccagagattcagggctcccgcccgccgggtcccctgtgtaggcgatccctgaggcttgcgctgccggaggctcctttcgggcctctgcgcctcagggaccgcct

SEQ ID NO: 165699 - DNA, 122 bp, Homo sapiens
agtgatcaccggtatagacagtgacatcagacatctttcattagccctactcaaaaatggcggcaacgtaagtatcctgggccggaggtcggttgtaacccggaagtgcctttgtaaaggag

SEQ ID NO: 165700 - DNA, 122 bp, Homo sapiens
agggttgcttggtaacagaagggcagaaagccacttgtggattgaaaaagcaaaagggttcgcaggactagaaaatgtttctgcataaaactggatcaagtctcttacgggccttataactg

SEQ ID NO: 165701 - DNA, 122 bp, Homo sapiens
ggctcttgccctttagactacagttcccagcatgcccaggcgattgcgtcccagaaccgacgtcccaccgccttcccacatcggatcgcagggctcccaaaatggcgagtgaggctgcgggg

SEQ ID NO: 165702 - DNA, 122 bp, Homo sapiens
caacagtccgtccatctggctcaagctgtcgggcatttttcctggttcttctgttcctggcgtctgagatttgtcagcagggcctggttttcagggaccacggctaccgcctccttctgccc

SEQ ID NO: 165703 - DNA, 122 bp, Homo sapiens
cccagggtctgcatgggggcggggggtgtgcaggatgagcaggccaagcctcggcaggaacgggtcagaggaagcatcgattgatcagcccaatgccgccccggccccttgctcctgggtga

SEQ ID NO: 165704 - DNA, 122 bp, Homo sapiens
tgagggggcctggggtcatacatgaagagccagcagggggcattctcatctgatggcaaccgcggttgcctcatgcacgctcataactgcgggctctcggaatttttttaaatgcctcattt

SEQ ID NO: 165705 - DNA, 122 bp, Homo sapiens
ggggtagtatctgtgctgctcatctctccaggttttcattggatccatccccctgtggggcgcttcaaagcctggttctgaggtcaggagtttgggaccagcctggccaacatgatgaaacc

SEQ ID NO: 165706 - DNA, 122 bp, Homo sapiens
aaatgtggaagagacaataaaataaaatcccagttctactgagttctaacagccagaaaccgtgagccatttaaaattttgtttgtctcatgtttatgagaaaggataaaataacagatatc

SEQ ID NO: 165707 - DNA, 122 bp, Homo sapiens
catttccaagtccttgcattttttccccctaacttgtctcgaatgcacccattttctctccgtctctgctccacaacatccccagttgcctcgtcctcgcctggtttcctgtcgtagctttc

SEQ ID NO: 165708 - DNA, 122 bp, Homo sapiens
gtctgccctttttatctccccgcaaggcccccagtcttctagggaagccagtcagtgaagcgcggaggtccgggcgcgccgagagagagtccagtctttgaggaccgagtagtcctgggcca

SEQ ID NO: 165709 - DNA, 122 bp, Homo sapiens
gaatcacttctgactagggccgggctgtggcctcccactgcccagagtactttcattgtacggcttggacctaaacttttcccggccggcagcggtcggagggcaggctctactcattagcc

SEQ ID NO: 165710 - DNA, 122 bp, Homo sapiens
tctttgttcataacaggggatatacatcccacacaaacatcagtgacagtctgggatcctcggtcagtgagctgggactcactgcatgtcactgaaattttcttggcgggtcttaagtagaa

SEQ ID NO: 165711 - DNA, 122 bp, Homo sapiens
cccccggcttcggtgccagcatctgggaggctcggcgggcggccggtcaggacgctcgagcgatgttccagtgatggccccaccggagccccgaccccacacgcgcccactccaaccccgcg

SEQ ID NO: 165712 - DNA, 122 bp, Homo sapiens
acccatcggcctcctcgggacagtccagccccgtcctctggcccatgccctctctgtccccgcctcctgcccagccagcttcctgagggtccctgagcttgcccggctggccactcactgcc

SEQ ID NO: 165713 - DNA, 122 bp, Homo sapiens
gtctcagcctctcagcctggactggacaactgggcttcgggaattcatttaaattctacccgctacacgccttccctggattcagggcggcgtccagtgcattcatcacgcgtgtgctgccg

SEQ ID NO: 165714 - DNA, 122 bp, Homo sapiens
aacccttcccctgccactgagaaagcgtttttctaatgaggaagtagtgtgactgcagaacggtggtacagtaggagggatctcccccggtacccatcacgcagggacagactggctctggg

SEQ ID NO: 165715 - DNA, 122 bp, Homo sapiens
gggaggcagggcatcctggagacagagggctccgaggggcaggcgggttgggaggcttcccgcgagttgaggtcccggggaggaagagattctgggtctgccaggaatccagctttttggag

SEQ ID NO: 165716 - DNA, 122 bp, Homo sapiens
tgtgtagtggggcagcagcggaggctggctccaggtccagcatcagcatattgagtgtttcgatggactgttcaatctcctgctgggaggctgctcgcgggaactcagggagactggggatg

SEQ ID NO: 165717 - DNA, 122 bp, Homo sapiens
tcaataggattacgctgaggcccagcctaggtgagaattttggaagaaggtgctgggatccggagttccctggaatgaccaatgtattttgggctggagaccttgaggccctgaacagcagc

SEQ ID NO: 165718 - DNA, 122 bp, Homo sapiens
aaagcatctatttgtagctctgtaagcttctatcccagcttcactgagatgtgcagctgccgagaggttggcactacctcctaggaaaactaaaaatggcttgtgaagggtttctctttttt

SEQ ID NO: 165719 - DNA, 122 bp, Homo sapiens
agctcctcttacggggttcctgggtcatcagtgggcggggaaccgaggcctcctggagggcggtgcctcagccctcacccctccctcctgtccctcgctgtgctgtccccgatggcctctgc

SEQ ID NO: 165720 - DNA, 122 bp, Homo sapiens
tccccccccacccggcgggctgcccggcggaggcgacagattgagcgatgagacgcattacgcacttaatccgcctgattgaatgttttgctttcgcccaaattgaaacattaaacaacacg

SEQ ID NO: 165721 - DNA, 122 bp, Homo sapiens
ccctggggggggaaatcgggggcagggctggggaggctgccccgcccccgggtaaacaggcgcttccgcacattcttcgcgcgcgccgcccctttcctgccccttcccagccggaggagggt

SEQ ID NO: 165722 - DNA, 122 bp, Homo sapiens
tacagcagacattgcaggcctgaagaaaggtaggtccagggacttgccttcctaggctttcgggctgatggcttgtttcacttcctgggttaagaatttctgggaggggaatgagaagaata

SEQ ID NO: 165723 - DNA, 122 bp, Homo sapiens
ttccaagccatggtttcggcatctgatcaatgcggatcctgatatgcaccgtcagagatacgatgggactggtcagcactgggactggtctggtgagtatttaatagagtgctcagcacatg

SEQ ID NO: 165724 - DNA, 122 bp, Homo sapiens
cctttggaataccgtgaagaaagctgctgtggctgtcctgaaaagatctttgcatggagacgtgtttccgtttctcccgggtaaatacaggcgcatctcgtttcagtgtgcctcgctttctc

SEQ ID NO: 165725 - DNA, 122 bp, Homo sapiens
caccattgtaagtaggcagtggagctacatttgcagggagagagaagagcgaaaaattggcgcgcagagctgtaaagcgtttttctccaggtcacaccgcagcctgtaaatttgtgacactt

SEQ ID NO: 165726 - DNA, 122 bp, Homo sapiens
gtaggggatgaaattataaagggttgaagttgtcttcttgcactaagtcagttcctgggtcgggggtcacaagaccagttgggtcagtttctgggttatgggttgcccatcctagtggcgcc

SEQ ID NO: 165727 - DNA, 122 bp, Homo sapiens
gcccttcattatagactcaatgccttctcattgctagagcactgtgccctccttggggctcgatggtttataataaagcttccccaggagatctcatgggggccaggttctttagtggtggc

SEQ ID NO: 165728 - DNA, 122 bp, Homo sapiens
tacgagtaacccacctgcccggcacacgggccctctctgtgtacgagtaacccatctgcccgacacacgggccctctctgtgtatgagtaacccatctgcccgacacacgggccctctctgt

SEQ ID NO: 165729 - DNA, 122 bp, Homo sapiens
ttcagtttaaattactgagtggctttttgttgctcataattagcccaaggatacaataaccgctaaggtctggtttctctctccctctttttgtcaaaatgtccaggttgcttgccaccatt

SEQ ID NO: 165730 - DNA, 122 bp, Homo sapiens
gggcctaagcgcgaaggctgaattaatcaagatcaaggggctcccgggctgagagcagagcgttaacccttccagtcccagagagcgacaaggcgggggaggaaaaacgcgccggccggggc

SEQ ID NO: 165731 - DNA, 122 bp, Homo sapiens
acaacagctaccattcaacagctaattcaacaacaatacaagtaaccttcacggtaaaaacgagaacctcatttgcctacctcgaaaataaccaaagcaaagcaagccagtgaagctggggg

SEQ ID NO: 165732 - DNA, 122 bp, Homo sapiens
tgaaaatgcaacaagggaagctgtataaagaaacaatactgggccaggcgcggtggctcacgcctgtaatcccagcattttgggaggccaaggcgggtggatcacctgaggtcaggagttca

SEQ ID NO: 165733 - DNA, 122 bp, Homo sapiens
ccgaccgcaagcccgccacattttccctcccttaagcacttgagctctttccccacttctcgtcggttctcttgtctaaggagtccaggagccctaggatcaccacggctttttaaccttct

SEQ ID NO: 165734 - DNA, 122 bp, Homo sapiens
agtccgtggagggctgagtcgcagggtgtgcagggtgactccatggagggctgagttgcccgccgtggtcagatccctgggggcgggagggagggacgagatgctgtcggcggggactggct

SEQ ID NO: 165735 - DNA, 122 bp, Homo sapiens
gaaaccctctcatccgccctgtggccggagggaccagaccattagtgggacgaacctagacgcctggagccgggccggctcgcaagaacggggtgacctcaggttgcccctgcaatggggtt

SEQ ID NO: 165736 - DNA, 122 bp, Homo sapiens
ggtttctcagcttcttctttaggcattgaagactgttcctttctgggtgaaggagaatcacgtagcaattgggagcaagatgcatccatgtaacccagtactggaggtcaagatggagacaa

SEQ ID NO: 165737 - DNA, 122 bp, Homo sapiens
cccggcgccgccataaatggccccggcctcgccattttagttctttttgcgaagtgggctcgtgggttggcagtatgagagttgtaatggcccgactgttgagtgagggggagcaggggatc

SEQ ID NO: 165738 - DNA, 122 bp, Homo sapiens
tgaagctataaagggacaaaagaaataagatccgtgccaattgtggtttagtgagaaaaacgtagcaatagtacattcaggtgttagttatttaaatcttgctccatatatattacatatcc

SEQ ID NO: 165739 - DNA, 122 bp, Homo sapiens
tgtgcggagggacagggtgaagggatcccacttcggggaggatgggcttatcccggcgggcgcgccaggtgggatctctagcgcctcaggggcccgcgcggcaacagccggcaccctcgggc

SEQ ID NO: 165740 - DNA, 122 bp, Homo sapiens
acccaggtttgcctgactcaaaagttctttcctgttaccccaggcagccaggacgctgttcggttgtgtttttataaaagtgctgtttctctcttgtggcagctttctcattagtgaaagga

SEQ ID NO: 165741 - DNA, 122 bp, Homo sapiens
tgtgttaattcgtgctgcagcagcgtgcatcacttccactttgacctcatagttaatctgcgtgatagttaatcacgcagagtctctagtgatttttttcctatttattttaaatacacaca

SEQ ID NO: 165742 - DNA, 122 bp, Homo sapiens
ttgtctctccatggctctccctgaccatgcgggctacctcagggaagccagcttcttcagcgagctgagccgcatccctgccactcagctcacagacccccacccaggcagccccacggccc

SEQ ID NO: 165743 - DNA, 122 bp, Homo sapiens
ccccgccccggtccccgggctcagccccagcccgcctggggagtccgccgccgtcgccgccgctctgcgccgcaggccgccccccgaccggccccatccagcggctcccctcgccggagggg

SEQ ID NO: 165744 - DNA, 122 bp, Homo sapiens
aggcctttgacacatgacaggtgcttggccaacagctgcggaaccaacattgcgaatggccgaaagcctttgtctctccccatgcctctggtggagctgtctgccattttcaccctgaatct

SEQ ID NO: 165745 - DNA, 122 bp, Homo sapiens
ccctgactgctgagcatgtggctgagcttgctggagtgaggacgtccttgggtgggggcacggaggactggccctggaagctgctccaggccctggagggcccaagattaaacagcacctgg

SEQ ID NO: 165746 - DNA, 122 bp, Homo sapiens
ttctttacttggtcctgccctatgcctgtgttgggtgttgggaataaaatgtgggttccacgcagctccaggacttgaggagcttggtgaacactcactcgcccagggcagcactgattcct

SEQ ID NO: 165747 - DNA, 122 bp, Homo sapiens
cacaaggctgaaggatgattttgccactggattgggaactggagctgctgctgaaggagccggtgcctggtggggagcaggggctctgggaagcactgccgcagggatggtagggtaaaccg

SEQ ID NO: 165748 - DNA, 122 bp, Homo sapiens
gtcctgcactgatggggcgagcagcaccgtgctgtccgcactggggctggtgggcaccaccgtgtcgttcatgtatgggtcctcctctgaagagtcatcgctggtccggatgccacttgttc

SEQ ID NO: 165749 - DNA, 122 bp, Homo sapiens
gtaaatgtgcccagctctgctcagagaaaactcaagccagcagcctctcagaccgtcttccgtaaaaggagagggtggctgtacccacgtggcagggaaaactgaaccgtgaagtcggcggc

SEQ ID NO: 165750 - DNA, 122 bp, Homo sapiens
atattaacccatctgagctcagctttctcccctgtaaaatggggttaatcatatctatctcgtatgagtgccatgagcattaaatgagatgattatttttgcctcgataaatggtgagtttt

SEQ ID NO: 165751 - DNA, 122 bp, Homo sapiens
cagtcataatctcatttaatcttcacaaccaccataactagtagaaactatgatttcccccggcccctgcattttacagatggagaaactgagatgtaaggaggttaagtgacttgtccaag

SEQ ID NO: 165752 - DNA, 122 bp, Homo sapiens
gagggtcctttgcagtcgggcgtggaagtgggatgagcaaaccccgcagcacagggccttcgccccaggacctgcaccctctaccggccacgggacgtccctccgcacccgcctgtggatgc

SEQ ID NO: 165753 - DNA, 122 bp, Homo sapiens
gggcggcgcgctccttgccgctgtccagcagctgtttctactgccaggtgctgcgtcccgcgatcgttataacacatgcgtacaaatgagcacaacgcgccataaaagtgttattgttatta

SEQ ID NO: 165754 - DNA, 122 bp, Homo sapiens
tttatagtgcgcgccgctcgcaaggccggtcctcggcgccagcccgcgctccgcccgaggcgtccaatacacacgcctgtttgggaaaccccatttcatgcttagggaaaggaatactgcct

SEQ ID NO: 165755 - DNA, 122 bp, Homo sapiens
ccaagctctttggaggagtccaagcgtgcccagcccagagggaggttcagaggcactgaccgtcttctgtttgggaggagaagctcactcttggagccacagccagcactaggtcaggaccc

SEQ ID NO: 165756 - DNA, 122 bp, Homo sapiens
caggaactaggcgcagtccggagcgcagggcatggtctttattaagatggggacgggcagcgcgctcagggcgcatccaacaccagcagcttgtgcatgtacgagttcagccagtggcggcg

SEQ ID NO: 165757 - DNA, 122 bp, Homo sapiens
tgggcgggtagttgttggggcgggtcggccgggaggttaggatcttgtgtttgtggcctccgcagccagcttaggctgctcggtgtcgtgtcgcagttatgtactgccatttattatgactc

SEQ ID NO: 165758 - DNA, 122 bp, Homo sapiens
ccacttaatgggacttaagtgttacctagttttagaggaataagaataacttctgtctcacgttgggtttcactgaggagatgtctgcattggaaagacagagctcatgtcactaaagaagc

SEQ ID NO: 165759 - DNA, 122 bp, Homo sapiens
gatgaaagctgtaaaacgagatggtcaaggatctggccaggcctggttcgggattatggccggcccctggaatgctgaggggggcctcttttaagaagccagtgtctatttacagtgtatct

SEQ ID NO: 165760 - DNA, 122 bp, Homo sapiens
ctcagggccccggtctggtcaacccggctgttgctggggtgagcgaaggcgacgtggcagcgcggacgctgctgggtgcctgggcgccgctgaggcggacagggggcggctcttgagcggcg

SEQ ID NO: 165761 - DNA, 122 bp, Homo sapiens
tgtttcgtccaacattctcagtcctggctgcatattggcatcacctggggactcctttttcgaaacactaattccatggccccgagcccttagacattccattttatttaatttatttattt

SEQ ID NO: 165762 - DNA, 122 bp, Homo sapiens
ctgatgcatctgaatgtggggtacacgtcacacgcagccccccacggtaccacatcctgacgcacctgaatgtggggtacacatcacacgcagcacccccacggtaccacatcctgacgcac

SEQ ID NO: 165763 - DNA, 122 bp, Homo sapiens
cctggtgctttctcaggactgtcccgtgcaggatgtcctgggagaggttggggagcggggcgtcctgcatggagtcaacccgaagagtgcccctcctgtcccaagaggtattcatggagcgc

SEQ ID NO: 165764 - DNA, 122 bp, Homo sapiens
gcactgcgggcgggcacaggcccacgtgaagaaatgccacatgtgtgcactgcgggtgggcgcaggcccacgtgaagaaatgccacacgtgtgcgctgcgggcgggcgcaggcccacgtgaa

SEQ ID NO: 165765 - DNA, 122 bp, Homo sapiens
ggcattttgtaagccgctttgattgtatggaccttaagttcttcctgcaccagtgaaacccggctcacctcccgtcactgttcagattagcgccctggctcgttcctggttatgctttttaa

SEQ ID NO: 165766 - DNA, 122 bp, Homo sapiens
gtggccagactgctctgtgacaaagggccacgcctgcccctgggaggggtattgggctgccgcccgcagatgttgcagtaggaactgaagaagatggcgtgcctgggcttcctcctccccgt

SEQ ID NO: 165767 - DNA, 122 bp, Homo sapiens
gagtcttgtcaaggcatgccaagacaaggtccctcattctccagtcaacatagtggagaacgtacttgcctgacgccagcatgtgtgtgatggtttaggactcagtgacctttgaggatgtg

SEQ ID NO: 165768 - DNA, 122 bp, Homo sapiens
ttgacagggaaatgggcagagtagggaggggctggtacagcagggtgatgcctgaggggacgcagtgtcacccgcccatctagtcaccctagatgctggccccaaagtaaccatggggcaag

SEQ ID NO: 165769 - DNA, 122 bp, Homo sapiens
gtgtgttttttctttttttttaagttcttatgaggaggggagggtaaataaaccactgtgcgtcttggtgtaatttgaagattgccccatctagactagcaatctcttcattattctctgct

SEQ ID NO: 165770 - DNA, 122 bp, Homo sapiens
ccccgcggcagggatgcatcatggccacgctggcttgccgggtgcagttcttggacgacacggaccctttcaacagcaccaacttccccgagcccagccggccgccgctgttcacgttccgc

SEQ ID NO: 165771 - DNA, 122 bp, Homo sapiens
agctggagagcaccgaggtgggcgtgcaggggggcgcttttgagggcacccacatgggcccgtttgtggagcggggacctgacgaggccatggaggacggcgaggagggctcggacgacgag

SEQ ID NO: 165772 - DNA, 122 bp, Homo sapiens
gggtctcagcccaaccgactcctggttgccacgccggttaccatgggtgcagcctggggacgctgtcgtctgtggccagtgagtgcaccgagcatgcggagagggggacaggaggccttggg

SEQ ID NO: 165773 - DNA, 122 bp, Homo sapiens
catctgctgagaatcagagcaactctgtcttccaaaaagacaagagtttggtctgaacaacgccaggtactgagcttccctctgccatcaccgttgcaccaccagatgaataaggagagagc

SEQ ID NO: 165774 - DNA, 122 bp, Homo sapiens
gccgaggggctgcgatactggttgcccgcggtgtgagcagaattcaacgtgtaccgctgccgtgaaaatggagaggcctttgtccgtgtttggggaccgcagcactggggaggcgatctgct

SEQ ID NO: 165775 - DNA, 122 bp, Homo sapiens
tccagcagcaccacaggcttttcctgagtcaaggccagcctgggaaggtgacaggcccttcgggaatcaggtgctgtggatcaggtctgaacagcaccttggagccgtgctccttttgcgga

SEQ ID NO: 165776 - DNA, 122 bp, Homo sapiens
atctcttaaaaaaaaaaaaaactgccagctcatttaaggacaggcagaaactcaaggaagcggtttaaacacctgggaccctaggagaggtgagccccttaacaattccatgaatttcagca

SEQ ID NO: 165777 - DNA, 122 bp, Homo sapiens
gcccccgccgaaggctggcctaaagacgggctccgtgtctggtggctgagtcggtgatcccggccccgctcaccgatggacacgcggcggtggaaccccgtgggccccctcgttgcgtggcc

SEQ ID NO: 165778 - DNA, 122 bp, Homo sapiens
ttcacgtggttctggagggctgtgggtccataggctggcttacccctagctcacaaggcccggccgatcctaatgacctccacccaccctctcggacactgagcgcccccaccgcccagccg

SEQ ID NO: 165779 - DNA, 122 bp, Homo sapiens
aggaaggcttccttcgtctctcagaaacacaactcgctggcatcaccctggaacccaaaacgtgaggtttttgtttagccatgaagaatgtctgcttctgcagatgcccacaggcagctcac

SEQ ID NO: 165780 - DNA, 122 bp, Homo sapiens
gggccgccagggggcagtaacgccagatcatctgtctcccggaagtaatgccagatgatccgtctgccgcgcctgcgcggcgggaagagccggagcgcgttgatgtggttgccgagacaacc

SEQ ID NO: 165781 - DNA, 122 bp, Homo sapiens
ggctcccccattccacacgaccctgagtttgggtccaagttagcttctgtcccagagtaccggtattcccaaagcgcacccggtaaggagcgggcggccctcttgcggggcggggcggggcg

SEQ ID NO: 165782 - DNA, 122 bp, Homo sapiens
ctccacccctcagggcaccccagtttctcagatccgctctgacaatgaatccgcgccttccggtcttggctcccagccaggtccatgacactgggaatacagcgctctaattaacggccctc

SEQ ID NO: 165783 - DNA, 122 bp, Homo sapiens
gggctgttgcgcccttaaggttgctaaggcgacggttctggccagagcgaggcgcattgacgtcagtagccgaacgctgattggctgcggccaggccgtttccggtggagctgtcgcctagc

SEQ ID NO: 165784 - DNA, 122 bp, Homo sapiens
acagtagtgatggaggccacattgctggcggaactacaccgtagactaaatgcaacgcggcggactagggttctgcagaggtggaggatgtgaagacactccaccctgactcttaagtcaga

SEQ ID NO: 165785 - DNA, 122 bp, Homo sapiens
gcaatatattaatagcacggtggttatgtcacaggcctgtgactggcttgggctcaaacccgggctttttcacttactagctgcaagactaactagttatttaatttctccattcctcactt

SEQ ID NO: 165786 - DNA, 122 bp, Homo sapiens
actccccagtgtgtccccagcatgaatgcgccagcccacacagtcacctgcctccatgaacgcgccaactccgcgcatccacctgtcttcccgaacgcaacgacccacgcatccacccacct

SEQ ID NO: 165787 - DNA, 122 bp, Homo sapiens
gctggaccctgttccattttcagcacggattttggcgtcagtatgcgtctcctcctccatcgcgccgagcccacgtgcggctgcagttgtcacttccgcctggcagcgcgcgccgcaaacag

SEQ ID NO: 165788 - DNA, 122 bp, Homo sapiens
acggtactggttgagtgcatagtaaataaggtacttgcacaactatgggcaacaaagagacggcttgggaattatcaaacaccaattttgattttgatgagaacagtcataacccaatattt

SEQ ID NO: 165789 - DNA, 122 bp, Homo sapiens
tcagaaggggagggcaggcggggggcgggactcgcacggccactagaccccttttcagagcgctcatattaggtggtgacggctgcagttcccggtgccgcctcggtgcctgatgggggaga

SEQ ID NO: 165790 - DNA, 122 bp, Homo sapiens
tcacgaacggcccaggcaggggccttactagtaagcacgttttgggaagtcctcagggcacgcaggcaccgtgacctcacacactagtgcgctggagtgtgtcattagcatctggaatctct

SEQ ID NO: 165791 - DNA, 122 bp, Homo sapiens
ctggccccacctgactgctggcccggcactggcacggtcactcctgtgtagctctgctgccgcccctcccttccccctgggcttgtctctaccctagaagtaatgtcaagcatgaggcttcc

SEQ ID NO: 165792 - DNA, 122 bp, Homo sapiens
gacggagcgccgtccgggcgtccaggactcaggcctggccactccgagccccccaccccccgccccgcgccggcccgcgcaccctgcttcccgcaacttgcagcaaacgcagcggcctctgg

SEQ ID NO: 165793 - DNA, 122 bp, Homo sapiens
ggcaggagctggcggcgggagggcagacagacagccgagtgggcagacaggtggcgggcgcgcgagcggctcgggcgggtgccgaagctcgagagagagcagagccggagcggcgctcagac

SEQ ID NO: 165794 - DNA, 122 bp, Homo sapiens
gcttgtcaccggctcacctggcacgcaagtgaggggttcgccagctgcgtacttggtgcgcgcagaggaaagggtttcacaatctgcacgttagggaggcagatctgacaccgacccacgac

SEQ ID NO: 165795 - DNA, 122 bp, Homo sapiens
tcccaggcactgccagagcgaggcaggctttgaggagcctgtcaaggagggcaaaggcctcgctttgaaaacgcttctccagtgtgctggctcgtgggacttggcaggcccagggaacggcg

SEQ ID NO: 165796 - DNA, 122 bp, Homo sapiens
acgggcgcgcccatccgactcttcgaggggcggcagggccccatctgtgtctttcgctctcgagcccccagctagagttggcttcagcggaatacctactgtgcaggattattcaacaagcc

SEQ ID NO: 165797 - DNA, 122 bp, Homo sapiens
ctgaactgcaatatgtaagatcccaaagggacttggtgagcatctcctcttccttcaagacgcttactcattgaatggctattctgtgtcgggcaccattccaagtgatggtgatacagcag

SEQ ID NO: 165798 - DNA, 122 bp, Homo sapiens
aaccaagttctgtgacatctgttgcaaccatgtttccaagcttcagtcattcacacgccccgcgctcagccatagccacatccccagaccacctgtatgatcaactatgatatgtgtttttt

SEQ ID NO: 165799 - DNA, 122 bp, Homo sapiens
acagctctgcctgggccctcagagacgcgcagctgcgtcagcgtggactctgggtggtgccggattgtggataatttgagggaatgcacagcacattaaggaggctgggaatgccgagggtc

SEQ ID NO: 165800 - DNA, 122 bp, Homo sapiens
ggatcaggaggaaagacagaaggtggtgatccctgaaatctagaagttttagggtagagacgtcaatctgtgtagaatgcaaagcttctaagtcattcctctgcttaaagcctgtcagtagc

SEQ ID NO: 165801 - DNA, 122 bp, Homo sapiens
aacactccaggaagagccggccatggcaggcggggactgtgtggcaagcctggttctgggcgccggcggaccggggctccggcgcggacatggcaaggtggccatgagggggacagaatggg

SEQ ID NO: 165802 - DNA, 122 bp, Homo sapiens
ccaggagctgagctcagggtgggcggaggaagcggttagacgccccgaaactgagctgcacgtttctaaggtagggaggaggaagatgcccccaattaagttgatctttgagccaaggaggc

SEQ ID NO: 165803 - DNA, 122 bp, Homo sapiens
cagctgtgcgcagtggcgcggctgctaagtagcagcaggtgggagactagggtctgcgctcgcggcgaccgcggaggagggtgggcgcctgcggaggtgtcctcgctcacttcggggggccc

SEQ ID NO: 165804 - DNA, 122 bp, Homo sapiens
cctgaagtgacaaaggggagtaacttcagacaaatcaacagaatgtaattacaggtaaggcgtttggctttactccccctaaaggtctttgaggcctgggataaattttgacgcaacagcaa

SEQ ID NO: 165805 - DNA, 122 bp, Homo sapiens
cttcacatccctcaaaccagagttgctcacagacatgcacatcatggagtgcgcagccatcgtttacgtccaggagagttgattttataaagataaagggcttgaagagaaaccactatttt

SEQ ID NO: 165806 - DNA, 122 bp, Homo sapiens
cgcgccgcccgccgagatcccctacgaggagttgtgggcgcaccaggggcccgagggcctcgtccggccgcccccagggctcgatctcatctccttcggggccgcgggaccgccgcgtcggg

SEQ ID NO: 165807 - DNA, 122 bp, Homo sapiens
tcacacttttgctctcttgcagtcagttgctttgctggcttctgcaggcttttaaggtctcgcggcgtagaaatgcctggcccccacccccttcctcggtctcccctttcaattcagatgtg

SEQ ID NO: 165808 - DNA, 122 bp, Homo sapiens
tagtgattttgcattagcctgcaggaggtcatctcttacaatggattcatagtgctttgccggtgatgagaattctcacctccactgggttgtgcatcaggaatgacctcgtcactctgctg

SEQ ID NO: 165809 - DNA, 122 bp, Homo sapiens
aaaacatgaagacagaaaggtaagaaaaaagatggttcttaaagtaaaaactagtttggacgtttggctgaagaattaatttacagtgaagagcacagaagggaaataaaattggaatagag

SEQ ID NO: 165810 - DNA, 122 bp, Homo sapiens
agggaaattgcttacaaggcgcttaagagacctattaagcaaacttgatgtgtggacctgcggcggatcccgattctataaggccaactgcacaaaaccacgagaccccctgaggactgcgc

SEQ ID NO: 165811 - DNA, 122 bp, Homo sapiens
tcttctggcggaccgtgcgaggtgagcagagcgtggggactgcaggtggtgacgggcaggcggccggtgatgagaacttctcccactcacattcgagtttcccgaccatgagatgactccac

SEQ ID NO: 165812 - DNA, 122 bp, Homo sapiens
tgccaggctagacatgagggatgctgcggcctctccccaccccactctccccaccccacccgcaactgccttcctcacaatggggttcattgttgaggtggtggggggcacctagggagggt

SEQ ID NO: 165813 - DNA, 122 bp, Homo sapiens
tgccgcccgcctccgctgcgtggcgctggcgacccgtggctgctggcgtgggcggggtaccggttggtaggagagacggaccgttgttacataaccattaaactgaaataaaccggaccaag

SEQ ID NO: 165814 - DNA, 122 bp, Homo sapiens
ctgtgcctgtggagtaggcaccctcggcccaccactattcacaggagacaggagtccttacgttcagaagccactccagggaaagaagaggaatcggctttcagccttctggagaggggaag

SEQ ID NO: 165815 - DNA, 122 bp, Homo sapiens
accggccgccgaagcctggatcaggctctgtcccgacgcctgaccggaacctgaagccagcggaaatcctgagagaaagtctgaaacccactcagtccccgaaaccttgtgtgtcgtcactg

SEQ ID NO: 165816 - DNA, 122 bp, Homo sapiens
gatcccgcggcggaggatggcagggcttgttccagaaggcttgagggtccgcgagtgcaccgccctcccaccctaaggtctagtcttccttgcccgcgcccagagagtgggattacgggcgc

SEQ ID NO: 165817 - DNA, 122 bp, Homo sapiens
agcccccagtgtgacagatgctcagaacacatctgctgaatgaatggacgaatgctgtgacgaagagaggtggagaggtaggcaaggctcagaccacagaaatggtcacagggtggcctgca

SEQ ID NO: 165818 - DNA, 122 bp, Homo sapiens
gctctctgtaaaatggcccaatcagtaggatgtgggtgggaccagataagggaataaaagcgggccaccccagccagcagagtcagcctactcagatttcctatccgtgatgtgggagcgtt

SEQ ID NO: 165819 - DNA, 122 bp, Homo sapiens
ggaaaacagctctcttactctgaatatctttagccttctgcacttcccagcctgtaacctcgtattgtggaccagtgtggacatgctttttctttccagaagggtcgaggaggcagtgggag

SEQ ID NO: 165820 - DNA, 122 bp, Homo sapiens
acggagcctcccccatgcagcccccactcaaatggagttttaaaggctgggttcaggttacgggggcgtttctcaccgtctgaatgcggaggacagagacgagctccagggagcgtgggcgg

SEQ ID NO: 165821 - DNA, 122 bp, Homo sapiens
gtatacagatctgggccacaaaacatggtttttcgtcatttttggagagactgggtagtacgaatggctgctcatactgctgtatgcctgaacaggccctcatagacatgataaaggaccct

SEQ ID NO: 165822 - DNA, 122 bp, Homo sapiens
ctcccatgtatcattgacctcattaaaatgcttctagaagaaatagctctgacccttccccgccctgtccccaatttccagcccctattctcgtttccctcccggggggttggggggtatct

SEQ ID NO: 165823 - DNA, 122 bp, Homo sapiens
tggctgactggaggggctggggccccgggggttgggaggcacagtgggagcagcagattgcgggctgaatggcggaggaggtgccctcccaccaagacccagacccctgacctgaggctggc

SEQ ID NO: 165824 - DNA, 122 bp, Homo sapiens
tgacctaacttccctaaatcaacacgctcctctcttctcttccctttccaagcagcgacacggtagtctttctcaatctgtttcttgtcagggaatgcctaattgggctttctcggtacttg

SEQ ID NO: 165825 - DNA, 122 bp, Homo sapiens
gcaggaggatcacttgagcccaggagtttgagaccagcctgagcaacatagtgagacccccgtctctaccaaaaaattttttaaaagctgggtgtggtggcacatgcctgtagtctcagcta

SEQ ID NO: 165826 - DNA, 122 bp, Homo sapiens
accttcggccgcccacagtagcggccttcctactggactccctgccctcgcccctgctcacgtagagccgcctcttctgaaggaaaatcctactagctccgggcccataaggccctgcccaa

SEQ ID NO: 165827 - DNA, 122 bp, Homo sapiens
gactctttactatgcgtgtcaactgccatcaacttccttgcttgctggggactggggccgcgagggcatacccccgaggggtacggggctagggctaggcaggctgtgcggttgggcggggc

SEQ ID NO: 165828 - DNA, 122 bp, Homo sapiens
ttagcgtcggaggatcgcggggctttgtggtggagcactccggctgagcgcgcttcacagcgctgtggcacactggtcatcgttgcttatagaggatgccaagccccacccccattccccca

SEQ ID NO: 165829 - DNA, 122 bp, Homo sapiens
cctcagcagctgaggtgcccacggcgttctcatcccacaggcacagcagtgtgaggcagccgactgtgcttacgtggatctccctgactgactccctttgagctcttgcacatgctaatttg

SEQ ID NO: 165830 - DNA, 122 bp, Homo sapiens
gtggtcccccctggagaaaagagccgccgccgagggcgcgaaaaggcgagtccggaagcccgccagggagccagtggcgcgttttccagatcaccctgttggaacttagcgtagcagaggtc

SEQ ID NO: 165831 - DNA, 122 bp, Homo sapiens
gctgggatgctccgaagctgccgtaggtgggcatgggagcgtgtctgcgggcgtactgagcgcggaggggctgcagccagccacttgagaacttcgaactccacttctccgcgctgcgcgtc

SEQ ID NO: 165832 - DNA, 122 bp, Homo sapiens
gttgggtttagtgttctcccgccaatttaagcctgtggcatggaacctaaagactagaggcggttgtgtgagtcaggaagaggggccagatatctgagtgttcctctttagtttcttcaatt

SEQ ID NO: 165833 - DNA, 122 bp, Homo sapiens
tttaattggcccatctgttccagttagtatttggaccaccaactgcaaactgaatttcttcggtgttttgtcttccatgataaatagcagcaaaaatcttatagtaaaagtatcatctcttt

SEQ ID NO: 165834 - DNA, 122 bp, Homo sapiens
tcaaggttgatagggtctccccatcaaggctaaagcagtttcaagactcagtaagtccaacgaaaagcctctttatccctacttttccagaaaaacccacttatccttattggatcagcttg

SEQ ID NO: 165835 - DNA, 122 bp, Homo sapiens
tgaaaataaaacacacctcgtggcatggctggcgtggtctgagtcttttagttgagtatgcgtgggcagtgccactgcagcaaagcccctcgatggagtagagttcctgccgcaaaggggag

SEQ ID NO: 165836 - DNA, 122 bp, Homo sapiens
ggtccaggaactgggctcggtgctccgccaaacccagccactccagccaatcagccacgtcgaacttggtccagaaccccagaggtttagcgccaaacggcttgtccgggggcagcgagagc

SEQ ID NO: 165837 - DNA, 122 bp, Homo sapiens
ctccccgtgctcctctcaggaacacggccgcagagaggcaccttgaatgggtctgcgtcccggaggagagactgacagtaccttcgtctggaccatgccgggtctctggtccctcaagtgct

SEQ ID NO: 165838 - DNA, 122 bp, Homo sapiens
ggtccggcggcggcgtgctccggatgaagcacttgatctggcccttctcgccgtggagggcgtgctgggtctgggtgctggagatgatggggggtcctgttgagaaacagcgtcccattagg

SEQ ID NO: 165839 - DNA, 122 bp, Homo sapiens
agaggacagcaaggggcagagcgcgctctgaagcaccgcgggcccatgtccggactctcgcgccaggaaagacccctagaagctggcaggaagaagggcaagttcaaggctaccctacgacc

SEQ ID NO: 165840 - DNA, 122 bp, Homo sapiens
gatggattacaacccacaagtctggttattttagcaggaaactggtgattccttttctaccgagaaagcaagcaacagacaagaggaaaccagcattccttgagaatccagtgcgctagaaa

SEQ ID NO: 165841 - DNA, 122 bp, Homo sapiens
tgcgcggaggtgacaggccccggggtgcccagagctcggatggatggcgcgggtttggaacgcagggctgcgggagccgggggcccgaggctcgctcacctccgccgtagacgcccccgctc

SEQ ID NO: 165842 - DNA, 122 bp, Homo sapiens
agccaagcctttctgtcttctccatcccccggccttttaaacagcagtggggcggggccacggcatcgatcactcggcgctcctccaggcactgcgtcgtgatcagacgagcggtgagcgat

SEQ ID NO: 165843 - DNA, 122 bp, Homo sapiens
ggcgtcctggccaatgggaatagtgaggggcctgtcactaagaaacctgtccctgagcaacgcataggaggggtggaacccagcagcgctgactgagccgccgcgaagtgccggaacgtatt

SEQ ID NO: 165844 - DNA, 122 bp, Homo sapiens
gttggctgttcttgccgcctctccactgtcctccttcatacgtttgattgagcggttcctcggttcctctgtgaccccggctaggcactgccatctctcacgcgtgccgtcgtagtagcttc

SEQ ID NO: 165845 - DNA, 122 bp, Homo sapiens
aaaccaggattcagcctgcaggatgcatgattccaggccttgggccctacttactcccaccgttgcctctggattgacctctctcctatcttgtacgatctagcctgctcccccagccaggg

SEQ ID NO: 165846 - DNA, 122 bp, Homo sapiens
agacggaaccgggagaccctgatctgtgggacagtggggcctcggggtgcgcctcactggcgtctgacacaatgccttgggacttgaatatgtttctagtccacttttttcccaataagaaa

SEQ ID NO: 165847 - DNA, 122 bp, Homo sapiens
cccacctcggcctcccaaagtgctgggattacaggcgtgagccaccgcacccggcccccacgggccatttctaagcattgcccacagaaggctgtgggtctgagcctccagctgatgggccc

SEQ ID NO: 165848 - DNA, 122 bp, Homo sapiens
tgaaaccaattttctgcaggtgttcaccaggaacatgccggaaacgccaggttcctgaggcgcggaaatgcggggccggagccaacctgactggaacggcagaaatccttttactttcagaa

SEQ ID NO: 165849 - DNA, 122 bp, Homo sapiens
atggagagtaaaatccaagatggcggcgcgggccgcagcaccgctcgctccctccgctgacgggaaaaatgagtccccgcagcgtccgagccccccgcccccaaccggccgccgccgccgcc

SEQ ID NO: 165850 - DNA, 122 bp, Homo sapiens
agtaacaatctgatctctctttcttttccccacatttcccccttttcttttcgacaaaaccgccgtcatcatcgtggcccattctggatggtcgctatctcttcggagctgttgggtacact

SEQ ID NO: 165851 - DNA, 122 bp, Homo sapiens
ggcacagctcacgcactacgaggggaaacacactctgaagccaacacacgcaaaggcaaacgtcgacactcgcaccatcaggacagcagaaattggactagtaaaacactgagcctggcagc

SEQ ID NO: 165852 - DNA, 122 bp, Homo sapiens
aaataggtgctcgcctaggactgattcccaacccatggcaagtcatttccttctgtaactcggtaggtctttgcaagaaatggagcgataaaatcagagggacagaaagagaaaacagccaa

SEQ ID NO: 165853 - DNA, 122 bp, Homo sapiens
tcccagtccctgtcccatgatcacacagagctgtccccccaactttgaggaggcagattccgagctcccgcttgaatcaggaaggggcacatagtaagccttatctgagagatgctggtgta

SEQ ID NO: 165854 - DNA, 122 bp, Homo sapiens
aagaaaaggcgcggggagcgggctggaggattctgcaagcacaggcccctatggagcgcccgttcgggggacgggatttccctccctttcccctcccccgcccgttcggaattccgcccccg

SEQ ID NO: 165855 - DNA, 122 bp, Homo sapiens
atggaccccgcgctggggaagcagtcaagggtgtggggacataagcagcatggaggccggcgtgggcagtccccgctccgagaaggagcagagcagaagccactcggcgcagctcgagccaa

SEQ ID NO: 165856 - DNA, 122 bp, Homo sapiens
aggtcgcgaaaacaatagaggctgaagcattgttagcgtaattgggggaggagggagcaacggcaagaattaagagcagaacacaggtctagaaacagtacctgtcccaaagtgggtctgcc

SEQ ID NO: 165857 - DNA, 122 bp, Homo sapiens
caaccggaccaccacctccttcagagaagccctggtgcagctggggctgggggtgctccccggggcgctgtgccgacggtggtggtgggagggtgttcccgggggcgctgtgccaacggtgg

SEQ ID NO: 165858 - DNA, 122 bp, Homo sapiens
ctggctgcagcggcggcagccccagtgctgcccctgtgcggcgcccctttcccgctccgccgcgcactgttgtcatggaggaaccaagatggcggctctggcctacaacctgggcaagcggg

SEQ ID NO: 165859 - DNA, 122 bp, Homo sapiens
gttgagggtaattcttgtgcgctccgcgggggcgggtccccatccgccgcttcaggcctgcgggctctgagggtcctgcccactgcggagcaggtgttgcaggaatcagtgactcaaaaaat

SEQ ID NO: 165860 - DNA, 122 bp, Homo sapiens
gaaaggaagggtttagttctggaaataccttgggggggaggggttgagtagtagaatgggcgggcgatggtgaaactgtggttccccttccagaatatatacaagtccacagagataaagga

SEQ ID NO: 165861 - DNA, 122 bp, Homo sapiens
tctcttttatgaaaactcaatgcgtgtggccccagcccctcccacccaccccaaagccgtcggcctcctgcgacagcggcgccctgactgcctcctccggccacggcccctcctgctttaat

SEQ ID NO: 165862 - DNA, 122 bp, Homo sapiens
ggtgggccacatgaagaggatcctgtgtggcatcaaggagctgagccgcagcgcccccgccgtcgaggcctagcctctgtcctctcagcctgtggcctccacatccccgccgccgaggccta

SEQ ID NO: 165863 - DNA, 122 bp, Homo sapiens
tcctcctcagcttcctgcgtgggttcctggtaagtgagtcgaacccgccggatgcgcgcgcgcctgcgcctccgcccaaaaggatcagtttccggctgtggactacatttcccagaagcccc

SEQ ID NO: 165864 - DNA, 122 bp, Homo sapiens
cgaaatgaatgaaatcgatgtggcagcgggcccggacgggtcggtggcgtagacgcggagcgcgcagctcacacctggcggccgcggtttccaggaggaagcaaggatgctttggacactgt

SEQ ID NO: 165865 - DNA, 122 bp, Homo sapiens
ccgcgaggagggagggaaggagggcgggccgcgcgggagggggctgtgggaacggccgcgcgggcgcaggcccattcacggccagaaaccagggctttgaaatccgagcccgggcgctgcca

SEQ ID NO: 165866 - DNA, 122 bp, Homo sapiens
aagccctgcccagtcccaagaagtgttaacaggcgctggagctttatctgcggctgcactcgcttctccctcctgcagacattcttgctgctttccggtcccacgggacggctcccaggctc

SEQ ID NO: 165867 - DNA, 122 bp, Homo sapiens
cttggcctgtggcgtggtggcgtcgggggtgggcatggctcagtgtggaggtccgggctccgtctccacagccctggcccagcagcctcttataagctgagctgacgtcaaagccccctctg

SEQ ID NO: 165868 - DNA, 122 bp, Homo sapiens
cttgaaggagaaagcagcattaaacaagaacaaagcaaacatgatataagctgtaatcaacgcacaaaagaaaagagtgggtaggaagaacgacttactttagatttatgtgatcaaaggag

SEQ ID NO: 165869 - DNA, 122 bp, Homo sapiens
caggcgccgcaggttcccgagctcctgcaggtgggcagagagtcagagcgcggatgggcacgaagcagggggccagccccaccctgactcaccgggggcagtgctgacagctggttccggtc

SEQ ID NO: 165870 - DNA, 122 bp, Homo sapiens
tgtctcacctggcttctccacagcgcagaagctcagcccctggttggaagagcctccccgcggagattcacagcaaagcgccattcagggcccaactccaagcccaaacctagctcctcccc

SEQ ID NO: 165871 - DNA, 122 bp, Homo sapiens
gtaaatcttaactgctgctcactctgggtctacactgcttttatgagctgtaacacttaccgcgaaggtctgcagcttcactcctgaagccagcgagaccacgagtccaccgggaggaagaa

SEQ ID NO: 165872 - DNA, 122 bp, Homo sapiens
gccggcggggcaccacccattcgccccggttccggggcccagggagtgggcggtttcctccgggacaaaagaccgggactcgagactccgttcaataaatggtgctgggataactggctagc

SEQ ID NO: 165873 - DNA, 122 bp, Homo sapiens
ggcacaccctccacagctgctggcctgggtgctaagcccttcactgtccggggcctgctgcgctcgccggccgctcagagtgcggcctggggagcccacgcccacctggaactcgcgctggc

SEQ ID NO: 165874 - DNA, 122 bp, Homo sapiens
agcggcccatcttgtcttcgctgtagggcaggatctcggacatggcgggcgcggggtgggcgcggggcgggagcgggactgcggcggggcgcgggcggcgggcttgctgccggaccggccct

SEQ ID NO: 165875 - DNA, 122 bp, Homo sapiens
aggaggcattccatgtagcaaaaatggcattcagacacttcaagatccatgtgagaaaatcgttgacaccatcttatgtggggtcgaatgactttgagaatgctgtcttggattatgtcatt

SEQ ID NO: 165876 - DNA, 122 bp, Homo sapiens
gcaggagtcgctggggaggccgtgtgtgtttcactgtattaccaactatgtgacaggctgcgggtgtgacagaatgtgatcttgtgtcactgtgtgtgtgtgtttgtgcgcgtgcgcccgct

SEQ ID NO: 165877 - DNA, 122 bp, Homo sapiens
taatgtgcaacatgctttgacacaggttcttgcgcctctacttcccaggcccctcagtggcgcccacctttgttgtagcccggcgtgcgggggaaccgcccagcaaaccttcgcagagcctc

SEQ ID NO: 165878 - DNA, 122 bp, Homo sapiens
agctcatttgcatcagaacctcaatctcaatctggttgagagtttcctcacttgggaaaacggaaacctagggaagctaatgtttctttgctgccataggagagaaggaggtgtggagctcc

SEQ ID NO: 165879 - DNA, 122 bp, Homo sapiens
agttatctcccctggggagggaccttcaggaatggcctgatccctatcaggagagctgtccgctgttcaggatgtcaaaggttcctgttctgcttctagaagtcagcttttcctgggaggaa

SEQ ID NO: 165880 - DNA, 122 bp, Homo sapiens
cagctggtgcaggacacggggctcaccatcctgcaagtcaacaactggttcattaatgcccggagacgcatggtgcaacctatgatcgatcaatccaaccgcatagggcagggtgcagcctt

SEQ ID NO: 165881 - DNA, 122 bp, Homo sapiens
taaagcggaaggagggtggccataaacagatttttttgccccttcttaaaaggacactgccgctttaaaagtttctttcccgggcccccactccccgcatctccgtattttgggggagcgta

SEQ ID NO: 165882 - DNA, 122 bp, Homo sapiens
cagccagagtctggctctttccagaatgtgcagggtggggtgctgggaggactcgctgcacggaaccaggacccaggggccaaaagcttaggatatatcaaaccctctaggtgggtgacaaa

SEQ ID NO: 165883 - DNA, 122 bp, Homo sapiens
acacccactaggatggctgctgttttaaaaaagacaaaacactcttcctaagccggcgctcggcaagttctcccaggagaaagccatgttcagttcgagcgccaagattgtgaagcccaatg

SEQ ID NO: 165884 - DNA, 122 bp, Homo sapiens
gccggagtatcacacaacacaggaagctttattcatccgctgctggtccaaagagtgggtcgcagggtcactcactttaatatgctgtcatcttgggccggaaggttagaagaaaagcacat

SEQ ID NO: 165885 - DNA, 122 bp, Homo sapiens
gcgtccagcacacagcatgtcaggcagccccagacccggcttccttgtccatactggaggcggctccctgccgcacatcccgggcccctccccccagggccttgagcgccagggccgctctg

SEQ ID NO: 165886 - DNA, 122 bp, Homo sapiens
tcttacagagcatcaagtttccactggccagagttagaatgcaagctgtaacctaccagtcgtcctggaatgacccccgatcccttcctgtttcattgcattctacagatgaacacaaagac

SEQ ID NO: 165887 - DNA, 122 bp, Homo sapiens
gcgccactttgaagtgcaaagcagcaaagtgccgaacctgagcctaatcaaggtggccagcgccttggaccgcgagcgcatcccttcctacaacctcacagtttccgtctctgataactacg

SEQ ID NO: 165888 - DNA, 122 bp, Homo sapiens
gaccgagggaaggaaacaaaggcattctgtattcacctgcatgaagcagaaaagccagcccgaagctactggctgagcttctgccctaggtgcgtctcctgcgtgcagcgttgctgcaaggc

SEQ ID NO: 165889 - DNA, 122 bp, Homo sapiens
aaggagattcaatgggagggtgcctggctttcccagatgagatccccaggccggccaggccgactgcctctgagcatttccctaactctttccaaatgttgcaagagattaaaaagaccatt

SEQ ID NO: 165890 - DNA, 122 bp, Homo sapiens
cggggcctggtgaggtgtgggctggggcagctggtagcccgccccgagatgcattcagaacggatgtgcctccaacggtctcctcttgttcagcctcctggcaaggagcagagctggcggga

SEQ ID NO: 165891 - DNA, 122 bp, Homo sapiens
ccgagggcgggagggagactgtggagcagttccagacccgcttgtggacctgcacaactacgtcatcctctgcaacactgaccagaaagctcagcaacggcagcattctcaacaggaaagcc

SEQ ID NO: 165892 - DNA, 122 bp, Homo sapiens
agccgccaggctcagccccgctcccagcctcgctgcgcagccagagacctgctatggccacgtctatactcggggtaagtcgcaagcgcggcaacgcatttgcttgttttaaccggagtaat

SEQ ID NO: 165893 - DNA, 122 bp, Homo sapiens
atgtatttgtaaccctaaaatcaatcatcacggtactgtctggggttcttcccgggcatgcgcagagggtgaaaatttggagttggcggaggtaaggttcccagctgaagtttgaactggga

SEQ ID NO: 165894 - DNA, 122 bp, Homo sapiens
agggagcgcaccgccccctccgtatcctcgcggctacgccgggtttcagcgtgacaccctcgccagccgcctcgcctaacaaacttgacggatttgctccacaacctttcttctagctccgt

SEQ ID NO: 165895 - DNA, 122 bp, Homo sapiens
cgccccaggtcgctgagggaccccggccaggcgcggagatgggggtgcacggtgagtactcgcgggctgggcgctcccgcccgcccgggtccctgtttgagcggggatttagcgccccggct

SEQ ID NO: 165896 - DNA, 122 bp, Homo sapiens
gcgaaaggggcttggtgaggcccgcgctcctcggggtgggggcgcggggatgggtggtcgcgatgccgggagggcaggcagggccctggccgtgcttatgaagttggagctgtactctcagc

SEQ ID NO: 165897 - DNA, 122 bp, Homo sapiens
tcctcccacctcagcctccccaagtgctaagattacaggtgtgagccaccacacctggcccggaaaagctttttgagctgaggtcttgggggagagtgttctagaaagatgcaaaggcctaa

SEQ ID NO: 165898 - DNA, 122 bp, Homo sapiens
gcaggagaccagcctgggcagcataatgagacctacaaaaaaaatatccaggcatggtgacgcacctatagtcccagccacacatgaggctgaggtggaagcatcacttgagcccaggaggt

SEQ ID NO: 165899 - DNA, 122 bp, Homo sapiens
tttttttatgatgacatgatggggccagttgatcaatggggaaaaccccatgtggcaacacgccttctgtgtacattcccaatatttgctataaatagggccatcccaggctgctgtcagaa

SEQ ID NO: 165900 - DNA, 122 bp, Homo sapiens
tctaaaaagctccagctgtgggacctcgaagagcgcttcgtaaagggcttcttctctgcccggcaccccaaggaagctggggagaggtctttgctgtggatgaggcagggggcgaggaggag

SEQ ID NO: 165901 - DNA, 122 bp, Homo sapiens
caaatgtacctcatctgcattaagctgtcctttcttagaaaaccgaggtggcatatccttcgactgtccttgcagctgggataagagtccctgactctggttatggtagagctggcttagcc

SEQ ID NO: 165902 - DNA, 122 bp, Homo sapiens
ctcgcagcccctccctcatcctccgattctcgtaggcgtgcaccgtcacggtctaggtctcgctcagacaagccgaggaagaccacagtggcagggtttcatcctcggcaagttgtttacca

SEQ ID NO: 165903 - DNA, 122 bp, Homo sapiens
ctgctaattttctgtatgcacacagtagaggctcactcgggactacaggaagtgccaccccgagcccacttcctcaccacaggcctttatcccttacctttttatcttttcttttttttttc

SEQ ID NO: 165904 - DNA, 122 bp, Homo sapiens
ccccttagatgaggacaaggggctcaccagggtccctaacctgcctgcagccctgggcctcgctgggctccggcgccggtaagcaggaaagctagggtgccatcgcccgtctccgtctccgt

SEQ ID NO: 165905 - DNA, 122 bp, Homo sapiens
catacagaggccccaagagcggcctggccccttgacgtggtgaggactcagggaccgcgccgtcccagaaccagaaggctctccccaggcagtgtctgctggtacctggatcttggacttcc

SEQ ID NO: 165906 - DNA, 122 bp, Homo sapiens
ttcgtagaaaccaaggagagtcctggaagaaatgatgaggtaggtgtggtcctccatctccgagatgctccagcccaaatttcagtttaagattattgtgctttcacagttgctcagataaa

SEQ ID NO: 165907 - DNA, 122 bp, Homo sapiens
agcccaaagacaacgtgtcatctcaaagaagcaatacctggaggttcactgaaattggatcgaggcaactaccactgaattttcttaacaatagccatggggtggcaggagtttgggcaata

SEQ ID NO: 165908 - DNA, 122 bp, Homo sapiens
tctcctcatccttgaagatgatgtcggggttgtagttgggcacgaggtcccggaagcgctcggagccccttgccaccctcccctccgctggcccactggcgcccagggtccgctctggcacg

SEQ ID NO: 165909 - DNA, 122 bp, Homo sapiens
acacaacgtgcacacccagcgtaaatgcatcttctcacagtagcagatacacactcaaagcgtgtgtagatgtagggtgcagtttctcagacaccgtgcacacacatcctcactcaatgtgt

SEQ ID NO: 165910 - DNA, 122 bp, Homo sapiens
taacacatgcattgtgtacaggtatgtgtccaggcccaagaaaatgtgacaacaaaatagcggctgacatacgtggacacctcataacatattatgtagaggccaacactgaagagcactgc

SEQ ID NO: 165911 - DNA, 122 bp, Homo sapiens
agcatcatctctgccctgcgcactgcactagatgccagtagtagcactcccatcccaagtcgtgacagccaaaaatccctgtagatattgccagatgctccccaagggggtaaaaaaatcac

SEQ ID NO: 165912 - DNA, 122 bp, Homo sapiens
gtttcttccttctggtggggttcgtggtctcgcccgctcaggagtgaagctttggaccttcgcggtgagtgttacagctcttaaggcggcacgtctggagttgttcgttccttccggtgggt

SEQ ID NO: 165913 - DNA, 122 bp, Homo sapiens
tctttccttttccagaacaagttccagctgcctaaacaggctgaaagtctggggctgtttcggcgatcaaatgaccaaactagagcaggcaatggcttccacgtagatgaagctgagcattt

SEQ ID NO: 165914 - DNA, 122 bp, Homo sapiens
cacacagtgtgtgctaaataaatgctccgttcacccttgtgaagtttcctatgcctcactcgcgccagcaccgttcacagtgcccactggctgtatttatcgctgacataaggatgaggcct

SEQ ID NO: 165915 - DNA, 122 bp, Homo sapiens
tggcacccctcctttcagccgcacgccctcatccaccgtgggtggcggcgactcagactgcgggcacaggggcatcccaggcacccctaacacgcagccaacctccactggtgcgtcccccg

SEQ ID NO: 165916 - DNA, 122 bp, Homo sapiens
cgacaggacggcagctgctggggttttctacaggaagagtggtcggagcggcgccccccacgcctcccacgcctcccacgccgcccgcccgcacctcaccctaacgcccgccagcagcgctg

SEQ ID NO: 165917 - DNA, 122 bp, Homo sapiens
cagtccccgagctttatctgctggggccagccctgcccttgccaggcatgaattactgcccggctttctcggctgcagcggcagcgcagagaaatgccgggggtacaaacgcctcgaggtta

SEQ ID NO: 165918 - DNA, 122 bp, Homo sapiens
gctctctccccgcccctggcagcgggctctgcttcggaaactgttgactcagagggtggccgggcggccagcgtctgatgtcagcctggagctgggccagggagtgcagggcgggcggcgct

SEQ ID NO: 165919 - DNA, 122 bp, Homo sapiens
agaaagggcagcctgccagaagttgggtgtggagagaccagaaagagctgtggtgagggacgagtgtgggaatgttgacagcacctgatggtccaggggaggaattgaattcatacagtttg

SEQ ID NO: 165920 - DNA, 122 bp, Homo sapiens
tcaattcaccatctttactcaattttaagcaaaattttctcatgcgtatcattatggactcgtggcctctcatagattcaatgtgatttaatcaactgcaataattattatttttgctgctc

SEQ ID NO: 165921 - DNA, 122 bp, Homo sapiens
tgcgcgggaacgtcccaccggcgtctgctcatggctgggctgtggacccatacgcttgttcggaagccaagctctggcccacaggcgaccagaggaagctcgcaggccaggcgccagctccc

SEQ ID NO: 165922 - DNA, 122 bp, Homo sapiens
gaggggaggtgacctcccctggttcctcctgttttccagcctgtgtgctggaggagaccacggaggccacgggttgcgggtgttgtaaagggtgggagggcaggctgcttggatgtgtgagc

SEQ ID NO: 165923 - DNA, 122 bp, Homo sapiens
gacggcggccatcctccaccagccacgttccggggctgcgcttggcactttaactgcacccggcactaacccccacaacagccacctgaggtgcggactttaaatgcccccatcttattgat

SEQ ID NO: 165924 - DNA, 122 bp, Homo sapiens
tccttaatatgtcttagatgtttttatgtgttggaaaatttgaaataatattctttttaacggctgtagaatatgccaccgtatggctccatgtaagcagccgtcttctaagaaggactgga

SEQ ID NO: 165925 - DNA, 122 bp, Homo sapiens
cggttgtagttttcaaggtgaatttacacacacacacacacacacacacacacacacacacgtctgtgctagagctggagaccaggctagcacgtctctcaacaggataagaaattggctga

SEQ ID NO: 165926 - DNA, 122 bp, Homo sapiens
cagtcccttccccctctagagtttctccccggtgtctggaggcgtgggtgggacaaaacacgtctgtgtagagtcttgcatggtcgagagatgcttgagcagccgaggaggtggcaggtggg

SEQ ID NO: 165927 - DNA, 122 bp, Homo sapiens
gctgatcgccggcacgccaggctcctttgcaagagctggcgcggcagctttggagtgacccgtggaatcgcgccggggagcgagcccggtggatccagcgcgctggagggagagggcagagg

SEQ ID NO: 165928 - DNA, 122 bp, Homo sapiens
gggtaaaattcccgctcctgtcctctcctcgcttcccaccccccctccaacctcaatcagcgtatctataaaatggggccgctatgtgacgcgttgggtgcagtgtccagtccagcaccggg

SEQ ID NO: 165929 - DNA, 122 bp, Homo sapiens
ttatgatttggcttagtgtacgtgcagtgacccatgtgtgcatattgatcatcaatccatcgtggctttcttagctatcttggctttcttttgttagcagagcttacctgcaactgtagttt

SEQ ID NO: 165930 - DNA, 122 bp, Homo sapiens
caccgaataagcggaccctgcctggaaacttgagcgaagctgaactgcgccgaactccaccgtccagtgacccgagccagtgtggacgcccttttaatcacgctgtttacccaggtggaatt

SEQ ID NO: 165931 - DNA, 122 bp, Homo sapiens
gtgtccccgcctaccgccccgaactggccaattgcaaggggtttcacagggcgctgaactcgcgggagcgtcaccgtcctgcgacgcttcagaggatccttaggcctcagtggtctttgacc

SEQ ID NO: 165932 - DNA, 122 bp, Homo sapiens
caggtgtgaggggactcacgggggtgggtgaggtgggggaaggagcttcccagagcagcacgggggcccaagcccaccctcctcgccacccctgccccacgaggccgtctgggttggggatg

SEQ ID NO: 165933 - DNA, 122 bp, Homo sapiens
gggggctgctcaggggcggcttctctttaggtaaagtcagtgaatcccgatggccaagtgcgaggcatcggggagatcgcagaaagggtcgagggactcaggcccaagcctggggtgacaaa

SEQ ID NO: 165934 - DNA, 122 bp, Homo sapiens
ccacccaattctcatcttaaattgtaactgccacaattcccatctgctgtgggaggaatccggtggaaggcgattgaattaagggtgcaggttcatttcctgtgagtgaatgagtctcacga

SEQ ID NO: 165935 - DNA, 122 bp, Homo sapiens
agagcaaggccattggagtgtccagacccctgcaccccttcccctgggctgtctccacagcggccctgccaaggggtccagtccgatcctgccaccctggctgcccagatccgtgtcacttg

SEQ ID NO: 165936 - DNA, 122 bp, Homo sapiens
tttcacgcccggccctggccacctcgccagccgcatgtctcacgcaggtctcctcatgcccggcactcttgctgcccttcagaccctagtgtgtgccacctgcaccccacaaaccgacctca

SEQ ID NO: 165937 - DNA, 122 bp, Homo sapiens
cagtgcatatgaaaatgtctatgtgcgtacaaggtaggtctggactaagctctggccctccggttgttttcccattgcgggagcctaagccagggtgcccaggactcctgtgtggctggtgg

SEQ ID NO: 165938 - DNA, 122 bp, Homo sapiens
gcacacacccctctgagatcaggcagacccctcctgtcccctggacctgctgcacatgggcgctgacgccacagggcctcgctcctgggggtgggcctgcagcttgcgcaaggagcacaggg

SEQ ID NO: 165939 - DNA, 122 bp, Homo sapiens
gcttagttaaatctctgttttcaccgttttgtaattgagaaaggcatccgcagcagaagccgatttttcagtcggcttccttttgtttaacatagaaagtacctgtattaattttgatgaat

SEQ ID NO: 165940 - DNA, 122 bp, Homo sapiens
cttctcagcagcgccgcggccacgccccgcctcgttcccaccgcgcggggagcgggtccccgctcgggatgattcacttcgctccttacctggaggctcgcgcgtccccaccccttgcgacc

SEQ ID NO: 165941 - DNA, 122 bp, Homo sapiens
tccctgcctttacgaagcccatagggaagcaagtgagacaaacacaccactcgactatctcgagagggagacgcgccaggtataaactaaatgccctcagacggcacagggagggaggttcg

SEQ ID NO: 165942 - DNA, 122 bp, Homo sapiens
tgaccaagaataaatcacttaacttttctgtaaaattaggaaagtggtatctactttacacgcaggtcataatatagacctttttatgcaggtctaacatatagacctgcagacctgtaaac

SEQ ID NO: 165943 - DNA, 122 bp, Homo sapiens
cctccagcacgcgcagccctgaccacactgtgagcagctcacttggcaagggtgaagggccggagtggcgtcctcctgatgtggcttccttccagcctctaccacccctgggggcctcctcc

SEQ ID NO: 165944 - DNA, 122 bp, Homo sapiens
aaaaattttcctccttttttaaggctgaataatattccattgtatgtgcataccacatttcgtttatccattcatctgttggtggacacttatgttgctttcaccttttggctattgtgaat

SEQ ID NO: 165945 - DNA, 122 bp, Homo sapiens
gggccaacatggtgagaccctgtctctactaaaaatacaaaaattagtaggtcatggtggcgcgcgcctgtaatcccaactactcggaaggctgaaacaggagaatcgcttgaacccgggag

SEQ ID NO: 165946 - DNA, 122 bp, Homo sapiens
gggggatcgggaagccaggcctgccattggcaggcggggggagccccgaggtgtcgggggcgggtggagagaaccccaattcttaattatattttgaaatgttgatgcaggatgtttttgct

SEQ ID NO: 165947 - DNA, 122 bp, Homo sapiens
gccaggcatggtggcacatgcctgtaatcccatctacacgggaggctgcggcaggagaatcgcttgaacctgggaggcagaggttgcggtgagctgagattgcaccattgcactctagcctg

SEQ ID NO: 165948 - DNA, 122 bp, Homo sapiens
caccccagtgtcaactccacaggagcagagatttttgtcttgtttactgctgggtcataccggaactgcttggtaaacatgtctttgcatgaatgaacggagtgacacttcggtggccctgg

SEQ ID NO: 165949 - DNA, 122 bp, Homo sapiens
ggacaaacacaccccgttcttgggaggagacctcagaggcgctttgtaatgtggctctggcgccacctggtgattattcctagaatttttcctgtaactccaaggctaccagcgacagacaa

SEQ ID NO: 165950 - DNA, 122 bp, Homo sapiens
gtagccccggttctgccaggctgggagcgccagccatcttgggagttgccaggcagctgtcgccagcaggtagagggcgcctgcagcttgggcgcccaggtggtggagcacggcctaggcgg

SEQ ID NO: 165951 - DNA, 122 bp, Homo sapiens
acaccctccaacggggctggatgcccagggtctgctgcctccatgggatctggctgggctcgaagtcggggctcagcaaaggtatttcgtgtgaacgaggaatccacgggtcagacccgctt

SEQ ID NO: 165952 - DNA, 122 bp, Homo sapiens
ggttgaactagatgatctctaggggcttactaaactactagttctaccagtgtaaggagtcgatctgtcagccataaaggacagagcagaatttggaagatgccattattggcttcttggga

SEQ ID NO: 165953 - DNA, 122 bp, Homo sapiens
tcctggttgcgcgctccctcccatgtcttcattatctgatttggtaaaatatctacaagacgggggagtccgggctgctttctttgacactggtcatcactccacacctagacgctatgtcc

SEQ ID NO: 165954 - DNA, 122 bp, Homo sapiens
tgcccacttcggtgctgctggtgtcgcggccactgcggcctgcattggggcgggccaggtcgctgcttgtagggctgggcgtccgggtggtgttggtgctgggagtggtgctgaggtagcag

SEQ ID NO: 165955 - DNA, 122 bp, Homo sapiens
gcaggaggagccgcagacaaaactcctcagacacggagttaaagaaggaagtggtttattcggccaggagcatcgggcaagactcctgtcttaagagccaagctccccaagtgagcaattcc

SEQ ID NO: 165956 - DNA, 122 bp, Homo sapiens
caagttacaaacacagagtgtttgaagaccaaatgggagaaaaagaacaaagagtacatacgtgatagaaccagcagttgctcccacagtaagagtccttgaattagtgggctctcttctaa

SEQ ID NO: 165957 - DNA, 122 bp, Homo sapiens
cgtcaaacctccatcagggttgcaacgccacgttgccttggatgcctgcgtgagtggagtcgcgactcggggcccgcgtcctgagagacgcgctcccgcgccgcttctcgcctccggaccgc

SEQ ID NO: 165958 - DNA, 122 bp, Homo sapiens
ggctcctgctgaaggtaaggacagggacttccctgggccagagcggccgcgtgctgggcccgagccacgtcacagcgatccctggcggccggcgggcggagcggcgtgggctcagcggaggt

SEQ ID NO: 165959 - DNA, 122 bp, Homo sapiens
tcgccacgttctctgccaatccggaggcaaaaggtagacttcacgtagttgtctgctctccgccttatggaggtttttgtgggacaagttcatggcactttcttctcgcgcctctggatgcg

SEQ ID NO: 165960 - DNA, 122 bp, Homo sapiens
ggcccatggacatgagttcctcacccgtgtccctcttggggaaacaggtttcaggagcgacgggtcttgtagcctggggcagccaggccacctgggtgcagcaatgcctgaaggcctcctgg

SEQ ID NO: 165961 - DNA, 122 bp, Homo sapiens
ctgtgcatccatacactgcacacgcgtgcgcagacacacacacacacacacagacacacacgaagttggttactttctcagctgtaaccaggaggcagggaagaaggcaatgcagtcctcat

SEQ ID NO: 165962 - DNA, 122 bp, Homo sapiens
ccccagcctacttctccctgcaggtgatctcggcgcgcagggccttccgcgtgtcgccgccgctcaccaccggcccacccgagttcgagcgcgtctaccgagcccagtgaggcgcggcggga

SEQ ID NO: 165963 - DNA, 122 bp, Homo sapiens
cgagcacaccgatgagttcggggccgggcggccgcagagggcagagctatcgatgcgttccgcgctcgattcttcttcagacgggcgtacgagagggagcggctgagggcggtgtgggaaga

SEQ ID NO: 165964 - DNA, 122 bp, Homo sapiens
caaagacgacgggcaagaacgattgggcgtggcgcgcaggagtggtccccgcgaagacagcgtcagagggaagggaacacatcccagccacagccaggcaggagggagaagcctcggagctg

SEQ ID NO: 165965 - DNA, 122 bp, Homo sapiens
ggctgttccagtactcagcgtcaggccgccccagctccgtcaccgcccggaactcccccacgtcgctgtcgaagcgcacggactcctcctggttatagaagtatctgtccaggaaccgcacc

SEQ ID NO: 165966 - DNA, 122 bp, Homo sapiens
ttgagaattctcacctcaatttgtttcttcatattgctgtctccatcactgctggaacatcgctgagcctctctttttctcctgacaccaaacttaaaggaagcctgtctcctgggctacca

SEQ ID NO: 165967 - DNA, 122 bp, Homo sapiens
gccacatctctcgctctggatgtgctctccagatgttcttcttcctcttctttggcgccacggagtgctgcctcctggcagccatggcctatgaccgctatgcagccatctgtgaacccctc

SEQ ID NO: 165968 - DNA, 122 bp, Homo sapiens
taaatggatttaaatatgcagaaccatatacaactctccctgcctttcctgcaggctcagcgatatgaggcagcatcgacaatttatggaccgcacgcattatctgcttacattcagctctt

SEQ ID NO: 165969 - DNA, 122 bp, Homo sapiens
gcggggctggtatttgtgaatgtttcccttcggtgtggattttaagggatgggtcttccccgcccgcctcccaccgcaattcatattacatccactcttcttccttgcaggcaaacgagatg

SEQ ID NO: 165970 - DNA, 122 bp, Homo sapiens
acatagtagaaaacgagggctgcggtgctcgtgtgtggattctcgaaggcccgccagagccgctgccgcagggagctgcctgctggcagggctgggccgtccccggcctgctctgcctcctc

SEQ ID NO: 165971 - DNA, 122 bp, Homo sapiens
tgttttcctctgaagcattttgaagacatcctactgcctgtggctgtttgatttccctatcgttgcttgccagttcaagcaacgtgtctcatattttccagggactgtctcatgccctcact

SEQ ID NO: 165972 - DNA, 122 bp, Homo sapiens
ctgagcctggaggtgggaagaaggtccagtccgaacgcccagggcggtgtggggagtggacgcctgggggccgggaggacctacttagtataagaaaaggagagcaatgggtggtcagggcg

SEQ ID NO: 165973 - DNA, 122 bp, Homo sapiens
ggggaacctttcccgtttgcgccaacgcttggttaattcacgcagcactgtgaacgcatgcgtgtttccgtactttgttttccctgttggctaggtttttagctggtgctggtgctgccttg

SEQ ID NO: 165974 - DNA, 122 bp, Homo sapiens
ttccatgtgtgtatactccaccaggtctcttatcaatggacagtacaaacagtactaccacgaacgtccctgcactcgtatctttgtttacaactgcaagtgtttctgcagtatgaattctt

SEQ ID NO: 165975 - DNA, 122 bp, Homo sapiens
acactcacatcgctcagatgctttagctccgtgggcagtgtagtgctgggctcaatcagccgggaagaggaagcggctgtcgggatgaagtgaaaatggcagctgtaagggacggagccccc

SEQ ID NO: 165976 - DNA, 122 bp, Homo sapiens
ccagcagcgatgacatcattcctccctgactccgggaccgcggacaggcggcaggatccgcgcccagcaaggacttcaggcacgtaggcctaagatgatgggggctcttcccaaccagtgcg

SEQ ID NO: 165977 - DNA, 122 bp, Homo sapiens
agatgatggggcggtaatttattcaagcagagacgatcaccgggctcctgtgtctgccctcgcgtcagaggagccgtgcaatggcagggggagggcaggtgtgtctgactgcacgcaggaat

SEQ ID NO: 165978 - DNA, 122 bp, Homo sapiens
cgccaatgcaaaaaggaatatgcagcacatttttgccttcttctgcaccggtttcctaggcgcggtagtaggtgccaatttccccaacaatatccagatcggtgagtgagggggcagcctgg

SEQ ID NO: 165979 - DNA, 122 bp, Homo sapiens
ccaggacagtggcttgcattgccagggttgttcattctattccatcatctatctcttgtccgtccttccaacccagcatgagacattgtaggatgaacagtcttgccttcaggacccttgcc

SEQ ID NO: 165980 - DNA, 122 bp, Homo sapiens
gtctgactctgttcattcctgtgtccccagtacctggaaggacgccaagcacacagtaggcgcttaaaaaacattgagccacatgttgagaaaagaacggcaccattgtggctgcaagtggg

SEQ ID NO: 165981 - DNA, 122 bp, Homo sapiens
cacagctgctcctgggaccctcaccttgactgtgtgaatttctgcccacgatagagaccccgaatccacggctgtggcgggtgcaggaggaggaggatggccctgccggggcgtgtgtgcca

SEQ ID NO: 165982 - DNA, 122 bp, Homo sapiens
gctcgctgagatcattggacagacaaggcaggctgacgaggctggcctggcacgtgccaccgccctgccctgccggctccccgctgtggctgggctgctcgtgacctagcgagatgacactg

SEQ ID NO: 165983 - DNA, 122 bp, Homo sapiens
agcgggtagcgggctcagctggccggggctcaggtgagggcggcgggccgcgctccccagcgggggaggtttcttggccgggaaaggtacaattgtgtgcagctatttctggtatgtcaagc

SEQ ID NO: 165984 - DNA, 122 bp, Homo sapiens
ttaggcgcgcggacaacatgcgcatgctcagactctagactggccacgggtggccgggtgcgcatactcaggctctgagcgcactttggggtgcgcggattcgggcttcccgggattcgtct

SEQ ID NO: 165985 - DNA, 122 bp, Homo sapiens
agcctccagctgaggtgcaggaacttggagccgccagcagggtgggtgcggcgacagagtcgcttgccaggtctgggaagcgggcgccactcccgctttccaccccacacccctgaagtacg

SEQ ID NO: 165986 - DNA, 122 bp, Homo sapiens
aggtatgatgatacagctgatgactgaatctgatataatctgactgtattagactgatgacggtaatgattcatgccacacactctcgaggatcattaattgccttgcattcatcagtcact

SEQ ID NO: 165987 - DNA, 122 bp, Homo sapiens
ggagtcggagcctcacccatacgttttcttcaatgacgaccacacaaccatgacattcatcggcttccatctgcagcccaacatcaacggcagtgtcgatgccatcagtcacttgactggga

SEQ ID NO: 165988 - DNA, 122 bp, Homo sapiens
cgactgccacggggctcctctgacctgatggtgttggggtttgggtaggggaggggagctcggctgtcagaactccatggatatgtttctttggatggaggggagggcctttgttacctttt

SEQ ID NO: 165989 - DNA, 122 bp, Homo sapiens
tgcgcagggcgctcggagagggggcggggcctgagggcagagtcaccctggagctcaggtcggacgctggtgcaatcttgctatctatccccgggcagtcagcgcgcacttcagcagactcc

SEQ ID NO: 165990 - DNA, 122 bp, Homo sapiens
gtatgcttacatatacacaatggaaaaatttgcttctcaaacagcctgagtagaaaacctcgcatccccatggcaaccagattccactgtgaccacacatcaaatgggtgggtgacctggca

SEQ ID NO: 165991 - DNA, 122 bp, Homo sapiens
gcgccggtgctgccggccagcacctgggtacccggccagcacctgggtacccacccagctcgcttacttagcagcaccccttccggggtcgagagtcctgggcctgagcctgcagcctcggc

SEQ ID NO: 165992 - DNA, 122 bp, Homo sapiens
gaagatgaaaaagacaaacagattaataccgatcccatgcagtgggcactaccacagagacgtggcccagctactgcagaagcaattctctacctggcaaagctgaggacgttttgatagag

SEQ ID NO: 165993 - DNA, 122 bp, Homo sapiens
gctgcccttcgcctggttcgtggcgccttgtgacccctgccacctgcaagtcggtaaccgcgctgtgctcctgtgctgcggcctgtggctggactgcctgggatgccctgcctgctgctgcc

SEQ ID NO: 165994 - DNA, 122 bp, Homo sapiens
acttatgtgagatcacacagttagtcagtgcaccagactagaactcagttctaggtgcatcggatcccaagccagcaatcttaaaaacacattatgttgcctcaggagtaatcacgacacca

SEQ ID NO: 165995 - DNA, 122 bp, Homo sapiens
gagccaggggctgagggttgcaggcggctgtggccttggccaggcatcaccaccaggtggcgccgcgcgcttccctggcgcccaacccggaggccgcgaggtcggggagcggatgcccgggg

SEQ ID NO: 165996 - DNA, 122 bp, Homo sapiens
ggctgcagatgtcgtagacgagcacgaaggcgtccgtgtcctgcaagctccagtccttagcgtctggccactcctggggacaggaggccagggtttgcggaagcctcctttccactcttccg

SEQ ID NO: 165997 - DNA, 122 bp, Homo sapiens
ggggcacagacaaccccatgctgagaccctcgctgtgctgatggggatactgaggcacagcgcgggtagatggatccgaggtcggggaacaaagcggagacaggccgggaggcgccccccac

SEQ ID NO: 165998 - DNA, 122 bp, Homo sapiens
acgcctctgcccgactcccgggcttgcgcgcgcggctgcagcgcgacaggggcggggccacggccacaaagcagcccccgagaccacgtggcctccgagcagctcagggcgcccttgaaagt

SEQ ID NO: 165999 - DNA, 122 bp, Homo sapiens
ctctgtgtctgtgggaatgtcatcaagcactggtgatcctcacagatgcagcagaggtcacggtacatgccctgcacaggggaaggcacggccagtgggctccagccgcctgccctgagcca

SEQ ID NO: 166000 - DNA, 122 bp, Homo sapiens
gtgtcttgggtagggggtgtcattgcttctttaaaattcagtatctgacacctaccaagacgcagccggtaggactcaagctcgctgttggcttgaacattcaagcgaggcagggagggagg

SEQ ID NO: 166001 - DNA, 122 bp, Homo sapiens
ctgtagcgaagacacagtgcgggaagacacgctgctcaccctcacgccctgctaagctcccggggcgacgaggctgctgcgttcacactaataaaatccactggtgcatctgtatgctctgg

SEQ ID NO: 166002 - DNA, 122 bp, Homo sapiens
ggaggggaggacgagccgggtagaaacagtggatagaaacacggagggccacacggccaacggtcaggggactggcacaccagccagattcacccgcggcgatgccggtgcagagaagctcg

SEQ ID NO: 166003 - DNA, 122 bp, Homo sapiens
tgccgctccggtccggagagcctggcctcgacatctgtcccagcccggccgctgcagcatcggccctagtggggaaggtctggctgtaacttcttcacccacagctaagcagacacttggct

SEQ ID NO: 166004 - DNA, 122 bp, Homo sapiens
aatctatttcttcccaatatgtacatgcaaaggcccaaaggcattataacatataaaacacgtatttctattgacctatgtaataccttatctcaaattatcaaatttaacatcttatcccc

SEQ ID NO: 166005 - DNA, 122 bp, Homo sapiens
ccatttaacaaagaattactgagtcaggttagaggcacaatctagctgttagggatacttcgggaaacaaagcagaaaagacctccactctcatggagactacattctacaagaaaggcagg

SEQ ID NO: 166006 - DNA, 122 bp, Homo sapiens
agcagggtagggtcacattgagagtatggctctggagccagattgcctacatttgaaatccggttccattacttgccagctcagtgactttgggtaaattactttgccctttgcacctccgt

SEQ ID NO: 166007 - DNA, 122 bp, Homo sapiens
ctgtcttgcgtaataaatgcctgtggaagatgctggaagtggtaagggccctgaagccaccgccatggtctgtgtgtgttcccatccaaactgcagacagaaccacatcaaacccagccaca

SEQ ID NO: 166008 - DNA, 122 bp, Homo sapiens
agaaaaaatcctacatattaaaagagtgaaagaaggaaagaacacgataaatgcaattgacgcggaaaaagtattggacaaaattcaacaccctctcgtgactaaacactcaacaggccagg

SEQ ID NO: 166009 - DNA, 122 bp, Homo sapiens
caccgtgacccactcgctgtgtgtctgtgtgtacacacctaccttggagtggctttatcccggccctccccccggagcctctgtcccctgggtcctaccgcaggtcctcagccctccttccc

SEQ ID NO: 166010 - DNA, 122 bp, Homo sapiens
tgatccgtcccctgatgcatgactggggccaccggaggggctgaccctcccggagagccccgtcggtcctggtggtcttgggaccggagagcgacagatgtggaaaccgaggcccctcagtg

SEQ ID NO: 166011 - DNA, 122 bp, Homo sapiens
ctagctagctgtgtttccttaagcaagtgttatattctcagtaatttactttaaatacctcggaagggccagtgggaagcttatctgtgtgtgtgacttaacttgaatgtgtgccatggaga

SEQ ID NO: 166012 - DNA, 122 bp, Homo sapiens
ccgcctccgcgcggttctttctgacctcggcggcccccgtagctccgcccatcggagaagcgaccttacagcgcctgcctctttctgagcggcatgaagccacctcccaggcggcgagcggc

SEQ ID NO: 166013 - DNA, 122 bp, Homo sapiens
cagaccctcgatgacttattgacatgaaaacacaagaccctaccactgaaattgaagagtcgattctctccaccgttttctaaaacctgccttttcactgaccctaagctacagaccaccct

SEQ ID NO: 166014 - DNA, 122 bp, Homo sapiens
ccagcttctgtggagtccagtgttttgctttgcttgcttgtcccccatcctgtcctgagccggggccccccagcctcgcctccctcctcctaccatccctcacttggacctgggggtgtgga

SEQ ID NO: 166015 - DNA, 122 bp, Homo sapiens
ctcaccttctcatgcctcagaatcaagttttcacccagtcgtgatggaatttgacagcaccgcatcggatagtcctgacacacgtggttctctaatgtttgcatgcaaaagcagcgccgagg

SEQ ID NO: 166016 - DNA, 122 bp, Homo sapiens
cgttcatattattacgaacaggcttcagatgtacctaatcacaagaaactgagcttggggcgtgactgccttcagcattccttctgggtggcataggcagtttgtcagtttgccaacattct

SEQ ID NO: 166017 - DNA, 122 bp, Homo sapiens
agtcaggagccctttccctccagcgaaggggccgtgacgcatggaggagacagccctgaacgcacgtggtcgctggacaggttcccgctgcctcccttccccaggggcgagaacctgccaat

SEQ ID NO: 166018 - DNA, 122 bp, Homo sapiens
ggacaagtcgaagccccaccccgagggagatttgtgtccctgaatgtagtagttggtgtccggggcctgcgcagaagaggacagtccgcaaggggcggaagacaagacaaaaatgactccag

SEQ ID NO: 166019 - DNA, 122 bp, Homo sapiens
cgagcaccacaccgggctcccgaggctgcgccgttccgtactgggcggttttgcccgttccgcatcttcagaggctttgttcaggaagcaacatggctgctccctggagctgtttccgcatg

SEQ ID NO: 166020 - DNA, 122 bp, Homo sapiens
gcggacacctcgtggagtccggccggaagagcaaccgagatgaaggtgaagatgctgagccggaatccggacaattatgtccgcgaaaccaagttggacttacagagaggtaagataagttg

SEQ ID NO: 166021 - DNA, 122 bp, Homo sapiens
atattactcccaatatcgcccgggctgtacacgcccccttgtgatattgttcgtaatatccgtgggggaagggaagatggtattacttccaaaatcgtaaacacattgtgtgtacacccccc

SEQ ID NO: 166022 - DNA, 122 bp, Homo sapiens
cctgtgcccctgcctgccctttgactgtgcctggggagaatttgggtggggaggagggctcggaaggtgcacaacaggtgggaactgagttcacaaataagcttctccccagaacagaacat

SEQ ID NO: 166023 - DNA, 122 bp, Homo sapiens
atatttgcatctcctacactgccatctatcccagggtctgcaacctctgcctgggagccacgctggccagcaggctggttttccttggcaggcagcctggaaatcctcccaccccagctgcc

SEQ ID NO: 166024 - DNA, 122 bp, Homo sapiens
tgggatggcctggccgggcacgctctggagacacacatgccaaggcagggcctgggcagccgagggcccgtgggggctgttccgaccacacaggtgcccgagggaggcagggcaggccccgg

SEQ ID NO: 166025 - DNA, 122 bp, Homo sapiens
gaggcggtgcagggcggggatgccggggtccccgctcacctccatgcctggcctggcaggcggcatgagactgcctcgccccgcccagtcccactcccacggtgacgcccgccaggcagtcc

SEQ ID NO: 166026 - DNA, 122 bp, Homo sapiens
gctcaatgttcttagcaaaacacttctcctctttgctggtgttgctggcctggcatttaacgtgcccttaatgcaaggaggaaatgcaagcggagtcgggtctgaggggagtgagcgccagt

SEQ ID NO: 166027 - DNA, 122 bp, Homo sapiens
tatgcgcttctcacaccctctctgatcacaggtgcttctcataccctctctgatcatatgcgtttctcataccctctctgatcatacacttttcataccctctgatcacatgcaccttttcg

SEQ ID NO: 166028 - DNA, 122 bp, Homo sapiens
agttccctcaggcgactcgtcctgcgcatgcgctgagggctggagctcgagaactgaatgcgctcgccgggctgagcgtgcgtggatggaggcggtcggcttcagcacgcatgcgggttccg

SEQ ID NO: 166029 - DNA, 122 bp, Homo sapiens
gcgcaggagcaagagctcgagcggtagcgggaaaatcaggactggatcgcctcggagcctcggcccggagtgggtcaccggcaggggcggggctccccctgcaagggggcacggcgtcgagg

SEQ ID NO: 166030 - DNA, 122 bp, Homo sapiens
catcaggtttagagctggttgtgtgggaggaattcctttcaccctgccaatgtgttccttcgcagacctgaaaacggggaccgagactccccttctctggggccgaagcgcacgtccgaaga

SEQ ID NO: 166031 - DNA, 122 bp, Homo sapiens
ccgcgtaccgccacctcttctgcccggacctgctgcggtgagcggggcctgggaagcgagcgcagccttggtgcggggtccggtccgcgggcgccggcgcccccacgtggtccccgagggct

SEQ ID NO: 166032 - DNA, 122 bp, Homo sapiens
cgggtgctgctggttggtgtagtagctgctgtcggtggcggtggacaccggaagggtgggcgactcctggggcttgtggaggctgctgctgctgctgctgttgccacccgggccggcgccgc

SEQ ID NO: 166033 - DNA, 122 bp, Homo sapiens
cctagcctagctctgtagagtagaaaccaggcctgctggtctgagtcactctgtgtcccccgtctcagcacagtacctggcacaaaagacatccttagtgtctgtggaatgaacaaatgcgt

SEQ ID NO: 166034 - DNA, 122 bp, Homo sapiens
gctctgggctgggagggggccgaatcgccagtctaatctccccggctggccgtgcggaggcggagaaagtaggtcacagccgccttcccgccccccgcggagccccctcgggcggggggtcg

SEQ ID NO: 166035 - DNA, 122 bp, Homo sapiens
ggacctggcgcttggcactgtgcagccacggggatgaggctgagcgccggttatcggcctcgtggcgccactggggccacagcctgacttcacctccccgtcgcccaagtcgtgtgatgggc

SEQ ID NO: 166036 - DNA, 122 bp, Homo sapiens
ggtgtctatagatccacagattccatagtgttcctttgaaataactgaaaatgtcattctcgctgttagttaaagacaaatgccagatatggtaacacagttataagtgctaattatgttat

SEQ ID NO: 166037 - DNA, 122 bp, Homo sapiens
tcaggggtgctggggcggggccctgtcaactgtccatccggggaagggggaagggacagtcgccctccgtccattcctttagtgctgcgccgacagcggtcaggatctcggctttcttgctt

SEQ ID NO: 166038 - DNA, 122 bp, Homo sapiens
tattctctgcatctattctctgcctccatgcgtctcgggaatcatggattacgtgaccttcgtgctgtggcttctctcacgtagcacagtgtttgcggggctcacccacattgactcatgca

SEQ ID NO: 166039 - DNA, 122 bp, Homo sapiens
gaggaaggggaaccccttcataaagttcagagtggctgggtagagtgagttgaagaatgccggaggccgtcagcatggccaggctattcacacaggccacagcagaaaagagagcacctgtg

SEQ ID NO: 166040 - DNA, 122 bp, Homo sapiens
cttcctctacccggcctcccaaacaccaccccaatctagtttagccccccgccccaccctcgctgacctaataaggccatgcagtgtgcgggggagctacataaaagcgcgggctcgcggcg

SEQ ID NO: 166041 - DNA, 122 bp, Homo sapiens
atctcttcagcgagggtctttctttcaaaactcgcactgaattaagggtcatggctactccgtacccggctctcaaaggcacggcacctttgaattaggttgcggagtggcctgggcgaggg

SEQ ID NO: 166042 - DNA, 122 bp, Homo sapiens
tcgggggttggctgtgtccagcctatactcctgttctgtggagggaaatgggatgagcatcgggagaatcttgggtgggtggtaccccagccagtttaccttggttctggtgtaagcgcccc

SEQ ID NO: 166043 - DNA, 122 bp, Homo sapiens
ccacacctatgaggccggttgcatagccatgctgctgcaagattcttgcaaaagtggtttcgttctcagggagtccacctgagcctgcgttccactgaagggcccggtatccattgctggcg

SEQ ID NO: 166044 - DNA, 122 bp, Homo sapiens
ttcacctcccacccacaggttcaagcctcctcagtatctgagaaaggcgcgaagcctctacgcagttgcgacccgaggcgagcaacaactagcgcatgcgcacgtgagcccgcggcgcacgc

SEQ ID NO: 166045 - DNA, 122 bp, Homo sapiens
aactcgtgaataggttgttacgaacaaagtctagagcagagcccgtgtacagggccgagccgtccaggggcttcattttccgcacagcggttatgacttccctttttgttggatgggtattg

SEQ ID NO: 166046 - DNA, 122 bp, Homo sapiens
ggcctcttagggtcctggcgcgccccctcccgggaggagagggaacgggcgtgcaggcggcgcgtgggcagcggaaataaagctcccttgagtcccaatagtggaggccgggtggacttagg

SEQ ID NO: 166047 - DNA, 122 bp, Homo sapiens
ggtctggggccgagaacgtgaccgcagccgggctcgccgggagttctaggtaagtccaggcggagtcattgcctctgcacccaccctgacctggtgggtcaggtccagaaggtctcatggag

SEQ ID NO: 166048 - DNA, 122 bp, Homo sapiens
tccactcccctgagggtgctgggtccttacaagaaccagtagagcagctgtctccggaagcgcagccccaaggaggcattggtgatttgaagcatcagctcctgctgtggctggaaatcgag

SEQ ID NO: 166049 - DNA, 122 bp, Homo sapiens
cttcactcctgaagccagtaagacaacgaacccactgggagaaacaaacaactccagacgcgccgacttaagagctgtaatactcgctgtgacggtctgcagcttcactcctgagccagcga

SEQ ID NO: 166050 - DNA, 122 bp, Homo sapiens
ggtcagggtcacgccaggtgatcagaagcccccatgtcccgacccacgtggtcagggtcacgccaggtgatcagaaggccccacgtcccgacccacgtggtcagggtcacgccaggtgatca

SEQ ID NO: 166051 - DNA, 122 bp, Homo sapiens
aaccctattgtgaactgtgcaagaaaggtatgtaggctgcccgctccttatgagatctaacgcctgatgatctgtcactgtctcccatcaaccccagatgggaccatctagttgcaagaaaa

SEQ ID NO: 166052 - DNA, 122 bp, Homo sapiens
atggaaacaaaaatctagtcggtttggatgcaggagtgatggggactcgcgaacacagcacgtggtgggacagaaagaagagtgcgttaggccggggaggaaagagggggcgtgtgagtctc

SEQ ID NO: 166053 - DNA, 122 bp, Homo sapiens
ttctgatcatgagacctttccatctgaacagattgtttaatcccagccctggatgagtcacgccccgcctccagcctttaatgaaccttcaggtcagtggaagcaggagggccaccggtgtt

SEQ ID NO: 166054 - DNA, 122 bp, Homo sapiens
tctgtgtccacagtcagcctggggggcagcttcctggatctctgtgtcccaagagcagcacgctggtgcacttgccacgctctctcacacgagactgctccgtggaagcccttcctgctaca

SEQ ID NO: 166055 - DNA, 122 bp, Homo sapiens
agcgcagcgcgggggccggtctctgctgccccctggcgggtggctgcggtgagaaggcggcgcggagcaggtgttgggaggggaggaccagggcgcgcagggaggtagggagggaaggaagc

SEQ ID NO: 166056 - DNA, 122 bp, Homo sapiens
ggagtgcgcgtcgagtgcgcgccgagagagaagcggcgcgcagcggcgtcctcccggatgcggacgcgcaacttgaagcaactttaaggtgagcagctctctgttccgtccctgccccctat

SEQ ID NO: 166057 - DNA, 122 bp, Homo sapiens
ccagaccctccttccctggcccggtctcccggagtgccgggcttccccactccccactcccggtgtccgctggacttcatggcttcatttactctaatggactatcttagactgcaaagcgc

SEQ ID NO: 166058 - DNA, 122 bp, Homo sapiens
aaatacatcattcctttttctttcacttggtttattaagttcatctagggtttatctactcgagtgaagtaaaataaaatattcaattagtacagtgaatacaggtgaccagccagatgatc

SEQ ID NO: 166059 - DNA, 122 bp, Homo sapiens
ccaccatgtgttgtgggagggactcagtgggaggtaactgaatcatgggggcgggtttttcgtatgctcttctcgtgatagtaagtctcacgagttcgttataaaaggcagttcccctgcac

SEQ ID NO: 166060 - DNA, 122 bp, Homo sapiens
cctgaaagccctgctttttccaacagttccattgtgaacgtgcctggtgagtctactcttcgccgagatttcctgagactgcagcaggagaacaaggaacgttccgaggctcttcggagaca

SEQ ID NO: 166061 - DNA, 122 bp, Homo sapiens
ctgctccttcgagccgtgcacggcctgagtcacaggaaaagcccagttctgctgagtggacggctgcaaggggaggctaaatatggctcatagcagtaccagacaccagcgattcgagagaa

SEQ ID NO: 166062 - DNA, 122 bp, Homo sapiens
caggtaggaggcggctgtaaggtagttgacgatgtccctaacagcgaattccaaggcgcccgtgtagcaggagaggagcaagtcggccacgatgcgtgcactgtgcatcagggagacctgca

SEQ ID NO: 166063 - DNA, 122 bp, Homo sapiens
cagggccggcgctcctcaccaacgcgctgcagctacgggctcaggagggagccgcagcgtcggaggaggaaagcatttaagaatagcacaaagccttaggctcgaggaagcgtgactgctta

SEQ ID NO: 166064 - DNA, 122 bp, Homo sapiens
cccggaagcccttgtcatgtaaatagctgtcggggactggtgtattgtcgccgccccagccggcgggacctggggcgaatccacacccattgtctgctgcccaaggggcctccggctggggg

SEQ ID NO: 166065 - DNA, 122 bp, Homo sapiens
agcccagaaccgagttccagaggactttataactccccttgagcctcgctggactgagttcgtgagtctggaattatgtggtgttctttcagttaggccatccttgaattcacctgagtttt

SEQ ID NO: 166066 - DNA, 122 bp, Homo sapiens
taacaatagggctggttgttagtaattctacccttgctatgagtgctcattaaaaccttacgttaaatttatcattatgatttggacaaaatgaagaagtataggcatcaaaatgaagaagt

SEQ ID NO: 166067 - DNA, 122 bp, Homo sapiens
ttttgtttgtttgacagcggggattgttctgctggcttctccagcacgcattgtgctccgcggtgtcgagattgacggtgggagaaacagattagattagtggagtctttctcgttggggag

SEQ ID NO: 166068 - DNA, 122 bp, Homo sapiens
gaaaatttaagctgcgaatgctcgtaaagaaattaggtaaaaataatggagaacaaaacccgcaatcggcttatcaatcggcttactgttgacacgccacgccactcagaatagtatctaat

SEQ ID NO: 166069 - DNA, 122 bp, Homo sapiens
agatgcagccagtgtggagaaggtaagctgggtactggatttcagcagtctcagtggaaacgatttgaattctaagaggacacctttcttaaagcatgactagtttgtgtggtctgcatgtg

SEQ ID NO: 166070 - DNA, 122 bp, Homo sapiens
ctgtcttctccatctggctggggtgttcagagcaggaagactgggttcctggtgaggtctcgagcaccccagggaggtctgggggtactgatgggatgggaaggcctccactggccatgagc

SEQ ID NO: 166071 - DNA, 122 bp, Homo sapiens
gacctcacaacacttttcaaagtgcgtcttcacctaccctttcctaaatcttcaccagatcgctattgtacgagtgggaggctgaggctcagaggagctgcgggaccagaggaaactgggga

SEQ ID NO: 166072 - DNA, 122 bp, Homo sapiens
agcttacatggccacaccattcctcgtgtgtgtgtgtgtgtgtgtgtgtgtgtgtgggcgcgcgcatgttagggtaatccatttttctgtttgtttctgaattgctttggagaaggcaactc

SEQ ID NO: 166073 - DNA, 122 bp, Homo sapiens
tttgggggtctgtgagggcctgggcaacgccggcatctgcttcggaacctcaggggttttcgtccactccccatccggagcagcctctttgctaggctagatccagacgaccgctccccaag

SEQ ID NO: 166074 - DNA, 122 bp, Homo sapiens
cttacaccgataacgtacacccattggttgtctagcacagaatagcgaggttctgcacggcgagtctacctaacaacactcttcagagcaaaccccgtttcggcgatggctacccggaaggc

SEQ ID NO: 166075 - DNA, 122 bp, Homo sapiens
aggaaaatatgcagaaaacagaagtgaagtacagaaacagtaggattggttccagcttggcgtttgccttacttaaacatgggttttcaaagttggctgccttggattggctgaaactcagt

SEQ ID NO: 166076 - DNA, 122 bp, Homo sapiens
atcatcgagacggcggcggtggtgggctagacgagtttcgcgcggccgctcgccgtcccccgcccagtcgtactcggcgccccagctcggtgctgccgccatcttcttggaggacaggagga

SEQ ID NO: 166077 - DNA, 122 bp, Homo sapiens
ggtggacaggcggtgtggacggtggacaccgtgatgaggacggtggacaggcggtgtggacggtggacactgtgatgcggacggtggacaggcggtgtggacggtggacactgtgatgcgga

SEQ ID NO: 166078 - DNA, 122 bp, Homo sapiens
cctgtcagccgctgctttgtctccttagctcgggtcccttctgcgctgccgcagggaggccgcccgggccaggcgagccgaaccaatgctggacctggaggtagtgcccgaacgctctctgg

SEQ ID NO: 166079 - DNA, 122 bp, Homo sapiens
ctggcgcggggagccggggttgtgaggggtgatgtcctcaggcggcggcgctgcggggtgcggcgaggacaccggtggggtgagagcaccggcggggcagcagcgggggccgcagcgccggg

SEQ ID NO: 166080 - DNA, 122 bp, Homo sapiens
tgtgcgccgagccatccaagctcgtgggaccggactggtgccgggttgcattctggtccccgaggatgaagtaggagggggctgggccggcctggcttgtgcgctccgttctgtcccagcgt

SEQ ID NO: 166081 - DNA, 122 bp, Homo sapiens
tctgcctctcagggcctctgccgaaagcgtggggcacgtgactgtgacggcatgggttggcgcatgcgcttcgttcccggagtggctggcggcggagttttcgctggctactacgaggccgg

SEQ ID NO: 166082 - DNA, 122 bp, Homo sapiens
atggcaaaacaacgctaagaaatattcagatggagcaggcggctatgtgcagaaagccggcgcccgcacacggttagccaggaccgaccggtagctagtgacgccagacacggtggagaaag

SEQ ID NO: 166083 - DNA, 122 bp, Homo sapiens
aattcattcattctttcattcatattctccgctgttgttaattttcccattgacagtaggcgcaaggggcaacgccactcgccctgtccctctagcgtggcctctgtttgggggtctggggt

SEQ ID NO: 166084 - DNA, 122 bp, Homo sapiens
ccggggctctacagctcacccgggccctctcataggtctgggcgcctaacagctcagctgcgacctcgcctcaaacgcgtggaactacacttcccagaaagccagcgtcctcccgtggactc

SEQ ID NO: 166085 - DNA, 122 bp, Homo sapiens
ttatcttttacatttgcacacgttatctccatctatgtagaacagagtctgacagccagacgtgcatggatgaaaacttgactgacgccatgagtatgcactagaagagtccaaaaaagact

SEQ ID NO: 166086 - DNA, 122 bp, Homo sapiens
gggccccgctgagagtctccgggcagggggtcaggctccgcggggcccggcgctggccaacggcttcccaagtgcgcacgaggccctgaagagcgcacccagctccttcgcgcccgctggga

SEQ ID NO: 166087 - DNA, 122 bp, Homo sapiens
gggtctgaactagagtggtgggaaggacactaaaaaggaagacccagattcgagagacatcgcaggcaggaattatgaactgaattgtgctcctcaagcacaatggtcaacaatgttgccca

SEQ ID NO: 166088 - DNA, 122 bp, Homo sapiens
tctatcacacactgtccagagcatgtctttttctcaattatgtttattataactctaatccggttcttttcatgggattaaggtgacacagaggcctggtgtccaccatcttggtctgttct

SEQ ID NO: 166089 - DNA, 122 bp, Homo sapiens
ccgtccgcccccacaccacccctgccttcacgtcctacctgccggcaggcggactcagcccgtgcccaactgctcgtcggaccccgttgtctggggagccctactctttccgcggctcccgg

SEQ ID NO: 166090 - DNA, 122 bp, Homo sapiens
attccatgaggtgcgcgaaggccctacttccgctttcaccttggagacggcgactctctgcgtactgattggaacatccgcgaaatgatacgcctctctgcaatgctattggtcgaaatgca

SEQ ID NO: 166091 - DNA, 122 bp, Homo sapiens
agctacccgcagccgccgccatctttgcggaagcgcagctaggcggcgcttctctcccggcgccgccgcctaccgcttgggaactctcgcgacatccgacaggcttccgccccgcctaccgg

SEQ ID NO: 166092 - DNA, 122 bp, Homo sapiens
agccaagtccgtccaggacagattgggtccgagagtggacacaagttttgcagcgcagggcggcctcagcttaggaccgattcgagaagctgggctggctggctggctggcgctgggctgta

SEQ ID NO: 166093 - DNA, 122 bp, Homo sapiens
gggacccagaatcagggtgtacagggatggaagatggggagagagcaaggcagccactcccgacccctccaggaaagagctaggagaacccaggcgtcaggctgcccagtccgagccccgtg

SEQ ID NO: 166094 - DNA, 122 bp, Homo sapiens
atgtaaaacccaggatgagtattcgagtcttcagatcattcagagcttttgggctccatacggaaagtgactgttagattaaatgaatattcccagcccccaccccattaatagaaaatgag

SEQ ID NO: 166095 - DNA, 122 bp, Homo sapiens
cactcacccaccgtatacatagttgcacattgatgcataatagacatatacttgctgctacggaaggccttgtattcctgtctctcttcctaccacagcactcctgccatcccacaggtaat

SEQ ID NO: 166096 - DNA, 122 bp, Homo sapiens
tgttctgaggaacgtggctgtaggtcagagtggcacagagtagggtccaatgaagcatggcgtccacagtagctttcctgactggactaacctttccggacacaacagcagggcaggggtgg

SEQ ID NO: 166097 - DNA, 122 bp, Homo sapiens
atcgaggtaagggccatactgaaggctgcttctcgctctgccaccctccggtgcttatagcgtcctcacttgatcgtattttcaatggacggaacagcataaagacgttcgatgtcaacatt

SEQ ID NO: 166098 - DNA, 122 bp, Homo sapiens
tttcattcagggtctggctccgtctcagtaactccttggggaaagcgatggagaagggctcgctcacgcagcacttctggcagtccctgaaggaccactacctcaagtctcccaggctggag

SEQ ID NO: 166099 - DNA, 122 bp, Homo sapiens
cctacaccgggagaggggcaccacacgtgggtgagcacacggcgtttgacgtcatcagctcgggacggctacgctgcgccctcccggcctcagcccctcagcggcggaaacgccagtcttcg

SEQ ID NO: 166100 - DNA, 122 bp, Homo sapiens
ccccgtccccattcggtcactgccacgggctgtacacctgagggggaaggacgggggcggcggcgcgaggaggaagggcttcgccgccaatctgtccctaaccagtctgcctctcaacccct

SEQ ID NO: 166101 - DNA, 122 bp, Homo sapiens
aatcttcaaatgagaacaccaaaaaccaggggctaagtctctctgctctagtttctagtacgctttataccaaacatgaaagatccaaatgtttggctcaggataagcgaaaggccagaaca

SEQ ID NO: 166102 - DNA, 122 bp, Homo sapiens
ctgctcagcgctggccgctgttatggtataaaatgcaaaaggctgcgagggccaggtctgcgcttcccaggccacctgcctggcacctccctcgccagctccggggttcccgcctagccttc

SEQ ID NO: 166103 - DNA, 122 bp, Homo sapiens
cgggcttagcaggaaagggtgcctaaggtgagtgcccacttgcgtccgatcctctgggggcgatgcagggtcggggcgcctcagtgtgtctcgctgcttgttctggttgcagtcgggaaatg

SEQ ID NO: 166104 - DNA, 122 bp, Homo sapiens
cggaaggttgaggatttccttctgcctcctgtggtacatcctccaaagggcgatcttcctcggcctttggcatgttctgtggttttccctcattttcttcacaagacttttgcatattgagt

SEQ ID NO: 166105 - DNA, 122 bp, Homo sapiens
ctctctgaaattcagggccattttcagacactggagccaatgagggaagtatgacacaatcgaacatttttcttatctggcagtgtggtctggtggttagcatacgggctctgccagtcgga

SEQ ID NO: 166106 - DNA, 122 bp, Homo sapiens
ttttaaagaggcaggtgccctaggatttaacacaaacagttcaggtaagaaacctaaagtcggcctggtgcggtacgtcacgcctgtaatcccagcactttggaaggccgaggcaggtggat

SEQ ID NO: 166107 - DNA, 122 bp, Homo sapiens
acagctgcaaagttcagggagttgaactgcagtgctttcagttcactgctcactctgccacgatcaatctctgttgtaaattttcctcccagagcacgtgacgatgcacttcttgactatat

SEQ ID NO: 166108 - DNA, 122 bp, Homo sapiens
agagcgcggggagagggaggcacaacatcacacaagatgcctcgcagccgcgtgcacggacgcgcggacggagccccgcttccccggcagggacaccgcgggtgagagaggccccaggcggg

SEQ ID NO: 166109 - DNA, 122 bp, Homo sapiens
gctcaggctgatgccacggaggggttagaaatcagtatttcgggaacacatgtcagtgctcgcagctggctgggtgtggacagacacctcggggtgaccgctgagtatattttgtggcccca

SEQ ID NO: 166110 - DNA, 122 bp, Homo sapiens
atgaccttggaagatgactttatcctccctgggcctcaggttccttaagagcacatgtctcgtggtcactcctgatgaaggcagtgatcacgtggcaaaggggtggggcacagtagtggtgc

SEQ ID NO: 166111 - DNA, 122 bp, Homo sapiens
tcataatggcagagggtagggaaccggttggactgcagtgaacccagaagaggctgtcgccgaccttaaggggcactgtttgcctcaggaatcgagtccagggggctaacaccaccgggctg

SEQ ID NO: 166112 - DNA, 122 bp, Homo sapiens
agcgacagagcaacgtcgcactgcattcttaccaaacacccaggtgaacgacgcatccaacgatttgggagctcaggacccatggtccctaaaaggcaacaattaagactcccatttagacc

SEQ ID NO: 166113 - DNA, 122 bp, Homo sapiens
ggtaccctttctaccacttcccgttaatttcccaccttctgctagggacctcaggccttccgatggtcccagggtgcaatccaacacttgcactatctatacctcttgtcctgttttatttt

SEQ ID NO: 166114 - DNA, 122 bp, Homo sapiens
ttgcatttcatgctgtatttagacattccggtgggggcatgctcataccgtgctgaagtgcgcggatgctgaggtcgccgggccgtcactgctcctgggttcttctcctccttatcgtccaa

SEQ ID NO: 166115 - DNA, 122 bp, Homo sapiens
caggcagcaggcagccccgtcccctcccctagggtgtgcctgggtgactcctgggctggccgactgggagctagcctgagtgtaggttttgagtctgagcaccaggtcctcaccctgcccct

SEQ ID NO: 166116 - DNA, 122 bp, Homo sapiens
ccaaaattcacatgcctctcatttgtaaccagcagaatctaacatctttgaattccaattcgaatcctgaattggaagaatatggttggcccttttagggggtcatgtatccactcttgttt

SEQ ID NO: 166117 - DNA, 122 bp, Homo sapiens
cgggcagtacgcgagggaaccattctgatcctcgccaacctgtgtgcccagggcctgattcggcctgcactgggcaatgctggtggcgtggaggtgctggtagatgagctccggcagcgccg

SEQ ID NO: 166118 - DNA, 122 bp, Homo sapiens
gtcccgtgctctgccccttgagacacgcagctgagggtgcttagggtgccgttcgttaggcggctgctggtcaccgagagtctccttttggtttctcactccgtggtcatttgggtccctgc

SEQ ID NO: 166119 - DNA, 122 bp, Homo sapiens
ccccggctctggcccgcgcccccgccccccggcgctaaaaaaggagtgcctccgacccctcgtccccagcgctccgcacgcggcacagtgagacccccacccgctcctccccgcagggcgtg

SEQ ID NO: 166120 - DNA, 122 bp, Homo sapiens
gggtcgccatcgatgtacaggggtccgagcccagactttggggggcattttaaggcacagcgtgggaaggggaggctgcaggcgcgctggcggacttggggctggcggagcccagccgcggg

SEQ ID NO: 166121 - DNA, 122 bp, Homo sapiens
ctgataactgactgttgcaatcaagcaggtgagctatgatagggacttatgccagggcgacgacagcaaagggggcaaaaagtggttgaattcaggggttgacataagctcaagtctataag

SEQ ID NO: 166122 - DNA, 122 bp, Homo sapiens
cgcctctctctgcttctttggtgggctcacgaccacctgtcgcatccctacgcgtgcctgcgccccttcccaggcaccaaaagccttgcgctccggactaggggcttgagatccggggctgc

SEQ ID NO: 166123 - DNA, 122 bp, Homo sapiens
gaagagaggagaggtttagagtcaaagagccccaaacattagtgagagtatatgtatgaacgtttggtcatcttagaacagtggttggcatccacaggagaccagcagaatcacatgggcgc

SEQ ID NO: 166124 - DNA, 122 bp, Homo sapiens
ccgggacatccatttgtagtggcttccgaccccggtagcggtgctggagatggcagagctcgggatagccatctcagatgaagcagggagaagggggccccttaagtgggaactgaccattt

SEQ ID NO: 166125 - DNA, 122 bp, Homo sapiens
ccgccgcctccccttcgcctggctctttccatcttcagctgcaagtaacaaacagacacacgggatggggtgggggaggggtgttgagaacaatcgcagacgcccctcggcctgaccgcccc

SEQ ID NO: 166126 - DNA, 122 bp, Homo sapiens
gtcaggctttctgccgtcttggaaacagacaccgacaagcaacagggttcccatagtgcccgggcacttcggacccgctgcgggaccttgggcaaactcttttagcctcagcaccttcctct

SEQ ID NO: 166127 - DNA, 122 bp, Homo sapiens
ttttaccctttctaaggacttgtgaataaatgcgtggaactgcaatgtgcatacagtaggcgcccaagcgggggcagtgcagcccctgctccccgcccgcgggtgccttcgctgatgagcct

SEQ ID NO: 166128 - DNA, 122 bp, Homo sapiens
tgctggggcttccagcaatccggggccggagccggggcgcgctgcgcggggctccagtttcgccaaccccggtgctatttaaaggtgtcaggtggctcggcagtggctcctggccccgggtc

SEQ ID NO: 166129 - DNA, 122 bp, Homo sapiens
acacagtcatcgccacatggtcgtcgtcacacggtcaccgccacccagtcacctgccacacggccactgccacatggccatcgccacacggccaccgccacatggccatcatcacacggtca

SEQ ID NO: 166130 - DNA, 122 bp, Homo sapiens
acatgcgagtttacatttgtttgctgagagaaccacatactttaggctcagcctgaggagcgactcactgtattcagggatggtcaggatccagatatgccagagtcagtgggaagcctcca

SEQ ID NO: 166131 - DNA, 122 bp, Homo sapiens
atgtgatgaagccgggggagggcgggcaggtcgctccttccctccccggcagtggccagacgtgcctggagtcacagggtagaacacgtagctccaacccacccactcgctcccatttaacc

SEQ ID NO: 166132 - DNA, 122 bp, Homo sapiens
gggcgggcaggaggggcgctgggctgagggccggagaaacagaccaagagacatccgccgcgagggtgcggcgacctaacaagcggctcaggtatccccgactgctttaaagctcccgcttc

SEQ ID NO: 166133 - DNA, 122 bp, Homo sapiens
acagatactgattgaatgcctgcatgtaacaagccatgcttggggtgctcatgatacagccgtgaatgaaacacacaaaaattgctgctctcatgaaactctcttttttggtgcattgacct

SEQ ID NO: 166134 - DNA, 122 bp, Homo sapiens
ccctgcaaggtccctggagcgggtgacacacctgagatttgccgctgcccgcattcccgacgatgaacacggagtggcggacctgcagcagctcctccagctgcaccaccttcagcacgaag

SEQ ID NO: 166135 - DNA, 122 bp, Homo sapiens
tcatagcaagctgagcatagcagctgctttcaacgcgcaggaaaaccttcatctttgacacggcctctttcctttgtccagacgttcttgcatcctcagcctgtgtcagcacagacggcggc

SEQ ID NO: 166136 - DNA, 122 bp, Homo sapiens
tggcagcccctgatgtagaaggaaaatcaggtgaaagtccccaagagcagaaaatgttaacgaagagtctgggtctagtctggcatgcatcccagccctgccactgatgtgaatccttactg

SEQ ID NO: 166137 - DNA, 122 bp, Homo sapiens
tacttaatgaatcacccctcccactgcactcaatttgattaatttacaaaaagctccagccgcaaaccaagcatttgaatcttttttttcttttaaggaaactagccgttacacttctcaaa

SEQ ID NO: 166138 - DNA, 122 bp, Homo sapiens
cctgcaataatccaaggagccctgcaataatccaagaggcgcgtaggacactagaccgcgcgacgtgtgtgtaaaaaactaaggcaccgctaaaaagttacaaatagactctggtttccagg

SEQ ID NO: 166139 - DNA, 122 bp, Homo sapiens
ttaaagaaaacaaactccaagcaacagcttttctttctctccttcccttgtgaggtccgccggcaaaccaccaatgtttccgtattcaaggccaaaataccctagggagggaccggactcct

SEQ ID NO: 166140 - DNA, 122 bp, Homo sapiens
cgagccgcatccggagccgcgcacgcgcaatctgcatgaacgaaggccagtgcttaaagacgtgccattcattgccagaactcgattctcattggagcggaggaagttcgtgggtggagctg

SEQ ID NO: 166141 - DNA, 122 bp, Homo sapiens
tagggaaatgcgctaaaaccctaatatgtccactacccccaagcggtctctttttgaaggcgccgcacaaaatgtggtctctaccagcgcttggcctccaaggatcttcagtgagagacatt

SEQ ID NO: 166142 - DNA, 122 bp, Homo sapiens
cccccgcgcggcctcctgcgcccgggctggaggcagattcctctctccgggttttcagagcgcctttccgaaacctcctccccgcccagccagggagagagatcccgggcgcaatcgctccc

SEQ ID NO: 166143 - DNA, 122 bp, Homo sapiens
gtgggaggccttgtaccccatctggtgagctctttcttccctgtacccgcaacccccacacgctgtccccagaggccccgatgtaagtctcaagggctgcgcttcaatcagacagcagagat

SEQ ID NO: 166144 - DNA, 122 bp, Homo sapiens
cagaactgcccagaggcgggcgctgccttcctggggtgacgcagcagcaggaagagtttccggatcctggaatccgtgggcggcccgtgggaggggctgaggctcatttctctactcacctg

SEQ ID NO: 166145 - DNA, 122 bp, Homo sapiens
ttctcattaagcgtgacctcaaagcctgtctggacagccgcagatgaggagcagcgcctgcgttcatccacgctgggtgaaaggtaagaattcagggttacatgcgtgaaggggaaagcaag

SEQ ID NO: 166146 - DNA, 122 bp, Homo sapiens
cctatggaatgtaagaccccgactcttcctggtgaagcatctgatgcacgttccatccggcgctcagctgggcttgaggtgaggctgtcctggctggtcacggagggttcactgggatgtgg

SEQ ID NO: 166147 - DNA, 122 bp, Homo sapiens
aaccagcacccgcgacggtgtctacactggaattccaaggaaaagagggctccaggggcgcgaccaaggtttggtcttctgctgagcgctgctggatgaatcgccagccttcgcccgcggcc

SEQ ID NO: 166148 - DNA, 122 bp, Homo sapiens
gtatgatttttagcaagataaccatatgccttgaaatcacaaaagaagttttactaaaaacgttgattacttgtaaaggattatgagataatgcattttttttagggctgcacatttgatta

SEQ ID NO: 166149 - DNA, 122 bp, Homo sapiens
cgctttcatctgtcaactccagaggcccttgtgcttgcagcagggaggtcaaggccagggcgtctgaccccggccgctcctccacactgagcctcctgcacgtgctcacaggtagagaagcg

SEQ ID NO: 166150 - DNA, 122 bp, Homo sapiens
ggaggagggatgcggggaagagacttaactccttccctgcgggaagatggccacctaggccgggccccagccgcagtcccgccctcctgccctccgtgaaggtcccaccacggggactccgc

SEQ ID NO: 166151 - DNA, 122 bp, Homo sapiens
aaacaaacacagtaagtcacattgttggtgcggtccttccagacccaccgcagtgtcttgcgtcgtggggtcgtgagtctctgaacctggttcttctcagagttgacattttggacgtgggg

SEQ ID NO: 166152 - DNA, 122 bp, Homo sapiens
cagagctgtctgtccgctctgtgggcagtgcctacaattagagctttcagaacacacagccgctgcacagtggctggtccaacgacgacactgccctcctgaattgcctggtccagcgacaa

SEQ ID NO: 166153 - DNA, 122 bp, Homo sapiens
caccgccagcccctggggttctcttgggcctggctgctgggaccccagcacccagagtcacggcagtggtgggcatggggagggcctagcctggtacctccctgctcggctcccgcggctgg

SEQ ID NO: 166154 - DNA, 122 bp, Homo sapiens
ataacagcttccgccaggcggtgatgaagaatccccccgaaaggaccccccaggtgagaacgcggcggccgcctgcccttggccggatttctgcctcgcaggctgcgtcttcccctgtcccc

SEQ ID NO: 166155 - DNA, 122 bp, Homo sapiens
tgggcgcctgcgagggcttgggagagcaagccgcggagaggtgagtgggccgcttttctacgggaactggcctgaactcggccgtacgggctccccagtaaccgacctttggccaaagtgtg

SEQ ID NO: 166156 - DNA, 122 bp, Homo sapiens
caggcagcgtgacacccgcccagtgtgcaagttcattcatcacgggcccctgctgactcacgcttatgaaagtgattttcctggccccgcccactgcctgcgccgcctcctccctccccgtg

SEQ ID NO: 166157 - DNA, 122 bp, Homo sapiens
aaagtgacaataatctgaaatatttttaaagaagaaaattttctgaatacagtaagaaagcgacatgaagaaaaaagaaaactggtaacactgagtaacttacgtacagtatcaggagagga

SEQ ID NO: 166158 - DNA, 122 bp, Homo sapiens
aacacgtgtgtgcccatcaggactgctgcattttcaagatagctaggcttaaaaattacccgaggaggcctcatgttcacctaacgtggtaccttcgtctgttaggttactcaagactcaag

SEQ ID NO: 166159 - DNA, 122 bp, Homo sapiens
gcagctgagtagcagaacgaagagcagtagtcacctgggcctgcactgcaagatggaaggcgccacgtttgaagggcagcatggagccattgtggtttctcgttccctcaggaaacacccag

SEQ ID NO: 166160 - DNA, 122 bp, Homo sapiens
ggtggtcactgaggatcaccgtcctccaaacgcgacgatgcaagacgctctggaatcacccgtcctcagtcccccagtcctacggttcaccgaggatgtcatggccccagggggtgtggtga

SEQ ID NO: 166161 - DNA, 122 bp, Homo sapiens
attctggaattcagtgtggtccaatagaacgtctgcagcgatggagacaggcggtatctgcgctgcccaacaccaccagccacaggcggccactgagtctttgaagtgtggctaatgtgact

SEQ ID NO: 166162 - DNA, 122 bp, Homo sapiens
attttttttattcagcagtgtttgtgagatctatttaggttgatgcatgtagcagaggttcgtatttgtctcaacagcagggctttttatgctgtgggcctagttttggaaaggaaggaaga

SEQ ID NO: 166163 - DNA, 122 bp, Homo sapiens
aaggtgatggggggaggttcagacttcgggaatcagggcgcggacgctgggcgtggaccccgtcattgttcccggctagctcttatctcccaggagcaagtatcctgtgtgcgcagcgcatg

SEQ ID NO: 166164 - DNA, 122 bp, Homo sapiens
acccagcctcaggttctgggcctctagaggttcctctgcccagagatccaacatcgggggcgcaaacctacccgctgttgcctcactcctaaacctccatatactggcgccctcctcccccc

SEQ ID NO: 166165 - DNA, 122 bp, Homo sapiens
ccagatgttatagctgccctttgcttctgctgcacaggctctggggtcagggccagaggacgcaagaggaacctagcagtggagtctcctgttttccttgatagcactacctgctggacact

SEQ ID NO: 166166 - DNA, 122 bp, Homo sapiens
aaaacaaccaaatacaggtctcaagcgatttacagctcggtgcttaactcggtcaccggccgaggggcagccctctggcgccaaagccccgcctctctatgacgtcacacgaggagccctga

SEQ ID NO: 166167 - DNA, 122 bp, Homo sapiens
cctggtgccaagtggctttttggagacatggatggacacctgatacctggcagtctgcatcgagacattgattttgttttttgagatggggcctcactctgtcgccaggctggagtgcagtg

SEQ ID NO: 166168 - DNA, 122 bp, Homo sapiens
cagagagccgccgcggtcccgctctcccggggagagcctggctgggagtcagagctctcacggtaacggatagggaagctgagttccgagccttgaccaaggcagcacagcccaccctgaga

SEQ ID NO: 166169 - DNA, 122 bp, Homo sapiens
agtctcttcctgcacccgcaccacgccgggacccgaggggtttcactcccttcactgagccgagccaggaagccaagagccaccagggcgaagcagccctgcaaaacctccactcagcctta

SEQ ID NO: 166170 - DNA, 122 bp, Homo sapiens
cgtggtgatcctctgcttctccttggggagtaactgcgactcctgctgttgcttctgctacggcttctgctacgactacggcttcgagatcgagatcttccataacttggacttctgggccc

SEQ ID NO: 166171 - DNA, 122 bp, Homo sapiens
gagcagtggtgcagtcacagctcactgcagcctcgaactcctggtctcaaatgaacctcccgctttagccttgcaaatggctgagactataggtgcatgccaccacacctggctaattgttt

SEQ ID NO: 166172 - DNA, 122 bp, Homo sapiens
agaactaggttaaaatctaactttgtctcttactagctttgcaatttcagcaagttactccgaacctcagtttcttcatgggcaccatggaaataacaaagacctcagctcatcacatcaat

SEQ ID NO: 166173 - DNA, 122 bp, Homo sapiens
attcccacctgcgccacgtgaagcggcgccccaaggccaggacgtggtggccgggacacacgggtgcacggcaggcctcacactcccaggtggggccgcagggtccctaagtcatgggtggg

SEQ ID NO: 166174 - DNA, 122 bp, Homo sapiens
tgttagcagaagtcttataaacttccgggctgtcctatcaggctaagatatacgggggtgcgcctggagcctcccagaacctactttgtcttggccaagttagctgggactcctgtgatctg

SEQ ID NO: 166175 - DNA, 122 bp, Homo sapiens
cagagtctgggagaaggtcagatgaaggaggtgtccagtggctcacgtggacctgctttccgtgttgcccctgctactggaaagtccgctcagcacgctgaagtgtaattgtgaagcaaaaa

SEQ ID NO: 166176 - DNA, 122 bp, Homo sapiens
ctacttttgtctcctgcgggccactgttgagccttcacgagacgtcactgtcttcggtcgcggggcatcgtgggtaggagggagatttgctctcactgctcccaaaaatggcggacgcattc

SEQ ID NO: 166177 - DNA, 122 bp, Homo sapiens
agtttattgcaactacactaacttcgtaattttagatttgcagttgcatcctcctaactgcgtctaatggcagaagcaccaccttgtggcaaaagtaggagcttttaaattacagaagttag

SEQ ID NO: 166178 - DNA, 122 bp, Homo sapiens
ggaaaatctggatgcttgccgtttaaaagccaatgaagcccctccacgtccttggagccccgcaactgcatttctcaaagcctcaggaggatcctcctggctttcatcctgaacgcgagtta

SEQ ID NO: 166179 - DNA, 122 bp, Homo sapiens
ctggctccaggccccacccgtcttaccccatctcgggatgcagtgcaatggcacggggctcgtccatgtcctctgacaccaggatcttgtgggaggtgctgttgaggcacgtcacctcgatg

SEQ ID NO: 166180 - DNA, 122 bp, Homo sapiens
gccggaagggccagcgacggagggtctcagatggcggggcttgaggcccacccgggctctcgggtcggcgagtcccgttggggagcccttgtgcctgctaggatatttagcagatgccaggc

SEQ ID NO: 166181 - DNA, 122 bp, Homo sapiens
gccgcacaaagtctctctgctcgtacctgtgcctccaacttcatgaaaccacatggtgttcgcggattaggggttcgttggcacccagggaaaagccgctgcccctcccccttcgggcccct

SEQ ID NO: 166182 - DNA, 122 bp, Homo sapiens
gcccatctggagacacccgggccccattcctggataagatcacactggtgaaaacgccggcgtctaagtggccatcctgcctgtcctcaggagggtccttgggaaactacattgcactgtcc

SEQ ID NO: 166183 - DNA, 122 bp, Homo sapiens
cagaaagtgagagttaaagtgcataataaatattccctctggcactgtctcacaggaacacgccccaatccctgggctagtgacacaggcccctcttcagtaacacaggcccctcttcagta

SEQ ID NO: 166184 - DNA, 122 bp, Homo sapiens
cacacaatatggacacgggtttgaggctccagccccggatgacaacactccggaaatatgcgagcggcggcggaagcggaagtgcctcagcggtaggggccggggaagtgtctgtagcgtcc

SEQ ID NO: 166185 - DNA, 122 bp, Homo sapiens
ccccgccccggccgggcccccacgccctccgccgcgcctcgatgcccgcgacccgacccgcgccccctggcatcccaggaggccccagccaagggctcagtgcccggggcccccagcaggtg

SEQ ID NO: 166186 - DNA, 122 bp, Homo sapiens
cgcgtctctgattaacgatactgtactgtatacttaacaacttgttaagagggtagatctcgcgttaagtgttcttaccgcaataaaaataaattgtgaaggagattgtagtgatggtgtga

SEQ ID NO: 166187 - DNA, 122 bp, Homo sapiens
gtgatgaactgaaggctccccctgcttttggaggcagcaggagcgcagtacagaagcatgcgtttgacactcacaacccgctgccatcctatcatcatgttaggtttcatctttccaactgg

SEQ ID NO: 166188 - DNA, 122 bp, Homo sapiens
gcctcctcctgctcctactcccgagaggctccggcaatgagaataggccccgcccccccgcgcagccaagtctacggaccaagtccgagcctgcagacaagctccgcccccacgagggcctg

SEQ ID NO: 166189 - DNA, 122 bp, Homo sapiens
agccccaggctcccaggcctcacccacaagattccctgcgtgctccttgattaccacccccggccccagcacactcttaactttcagaaaatggctttgtgacaatccaggcgcatctgatc

SEQ ID NO: 166190 - DNA, 122 bp, Homo sapiens
gcccaagaccccagtagcagctgcagggagcagcaagcgggagccgagcaccaagggccccgaggagaaggtggccggcaagcgggaggggctgggcggcctgaccctgcgtgagaagacct

SEQ ID NO: 166191 - DNA, 122 bp, Homo sapiens
ccgccgggctcctttccgcgagagaacactgcggcggagaaaagtcattgtcaccttcaacgtggatccctcaactccggcgactcctcaattatgcccaggctccactcacttccccgccc

SEQ ID NO: 166192 - DNA, 122 bp, Homo sapiens
gtggggctcagggcccgggcggggatggggttcagaggggtcagggtggggctcagggcccgggcggggatggggttcagcggggtcagggcgggggctcagtgccagggactgcaaggagc

SEQ ID NO: 166193 - DNA, 122 bp, Homo sapiens
gaagagagaatgccttgactgttgtccagaaagattcctctgaacttccaaccactaaatcgaattctattaatagcagttcagtggatagtttcactccgggatacctcactgcatctaat

SEQ ID NO: 166194 - DNA, 122 bp, Homo sapiens
ggctcggcggctggggggtgggcggagccgcggccgggcagttcattatgttggacagggcgcgtctgcgcctccggccgccgcggctcccggggcctccgcctgcagccggcggcggaacg

SEQ ID NO: 166195 - DNA, 122 bp, Homo sapiens
atgcttaattagaaccggttgccatggcgacagtctctaggcagcgtgggctgagctctccgtaggaataaagggtgggccgccgctggaccctgcgcgcgcccgccaccaactttccctcc

SEQ ID NO: 166196 - DNA, 122 bp, Homo sapiens
cctaggcctcgaactctcgcctgctctccggtgggcggtctcgaactccagcctgctctccggcagcccacagcaatgcgcctgccaagaccttaggctgcaaaactcgccacggcccagag

SEQ ID NO: 166197 - DNA, 122 bp, Homo sapiens
ccccctctgcccgaggagttgtcgcgcgcagtcagcgccccgaactcgcgcgcggcccggcgccccctcggggcccacctcccgggccagccgccgcgcctacctgtgcccgcggctcggct

SEQ ID NO: 166198 - DNA, 122 bp, Homo sapiens
ctcgtcttcattcacaaaccccattagcttctgttgtctatgggcttcctcgacagaccgcgagcccctcgcgggggccagaaaccaagtatggatcatccctatgtgccttcctttccgtc

SEQ ID NO: 166199 - DNA, 122 bp, Homo sapiens
tggattgaaacccaggcctcctgactgcagagtcgatatttatttattctttcctttattcgataaacatttagattgaaaattataacttaaaaaaaaggcattcttcttcccctgaagaa

SEQ ID NO: 166200 - DNA, 122 bp, Homo sapiens
gtcttttaaaactcaaacctgactgtgtcacttagtatttaaaatgtctcaattgcctcccgtttcccaaagtaaacactgaagtcttaacttgcattgcctggcctctgcgggctcctcta

SEQ ID NO: 166201 - DNA, 122 bp, Homo sapiens
gtgggcgcaggttagtgggtgcacgcaccgtgcgtgagccgaagcagggcgaggcattgccgcacttgggaagcgcaaggggtcagggagttccctttctgagtcaaagaaaggggtgacgg

SEQ ID NO: 166202 - DNA, 122 bp, Homo sapiens
ctgaggtcaactgacgtgggcgtggtctgactgtgtgggcgtggccagggaatgaactcacggctctggcttaaggggtgtggtgaacgaaggatggggcgtggctgtgtcaccaagggcgt

SEQ ID NO: 166203 - DNA, 122 bp, Homo sapiens
aagtgaagtgtctagactttagatggcaggcttctgagcccgctccccgccccagcacaacgtgggctctaccacacagaacagcccacaggtgggacactgatgtgcaggtcattaaaaat

SEQ ID NO: 166204 - DNA, 122 bp, Homo sapiens
aggagttggagaccagtgtggccaacatagtggaaccccatgtccaccaactcatgacaccgcatgtggtgtttattaatctacttgtaaaggctgggctacaagaagtcttaggaagactc

SEQ ID NO: 166205 - DNA, 122 bp, Homo sapiens
gtgtccctgtctctccccttctgggccagccttgctttctgggcaggcccaggagtgtcccgggcccagcactcagagtcagcgctgtctttaatctgtattccacaggcatcctcaccccc

SEQ ID NO: 166206 - DNA, 122 bp, Homo sapiens
ttggtgttcatttgcattatttcccgttccaaatgaggactgctgcaaatgttactgcctcgtgatcttctttaatatggcagccacgcccctcaggcactccgcatttcctccctcatccc

SEQ ID NO: 166207 - DNA, 122 bp, Homo sapiens
aaataggtttaattgactcgcaccacatggctgcagaggcctcacaatcatggctgaaggcgaatgaagagcagagtcacatctttcatggtggctggcaggagagagcttgagcaggggaa

SEQ ID NO: 166208 - DNA, 122 bp, Homo sapiens
cccccgcggggctcagaggagccggaagcgccgagggcgcgagcggagaggcactcggcgcgcccggaggcgagctgccaactgaaccaaaaatgccgctgccgggagttgctcgcctagct

SEQ ID NO: 166209 - DNA, 122 bp, Homo sapiens
gtttccccccaaatcctccaaaatacatcgccacgatttcgaaacgggagccgagggagacgcaccaagtgcttcccgacgccaggtgaagcgcaccatacctggtgtgcgtgttgagcccc

SEQ ID NO: 166210 - DNA, 122 bp, Homo sapiens
ggtggcttcccggggcggggcggggattcgctgtgactccaggtccttttccccggagcccgcacgtcttgtaagacactgattcccggaggtctgaggagcaggaatcgagtgggaggtgc

SEQ ID NO: 166211 - DNA, 122 bp, Homo sapiens
ttgggctgcccggcgtgcatgccggtgaggacatactgcccggggttggtgacgctgtctcgcacaaggaagtccccgtcagctcgaagcatcctctctgccgcccggcggctcatccggcc

SEQ ID NO: 166212 - DNA, 122 bp, Homo sapiens
ttctctggggattaatgtgataacatgattaatgtgactttttggttttaactgcatcaacgatagaatccgaagcctgaaagggcgcatgcacagtgcctagccctgactgctaactgact

SEQ ID NO: 166213 - DNA, 122 bp, Homo sapiens
aatgcgaaaccccctcagtgcgttgagtcccggggagacggttctgtgggctgaagggagcgcttccgtcatcggagcccttaccagcctgggagaaagcgctcggggcgaggggcgcagca

SEQ ID NO: 166214 - DNA, 122 bp, Homo sapiens
ccccggcccaggctgctcccattgctggggaacttgcagctgcagtccggaggcctggaccgcgcgctccattcccgacaggaatgggggaacggaattctggattcgtggaggtggggctg

SEQ ID NO: 166215 - DNA, 122 bp, Homo sapiens
gtggcttccacatgaaaagtagctgtttagaatgagcctctcctttgtgggcctggagtgcgggaccagctgctaaggaggcacaagtggggtgggggtggggagtgggggagaagccacca

SEQ ID NO: 166216 - DNA, 122 bp, Homo sapiens
caaagaaaaacaaatcagtggcctggtgaccacacacctcttcaccttaggacccccaaacgcccgtcatccaacgagcgggcgcagccttgcgaacccccaggtccgggcgccggggccgg

SEQ ID NO: 166217 - DNA, 122 bp, Homo sapiens
gcagcccggcctagtagaaggtaggcctgtcacgtaatgtgtggacccagcctagtagaacgtaagcctgtcgtgcaacgtgtggacccggcctagtagaatgtaagcctctcgcgcaacgt

SEQ ID NO: 166218 - DNA, 122 bp, Homo sapiens
agttctctaaggagccgctcgtgtgtaacaccatagcccatgtgaatccgtgctgacatccgcacagatgaacggatcagatgagatttaatctccctgaggcccatgggcacgagtcactg

SEQ ID NO: 166219 - DNA, 122 bp, Homo sapiens
gcttcggttctgcgggttgtccagacttcaggcctgtgcgctcaatcgtggagaatgcgccggcaggccccccacccccagcctaaggtgcaggaaggaccagcacgaacccgctggctttg

SEQ ID NO: 166220 - DNA, 122 bp, Homo sapiens
tcgctagctcaggaatgaagctacagaccttcgcggtgttacagctcttaaggcgccgcgcgtctggagttgttcatcctgccagtgggctcgtaatctcactggcttcaggagtgaagctg

SEQ ID NO: 166221 - DNA, 122 bp, Homo sapiens
ccctcctgccctgaggtcgccccctagtggctccctgtcccggcaattggcaattaccagcgtggttgggggagagggtcccctcgctgggcagctccagggaccccagagggacctccatg

SEQ ID NO: 166222 - DNA, 122 bp, Homo sapiens
tttaaaatgccacctgcgggcaggaggtgcccattcttgtagggggatacacaggatgaacgggccagggcagtagagagaagcccttcccttggggcctcagagggtgcacctattggtct

SEQ ID NO: 166223 - DNA, 122 bp, Homo sapiens
aaaacaaaatgaaacaaagagagccattctcttttctggaactaggaactcccagcgtagcgcagatgtaaaaggccacacagctgatgtgaagtccccataacacagagaacaccgttggc

SEQ ID NO: 166224 - DNA, 122 bp, Homo sapiens
cgggaggcagcaggcggacagacaggcggacagacaggcggacatgcgtggtgccaggaccgtgcagcagcccctggctcaactccagggccctagacccgccttagctccggtttctgccc

SEQ ID NO: 166225 - DNA, 122 bp, Homo sapiens
gaggccgggtggggaccgcagggcgcagctctcccagtcccacccttcggcgcagggctccggccaacacagccctccaggccgcctactctccagccagccggctccacggacccacggaa

SEQ ID NO: 166226 - DNA, 122 bp, Homo sapiens
ggaggtcgaggctgcagcgagctgtgatcgtgccactgccgtccaccctgggtaacagagcgagaccctgggaaaggaaggtaggaaggcaggaagggagggaagaaggaaaaagaaagaaa

SEQ ID NO: 166227 - DNA, 122 bp, Homo sapiens
gagcttcttgtggagccgtcgtcttgaacctcctggaccaaagggatggttgagcctagccggtggactggccactaccagggggcacagggctcggccttctcgcaaagagcctcttcctc

SEQ ID NO: 166228 - DNA, 122 bp, Homo sapiens
caccacagcgctgcagcccccagggagtctcagcaccacctgaacttgactttcaagagccggaggcaacagcagccagcccttcacaccgaatccatctgcatccctagtgggagacttgg

SEQ ID NO: 166229 - DNA, 122 bp, Homo sapiens
gtcccagtgcaaaatgaatgcaggacaccttggtaaaacactatttaaatttcaagattgcgacagcagagcataaataaaggctgggtgctcctaaaggcaggaccttgtgcagctgcgca

SEQ ID NO: 166230 - DNA, 122 bp, Homo sapiens
atctcggctcaccacaacttccacctcccaggttcgggcgattctccggcctcagcctcccgagtagctaggatgattacaggcaagcgccaccacccccggcaaatttttttctattttta

SEQ ID NO: 166231 - DNA, 122 bp, Homo sapiens
ctccaggtcacagggcactgcactgccaccgaccaaaggcacgggcggagaggatgagcacgctctccaggtcacaggacactgcactgccaccgaccaaaggcacaggaggagaggatgag

SEQ ID NO: 166232 - DNA, 122 bp, Homo sapiens
gcgcagagccgcgttcttggggagcatggggtggcgctgggggtgttgccaatatgggggcgtggggagcggaggggaggcgctggagtggctgcgatgctgatgcgtgctctttatctgga

SEQ ID NO: 166233 - DNA, 122 bp, Homo sapiens
actcaaagcacgactctatactgtacttttgtaatgtacaatgattgccgtggagagcagcgatggagatgttagtcctctttccttctccatcccccttgccctggtgcctgtgaaacaga

SEQ ID NO: 166234 - DNA, 122 bp, Homo sapiens
ccagcgccagcttctggcccaggaggcccagaaggcccaggcagccagcacaggtttggccgcgccgccgggttcgcagcgaccgccacctccaggctcgcaggtgtccgccgtgcgcctgc

SEQ ID NO: 166235 - DNA, 122 bp, Homo sapiens
ccggaccctgacggcccgggcggcgcgtgcctggttccggctctcgatggaggagggcctcgccgctcgccggctagagggaaaagtgaactccaccctccggctttcttcccggacgccgc

SEQ ID NO: 166236 - DNA, 122 bp, Homo sapiens
agttaccaccatctttctcctttctaacttccaaaaacttgttcatatcatctcttctcccgtctctttttccttaagtccaatttctaaatcattttataccattttagctgggtttgggg

SEQ ID NO: 166237 - DNA, 122 bp, Homo sapiens
aaccgccgccaaccccccgccacccctaacagcgtccgccttacgggcgccgccatctttcgttctcccacaatgcaccgcggctcccagggatccctcagccgcgggagcggcaaactagg

SEQ ID NO: 166238 - DNA, 122 bp, Homo sapiens
cggccccccagccctcctggggcatctctaggtgacaccccacaaggcctgaggcctctacgccttctctcccatccgcagtgaccctgcctcgcacctgccacgtgggtccagccacactg

SEQ ID NO: 166239 - DNA, 122 bp, Homo sapiens
ccaagcccagagaccagctgtctcaaggaaacagtaaaccagatgaaggatgcctttctccgattcggttgacatgctttatgtgtgagcactcttacgacaacagcaggtatataaaaagg

SEQ ID NO: 166240 - DNA, 122 bp, Homo sapiens
tgagtctcatcttgaaaaagatttgtgaaaagagcattgtaggccaccttcttgaggctccgctttgccctcttccggttcacactgcgctggcccaggtgagtcttggcagccggcaggag

SEQ ID NO: 166241 - DNA, 122 bp, Homo sapiens
caggagagctttcggcggcgctcagacctcaccacgcaccagcaagatcacctaggcaagcggccataccgctgtgacatctgtggcaagagcttcagccagagtgccacgctagctgtgca

SEQ ID NO: 166242 - DNA, 122 bp, Homo sapiens
ttacgtgacttgctcttagtcacacactgaggttttaccagttttgggaccaggattcagcgcttctggattctagtcctgtggtctttctgctctaccatgaggctttgatatacaaacat

SEQ ID NO: 166243 - DNA, 122 bp, Homo sapiens
ttgttgatgtgggtgccatcgtgtagatgacggagcacgaacccgaggctcagacaggggcggcgacttgtccaaagtcccactccgtggaggaagcggctctgcagacctcaggcggcggc

SEQ ID NO: 166244 - DNA, 122 bp, Homo sapiens
ttacagcatagtctaccatatctgactaatacagagcctaacccagacctaggagttagacgaccaagagtgaaaagaatatcagagaattaaaaatagttcagtgtgactggatcaaagag

SEQ ID NO: 166245 - DNA, 122 bp, Homo sapiens
tgaggggtgtgcccttctttccaaatgctcaagcactgacctggtgtgtgtgccagggtccgaaggacgctttggctgccatggaaacggtggcatgcttctagcctgcgcatcccctgaaa

SEQ ID NO: 166246 - DNA, 122 bp, Homo sapiens
gagctgtccaggaggaggagtggcagggccagtgactcactgggtgtggagagggggagacggaagagtccagaagattctgcagcttgtgtgactgagggtatggctatcccatttctact

SEQ ID NO: 166247 - DNA, 122 bp, Homo sapiens
ctggggagcgtcaagacgcctcctgcagtcgtagacaagccgggctgaggcattcactgtcgcttagaactgaaaacttagggtcgtccatgcccagaacgtcggcagtgcggaccagcccc

SEQ ID NO: 166248 - DNA, 122 bp, Homo sapiens
agaaggaggagttgtgttgtcgttgtggtcctccctgcccttccacgtggcccggctcagcgcccttgcttagttaataggaattcagtgtttcattatgaaatccacatatggcaaacata

SEQ ID NO: 166249 - DNA, 122 bp, Homo sapiens
gtgcgggagtcaatgggcagggcggggcaagcctggcagtcatcgacccgagcagggacccggctggccgcctccccttgcaggaaacaggtgtttgaacgcgatagcggccgccagtcaac

SEQ ID NO: 166250 - DNA, 122 bp, Homo sapiens
gagcgcatcgccgagaaggagcaggtgctccgtgccctggtgctgagtgcatctccacgacggcagcacctgatggagggaagctgggtcagcatcgctgctcctggtcacagattgtagac

SEQ ID NO: 166251 - DNA, 122 bp, Homo sapiens
aagtagagtcttagtccctgagggtggatcacgtgggctcccacacatctcctcctgctgcgagctgttcgtgctctgtcagcccctctgccagaggaaggtgtatcatacagtggtctgtg

SEQ ID NO: 166252 - DNA, 122 bp, Homo sapiens
ttcccaccgccctgggctttaccctcctggttggacctgtaagggctcaggaaacaaactcgccaggaggaagtgggagagggtagaatcccagcacttcttcagaggtgactggcacatcc

SEQ ID NO: 166253 - DNA, 122 bp, Homo sapiens
cgcccgcgcacaaagagaagatcgcggaacttcagagttaaggggagccgtttcccgcagcgctagccggcagtatttccaaggcgcaagttgcggagtttctgtttcctttttcctctggc

SEQ ID NO: 166254 - DNA, 122 bp, Homo sapiens
ttgctcaataaatgtgttactgtttctgtttgtattggttttctcattggtttccttggccggataatagcagtggtgtctgcctgtctgctgggtgtctggatccccagcacctgttgcgg

SEQ ID NO: 166255 - DNA, 122 bp, Homo sapiens
cgtcgctttcgtcgttacttgtctgcaggacggctggtccgggcccaggccctcctccagcgacacccaggcctcgatgtagatgctgggcagcccccaccactgcaccgggcctgtgcccg

SEQ ID NO: 166256 - DNA, 122 bp, Homo sapiens
ccttcacaaatatctctgtggcgcttcctgatattcttgtgtggtggtgagggcattatgcggtattgcaggaagagttacaagactggtattctggtcctgggctgcaagttaagaagcct

SEQ ID NO: 166257 - DNA, 122 bp, Homo sapiens
ggaatcagtcattctgtaagagggttcccttcctttggcacaagcagtctgaactgcccacgtggtgactggagttttgcattcagtggaattctgagtgtatcctttggaaatcaggactt

SEQ ID NO: 166258 - DNA, 122 bp, Homo sapiens
gggagccagtcctctggctagaggcccagaggatgcctggataggtgccccctggaacggcgtcaaagagcctgaaggagacccccgggcagcagcgccgggctcgaggctggaggtgtgtg

SEQ ID NO: 166259 - DNA, 122 bp, Homo sapiens
gagaccatgaactgctaagtctgtcagaggaataggtgaacaacaaaaatttgagtccttcgccaatccggttactgttgggtaggccttcagcatacttttgtccaatcagcttcagactc

SEQ ID NO: 166260 - DNA, 122 bp, Homo sapiens
cacctggaggcctcctgtgcagctgtagcgggaacgagcagccgagggcccagagggatccgcctcattgtggggagaggcagcggtcgggtggtccactcctgccccagagaggccatagc

SEQ ID NO: 166261 - DNA, 122 bp, Homo sapiens
ccagccctggtaggcgcgggtcagctcctcagccctgcagcccctgcccgcaagcccgcgcgcctcctggtgtccagccccagctaccaaggagagagacccaggaaccgccagtggctgcg

SEQ ID NO: 166262 - DNA, 122 bp, Homo sapiens
gcgcacttttgcgagcggctttcgtagccagttgcttcctgggttctttactgctttgtacgagtcatggtacagagacctccttacttaccccccttctccttcggctggagctcggtgag

SEQ ID NO: 166263 - DNA, 122 bp, Homo sapiens
ggggagatcctagctggcggagaccgacggatggggccgccctaacctcaatgaggctcacgggtgagtcactgggaacattcctcgccgctcgcacgtccccgcgcccctgcccccgccat

SEQ ID NO: 166264 - DNA, 122 bp, Homo sapiens
cagaccctgcgaaatattttgctgcatcagaatgctacaggccgtcaactccctaacatgcgcaaaagcgggcagccgattatccagggtagtggattatccaggagagtggattatccaga

SEQ ID NO: 166265 - DNA, 122 bp, Homo sapiens
ctccctttccccagtagtttcggtttctcaacagtttccttttcctggcatttgtcaaatcgggatttggccggggccagatgagggcggaacaaattcctgaggatcaaattactttagga

SEQ ID NO: 166266 - DNA, 122 bp, Homo sapiens
ttggggaggtctatgtcatttgtgcaaatcatacggagcatttcattcgttgtggaggtgcgctgagctggcaaaatgcgaattctaagaacaccttcatttacatgtcgactgctgcttga

SEQ ID NO: 166267 - DNA, 122 bp, Homo sapiens
ccatgcaagagggcatctctctccatactgtgctgcccaggcttgaaggtgagatgacaccggtaatgtgaaattgtccttcctatacacttctatgtgtcttttcttatttctgtgctgca

SEQ ID NO: 166268 - DNA, 122 bp, Homo sapiens
caggaaggcagtcctgcagcaagactcttctctttacggagacatctgtgaacctgcctgcgctcgcggttggccgtcgtagaagcatggataagcatagcccgtgtgaatctgtgaacctg

SEQ ID NO: 166269 - DNA, 122 bp, Homo sapiens
aaaaggatttttaaaacgcttttttcgttctgcaggcgaaggctgtggccgtgctcccgccggccagttcccagcagcagcgcattgcccctgctccacgccttcgctccaggcccgcaggg

SEQ ID NO: 166270 - DNA, 122 bp, Homo sapiens
tttaggtgccttcctcgcccctactcctgggtagaggaataacaatatttctcgaggcttcggcccaaggtcttagccttgtgatctagaatccgccatctgtgaggtgggtacttcctgtg

SEQ ID NO: 166271 - DNA, 122 bp, Homo sapiens
ttcaataatcaattgccaggttgcttaagtgtttttccaaatcctattttcccacaataacgtatctattttaggaaagcctgaagggaaagaaaaacaaccagtttagaatattatgtttc

SEQ ID NO: 166272 - DNA, 122 bp, Homo sapiens
tctatcccagtctacccctgctctatcaggggcatttgtgtcccggtttagggtcataaacgagctgccgagggaggggtgcaatggcgcaatgcgacttgccgcaattaataatctcaatt

SEQ ID NO: 166273 - DNA, 122 bp, Homo sapiens
cactttgggccctccaaagtgctggggttacaggcgtgagccaccgtgtccggcctaggtcgttattataaacatgcacagtttcagtgcaacaaacatggttttttgtttgtttgtttaat

SEQ ID NO: 166274 - DNA, 122 bp, Homo sapiens
tactgcactaccataactactgctattgttaacgataaaaggcaaagactttccaggacccgacccctcgcttacaagcctttcgggaacttgccctatacccccgaccccagtcaccttca

SEQ ID NO: 166275 - DNA, 122 bp, Homo sapiens
gctagagcagaaggcggatgagttttggacagaagaggcttccgttgaggggcgtggcgacgcagccgcggtctgagagaccggttcacgtgcaggcagcggcggatcatattccttcatct

SEQ ID NO: 166276 - DNA, 122 bp, Homo sapiens
cagggactggaggatgaagaaaatgaggaaatactgattaaagtgtacaagtttcagttacgcaaggtgagtacgttctggtgatcgaatgtacagcaatgtgactataactaacaacactg

SEQ ID NO: 166277 - DNA, 122 bp, Homo sapiens
gggacggaagaggaaggaggactgagcccgggagagagaggggaggggtcggcgcgcgaccgggtcatgcaggtgcagactggccggtcgcttcccgccctccagccacccgcagctccccg

SEQ ID NO: 166278 - DNA, 122 bp, Homo sapiens
gagggggcagctggacaagctcccaactgcagagtcccagccctggctggggcagggccccggcctgggactcagcatttctgatatgccttaagaattcattctgttttgtacaattattt

SEQ ID NO: 166279 - DNA, 122 bp, Homo sapiens
atggtttctcattatcactgaatagttgagagtctactgtatttgagtgaaaatgcagcacgagaaactgaaatcagatgcgctcatgattatgaccctgaggtcaatgtgtcattcccttc

SEQ ID NO: 166280 - DNA, 122 bp, Homo sapiens
ttaaccatgttactgataatgatggagtcattgtgttacatggacaacagcatggacattcgggatgtctggaggaggggtgggggcccattctgttgcaggagtcacactgctgggggctc

SEQ ID NO: 166281 - DNA, 122 bp, Homo sapiens
tctcgggaaaggaggcccccgtgaggctgggtgggctctgaattcccggtgtgttgatagcgatcggcacatgcctcaagccacctggaagagaagctgccccaagattctccaggcccttt

SEQ ID NO: 166282 - DNA, 122 bp, Homo sapiens
agaggaggaggcctcgggagcttcgcgggaggacgtgcatggagagactgggcctggaagcggagctggcgtcagcctgcgcggcccctctcagcccaccccagccgggcctggccttacca

SEQ ID NO: 166283 - DNA, 122 bp, Homo sapiens
gggagggagactcaggcccacacttgggtattttctaatttcagacaaacacacactcagcgcgcactcactgattcctacacattgccaagatttcacacatgtgaccaggggccaccaaa

SEQ ID NO: 166284 - DNA, 122 bp, Homo sapiens
acgtttattctacctccattccccgccaagaccccgcgtccaactcacagaccccgccgccgctgaggggctccatacccagcttgaagccgcccgcactctccatgcgccgcccgagctgt

SEQ ID NO: 166285 - DNA, 122 bp, Homo sapiens
gcgaggggatggcaactacccggggtccggaggcggggctgcgagtgtcggggcggggggcgcgggccgggtcgagcaccgccccgacgagggcccaggccagtccggcccgccccgggttc

SEQ ID NO: 166286 - DNA, 122 bp, Homo sapiens
aggagaattcatactggagagaaagcttataaatgtgaagaatgtcacaaagtttacagtcgcacatcaaaccgtgaaagacaggagaattcatactggagagaaaccataaaaatgtaaga

SEQ ID NO: 166287 - DNA, 122 bp, Homo sapiens
gtgccctctgggtcccgtttcctggatcctgttctgagccgggcagctggtagccctgttcgtgtgcgttaaggctcggttccccagcacaatcattcaggattgaaacgatagcataatgg

SEQ ID NO: 166288 - DNA, 122 bp, Homo sapiens
caaggacaaggtcctggggcacacccagcagcagcccagcagcaggtgatggggtttggtcgggtgaagagccttttgctagagagaggaggcaaggcacacctctgagacccaggtgggca

SEQ ID NO: 166289 - DNA, 122 bp, Homo sapiens
ctcccacgcaccagtgaggctgtcaactctccagctcttcggaaactccagcatttcatgcgcagagacccatccccatgcggctaccccaggcccagtatgcgccggcagggcttctcaca

SEQ ID NO: 166290 - DNA, 122 bp, Homo sapiens
ggaagcaggcaccccgcccggctctccgctgcctccacactcggggaccctgggcgctcacgtgttcccctctgggcctcaggattcaaggatgcgccctcttgcaaacagtccgtggcctg

SEQ ID NO: 166291 - DNA, 122 bp, Homo sapiens
aaacctaacttaggagtatgcgtctgtaacaatagctgagtcttggccaatcccagaggccgtagttcaaccgctcatacgctgctgagtgttcaaactgtactcaaataaggcaaacgcca

SEQ ID NO: 166292 - DNA, 122 bp, Homo sapiens
ccctggaggaagctaaactcagaccaaggccctgggctccccaggagttaaaagggaatacgctgtcccaagattctagaatgaagagtcaacgtagcccgagtggcttaaacctcctgtcc

SEQ ID NO: 166293 - DNA, 122 bp, Homo sapiens
tgaaggcagagaggggacaacaaacttcacacagggtcgtgggaaatactgtgcagactccgggttggattctgaggcaagttggtgccctcagaaggtttgcagctgaggagggacacggg

SEQ ID NO: 166294 - DNA, 122 bp, Homo sapiens
aaaccggggcctggtgtgtctgtgctctgggacacgggtggcaaaggttcctcggctctacgcagacccgacgggcccgggcacggaggcggatcgcccgggacaaaccgacacagagcatg

SEQ ID NO: 166295 - DNA, 122 bp, Homo sapiens
tggcctggaattttccacttccttctttgcaccctcccataccttgtacatctatggttgcgcttaccatagttgattacacgtgtttcccttgagtagattataaacttctcaaaatcaag

SEQ ID NO: 166296 - DNA, 122 bp, Homo sapiens
catgtattccctggctctctaacgatcctggtgtaaacttggggaagactcgggcagacccgacccacgacggggtggggtgtggggcgggggggcgcgctctcctcccgttcctctccgcc

SEQ ID NO: 166297 - DNA, 122 bp, Homo sapiens
gcgcctggacccattccatccagatcacgaaggtggaggcgatcgcagccagcaagtgcccgcggccggccgtcaagcagttccacgactccaagatcaagtttccgctaccccaccgggtc

SEQ ID NO: 166298 - DNA, 122 bp, Homo sapiens
actgggccagggtatcacatcctccagggaatgtttggctgcgacctggggcccgacgggcgtctcctccgcgggtatgagcagtatgcctacgacggcaaggattacatcgccctgaacga

SEQ ID NO: 166299 - DNA, 122 bp, Homo sapiens
agccttagggctcctactccagattgcagggtttacttttattttgaatgataaagacttcgagggccttgcccgccctcctcctcccacccgcaagggttggcccgcgttcccctgcgggc

SEQ ID NO: 166300 - DNA, 122 bp, Homo sapiens
gaggctgcagctggaccaggtgtactgtaagcagcttccatggccgacaccagggaacgtcgtggcgttctggaagcttggagatgccagtaactgcagagccctaaagaggtgtcacagcc

SEQ ID NO: 166301 - DNA, 122 bp, Homo sapiens
cacaagcacataattattagaacaggatttccaagtgtagagttttcaatggccttaatccgtttaagaggattgattgcagacaacccattggctgtcttgttcaaattatcagttccagg

SEQ ID NO: 166302 - DNA, 122 bp, Homo sapiens
ggcagccagaagtgactagagccaaactccaggatgtagtggcacaggcttccagcatcacggcaaacaggcttgcagataatcacccacatgcatggtgcctctccctccctactccctca

SEQ ID NO: 166303 - DNA, 122 bp, Homo sapiens
gtccagaccagcgtcggctcacgatgccggagtcatccagcctcccgcccctgccccagccgccgccacttcggggccttggctgcctgttccgtttagcctgtttgttttacagagttccc

SEQ ID NO: 166304 - DNA, 122 bp, Homo sapiens
taattttatttactttgaatagagctaaagtctgattttgttgcccaatttgttctcgaacgcctggcctcaagtgatcctcctgcctcgtcctcccaaagtgctaagattacaggcgtgag

SEQ ID NO: 166305 - DNA, 122 bp, Homo sapiens
cgggcagcagcgtgtagatggtgtagatgaagaacacggtccaccagatgccctcagaggcgctgcgtggctgcggcagcagcaggcccaccacctggacggccagcaccacggcgatgagc

SEQ ID NO: 166306 - DNA, 122 bp, Homo sapiens
cactatatttttaaacttcctagagcttttcatatgcagccaggtttgagaatcactgcccgagctatagtcatgcttacaatttttgaactggcccaaagaagagggaattaacctttcag

SEQ ID NO: 166307 - DNA, 122 bp, Homo sapiens
tgaactggggaggcggaggttgcattgggccgagatcgcaccactgcaccccagcctgggcgacacagcgagactccaaagtttgacaccagcctgggcaatgtagtgaaaccctgtctcta

SEQ ID NO: 166308 - DNA, 122 bp, Homo sapiens
ttccagccagcctcactagctataaaatctttgctggacttcaaaactccttcttacccacgttcatgttggtaagcctgatgcagttctctgttgcttcaggatgaggaaaataacacttg

SEQ ID NO: 166309 - DNA, 122 bp, Homo sapiens
agcctaccgggctgtcttcgccgctcaccggagagggtcgtccgggtgtttggttttgttcgaaagtttctgggcttttttttttttttgtaaaatccaaagcaaccgaacaaaaagagtcc

SEQ ID NO: 166310 - DNA, 122 bp, Homo sapiens
tgggggattcctgagccttccttctgtttacttcctttttccaccaaacccttggaggctcgggctccgatccggcccccttcccacgctcggggcgctgtcttcccccccggaagcctggc

SEQ ID NO: 166311 - DNA, 122 bp, Homo sapiens
gggaggaaagccgccagaaagaaggcgattggatggcggcggcgctctggggcgtagcgtcgcccgggccccgcccaccgctgccttcctctgctgggctccagagccactgaggcctgagc

SEQ ID NO: 166312 - DNA, 122 bp, Homo sapiens
ttagcccccgggacgcgaggtggccccgcccgcttccgggagccggaggcaagtgggagccgcgccctgtgctctgcgtccggcactacccacctcaagtctccaaggcttcgttttctggg

SEQ ID NO: 166313 - DNA, 122 bp, Homo sapiens
aaaacttgtataaagtttacatttacttttacagttcattgccccctcccaagcaaacttcgaatgacctcatgggaaaccaaccaaccaaaaaacccaccaatctatttcgtttttctaat

SEQ ID NO: 166314 - DNA, 122 bp, Homo sapiens
agaatccgtctgtgccaggagcaccaagtccctgagggactggtagaatcaggtggcagccggggacaggcctctgctgacttcaggtcttattttagcctctggcatgtccccaggaggcc

SEQ ID NO: 166315 - DNA, 122 bp, Homo sapiens
gtgcttggtcccccccattcccagccctgcagcagcaacaaacgggaaggaagtgggtgacgaggacaggcagagacccctcccacggggccgcccgcatctcacctgccgtcgcggggcgg

SEQ ID NO: 166316 - DNA, 122 bp, Homo sapiens
tgtgtatgtgtgtgtgtgagtgaagtatgtcctggaataacttctcagtgaaataaaatacggaatgctgccatgtttgtatcaaagaagagacattttgactaatactctcactccattaa

SEQ ID NO: 166317 - DNA, 122 bp, Homo sapiens
cagaaagaagctgcatcccagcccagatccagctgagagccacagctgccaagaggcagtcggagctctgggcacctctctgtgcacccaggaagccccaggaggacttcatcaagccaagt

SEQ ID NO: 166318 - DNA, 122 bp, Homo sapiens
acctacgcgcgagggggcggggccagacgggctcacatgatttgccggcgactgtagcgccggtcccggccacaagctgtcggctcggttcggtcgcgttacagggcaggcgccggggccaa

SEQ ID NO: 166319 - DNA, 122 bp, Homo sapiens
ctgcaaatgacagccgccgtgctgagcgctcactgaagtggaaccgggagatcagaggtccgtctccaagtcgcccttagcggaggcaggagcagatgaactgccaagtaggagtaatagag

SEQ ID NO: 166320 - DNA, 122 bp, Homo sapiens
actcaactctgacggcttcaagtacagaaaatgtgattttctgcgttcactcttaatgttcgtggtttcttcagttttcatgtttctgcatgctttttataaactggtaaaaacaaaagagt

SEQ ID NO: 166321 - DNA, 122 bp, Homo sapiens
cgatgggtccccttgccctggctgtttctgtttcaaaaccccagcagcatcgtggggagacgggaagcacgcaggcacacggggacactcagggtccccacggccacaagagacagggtgga

SEQ ID NO: 166322 - DNA, 122 bp, Homo sapiens
actccgtgcgctgtgtgctccgtgcgctgtgtggtccgtgctcgctgtgtgctgtgcacgcggtgcgctctgtgctgtgttgcatgctctgtgctgtgtgcgctgtgctgtgtgcgctgtgc

SEQ ID NO: 166323 - DNA, 122 bp, Homo sapiens
cctcccttcgtctctgcccacatcacctgctattaaagagacacaaaactcagccaggaacggtggctcatgcctgtaatcctagcactttgggaggtcgaactgggctgatcatgaggtca

SEQ ID NO: 166324 - DNA, 122 bp, Homo sapiens
acagggccactgggagaaggtggtgacctttaagggggcctagagggtcctcctgccatccgactcccccgagggagaccccgagtgtgagcagagggagggtggccaggcctctgcacagg

SEQ ID NO: 166325 - DNA, 122 bp, Homo sapiens
tatgagccacacgcttggccccattcattttaacaaaaaaataaacaatatgagagtgtacgccatacattattgtttcatgagcctttcatttcagttacacagacatattatgttacgtc

SEQ ID NO: 166326 - DNA, 122 bp, Homo sapiens
ctctcgtgctctgcggacgcccagggagcggccccaacccacgcgccggcttctcgagctcggcctcttaagtgacagactcaaacacctgagcaacaagtttcctggggtcacctaataac

SEQ ID NO: 166327 - DNA, 122 bp, Homo sapiens
taccttcataacccagaaaagagagagaatcttgatgatagcaaggtataaaatgtattacgccatcacaggatttagtatgtgaagctagtgtgatttcattaaaaaagccccaaattgag

SEQ ID NO: 166328 - DNA, 122 bp, Homo sapiens
tgaagtccacctggagatcttcaaagggggctgctccataagcttgtatgccgggtggaacggctggacattgcctagcattatgctgtgggcaggtaacacaccactgcgtcaccgttttg

SEQ ID NO: 166329 - DNA, 122 bp, Homo sapiens
ccagatgtgactgtgcctgtcacgaagtggggaaaagagggctcctgagggcccaggaaccgccagcaaaccagcctaccacacccaccagaggcgtccaaaaggcctgatctcacccacag

SEQ ID NO: 166330 - DNA, 122 bp, Homo sapiens
tcggctcactcggttatatctgctgaacacaagagcttgctgtttacgcaacaccaccttcgcgtgttttaaatgcctttgggagaagcagatccagaatacttgtgtaatgaacaagcaca

SEQ ID NO: 166331 - DNA, 122 bp, Homo sapiens
agaaacgtacctgcttaattttgcttttgacacttagaccaacgtgcctttgggggaaagcgaggctgctaggaagagtgttcctagtcaacatctgagctctggcggcttccaaaacactc

SEQ ID NO: 166332 - DNA, 122 bp, Homo sapiens
gcagtacggcctggtctacatatacagcggagtgcagtacggcctggtttctatacacagcggagtactgtacggcctggtctatatacacagcggagtgctgcacggcctggtctacatgc

SEQ ID NO: 166333 - DNA, 122 bp, Homo sapiens
ataaacacgaaggaagagccggcatttttggcagagtgtagaagaggctccagaacactgcggactcactggtcagcgaacccttcattcaggggacagagcgggaagcccagagagaggcc

SEQ ID NO: 166334 - DNA, 122 bp, Homo sapiens
gcgtccctaggccgccttcccgggccgtccacgccttaatggcctccgccgcgcggcgttcgagctgccgccatacttcccggcccaccacgcccagcgccgcccaaaggcgctgcgtcccg

SEQ ID NO: 166335 - DNA, 122 bp, Homo sapiens
cgccggtagcaggctgcgtgtgcatgacacgtgtacttgtgtgtgcttgtgcgagcagtgcgtgttccttgcctgttcactcacacggagggggcatgccaggcgctgcggaggggcagaaa

SEQ ID NO: 166336 - DNA, 122 bp, Homo sapiens
tatctatataacaaacctgtacgtgtaccctgaacctaaaagtttttaaaaagtactgatcggccgggcgcggtggctcactcctgtaatcccagcattttgggaagccgaggcgggcggat

SEQ ID NO: 166337 - DNA, 122 bp, Homo sapiens
aggaatgcctggaccacctggacctggaaggggcgagaacagactctccccgggagcctccgcaagggctcggccctgctagtaccttggttttcagcttctggcttctggagctgtgagag

SEQ ID NO: 166338 - DNA, 122 bp, Homo sapiens
ttaacttgaggggcagccggagcactgggagaggcagccctggcctcggaatatggaatccggtggccctgggtgctgcaggaaagggaagtaaatactctgttctaatagaaaacaatcgt

SEQ ID NO: 166339 - DNA, 122 bp, Homo sapiens
cactctggctttctcagacacttttgttctcttggaccctctgggaggggaggagatctacgcaggcaccgagatggacatcctgagactgcaggcagcccccacaggaagtgagaggcagc

SEQ ID NO: 166340 - DNA, 122 bp, Homo sapiens
tatatttttctctactatgggtttaggagctaattgttagaactgattagaaaggtagtccgtagatgataataaaagcctaaataagtgtcttgtgagtaagttgtttatgctgcatcagc

SEQ ID NO: 166341 - DNA, 122 bp, Homo sapiens
ctggagtggcaagcaaatagctggtattttcagagccgccctgccccggacagagaagaccgggcccagcaggcgttggtggatgcctttcaagctgtaatcagtttccccgaacgtgtacc

SEQ ID NO: 166342 - DNA, 122 bp, Homo sapiens
ccgacgtgctgctcctgaaagaggcgctgcgcctggagcgggagaactcgctgcagaaggcgttcgctgccgccgcgcctgcgcagcccggccaggtcctggagagacaggtgaggctctgc

SEQ ID NO: 166343 - DNA, 122 bp, Homo sapiens
gctgtcactgtgccgctgtcatggcacgctccgggagtgccacgccacctgcccgggctccgggagcccctccacggagcccaccccagaggctggtacaggtcaggtggggtgggaggaag

SEQ ID NO: 166344 - DNA, 122 bp, Homo sapiens
cagaaccgttttccaagatgctgcgtcattttatgttcccactagcagtggttgcggggccggtttctccacgagcacggctggtttctgccgtctttggattctagccgtcctggtgggtg

SEQ ID NO: 166345 - DNA, 122 bp, Homo sapiens
cctcctttcctcaccccaatgataatggccttggggagctgctggaccaggtcatggaggcgaacctgctccttggaagcgttgcccttccggaactcgtgcagcaggccacgcttaaactg

SEQ ID NO: 166346 - DNA, 122 bp, Homo sapiens
tagaccggagacagcgagtatagacagcccttctggataggggcagacgggtgggagctccgaaggggtgccggggcggtgatcgggaggtctccagcggcccgaaccagggtgaagaagaa

SEQ ID NO: 166347 - DNA, 122 bp, Homo sapiens
caaggaaaggagactccctttcgcggtctgctaagtaacgggtgccttcccagacactggcgttaccgcttgaccaaagagccctcaagaggcccttatgcgggcgtgacagaaggctcacc

SEQ ID NO: 166348 - DNA, 122 bp, Homo sapiens
acaccgggggcacggtcagaggtctttaggggagggcggcggtctgagagtcctgggtgccgacctgttgggacccaaattccttgtgggaacgatgataaggagcaggtttacagatcata

SEQ ID NO: 166349 - DNA, 122 bp, Homo sapiens
gagagttgggattccagctgggcctagacaggtgagtagaattctaaggaaagggaaggacgggggattccgggaaaggaaaacaaaggccggagccatattgccaattaacgagatggtaa

SEQ ID NO: 166350 - DNA, 122 bp, Homo sapiens
ctggatggctgcccccagtccccggaggggcctctgagcagcgtcctggtgctgggaggccgtatcgtctgtttccgaggaccctgtcgcgagcgcgggagtctctcagggtctcttctgcg

SEQ ID NO: 166351 - DNA, 122 bp, Homo sapiens
cagcaaatggagaaacccttggcagcgcccggacgccctccagtggcggctcctgagaaccggggacagttcaatccgggccacaaacttttttagaacaaatcattgtgggaagctgggag

SEQ ID NO: 166352 - DNA, 122 bp, Homo sapiens
ttttcaagcaatcgcctgtgcactttatcctaagtgtttaccacacaagaagtctttgaccggtgctacctgtcagaggagagagaagtttttgtgagccaagggtcagagtgggttccaag

SEQ ID NO: 166353 - DNA, 122 bp, Homo sapiens
tgaaagggcaaggcactcatgaagtcatggttgaatattgtgccagtaagtgctagtggtcgcctcaatatttatttgtctcttcttctgtagtaataggtttattctgaactcatagacac

SEQ ID NO: 166354 - DNA, 122 bp, Homo sapiens
gggctggaaaggaaacctggtgaagggctggcccggagcctggggtggggatattcactgcgggatagggccagcaagaggacccgacacgcatcgtcccgagtgacacgtgtaaatgtcaa

SEQ ID NO: 166355 - DNA, 122 bp, Homo sapiens
gcccagttcggcatcaaggacgtctttgacaacgccatccgagctgcactcatctcccgccgccacctgcagttctggaagtcccacctccgcaatgtgcagcggcctctgctgcaggcacc

SEQ ID NO: 166356 - DNA, 122 bp, Homo sapiens
tatgtaagatgaaccttggttaggtccagaaaggtgggacaactcaaaacaaaggcaggacggcatagggtaaataagacaaaagtgtttgcattatcttgaggttctaattagcctttcca

SEQ ID NO: 166357 - DNA, 122 bp, Homo sapiens
tctgctttttaactctatataatacttgattttttcaataggaaaacagcaaatgattagcgccatgtttggaagtcagtgcacataaatgctgtttctcgtaagtgaggttgaaggatgcg

SEQ ID NO: 166358 - DNA, 122 bp, Homo sapiens
ggcaggccggcgggcggtgatgtggcgggactctttatgcgctgcggcaggatacgcgctcggcgctgggacgcgactgcgctcagttctctcctctcggaagctgcagccatgatggaagt

SEQ ID NO: 166359 - DNA, 122 bp, Homo sapiens
actgggacgtcctgggaaaataaattaatcacgtacggagtgagagaacaggaaacctgccgagaaaaagatcgataagcagacaattacaccaagccaacttcagtgcaatcgttaaagct

SEQ ID NO: 166360 - DNA, 122 bp, Homo sapiens
caaactcccaacctcaagtgagccacttgcctccgcctcccaaagggctgggattacaggcgtgggccactgcaccaggccgaaaatggctgtatttgttgtttcttttttgagatggtctt

SEQ ID NO: 166361 - DNA, 122 bp, Homo sapiens
gaaacacaaatactaggtggaatcaagaattcattctagggatttgacttcaggcacttgcggacgcttgtcttacatctggtgttggagtctgaattctgcagggcagcgggtcagggtgg

SEQ ID NO: 166362 - DNA, 122 bp, Homo sapiens
tggggcccaagctgctgcccactcggggacccggcagcctcctctctgcccgcaggtgcgcgtgggccttgctgcattcaggtggaatgatgaacttttgcgctcttggctgatacatagtt

SEQ ID NO: 166363 - DNA, 122 bp, Homo sapiens
aaggtagatacaccaggcacagaagcacaaagaggcagcccctgccctcagtgtgcgccgcgtgctgaagtcgcagcccctaacctcagtgtgcgccatgttctggggaaagacgcagcccc

SEQ ID NO: 166364 - DNA, 122 bp, Homo sapiens
cgcccggccggagctgcgggggccgagggacgccgcgcccgccgccgccagccgggctcgcgcgggagagcagggaagagaaactttgccttttattgtttttagtccttaagtgcaaggaa

SEQ ID NO: 166365 - DNA, 122 bp, Homo sapiens
aaggacggagagcagctgctcccggccaagccccgatggactccccctgctgccaggcaccgtgctggacctgtccacgggcgtcaactcagctgccagcagcccagaggcgttggcccctg

SEQ ID NO: 166366 - DNA, 122 bp, Homo sapiens
agggcccagagccccactttgccaaggagctgtcgctggagcggtgactttgttcagggccgagaaccggaggaggaggccagacttgctgctgggcagctggcacatgggacatggggtgt

SEQ ID NO: 166367 - DNA, 122 bp, Homo sapiens
gccaggcgcaggttgcaccagcgggcctaagtggttacaatcccccaaattcaaaccccacgagttgtccctcccgcgcccagccgaggtccaggatccgcgtcgcacgtgatggaacccgc

SEQ ID NO: 166368 - DNA, 122 bp, Homo sapiens
catctcttgtctactcctcttgccccactcaggggcaggcctcttctagattcttccccccggcacccctccacgaaggttgtttttcacaagcctggataatcagcctaatccccctgctt

SEQ ID NO: 166369 - DNA, 122 bp, Homo sapiens
ggaaagggggtttctttcctattttcttttgtgcaattgtcattattaatgataccgactcgtttactcaaacagtcgaatcggagccccagctcttagcccggatgcagcaattgcccgtg

SEQ ID NO: 166370 - DNA, 122 bp, Homo sapiens
ctccagggttcaagcgattctcctgcctcagcctcccatgcaactgggactacaggcgcgcgccaccacgcccagctaatttttgtgtgtgtatatatttattttgagatggggtctcactc

SEQ ID NO: 166371 - DNA, 122 bp, Homo sapiens
ggcacagagctgcagcctgggactctccgtggacccagactggggattttgccaggggggcgatgggaggagcaggtgctttgcctggcggctgtgtctgcatttctggacgccccagagca

SEQ ID NO: 166372 - DNA, 122 bp, Homo sapiens
agccccctgcgcccggctgctctcccagtggtggtggggagcggtgggggtagacgggggcgcgcccaggcttttctaatccggcgctggtgggggagaaccgagggcgccaccgcccctcc

SEQ ID NO: 166373 - DNA, 122 bp, Homo sapiens
accgtttcaacggttattcttatttcagatcttagtttaccaacccatgttgtaaagtaccgcagctggacagagtggaagctctgaagacctttgctctgaacaagtaattgagaagggaa

SEQ ID NO: 166374 - DNA, 122 bp, Homo sapiens
ttctgggccaggactcaggctttccaaactgagaatttggggtggaaaaaagcaatcacccgttgcccggggagcataaaagctgaatgcgcacctcaaagagatgtggtgtttgcgcaggg

SEQ ID NO: 166375 - DNA, 122 bp, Homo sapiens
tcgggtctccggtgggcacgcccattgtgtggcacctactccattcccttcacgggaaggcgcggctgtcactccctccaaccatgggcctccgcagaacgttagatgaaaatactctgaag

SEQ ID NO: 166376 - DNA, 122 bp, Homo sapiens
gcttatagcacattaaacatacttcaaaaacaaaacccaactatgttagaaaagccttcacgatcacatccatatgtttagttttaatttgcatcacacttagctctgaataattaagaagg

SEQ ID NO: 166377 - DNA, 122 bp, Homo sapiens
cgagtaacaggccacagatgaggctccctatgacggcagcagtgatgactcttgtaggcacgattactgggcaattttcttcatcgctgccatcaccacagtcatcttgagaatcacacacc

SEQ ID NO: 166378 - DNA, 122 bp, Homo sapiens
tggattctttttcctaacagcatctacatttagtggcaaagcctcatctccgatagcctacgaacactgctctatcttacacctgccaccttatcttatatattatgttacatttaaaagtt

SEQ ID NO: 166379 - DNA, 122 bp, Homo sapiens
aggggtggggcaggaacgggggcggggacggcgctggaggggcgggtcgggtaggtctcccggagctgatgtgtactgtgtgcgccggggaggcgccggcttgtactcggcagcgcgggaat

SEQ ID NO: 166380 - DNA, 122 bp, Homo sapiens
gacgcggtccatggcctcccgggcctgggccatgcgcgtgctggtgggcgggttccgttccgacaccagctgggtggaccccaggtacctggccccaaatatgacaccgtccaggaggtctt

SEQ ID NO: 166381 - DNA, 122 bp, Homo sapiens
tccagcttctgtttttacccactgagggccctaaggggactcttctggagaaaagaggggcggggacagtgccagagcccctcacccagaggaacccatggttgattcttaatggagagctg

SEQ ID NO: 166382 - DNA, 122 bp, Homo sapiens
agaaactacaaagtcatatggtaaaggatatgggtacagggaggtgtggagaattggggccgttattgtaatctaccaggtttggttgactgtataccctaacaaaatccatctgaaccaag

SEQ ID NO: 166383 - DNA, 122 bp, Homo sapiens
tgactgggcggggcgcctcaacctcttcactcctcccccgccctctcgtggccatgcgtgcgtcagtacgtatgtacgtacgctcgagggaaacttcagaggcgcatcctgacgtcaccccg

SEQ ID NO: 166384 - DNA, 122 bp, Homo sapiens
gtccaggtggctggacatcagggtgtggcgctcaagagagggttctggagtggtcgacaccgaagtggagaggaagcagtgaggtgttctaacaacggtgaggaattggggaggccgctggg

SEQ ID NO: 166385 - DNA, 122 bp, Homo sapiens
ttttcataacgggcaggtgtgagtgccctgcagctggagaccagaagcctgaaggcagctcggccctccccagcccacagcgccgttattccgtttctatatcagtaaacacatttcatttt

SEQ ID NO: 166386 - DNA, 122 bp, Homo sapiens
cgagcctgccagccgagagcggttgggtcagcggcttcatggtgcagccgagtctcaaagcgggtctgcactctcgcctccctctgcattctcttagccactatttgcctggtcccgtcgcg

SEQ ID NO: 166387 - DNA, 122 bp, Homo sapiens
aaaatgaggcagttacttttaagtcagagatttgtaacgtcctgttttttttggcagttgcgaaacccggaattcctatgtgaagttttgcatatgtatattcatactttggagagcaaggc

SEQ ID NO: 166388 - DNA, 122 bp, Homo sapiens
acagcaactgccacccaagaagtaggactcctttcttttggtaggcaaaacaaagactcacgtcccatctttgctttctaactttttccccaattcttggcaatacccatgcttcagttctg

SEQ ID NO: 166389 - DNA, 122 bp, Homo sapiens
aagaatgaactagatggccattaagagaagagataggatgctgttgagcacacaaaaacacgtgccagttagaacctatcatgaaaccacatctgcctggcctttacctaggacccagccac

SEQ ID NO: 166390 - DNA, 122 bp, Homo sapiens
aatgagactaatactagtacccaccttctaaagtgattatgagcattaaatgaattagtacgtttaaaggcttagaacagtgttttatgatacgataaacactcaataaatgttagctattg

SEQ ID NO: 166391 - DNA, 122 bp, Homo sapiens
atatggtattaatatttctttcttgttttacagccaagaaagggaagggaaaggactagacgccaagcctggatgccaaggagcccctggtgtcacatggggcctggcccacgccctccctc

SEQ ID NO: 166392 - DNA, 122 bp, Homo sapiens
agctagggagaaagcatccccggcgcggggtgcacggagccccagaccccacccgcctcccgcccggaccccgcctccactcagggagccgggccccacctcccgccctaggccccgcctcc

SEQ ID NO: 166393 - DNA, 122 bp, Homo sapiens
tttgccttcatttctccggctgcatccgaggctccccagaggggccggcgcgcgcccgggcgcacactcgcacacctgcccgcgcgcacacacccgcgcctggccccgcgcgcgcacgtccc

SEQ ID NO: 166394 - DNA, 122 bp, Homo sapiens
taattttttctaaagattctatcagtcttgatccaatgtgctaggtgataaatgactgaacgctggccccggaggggaagttagcaatgagtcatgctgtctcctagtaaccagtcagtaaa

SEQ ID NO: 166395 - DNA, 122 bp, Homo sapiens
cccccgcgcccggccaaaaaatgcccgtcttaagaacaacaaaacagcctccttcaccctcgctatcctccagttacctcctcctcggctccggtttgcagccaaaggccttagtctaccct

SEQ ID NO: 166396 - DNA, 122 bp, Homo sapiens
ctaaagagaacagggtgtaacgggggtcatttcagggctgttcttttaaatcggtgagcacggtctgtctactttccctcagttgtctagagaccacacgccacccccgccccgggggagtc

SEQ ID NO: 166397 - DNA, 122 bp, Homo sapiens
cagcagccgaggtggcaagccattaacgtgagaaccacactggcatctcagcagccgagccggcgagccgttaacgtgagaatcacatctgtgtcctggcaaccgagccaggcatgtcatta

SEQ ID NO: 166398 - DNA, 122 bp, Homo sapiens
gccacttcgtggctcttttaggagcattaagtaaactttatcgggcaacactgacagccccgtcatagtcaccgcgacggccagctcacccggtagctctcgaaggcctcgtcgatgggtgc

SEQ ID NO: 166399 - DNA, 122 bp, Homo sapiens
tgctgccggcccgggctccatgagcgtggcgggcactttgcagtctcgggtgttcctgcccggtcttctgttcctaaactgcagcaaagggaaaaggaactgaaaaaggcaggctcgtcgtt

SEQ ID NO: 166400 - DNA, 122 bp, Homo sapiens
tcgggaggaggagaaatggaacatcaggcggaggaaacagcccagacaatcgcactgggacgtgaaaacccttgggctgcatgcggggagaaaaccagaattggggatggttagggttttgg

SEQ ID NO: 166401 - DNA, 122 bp, Homo sapiens
tcgttgaaggtggaagaaaccggcatgtccagggtggggccttactgtggaaagaagggccggactcagctcctaggcccccaaagggatctgggaccagtgtgctgcacagctgtgtcccc

SEQ ID NO: 166402 - DNA, 122 bp, Homo sapiens
caggccccagacaaagctcacagccccgggcccccacaaagctgtgggtgtgccttgctccgccagctctgaactgccccctcagatgggtgtggggggtgcgagcagaatccagccagggc

SEQ ID NO: 166403 - DNA, 122 bp, Homo sapiens
aattggatcctcgctgcctcctcccagctccccgcccccaatcggggagcgggtaaatgccgggtaccttggcaaaacagtcggatccaaacctattatttgactaatgggcttccctcgtg

SEQ ID NO: 166404 - DNA, 122 bp, Homo sapiens
ctccacccccgctaccccctaaatcccccagcttccaggccccaccgcagaaggccggtgcgcaggccttgcccgccccgcctgcccctccgggctcccagccgttcctgcagaagaagagg

SEQ ID NO: 166405 - DNA, 122 bp, Homo sapiens
aggatttctcggcgcgcttgtcccgattgggaactgtgacgttaggagattttgcacaagcgcggatgaacacacacataacaaacacaaacacacacataccccgcggggattttttatcc

SEQ ID NO: 166406 - DNA, 122 bp, Homo sapiens
ttatcaaggtacacacacaagctggtcaactcacttttcctagtgaaaggcgggcagtctcggatgctgcctctgcctccacggctgcctccaccaactcacagctcatgatacaggttctc

SEQ ID NO: 166407 - DNA, 122 bp, Homo sapiens
gctgcaccatgggagcccttctctgggctggctgaggccggagccagctgcctcggcttgcgaggaggtgtggagggagaggcacgggcaggaaccggggatgcgtgtggcgcttgtgggcc

SEQ ID NO: 166408 - DNA, 122 bp, Homo sapiens
gtgggggcggggtacagagagattatctggctgatgatagtaacacacctggaaagacaccgagggctcctgctttgccaagggtaacaccacctccccatgaggacagatcctacatcagg

SEQ ID NO: 166409 - DNA, 122 bp, Homo sapiens
cacggccgggggcgtctcagggtcgcgacaaatttctggccgaaaagtttgcagggtctgcgtgtcggggaccttatgacctgaactacatatttgtatgtcacttgggagacgaaaatggc

SEQ ID NO: 166410 - DNA, 122 bp, Homo sapiens
tcagacagagttggggggcatagccctcgctttccaggccagtggacgcaagaccccaggcgtgtgcgctcttctcattgaggccgcctgtgagctgggagaagtcagaggaaccatctcgc

SEQ ID NO: 166411 - DNA, 122 bp, Homo sapiens
ttggtttttggaggtcctgggtgcgtctccaccatggctcccgggttcccttgcgcacaccgagccagcagctgctggggcctcagggctcgcagctcacaggcttctgacgcctcagcctg

SEQ ID NO: 166412 - DNA, 122 bp, Homo sapiens
caccccaggccggggcctcattccgttaagtagggccaggtgtctgtcctctcacgcgtccgaggtggctgccggcgtgcgggtgtgactgtcgatgagagctctgagctgggatatctggt

SEQ ID NO: 166413 - DNA, 122 bp, Homo sapiens
attttatttattattgtaattagatcttcacaaagttgtcttttcactgtgttttgtcaacgtgaaattaaattgtagttataagcaaaagttggttgcctagggaacaattgtatattcag

SEQ ID NO: 166414 - DNA, 122 bp, Homo sapiens
tcaaggggtgtggaaactaattgtcttgccatttaataaatactttttccatggcaaccacgttgtccctcatttcctgcagaagagaattctttcttttatggaaaattcttgagagaatt

SEQ ID NO: 166415 - DNA, 122 bp, Homo sapiens
cataactttcagtccgaagtcccttaaatatttacaatgggcctgtggcttttgcactagcgcctcctgccccacccccggagccagcggccaccacgggctcagagcttctctgccctctg

SEQ ID NO: 166416 - DNA, 122 bp, Homo sapiens
cctttcttaatgccctggcaagaacgtaaagcgtttaagccgccaaatagtacaacaccccgctccaaagtaggcagatggataacgcagatcatggctcgactcaccagagctgcttggga

SEQ ID NO: 166417 - DNA, 122 bp, Homo sapiens
cgccaaatcctctctcgtgagatctgcccttctcacgaaacttgcgcttgcttcctctcgcggtaatttcatggcattgctaggtccagatatcgcgatatttcctggtggtcgctgtaata

SEQ ID NO: 166418 - DNA, 122 bp, Homo sapiens
agacaacagtgacggagcctaagagcaaagccaaagccacgggcaggggtgagcgggacccgaggcaggagatgacggagcctaagagcaaagcgaagccacgggcaggggtgagcgggacc

SEQ ID NO: 166419 - DNA, 122 bp, Homo sapiens
tgctcgcggctataaggggcggaggctgggcggcgttgctctgcgctctgcggctgacggcgcttttgtctccggtgagttttgtggcgggaagcttctgcgctggtgcttagtaaccgact

SEQ ID NO: 166420 - DNA, 122 bp, Homo sapiens
ggaaagcgccatgtggtctggggtgatcaggcattgaaggagactcaacggagctccttgcggaggagagtcggctcacagacaggcaggaatgaacaggccgatctgctaggggctgatga

SEQ ID NO: 166421 - DNA, 122 bp, Homo sapiens
tggcagccccgattatttacagcctcagcagagcacggggcgggggcagaggggcccgcccgggagggctgctacttcttaaaacctctgcgggctgcttagtcacagccccccttgcttgg

SEQ ID NO: 166422 - DNA, 122 bp, Homo sapiens
cttaccctccacaccccactccccccggcccggagctacagatcgcccccccgcactcgccgccctttcaatcccaagtagacccagaactcaccgaaatcaggtgttgagctgggccaggg

SEQ ID NO: 166423 - DNA, 122 bp, Homo sapiens
agcgcacgttgagcagtgggttcttgggtttggtatcacattgcaacgcagatacatgctcggggctgatactggatagctgtctgcacatatagctctgggtttaagaacaaacttatgag

SEQ ID NO: 166424 - DNA, 122 bp, Homo sapiens
tgcagttcaccttggatttaaggtgtgctgtttttctggcaaagagtcagtgggagtgtccgggaaaagggctaaagtctttgtagtcagacaaaccggcttgcagtcctgactgagctaca

SEQ ID NO: 166425 - DNA, 122 bp, Homo sapiens
cacggtgaggcgcgcgaggcgtgtgctgccagcttctctcttccttccccggtccgccttcgcgcccttaaggagacagtccctgggagtttctgcctttggtctccagttattgttctctt

SEQ ID NO: 166426 - DNA, 122 bp, Homo sapiens
aggtcctcaccagcgagttggactctcgccctgggctcctcatcggcgcctggagggcagcgctgcagccccactcccgggaaggccgcgtcctctgcctggtcctgggatcctgcagaccc

SEQ ID NO: 166427 - DNA, 122 bp, Homo sapiens
tctctgcaggaacgcagctactggggtatattgggtatataaagagtgggtaccctccctcgagcgaccgggtccaggcacgcgggacgatggggtttgcaatcccgcgtcccagccgcccc

SEQ ID NO: 166428 - DNA, 122 bp, Homo sapiens
tgggtactgtcccgggacagccagttggtcctctccttcccgttggcaattctggctttccggcattccacaccaccggcccagcccctggggcttggcggaggcagtgttcctgctagctc

SEQ ID NO: 166429 - DNA, 122 bp, Homo sapiens
cctgaactcgggtctccgcgtagccggccgccgccgctgggtcgctgcctggccctcccccgctcaggcgccgagcgctgtgcgatccgccctaacatctgtccgtccaaccattggcgcat

SEQ ID NO: 166430 - DNA, 122 bp, Homo sapiens
ggatccggcaggggagcaacaaatgtggttcggcaaattgctaaacgaaaagcggacacccgcccacgacgcctgctctgatctgacctcccggcctacagccctctccaggctcctcccac

SEQ ID NO: 166431 - DNA, 122 bp, Homo sapiens
tgcccgcactcctggtcctgctcggggctctgttcccaggtgagtcggggtggggattgccgtcgggccagttctccgaagccccgggaggaccggctcccgggtcaggtcatgcatgctta

SEQ ID NO: 166432 - DNA, 122 bp, Homo sapiens
tgggaccggacaaatgacagcgtccactgaccctgactgcagaacccacccatgatgcaacggctttctgtgattccgggaaccccaggactccacctcctcacgggaggggctcccaggaa

SEQ ID NO: 166433 - DNA, 122 bp, Homo sapiens
ttaaaaatctttttcttcctttatctccctaaggacatacatggtttactatggtacacacgtacccattacaaaactttgttcccatataaagagtctctttctgtttattaagttgacac

SEQ ID NO: 166434 - DNA, 122 bp, Homo sapiens
ggctggaaggccagaagactccatcttggtcttgcccacagatcctgctgggagagctggcgcgtgcctttttccctgcaccaccttcagccgtcccagtcatcggggagagcaccatcgtg

SEQ ID NO: 166435 - DNA, 122 bp, Homo sapiens
aattaaacaatgtgtagcctgaggttggatcctccacagtgaccaaaaaaaccaacaacccgtggaacaagtttagcaggcagtgtacacgaccaccagagggaggcagagggctgctgaga

SEQ ID NO: 166436 - DNA, 122 bp, Homo sapiens
gaatttttgaaacagggagcctgaggaagggaggcttgctgctcccaaggttgcacgcctcgctgttaactatggcgaagggaagcttcaggcttgcccaacagccaattacggtgagggaa

SEQ ID NO: 166437 - DNA, 122 bp, Homo sapiens
cactgaaagaactccttaatgatacataacacatgccacggaacacccatttattcattccgcaagaatttatggaaggccacaactctgtccagtggtgtgctaaaaattttatacctggg

SEQ ID NO: 166438 - DNA, 122 bp, Homo sapiens
gccgtcgccaggagccctgggatccggaactggggcagaatccaggagcagggtgggccccgagctctcaggcagcgctgcggctccgcccacggcccctggcagagtcactcagccccagg

SEQ ID NO: 166439 - DNA, 122 bp, Homo sapiens
cgccgtgggcctcgccgccccggctctgcagaactgagttggactccgcatttcaaaggccgctccagcgctgacatgctctgactgtgattctacccagatccgggaggatgggggcgggg

SEQ ID NO: 166440 - DNA, 122 bp, Homo sapiens
gccaaaggtcaaatataatggcaaaaaccgcaactacttttgcaccaacctacttaaatccgctaggctgttgggccgtgctccccttgactctgccttcatggtggaaagcagctccgggt

SEQ ID NO: 166441 - DNA, 122 bp, Homo sapiens
ttatcagcctcagtcctcacagcggaacccaggcgtccggccccccacccttcaggccagcgggcgtggagctgaggctttagagcctcccagccgggcttgttcctgtcccattgtgtatg

SEQ ID NO: 166442 - DNA, 122 bp, Homo sapiens
ggctcctcactgcacagctctggtctgggcgcctggctctccaggagtcggttttctaaccgggcccatcgcgcgtgtgggacggggaggcaggagccacggctaagccggaagcctcaggc

SEQ ID NO: 166443 - DNA, 122 bp, Homo sapiens
agagtctcagatgctttgttacaggggcacaaactaccctacccctactgtgcgtgggtgcgggagccttggtccataagggagccatgtgggcaatggcttagggtggtttagggttcctc

SEQ ID NO: 166444 - DNA, 122 bp, Homo sapiens
agtacaaatgcacgcaaatatttgtggccgaatctcggcaacccgctggaaaggattaaacgtgcggttgccgtgactaaacgcattcattcaccctacaagatttaggaaaatgtaacgtt

SEQ ID NO: 166445 - DNA, 122 bp, Homo sapiens
ctggaaggagctgagaaaccacaagctccaatgctcacgccccataggggaccgaggaaccgcagaagggaccgcacctgcccggtggccagcaacggaaggacggcagggagcgaacacac

SEQ ID NO: 166446 - DNA, 122 bp, Homo sapiens
gccgctgatcactctgcatgtttcttcgtgtggtggtcgcgtccatcttcaagaacagctcgttgtgctcatctgtgaagccttattaaacgtggacgttgttttctgccttcccaggattc

SEQ ID NO: 166447 - DNA, 122 bp, Homo sapiens
ggggctcggctttgatcccagggcaccttttgtccctggagacgctctgccagccaggtacgtggagggagtgcagcccgccctcccgggcgacgcgcggggctggggcgggccggcggctc

SEQ ID NO: 166448 - DNA, 122 bp, Homo sapiens
ttgcttgctctctttggggacatgaagagaggtattgagcaactttgtaagtttccattacgtgaatgcctagatgtgtagtgatagcatcaggtgagaagaaggaaagcctgaaatgcctc

SEQ ID NO: 166449 - DNA, 122 bp, Homo sapiens
tgttgataactttgatgatatgaatttaaaggagtctctccttcgtggcatctatgcttacggttttgagaagccttccgctattcagcagagagctattattccctgtattaaaggtaaaa

SEQ ID NO: 166450 - DNA, 122 bp, Homo sapiens
gggagccgcgcgggcatggggagggcgaggtcgcagaggcctgcgccctgtaactctttccggccccttgcagctcctcccttctcccagagagatctttcgcgaggagggtctcttgggga

SEQ ID NO: 166451 - DNA, 122 bp, Homo sapiens
agcttttacaatggggatcagaccatgtcttgaaagaggggctggccgagctgggagccgcgacgcgcccccacagccactcccctgaattcccaaggcctcgttcccgcgggtgcggcgtg

SEQ ID NO: 166452 - DNA, 122 bp, Homo sapiens
gctctctttccagtgggtgtgggccggctggaaaatgacctcagagggcggggtggctaacgggcctggggagctcagggggctccggggcgtgggttcccacaccatgggcttgctctctg

SEQ ID NO: 166453 - DNA, 122 bp, Homo sapiens
tgcgtaagtctccggcagtgggcacaggcggagggcagggggcattcctctgggctgactcgagcccggcctgcctggcacaagaccccctgctcctggaggcagctcaggggcttgctcat

SEQ ID NO: 166454 - DNA, 122 bp, Homo sapiens
ctctctcactcctggggtcggctctggccggtggcctccagctcagctagcggccggacgcgcagcccgccgactagccctccaggtcctagcgcgactcccggatcccggatccggcggat

SEQ ID NO: 166455 - DNA, 122 bp, Homo sapiens
tcattgcctttcagttccgggacataaagcgcgctggaaggacactgagtcaccaaccaccgccatgggccggaagccaccgccctcgcgtcaactgcaatctagagcgcggcgcatcccgt

SEQ ID NO: 166456 - DNA, 122 bp, Homo sapiens
cagattgttcggggatgccaggtgggtcatcagggcagaacccccactcggtgtgtgcgtcggaggagctgcagcccggggcgtccccagtctctcttgttaaaaataaaaggggattccat

SEQ ID NO: 166457 - DNA, 122 bp, Homo sapiens
caccgtcctgctcctggaggcaggcaggcacagagccaggccagctcctctggcaggtcccggagcaaggccaggcccaggtgtggctgccatgaccgatcctccctctgtccaccctgaag

SEQ ID NO: 166458 - DNA, 122 bp, Homo sapiens
tggacgaatggatggatagttggttgggagggaaaggggaattggctcacgtgtaaattgcgttggtcttgaaaagatgtttccttaaactgcgagtctgacgtatttgcacatttttctgg

SEQ ID NO: 166459 - DNA, 122 bp, Homo sapiens
aacctccaccctggatatgtgatcaccctagacatttgctcaggtttctcatcctccatccgccaggtgatgcctatctttagcaaaaatcctgttagatggagctagccagaatctccctt

SEQ ID NO: 166460 - DNA, 122 bp, Homo sapiens
ggtttgccctgttcctctgtagacccaggcagcttccggccgtcagattagtcgtcagtgcgcagacaccacccttcgtggacacgccctctaggcgtaaggttccatgcgagcggtaagag

SEQ ID NO: 166461 - DNA, 122 bp, Homo sapiens
ctggctgaagcttctccagacttgtgccggaccttggtgcagccaaagttgctttctccgcggccacctaagctgccaggtgcacattaactaagtggcagaaggccatcggcttggcaatt

SEQ ID NO: 166462 - DNA, 122 bp, Homo sapiens
ctgtgttttgccatcagaggctggacactgctaaagccggcactcccggggtgcccctcccggcctcctcagggcgtggggcctgcagccttgactgacactgtcaccccatcaccagcctt

SEQ ID NO: 166463 - DNA, 122 bp, Homo sapiens
gctattttaagtcctgaatgtcaaaactcttctgggacattgatctcaaactgcttattccgtgaagtgaaaccaggctttctgccaccaatgtggcgtccctttttgcaattttagaaaaa

SEQ ID NO: 166464 - DNA, 122 bp, Homo sapiens
tgcagccgctgagccaggagcttctttctccgagagcccagacggaaaataaaaactttccggaaaagtccctgggctgggggagggcaaggggatgaggatcgggaggggaggggactaag

SEQ ID NO: 166465 - DNA, 122 bp, Homo sapiens
tgaccgtccgtgtgagcatctgtgtgaccgttcgtgtgagtgaccgtccgtgtgagcttccgtgtgaccgtccgtgtgagcatctgtgtgaccgtgtgtgtgtgaccgtccgtgtgtgaccg

SEQ ID NO: 166466 - DNA, 122 bp, Homo sapiens
caggacccgctcctgcacgcggcgtggctcaaggcggtggcctcaggtcctcggtgttgacgccctgcgatgcctccctggtagtaccctgtgccttctgctctgaggccgctgcggtgccc

SEQ ID NO: 166467 - DNA, 122 bp, Homo sapiens
cactgctgccaccgccaccgaattggaaacgcgcgcccaggctccgtcgtcgccttcgcccgccgaccgggccagccggctctccgacctccctacagaatcgcaccccagtccctccctgg

SEQ ID NO: 166468 - DNA, 122 bp, Homo sapiens
gtgcgcaggcacaaatgaccacaacactgaaggcgtggcgggaagaggtgcatcgggcagcgcagtggaagggacgcgctgggcgtttgggttgaacagaagttaaggacttcatgggaagg

SEQ ID NO: 166469 - DNA, 122 bp, Homo sapiens
cgtggaaataaagggagcgctggtaacacagaggcggagtaaacgcacattaaggagcgccggcccgcgtgcccttatctgcatgtgcaggtcggctagatccatcactgcaggggcggccg

SEQ ID NO: 166470 - DNA, 122 bp, Homo sapiens
ggctggagtgcagtggtgcaatcatgacttactgtggctgcctcaaatccctgagctcaacggatcctcctgcctcagcctcctgagtagctgagactacaggcacatgccactgtgcccag

SEQ ID NO: 166471 - DNA, 122 bp, Homo sapiens
tgcctgagggtgccctgccactgccacacccaggtttccactcagacccctgctggccagcgtctcaggaggctactccctgctctgcgcagtgaccacatggttagccccagagacccagg

SEQ ID NO: 166472 - DNA, 122 bp, Homo sapiens
gaagaaagcggcgtcgacattttctgaaatgccaaaggtcccgtctccactttcaatctccgcagttacaaaacagagggctgagtcatcactcccatgaagtcaggggaggggagccattc

SEQ ID NO: 166473 - DNA, 122 bp, Homo sapiens
ggcgtcggcgggccagccaagcctgcacccacccggaacccgcgccgcccgcgagcgctgcgctcagcccccgctcccgcccgcgcctctccgccagcagagggagctggctccagcctcgg

SEQ ID NO: 166474 - DNA, 122 bp, Homo sapiens
gccccagctggggctccatcttgggctctgggctccagctgcagcctctggctgtccactcgaggctgtacagaggcagggcttggccaaagaggaagctgtcagagggggctggcttctgg

SEQ ID NO: 166475 - DNA, 122 bp, Homo sapiens
acccgtagtgcgtggtcgccgcgaggggagttctgcgcaagtacggaagctgaggttccgcgcttccgggaggccgtccgccccgccccctcgcgggggcgcttcattggtcatcggctcgc

SEQ ID NO: 166476 - DNA, 122 bp, Homo sapiens
ctctgaaactcatatctacagcaaagcttgaacgtttgtaactgttcactttggactctgcgtcacacccagagagaccctgaaccatctgtcacaggtgacgtaaccctcagttccccttc

SEQ ID NO: 166477 - DNA, 122 bp, Homo sapiens
ggggttccctgaggaggcaacagcggcgcggggccccgacccaggagcaagcagcagcttcgtgctgacctaagctcacagcccgaggcctcatgaaccgaaacacggctccctggagggac

SEQ ID NO: 166478 - DNA, 122 bp, Homo sapiens
cctctcccggcggggtctgggcagcggcggccgtggcggagggctatgcggcgggggagacggggcaggcccctcctcctttgtccgccctgccctcccattggtcctagcggggggccggg

SEQ ID NO: 166479 - DNA, 122 bp, Homo sapiens
ttatcatatgtatctgtgtttttgcatgtgtccatgttgtagcgtgtgtccctgttgtagcgtgtgtccctgttgtagcgtgtgtccgtgttgtagcgtgtgtccgtgttgtggcatgcatc

SEQ ID NO: 166480 - DNA, 122 bp, Homo sapiens
ccctccgcgcactcctgcctatgcaacaagtgtcacgtctgcatgttggcacatcatccccggtttcccgcgcccctggactggcgggaggctcccagccttcagggaccagaagacgttca

SEQ ID NO: 166481 - DNA, 122 bp, Homo sapiens
aatgccttcttgtctggattgtaagaagtctcccagatggcctcctagtttgtctgtcttcggtttattctccacattgctgctaatgatccttctaaaatggaaatctgattactcttctg

SEQ ID NO: 166482 - DNA, 122 bp, Homo sapiens
ggcccatgccctctgctggccctgctatccttgggcctcccagggccaggcaagctccttcgctgtgaccgacggcctcacgcccagcagagccaccaccaacagctttctacgaatctcag

SEQ ID NO: 166483 - DNA, 122 bp, Homo sapiens
cctcagcaacctgtgcggaagcggagttgtccagacttgccggggcaaacttcttaacatcgcacgctggtgtgacacatgaaccatggttaccgctctgctgcgagcagatggcacgccag

SEQ ID NO: 166484 - DNA, 122 bp, Homo sapiens
gcctctttactgaagcctatgccccaccaaatagcaaactatccgctagagtaaggaagccgttagaccttagaataaaactgcctgtgtaggaaatgtgattggggtttgtatctgcatgg

SEQ ID NO: 166485 - DNA, 122 bp, Homo sapiens
gctggtgcaaaggcggtaacatgcagctgtggctctgccctccctgccagagcatgaaggcgcaagcactcgggttaaaaaccattttcatggtacgaccttgtaatggaaaactctcccgt

SEQ ID NO: 166486 - DNA, 122 bp, Homo sapiens
tctgtgcctgttatatactgaaatgagttcaacccaccttgcaaaagaaccacgcgaaaacggaagggaagccatagattgggtgttcccgttgccctctgggaaatgtagtttaagcctaa

SEQ ID NO: 166487 - DNA, 122 bp, Homo sapiens
aggaagcaagcaaccggccagcgccgcacacaggagggtaaaatgcggccccattgcagccggcgcgcacagttcccgaagaccgttaggaagggtgctctcaccccaaaccgagagcagga

SEQ ID NO: 166488 - DNA, 122 bp, Homo sapiens
ctttttttggattttattttttatagagacaggggctcaccaagtctcccaggctggtcccgaactcctgggtttaagtgatcctcctgccttggcctcccaaaatgctgggattacaggcc

SEQ ID NO: 166489 - DNA, 122 bp, Homo sapiens
tgtcagcggagtgtgaacaaagtggctcggaggtcagagccaggcacactctgatgggcccggccgtggctgtgttcccctctgggctctctggagaggcgagttcccagccatgccccgac

SEQ ID NO: 166490 - DNA, 122 bp, Homo sapiens
acatatttgctgaataaaagaatgaagaacaagaggtcacgttacaaaattttaacgagccgctgcccgcttctagggggcgcagcgcactatacaaaattctccaattccacatggctccc

SEQ ID NO: 166491 - DNA, 122 bp, Homo sapiens
cgccgcgtttgcgagctaaggtcggagttctgcaccggcgggggcggggctctgcgtggccggggcgggctcgggatccgcggggcgactcccggtctggcttgggcaggctgcccgggccg

SEQ ID NO: 166492 - DNA, 122 bp, Homo sapiens
aaacatctaaaatgtatgttggtatgtttcctttgctgttctaaatttaaaattagagtgcgttttaatattgtaaaaacccaacagaagttacatgggatataatattctaagcctgagct

SEQ ID NO: 166493 - DNA, 122 bp, Homo sapiens
cctgtccctgcaagatcaaaactcctcctggaagccctgctagctctgtctgctcgccttcgtggcagatattgctattgtactttcatgctcatttgtgtggtaagtacttcaatgtccac

SEQ ID NO: 166494 - DNA, 122 bp, Homo sapiens
ggtctcagtacgcctgttgatgctagggaaagaggggactgtatacagcgggctggacagcggaccctctttgggaacagccactttacacatttattgggaacggcaccaatagccctgaa

SEQ ID NO: 166495 - DNA, 122 bp, Homo sapiens
gctcgaacccaccaccaggtcggacgtacttgagggaattcagaatctcttcgttcttggcgttctcctgatgcccaaactggttgcacgggaagccgagcaccaccaggccccggggtccg

SEQ ID NO: 166496 - DNA, 122 bp, Homo sapiens
agaaagttgtttgcaaatgagaggaaggattcaggctatggaaaccggctcgaggtcaggcggcgtggagttgccagggctgcggttctaagacaagtgtctcacccagttcgcacccatcg

SEQ ID NO: 166497 - DNA, 122 bp, Homo sapiens
tgcaggtgggaatcctggatgtggacctgtgtggccccagtatcccccgcatgctcggggcgcagggcagggctgtgcaccagtgcgaccgcggctgggcacccgtcttcctggaccgggag

SEQ ID NO: 166498 - DNA, 122 bp, Homo sapiens
gaattgttcagaatagtgtagcctagtggcttgtactttttcccatatgagtttctacttcgtggaaagggtttatgcacatcaagaggtatttgccaccatacatagacttgcttgctcag

SEQ ID NO: 166499 - DNA, 122 bp, Homo sapiens
aacccaagggtgagtgggcggttgggcgggtgagaccaggatgtgggttcccccaccttccgaggttcaaggagaccagcttttacccagaacaagcctccaggagccctccttggcccaga

SEQ ID NO: 166500 - DNA, 122 bp, Homo sapiens
gtcgggaagggcctgtacgcctctagcgacggcagaaccagtagatgcggatgcagtttccggacgagtcatattgcagaagacacatggtccgaaccattactgatagttttggaggggga

SEQ ID NO: 166501 - DNA, 122 bp, Homo sapiens
aaatcttttcctctgagaatacttcagtataagataaagatgcctggaggcagagttcaacggcagtaactgcgaggagagctctgcagcctgactctgaggccaggctctttgttacctgt

SEQ ID NO: 166502 - DNA, 122 bp, Homo sapiens
atagagggaaggaggcgggagaattgtccccccatccagctgccaaccagctgtgccccccgccccccaacattagttccaaggtcgagttgggaggtcttggatgcgggatccgcacctcg

SEQ ID NO: 166503 - DNA, 122 bp, Homo sapiens
gagcgctggacggcgggagagaggctcggaggaccggtagctcccagcaaagcggcccagcgggtaggtacaaggccccgcccctcgccagtcctcactgcctgttctccctgcgccgggga

SEQ ID NO: 166504 - DNA, 122 bp, Homo sapiens
acatggaaacactaggccatttgatataaggtacttgagcatcacaggttttagtatccgcggggtatctgggaaggaccaccttagtttgctcaaggaatgtctaacttgagttttgaaga

SEQ ID NO: 166505 - DNA, 122 bp, Homo sapiens
ccgtgcaggttacagtaattgagttacagtgaagttgttagggtgggctctaattcaatacgactggtacacttaagaggaaatttagacacagacatatacaaagtgaagaccatgtagag

SEQ ID NO: 166506 - DNA, 122 bp, Homo sapiens
cacccccttattcagcacactgctcttctcctgcagttagttgcacagaaattttattatcgtagcataaagcacaactgccacttaacagcacagaaagaatcagcacaatccctgccctc

SEQ ID NO: 166507 - DNA, 122 bp, Homo sapiens
tagtggctctggctatcaaaacaaacacaatgggaaagcctgaatttgtatccagttaaccgagctgatgtctgggattagtgtattcagggactgtgtcatctgcatctaatttccttttc

SEQ ID NO: 166508 - DNA, 122 bp, Homo sapiens
ctctgtctgcggctactctggcggcggctctggctgcggcggaggctcctctggcggcagcggctccggctacgtctcctcgcagcaggtcactcagacctcgtgcgcgccccagccgagtt

SEQ ID NO: 166509 - DNA, 122 bp, Homo sapiens
cgggcgcgggccctagggtgcaggatggaggtgccgggcgctgtcggatggggggcttcacgtcactccgggtcctcccggccggtcctgccatattagggcttcctgcttcccatatatgg

SEQ ID NO: 166510 - DNA, 122 bp, Homo sapiens
acggagccaaaggtctctcctcactaggaccaatgcagactgcagatctgcgagacaatccgctgtagtcacagcatcttctgtatgtgaagcctttgagaaacaaaggtgacttgaggagg

SEQ ID NO: 166511 - DNA, 122 bp, Homo sapiens
gttcgcgctggtgctgccgccggtgctgccgtcgccgctgcccctgcggccgccgcgtcccggctctaatatactccgccgattggagcatgcacgactggaaaacaacaccacttttcaaa

SEQ ID NO: 166512 - DNA, 122 bp, Homo sapiens
gcactgctgaactccagcctggaccacagagtgagactctgtctaaaaaaaaaaaaaaagcggttagaatttgaggtttatatataatctaaaatttacgggtgggaaggggtagggggtac

SEQ ID NO: 166513 - DNA, 122 bp, Homo sapiens
ggtgtggttgggtggccaccaagatggatttcagtctctttccaggcccagggaacaagccgaattcgagagacttggcttttagcctcctgttagagccaagaaagacttcaaagactcaa

SEQ ID NO: 166514 - DNA, 122 bp, Homo sapiens
cctgctccgggggttctgaacacgaatgccgtgtgggggttccttaaagagaccagagaccggcccggcgcggtggctcacgcctgtaatcccagcactttgggaggccgaggcgggcggat

SEQ ID NO: 166515 - DNA, 122 bp, Homo sapiens
acccctgccctctcccttatgagcacctggctgattcggttgaagccgtactgccgaaagcgctcgtcgaaggtgggcaccttgcctcctgccacgtagaatggctcccaggggtcctgcca

SEQ ID NO: 166516 - DNA, 122 bp, Homo sapiens
tcactgccgtctcccccacatcctaagggagctttgcatggccactttgggttggcaccccgggttggcaccctgccccgtggctccccagagccctaaaatataaatgtggtttcctgtgg

SEQ ID NO: 166517 - DNA, 122 bp, Homo sapiens
gcctctccgcaccccggtctccaaggctgctgtctccagtttacattctggagctaatcccggtcctgagaaaggcaacggctagaaccggcaaagggtgggggggcgtcccctgcctttgc

SEQ ID NO: 166518 - DNA, 122 bp, Homo sapiens
ttcttcctctgctctgcttcccttcggaggaaaatttcaggctgaaggtttagcgggtgccggtgagtggggaatgagtggcggagagtgcggcattcttcgcaaggtgtatccgggaaccc

SEQ ID NO: 166519 - DNA, 122 bp, Homo sapiens
tgagcgctttaatatatattaaatggtgataaataaggggtccaggcagccggcctgacacggcatttgtcttggagggagcagagattgatatctcgtgggtggcattaaaaactcccgcc

SEQ ID NO: 166520 - DNA, 122 bp, Homo sapiens
ctgggttcctgtcattgatcaccatgagagagcttcaggacacatcttcaaagggtcagccgcatgcctgggccctcattactagggcaggccctccaggagactgccacaacccagcctgt

SEQ ID NO: 166521 - DNA, 122 bp, Homo sapiens
cgcagtcacggagacgccgagggcaccgccccctccgccggacacccgggcctggcgtcccgcctgcgccccgcaccctccgcgcctccgtcgcctgcctcctggggcccagagcccggcca

SEQ ID NO: 166522 - DNA, 122 bp, Homo sapiens
cgttacgccacttccggcttctcctgaagttcgctcccggcctctctatctcacgctagtcgttgctcctggagggctgcacggcggcttgtccctttggtagttgaatcccgcccattcca

SEQ ID NO: 166523 - DNA, 122 bp, Homo sapiens
caaagaggaagcaggcatatgagtgcgcacgccttcacgtgtgtgtatgctgtgtgtgcccgggacccccgtctccaggggtgccccagacccagagattagcctcccacttcggcgcagaa

SEQ ID NO: 166524 - DNA, 122 bp, Homo sapiens
ttgcatacgcccgtcccactggctgcccggggtttgctggggttcggcaaggtttgcagccgccacggccgctgctgcgctccggtgcagggcaggctggcgccgagcgaaccagggccggg

SEQ ID NO: 166525 - DNA, 122 bp, Homo sapiens
tatgtttgaggattatacagtaacaaggtgggagaaactagatctcatgcagtcaaaatacgtgaagaacagttctccattggactaggtaattcattattctactaattttgccttgtgta

SEQ ID NO: 166526 - DNA, 122 bp, Homo sapiens
acaccggctggcgggttgtggcggtgccagcctgtgtgtgcgagtgtgtctgcgtgcctgcgcctgggcggacagcccggagcggcagtgcgactcgccgggagaggcgtctccgcagaggc

SEQ ID NO: 166527 - DNA, 122 bp, Homo sapiens
agggacctactgctggcgcccactccccgcggccgctggccaagtgtgggctctcgggttcgtttccacccagcgcggcggtgttattcggagaaggaaaataaatgtctgcggttgctctg

SEQ ID NO: 166528 - DNA, 122 bp, Homo sapiens
cacgcatcctacccgcaccatactcgtggcctgatgtgagcagattactgccacagacttcgaaggggatgagatgctggctgcatacaggatcctgtttcttaaagcgagagccactgcac

SEQ ID NO: 166529 - DNA, 122 bp, Homo sapiens
caagctcctcgctctgtgtcggaagagtgtctcccactcttccaacccagggtaagctttcgttaaaggagttatagatataaaaatgtaaacccttcttactcctcccagcaaaggtgggg

SEQ ID NO: 166530 - DNA, 122 bp, Homo sapiens
aaccaccactgagaaagtataccacgtttgcccaaggacaaaaaggccccgcccggcccgcgccacacaggtcacctacgcagaatgcagtcctggggggttccacttgtgtcgctcagcga

SEQ ID NO: 166531 - DNA, 122 bp, Homo sapiens
cacccagtcagggaggcttgctgccgaccatgacgacggtgatgacaggagcggacaccccgagagctgacccgtgccaggccctgttctcagtgctttacgttgctcatccaacttcatct

SEQ ID NO: 166532 - DNA, 122 bp, Homo sapiens
attcttttgaatttttagattcatcaaagactgaccctttctctttttgaagtcttctctcgcttcctagctatcagggagtgctttgaactcagctcccacggaccgtttcctcttcaaag

SEQ ID NO: 166533 - DNA, 122 bp, Homo sapiens
ttttaagataacaatggtctccaaaatgatctacagattccataatccatatcaaacacccgtttgcctttttttgcagaaattgacaagctgatcctaaaattcatatgaaaatgcaagga

SEQ ID NO: 166534 - DNA, 122 bp, Homo sapiens
ggggcagttgcccctggccacccgccaccccacccccacgcagggcctgctgcccctcaccggcattgtggatgaggatgtccaaccgtggctcagagctcagaaaggcagtggcaaaggcc

SEQ ID NO: 166535 - DNA, 122 bp, Homo sapiens
gagcggggcgcggaccctgaagtggtcggggtcccgcctgcccgctgagggacagtgagacgagaagagagagcagaggcttggacatttccagcgcctgtccccgcgctcctgctcgcggc

SEQ ID NO: 166536 - DNA, 122 bp, Homo sapiens
actcacttctcgggctggccataatgctgcacagagccccggccagccattaatatcaggcgcaggagaaaacccagtaaaatcacttaccagtcttccacctccggtgctgatctagcaag

SEQ ID NO: 166537 - DNA, 122 bp, Homo sapiens
ggcctgagcctccccaaaggcagctcctggggactcccaggaccacaggctgagacgagacgcagggtggctggaggaagtgagaggtgaactcagcctgggactggctgggcgagactctc

SEQ ID NO: 166538 - DNA, 122 bp, Homo sapiens
tttgcagaactgtctgaataaaggatacaaggattatttcaatgttactgcactgaaaaacgtgtatgtattagtgtgctagattatttagcagaatattcacaagtttctgttgaccttgt

SEQ ID NO: 166539 - DNA, 122 bp, Homo sapiens
acccccacgcggttaaagggccggacggccttgcctcctctttggccgggattatttgtccgccagagcggaaatacgttccacacccccctctttctcgctccccctcctctgtacctcca

SEQ ID NO: 166540 - DNA, 122 bp, Homo sapiens
cgacagccgggagggggcgcctctcccagccctcggccgtgtcccggtctgactcgcccccgtctgctcagcgctatcagcctgcagctggcacacaggtgcgtgtagatggacagccagga

SEQ ID NO: 166541 - DNA, 122 bp, Homo sapiens
gggcttcccttgtgtcaggcactgttctaagcacttcacccctaaggctgggttaatccacgtatccaccctatgaggtaggtgttgttcttttcccactttcacagagaaggcaagaaatc

SEQ ID NO: 166542 - DNA, 122 bp, Homo sapiens
ccccttccctcccctctgccatccggacttcggcagtctcaacttacaagtcaagcctctcggtccctggcggatcccgccaggccccgcccacccgtcctaggcccgcctccccgcctttt

SEQ ID NO: 166543 - DNA, 122 bp, Homo sapiens
actattgattctaacccgactctaaaaataacccagtggcacaaacctgggaggagacgccgcagaacgtcctgccctggccgttgtccgcagcaggggaatcacaaaggattcattttcct

SEQ ID NO: 166544 - DNA, 122 bp, Homo sapiens
ggtgctatcttcgccttccttcccgagccttgcagcaggtggtgcgggagaccgcttgcccgccggagtgcgttggtgcccccgcccccaatccgcacattcccatcccctttccgcacatc

SEQ ID NO: 166545 - DNA, 122 bp, Homo sapiens
cgtcccgctctgttccctcgtccctaaggatgtggtgggcactgggacctccaggcgtcccgctctgttccctcgtccctaaggatgtggtgggcactgcgacctccaggcgtcccgctctg

SEQ ID NO: 166546 - DNA, 122 bp, Homo sapiens
cagttgcaggcggccggatgctggacccgcagcgtgagctccacggccgcagcagggaggcgagagccctcaaccagggacggagccgccctgtccacggagcatgcagacccaccagaacg

SEQ ID NO: 166547 - DNA, 122 bp, Homo sapiens
tgctgcttgaagttcagcagaagttatctacttgatacttatattccaggcaaggccttccgttggagaaaatatcggcactttggacaaaactgaaatgtgaaaagaaagggaagagaggg

SEQ ID NO: 166548 - DNA, 122 bp, Homo sapiens
tctgtggaggggccacaggccttcatccctgagctttcagcagagggacaccccctctctcgagagtggagagatggggtccacacgcaggccactgccagctgacactgaagaatcttcag

SEQ ID NO: 166549 - DNA, 122 bp, Homo sapiens
ggagcgcaaaggcgctctgctgccctggagccccgcgtggcgggtgtgcagcttggccggcgaatcgcttgacctctgggccgtggttcctggcttaggtgacacggagcataaagccttct

SEQ ID NO: 166550 - DNA, 122 bp, Homo sapiens
cctgagggcaagtctgtttgggggtttctgggaaaggttttcctcctttgtaaaaagttgcgaggaaaaaaaatttaactttctttggctagatggagtcatgtctatacgatacctgggac

SEQ ID NO: 166551 - DNA, 122 bp, Homo sapiens
tctagcctctccgagtgcggggcctgccaagcccatgcccacccggaactcccgctggcccgcaatcgcggcgcacagccccggttcccgcccgcgcctctgcctccacaactccctgcaag

SEQ ID NO: 166552 - DNA, 122 bp, Homo sapiens
cctctaacctgcaccagcagggctccttctacaactacgggccgaaagccaggaccaaagcgtgtgtctcactagaaatgaaaagaaggtggaaggagaaaagaaaacttcgcgccaatcgg

SEQ ID NO: 166553 - DNA, 122 bp, Homo sapiens
ctgtctcctccccttccagccctcacctccacgcgggaccgctcgcgccagtcaactccgcgcacgttgcccctgcttggcagccaataaaagggggctgaggaaataccggacacggtcac

SEQ ID NO: 166554 - DNA, 122 bp, Homo sapiens
cggctcttccgcaccgggggggtggggcgggtcggcagcttcccagactgacctgcggcccgccagaccctcggcgcggccgccggacgccgcggggcggacgcggaagtgaacgccttctc

SEQ ID NO: 166555 - DNA, 122 bp, Homo sapiens
cctgcacggagagcggcggctgggatctcggagcagggtcggctatggccctggaggcagcggctcacagagaaaaagctctggcttttctccgcccgctgcgttcctcttcttacagcctc

SEQ ID NO: 166556 - DNA, 122 bp, Homo sapiens
ctgctcagctgggttcgtgaggaagcccgaggaatggtggtgatgccctctcttgggagccgttttctccagggaagaccctgcagaggctaccatccagcctctgcctccacacacgttta

SEQ ID NO: 166557 - DNA, 122 bp, Homo sapiens
tgttggctttcatcggggctattttaatttttgcatcaccctcttcaaaagggcacttctcgctttcccacggctaagctgccacactcaagtgtgctggaaaaaaaggctgggtagctcac

SEQ ID NO: 166558 - DNA, 122 bp, Homo sapiens
ggggagcagagagaagcctcccacgcaggtgggctcatgactcctgcagacccccagaggcggcggaacctcacacctccagtgaagactgcagagcgacgtcctcaccaagagcatgtggt

SEQ ID NO: 166559 - DNA, 122 bp, Homo sapiens
aatgtcttgatgctgcagattgatatgactttagcaaggcagggaccaagggcgggggtgcggggagacaaatgaaaggcaaaaaggagttgaggtcagagagaagaaaaatatattggagg

SEQ ID NO: 166560 - DNA, 122 bp, Homo sapiens
agtttgtcaaggcaaagagaatcaaaactatttactcaggcttggaattgatcaggtgctcgggaggctcggagcaggggagcggcggctcctggactttaacccccgtgtttgtggaagca

SEQ ID NO: 166561 - DNA, 122 bp, Homo sapiens
agcaaggagggcacacacacctgctgtcatggtggtggtgtaatgaagaggcctacataccgctgcatggcgatcataggccatggaggccaggaggtagcactcaacagtggcaaacccca

SEQ ID NO: 166562 - DNA, 122 bp, Homo sapiens
tctcaatccacagcatggggctgactcggactcaggagtttttgtggctccaggcgtaaccgttgctttggataaaattggtccagttcacttgaccaaggagaagtgcagaggaggataaa

SEQ ID NO: 166563 - DNA, 122 bp, Homo sapiens
tccccccaattcacaaatcccatgaataaatctattcacggacctccaagaggtccatgacgtgaaccacctaggacatgaacttcccccggaggtgcctcacagggccagctccaagcccc

SEQ ID NO: 166564 - DNA, 122 bp, Homo sapiens
tatcctccccacacctgaatattttaggatgggcctccagcgctttccaggctaactcagcgagcccagtcttcttagtcaactgagagacatgtctacagaacagaccatgtggccaactc

SEQ ID NO: 166565 - DNA, 122 bp, Homo sapiens
ccccacgcgggactgcgcggcctcccaaggcgcccgcgtgaccaacccaggagagctcggcgttccccagcaagtggaaagcactggaatgagagatacaagttaagttcgtgttgttttaa

SEQ ID NO: 166566 - DNA, 122 bp, Homo sapiens
ggactcgccccgaacttccccctctccgggcttggactgggtttggggttgccgaggcaacggcacttctcataagcgccctccttccccttgagagagggcagcgctggctccgctccagc

SEQ ID NO: 166567 - DNA, 122 bp, Homo sapiens
gagctcagtcttagcaggtgctgttgggacagaaatcaatgggatctttgtgtccccgagcgggagttgggggtgggcaggaaaggggaagggtgatgagacctcagtgagaggaaaggaga

SEQ ID NO: 166568 - DNA, 122 bp, Homo sapiens
aaaaaaaaagacagccacagtgtgctttgaaggagacaccctggcactacaggagagaaacgatgttttcaattgtccagagaggaggggagtcacttccggtgcgtcccagggcatcatgg

SEQ ID NO: 166569 - DNA, 122 bp, Homo sapiens
ggaaaggcccagaacttgcacacagcaggcaggcccagcggctgggtttctctagcacctcggcattgtctgcctgctcttccaggcgtgcagggcagtggtggctcgggccaggctctggg

SEQ ID NO: 166570 - DNA, 122 bp, Homo sapiens
ccgtggcgatcgcaggtttgtccccagttgatagttccgtgagttcctcaattattcctccgcccaggttcacagctgaaactagaggtcatgggtgcggcagccaaggcaggcgggcgcct

SEQ ID NO: 166571 - DNA, 122 bp, Homo sapiens
ccccacagcccctgcaatacccagtttggcctcttttgcttgtaataacgcagatcccagcgccacggcaccttagaacagacctttttctttctcgcgtggggcctgactccttcagtgaa

SEQ ID NO: 166572 - DNA, 122 bp, Homo sapiens
cgcccacacttccagtcacctcttgcacttggaagggaggccacagcccaggtctggccacggcctatgtactgcagactctgggggtgctgtggggatggaacacttctgtttttgtgctg

SEQ ID NO: 166573 - DNA, 122 bp, Homo sapiens
tcctagcctttggagggttattgggtgtttggggaaggaaggccctaagggcagcctctccgtggttcctagcaaccatcttggaatttctggtctgggctcgatttgggtcaggccctgag

SEQ ID NO: 166574 - DNA, 122 bp, Homo sapiens
atgcccaggtaggtgtagacatcaggcttgtaggtgagcaggcacttaatgcccgctgcacggatggctgaatccgcctccagtacacccaagcggtccgtgaagtcgtccgtgtaaacaca

SEQ ID NO: 166575 - DNA, 122 bp, Homo sapiens
tggaggcgtccgatgggggcggggctggggaccccgggagtcaccagcatccctcagcctcgagcacgagccctcagccaccaccggaaggaagacagggttcccggaactctattcggagg

SEQ ID NO: 166576 - DNA, 122 bp, Homo sapiens
acgcacacaatggaagacatcactgtgcttgtgaaacctgtgttgagagcagacagatggcggttatcaaatactttggcactcatacacaggagacagttacatctcagaggagtgtaact

SEQ ID NO: 166577 - DNA, 122 bp, Homo sapiens
gcggtcgccgtttggggcggcggggaccgttcgggtgcttttgtaacaaataggctctcccggccaggacggctggggcgaagagccacccgatcggttctgggagcgcccacaatgtgctt

SEQ ID NO: 166578 - DNA, 122 bp, Homo sapiens
gttttgaaacagcactcaaatcttagaaaattaacttcactgattcctggaaaatgcttacgttttaaaacaccaactttattcaaatactaaccccatctgtacattaagaaacaagcaaa

SEQ ID NO: 166579 - DNA, 122 bp, Homo sapiens
aggacagataacattgctgcccggtcactacaggggcaaaaccttttgtaattaagcatccgtgtccttacggaagttagaggaaatctgtttctagaatggtaagaattcagaggaaaagt

SEQ ID NO: 166580 - DNA, 122 bp, Homo sapiens
agacaccgctccagggtccgtcagcgccaggcccgcggggctatggctgtccgcaactcccgacacaagctgcaagcaaggcaagaaagccgctgggaaacctcacagcaaggatgcgccta

SEQ ID NO: 166581 - DNA, 122 bp, Homo sapiens
ccataccccacaggacccggagccaatgtggcaagccccctagaggacactgaggagccccgagacagcaggcctcggccgtgcaacggcgagggcgccggcggggcatacgagagggcccc

SEQ ID NO: 166582 - DNA, 122 bp, Homo sapiens
ggcttggcaagaaggtgcatgaactcactgcactgcgagagcttcaggacttccaggaagcgctggcaaccctgaggacgaagaagcggactgtgtgccttgtagcgctgggattcttgtcc

SEQ ID NO: 166583 - DNA, 122 bp, Homo sapiens
ccctgcagtggggagagagctgccagcatggaatcaaaattagaatctgaaatcaggggtcgtacagctttagcccactcccacgttatttgtcaacatggagatgtgggtcgtccgacggt

SEQ ID NO: 166584 - DNA, 122 bp, Homo sapiens
catggggaaaatgtcaaacagtacaaaaatagacacagagacaagtctacccctcacccccgtgccccagtctcctagtctccctcctcagaggcaaccactgagagcagttttttgatgtt

SEQ ID NO: 166585 - DNA, 122 bp, Homo sapiens
atgtaatcctcccacctcagcctcccgagtagctgggactggaggcgggagccaccatgtcgggctaattggtttttctgtagagatcgggcctccctaggttgcccaggcttacttaacac

SEQ ID NO: 166586 - DNA, 122 bp, Homo sapiens
gcgatgctgtttttgaccccaacagtcttcttggaggcagggaggtgtctatgtctgtgacgcagccttcttgacccagactcttgtcccctccccaagagactgccagccacatgggccct

SEQ ID NO: 166587 - DNA, 122 bp, Homo sapiens
tcaatcttagaagaaaacactgaggcccgctgttccattcctgttttacaggtggagaaacgtgacctgagagaagaaaagattggcccagggtcctaaagtaaatcagagcccaagcagcc

SEQ ID NO: 166588 - DNA, 122 bp, Homo sapiens
ctcagtattgtcgatttccacatccacagcctaacaacgtggtgcaatcgccctttgcgacgccgcagaccaacagacggatgctgccctgctgcagtttcacagcacaccgggtctttccg

SEQ ID NO: 166589 - DNA, 122 bp, Homo sapiens
gccggcgcctctccgtcctcgggggggtctccttccccccacttaagtctcttctgcccgcggtcatgccctgggcctcaggaaagaccgcgcccctccacgatgtccatttcttgcatccc

SEQ ID NO: 166590 - DNA, 122 bp, Homo sapiens
gcactaccacctctcccagcacggggtcttctcagaggctgacatgcgcttctatgcggccgagatcatcctgggcctggagcacatgcacaaccgcttcgtggtctaccgggacctgaagg

SEQ ID NO: 166591 - DNA, 122 bp, Homo sapiens
tgtgcccagaaccagcacgctgtgaacaggcgccaggccctgcgccggcccacggctacacggtgctctggaaacataggctagcgagagtctaaagaggtggtgcaggctcaaagccatgt

SEQ ID NO: 166592 - DNA, 122 bp, Homo sapiens
gagagtctaccacttgctgcgtgagcctggcctgtgctttgtccaccaagctggtctaagcggactcacagaaggcagaggtattgtggaagctctgatgactgccccatctctcctttagg

SEQ ID NO: 166593 - DNA, 122 bp, Homo sapiens
ggtcagagccagggctgcagggggacccgggaggtcagagccagggctgcgggggggacccgggaggtcagagccagggctgcgggggggacccgggaggtcagagccagggctgcggggga

SEQ ID NO: 166594 - DNA, 122 bp, Homo sapiens
ccgtctccactaaatactaaatactaaaccccgtctctactaaatactaaaaaatttgcccggggtggtggcacacgcctgtagtcccagctactcaggaggctacagtggaaaaatagctt

SEQ ID NO: 166595 - DNA, 122 bp, Homo sapiens
tgcagaaattctgacctgaaacgcttcgcatccggtctctgcttgttgaaggaccttcaccgctatttctgagaagagcaaaagtgatgcagatctgttcttcctcttcttaatcccagaga

SEQ ID NO: 166596 - DNA, 122 bp, Homo sapiens
gcggcagcgaggtgcgggcgtgtgttcgggccgcccacaggcctccctctgtctgcccggcgcacattgatcttggcttctgcctgtgtccgttctagcctggccagctgggtgtccggctg

SEQ ID NO: 166597 - DNA, 122 bp, Homo sapiens
gcagagggtgggcagggcgccaggggacaggcagctgtgtgcctggtagcctgggggctccgagacagacctataggctgaggctggtaccccctctgcccgaatacgcctcgggctggccg

SEQ ID NO: 166598 - DNA, 122 bp, Homo sapiens
agatttgcctcagcaaagcagagaaacacgaagccagagcttcccaggtcccccagctgacgccaggatcctgggccaacgcagcgcctcccctgcctcccttgcctgcccttctccaccag

SEQ ID NO: 166599 - DNA, 122 bp, Homo sapiens
agaatcaactggggactggagaatgggggtagggcttgcttcagggcagagccacccagccgctatgtccagggagggaccagggatggctcatcttggaaaaaaaaagtctctgccccacc

SEQ ID NO: 166600 - DNA, 122 bp, Homo sapiens
ggcgcgctctatttcccctttcgtagcgaaagggccaggcgtattgagcggtcaggggagcgcgcacgcagaacgtcagccagtaagcgccgttcctccgggagatgtggaggaggggggcg

SEQ ID NO: 166601 - DNA, 122 bp, Homo sapiens
acaagcagacctgtcctcgagatcacgaggggcacgactttggtggactcacgcaaacaccgtaatggcagctctgaggctgggatgccacactgctttccccggactccgtctgctgtttc

SEQ ID NO: 166602 - DNA, 122 bp, Homo sapiens
gcttcctccttggcatgccgctcatgcccccgccgtgggataactagcaggctttgtgttcgaggggaaagataaatccatggaagaggaaagagcgggagggctcaggctggtgttcaaag

SEQ ID NO: 166603 - DNA, 122 bp, Homo sapiens
gggtgggacctccgagagggggtggtgatgatggagatgggtcagacccgggggaggtggcgggggaccctgggactggtgatttagtgggaagaggcagccttcacacagaatccgcaggc

SEQ ID NO: 166604 - DNA, 122 bp, Homo sapiens
tcatgctgggcactcgtaaggggtctcgtgattgttgtgggaagcagctactggattggccgtgactctgttagattcatgagatttaagtgttcttcctcagtgtggaaacaccatcgcca

SEQ ID NO: 166605 - DNA, 122 bp, Homo sapiens
atggatattcactgtacctctgtgacatgtcctgtgctagaataataaaatgaagtgacccggttcccgtctccagtgactgcacagttcccagtgagaccgtttcctaggaaacctgacat

SEQ ID NO: 166606 - DNA, 122 bp, Homo sapiens
ccctcccctcggctgttccgattaggccttctcagcctccccaggccgtccgaccctggccgactgaggatgtgtgtttccgtggggtctcctggaaaagattaccccatttgttgaaaatc

SEQ ID NO: 166607 - DNA, 122 bp, Homo sapiens
acgagggaggggctgggcgcgggctcggcctaatccgcttcgcagcctgggggattggaccgaggtgctccgggtgtccttggccctgataattctgtgacctccgcactgagggttgtcgg

SEQ ID NO: 166608 - DNA, 122 bp, Homo sapiens
tcaccatcacgcacgcacagagccacactcccatattcacactttctaactcgtaagctccgacagcgcctgcattttctttgggagccgcttggaggttcattaatatcattagcatttaa

SEQ ID NO: 166609 - DNA, 122 bp, Homo sapiens
gaaatggagtccacgagaggacacctgcattcggggaagtgtagttccatgcgtttgaggcggggtcccggctgagctgttacgcgcccacatgccacaagagggcccctgtgagctggagg

SEQ ID NO: 166610 - DNA, 122 bp, Homo sapiens
aaggaagagagaggcagctatctgcaagagcaaaaatgcctcttacaaaagcatacccaacggctgtccttttttccaagaccagttctgacagctaagaaggctgacacccagctggcatc

SEQ ID NO: 166611 - DNA, 122 bp, Homo sapiens
ggggccgctgagcccgagcctgaggccgagactgccagaggtaggcggtggggacagcggcggggatggcggtggcggggagaggtggctgcgggcggacgtgatagtgtgagggcagaggc

SEQ ID NO: 166612 - DNA, 122 bp, Homo sapiens
tcctagggcaggggaggggcgggcaatgccagagaacggtccccacctggggtggtctgacggccagggatgcagggagagacgcctcccacactcccggaggcacgcacgtgctgtggcca

SEQ ID NO: 166613 - DNA, 122 bp, Homo sapiens
tgggcgtggtggctgtgatgtggctcagctgccaggttgtgggcctgctgggaagccaggcggccaccggagcgtgctggtccgggattgtacgcgctctcctagggaggggtctgagctca

SEQ ID NO: 166614 - DNA, 122 bp, Homo sapiens
gttctcacccaactctttggcctttcttagcctgaactgcagaatactgctactaataaacgaaacaaagctttgcccccacaaagccctgctgctgaatgctgactgacatttgaacaaag

SEQ ID NO: 166615 - DNA, 122 bp, Homo sapiens
tttcgcacccgtgatgagcaaactagcgcgcggaggaaccaatcggggagcttgcgaacgcgcaccagtcggagaggttttagaaacggtggccccgcgccggagagcccaaggcgggaggc

SEQ ID NO: 166616 - DNA, 122 bp, Homo sapiens
ttaatttatcttgcctatgacttattgggctttttgaatctgtgaattcaaatttacagccgtcatcttcaactgggacttcaattaaatatatggcagaccttctcactctactaattgag

SEQ ID NO: 166617 - DNA, 122 bp, Homo sapiens
gtggacaatacagccagaccctgtctcttgaaaaaacaaagtcttggcacttccagagcccggtgctgccggccgcgggagatgagtgcccagtagggagacttctgtgaagcgtcccggtc

SEQ ID NO: 166618 - DNA, 122 bp, Homo sapiens
atcagtcagtgcaaaatgtgcctggttcttaagacaactttttatttagaactgtgagaccggtattttggaaacatttcaaaggaaacatatgaatttgttttgcgttgtgcactacatca

SEQ ID NO: 166619 - DNA, 122 bp, Homo sapiens
agcagcttcaggggctgcctgggggtgggtgttaccgtgccactgccctatgtctttgtgcgtttgtgtgtgtgcgtaagtctctctcttatttctctctctctcctttctcgctctttcac

SEQ ID NO: 166620 - DNA, 122 bp, Homo sapiens
tgcggtactcattccagccagtgcgtttgaacggcgcttgcagtaaaagctgggagagttcgaggtcgccacctagtggccagcaagactgctattcacgctcccattttgtcccggaccag

SEQ ID NO: 166621 - DNA, 122 bp, Homo sapiens
aatttgccgagcggtaaccttaccaaggactgggaagcagggttttcacctactgacccccgtccctcctcggttgagggtcgcccttggggtgttcaatccctagcgtttagaggtgggag

SEQ ID NO: 166622 - DNA, 122 bp, Homo sapiens
caggaatgcctatgtaacagggaaaaagctactgatgcaagtgcggtggttccatattctcgggatgatgatattcatctggccatctgcccatcagtataagtgccatgtcattctcggca

SEQ ID NO: 166623 - DNA, 122 bp, Homo sapiens
ctgctgggcctctcagggcctccagctcagactggtgggggtggcgcttgtgtcatggggcgggcgcccagccggagagggcgtggccggcaccaccatggctcttgtctctgtcgtctgcc

SEQ ID NO: 166624 - DNA, 122 bp, Homo sapiens
caagtgatcctccaacatcagcctgccaaagtgctgggattacaggtgtgagccatcgtgcgtggctgcagctggttttcaaaagcgatccctacaacttgcaggtgtatttgccaagctct

SEQ ID NO: 166625 - DNA, 122 bp, Homo sapiens
acgaccaactgttgcctgagtgtggggcgcggacaggggtggaggcgggaacccacaactcgcggccccctgaaaatctcctttcccacacgcccccaacagtgagcctgagctcccctcgc

SEQ ID NO: 166626 - DNA, 122 bp, Homo sapiens
gccaccgggggcgggtggcacccaggcggcggggaggcgggggaggggcgcagtgacagccgagccggctttgaggaaccttgcagaggaagtggcttcagaactgctttacgcgaggggca

SEQ ID NO: 166627 - DNA, 122 bp, Homo sapiens
ctgagtccctacagtcaacccttgctccttgcagacacctgtgctgccccccaccatcaccgaccagatccggctctgggagctggaaagggacagactccggttcactgagggtgagtagc

SEQ ID NO: 166628 - DNA, 122 bp, Homo sapiens
tggcaggtggggtttcctcagggcgtgggcggctgctagaaacgagaaccaggagaaccacgcagccaggaagccagtggccaccgcgcacttccacccagaaacgcattccccagaacctg

SEQ ID NO: 166629 - DNA, 122 bp, Homo sapiens
attgactgcagcagctggcccgggggtggcggcggggtgaggttcgtaccggcactgtcccgggacaacccttgcagttgcgctccctcccccaccggctcacctcgcctgcagctgggcca

SEQ ID NO: 166630 - DNA, 122 bp, Homo sapiens
ttctcttgttagcattttgattaacgaatgtgggcacgaacagccagctgaccgaccgcgcgcgcagtcgagcgtcggttcctcgccttgggagggaccactggaggccccgccccctggcc

SEQ ID NO: 166631 - DNA, 122 bp, Homo sapiens
agcggggctctagctactgtggggctgtccttcccttcaaaatcgggactcttgatcactcgtagagcgtcgacgccccccttttctgcaccctgcccatcaaagtccccgaactcctttcc

SEQ ID NO: 166632 - DNA, 122 bp, Homo sapiens
gcgtgaccctggggaacggttaggtggctgtggcaaggagatgccaggttggaggcgtggcgagggtgagatggtgcctgctgcctcgtgccagccctggctcagctgtgttgagccccctc

SEQ ID NO: 166633 - DNA, 122 bp, Homo sapiens
aagctggcccacggggaggtcaatacaatcgatgcggacctcgacgaaacggaagaatctcgcaggttcctgcgtgctgggttccactcaaaatgtttcaggatttagggtttctgcctcct

SEQ ID NO: 166634 - DNA, 122 bp, Homo sapiens
tcaatggtggtgatgcttccatactgcagcactgacacctgagtgagacgaggccctaaacggaacgagaaaatgcggattattttgaatcaagtagagccacaaaaagagcctcttcgtca

SEQ ID NO: 166635 - DNA, 122 bp, Homo sapiens
gatgccagaatgatctaatctaatctaatttcccttggccacatgaacatgaatgaatgacggactcaccattgaagcttttccttattttgggttctgcagagggcaaattcaatttggct

SEQ ID NO: 166636 - DNA, 122 bp, Homo sapiens
tataatagcaattgcttttccagtgtcttcattccatgatcctgagccaattcaacaacacggtttcagtttttgagagcctgaggcactaaccttggttgatataacattttctttcctct

SEQ ID NO: 166637 - DNA, 122 bp, Homo sapiens
ccgcaactcgagcacgcagctgtggctcatcacgcactaccacgagcacggctccctctacgactttctgcagagacagacgctggagccccatctggctctgaggctagctgtgtccgcgg

SEQ ID NO: 166638 - DNA, 122 bp, Homo sapiens
agacagagcaagactccgtctcaaaaaaaagaaaaatagaatctagaagactataccctgcgcttaacagtagttagcagtaatgaatcaggatggaaacatggtcttgggacacaagagca

SEQ ID NO: 166639 - DNA, 122 bp, Homo sapiens
gcctggctgctggaagagtccattagggatggccaaggcagggtgttcccgacgccagagcgcggacctggctgcccgctgcggagagcagagtgcgcagcccggggcggccacccccgctc

SEQ ID NO: 166640 - DNA, 122 bp, Homo sapiens
actgaggaagggggtagtccgtggcaccctcttcacaaccctgctgctgtgccctcaggacgctttgcctcccctcagacctcgcccccggacgtgggcagcttccccttcctgagcccgtg

SEQ ID NO: 166641 - DNA, 122 bp, Homo sapiens
aaaatcccgcctccctggagcctcccgtcctaaaaagttaggcactgagtgccttgccaccggtgcgttcctcgcgctggcccctcgcccttggcaactttgtttctctttctgcgttggtc

SEQ ID NO: 166642 - DNA, 122 bp, Homo sapiens
ccatatttctcttccagtgctttctgcaagttcaggttcatagcatttttctggtgccaccgccctacagcgagcaggagaagagccagcacagattagatcatctggcagtctctggagtt

SEQ ID NO: 166643 - DNA, 122 bp, Homo sapiens
tgcctcgtcaggacaggaagtcttgctgggtacgtgctgttctgcttgttacggacaatccggagcagttcctcaagcctaatttcaaggtctgggggaagagtcctctccagcttccttgc

SEQ ID NO: 166644 - DNA, 122 bp, Homo sapiens
ggttggaaagtaatcccacccgagcaggtgggcatgggaggccgctgtgctggggagccccgcgagggctccgaacagagcctcccttttcagaaaggtcaccctggtcattgcagctgcca

SEQ ID NO: 166645 - DNA, 122 bp, Homo sapiens
gtgttagtctggtaaattgtctgttgacatattcagttgctgactcacaggcgactcaaacggaacatatcccatgtgaatttcaaatctccctttctgcttcatctaaaatttctcttcca

SEQ ID NO: 166646 - DNA, 122 bp, Homo sapiens
cccccatctgtctgtgtttagcctgggcctcatgctggcccccacagccagacccgcaaccgcaagacggcctccccaatctgaccagatgccagggcagcttgggaatagggaggggctga

SEQ ID NO: 166647 - DNA, 122 bp, Homo sapiens
gaataacatttattactagtttaggaatcagactgtagttagagtattcaatttaggctgcgagataaagtttttgtaatattccagaaggtggaaatcagggtgactaattctgatttctt

SEQ ID NO: 166648 - DNA, 122 bp, Homo sapiens
gccaggctgggcggggcctgtgtaggtagagggaggagttaaccagcatggaagagagagcgtccaatcagaaagctgagggccaggcactgggccaatggagcaatttggaggggagccaa

SEQ ID NO: 166649 - DNA, 122 bp, Homo sapiens
ggtcagctggcacagaagcagctgcccctttggggtcaaggcccgtgctcccaggtcacacgctggacctctggcaactagccaacgtggcaggcttgtaagattgtgaccctggtccaagc

SEQ ID NO: 166650 - DNA, 122 bp, Homo sapiens
gagctctgagtgttggttctgactcatgagcaaaggtgggcatggggtggagggagaaagcgcacatgcaacaatttgggacccttgacctctgatgtgtctgagggcagcccacgtgtctc

SEQ ID NO: 166651 - DNA, 122 bp, Homo sapiens
gccaagttcctgcctcccgccgatggcccgtgtgggcccaaagcgtcctgaagtcggcctcgccaggcccagctcctgcctgtcgtaggcgcctagaggcatggcctctgcctcctcacagt

SEQ ID NO: 166652 - DNA, 122 bp, Homo sapiens
ttccgcgccgcggacccgggccggcctacctggctgccggcctacctggctgactgctcgcgccgtctctcccgaacaagccggcctcagtttcccctgaagagacaggggaacttgcaagc

SEQ ID NO: 166653 - DNA, 122 bp, Homo sapiens
ctggcgcgggggcgcgggagccccggctaagcccggggacgggagggcgccccctcccagcgcccgaacccaggcaacttcccgccgcccgggcaggagtttctccgtagcccacggacatc

SEQ ID NO: 166654 - DNA, 122 bp, Homo sapiens
gtaaaggaaccacagtgcctctccatccccagcctggacctgtctgtcccttagccctgccgcctgatggctttctccttggacaacagcgtgccgcctgatggctttctccttggacaaca

SEQ ID NO: 166655 - DNA, 122 bp, Homo sapiens
aaacatgacgggtgaaaggattcaaagtctgggatttgcttcaaagcaacgcagggatggcgtgggggatggatggggcaggaagggccttgaaactggtgctggaggcttcccagggctgc

SEQ ID NO: 166656 - DNA, 122 bp, Homo sapiens
gcacggcggtggctcggtctcccggctgcgcgcggagcgggagggctctcctcacacaagcgcttccttgccgagaggctggagctgcggcaccgcaggcctgagccaccccttctctgctg

SEQ ID NO: 166657 - DNA, 122 bp, Homo sapiens
gcttttgtatttcttttgacccttcagggcttcctgttcctcaccgccacaatagagtcccgccccacttccggcgacgtaacccaatccgcggagctcttcctccccgggagcccgatgga

SEQ ID NO: 166658 - DNA, 122 bp, Homo sapiens
tggagaggtccatgtgatgatgaactgaggccccagccaacagccatgtgaaggagccatcgtggaagcagatcctccagctcctcttgagcctccagatgatttcagcctcagccaacatc

SEQ ID NO: 166659 - DNA, 122 bp, Homo sapiens
gacagcgagctcgaggcagtggggtgcgactgagccggatgtgctgagctgcccggggcacggggcggttggggtagagaaaggctttcagagctgggggacaggacggggccccgggtgag

SEQ ID NO: 166660 - DNA, 122 bp, Homo sapiens
atatatggtaacttccaggccattgctatggcccattgccatggcatgtgtaaactgtcacggcacccatgggaatgtctttatgctaatgagtagtgagggcaactacaggtcactttcat

SEQ ID NO: 166661 - DNA, 122 bp, Homo sapiens
cgacgcccccagcgtcccaggggagccggtgcgtcagctcacggctggccaaggcggggccgtacaaaagctagcgccgcgggacccccttcatgggcttctaccctagcagaccgagcgct

SEQ ID NO: 166662 - DNA, 122 bp, Homo sapiens
gccagccctggcctcaaacctaggtgcttcctcttcctactactatgactacccttatgacgtggggacaagggactccacccctgcaaggctcagtttcttcatctgagagatgggggtga

SEQ ID NO: 166663 - DNA, 122 bp, Homo sapiens
gaaagctttgttctttcgctctttgcaataaatcttgctactgctcactctttgggtccacgctgcttttatgagctgtaacgctcaccaggaagatctgcagcttcactcctgagcccagc

SEQ ID NO: 166664 - DNA, 122 bp, Homo sapiens
agaagtggaggcccttgcggagggactcccttggtcccatccagttcagggggcactgaccggcggcgagagttcgcgggagggtcgaggtgctcccgccttgcccccgccttgcccccgcc

SEQ ID NO: 166665 - DNA, 122 bp, Homo sapiens
tggcaccacccctccgaggagggcccccgggaatgcctgttgaaagggcactttgaggcccggctcggtgctcacgcctgtaattctagcattttggggaggctgaggtgggcagatcactt

SEQ ID NO: 166666 - DNA, 122 bp, Homo sapiens
ttgcgtgtctggatgtgtctgctggcttcttggggctgcagggcttggcctggcttccttcgttgcggcgaatgcccaccctcatcagcggtaagtcgctgctctcatctggggaatcagag

SEQ ID NO: 166667 - DNA, 122 bp, Homo sapiens
cctggctcgcacaggctaagaccacagacagagcagggcttcccggagccacacaggccacgcaccccaggaacccttgctgccgcgggccaggaacaggaatgtgttggtgcctgagacac

SEQ ID NO: 166668 - DNA, 122 bp, Homo sapiens
gcagcggggaagggggtggcggccgcagaggccgaggaggctccggtccggccgcctctgcggacccccgcctctgtgtgtgtcacggtctctatggagatctcccgcagaggacagcacga

SEQ ID NO: 166669 - DNA, 122 bp, Homo sapiens
tggatgaagctggaaaacatcatggtaaaggaaagaagccagccacaaaaggccacatgtcgtatgatgctttttatatgtaatttccaaaatagtcaaatccatggagacagaaagtgttt

SEQ ID NO: 166670 - DNA, 122 bp, Homo sapiens
cccctcatttgttggctcagatctgacagagcaaaagccttttatcccagaggaaagagccggttctgagcggcaaccccgcccccgagcacacacaaagtcaaaaagacgtttgtccgaag

SEQ ID NO: 166671 - DNA, 122 bp, Homo sapiens
caggcgtccaatcaaggacctgcagtgtgggtggtgggggctggtgccctggggtgcgagcgcacacaggcgtgcccttggtttcacgtgcgccagttttcccactttctacgggggggagt

SEQ ID NO: 166672 - DNA, 122 bp, Homo sapiens
taggcgtgcaatactacccctggttactttttgtatttttagtagagacggggtttccaacgtattggtcaaggctggtccgaactgctgacctcatcggatccgccctcctcggcctccca

SEQ ID NO: 166673 - DNA, 122 bp, Homo sapiens
ccctccctttataagggaagccggaggcgcttgggcgggggtggcttcccccgcctggcgcgccctttcctacatgctgatgcataggattttcaagacagctaagagaacaaggacttcac

SEQ ID NO: 166674 - DNA, 122 bp, Homo sapiens
tcgcccgagaagtaagtttgtgtgtaaggtggagtctcaccgtcccccaggctggagtgccgtggcgtgatctcagctcactgcaacctccacctcccgggttcaagctattctcctgcctc

SEQ ID NO: 166675 - DNA, 122 bp, Homo sapiens
cgcgccctcccggccgccgtccccgctcaggctggggccggcgccaaaaatgtctcagggcgcagacacggaagcacccccagggctagtgcgcctgcgcaccttgggccagccatgccgcc

SEQ ID NO: 166676 - DNA, 122 bp, Homo sapiens
ccctgtcctagtcctagctcagtgacccacccccgctttgcagtgatggggagtaccaagcgtctcctgcgtctgtgatgggtcagtgttcccatcacatgggtccatggagggagagcatg

SEQ ID NO: 166677 - DNA, 122 bp, Homo sapiens
gggagacaccgcggcccccgggcgccggggtgggttgggcccgggcgcccggttcctcggcggggatacccaggaagagccccctgacccgtttcagggccccccagacacaaaagcgggcg

SEQ ID NO: 166678 - DNA, 122 bp, Homo sapiens
tgtgcacgcagcaggcactcagtacacatatgctgaacacctgagtgtcaccgacagctgcggaggcactggggcaatctgtgtgtttctcagcctggcgtcgggggttaagggggcgggaa

SEQ ID NO: 166679 - DNA, 122 bp, Homo sapiens
gcgcttcagcagcgagttctgtttccgccgcaggcccgggttcacttgcggccgctggcacgcactgtacagctgcgtcagctgctcgcaggacacgtcccgtcccgcagctggtccaagtc

SEQ ID NO: 166680 - DNA, 122 bp, Homo sapiens
ttattctattgaccgcagagtgaaatctaaaatctttgtcatgtcattcaaaagtgtcttcgtgatctggcatctcttgacctttccagccttaactcactaatctctatcatattatttat

SEQ ID NO: 166681 - DNA, 122 bp, Homo sapiens
gccggcgccggccgcgcgatacgagaggccgaccacccccttccccgggcgggcagcaggcgaagccccagggctcagcaggtgtgtaggagtggcctgcccggccccatcccagccccgcc

SEQ ID NO: 166682 - DNA, 122 bp, Homo sapiens
aaggtggggcgggcgcccccgaggttgggcccgcggtatgggcagtggaaactgcgcatgcgcggcgtcagggtcgggcggaagttgacgccgccgtgccgccgccgcgtgacgcatttcct

SEQ ID NO: 166683 - DNA, 122 bp, Homo sapiens
ctgataacctaggctagggagggagacctacatggagcagatggaggaggaagagggtggcgggccctggtgttctgcaggtgcatgtcttctgcttgtttgaccatgtgggggaagggggt

SEQ ID NO: 166684 - DNA, 122 bp, Homo sapiens
ctcaggagtcctgctggtctcccagtgctgttctaagggtccacatgaaggcaggtcaggcgggactccccgggcaagcacttctgtacgcggaaagcacgaggcgcaggagccatggagag

SEQ ID NO: 166685 - DNA, 122 bp, Homo sapiens
agtgagttttaggaaaacacttttgttaggaagatcatgtgggtcagcatagtttggaaacggaaacagagtgtgaccttttccaaaaataaaagggatgggaagtaatttttttttaaatg

SEQ ID NO: 166686 - DNA, 122 bp, Homo sapiens
ctggttgaggtccctctcctcttcttatttctttctttcacaagacttgtcatttaatagcggattttatttattgctttccttgtacataaaaagataggcttcagattcccttcttccaa

SEQ ID NO: 166687 - DNA, 122 bp, Homo sapiens
gagggtgattactgttattatttatagagtgcagtaagtatatataatgctttataaacacgtaggcagacaaggtgcccagaggtgcctaaattctaattgcttgaattagacattttaaa

SEQ ID NO: 166688 - DNA, 122 bp, Homo sapiens
gcacagaaaggtgaagaaaatgcacagaagtgttcagccgcgacagggtctccctgtcctcgcctgtacctgcgacacccgccttccctctccctgcgttgcagagtgctcccaacccaccg

SEQ ID NO: 166689 - DNA, 122 bp, Homo sapiens
gagagccacttggccatgtacctcattggagagccacttggccacgtgcctaattagaagcgcacattctttgatccagcagatccacttctggaaatactggcatattttgtaatagcaaa

SEQ ID NO: 166690 - DNA, 122 bp, Homo sapiens
agcgcagcgcactcagggaaggtggcgggcagggcgcgagctgcacaggtggggcacctgcgtagccggcagcatcccacagtgagcaactcggctcggcggtgccccaggtccgtcccgcc

SEQ ID NO: 166691 - DNA, 122 bp, Homo sapiens
ctctgcagctgctcacgcgcagggcacgacgtagcccggcctcttcgacctgcacctccgcggctccctctgggggccctctgctcgcctccctgctgctccaatgaggagccccgccagcc

SEQ ID NO: 166692 - DNA, 122 bp, Homo sapiens
cgtcctgcaccaggtgaaccagagcagcgtgcaggtggtgctgctgttcgcctccgtgcacgccgcccacgccctcttcaactacagcatcagcagcaggctctcgcccaaggtgtgggtgg

SEQ ID NO: 166693 - DNA, 122 bp, Homo sapiens
attccttttccccaggaaggaagctctgggtagcagctccctgggggtgggaggtgggggcggaatgaagcagcacagggccgctgacccaccagcctcctgaaatagccaaatatccgggc

SEQ ID NO: 166694 - DNA, 122 bp, Homo sapiens
agcaggcgcgctgggagcagcttctctcggggcctgccgcgtttatggcttcaatagcgccgctccgggtccccgcggcgtcggagaggcttctgcctagcgcctctctgctgcgcgaggtc

SEQ ID NO: 166695 - DNA, 122 bp, Homo sapiens
gtttcattcgtcagttgttgggcggcacgggaaggtgaaattttgctcatgtggcacatccgtggatcattctcgccaccttgaatagtggaaactggaatgcatttagaagataggaacgg

SEQ ID NO: 166696 - DNA, 122 bp, Homo sapiens
ttgacgggcgtccagccggcggcgccctgggctcggctaggcgcaggacggccctggcagcggtgcagcagcccaggctagttcctggggggtccctggtccccgcctccccgcgcgccccg

SEQ ID NO: 166697 - DNA, 122 bp, Homo sapiens
gatgagcatttcatctgcatccgttttgaggcgctcactgaggcccgccaggcggtaactcgcttccaggagatgtttgccacactgggcattggggtggagatcaagctggtggaacaggg

SEQ ID NO: 166698 - DNA, 122 bp, Homo sapiens
ttccccataccccaccccatacacgtttttcctcttaccttgctttataagacttttccacggcaattatcaccatttcacattagacatttacatctttcttcattgactcaaacccctat

SEQ ID NO: 166699 - DNA, 122 bp, Homo sapiens
cgttccgagagcgcacggcggcaaataaggccaggataggtggctggctggcgacgggggcgcctgcggcggcgcgcgctgctgtccgtggtgttggaaccacgctctccgcccgctcccgg

SEQ ID NO: 166700 - DNA, 122 bp, Homo sapiens
tgtccggaaagccttcgcctccctctactgtgtcaagcgtgacagcggcttggaaagctccgtccttcgcagacacactggcggcctgtgtcctgtgcgccccttagacatacttaggaagc

SEQ ID NO: 166701 - DNA, 122 bp, Homo sapiens
caggcgccctgtgacgactctcttgcacacacgcacacacacacgctcatgcaaaagcatcgcatggtgggtaagaccgtggactctgaacccagacgtgcaattcaaaccagactccctca

SEQ ID NO: 166702 - DNA, 122 bp, Homo sapiens
cacccgagtcccatccccaccaacacacgcgacttcatccaaaagttcttcctctgagaacgccaagagacacccaagggactccaggtaaaggtgagcccttccagcagtcgccctctggc

SEQ ID NO: 166703 - DNA, 122 bp, Homo sapiens
acgcacgtgtgggaggccgttttgtgcagcgccattgtgctccccgggcgggcatgtgctcgcgctccgtggctctgttggtgcccagcgtgcgggggtgtgctggtggccctgtgggcctg

SEQ ID NO: 166704 - DNA, 122 bp, Homo sapiens
ccacccgggcgcgccccctccgcacaccggctgcaggagcctgacgctgcccgctctctccgcagctggccttctggtccaagcacgtcggtgagtgcgttctagatccccggctggactac

SEQ ID NO: 166705 - DNA, 122 bp, Homo sapiens
ttaacttgaatctgtctttccatttctggagaaaatgtttcctttggctgctgaaattaacgcaatcagacatgtgtggaaacaagcagctatgagcatccctgactttcgaagctacaccc

SEQ ID NO: 166706 - DNA, 122 bp, Homo sapiens
atgcctggctaagcacatggcagaacctggtacttaaacccagaatgtgcacctccaaatcgcacagctttctgctttgtcatgctgactggggtagtgctttgatcacctgtttggtcatt

SEQ ID NO: 166707 - DNA, 122 bp, Homo sapiens
gcagctagctggtggcagccctggcagatcccggcacacagtcaggctccacgccttacccgagccagttgtgcctctagattacgcctcgcttaaagtccagcgaccaagatagaaaaaca

SEQ ID NO: 166708 - DNA, 122 bp, Homo sapiens
gcctcagcaaaacggaactgccaagcactggtatcagggacttgggatggcctgaaccatcgcagccctgagtcatatgacacagcagttttcttcagccctgcccgtgaggtaggagactg

SEQ ID NO: 166709 - DNA, 122 bp, Homo sapiens
ttcctttcctaccctatcccactcctcgaggaatcatccctggctcccacctcagtttcccgcctccaaggcagcatggcgggcaagaagttgaggccactgtccctgggtgttcctacccc

SEQ ID NO: 166710 - DNA, 122 bp, Homo sapiens
aaacaatacagaggtgtagggaaaatacctagtgccaccctccactccaaaaccccatgtcgccagagataaccatttattcagacagtgagtatctattaagtatctattgctaggctttg

SEQ ID NO: 166711 - DNA, 122 bp, Homo sapiens
cactcactcacccacggtggccagcgtgtcaaagtcctgcaggctgtacacaggcggctccggcgacagcgcctcagggctggggcagagcgcgggcgccccgtcgggggtctcctccgcca

SEQ ID NO: 166712 - DNA, 122 bp, Homo sapiens
gtggcctagtagctggcagagcttctgagctgcagagaagcatccagaatgcagagaaggcggtgctttgcgattgatggctgctgctgcccctcccatgaggctgattcaggccaagggaa

SEQ ID NO: 166713 - DNA, 122 bp, Homo sapiens
acccaacgtgccctgcgtggtcccgttacgtgtcccatcatgtttcgtgcgcttccattacggatcatacctcgcacctcaccgcgtggcctctgtagttccagagctcgcgagggccaggg

SEQ ID NO: 166714 - DNA, 122 bp, Homo sapiens
acgtcgggcagattcccttccagcccaggttgggatctcagggtctgttccttgctagaccgggtccaattggtatcagccccctattcctgctttggaatagggggctgatacaaattgga

SEQ ID NO: 166715 - DNA, 122 bp, Homo sapiens
tccatggccccaggcaaccgcaccccggggaaacctgtcagacccgaccgtgggggtcggcgcgccgggaacctccacagcctggccagcccctgcctggtgctcggttcagacaagctggg

SEQ ID NO: 166716 - DNA, 122 bp, Homo sapiens
tccaggtggaggtcttgaggctatcagatcggtatggcattggcgtccgggcccgcaaggcgggcgctagctggctccgggcagctcggccttgggggcttcggggccccgagacgcggggc

SEQ ID NO: 166717 - DNA, 122 bp, Homo sapiens
ctttgagacctgggggatctcaggagccacctgggatggccctggcctgaatccagcctccgctgtggccatagaaggaatggagaacagggctgggcatggtggctcacgcctataatccc

SEQ ID NO: 166718 - DNA, 122 bp, Homo sapiens
agtattggcttctgtgcacatcgggcaatgaggtcttttgcgtagcagtatttggatatccggtttcctcacgctatttattgaagcgactgtcctttccccatcgtgtattcttgacacaa

SEQ ID NO: 166719 - DNA, 122 bp, Homo sapiens
cctgagtttccatacaccgcagcagctggcgtgtgtgcccggaagctacgagcacctgcacgtggaggctcagagcagcatcactaagagtcaaagcacagccccgctgatgaagcaacaga

SEQ ID NO: 166720 - DNA, 122 bp, Homo sapiens
atttaaatgcctgtgggacattcaaatgcaaacatttggttagacacattgtctggagctcgagggaataagctaagatgtagcattagatttgagaatcatcagggtatttgcagccaaat

SEQ ID NO: 166721 - DNA, 122 bp, Homo sapiens
tcacaagaaattgcaaacaaaaaaagctgacaaacaggatctgctacataatttgcgggacggagtgcaaaacaaaaacgcacagttcgcagttcaaaaagcagggcgggggcgaggacctg

SEQ ID NO: 166722 - DNA, 122 bp, Homo sapiens
tttgtgcagagctggggtgggtaatcctggggccaggtctgccccctgcagtgccttgaccgtctcctgccgctgcctcagctttacccttcaagctcgagtcggttcccgagctctccgtc

SEQ ID NO: 166723 - DNA, 122 bp, Homo sapiens
aaaggaaaaggaaaaccaagccagccacggaaataatccaaaaaaagccggtgatagcaacgaagccaacaggacacacggaaggcgctggttctaggcaagtcacagaccggagcggggcc

SEQ ID NO: 166724 - DNA, 122 bp, Homo sapiens
gctggggaccaaagggcagtgaggcccacagccggctccggtcctcgccccagcccctcccgttgctgcttgtaccactacactcaaggccccagcgccaaggcctggccctgcagagggcg

SEQ ID NO: 166725 - DNA, 122 bp, Homo sapiens
acaacctccgcgtggtccccgagctctcagggagctgcgcacaggcgttcctagcccaggcggggcgctggcaaccctgcccgccctctgcctgtgtcgccaccacagcccacagggctcag

SEQ ID NO: 166726 - DNA, 122 bp, Homo sapiens
cgtcttgggtctggatttggagcctggatgggaagcagtgtgcacagaagccattgcacccgggaggtgggacgtgggccatggcgctagagagctggaaaggccgagggtgccatgggctg

SEQ ID NO: 166727 - DNA, 122 bp, Homo sapiens
cacagtccctagcggggggcactcggagggacacacccagctctgtaaggggccggggcgcgggcccagtacaggtctgcgcgcccgcagtctccgaacgctcacaggaccaggccccgccc

SEQ ID NO: 166728 - DNA, 122 bp, Homo sapiens
aagattgccatggctgcacattgcatttgggtcaagagtggaggccgccgggaagtaggacgctattcccgagtccggtcacaagatggcggactggtccggcagaagacgagcagggacga

SEQ ID NO: 166729 - DNA, 122 bp, Homo sapiens
gactcctgcttggccgcccgagccttccttccagaagcccgcaagtctcccaaggtcactcgggacccctgtgtgcctggcctagcccagaggctgctcacctattcattttcatccgtact

SEQ ID NO: 166730 - DNA, 122 bp, Homo sapiens
aaaaggcacaggttccttgaacaggtaagaagagcgccccacttgttctcccgccttctgcgtgagcagcccctacggggtctcctactggtccctaggaactttcgccacacccggagcgg

SEQ ID NO: 166731 - DNA, 122 bp, Homo sapiens
tgcaccattgagttttcagcccagtatatgttaaccctgatcattatctgcagaagtccccgtgccacactctacatcatccaaattctctccaggtggactaagtagattaaagaacttta

SEQ ID NO: 166732 - DNA, 122 bp, Homo sapiens
agcagggaggcgtggggtctgtgctctagcgttaaagggagggttctagactaacgagggcgggtcggcccgactaagtgacttaaactcccacctactcctggaataaggagtcaaagccc

SEQ ID NO: 166733 - DNA, 122 bp, Homo sapiens
gcatggaggagagagggctcctcatcccagaagaggaatcgggcctgggcatggtgggggcgtcctggagcccgctcccatcggcactggattcgactgtgcacataactttccaactccat

SEQ ID NO: 166734 - DNA, 122 bp, Homo sapiens
gctccaaggggggttcataagcagtaacttccccgaaacacaccagcaccaggtccaggacgcagagaggatcgatcccgcccggtgcctctcgaagtcaccaacgccccggtatacaccta

SEQ ID NO: 166735 - DNA, 122 bp, Homo sapiens
cgcacccatgcgctgggtttcacagatgcagactgaagtccaggctctgctgcagattaacggggtggccgccagcaagtcaagtgacttgctcttctgtgcactgcatgtacttgggttcc

SEQ ID NO: 166736 - DNA, 122 bp, Homo sapiens
ggggcttcaaggaggagacctgtttccgccactgagagtcccttcagaagacaagagccccgtgggacggagactgagctggagggtcttcacagtgggaggtgaataaggagggggtgaaa

SEQ ID NO: 166737 - DNA, 122 bp, Homo sapiens
agccaggccaggggcagccggcacattgagaggccagggcggagtaatggccaaggccaccgggcaggtagtgaaaggcccctcgctgtgttaaacaaatgcagtttccttcctggcttccg

SEQ ID NO: 166738 - DNA, 122 bp, Homo sapiens
gtgtctgtcagggaatgtgtccctcttccattctctgtgtctctggtgacaagtctctctcggttcctacttcctgtctctccctgtcccttcatgcactgccactttctgccctgtgtccc

SEQ ID NO: 166739 - DNA, 122 bp, Homo sapiens
cgtgagccaccgcgcctggccaattgttcgggtctttttgatggactcatatgacatttccgttgggagatggatccaagaggggaattgctggattatgtggtgccaagtggccttctgaa

SEQ ID NO: 166740 - DNA, 122 bp, Homo sapiens
actccctcgtccgcgaccatggaaccgagcccccgtctcctgcacaccacaccagccagccgtgacccactccctcgtccgcgaccacgtaggtcggacacctgactgccccacagtgtttt

SEQ ID NO: 166741 - DNA, 122 bp, Homo sapiens
ggggcgaacatgcaggaatttcaaaaaactcagacaggcgaaggcagccaggccatggggcgacgccaaaatatgcacgaagaaaaatgctattaggtcaccagcccttgagaggcgggaag

SEQ ID NO: 166742 - DNA, 122 bp, Homo sapiens
cagggaagagcccccagcgcattccaggatatctgcgtaccgcgcctgcgggcgtctggccggttctcccacctgatttccagcccagctcccgccaccctcgccggtcggtttgctgtttg

SEQ ID NO: 166743 - DNA, 122 bp, Homo sapiens
atcaaccaaatcaatatcttactgaggaatttgtacagaagaagggtggtagggtggcggcggtggtaaaagcttggcaggcttcagggggattaaccatttttggccattgaatgtagact

SEQ ID NO: 166744 - DNA, 122 bp, Homo sapiens
gccttcatcattcttcccttgctcttttctatctagccattcctccaatgaccaacctcacgccaaagtgatctattttcagtgaagtgtatacatcctaagctgggattttggacatcttg

SEQ ID NO: 166745 - DNA, 122 bp, Homo sapiens
cactgcagccttaaaaacccatggaccccagatgcccccagtcctgtccacccctttcagcgtcctgaagcttgttccgtggctcccactgcctgaaatcagcccatcgcccccatcgaagt

SEQ ID NO: 166746 - DNA, 122 bp, Homo sapiens
cacgcgcacgccgcacgggcctgggccccgggctctgaatagcggccgtgctgactgctgcgcgccctgtagagtggaggccatattcaggcttccgggtgatgtttgtggccacccgggaa

SEQ ID NO: 166747 - DNA, 122 bp, Homo sapiens
ttatctaggaagccaatcgatgtatgaccgcccggtgtaggtcaggagagaggcgggagacggcaggggatggaagactctttaggtgcctgttccttgacttacatccacaaaaatcaatg

SEQ ID NO: 166748 - DNA, 122 bp, Homo sapiens
caggccttcctcatctctgtatctgccaccacactgagctcaggcttagcacccactaggcgtcagcaagtgcttctcaaatgaatgaaccaatgaatgagcaagtggatgagccattgacc

SEQ ID NO: 166749 - DNA, 122 bp, Homo sapiens
attccaaatacagaattcaagaattaaaagaactttccagtcagcactggaatactgtagcgcccttccccctcaacccctccacatttaccccaccctccaatcaacatatgaatggagga

SEQ ID NO: 166750 - DNA, 122 bp, Homo sapiens
caccagtactcccgcagagagttctttcctgggttaggaatttcagaggacttggcggaccgactcttgtcccgagttcagatcactcgacccagtcctagcaaagaactgaacctaagagg

SEQ ID NO: 166751 - DNA, 122 bp, Homo sapiens
tctgatggggacgtggagaacttttgtatctagctcagggattgtaaacccaccaatcagcgccctgtcaaaacaggccacttggctctaccaatcagcaggatgtgagtggggccagataa

SEQ ID NO: 166752 - DNA, 122 bp, Homo sapiens
acaggaagaaagctacaaacaggaggcctgtggcacatgcttccgtccgcctcctccaaacgggtctccaaccccaaggaccgcggtgcacagctgttgatgggatgttattttataaccaa

SEQ ID NO: 166753 - DNA, 122 bp, Homo sapiens
actcagacagtgcaggacgagaaacgcccgcggcaccaaagcccctcagagcgtcgcccccgcctctagttctagaaagtcagtttcccggcactggcaccccggaacctcaggggctgccg

SEQ ID NO: 166754 - DNA, 122 bp, Homo sapiens
tttcctctcattttggacctccagccttcctgtagtccgaggccctgcaccggggtcaaacgcgcctccggtcttcacgtaaccgttcaagcatccctccttcccaggacacactcaaagcg

SEQ ID NO: 166755 - DNA, 122 bp, Homo sapiens
acagaggccggggatgggaggtaacttactcaggtcacactgttagcaagtgataggactcgttttttgtttttttttgtttttttgagatggagtctccctctgttgcccaggctagagtg

SEQ ID NO: 166756 - DNA, 122 bp, Homo sapiens
gagggctgaaagtcctgttttctccctagcttcagtgaagaaagcctgacggctcccccgcgtccaacaaagacaacgctcttccggtcttcgtgacccaccccgtgagcagcccaaaccga

SEQ ID NO: 166757 - DNA, 122 bp, Homo sapiens
tttctgtttttccatttctctcaaggtaaaattaggataatatatgtcttgtagaattagcgtgaggattagatgagatgatatgcttaaggttctatccagtgcctggcatgcgatagtca

SEQ ID NO: 166758 - DNA, 122 bp, Homo sapiens
aggtgaatgtcttggctctgcctcaggtgcctgcctttctggatttgtgttctaggacgacgggagttggggaaatgtctgttctttgggtcctgtgatggcggtcacctccagcctgagat

SEQ ID NO: 166759 - DNA, 122 bp, Homo sapiens
gggaaaagtagccaccttaccttgccaacgatgccacgacgggaaggatggagagtcagccgctgcacggtgccgctgctccttggactctgagacattcttttaacccttttcccatttgc

SEQ ID NO: 166760 - DNA, 122 bp, Homo sapiens
tatgtaggacttctcttccctgggtgaaaagcatggaccggctacaattgtgtctttgagcgcgcagcatcgtgctttgtgctgccggggataacggattctgggtctcacacgcatccgtc

SEQ ID NO: 166761 - DNA, 122 bp, Homo sapiens
tgatagcggctgggggttctgtttccctgactcctttcatgggtttcctaacagtggagacgtggtccttatggtcttggggtgggggtctccttggccatagcacagggctgggcccaaag

SEQ ID NO: 166762 - DNA, 122 bp, Homo sapiens
gacccccaaggacggccacttacattgttccactgggacttgagcttctccttctcaaagcgcctgtactcccggaggtcgctcaggtggatcagagccttccagatgaccagcaggagaat

SEQ ID NO: 166763 - DNA, 122 bp, Homo sapiens
tgtttcgtggcgaggacacggagggccaagggggcggggccgggctgccctggccacgcccggaccgcctgctccccgcccagggcctgcacagttggcgcccaccggcatcagcgtgaagg

SEQ ID NO: 166764 - DNA, 122 bp, Homo sapiens
cctatcttcgccgaaccctgtttccctacgcccgccgtcccatttctcagctcctcacttcgaggctgcaggccccactggttgaaaggaaacttggcgctcccaccgcccggcagcccggg

SEQ ID NO: 166765 - DNA, 122 bp, Homo sapiens
agggccagcccagggcgcgctaagagtccagagagttcgtttccatggtgacgggttccgcgaaggttttcctggggtgaagaggcagggcgttgaataatcgccatggcgacagcagcaga

SEQ ID NO: 166766 - DNA, 122 bp, Homo sapiens
aacagccttttttgggaggtgtgggagatgccgtggtcagcccaagggcgagatgcgcctcggggtcggagtcgcccgagtggagactggacactccatgggggaggctggaaccccctgtg

SEQ ID NO: 166767 - DNA, 122 bp, Homo sapiens
tcctgaatatcaagtgggatgacttgaaattttgccaaacaggcacaatcttaatacgatcggccttactaaggctaaatggccttatccgtggttgaagttgacaaatcaatatattaaaa

SEQ ID NO: 166768 - DNA, 122 bp, Homo sapiens
cgcgtacgcagagaagaactgcatgaccttctttgaggtcagccccctgtgcaacttcaacgtcatcgagtccttcacggagctatcccgcatcgtgctcatgcggcacggcatggagaaga

SEQ ID NO: 166769 - DNA, 122 bp, Homo sapiens
tgagactacaggtgcccgccaccacgcccggctatttatctccattcttatggagcacagcgtggtggagttcagtccacacgcttacaggtggcttatctgcaaaatgtgtctaaaaagaa

SEQ ID NO: 166770 - DNA, 122 bp, Homo sapiens
aaaattcttagcaggccttacagtaacaggcagcaggcgggcagtaggtcatcaccccaacgctagaggaatgagaccatatcgatccgcgaggatcaagtcctgatcctgtccctggcgac

SEQ ID NO: 166771 - DNA, 122 bp, Homo sapiens
gctgcttaacttttaaaaggtggtagaacgcccagccttacacgctgctgcttaaattctcggtgctcaccaaggctgggctcgtgtggcccaatcctgcaatccccgaggcggtgtttctt

SEQ ID NO: 166772 - DNA, 122 bp, Homo sapiens
gcaagccccctcttcccaggctccacgctttaggccctgactgggagtggtgctccccggcgtggccgttgtctcctcagcctggggagcaggccctctctccggatggccgaagcgtgtcc

SEQ ID NO: 166773 - DNA, 122 bp, Homo sapiens
tcattgttttcagattcatctatgtcattgtgggtaccaatagttctttcctttttattacggttgagtagtcttctattatatggataatcaatattggcttcttcattcatctactgatg

SEQ ID NO: 166774 - DNA, 122 bp, Homo sapiens
gcccggccgggcggggtggggcggccccggcctcattaatcagcggcttgttgtggatgccggcggaggagatgccacccagggcgggaaaaggggcgcggaagaggggcggggcgggccac

SEQ ID NO: 166775 - DNA, 122 bp, Homo sapiens
gcagaggccacaatcaagacacggaaacgacagtcagtcgaggcagcagagagggtttcacgcgggccagcggaggcgcagggcagttgagaagggaacttgccacggggcggaggggccgc

SEQ ID NO: 166776 - DNA, 122 bp, Homo sapiens
aaacgcgtgcgcagtgtggtcaggttgtttcgctgggtgagtaaaatgaaatcttagaggcgttgtgggctggcccagttgatgacgtcaccataccacagcttctagtgctattctgcgcc

SEQ ID NO: 166777 - DNA, 122 bp, Homo sapiens
gcctcagagagcagggagtcggggagactgaggccccgctccgagagcgcggaggaagcgcgcccagccggcttcctgtgggggctcgggcctcgggcgccccgcggacagacgtgtccggc

SEQ ID NO: 166778 - DNA, 122 bp, Homo sapiens
gctcggaattgaccgaggggagccagagaagaggttggaaaccttttctcccaccacgggcggtttaagatggaggaaaacgctcttttattgaaataaaagaagtctaagctgacctgcgg

SEQ ID NO: 166779 - DNA, 122 bp, Homo sapiens
gtgcctttgaaaatcaacgacaacttgagcacaggtaaggcctgggagccgggcccgcggcgcccacccctcccccgccccggaaagttagtgcaactcgcgcggggccgcggccaggcgcg

SEQ ID NO: 166780 - DNA, 122 bp, Homo sapiens
agcgcgagcgtgcagggtgttgggggtgcctgcatcctgtctcggagcacctcggccaggcgcgagcgcgcgggtccccgtccccacccccgggcgccttcccggcgcgcccaccgcccagt

SEQ ID NO: 166781 - DNA, 122 bp, Homo sapiens
agatatctttccggagcaaatacgttgttttagccagagggaagatattacaagacccaacgggactggaggaagtgatgagcatggctaaacatctatgaattattggcatggtggcttta

SEQ ID NO: 166782 - DNA, 122 bp, Homo sapiens
gtccctttaggcttttctctcccgccaatcctcactctgccctacgggagggttcttggccgcttcagctcggtttgctgcttaccaaccccgcggcccaaggggagcacggctccctggcc

SEQ ID NO: 166783 - DNA, 122 bp, Homo sapiens
cccacaggcccaatccaggctccgcccgtttggagtcatggggccaacttggcagtggcccgctccaggcgagaggtgacaggtaggcagccggtctctggcctccgcccggctgtacacaa

SEQ ID NO: 166784 - DNA, 122 bp, Homo sapiens
ggtaaaggaagaagaaagcaccattcaataccatgaatcacggaacaagctgatgacttacgaaggtcagggaaggacctgccagcatcttttcaattcatgtgtgcaggcattccacagat

SEQ ID NO: 166785 - DNA, 122 bp, Homo sapiens
cggctgcctggggcgcacggggctggagtggccctctccctccccttcgctaggctcccccggcttaatctgttggccgcgactcctcagccagccccgaggaaagtgcagccattggacag

SEQ ID NO: 166786 - DNA, 122 bp, Homo sapiens
gtcacgctctagagcctgcatccacgccaggctggcacacgcagccccgtttttcttatgcggctttgatgatgattcaattaaggcaggtatgagcaggagctaatacaaaagctaatacg

SEQ ID NO: 166787 - DNA, 122 bp, Homo sapiens
gaatggagtgaatctgaggaatgcaactcatgagcaggctgcagctgctctgaaacgggccggccagtcagtcaccattgtggcccagtacagacctgaaggtaggagaagggaaggtggga

SEQ ID NO: 166788 - DNA, 122 bp, Homo sapiens
ccagagggagggtttggaatctgtgctttgcaggggatctcggtgggtaccgcggcccctcgcagggtggcgagtggggtccgtgcctcgagaagggggcccttacccacaccgtgcggctt

SEQ ID NO: 166789 - DNA, 122 bp, Homo sapiens
agcagccggggctgggacaaaggactcgctcttctaatgtttaaagcgcaaagcgaaccacgtgtgggcccagccggccctcaggaggagctccgcggctcctcccatctgacaactccccc

SEQ ID NO: 166790 - DNA, 122 bp, Homo sapiens
ccctacgtgtaggcccgcgaacaaagaactaccgttttctgattttttttggccgatgttcgtcatgcagaaccttgaatcccgatgaagatttggaggccttttgtatcctcaacatcaga

SEQ ID NO: 166791 - DNA, 122 bp, Homo sapiens
gttggttacagcagctgattggctgcagccaagactgtgaaaggataaagaggcgcgaggcggaattggggtctgctctaagctgcagcaagagaaactgtgtgtgaggggaagaggcctgt

SEQ ID NO: 166792 - DNA, 122 bp, Homo sapiens
tggggctcacggagggacagcctccaggaaggtggcctccatccgggaatggggtccaggcggaggagggtgggcatctctccacatgccactctgtgccccactgcccctgccggggtgtt

SEQ ID NO: 166793 - DNA, 122 bp, Homo sapiens
actataaatctcttagttacaactcacatcccctttccccagacaaaaccccacatagcccggtgtgtatttactgaaagcagtaagatattgctggggctttgggtgcaagatggagagtg

SEQ ID NO: 166794 - DNA, 122 bp, Homo sapiens
agtttctaaagctgtagcactgattgcagcgaaccctccagactgggcatcacgcgtgcccgtcaggagcagcagccgctgagactgtgattctcctgcagctgtggggaaacagaagtcca

SEQ ID NO: 166795 - DNA, 122 bp, Homo sapiens
cagacggcttacagccagatgaaaaataaacagggaaaaagacaatgtaatgcacatatacgtaatggtttcacagaggtttcttaattgttttttaatctttaactgtgttacctactgcc

SEQ ID NO: 166796 - DNA, 122 bp, Homo sapiens
aaaagcaaaaagatcgggttcgagcgacagggtaacgttttgagcggacgttttgatctccgggacaacgtctcacctcccagagtccttcagagtcactccaagatcatggaacaattttg

SEQ ID NO: 166797 - DNA, 122 bp, Homo sapiens
ttgttaattgcaacgataggttccccactcaaggccttcttcctaaaaaaccatgaggtccgtttcttagagaagatctgtataaatgggtcaccttacagagataccattttatgattact

SEQ ID NO: 166798 - DNA, 122 bp, Homo sapiens
cctggtcccctcttgggtgtgcccaggctgagctgcccccagggttgccctcacctggtgcgcagggcctgccaggcggcgtcgatgtcggcatagaggttcctctcggaaggcctacccga

SEQ ID NO: 166799 - DNA, 122 bp, Homo sapiens
tgttagaaaagtcacctgctgttacaagttactctggtctcctgttgttacagacttacacgtcgattgtgttctatgtttataacttgaattcatatgggatttcacaggaccactgctct

SEQ ID NO: 166800 - DNA, 122 bp, Homo sapiens
ttaggaaaaaccgaggccctgtgggaacagcaacgcgggctccagccaggctctcgtcctcgcagcctcccacaagacctggggctcagggcagccgcttccccacccagcacagcagcaga

SEQ ID NO: 166801 - DNA, 122 bp, Homo sapiens
ttctttaaaaacttacttagattggcaaccaaatgaccatttgctttcactggagctcagcgatatttacacagcacttgagatattctctctacaattcaatttacaagctattagagaat

SEQ ID NO: 166802 - DNA, 122 bp, Homo sapiens
aggagagaaggaaaagagatcaggttacacattctttgttcctgagcctaccactgcacacgttcagagaagcaatagtgaggctagagtatgcatttgccactatgtcttcaacccttccc

SEQ ID NO: 166803 - DNA, 122 bp, Homo sapiens
atgggggcgcctctgggatggagccaaccaccggcgcagtcggatgaaaggtgggctggccgctcagccatcctcctagggcaaggccttgggtatgagtcagcagccccaggtgtgagcgc

SEQ ID NO: 166804 - DNA, 122 bp, Homo sapiens
tcggtgggatacccttcaacgtggcagcactgagccgttattcggtgagatacccttcaacgtgggagcactgagccgttattcggtgggatgcccttcaacgtgggagcactgagccgtta

SEQ ID NO: 166805 - DNA, 122 bp, Homo sapiens
tggctcgggactgacgtctcagtcctattggttacgagagccgcggttggggcgaggaggcgggagtttggcactggttctgataggacgggtgtttgcgttcccagagttcctattgggtt

SEQ ID NO: 166806 - DNA, 122 bp, Homo sapiens
ccctgctgggccaggccaccgtatgttaggagcaagcctgcctgctgcgggccacgtgcgcgtgctggggtggcaggagcccgctcgcctctcctgaccccgtgctctgcctcctgtgttcc

SEQ ID NO: 166807 - DNA, 122 bp, Homo sapiens
ttctggcgcccgcgaggaagagggttgaggaagaggaaattgggatgaggccctggaacacgttttaatgcagcgccctgacaggcaggagccaggcaatactgcttgggaatgtgaagccc

SEQ ID NO: 166808 - DNA, 122 bp, Homo sapiens
gcggcaggggcggcggcggcgacggccggaggtgtacggtgagaagccataaagacggggcggtggggggagtggcagcgggaagaggccggccgaagcgcgcgaggggtggggcctgcgcg

SEQ ID NO: 166809 - DNA, 122 bp, Homo sapiens
cagcccaagataggggggagagtctgaccatctccccttttcccagtggggtgcaatgtacgcaagtaggccctgggcataactctgcctgtaggtgtgtccagttctgtgtagcagatttg

SEQ ID NO: 166810 - DNA, 122 bp, Homo sapiens
attatgtcagcctgtatggagaagatgggattaatctgaaccgtgtgtttggagtacagtcgtgttgcttggctgaccgagtccttcagagccaggcaacagaggaggaggaaccagaaaca

SEQ ID NO: 166811 - DNA, 122 bp, Homo sapiens
ctcccgggaggattccgttccgggggcgggggagcgtccctcggcctcggctccccgccccgaccccgcccattggcccgccgcctgccgtatatgcagaaaggtcccgccccgccccgccc

SEQ ID NO: 166812 - DNA, 122 bp, Homo sapiens
gctactcagaaaagctgaccgatgatagagcactgggtcaactcacgctaattatgaaaccgtgagtaaaataatctgtgcttctatgtaacttaagtacccacaaatcaggaagcattccc

SEQ ID NO: 166813 - DNA, 122 bp, Homo sapiens
ttggcctgcacctgggacatccttctccacggctagtctacaatgcaggtgctctgcacacgctccctggctgaccccaacgcagagaagatgcacgtgagcccacccccacagcaggcgtg

SEQ ID NO: 166814 - DNA, 122 bp, Homo sapiens
gcaactgtgtgacgattcctccaagcaagaaattggaattgaatgtctcaagtctcgttgcggttgctgaggggattggatatagggacctggactccaacatgaagaagctagggagaatt

SEQ ID NO: 166815 - DNA, 122 bp, Homo sapiens
caccccttcgagtcctcctgcccaggaaacacccccacgagtcagttccggggtgcctgtcggattcaacttcccatccgtgggattcccacccccggggtcatgctccccttctccatcac

SEQ ID NO: 166816 - DNA, 122 bp, Homo sapiens
gctttattaactaaaggactagtaacagcctcagagcgctccctggaggactatatgtgacgtactaatttctaacaaaaagttgaaattaagaaattttcaccttttcatgtttttgtaca

SEQ ID NO: 166817 - DNA, 122 bp, Homo sapiens
gtaggaggagggctctgcaggccgcctcccggaacgggaggttcccaagccactgcacttcggaggggctgtaattagagttgcacattcattcagttcccagtaaagtagaacgtgctcca

SEQ ID NO: 166818 - DNA, 122 bp, Homo sapiens
cccgccaccaccgccaggggacccgcggagagccccgccccgcgcccgccgcggctcagccgtttcacatgctgattggctgtggtgggggccaatcagcgcccaaccgccccgcccgcccg

SEQ ID NO: 166819 - DNA, 122 bp, Homo sapiens
gagtggcgctattcctggcccagtagcacccgagccccgggtttgaccgagtccgcgctgcgatggaccccaacaccattatcgaggccctgcggggcactatggacccagccctgcgtgag

SEQ ID NO: 166820 - DNA, 122 bp, Homo sapiens
aaaagattggcccagggtcctaaagtaaatcagagcccaagcagcctccagctctcaaaccgtgccccgtgtgctgaccattccgcagacgtggacttcccactagccatgctactgtttca

SEQ ID NO: 166821 - DNA, 122 bp, Homo sapiens
ctactggacttgagcactgacgatgtttggtcttcccattaaacatcttcctgtccttcacgtggacattttgaagattattaagggaaaggtaatcctgttgatttactggaaaaaagaag

SEQ ID NO: 166822 - DNA, 122 bp, Homo sapiens
aggggctattatacaatctaggagaaaatgtcagagagaatgttcctgccacccactccccgaaactttccctggaggagccaaactttctcaatcagaaagggcctcttcaaaggacttag

SEQ ID NO: 166823 - DNA, 122 bp, Homo sapiens
agggaaatcaagtcgttcagacaaccgctgggctaatgattaactccacaagtcacattacggcccatttcagggccacacatagatattcatcatagaactgccatgatactcccatgttt

SEQ ID NO: 166824 - DNA, 122 bp, Homo sapiens
ataatgctctgcaggtaagcccggttcatcagcagggtgggttccaagtgccctttctcgcgtgccttgctctccgcggcttcccgctcctccgtctcccgcttgcagtaggaatacctgtg

SEQ ID NO: 166825 - DNA, 122 bp, Homo sapiens
ttcgatggtaagtgggtcaccggcgcgaactgtgtgaggatcccagtatcttaaagccttcgcccaacttcgcccttttggaggctctgttctttggagcctctcaggcaatttccacgtat

SEQ ID NO: 166826 - DNA, 122 bp, Homo sapiens
atggaggcgggccggaggccggtggaaccagctcgagctctcgagggccgtttgggggctcgcgccgtacggcttgtgaagtctcgcgcctctccccttagtccgcctctgctgctcaggct

SEQ ID NO: 166827 - DNA, 122 bp, Homo sapiens
ttgaggcaggtagactaggggaaatgtgagtgagtggaggcaggggcatgaagcttgcaccgtggctgtgaattaatatagcttttctgtccctgggtctctgggtctagcacttttcaatt

SEQ ID NO: 166828 - DNA, 122 bp, Homo sapiens
tgagggctcagctccgctcaatccgtccctgggccagcgtgctgcgcaagtctgttcccgcgcagaagtacacaccggcgacgggacagcgctatccctgctctggaactgagcccccagag

SEQ ID NO: 166829 - DNA, 122 bp, Homo sapiens
ctttcccttgctgccaaactttcctaagtgcccaccgcccgcctttccaggcgcagtcagcgggagacagccaccaccaccagctcttatacagactcacaagaacctcagaccaagccagg

SEQ ID NO: 166830 - DNA, 122 bp, Homo sapiens
ggcgggagccaccgcgcccacctttgtatcagtttttgtgtcataaaaaaatgagtgcgtcggctgggctcagtggctcacacctgtaatctcagcactttgggaggccgaagtgggtggat

SEQ ID NO: 166831 - DNA, 122 bp, Homo sapiens
agacttacagtagaattccaaaagcagaccgcctgggttctaattctggctttcccgtttcgcagatatgagactgtgggtaagttacttctcaaagcgtcaatttcatcatatatacaaca

SEQ ID NO: 166832 - DNA, 122 bp, Homo sapiens
catggctgacaataataaaaaattttaaagcaaaactaaagatttataaattgtaaaatgcggttgtaacaagtatttactgtaccagtaaatatgaaaaatattaatgtcctcacacacat

SEQ ID NO: 166833 - DNA, 122 bp, Homo sapiens
ccagactggccccgaactcctgggctcaagcaatcctcctgcctcagcttcctaagtagccgggactataggctcatacaattgcatccatcaggaatttttgtagctcattcatgaactat

SEQ ID NO: 166834 - DNA, 122 bp, Homo sapiens
agcttagatccgccgcctagggcgcgcgcgccaaacgagcgccttggcgcctcgacatgacgcacttccgcttcatccggtggggaactggaagacgccgttctggcctgggaagaggaagc

SEQ ID NO: 166835 - DNA, 122 bp, Homo sapiens
gctctctttccatcaccaagtgcatttctaaactgtccagtacgaagaaaacaaagagctcggttaccataaagaaggtggttttcaggtctatattcaatggctctggtgtaatagataat

SEQ ID NO: 166836 - DNA, 122 bp, Homo sapiens
ctccacagttagcatgagtcccttgagagccgggtaagctccctctctaatcatgtttgccgcctgccccccagctctctgccctgccaacttctagcagagtgtcttacattgctttttac

SEQ ID NO: 166837 - DNA, 122 bp, Homo sapiens
gggtcgccagctgactccatgtgagcccacttggcaccggccccccgagggatcctgcgacgcgaggggtgcccatttgcagtgatccgcggactctcgaaccctaaaccccggggcccagc

SEQ ID NO: 166838 - DNA, 122 bp, Homo sapiens
ctaatagtctacacatcacacatctatgcatcatattagaattaaaggaaaagtttaacacgttccatttattgaatggacaagaggccaaaatgcacactggggaaaaacaatctgtggct

SEQ ID NO: 166839 - DNA, 122 bp, Homo sapiens
cacgggggtgggagaagcccaggggtgagcacagggtcagcgctgtgacggggcccaggccgctctcagtgacgcccgcaaaaccccacgtggcgggaaccaggctcagccacactggcggg

SEQ ID NO: 166840 - DNA, 122 bp, Homo sapiens
ttccttgcagctctggacatcctgagcccaagtcccccacactcagtgcagtgatgagtgcggaagtgaaggtgacagggcagaaccaggagcaatttctgctcctagccaagtcggccaag

SEQ ID NO: 166841 - DNA, 122 bp, Homo sapiens
gttcccattggctaaagcctggtgtattttgctataactcccaattaatcaaggaatgcccggaacattgacttgttacttacttaagatgcttttccatcacctctccagcactttttaga

SEQ ID NO: 166842 - DNA, 122 bp, Homo sapiens
tgctcagtgctgtcagaaaaggtaaaggaatccgagccctgagggctgcccagacgtgggcgcttgccccagctgctgtccagtagcatctgcgggcggcgcctgcacccgtaagtgcatgt

SEQ ID NO: 166843 - DNA, 122 bp, Homo sapiens
attggaatctgccgtttaaccggagcaccaagtgacatggctgcacggtgagtgtggctccgccaccaccctgcactgtagcaaaggcccaggagcccagggcaccggcctgtctctgctgt

SEQ ID NO: 166844 - DNA, 122 bp, Homo sapiens
tttctgcaagtctctggatgatgtctgtccacccaccgtctctgagtgttctcctcacctcggccttcctcccttattttagtcccacaactgtcaccactcttcagaatcctcatgaaact

SEQ ID NO: 166845 - DNA, 122 bp, Homo sapiens
ctgggggtacagcatcccgccctgcagccccagcgcgcagccccacaacaacggcccgagcgccgcccaggcaaccgccgacccccgggccatgcttcccggtcccccgctcggccaccgtc

SEQ ID NO: 166846 - DNA, 122 bp, Homo sapiens
ggagggcgatggcccacgtctgggtgcggggcccacacccggttctgcgactcgaagaaacgtctctgcccctaggagtcccttggtgtagaccacagggttgctgtgaaactcagcagtgt

SEQ ID NO: 166847 - DNA, 122 bp, Homo sapiens
aaaaccatgtttctcaaaccgattgcctttgtaagacattgctacatacatgattctccacgcatgtcaagcaactcttgcctacaatgtagtgtgggaaaattttaatatttgtcaccaca

SEQ ID NO: 166848 - DNA, 122 bp, Homo sapiens
aaacttttcatttagaggagtgctagaaagtccaaactggggcagagatgacaaatgtctcgttgaggtgtttccatagatgagcccaagagcaagccttaccaagcccagcaggaatcaag

SEQ ID NO: 166849 - DNA, 122 bp, Homo sapiens
ctgggaagcatcttaggctggcaggagtgtcctgagctctgttggtctcctgggatgccacgacacatctttcccaggagcaaagcacttcagcacatccctgtgctttgcagagctctgag

SEQ ID NO: 166850 - DNA, 122 bp, Homo sapiens
caggatgcctgctgcacctggcactgccggcagccgggccacgccatcccccgcaacaggcgggtttggacccttgactgtgccgctctaccaccggcttccctcttaagatggagacaccc

SEQ ID NO: 166851 - DNA, 122 bp, Homo sapiens
gttaacagtaaaagtcattgcatttgtgtcataattctaaccgaatgaaaacatcacaagcgatgttcatagaattgcaaaccagacaaaactgacctgaggtttgagaggagctgaatgag

SEQ ID NO: 166852 - DNA, 122 bp, Homo sapiens
gatcgcgaaggggctggcgggggcggttttgggggttgtgctaccccctagaggtttgggcggcagcagcgtccgccccctcccctgccaacagccagggcatctatcacaccagacaccga

SEQ ID NO: 166853 - DNA, 122 bp, Homo sapiens
aaagaccgcagagcccagggctgcgtttccttcccggccttttgtccaggccccagggagcgagctgggggaaggctccccggccagggcttccccacagattttactaggtcagggcagcc

SEQ ID NO: 166854 - DNA, 122 bp, Homo sapiens
ctcagggcttgggtggccatttttttctcagatattggtgggaagttgtcagccagtttccgtagcgtcttctaacccaagaccctcacagttttacagatggggaaattgaggctcagaaa

SEQ ID NO: 166855 - DNA, 122 bp, Homo sapiens
cccgcccgcgccccgctctgccgccgccgccgccgccgccgccgccgccgccggcgcccccgcccggctctccgggttcaccctcggtctctcactccgtgagacacagacggtagctttcc

SEQ ID NO: 166856 - DNA, 122 bp, Homo sapiens
cttccttttttccttcaaaggtcgccgctcctgcctcacctcacatccgtttgtggctgccgagtgcttcctgggaattgtagtttctaagtggaaccgcccctccccgccctttcctgtcc

SEQ ID NO: 166857 - DNA, 122 bp, Homo sapiens
cctcgcaaataaaaatacaaaaggtcagttcttgttctcaacttcctgacaatctattgacgatctcaggaaaacttgctcttcatcatctcactacagacaaagtaagagagagattgcct

SEQ ID NO: 166858 - DNA, 122 bp, Homo sapiens
gcgtgatttgaggacctgctgtacgtgcgctaaacgtctttttcttgttactctgacattcgaatccagtcaggcatcctgtattcaatctggaactctgctcttccttctggggggccctc

SEQ ID NO: 166859 - DNA, 122 bp, Homo sapiens
cattttgcccggcactgatctgggcggtgcatgtgggaagatgaatagggcccagttccccgactttgagggcctcacaggctgatgtgtaagagacaggaaaacagccctagtgctttgtg

SEQ ID NO: 166860 - DNA, 122 bp, Homo sapiens
actgccgacgtcctccttcccctgggcagcgtgggggatgctgaaatccgtgggagaccccgagaagcccaccccaccttcttgggttccgccacatgatggctgagctaggaggtcacttg

SEQ ID NO: 166861 - DNA, 122 bp, Homo sapiens
ctaagtttccacgattccctggaagagtcacatataaacacacttgtgatcattaccaaacgacaggacaagcccagtgcaccccggcgtcccctcccagttttaaggacgaatcatgtatg

SEQ ID NO: 166862 - DNA, 122 bp, Homo sapiens
aggtcaggagttcaagaccagcctcagtggaggagtttaagaccagagatggtgaaaccccgtctctactacaaatacaaaaattagcccgttatggtggcacgtgcctgtattcccagcta

SEQ ID NO: 166863 - DNA, 122 bp, Homo sapiens
aatgggctgatagcttttatttttttgccttagagtccagacatggtgctctggaatagccgttgtagggattatgtttatttgtcctgcatgaatgccaattttcggtttgtgcaaggaag

SEQ ID NO: 166864 - DNA, 122 bp, Homo sapiens
tgtctgactcctggccttggtggtggtttccaccagccggcgtgtaggcgccaggagctccgtgggtgcaggacttcaccacctgctacgttccccgcacctggcacgcagtcaggctcggg

SEQ ID NO: 166865 - DNA, 122 bp, Homo sapiens
cttgaagtagtgtccaaatgataaggctggaatatatatttttagaaagggctggacactcgatccggtgggagggaacatctggaacattagacagggtaagccacctttgcaactccttt

SEQ ID NO: 166866 - DNA, 122 bp, Homo sapiens
cctttaaaaacatcatcttgggaatttccttaagctttaacttaagcctcctgccatgggcgctctttcttatttcatgtgcttcctggcttcagctgctcattcctaggaagggagggagt

SEQ ID NO: 166867 - DNA, 122 bp, Homo sapiens
ccctgggcgtggaggggaggggcggggcggggcgtagagcaggcggggctggaggggccgcggggcggggacacccaggacaagcgccccaggcaaggtttttcagtgtcaatgtcactctt

SEQ ID NO: 166868 - DNA, 122 bp, Homo sapiens
gatggcagttttaactttctccctacacacaaggagctgctatacatggttccggcttgacgcggatacctagtgacacttggcggccaggccgggcagacttccgggtgggtgatccctgg

SEQ ID NO: 166869 - DNA, 122 bp, Homo sapiens
gtgggaaggccgcacgccctccgcctgtccggagtgtctcgctattgctgtctcggctggcgcgtgggtactggcgcgtaacccggcaccacagactggcagcttcaacagcagaaacgtac

SEQ ID NO: 166870 - DNA, 122 bp, Homo sapiens
tctttcccaaatgttcacgatgccatcatgtttcagcaaacacgagtcatgtctcctgcccgataatccaaccaggccagcctggccaggcctattcagaaactcagaattacggccatttc

SEQ ID NO: 166871 - DNA, 122 bp, Homo sapiens
gatggtgaggagctgcacgggcaagttcgagtctggcgagagctcatgctgccgagactccgtcacagtcaggtgcacgtcctgctgctgggccacgtgcactcggtaggtggttaccttca

SEQ ID NO: 166872 - DNA, 122 bp, Homo sapiens
agacacccagagaagacgactttgagccctcattggatggtgccatcgcaaagtacaaaacgaattgggttgtaggaactggaggcactgggacaatattccagattagggattgagctgaa

SEQ ID NO: 166873 - DNA, 122 bp, Homo sapiens
cgccttggcgcggtgcccaggctgcgggcaaggggtgcaggcgggttgtccagggggctgcgtggaggaggaggatggggggtcgccagccgagggctgcgcggaagctgagggctgtctca

SEQ ID NO: 166874 - DNA, 122 bp, Homo sapiens
cacctcctgaccctttttcttagggtctgacccacagcccccacctacaaatatgccagacgcgtcgccggctccttgcacccgactgagggggttctgatttcctggagcagcagcggggc

SEQ ID NO: 166875 - DNA, 122 bp, Homo sapiens
ctggagcagggcaattttccctccaacaatatcctgtgggagttcattagcaaggagctccggcaggatattattgggcatatagtccttttctatgtctgatttactgaattggaaaaatt

SEQ ID NO: 166876 - DNA, 122 bp, Homo sapiens
ccgctcctctctcaggcgctcaaagtggcctggaatttgtagaacgcccccctccaagcccgttggcagttgtcctagcccgctggcccttgcccccgcccgctggccgttgcccccgcgac

SEQ ID NO: 166877 - DNA, 122 bp, Homo sapiens
taatgctggcctaggtcacagtcctatgtgctataaatcagtaaatccatgggaagttcacgaacacatgcacctattgggcgattcctcatgctaccttgggatttctcttgtatcgttgc

SEQ ID NO: 166878 - DNA, 122 bp, Homo sapiens
ctgagagattgggagcgcaacttggtgctgagaagaatcgaatcgttccgctgcttcctgcgccgaactacatttcccagaggccttcgcggccctacttccccgaccccacctgcaaaaag

SEQ ID NO: 166879 - DNA, 122 bp, Homo sapiens
gcgtgaaaggttggtgcgtttcccccctgactctttttgtccgcagccgagtggcgtctgcgagtctgagctgcaaagttactgatttgcaggctgcatgttaaggcagcccatgtaagtaa

SEQ ID NO: 166880 - DNA, 122 bp, Homo sapiens
cccgacctcagcagcaggtcggcgtgcgggactctcagaatggcggcctgatctcagcagcgggtcggcatgccagactctcggagccctcagctatcttcatgtgtttcaggactgctgcc

SEQ ID NO: 166881 - DNA, 122 bp, Homo sapiens
gacgttgagcacaacgtatctcctggctacaatttcaggtgggcgtgagcttgggcccctcgctcatgttgtagggggtgctggtggctgcgtacgtgccagtgggccgcccactgaagacc

SEQ ID NO: 166882 - DNA, 122 bp, Homo sapiens
agggtgggcgcccagcacgtagttccgatccgggggcagctctgctgttttcaccagcttcggggtgttgagcaggatgaagggaggatggaaggcaagacaccggctgaaaagaggggccc

SEQ ID NO: 166883 - DNA, 122 bp, Homo sapiens
tcttactttgttttctgcttaaaactcacgtgatctgattggcatgtctccaagcaaacacgctctagcccttatgaaatgtgctctctgtagctaaaaccttgttacaatgtcttaagtca

SEQ ID NO: 166884 - DNA, 122 bp, Homo sapiens
tttcaaaggtaaatgaatagattgttgttgtttttcagcctgccgctgagagtgtgcgtgcgcctctgttatgtatagacccttttaaaggcttctggaagcaatccctaacattttctata

SEQ ID NO: 166885 - DNA, 122 bp, Homo sapiens
atctatatgaacttctagaacagacagggctcctctatgctgatagaaatcggaacagcacggcctgcaggggatggggaggacaggcgatggagacggggatcagatgggagggtgacctg

SEQ ID NO: 166886 - DNA, 122 bp, Homo sapiens
gaaggggcggggaggtgggcggagcctggcaacctggggaccaccaataggatgctcagccggaggtggccctgcgcgtgacgcagcggtgctcggaggcagggggcgtaggggccgggctg

SEQ ID NO: 166887 - DNA, 122 bp, Homo sapiens
cccatctctgccaacttgaaatcctcctggaggggcgagctgctggggttcaggactgggcgttgcggctgcaggaagccgtgggacctggggggtccctcggccgggcaacccccacccac

SEQ ID NO: 166888 - DNA, 122 bp, Homo sapiens
ccctgactctcttcgcttattatttaagccctcgtaagccttgctagacatcagatgagtcgccgggacccctggcgctgcccactccactggccccgggtctcctgggcggtcctgcctca

SEQ ID NO: 166889 - DNA, 122 bp, Homo sapiens
ccagcttggcgtagaggccgccctgggccagcagctgctggtgggtgccctgctgcactacgcggcccttgtccagcaccacaatgaggtgcgcgtgctccacggtgctcagccggtgcgcg

SEQ ID NO: 166890 - DNA, 122 bp, Homo sapiens
ttgcagaggaggaggagtcgatgatgtgaggcaggaggcaggcgggcagaaggccctgcccgggacctcacagtcccttcttagaagcctgcaaaggtcagctgtgccctctgggattctga

SEQ ID NO: 166891 - DNA, 122 bp, Homo sapiens
ttcgtttcattgtctggacgaaatccagtttccatgctagtgtcccttcccttcttcacccgctccggcagcttggtggcctcgtgcccgggccccactcctgccaggacacgattccttcc

SEQ ID NO: 166892 - DNA, 122 bp, Homo sapiens
tctgagaggaaacgaatgttgagggagaagatccagagccccggagactggaggagtcagcgcattggagctgaggtcactattggaaaactgagtgggaaaagagaaggaggaacttgcat

SEQ ID NO: 166893 - DNA, 122 bp, Homo sapiens
tgcgggtgtggggggccggggccacgttccaacatgcaccgctgcttcccctcagcccagcgccgtgcagccccgggaggacgtctgcagacactgccgcctgccagacactgcccctgccc

SEQ ID NO: 166894 - DNA, 122 bp, Homo sapiens
acccccgccccgccccgccccgccgcgccccgcaggagcctcctcctcccgccggcgcggcgcctgtgccctggtcccggtgtccccgctcggtgccaccgaaggatctaggggctcgggcc

SEQ ID NO: 166895 - DNA, 122 bp, Homo sapiens
aacgaatgacaggatgcagttaccctggcaacttcatctctagagagacaggtattgccccgttgccctggcaacagctgggttctaaggtttacagggaaatgatggctaattcacaggga

SEQ ID NO: 166896 - DNA, 122 bp, Homo sapiens
ccctaacaggtggcaactcggcagggctgctgggggcacttcctgcccagtggggggtgccgcccaaccttctcccctccccacccccgcccccgggaccgtgcaggcaccagggttccgtg

SEQ ID NO: 166897 - DNA, 122 bp, Homo sapiens
agaaaaacaaacaaacaaaaacctttgctgggaagcaggagagtttcctggaaaggaaggcggtaggtttacacctttcctgggtgctcaaattcaaagagatactgtatttctggttttca

SEQ ID NO: 166898 - DNA, 122 bp, Homo sapiens
gtgttgtctttcaaggtagacaaccttgtggtagagtgaaaaaaatcccctcctctcaaccgaagatatctaatccctggaaacggggaatgttcctttatatggagagaaggggaaggagg

SEQ ID NO: 166899 - DNA, 122 bp, Homo sapiens
cacccctgcgccggggtcttcttcagtggttcatagccacgtgacctcaccggagggccccgccttgtgttatatatgcaaattaaacattttgcattgaccaataggagacagtgcattgc

SEQ ID NO: 166900 - DNA, 122 bp, Homo sapiens
actgttcctgtccgagctgcagtattacctcaccacggaggtaaggggcggggcttagtgcgtgggcggggcttggcattctaggagtaggacctttaggggtgggagtggggaaggagagg

SEQ ID NO: 166901 - DNA, 122 bp, Homo sapiens
gcaacagagcaagaccttgtctcaacaacaacaaaaaaggcagccagctgcggtgtgtcacgcctagaatcccatcccagccatttgggaggccaaggcaagaggatcgcttgaggccaggt

SEQ ID NO: 166902 - DNA, 122 bp, Homo sapiens
ggaggtgtggagggagaggtgtgggcaggaactggggctgcgcgcccttgcgggcaagcacgagttccgggtgggcgtgggctccgcggccccgcactcggagccgccggcccggacagtga

SEQ ID NO: 166903 - DNA, 122 bp, Homo sapiens
gtggtcagtaccaaccagcggtggtgtggactcgccgcttgcctggcttcctgcctgctccggatggcgagtctaactcagcgcacacttcaggacacaaaacacagtagagcctcggggtg

SEQ ID NO: 166904 - DNA, 122 bp, Homo sapiens
ggaatattattcagctaggaaaaggaagaaaattctgccacatgcaacaacatggatgaacgttaaaaacatcatgctaagtgaaacaggccagtcacaaaaggacaaataatataggatgc

SEQ ID NO: 166905 - DNA, 122 bp, Homo sapiens
ttggcccccggccggcccgccccgccccgcctcggcggatgcatgagagctcgaggtggccgccgcagccaccgccaaccgcagccactgcagccgagcgacagcacccgagttgggttttt

SEQ ID NO: 166906 - DNA, 122 bp, Homo sapiens
accgtgggtccgtccttcgctgcgtctggggggcgtcccccgcgctgcctctgacccgcccggccctgcgtttgtctgaagcccctcgttccgcatctccggaccagggtccgggggcgtgg

SEQ ID NO: 166907 - DNA, 122 bp, Homo sapiens
gccgccgcctctgtccccaccaggaagctgcctgcagaaccagggcccctgctccagctgcggagtttcagaaccaccccacctctgctgccagccacactagcaaagcgggtgtctcgggt

SEQ ID NO: 166908 - DNA, 122 bp, Homo sapiens
gtgtcgcacaggctggagtgcagtggcgcgatcttggctcactgcaacctccgccacctgcgttcaagcaattctgtttcagctggtgtgtgccactgtgcccagctaattttttatttttt

SEQ ID NO: 166909 - DNA, 122 bp, Homo sapiens
ctccaagcggtcccaaccgccttgtgacgccatgcaatatgttcagggcacaccagagggcgctacggcttcgcggctgggcactgagccgggctggctccgaggctttctttgcggagcct

SEQ ID NO: 166910 - DNA, 122 bp, Homo sapiens
tctctcgcgagacgtcctccgccctgtagaaggccgtttcggttcttcgtgcgcggtagccgccccacttgcgggattccaaggcctcatcgagtgcgggtatctggctgtggattcgccgc

SEQ ID NO: 166911 - DNA, 122 bp, Homo sapiens
ccgagacattagaacgagatctcaaatgcctagaacaactgactgctgtacgtgtcttcacgtttttgttccttacatacctttgtttttagttactttcgttccttatttacctttgtttt

SEQ ID NO: 166912 - DNA, 122 bp, Homo sapiens
agagggacagaactaatggctcattacaaaaatgcctgaagaccgctgagctccttggcacgtggtgctgatggcctggtgcagggtgccatggtggccagctgtgcagcagctttggtatg

SEQ ID NO: 166913 - DNA, 122 bp, Homo sapiens
gctcgtttcatacatgagacgggggaagccaaagtaaccactcaggccacagcagaaaaacgcgtgctggaatctgaaacaaagtctgttggattccaagggttcaacgtcttttgtgatga

SEQ ID NO: 166914 - DNA, 122 bp, Homo sapiens
cccaaagtgcgggcattgcaggctgagccaccacggccgccacgaccttctcttctggagcgtgtcgcttttgtaattatgatgtaaactccgggcacgcggggaccctcgcgcttcgctca

SEQ ID NO: 166915 - DNA, 122 bp, Homo sapiens
acttaccacgagccctgtccctaggcttgcaatgagtgatcgccctgggggtggggcctgcgataagtgccagccctgggtagggtaagtggagcctgtctgagtgaagactgtgcggggga

SEQ ID NO: 166916 - DNA, 122 bp, Homo sapiens
ttggccagacatttaatgtgtcaaccacccaggcccaacatgttgtgagttcatgtacaccgaccattttgctatttcttttctatatgtcactttttttttttttttggttgttttttgat

SEQ ID NO: 166917 - DNA, 122 bp, Homo sapiens
gagagaagggacatactttctgcgatcctgacacagagaaggggaaagaagttcctgtctcgcctggcaactcgctcattagcattggccagctcctccccgcaggctggcgattcacacgg

SEQ ID NO: 166918 - DNA, 122 bp, Homo sapiens
tgggcccctccccaacttagcggggctcgcgggagcgcagtggcagtctgcctggcaacccgtgacatcacatggaactgacgccggattggctggacgctccccggaggcggagaaatttc

SEQ ID NO: 166919 - DNA, 122 bp, Homo sapiens
aggagcggcggcggtggcggccgctgggtaggtaccgggcgggctggggagctgcagggacgccagactcctcacccaagtttgcgcctcaggcgagagcgacacctccagacacctgccct

SEQ ID NO: 166920 - DNA, 122 bp, Homo sapiens
gagttagatgtttttattccctttttatacagatgacaaaactaaaattcagggaggttacgtatggaagtagaatgaatcattagacccatttctaggactacagacaagataaatactga

SEQ ID NO: 166921 - DNA, 122 bp, Homo sapiens
ttgacttattgttctagccactatcgaaaacgatcggcatcccggggtcgctctggaagtcggtctagaagtcgctcaccctcagacaaaagaagtaaacgtggagatgacagacggtctag

SEQ ID NO: 166922 - DNA, 122 bp, Homo sapiens
tgaaagacctcttgggctaagaaaaataataggaagggctgccccagtgtcatcttcccacgaggtttgtcttttgctcattgtgctgtggaaaactataaagtcaaatcaaatacttttgc

SEQ ID NO: 166923 - DNA, 122 bp, Homo sapiens
cctcggcgcttccaagggggaaatatccaggagggatgcctattcctgagaactctttatcgagtcttctcagagcctgccttgaggccgcaaccaatttcaaaaatctcgtctcaagatca

SEQ ID NO: 166924 - DNA, 122 bp, Homo sapiens
ggggaagctggctcagatgatgggccctaggggtgggctttgagtgagggactctcggggcgtggcttgagttgaagcactcctaggccctggggactatgggggcgtggcttggagtgagg

SEQ ID NO: 166925 - DNA, 122 bp, Homo sapiens
ttcacccggcctcccattcctttgtcaatgccagaagccagtgtctgctctcgagcttcccggcgcggtgtgaggggggaggagatggcagcacccccactttctgcctcaccacttgccga

SEQ ID NO: 166926 - DNA, 122 bp, Homo sapiens
cgcgcgccgggacagggccacaaatgactgcacctgggcttcgctggcccaggcaccacgcgactctaagcgcgcccaaagcgaccctctgcgcaaactacccccggggacgacgtcacccg

SEQ ID NO: 166927 - DNA, 122 bp, Homo sapiens
acctgggccttgctgcttcacatggaaggtggcgacacaggtgtccatgaggctatgaggcggccttgggctgcggcgtcgtactggctgtccacgatgtctgtggccgcggccgccccttc

SEQ ID NO: 166928 - DNA, 122 bp, Homo sapiens
gcttttgaagttcagttggtgggagataggatctttgtggccttctggatggatgcaccacgatagggaaatcagcaagctgaagatagggaaagtgaacacttatcactgaaggcctctgc

SEQ ID NO: 166929 - DNA, 122 bp, Homo sapiens
acgccgggaggtgagatcgggtaggaaatagccgaaactttgagttgtgcgccaccccaccgcccccaacacacacacacaggcacacacacacacacacacacacacacacacacatttac

SEQ ID NO: 166930 - DNA, 122 bp, Homo sapiens
tttcggatttcctaggaggtttctggtttgtcagcattctgttttgtttgcttctcttaccggccgcaaatctgtacagttctgcagcaacctcaattcttgcctcctcagaagaaagaatt

SEQ ID NO: 166931 - DNA, 122 bp, Homo sapiens
catgggggccgcagacgcctgcactcgggacttcctcttccagctgagaagctgagcctgcgcagtcctcaccccgcccctcggccaaatcccgccgaccttgctcccttcctccagggttc

SEQ ID NO: 166932 - DNA, 122 bp, Homo sapiens
ggcgggggcgacccgggaggcttcggatggaacgaggcggagcgagccctggcatcctcccgcccaccaggctaaggactggccgaacgtccacacgggcccgcctgctctggctgcggcgc

SEQ ID NO: 166933 - DNA, 122 bp, Homo sapiens
aagaaagagtactaaaagaaactgtataattttaatgattttagatatgcattagagatgcgttaataacaggttttgctggggaaaatctctagctcatgtatgcacagctgggggccctc

SEQ ID NO: 166934 - DNA, 122 bp, Homo sapiens
ctgcggcgggagacgcccggcggtgtttccccgcgtgtgggcggcacctttagaacttagcgcaggagcccggagggctacgtgttttgctccactctttgtccgaccttcacctctttctc

SEQ ID NO: 166935 - DNA, 122 bp, Homo sapiens
aggggcgggcgagggagggctccgcgtcaggggcagacagctccaggtgctggaggctgccgcgcggagaggtccgcccagccaggatgtgcgttgtcctgagaatcgaattacccggaacc

SEQ ID NO: 166936 - DNA, 122 bp, Homo sapiens
gagccccaaacctcttaggactctgcaccaggagaaggttgctaaggtaacctaagtgtccgtggtggtccttctgctcctatcctcattgattactatggcaacctcccccccacctagca

SEQ ID NO: 166937 - DNA, 122 bp, Homo sapiens
atcggtgttaggcaatctcaggcatttttatactgtacctatgacagacttgatgcttatcggagacatgaaaataatcagaaagctgccatgcaaattcaacatgatatttatttaccagg

SEQ ID NO: 166938 - DNA, 122 bp, Homo sapiens
tagacgcggagagatgcatgccgggacttgtagtcccgagtcgtcatagtcgagctcttccggtcacttttagtgggcggcagggaaggtcaaggtgaggctggtggcttaaccctccaggg

SEQ ID NO: 166939 - DNA, 122 bp, Homo sapiens
agagggtggatgacagctagcacttataaagaactcagtacacccttgtgttcaaactcccgggcacgaaaacagaattttccagcacagaaaaggcacttcaaggaaaaaagaactttgat

SEQ ID NO: 166940 - DNA, 122 bp, Homo sapiens
catgaagccagggaatatgtgtggccggccgcttggggtagcacttgttgctagagataccgcctggaggccactgatctgtaaaagggatctctacagaagatagggatttttgatcgcca

SEQ ID NO: 166941 - DNA, 122 bp, Homo sapiens
cggtgcggtccgaggcctcagaaagggacacgcagcagcggaagtggcgctgactcagcccggcctccctgcagtcccctggcagcggtagcagccacaggggcgggcggctgggccacacg

SEQ ID NO: 166942 - DNA, 122 bp, Homo sapiens
cacacacatgcacacaagcacagcgacacatacacgagatacaatgcacacacacacatgcgcacacacacatgcacacacacagcaacacatacacatgtgacaccacacacgcacgcaca

SEQ ID NO: 166943 - DNA, 122 bp, Homo sapiens
catctctgaagaaattcatattttatgccagggtggtctacagtagttcccattagtaaacggttaaatatcacccttccctggtaaatctgaatacttttgtgtctgttgtgaaatgctgt

SEQ ID NO: 166944 - DNA, 122 bp, Homo sapiens
cccatccctcacttaatcctgggtccgaaatagccccgggtaatcccagggcgaggcagtcgggaattaaccccagccttgaagtaagagacagaggcgtccacagaagagggctctgcgcg

SEQ ID NO: 166945 - DNA, 122 bp, Homo sapiens
ccaaacctgtgccaccaacgcgcgaagcgcagctgagactcgcggctggcgggaggagggcgggggactgtcctgaaaatgcccaagccgtgagggatcctaagccgaccgtcagacccgga

SEQ ID NO: 166946 - DNA, 122 bp, Homo sapiens
cctggacattgtggtgcaatgccgctgatgtctcaatgaacttgcagtcaaagaccaccgcgcaggcccggccctctgtgtgggtggggaaaggcaggcaccagtaaacaaagggtgggtga

SEQ ID NO: 166947 - DNA, 122 bp, Homo sapiens
cgacgggaaccggctggaaccagagtccgccgaagtctgcggccgggattggctgagggacgcgcggggcggcgcaggactagcacctgggacccggggacgccatcacagcggccgggctg

SEQ ID NO: 166948 - DNA, 122 bp, Homo sapiens
gcgtcaggtcgccgtcagccctcaggaagcgcagcagctgcaccaagagcaggagcagcgcgcacagcaccagcagccacagcagcagctcccagttcattgcggccgcgcacgcccagctc

SEQ ID NO: 166949 - DNA, 122 bp, Homo sapiens
gtgtggtaactgaggctaataagcaccactgagacctgttgagtacaacaagggcatcttcgtttaaaaagatcaacaggtaattcacacacaagcaaggttattactcaggaagactacta

SEQ ID NO: 166950 - DNA, 122 bp, Homo sapiens
gtccaaggccaaggcacccgcatttggtgagggctgctctctacccaagacggtgcctggcgtgcagtgtcccctggagggagaaatgcgggtcctcaggaggcaatggcgggagggacaga

SEQ ID NO: 166951 - DNA, 122 bp, Homo sapiens
agttcccagaccgcatcatgaacaccttcagcatggtgccctcgcccaaagtgtcagatacggtgtggagccctacaatgccacactgtctgtgcaccagctggtggagaatacgaatgaga

SEQ ID NO: 166952 - DNA, 122 bp, Homo sapiens
agcgttcccggcgcgggggccctcgccactcccgcgccgccctgccgcggccccacgcggcgccagggccccctccgtgatgacccgggcccaaggagctgccccctgcgttggcggggccg

SEQ ID NO: 166953 - DNA, 122 bp, Homo sapiens
tcggcttcccagcgtcgggcggagctgcgtcggagaaagctgctcatgaactcggaacagcgcatcaaccggatcatgggctttcacaggcccgggagcggcgcgggtaagagcctcgattt

SEQ ID NO: 166954 - DNA, 122 bp, Homo sapiens
tacgggcacctgagggctgtagaccggggtgcagccgcacaggcacctgggggtgtagaccggggtggagccgcatgggcgcctgggggccgtagactggggtgcagctgcatgggcacctg

SEQ ID NO: 166955 - DNA, 122 bp, Homo sapiens
gactgatggcctaaatccatcaggctcaccagccccggtcttggaccactgaataatttacggtccctcggagcggcgaggagcaggtcactggagttcatgggttaataacaggtttggtt

SEQ ID NO: 166956 - DNA, 122 bp, Homo sapiens
gtctccctttatttgctttgaaaccagaaacagatcaattttcatctagaaaaatgacaacgtgaagagaagggcagtatcttctcctaggctttaatgaaaagacaacctgaagtcattat

SEQ ID NO: 166957 - DNA, 122 bp, Homo sapiens
atcttctcgctcagattcaattaaatcatacggtgtttattcgcaagatttcttattccacgatgggagggctggcaggaccccaagctcagctcacccacctgttccttgcctggcactat

SEQ ID NO: 166958 - DNA, 122 bp, Homo sapiens
gaccagcccagccaatcagcgcgctccctctgccggcccgaccggcgctctggtgacgcgcgacgtctgccttcgcccacggctcttgggcgacgacccctcccacactcgccgtgcttgtt

SEQ ID NO: 166959 - DNA, 122 bp, Homo sapiens
ctcaaccgccctcccggcgatagaagccgagcggcaacgacgaagtgattataaagcctccgccccgcgcgccgctgccctgcgcaggcgcttcgctcaaacacctcacaacccttgcgccc

SEQ ID NO: 166960 - DNA, 122 bp, Homo sapiens
aaaaggttggacagtgagacactgggccaaggaagactacgttgccatggcactcactgccgtgggatgcagggatggaaaggagtggcactgctaggggcacagctggtttggcaagaaaa

SEQ ID NO: 166961 - DNA, 122 bp, Homo sapiens
ggggtccccaaccccagggccatggactggtactggttggtggcctgttaggaacgggtccgcagagcaggaggtgagcaccagctagcaagcattactgcctgagctccgcctcctgtcag

SEQ ID NO: 166962 - DNA, 122 bp, Homo sapiens
ggccgccttggcggctagggcggctcctgttgctcatgtgcctgctgctgctggggagctcggcccgggcggctcacatcaagaaggcggaggcgactaccacaactacgagcgcgggcgcc

SEQ ID NO: 166963 - DNA, 122 bp, Homo sapiens
ggcggcccacaaataaggtcaggccggccatgagaccgggaaacccaaagcgcgtgaggacgcgagcaaactaggccggcgcacgcgagccgaaacgctggctttggtaggacaaccaagct

SEQ ID NO: 166964 - DNA, 122 bp, Homo sapiens
aggaggggattttggaaagttgcgtctgagattacttctgctcgtcctcggaaacccaagcggcacaggaaagtccaaaaaggaagcaaagacgagcatccgaagtctcacccaaaaataac

SEQ ID NO: 166965 - DNA, 122 bp, Homo sapiens
tcaagccttagctgcagcgccccctggaggtctctgatgtgctccaggctgaccagctcccgtcaaagaagatggagcaaagtgcttctcatggaatgttctgggaccttaaaacagacaac

SEQ ID NO: 166966 - DNA, 122 bp, Homo sapiens
tgactgatgttgccccagtgatgtcactcctgcaaaatgcaaagcctgcgtcctggctgtcggagcatgtgtggacatttggcagcttctttctcttccctcctgctcttctgtttgttttg

SEQ ID NO: 166967 - DNA, 122 bp, Homo sapiens
tctgtcacttgggatttcttggtgaggcacacataaggtattggatgtgaacacacttttcgactgaaaacacaaatgtgctctagtgctctggcaagcaccatggcagtaaccctatcctt

SEQ ID NO: 166968 - DNA, 122 bp, Homo sapiens
tggggcattcacggagcccagctccaagtgaaggacctccagtgagtccattgacggccccggtgtgctcggtccagggccaggctgtgcccgctggccctccttctgccaccccacgtcgg

SEQ ID NO: 166969 - DNA, 122 bp, Homo sapiens
atctaaggccagcacctcccgctgggccccggactcatccctctcactgcctggggacagcgctccaactccatttcaagcgacaggagctgtctctgtcttgggctcatcagcctcatttc

SEQ ID NO: 166970 - DNA, 122 bp, Homo sapiens
tcgggccaaggctggaatctttgtcctcattcagggacgcctttgcggtctttgaagctacgctcaggtgagccgagggcagacactgtgtctccttccggaagctgggggttgcgatacgc

SEQ ID NO: 166971 - DNA, 122 bp, Homo sapiens
cgattgcgacattcatggaataaattccccttcgcgacacatggggacgctcacgctccacgctgtggccacactcttacgcgcctttgttcaaatggtccgcggtaatcacccctccagct

SEQ ID NO: 166972 - DNA, 122 bp, Homo sapiens
aaggactgcagacagaatatcgcgaggtattggtcagccaagatggcttctaacactggccgccacacttaatatggcggccagggaaatttcctggagaaaatcacgcgagagttgcatca

SEQ ID NO: 166973 - DNA, 122 bp, Homo sapiens
ccctccaacgtggactcaccatgagaggacgatcgtgtgctattccattaaacatgcctccgtctcacgactccagccagggttaaaaccttcagatgttttctcaacacattaagcagaac

SEQ ID NO: 166974 - DNA, 122 bp, Homo sapiens
cctgattgctggctgtctccctcaccagcatctatgctccagaaaggcaggcattcctgtcggtttactgttgctagaacagtgtttggcacataataggtaggtacttactattcattcag

SEQ ID NO: 166975 - DNA, 122 bp, Homo sapiens
catgctgccagcactggccctttgacagatttgaaacaccagcctttccttatcaaaatacgaaaagaaaaaaaaatcatataacagtttctcagcaagaaaccattagacagatgtaatca

SEQ ID NO: 166976 - DNA, 122 bp, Homo sapiens
ttaagttctgtggtggagacctggagtctgtttttccaaataggcaccttgaaatagatacgcttcttaagcggggaaagtacgagtaggtcctattatttgcaatgttttagcctttccag

SEQ ID NO: 166977 - DNA, 122 bp, Homo sapiens
taacaagcaagcttcaagaaaccagcaatctcttcttatcctggacccattaatcatgggcgcttgggagttctagcctgaaattatttggcatctggttctttcttcaggtccagctcacc

SEQ ID NO: 166978 - DNA, 122 bp, Homo sapiens
gttttgctccttttttctccccaatgagtgggctgatgccccgagaaggtcgggcgcatgcgcagtgctcggattttttgcttggctacccggagtgaagcggccgggttgggcgattaaca

SEQ ID NO: 166979 - DNA, 122 bp, Homo sapiens
ccgcccgccgtaaatacccgaagagcggggcctcagtgtagcccgcagggccagcggcgccgccaccagaggcaggtgaccagaatccttctaaataataggaagctctggtcagggcagaa

SEQ ID NO: 166980 - DNA, 122 bp, Homo sapiens
ctcttgcgggccgctttggtagccagctgcttcctcggggccttgccgccggtcgacttgcgggcagtctgcttagtacgggccatgctgtctcattgataggagagggtctaggcagtcat

SEQ ID NO: 166981 - DNA, 122 bp, Homo sapiens
cgcacgggtctcaggcaccagcagcctcttccatttctgtcctcagttgctctgagtgcccggggatgggaaagcctggcctgagaacacggtgagctgaggctgagggccgggacactgtg

SEQ ID NO: 166982 - DNA, 122 bp, Homo sapiens
acccctcccaccccgaccctgccacgttagggtgtgaccccgagccgggattccattctgcgcctgctgcgccccctcggccacctgcggggacagcccctgcctcagccgagaaggggagc

SEQ ID NO: 166983 - DNA, 122 bp, Homo sapiens
ataatgcagggctgagtgggcagcaggccagacgtgggtcagggagcgttcatcccgaaccgtgtccagccctggcctcgccggcccaagtcgcccgccctgtgcagccaggggacggcgac

SEQ ID NO: 166984 - DNA, 122 bp, Homo sapiens
ggaggaactcacagagcggtggaaggcatcaaagaacctcagctcctcaaacacagtgcccgctgcctccctgcttcccgtccacctcacggggaactaggaattccctcctgtgtctggcg

SEQ ID NO: 166985 - DNA, 122 bp, Homo sapiens
tcctggctccaaacctgctctctttgcactatactgcattcaaacatttatgaagagcctcgtccagaaatcgccatgctgccttcaagagatgatgcctgggcgccgggcgcggtggctta

SEQ ID NO: 166986 - DNA, 122 bp, Homo sapiens
catgcatagcaattaatcatcatgtgctttgtcatcaagtaatctgtgatatatttcagacgtctcaactgaaagaaacttccttttctgcctggagaaagaacttgtgaaagcatccacca

SEQ ID NO: 166987 - DNA, 122 bp, Homo sapiens
acctgggcgccttggaatcgcggtcccgtgctgtcctccaaacttcagactcacctcggacgcgtcaacctctttgaagacttttcagtcgccagatgagccttatatgaccttagcccctt

SEQ ID NO: 166988 - DNA, 122 bp, Homo sapiens
ctgggcaacacactgagacctcgttgggaccagggagtcaagccccccacacataaccagcgcttggcaccgggaactgtcctggatgtgagtgtcacagggctgaggccaccagggagtcg

SEQ ID NO: 166989 - DNA, 122 bp, Homo sapiens
tccctcaaacttaaaatattttcccacgcagatctcaaatcttcatgttattcagcccaacggtgtaatgcaattttttaaattatgagtttttgttgtattttcttttcctatttatcact

SEQ ID NO: 166990 - DNA, 122 bp, Homo sapiens
cattccttggcttgtagctgcataactccaatctgcctttgtcctcatctggcatcctcacgttctgtctatgtcttcacacggtcatcttcttaaagggacagtagtcatggtgggttatc

SEQ ID NO: 166991 - DNA, 122 bp, Homo sapiens
agatgtggctgagagccctgcccttgagccttttggcttgaggcttcatgccagcatccacggaggcacagcttcagggtccctggtggcccagccactgggcaagagaggatgctcttttc

SEQ ID NO: 166992 - DNA, 122 bp, Homo sapiens
ggctgctgcgcttcctcgcccacactcagcacttccagcgtgaccacccctttgtccgggcggaccctccagtcagaggagccagggctcaacagaaacctgtcctgggcgtgcacccgaat

SEQ ID NO: 166993 - DNA, 122 bp, Homo sapiens
ggcggggcaagcccacttataggagacccatgggcagggactgtcccctggcacccagctcggcgccctcccccagggccctccgcagtaccgacctcagcggctcccgcttcccgggctgt

SEQ ID NO: 166994 - DNA, 122 bp, Homo sapiens
aagatcagtagccttggacgagcctgagggaggccgagcgcgatcctgactccccagatacgtgaacttgcgggtgagatcgtccacaggcgcgtcctccagggaagccctgtggctgatct

SEQ ID NO: 166995 - DNA, 122 bp, Homo sapiens
ggtatgcgagagcggttcttcctggccctcgggttcatggaatggcctaactggaaccaacgcttacggagcaagggtatgcgagagcggttcttcctatacaggaagtggaagatgttttg

SEQ ID NO: 166996 - DNA, 122 bp, Homo sapiens
ctgggcccgcgtggacccccgtccacccccacacgccctggggggggggccgggcccacacgccctggaagcccctagaggtgactctccctgggacccctgtaccagggaggaaggatacc

SEQ ID NO: 166997 - DNA, 122 bp, Homo sapiens
gaaagggatagaggacagaggctgccttctctctgcggacccataaacttgcccatgggccgaagccagccaccctggtctgactctgcatgcctttcagctgaaggaacaattgctgcctg

SEQ ID NO: 166998 - DNA, 122 bp, Homo sapiens
accccaccaaactttccctagggacagaaaagcgtccctaccgaaaacggatttaaacaccgtccccacttttgctaaggaagtttggatagggaggttgtggtccttaattcgccaggtaa

SEQ ID NO: 166999 - DNA, 122 bp, Homo sapiens
gcccacggcaggcggggggcctgacccgagcagcggcgttagggctggcctggggcgcagcgtgcgcacgggagcgcgtgtctgctggactccagcgaggtgctgtagccagctagccaaga

SEQ ID NO: 167000 - DNA, 122 bp, Homo sapiens
gtccacccaaaccctcagtggcctttcctgcagagaggggacccccccgctctgctgctccggactgtctcatggatctgaggcagtgagagcttactgtcaacctactgcccctgcacccc

SEQ ID NO: 167001 - DNA, 122 bp, Homo sapiens
attttccttttttatagcagagggaactggatctcaaggagctacgaaattttctagaaccggtgggtctggccacagtttagaactgttcacctctgttgtaaatgcttttgtcatttctc

SEQ ID NO: 167002 - DNA, 122 bp, Homo sapiens
tggggaccggggctgcagcctctgcagctgggtttcccactctgacaggcgccattttaccgtccaaaggactccctcttcctgtctttccccctcctcttcccctttgacactacttccgg

SEQ ID NO: 167003 - DNA, 122 bp, Homo sapiens
aaggttatccttttacattcaacctcataatgctgctttttgtggcagtcatcacagtgtcgaaatttgtttacatgtccatctttgctacttgatggagggcaaagatacacctcatacct

SEQ ID NO: 167004 - DNA, 122 bp, Homo sapiens
tccggcccgggccaggccagcccagccccggcggaagccaagctgggagcttttgaagtccggagaatttcaatccgagaggagccggctggaccggagcccgtcgccccagcgggggaagg

SEQ ID NO: 167005 - DNA, 122 bp, Homo sapiens
gagaagagaaagcacaggaaagaaaagaaagataatccaaatcgagggaatgtaaacccacgtaaaatcaagacacgtaaggaagagtgggagaaaattaagatggggcaagaatttgtgga

SEQ ID NO: 167006 - DNA, 122 bp, Homo sapiens
gggagcgacccgggagaaggagggccaagatggcggaagcggaggagtctccaggagacccggggacagcatcgcccaggcccctggtgagcttgggatctgcgacaaaagggaccgagggt

SEQ ID NO: 167007 - DNA, 122 bp, Homo sapiens
ttgtaaatcatcaaagccacgttctcaaagccagtgtctgatgagcgtctgtcactattgcgtctattgtgtttatcactagtgaagtgatggcatcctcagttacctcatcactaatagac

SEQ ID NO: 167008 - DNA, 122 bp, Homo sapiens
ttcggagcgctcgggcgcagaagggctggggcccattggctgtgggacgctgccagtctccggagggggtgtggtgggggtggggtctggggccgcagcgggtcggggctgctcactgtttg

SEQ ID NO: 167009 - DNA, 122 bp, Homo sapiens
gtctccaccacactcttagtgtgcccagtgcctagaaggatgccaggtgcagcgggcacacggtggtcgctccttaagcggtgctccttaggcggtagctgaagcccgggccccaggctggg

SEQ ID NO: 167010 - DNA, 122 bp, Homo sapiens
aagccacccatttttatgactgaagactccttagattccctaggcttcctcccagaggaacgtggtaggacagaattttaaactacgaagaacttcaagttcagtccttacatcctatttga

SEQ ID NO: 167011 - DNA, 122 bp, Homo sapiens
cctcagattggggctggcttcttgcacggtgctgggacttaggtttggattccacaaatccgggctctcgcccagttcctgcatcgcttcttgtgggtcccaggtccctgtcttctcccctg

SEQ ID NO: 167012 - DNA, 122 bp, Homo sapiens
gccggggacagttggtagcggtggctggtggcgaagctgcagggcgcccaaggccccctgcggcccaggagtgacccgagtgcactcgccccttactctggcctggggcctgaagaaggcac

SEQ ID NO: 167013 - DNA, 122 bp, Homo sapiens
ggagagctgactattaagtatgccaacgccaagttgtccgagctggaggccgccctgcagcgggccaagcaggacatgttgcggcagctgcgtgagtaccagcagctgatgaacgtcaagct

SEQ ID NO: 167014 - DNA, 122 bp, Homo sapiens
gccgaggccgcggtttccccctgggcctccccagcagcagccatgggcagtgagtagcggcggctggagcggggactctggctgggaacgcaggccccgcctgggctgcgggcggtggggct

SEQ ID NO: 167015 - DNA, 122 bp, Homo sapiens
gcaggcatggtgctggagcccaaggcttctgggaaagagtccaggttttcgcggagggagcgacggactcacgcgggatcgcaggcactgctgcaagacgccgaacaggctgagccggtagg

SEQ ID NO: 167016 - DNA, 122 bp, Homo sapiens
ttttccccacctgatcctagtttggtaaggtaatatggaagtggcagttttgcctcccatcgcaagccataagttttaacagggattatcctggtggtgcaaattggagtttgaatgtttgt

SEQ ID NO: 167017 - DNA, 122 bp, Homo sapiens
gcagctgtaggccaacaggagccagactgaagagatccagggaggtgcctccagcacgtacggcccacaaggggcggagtcttaagaagcgtacccaagccccaccccttacagcaccccct

SEQ ID NO: 167018 - DNA, 122 bp, Homo sapiens
ccggcctcacgtgacaaaggtgtgtcttgcgcacgcgcgttcgcaatctggttaccatgacgacgaggccctcgccggttcctgaggacgcgcgcggagcagtcttggcagtagctgtggac

SEQ ID NO: 167019 - DNA, 122 bp, Homo sapiens
cactcaatcaacgcctgcctaatgaattggctgaataaattaatttggggttcattttcccggccccctgcttggatggggaggctgcctccctgacctgtggggtgaggcccctgagggcg

SEQ ID NO: 167020 - DNA, 122 bp, Homo sapiens
ggatgaaggcgtggcccttggagatggacaggcgctgcatggccgggaactggtggctgccggtggtgtctgtgatctgcagcgtgcacacgctcttgtcgcagctgatcacctgccggtag

SEQ ID NO: 167021 - DNA, 122 bp, Homo sapiens
aataatattgacttctatttaaagatatgttactttattattatgttactttgctgaattcgttattaaagatattgacatttgagatggttagagtactagaaggcatagatctggctata

SEQ ID NO: 167022 - DNA, 122 bp, Homo sapiens
ttggaaccttgtctgcaaacggctcgaaggacacgcggcccaagggcttgccgtcgacagcgatgtcgaacacggtggggttaaccatggctgatcgtacagagctcctggcgtcggtggct

SEQ ID NO: 167023 - DNA, 122 bp, Homo sapiens
cctctcaggtcagcctcatgggggcttcaacagccaggaccaaaatgaccaaggcccctccgtccctgtgtccctgcttgacagaaccaccggaggagggaggtgcgggaagggtgttgacg

SEQ ID NO: 167024 - DNA, 122 bp, Homo sapiens
agtccacatgctgggcacatgtgtgctgctctcgtgatgacttggctaaactgcgacaggcgacaggtgacaagcgacaagcgacgagtgggaagaaaagtcttcagaaggtgacagattca

SEQ ID NO: 167025 - DNA, 122 bp, Homo sapiens
cggcgtggccctggcgcttccggacacccggtagggcggagggcccaacggtggggtccgcgctcaccgccttgagcccgcccctgcgcccggcgccctcagcccacgccccgcccagtccc

SEQ ID NO: 167026 - DNA, 122 bp, Homo sapiens
atctctggccaggactgtgaatatgatggattcagttaagttctgttctgttcaatgattcggttatactgtatggcacagttgatctaaagacagggagatcacccacttgggcctgatct

SEQ ID NO: 167027 - DNA, 122 bp, Homo sapiens
acagacgcagagcagacttgtctttccgcttaacctcaacctcgtgtgatctgccagtttcgctcccggttagcccaggactttttatagcatagagttttaaagcaagggcttagaatcag

SEQ ID NO: 167028 - DNA, 122 bp, Homo sapiens
gttcactcccttccctagccccttgggaaggtagcctggaaatgcagccagatctcggaccggtgcaacacgtattagcccatgcatgatgcaacatattcgagacagagtcctacaaaatg

SEQ ID NO: 167029 - DNA, 122 bp, Homo sapiens
tcctcctgcggcgaatctgccgttgcatcacagtggctagtctcagggcccgcaacgtgacgcttgtcgaatctgctgcggggagaaggacgcgagggttgcttgggcagcgactgtcatgg

SEQ ID NO: 167030 - DNA, 122 bp, Homo sapiens
agagggtgtgtgggggaggatgttccaatgtctatacaaacctgcaatagaagagaggagcgtccaagagatggaaacaaggtcagctaaagcaggggaatgaatgtgagacagacttggtg

SEQ ID NO: 167031 - DNA, 122 bp, Homo sapiens
ttttttccttctagtgggtgcgtggtctccctggatcaggagtgaagctgcagacctttgcggtgagtgttacagctcttaaggcggcgcgtctggagttgtttgttcctcccagtgggttc

SEQ ID NO: 167032 - DNA, 122 bp, Homo sapiens
ggattatacagccaacagttactgggctggtttcctttaatcctcacagcaggccctgtccgcaagtctttcaccgtttcccgtcaacactccacctttcctgcccaaagtttggggttggg

SEQ ID NO: 167033 - DNA, 122 bp, Homo sapiens
cgcgaacttattctcctgtggccacgccccgcgttttctaaccgtcctcttaaaggtgcacgcactttttactcttaaagggtttagggattgctcacagcgccctctccctgagcttcaaa

SEQ ID NO: 167034 - DNA, 122 bp, Homo sapiens
ttcctcagttgttcctgcaggacactagaactttttctccagggcactcagagtgacatgcggtggtggccgaggggacttcccaacagtagggtatgtctggatggctcccagagactgca

SEQ ID NO: 167035 - DNA, 122 bp, Homo sapiens
agaagaaaaattatggccatttttgcattctgctacccagtttcaatagctattggtaatcgcttgattgcctcatgtagaataataatgtagcagaatgagacatgaaatctcagaaatcg

SEQ ID NO: 167036 - DNA, 122 bp, Homo sapiens
ccggctgcagactccagggcagcaagacagcagctgggctattcttagtccctgctccaccgggaccgggtctgtgtaacagctgaagggcgagtcctcaccaggtacccaccatgccaaac

SEQ ID NO: 167037 - DNA, 122 bp, Homo sapiens
agaatttgcttttttctgtgtaaattcactcagagtgaggcagcaggaaaccctaggatgcggtgggtgaggaggctggaacgaacaagacctgagtgggtggaagggtggcttcccaacag

SEQ ID NO: 167038 - DNA, 122 bp, Homo sapiens
aaatgtcaaatgcatacttcaaacataacgtgtcttaaaacaacttttgatctctgtcaccggcccctgctcgtttccccaatcttttcctccccattcttttctatctcagttaatggtag

SEQ ID NO: 167039 - DNA, 122 bp, Homo sapiens
cctggcggcgggcgttgctcctgaggggcggggcttccgcttccggcgggggattgttgacgcctgcggttgctgcggtggtgacggggctgttggggaggggccattgggggagggaaacg

SEQ ID NO: 167040 - DNA, 122 bp, Homo sapiens
tcttctttaggtttaagtcttgggataaaggctgggataaaggttctttatttgtagatacgggcatggtctaaggaccagctacactaattttgaaaggtctttaaatcaaatgcaaattt

SEQ ID NO: 167041 - DNA, 122 bp, Homo sapiens
cgagatagtaggtggctctgaaaagagcctttatgtccatcaaaggggccccgggggcggcgggcggcctcacttgcccttggccttgtggtggctctccgtcttcttgggcagcagtacgg

SEQ ID NO: 167042 - DNA, 122 bp, Homo sapiens
aaccccagaacaaagcctatcccagtttggaatcatcacacctgggccattctccagatgcgtggagtccagcaaaatggtggcatttttgcatctcaattcgctcatctgtaatacgggag

SEQ ID NO: 167043 - DNA, 122 bp, Homo sapiens
tccccaccgcgcagcggccccgaggttcttggctgggagagtttgactttgtaaagcaatcgacaactggggcccttcccccaggcctcaggctcccagtggatgcactcggcgtggggcac

SEQ ID NO: 167044 - DNA, 122 bp, Homo sapiens
tcctctcacacacctggatcacattctggaccggccaacctggtgcctcaggggaaagtccggatctgctgggttggccactggcccaagcctcccatgccctcagttggccccaggaacct

SEQ ID NO: 167045 - DNA, 122 bp, Homo sapiens
gatggcctcatagatggtgcagtagccaaaatccacctccgagggactgagctccaggtccgaggtggtgacaatggcatgcacggtgaatcccactggcttgttctgagacataaagggca

SEQ ID NO: 167046 - DNA, 122 bp, Homo sapiens
acacttgggggttagctggagttccgggtgggcatgggcttggcggccccgcaatcggagcgggacttagcaccctgggcagcagctgcggagggtgcgccgggtgccccagcagtgctggc

SEQ ID NO: 167047 - DNA, 122 bp, Homo sapiens
ccccgagcccccaccacatatgtgcggaggcccctgggggcccaggcctgtcctcagtcccgactgggctctacctgaggaccctggggagcctgggcctggccctcctcaggcaagcgggg

SEQ ID NO: 167048 - DNA, 122 bp, Homo sapiens
gaaggctgcctgcagacgtgacctcggtaggctgagcccggaggactcacaggggccagtcgtgacccgcacattcaggctttagggcattgagccggggtcacagaggcaggcgggagcag

SEQ ID NO: 167049 - DNA, 122 bp, Homo sapiens
caacgcgctcttcctatcagcaaacccaagaaacaaagggggaggctcttctggggagagcgcgacaagaaaggctcaagacatcccttccagcacagctgaaaaataatagcttaatatta

SEQ ID NO: 167050 - DNA, 122 bp, Homo sapiens
ggaggggaactgcctgtgcgtgcggggcctttggggccttcctgcagcctcctttatgctcgctcctgcccctgtgccatctgcaaaggggactgcctcccctctgcatcccgagatttcgc

SEQ ID NO: 167051 - DNA, 122 bp, Homo sapiens
cctcgatgcagaaatccccgcggatggtgccgggcggggcgtcggccgggttcgtggctccgatgagcgcccgcgaggtgcgcaccacgtccagcccctgccatacctgtgcggaggaacgg

SEQ ID NO: 167052 - DNA, 122 bp, Homo sapiens
tgaaggaagtgtaccaaaagatcttcagatttgaaattacctttccaaaactgccctttccgatcactttcaagaagtgaaagtcagatggtttagcatgaggattggacgacgggccaagg

SEQ ID NO: 167053 - DNA, 122 bp, Homo sapiens
acagaatgacagggctaggcagccctgggagtccaggaattaatagccctgccgaggctccggggctctggagatggagctatttaaagtcaagaaatgtcatttccacccacagagcctgc

SEQ ID NO: 167054 - DNA, 122 bp, Homo sapiens
atgctgtgcgggagataaagcaggctccgccgtgaagaacgacaagcggagccgcgtggtcgcgaaaggccttgcgtgtgccccgtcagtgtgtggcgcctggcagggctgatggagcgccc

SEQ ID NO: 167055 - DNA, 122 bp, Homo sapiens
actatgcgttggcagattctgccaagttctacctgtaactggcttcattttcaagtcagacgtttggctgctgctctgtcccctgcaacaaggagccatgccagctggacacacacttcttc

SEQ ID NO: 167056 - DNA, 122 bp, Homo sapiens
cccgccgtccagcgcggctcgggcgcagttccggcgcagtccccgcgccgagcggctccgcgccccgcaccagcctctgcccggctccgggtgacgtcgcatcctccgattggaccacgcgg

SEQ ID NO: 167057 - DNA, 122 bp, Homo sapiens
ggagcacggggcaggaaattcctcaaattccaggcttgtaggatcattgctgagcttaaccgcagagcaagagaaagaggcaggagaggcagagaactgccttctctccatctttttttccc

SEQ ID NO: 167058 - DNA, 122 bp, Homo sapiens
tctcccagcgccgcgcacagagcaaggcgcgagagagctcaggaatcgcgggaaggcaagcggaatggggagggggtaggggatgagggcctctcttcactattcctccgcccggagagcgg

SEQ ID NO: 167059 - DNA, 122 bp, Homo sapiens
accccagcacgttcgaggagggctaagcccagcgtgaggctcgttggctcgacagaggcacgtgacgggtcctgagccaatccgtggaaggtaaaagctgcttcctgttggggcatgagtcc

SEQ ID NO: 167060 - DNA, 122 bp, Homo sapiens
cgtgggcctgtcgcagacctgctggtgatcttgagtaagccccttgcccactctgggtgccgaatggatgagcctggatgccctctcaagatcaaagggaacgatgaggcctgtctgatctc

SEQ ID NO: 167061 - DNA, 122 bp, Homo sapiens
ctgccaggccagggctcaggtggcagccgcctgcagacctgtgggctggggaaggatgctcgtggcagagctgcagacagacgtagcaggctggggcccttcgtgtcacacggggagttggt

SEQ ID NO: 167062 - DNA, 122 bp, Homo sapiens
cacacgttgtcgtcgaagggcagtacgtcgagcagggagcgagccgccagcgccgcccggcgcacgtacaactgctcctgcagctcctcggagctgaaccagggccctgcagcgcccgcccc

SEQ ID NO: 167063 - DNA, 122 bp, Homo sapiens
ctataaataccaccccctacatgcacctctctcccctccccccaacctggcctcggcccgcgcagtgctcagcgccagctgtctctgcccatccgcgcacccgggcttcggctggagagggc

SEQ ID NO: 167064 - DNA, 122 bp, Homo sapiens
aggtcattgcagtccacagtggtagcctcgcggtaggacgagcggggcgtataccagggccggatctggcaggcacactgaggggggcagggaacatgccagggtaccacgggcacagcggc

SEQ ID NO: 167065 - DNA, 122 bp, Homo sapiens
aatgaatccaattcttcctattgctaatacggaaagctggaagtgcgggttgagacgtctcgttttcaaatcagacttccttctcaaaagatcgaagactttagttagggctctttggatgg

SEQ ID NO: 167066 - DNA, 122 bp, Homo sapiens
attcagcctggaggcccggctggcaatgggttcagcagcaccagcatccaaaggattccgcgctccatatttgaacttcaacatctccccactggcgctgaaaggatatcagaaaagtcaag

SEQ ID NO: 167067 - DNA, 122 bp, Homo sapiens
cagccgaaacagagaaggaggaaggggccaagggaaagggagtggaggctgcgaggggagcggagagagggaggaaaaaaattgcctaaaagaagagaggaaacacgaggcgactggggtgc

SEQ ID NO: 167068 - DNA, 122 bp, Homo sapiens
tccctcccagtccgccacgcccccggggcccgccctgcgctcacttctccacgcccacgacgatgtagcggtcttgtaagaagtggaaccagccctgcatgagcagcgcccactggatgccg

SEQ ID NO: 167069 - DNA, 122 bp, Homo sapiens
taaggtggaagaaagtccctcttaagactttacatctagctggctgggcgcagtggttcacgcctgtaatcccagcactttcggaggctccagcgggcggatcacctgaggtcaggagtttg

SEQ ID NO: 167070 - DNA, 122 bp, Homo sapiens
tatccatccaggcacctctcctaccctgcctggcagagtgcccaaaaaaggtctgctgaacgaatgaatgacagcccaaactccctagtgtaaaatcacaacatcctccacccactctcccc

SEQ ID NO: 167071 - DNA, 122 bp, Homo sapiens
ccccgtggaggaggagggacggcgggggacgcggcgggcgctggagcctgccagggtttgcgttcgcgcggacggaggggccgaggccggggccggggccccgcggagggcgaggcctgggg

SEQ ID NO: 167072 - DNA, 122 bp, Homo sapiens
gcgccacagccctgacagctggcttcctgcgagttatggctctaccgtaatgggtggcttcgttaagacaaaagccgtataacaactggctgctcagaaccattgctccccagcggcaccgc

SEQ ID NO: 167073 - DNA, 122 bp, Homo sapiens
cggagccagctcccggcctgagcaccccgccatgaggccccctgacagcccgctccctggcggccgctgcgcctcctgtttaaattgccacctggtcgggttcccactgcctcctccgcccc

SEQ ID NO: 167074 - DNA, 122 bp, Homo sapiens
ctgggagcccctattggcttctgtcattctgcagtttgtagccagcctactgtgggacttcgcctttgtgattgttcagccaattcttcctaataaattcccgtttatatatatatatgcgt

SEQ ID NO: 167075 - DNA, 122 bp, Homo sapiens
aaagacaggagtgccaaggccatgcaaagtaggttgctagtgatggtttcctttgcccagcgatctgggttaaatgaacaccacggcctccccagcgttccttgttcttccttccctgacgt

SEQ ID NO: 167076 - DNA, 122 bp, Homo sapiens
ttcatctctgtcgccttcaagctgctcatcctgctactgggcagctgggctctgttcttccgccggcccaaggcctcgctgccccgcgtctttgtgctgcgtgccctgcttatggtgctggt

SEQ ID NO: 167077 - DNA, 122 bp, Homo sapiens
gacctttcttcagcctctgtgcgaccgagccgcgcgccaggctcctgtgcgaggaggacgcgctgactccctccgacctgggctccgatggagcagaaatagcgggacctggacttgtggcg

SEQ ID NO: 167078 - DNA, 122 bp, Homo sapiens
ggaaagagatcagatccaggctgagggcaggccctggaaagtacaatgagcgcgggagtccgaggactgcctgtcacagcctcctcctcttccccgcagggccacccgttcatcgtgcagtt

SEQ ID NO: 167079 - DNA, 122 bp, Homo sapiens
ccttgtccctttccttatctggcatcccagctcagctttcgttgtgctgtactgagctcccgtgtgtatgggtgtgtgcactttgtccctgagctcctggttctattccagtggtctacttg

SEQ ID NO: 167080 - DNA, 122 bp, Homo sapiens
gcgcattgggcggaagaccctgggccggcaggaacttgcttgtgattggatgttgtgggacggcggcttctcattcgtcagcctgtgactgtggagtttgaattgggtggcggttgactgta

SEQ ID NO: 167081 - DNA, 122 bp, Homo sapiens
ccatgtgccccaggaggaagcggggtcttcctgacccaactttgaacatgcacttggagccgggcgcggtggctcacgcctgtaatcccagcactttgggaggccgaggcgggtggatcaca

SEQ ID NO: 167082 - DNA, 122 bp, Homo sapiens
gaaagctaaatttaaacagcaacaataagaaatcttccccagtggatccctcgagcctttcgggaaaatgcaggtttctggctgacaggaagaagaaacagcatccaatcggcacttgtgtc

SEQ ID NO: 167083 - DNA, 122 bp, Homo sapiens
ggccggtccgcgttaagtaaacgcggtttacttacccgggtaatcgcggcagcagcgcgtcgtgtgaacccggcagcagcgcgcgtccgttcccgtcccaagcaggaggcgcccagggccgc

SEQ ID NO: 167084 - DNA, 122 bp, Homo sapiens
gaaaacaaataacaaaagatacctgtaatcccactacttaacacttagtgtcgtgttaaccgtttggtagatagtattccagatattttctatgtatacatatttaaaatattcattttacc

SEQ ID NO: 167085 - DNA, 122 bp, Homo sapiens
cgaatcctcccgggtgggcatcgtggggtgggggtgggcgttccgcgaggggcatcctcccgggcggacgttgggggattctcgggggagggaggggcgcggggcgggcgtcccggggaggg

SEQ ID NO: 167086 - DNA, 122 bp, Homo sapiens
gtggaaggaaattgattgaatacaggtctgagcgttgaagacataagctagtgctgtgtgcggtgtggttagttacagtgcttctgggttagctggactagttagagtctgctactttagta

SEQ ID NO: 167087 - DNA, 122 bp, Homo sapiens
tgccaccctagaggaagcaaaacattcccatgcaaaagcaaggatgctctaattctcagtcgagtgagtcattatatccacattgtggagaaggctctcatgccactaaacaattacatcac

SEQ ID NO: 167088 - DNA, 122 bp, Homo sapiens
ggtggggacccggcagggcggagtctcccacaccctagggacacgcgatcttggtagaggcgactgtccactccttactgcacgccctccatcatcttcaggaactctgagggaaaggagag

SEQ ID NO: 167089 - DNA, 122 bp, Homo sapiens
attctccagcatccagcctgcaagaggctacctgggcacaggtgagggatgagaagcagacgggcagagagaaccctggatctgcctacgctgatcttagattttactaagcccaaagtcat

SEQ ID NO: 167090 - DNA, 122 bp, Homo sapiens
atctacaagtcatcgggtgtccactcgccttctctccatttcaggaagtcttcctccacccgccccacctgctttgtgctcagcaaccagcgttcaagagatcttcaaagaataaatgtagg

SEQ ID NO: 167091 - DNA, 122 bp, Homo sapiens
cccgagctcagacctgcccactggctgagggtatccggcggacgcggcaagccagggccccgattacccagtaatgcaaccagcaaaatggcgaccacaacaaaccggcccccccacgccct

SEQ ID NO: 167092 - DNA, 122 bp, Homo sapiens
agcatcttcccgcccgcccgcccgggagcgacgcggcggcgctgcggaccctggaccaggcgtccctcagcccggcagctccgcaccgaccccaggcacctgcaccatcaccccggccccgt

SEQ ID NO: 167093 - DNA, 122 bp, Homo sapiens
gacagataaagatggcgaaatacttgtttccttctttcataccagtctcctgcactagaccgtgagctccatgagggaacggagcacatcagactggtgccacaccgtgttccccgtcctct

SEQ ID NO: 167094 - DNA, 122 bp, Homo sapiens
tttgatggatgagggatggagtggcttccctccgggaatgaaggtgtgcagaaagggccacgcgcctgcgggctgggttgcagggcctctgagggatgggctcagatgtggaagctatagga

SEQ ID NO: 167095 - DNA, 122 bp, Homo sapiens
cagcaggatgtcactgtccaccggcccgtcccagaccttgaggatgtcgtgagccatctccgtgtcgaaaacaatgaaatggaggctgcaagagagaacacagtagcgctacttgccgtgca

SEQ ID NO: 167096 - DNA, 122 bp, Homo sapiens
aagttaaaccagaactagcgctttcagcaatgatgtaatttgatctcttcgggccaccgtcgctgagcatgcgcaaataaacgtggcgggacgtatgtgtcatggcgctctccatctaaagt

SEQ ID NO: 167097 - DNA, 122 bp, Homo sapiens
gcgtcgtcctcggattgaggggccttgctccgttgcggtgcaggaaaccatggcgatgtgcgagagggtcagggtcgtgctggcacaggtaggaggagagagttatgacaggaaggagcttg

SEQ ID NO: 167098 - DNA, 122 bp, Homo sapiens
ttaatgacctagtgaagtgagcttaagccgcctcccagacacctgtaacgaagaccatctcgggaaagctctgggttaggcaactcgatttcacgaaagcggacaccaacgctctacccaga

SEQ ID NO: 167099 - DNA, 122 bp, Homo sapiens
gggcagggtgtgaggcctccccagcttcttccccttgagatcccatttccctgtttggggcgtgaggcttttgtccacagctgagtctatgaggctctacaagtaggtgtggctgcacaggt

SEQ ID NO: 167100 - DNA, 122 bp, Homo sapiens
agtggttgaagatcctcttgtactgctattgtctctaaatcccctttttttgcagggggccgggggggtggggaggtaggaagcaagcatggctgttttgtgcatctgaatggaacttgaac

SEQ ID NO: 167101 - DNA, 122 bp, Homo sapiens
tccgccctctctacccccccatccccaggtgaggggggtgagttcaggaagcggagaccccgaggaacccagcagggtcaccatttgcagcgcaacatggcaggtaaaggagaaatccccct

SEQ ID NO: 167102 - DNA, 122 bp, Homo sapiens
cacaggaaaacgtagcacatcatccatcttgctgaagtgggagacaggtcacatcttccccgacccctccatcccttttagtaaagtgctgacttctgatgcaaactgaaaagcctccctgt

SEQ ID NO: 167103 - DNA, 122 bp, Homo sapiens
aaattacatctgaaatacttgccatgaccttataagtgttctacactattgggccgggtgcggtggctcatgcctgtaatcccagcattttgggaggccgaggtaggtggctcgcatgaggt

SEQ ID NO: 167104 - DNA, 122 bp, Homo sapiens
tctggatctccctggaggtgatgatcgagcgcttgttgtaatgcgccaggccggaagactcgcccgcgatgccctcaacgatgtcattaacgaatggccttggaagagatgcgggtgtcggg

SEQ ID NO: 167105 - DNA, 122 bp, Homo sapiens
ttgattggaaaataacccctacgctgggacttttgaggctggttcatttccatgttcaaccgtgccattgggggtcttcaagtctaatgtgcatttttttcagaaacgttctcttttgggat

SEQ ID NO: 167106 - DNA, 122 bp, Homo sapiens
ttggaatggggacaagtcccgataaacccactgcgagttgaaaatatcctaagtcaaaaacgcagttcacacaccaaacccaccgagcagcacggcttagcctcacccaccttaacgcgctc

SEQ ID NO: 167107 - DNA, 122 bp, Homo sapiens
ggaatagctttagcaatcattctggattgaagttggaatcgtggttagggtccggctaagcggcaagcaatttctcactccccaagtgatctgttactcgtggctgatttggaagtaaaaat

SEQ ID NO: 167108 - DNA, 122 bp, Homo sapiens
ggcggagccatgttgggaatcgcaggctgaagtgcgcctgcgcggagcccaagaacggaccgacggccattttgagcgtggctgggaagagaagtgtattcggatgctgcaagggacctcga

SEQ ID NO: 167109 - DNA, 122 bp, Homo sapiens
gtcatagttagagaatcctgagaatggaaagcagaaacctaattgtaaggcctacagcctcgagcatgcacagaaagtaacttaggtctgaggtcctctggaataaatctttggtgataaca

SEQ ID NO: 167110 - DNA, 122 bp, Homo sapiens
gctgccctcgccgccgggtctctcagaggctgggagctgggggtcgccgccgccgccgcccggtgattcccatagagaagacaactctgtgctgcctctccaagagctgccgctcggctcgc

SEQ ID NO: 167111 - DNA, 122 bp, Homo sapiens
cttcttatacacgcttacaaaccccacatttccacctgcagccacctgtctaccggcctgcgcgtctgacagggattttaactccacagctccaggctaagctcctgagcgccctggattcc

SEQ ID NO: 167112 - DNA, 122 bp, Homo sapiens
agctcgccccagacgccacgaggtgcatccttaaacagggacttcctagacgccatgaggcggtgtccttaaacagcgacttcctctcacccaccttgatttgattttcagttttaaactaa

SEQ ID NO: 167113 - DNA, 122 bp, Homo sapiens
ccgcgtcgccacgcctgcccttcacagccttggcccataaggtcaccgaggggcgggaggcgccgcccgggccctccttggaggcgggcgctgctcccgcaccatcctcccccagttctctt

SEQ ID NO: 167114 - DNA, 122 bp, Homo sapiens
ccttgaggaaatgaagggagtccagctctggtaaggttctcacattcacatacaactgttcgaggttgtacataaatgctagagtgagaacttatccctgtgagagatgatttttgcctctc

SEQ ID NO: 167115 - DNA, 122 bp, Homo sapiens
cgcagccgccgccgctgcctcatcttcctgcggcgggagacatgttccgccccccgcccgcgccgccccgccccgccccgtgcaggccccgcccctgccccgcccccgagtgccccgcccgg

SEQ ID NO: 167116 - DNA, 122 bp, Homo sapiens
cctctgcccatcgttactcacctttccaggtcactagttcatgatcctttcggtcacccgcgagccctgagcacagccgtgtttacaaagcacccctggaggaaaaggctgaacggcacttt

SEQ ID NO: 167117 - DNA, 122 bp, Homo sapiens
ggatttataagccctctcttataaatcctggtttagcctttgttttgtgactgagtccaccgagatccttgcaggagaagaaaatttgcaggcaaatgaactaaatgtctcttcctgacact

SEQ ID NO: 167118 - DNA, 122 bp, Homo sapiens
agggactgtgctgtattttatttatgaaaaaatgcaggcgcctccctggataccgagccccgtcgtttctgtttgtcagtctgctttttggcattgagcatctcaatgcaagattgtggaat

SEQ ID NO: 167119 - DNA, 122 bp, Homo sapiens
tgtagacaaagactattcactgtagcagcagcggtgagggtggagtcaagagcccagcaacgtggcaggaagtgtccggtgggcggagtccagacacgcagtgtgtccacagggatgtccca

SEQ ID NO: 167120 - DNA, 122 bp, Homo sapiens
ctgggggacctcacaatcatggcagaagaccaaggaagagcagagggacttcttacatgccggtgaacaagaagaggatgtgtgcagggaaacacctctctataaatccatcagattttgtg

SEQ ID NO: 167121 - DNA, 122 bp, Homo sapiens
ctggcacgagtgggagatcgccaacaacaccttcacgggcatgtggatgagggacggtgacgcctgccgttcccggagccggcagagcaaggtggggcctcagacgggagcccgggaagagg

SEQ ID NO: 167122 - DNA, 122 bp, Homo sapiens
ccctcgcccgggcggtcgcctggccgcccactccccgccagcacgcccggcgacgccccccgccccgccaccccacaatctcccgcccagcggtgtcccctcagccccggttggcgtcccat

SEQ ID NO: 167123 - DNA, 122 bp, Homo sapiens
atgagcgcgtgcgggctgggcttgtctcacgcccgcctccggacagggtgggtttcttgccggcggccgtgccccacctcgacgcgatgcacctgcggtacatcccacccaggcgaagtcac

SEQ ID NO: 167124 - DNA, 122 bp, Homo sapiens
gaagccgtgtgtgcaggtgagcatgacgaggacaagcacaaggccaccgcacccatgctccgtcccttgtcttgttcctcatttgcaaaattctccagctcagctgggactcacaacccaac

SEQ ID NO: 167125 - DNA, 122 bp, Homo sapiens
acccagggcccgcagcccaggctcagaggacgtgggcgaacaacgcaccttttgagttagcgctcagggtcaggcagagcctccgcgcccacctggcccgtgctcccgcggcagctgctcgg

SEQ ID NO: 167126 - DNA, 122 bp, Homo sapiens
gtggtatcatgattccacagcagtgattgtaagacagtgagccacagggaaatgggaaaacgtgaaaagaaacaagtatcaggaccaaattagagaagatatgagtagggccatcactagag

SEQ ID NO: 167127 - DNA, 122 bp, Homo sapiens
gttaaataaattcactcatagcaactgctgcgtaatctagaatgctgatttactcacttacgatgaaaagtaatagtgccaaacatatctttttcccatagacaaaactatatgagaagcca

SEQ ID NO: 167128 - DNA, 122 bp, Homo sapiens
ctccgcgcacccttcctagtgaaaccgcgtgggctccgcgcacccttcctagtgaaaccgcgtgggctccgcgcacctttcctagtgaaaccgcgtggactccgtgcacctttcctagtgaa

SEQ ID NO: 167129 - DNA, 122 bp, Homo sapiens
gctgcgggcgctgaatgagagacggtgactgttcgggtcgacgagtgctactctaggcggcggcggccgtggcggtgaagcgtgaggccggcatcgtctttccgtcctctgaggcgacggcc

SEQ ID NO: 167130 - DNA, 122 bp, Homo sapiens
acttgcattagagtgaacacaagatgtttccttacaagtaaaaatgagttctgatatttccgaagtagaagataagaatgagtttcttactgaacaactttctaaaaagcaaattaaattca

SEQ ID NO: 167131 - DNA, 122 bp, Homo sapiens
ccaagcgatcactgcccagatccatgctgcaaagcatctcccccacgagcttccttccagcggcttcgcagtttcaggtcttatgtttaagtcttttatccaatttgagttgatttttccat

SEQ ID NO: 167132 - DNA, 122 bp, Homo sapiens
gtcgagcctaagaataaaaagaccctgtttctcttagatacccggttagcaaggcaacatcgctggcctcctgccctggacacttatcaccccggtgctgctgcggccgggtttagccggcc

SEQ ID NO: 167133 - DNA, 122 bp, Homo sapiens
gcagcagagcttcggcttgaagggatccagggcaagtgcgcgggcttcgtggcatcgcgccgagtccttcagcgtcggcgccagctccagccaagcatcctatgcccgcgcggtgcaagacc

SEQ ID NO: 167134 - DNA, 122 bp, Homo sapiens
agcctggcccaagccttctcccacagcggggtacacagcctggaaggcagggaaatagaccgtcaggcactacgggaactgacacaggtagtgtctggcactgcatcatactctggcccaaa

SEQ ID NO: 167135 - DNA, 122 bp, Homo sapiens
tcttgcactccgcgttcaactggctacctagagtcttttgctgatgctacttgcttttgccggactggaggttctttgaaatagcagaggtctcagaccaagccgtcagctgaatctttgct

SEQ ID NO: 167136 - DNA, 122 bp, Homo sapiens
ggcagaggaagtggcgccagcctccttgcagactggtgctctgtgttctgtgggagggaccgggggtctcccggagaggggagctggagggcgcgccctgtggctgccaccggaggaagggg

SEQ ID NO: 167137 - DNA, 122 bp, Homo sapiens
ctggctcacccctcactagtcacgtatggaatcctggctcgcccctcactggtcacgtatcgcatcctggctcgcccctcactggtcacgtatcgaatcctggctcgcccctcactggtcac

SEQ ID NO: 167138 - DNA, 122 bp, Homo sapiens
ctgcctcctgacgggaagcaggggccggagcccaactccacccacgggccaagggcagggcgtcttctgacagttctgcctttgggtctgaacacccacccacaaggtggggaaggaacagg

SEQ ID NO: 167139 - DNA, 122 bp, Homo sapiens
ctaagccccttactgcccggctggcggggccggctggctgctccgagtgtgggggcccgccgagcccacgcccatccagagctcacgctggctcacaagcggcacgcacagccccggttccc

SEQ ID NO: 167140 - DNA, 122 bp, Homo sapiens
ccagcctacgtgcctgcccagatgcagtcctgcctgcttccctctgcccaggtgtaaaggcggaggggctgtgtgagcagacgctctacctaccgtgagaaccatatcccagtaactatgga

SEQ ID NO: 167141 - DNA, 122 bp, Homo sapiens
atgttgtattaattctgcacccaattaaactcagtggccagctttagttttacttgacaacgttaaacaagtatggtttttgccctctgctgtggttactggatgcttggttgatgtctcct

SEQ ID NO: 167142 - DNA, 122 bp, Homo sapiens
cttcctgtgcagtttcatattagtggtgttttcagtgtaggtatcttaatatcagcttatcgtggtttttggttatgtattataattttagtcaatttgcaattctgtctgtatactttatg

SEQ ID NO: 167143 - DNA, 122 bp, Homo sapiens
tgtttattgtatcctcaagagcacctactattactaatggcagtcagcacttagtgtatacgacacacagtactttatgtatgctatctatttaataccacaatatctctaacaaggcatta

SEQ ID NO: 167144 - DNA, 122 bp, Homo sapiens
gagatggactgacgggtagcataaatctgggccacatgaccaccaccctccacacggacacgaatgtccacaccagcaaatcgctccttgctgagaagcaaaactggctccagcagcttgta

SEQ ID NO: 167145 - DNA, 122 bp, Homo sapiens
ggctcgggctctgggagctgaaagtccacgtggcgcaaatggctctacttccacaagcctcggtcgcatctcctggaaaatgttgccgcttctcttcctctttccacacgtgcgctgctgtg

SEQ ID NO: 167146 - DNA, 122 bp, Homo sapiens
tcgcgctccaatgcaatccccactccccgctaagggactccacggtctgcacccgctcgccggtccgacctctaagcccaccctttggacgagcctgacccatttcctcccgcgctcccagg

SEQ ID NO: 167147 - DNA, 122 bp, Homo sapiens
aaccccagcgggtgcctttgggctgatctcgagtctgcatgggatctctccagtgggggtcggatttacagttccttggtggaaacaggccttcaggcagatgccctgtaccctgcaagcgt

SEQ ID NO: 167148 - DNA, 122 bp, Homo sapiens
gacaccagccggagatgtggaaactagcattgctgcctttgctagcaagttccaggtggccggcaagggaagatgcccctctgaggacagtgccctgctgtctccctgcaccacccactccc

SEQ ID NO: 167149 - DNA, 122 bp, Homo sapiens
tttttttgctttcttacctttgcttgttcccgtctctttctctgtttccttggtcccatccgtttgtttttttttgttttttaaactgggtcaacaacctttgttgtaaaacaaaggtgccc

SEQ ID NO: 167150 - DNA, 122 bp, Homo sapiens
ctctcagcatctaacacatcttccgaaaacaagcatgacagggagaagggttccttctcacgagcaaagactggcttcagcaccgaggtgaattccacgctggggccaaacgtcgatcctgg

SEQ ID NO: 167151 - DNA, 122 bp, Homo sapiens
cagtgagctcttcctgggctgttgtaggtagaggcctcagcactggaggtggatggacatcgtgtgtgtagcccgcattgagtagaacttcatttgatggtagtgtgggaggaagggggagg

SEQ ID NO: 167152 - DNA, 122 bp, Homo sapiens
tccttatctacaaaggagtaacaggacccggctcctaacggggcagtgggaaccaatgcacgatccgtgtaacacagcgtgttgcatggtgtctggtgcacagtaagtgcctggtcccctct

SEQ ID NO: 167153 - DNA, 122 bp, Homo sapiens
gggagtggtggccgggcctcagcaggggagggggccgccggcgcctgggatcttgcagcgcgggccacgcgaccgggacaaaaacccaaaacatggcgggctctaggacccccgggaccaca

SEQ ID NO: 167154 - DNA, 122 bp, Homo sapiens
tcatggcatccaaatagttgaagacctctttgagtattttcattctgcacacttgtagggcggggattcttgagttggatttgtctggtccactttcttagcaggtttgttttcctctttct

SEQ ID NO: 167155 - DNA, 122 bp, Homo sapiens
catacaactgaaacggggcaaagcagactgcgcagtctgcagtcttcgtggcgggccaagcgagcttggagcccgcgggggcggagcggtgagagcggccgccaagagagatcacaccccca

SEQ ID NO: 167156 - DNA, 122 bp, Homo sapiens
ctgttcctgcaggagcctggccttggtctctgccaccgcattctggagctcctcctggtgcgcttcccgcagcgcctccatgctggcctcagcctcatcctggcgggtgttcagggcataaa

SEQ ID NO: 167157 - DNA, 122 bp, Homo sapiens
gtaaagttccgcacctatcagcgctccaagtttgtttttgttttggccgactttgcaaaacggattgggcgggatgagaggtggggggcgccgcccaaggagggagagtggcgctcccgccg

SEQ ID NO: 167158 - DNA, 122 bp, Homo sapiens
gcagtcccagtattaactgggtccttgagaccaaggaccctcataacctggactggtcatcgggctgactaaaccagcacagttctgggtaagttcgtgctggggtggggagggtcctggta

SEQ ID NO: 167159 - DNA, 122 bp, Homo sapiens
cggggcccggagcggggatgggcgggcgcagccgggattagctggcgggcgagggcgcagcgcagggaggaggaggggaggcggcgccggcgcgggcggggcggaggatctggagagggaag

SEQ ID NO: 167160 - DNA, 122 bp, Homo sapiens
acaggaaccattagaaagcatgcgttcctggaaacacacaggactacagttcagacaagccggggatggtccatccatgccttgagcattgaggcctgtgccgtgtccggccttggccgagt

SEQ ID NO: 167161 - DNA, 122 bp, Homo sapiens
gctggaggccgtgcgcatgctcggcacgcaaggccgattgggagttgtagtccgctcttgcgtacactttacatgtcttaccaaattaaaaaggcgagaaaggaagactccgctccagactt

SEQ ID NO: 167162 - DNA, 122 bp, Homo sapiens
aatttttaaccagtgacagtgacagataagattcaaaccaggtttcctctccacctacctcggaggcaggccacacctgccagaagtagcagcaatgtcccagcatagtgagaaaacggcac

SEQ ID NO: 167163 - DNA, 122 bp, Homo sapiens
tcagccatgggtgggagtgaggggcggggcggccagggtccccgcgcagcagggagggtccgcccagccctgctgacgctcagctcccggccctagtgctgaagctgctgaagatggctacg

SEQ ID NO: 167164 - DNA, 122 bp, Homo sapiens
cgagtctcccctcatctgcgcagctcagtttgctcagtttgctcttcgtgacacgtgactcggcaaggggagcaggaggaggactgcggcggtcacccctgcttcctctgccagaccgtgaa

SEQ ID NO: 167165 - DNA, 122 bp, Homo sapiens
catgttgttctctgggtgaccggcatggcctgaggcagaattgaggaaacaacctgggcacgatcagtgtctccaggagaactgggtgttgggggtgcttcttgccatgctgcttgatgctt

SEQ ID NO: 167166 - DNA, 122 bp, Homo sapiens
ggtgaagacgacagtgacagtttgttctgtggggactctctagccaggtggtggaatggccgtggagctgatttgggtttctcttagttgttatctgggcatttgtatttgtggttgctagt

SEQ ID NO: 167167 - DNA, 122 bp, Homo sapiens
gaaaataaaatcctgatccactcagagatcacaagatcgaaatctaggagagaccacaggcgactggcgagcagaaggcaggctccgctccgcacttctcaccaagttctggaagtcggcac

SEQ ID NO: 167168 - DNA, 122 bp, Homo sapiens
gctgtgctgacacattaactccctgaggccgggaggagggtggatggtcatttattactgcggacacttatgtaacctggggtgtatataggagcctggctgaggacacactcgccagcctg

SEQ ID NO: 167169 - DNA, 122 bp, Homo sapiens
acaatgccaccagtaatccctccatccatctgttcacgcagtcatatgctcactttctcacgcattcaaggaacaatgaaagagcatttaccacccctggcactgagctaggcattgggcac

SEQ ID NO: 167170 - DNA, 122 bp, Homo sapiens
gccattgcactccggcctgggcgacagtgcgagacttcatctcaaaaaaaaaaaggtggccgtgcaacagctgtagaattcagtgctctttctgggcctgggtttggtttatttccacttgt

SEQ ID NO: 167171 - DNA, 122 bp, Homo sapiens
cacagagccaaagagggcctcctgaatgcacacatagcgagtgatacataaacatcaggacgagggagagatcagtacaaatatgcactgactcccttctgcacatatgtcacccatgatgg

SEQ ID NO: 167172 - DNA, 122 bp, Homo sapiens
acggtcccgagagacccggcctccctctggccttcgcccccgcggctgctctagctgcctcgggccgggccgagaccccgcagaagcctccctacagctacatcgcgctcatcgccatggcg

SEQ ID NO: 167173 - DNA, 122 bp, Homo sapiens
gccgaccgctctagctgtagcggagacccccaagtagggaaattggggcaaaacgcggagcgctccaggctcctacgggctgtgcggtgccagggctcgactgctgagcgtcgtgggctccg

SEQ ID NO: 167174 - DNA, 122 bp, Homo sapiens
cgcagctgctgtagacaaagcttcaaactacctaaggaccagaaagcccggcccggttgtcgaggatgcgttagtatgagttgccaggcctctggtccaccacactgtgtctccctcagctg

SEQ ID NO: 167175 - DNA, 122 bp, Homo sapiens
cagcttgttttaataactctccaataattagaacatttgaagtagtaccatctcctgtgacgtcatcctgagctgttgctacttttgctatcaaggaagctgttggatgttgaatttgctgg

SEQ ID NO: 167176 - DNA, 122 bp, Homo sapiens
tttgccctgagcagttcccagcttgaagggacccaagagatttttcctttcacagccccacgtcatcgcaggagtcgttgtgagagggaggcaggagggtcagggtcagcaaggagatggtt

SEQ ID NO: 167177 - DNA, 122 bp, Homo sapiens
gagatttattccaagaattggctcacaggattgtggaggccaagaagtcccacagtctcccgctctgctgtctatacactggagaaccaggaaaacaggtggtataattcaggaaagtccaa

SEQ ID NO: 167178 - DNA, 122 bp, Homo sapiens
tacacctacagggtaaattaaaagacatctgaactcttcaatacttaacgtcaccataatcggcaaagacagatggagccctttcctcctgcccttgccccctctattccacataaccatta

SEQ ID NO: 167179 - DNA, 122 bp, Homo sapiens
gagcgcgctccaggtgcgcaggactcctagctctcttggggaacgctttctggggcagggcggggacccgggggcgatggggccttcaaccgacgggcaaacacacacagacacaccccggc

SEQ ID NO: 167180 - DNA, 122 bp, Homo sapiens
ccacttcccctttaagagagcacgcccagacgagattagggaaaggcagaaagaaaagcccggaacagtcagggttgtatcctgaatttggcagatgaacttgggtattcctgaaccacaca

SEQ ID NO: 167181 - DNA, 122 bp, Homo sapiens
aaattgacatgtaatattgaacattaattaagtgctaatgtgtaaaaatggacccaagagcggggcctggattcctttcctagataattttataggaaatatgagtggtgcctcttctttag

SEQ ID NO: 167182 - DNA, 122 bp, Homo sapiens
aaccacataaaactggagaatgcgggcatcgatcccgctacctctcgcatgctaagcgagcgctctaccatttgagctaattccccgtgtgggaaaacgtctcttatatcctttaccctctt

SEQ ID NO: 167183 - DNA, 122 bp, Homo sapiens
ttgtagtttccgttcaactcccaccttggagcaacagtttagaatcccacgaggcgggggcgaagtgtgagcggggaaactgaggcctggatggggtcaaggggcagctcggctcctaggga

SEQ ID NO: 167184 - DNA, 122 bp, Homo sapiens
caattggagtgtccttttgcttcctaggtctttagtctgaacgatgaccaatccaccacacgcacctacagtgtaggtcttccattttactctctagtctggttctggggctgggcatagaa

SEQ ID NO: 167185 - DNA, 122 bp, Homo sapiens
gtctctctaccatgccagactagagtcaagctcgacagggtcttcttttcccaatgactccgccaagcccattcccttggctgtagttttgctgaatcataggtaggaacagtgggaatctg

SEQ ID NO: 167186 - DNA, 122 bp, Homo sapiens
tatattaaccaaatcctgtggtgtcttaaagataccatgtgtgccctgagaggctggtctcggtctagctttctgatttccttatcaattgggtcacatctgtattttctgctgactcactt

SEQ ID NO: 167187 - DNA, 122 bp, Homo sapiens
caagtcaaatgcccattcaagaaaacgatgtcattgacacagacttttagattgagctcccgaagttgaagtgttaaatatagggtggtgatattaccattattacacagcttcaagactta

SEQ ID NO: 167188 - DNA, 122 bp, Homo sapiens
ctcgcgcggaccacggaacagcgacgcgcaagcaggtctctttcgtcagcgtaatccctccgcagaaagccgcgcactagttttaatcacgccccaccccctggccgctggcgccacctccg

SEQ ID NO: 167189 - DNA, 122 bp, Homo sapiens
ctacctcaccctgttaagggagctgctaagagagcacgccgaccgcagccttccaaagcccggaccactcggcccagacagtctggccataataaccccaggagatcaggtactagtaaaag

SEQ ID NO: 167190 - DNA, 122 bp, Homo sapiens
cagacctgccagaaccgacccggaaaccaaagcgtgacagccaggggttgctagagcggccggcgcggcgcagcgaaccatcgagtttagccaggcgcggctagaagggcagggaggcggtg

SEQ ID NO: 167191 - DNA, 122 bp, Homo sapiens
aaatcagcatcttgccttgtgtaaatcttcaaattaataaaccaatgatcaactacaagacggctcaccaaaacaaataagcaaaaaaggttaggtttaactctgatcgtcttagctaaaga

SEQ ID NO: 167192 - DNA, 122 bp, Homo sapiens
gtcaaaaaccgaagaaagcaaagccttttagcactggcagctaattttggtgcctctgaacgtgtgaaacgcccctccccgccccactcgcatcctgccaccttgcccgcggtagctaggag

SEQ ID NO: 167193 - DNA, 122 bp, Homo sapiens
gggtaggactatgaagttcatgccccaggggaagagactgatatgtgcaatcattattgtcgtgggaaacacagacctatatattagaacaggatacactgcagtcatttgtgtaggaatcc

SEQ ID NO: 167194 - DNA, 122 bp, Homo sapiens
acacggcccgcgaggccaggggcgagtggctggcgggatcgggggtgcacacacgagcttcggtgggcaatctgcgggctcgggggccggggtggcgccgacacgactccctcggggatgcg

SEQ ID NO: 167195 - DNA, 122 bp, Homo sapiens
cgcctgctcctggggcttcccccattggagttgcctcggccaaaaccaacagggctccaacgacatcccgccttggcctgccgggcgggcggccggccctgccccatggcccgctcaggggc

SEQ ID NO: 167196 - DNA, 122 bp, Homo sapiens
ccagctctttgagctcctgcaagacctggtggaccatgtcaacgattaccatgtcaagcccgagaaggatgcggggtactgctgccactgggagggctgcgcccgccatggccgaggtttca

SEQ ID NO: 167197 - DNA, 122 bp, Homo sapiens
ggaaaccgtaaaacaaagcactttctctgtctatggattgtcttcctgttgcgtcctcatcggggcattctggggcttgtctgagcttcttaaccagcagaattccctagaaggcaagggca

SEQ ID NO: 167198 - DNA, 122 bp, Homo sapiens
gtccgtgtccaaacctactctccagccgcctcttctctcgccccaccaggaaacagtgggcgaaccctgcaccccaactccttctgctcgagcaggggaaggaaacggggccccaacctcgc

SEQ ID NO: 167199 - DNA, 122 bp, Homo sapiens
gtgcccccgacgcgatcagcgatcctggagccccaggagctgttaattatttctccttttcgccacagcagggaagtgtcaagaaacctgagccactccctgtgcctcagtgcatgttggga

SEQ ID NO: 167200 - DNA, 122 bp, Homo sapiens
gggaggggagggaaagggacgggaagggaggccctgccctgggagaagggagagccacaacgctcagaatccctacagaaaccctaagacagggaggagcaggaccaacatgtgaaaggcaa

SEQ ID NO: 167201 - DNA, 122 bp, Homo sapiens
gtcacagaatggggcgggatgttccgctggccacgccccttaaataacactctgtgaagccgtggtcttcttgcgcgggatagggcacctgaggaagcgggctgcgcctgtggcacagtggt

SEQ ID NO: 167202 - DNA, 122 bp, Homo sapiens
cgggggcaccacctgctccacgctgtcgcgggcttctgcgaggccatgatccgtgcccaacgccagcaaagggcagcttgtgcccgagagtgggggaaatgcatccttcccggggatctgaa

SEQ ID NO: 167203 - DNA, 122 bp, Homo sapiens
agggaagagatggtcttcttactctggactcagatgcttttgcttatgttcttactgagtcgtctcaactggattatcagataggaattcatattccaatattatggaattatgggtgaaga

SEQ ID NO: 167204 - DNA, 122 bp, Homo sapiens
cgccaccgaccatggtgcccgccgcagccgaggaccggatagcccgccgccttcccgacgcgcactgcgccaccgcctgccggccagaggggccccatcagcgcacgactgctccagaagac

SEQ ID NO: 167205 - DNA, 122 bp, Homo sapiens
ccaggaaggtgtctcttcccagaagagtcgtaaagcatgaaataatgaatggacagtcctcggcgcagggcctggccccaggagttttctcaggacagtgtcataccctactgagagtgagc

SEQ ID NO: 167206 - DNA, 122 bp, Homo sapiens
gagagacccctacgatcccaggacactgatgtggggtaactaacacccactggaagtctacgctgagttcacaggctatgtatgacctgacatgcattttgacctgccctgtgttttgatat

SEQ ID NO: 167207 - DNA, 122 bp, Homo sapiens
ctgagcaaagaaactgcctgtgtccaatggtactgaacacacagctgggattaacatgcccgtgcttctgcctggaatggagttcattccttttgttcacatggagaacaccagtgttttct

SEQ ID NO: 167208 - DNA, 122 bp, Homo sapiens
aggaaggaaagaaagagggaaaagggggagggagaggtcaggaatgtggaggggagggggcggaaataaaagtcgtctctgcactaaaggaagaagtacaatctgcatttcacttttttttt

SEQ ID NO: 167209 - DNA, 122 bp, Homo sapiens
ttgtagcctcccttgcagcacatctggcctctggctgttaggctgttggtgctgggaccgcgggataggtccccatcacccacatatacacaactattagttttcttgggactgggcccagt

SEQ ID NO: 167210 - DNA, 122 bp, Homo sapiens
cagaaaaatcagaaattccactggagaagggtcatgatcaaagtagaggtaaatccctgacggggcaataatgcagccttctcttgtaattgttatgaaggatatatgaaatgatgcacata

SEQ ID NO: 167211 - DNA, 122 bp, Homo sapiens
gggtcccagcatgcacagcgcgctcccacgtggccggccgagcggttcggggcggggggacgggcctggaaagctctagatccgggggtctttaccttgacccatgggtagaatcgctctag

SEQ ID NO: 167212 - DNA, 122 bp, Homo sapiens
tttcaaaagcacgcagcttccaccgctatctttagcaagagatcaaggccgtgcctctggcggaggaagactgtgaaaggtagctcgctggggaaataaagtgtctgagctggatgtgcaaa

SEQ ID NO: 167213 - DNA, 122 bp, Homo sapiens
tgtctgaagtctcgggatgtggtcctttatcacgtcgggggcgccctgcgtctcaagtctcgggatgtggtcctttatcacatcagggacaccgtgtgtctcaagtctcaggatgtggtcct

SEQ ID NO: 167214 - DNA, 122 bp, Homo sapiens
gagcaatgaagggcctgcgtgaaagccctcacggggatgctgggctcagcaggaagaactcgcagcaaggaagaagcagagccccctggccaaaagcaccaagtgacaatctaggggatgag

SEQ ID NO: 167215 - DNA, 122 bp, Homo sapiens
gtcgtttgttgctgtgatcacaggagctcccaactcattccaccttctctaagccagctccgattcctgaggaccacctgtgtgcccaagcctggttggggcgtttctggttaattaggaaa

SEQ ID NO: 167216 - DNA, 122 bp, Homo sapiens
ttctggttgtcctcaggtgcttggtgtccttggatgattctgtgccttcgcctcccacagcgaactgagataagacctggggacatctcgactctcactctcccctccttcaccccgtcgaa

SEQ ID NO: 167217 - DNA, 122 bp, Homo sapiens
aggtagctgacactgtgataagagcatcctgtgaactacccaaataaggaggaaaacgaacgcagctgagcatgggatgccatataaaaatcacttaaaccagtcgccactccttgtttcct

SEQ ID NO: 167218 - DNA, 122 bp, Homo sapiens
cgcggcgaagctggagaggcggggctcgcgggcgcctgtaggacctccgctgggaggggccgtgctcgccggccacgcgccggttttcactccgctctcccccaagggcagggacctacaag

SEQ ID NO: 167219 - DNA, 122 bp, Homo sapiens
cgctgtccatggtcctgcagaagggaggctcccaagggaacgagtcccaggctctggacacgtttgcagacagtactctctaaaaaggctacttttcgccacacattagaacaagatctcct

SEQ ID NO: 167220 - DNA, 122 bp, Homo sapiens
ggcgaccaggacgctctgcatccccagtagcaggctgagccgagggaggctgcgtatgcccgcccctctggctgtcggagccgcacctcttcctcttccggcccccgtagcaattaggtttc

SEQ ID NO: 167221 - DNA, 122 bp, Homo sapiens
ccttaggctggttatgggagcttaagacactatggtctgtcccctgccaggccctttctgcgatgcctgcacctcatgggtggtggcgagcttgtggagcagcaccaatcatcccacagaca

SEQ ID NO: 167222 - DNA, 122 bp, Homo sapiens
gatgggagcactgcttgagaccaggagttcaagaccagcctgggcaatattatgagaccccgtatctacaaaaaatttttttaattagctgagtgtggtgacacgtgcctgtagtcccagct

SEQ ID NO: 167223 - DNA, 122 bp, Homo sapiens
cgggcgcattttgaatcgaaactccaggagggacgtgtccacgcgtcctcctagtagacacggctccctgaggtcccacctgcagccccaaggcttcttgctactcttactcttccgacttt

SEQ ID NO: 167224 - DNA, 122 bp, Homo sapiens
ccacaggtgtcagaaacaaggacctctcccgcgaacgcctcagtgtcccgacgccgggtccgggctgcagacctgtgaacagtcgccgctctctcgctgcttcaggattcgggttaggatga

SEQ ID NO: 167225 - DNA, 122 bp, Homo sapiens
cgccccaccgaagcccctcccttccccgccccgcgcgtcagggccccgcccccccctcagcgtccagctcaactccggctgctcgctgggctccgaccggttgtgacgtctctgggagtgac

SEQ ID NO: 167226 - DNA, 122 bp, Homo sapiens
agggacagaacacttagaagcacagaaaacatgtctcattcaatctacctttcccaactacgttaggttagccttgggatgttaaacctgccaaactattcccaaggctcagcctaatcaat

SEQ ID NO: 167227 - DNA, 122 bp, Homo sapiens
gtcagagctggccagaaggagcggtgcccatggagggctgccagtgcccagagagccttccgaggtgtcacgttgggcagtgaaattcagagtcgggcagaggaggccctggggtcacacag

SEQ ID NO: 167228 - DNA, 122 bp, Homo sapiens
ctcctgtgatacagaagctctaccattcccattttatacattcagagaggtcaaataactcgcctgaggtcacacagccaggacctggaactgaagttcggcagcccccatacccttgatct

SEQ ID NO: 167229 - DNA, 122 bp, Homo sapiens
cctctgccccctcctttcctgcaggggctgagcgggtgatcacgctgaagatggagatcccgggctccatgccgcctctcatccaggaaatgttggagaactcagagggcctggacactctg

SEQ ID NO: 167230 - DNA, 122 bp, Homo sapiens
tgctccgcgtggccgggagacgcggcgcctttaaagcccagtgggaggcgtgtccctgggcgtgtcctcccggagccccgccccgggggctggtagcctcggccccgggaggttgcgccggc

SEQ ID NO: 167231 - DNA, 122 bp, Homo sapiens
agatacgtaaaccttctcaaacctccgagttcaccttacagcgaacattaaatacccttgcgactacaatactaacaaatcgaacactgacgtaaaatcttaagaataaacgaatctttgtt

SEQ ID NO: 167232 - DNA, 122 bp, Homo sapiens
aaaatggatgcatacaagtacatccaggagcaatggaggaagaagcagtctgatgtcatgcgctttcttctgagggtctgctgctggcagtactgccagctatctgctgtccacggggctcc

SEQ ID NO: 167233 - DNA, 122 bp, Homo sapiens
ggatcttcacaaaatatccgagaactaaatctgaaacgtctctagtaaggccacgtgatgcgtgcgtctagcacccacgagtgaggagccggaaacattctcccgcgccagctctgcggggt

SEQ ID NO: 167234 - DNA, 122 bp, Homo sapiens
gttatttgacctttttcagtctcagtttttccatctgtaaaatggggacaaaagaagtctcggtctgtttccccattaaaagtctgaatctgaaaaatggggataacaatagtacctacctc

SEQ ID NO: 167235 - DNA, 122 bp, Homo sapiens
taattttcacaaagtgaacatactaggtgaccaagacccaaaacttgaatattatcagcacgaatccctccatgtcactatcagtcactatctccaccaagtaaaccattatcatgacttct

SEQ ID NO: 167236 - DNA, 122 bp, Homo sapiens
ctgtgtctcagcagatgctggatttcacgtccacggccgcctggaaataaatgccagcaccgtgcaagctggctttgcattctctgcctttcccgagcgtccctgcctcagattccaaaatc

SEQ ID NO: 167237 - DNA, 122 bp, Homo sapiens
gtcaaatcggttcttgacataagtaactatcgagctggattacagtaggattgccacgttcgcttggatggctcaaagtaaatggagcctccgaatactataggtgtggtcttattgtaagg

SEQ ID NO: 167238 - DNA, 122 bp, Homo sapiens
accaagttcatgcgggacattattccaaagatgtatggctttactccctacgagctggcgcgccatggagttgctcaaggtttccaaggacaaacggccctcaggttcatcaagaagagagt

SEQ ID NO: 167239 - DNA, 122 bp, Homo sapiens
tacgttaaatatctggtttctaggtcacctccctgacggggacggtagggaccgtcttctcgttcatcagtagggaagtagctatggcagtgcctgatacaaaataaactccaaatgtgtat

SEQ ID NO: 167240 - DNA, 122 bp, Homo sapiens
ctcaagtgatctgcccgcctcagccttccaaagtgctgggattatagacatgagtcactgcgccaggccaaaagggactttctgattcacgaatctaacatcacatccctgcttaaataccc

SEQ ID NO: 167241 - DNA, 122 bp, Homo sapiens
gatgcattatttagcatctcagcctcaagaactcctcaaaaagtgcattggaaggttatgcgtggttttttttcaggatgaaatgagatacagcttataaaatgctttgcacgcacactgcc

SEQ ID NO: 167242 - DNA, 122 bp, Homo sapiens
atccgctcgtctcggcctcccaaagtgctgggattacaggcgtgagccaccgcgcccggccgaagtatttgtttctaacaagagcattctggacattaaagggccttagagtatgagagaaa

SEQ ID NO: 167243 - DNA, 122 bp, Homo sapiens
catgctctctggggccccacagcttcctgcagtgagagctgcacccactttgcccggcagcggtccacagcccgccaccagcggccagtccagggaaccggagaggattggccggcaaaagt

SEQ ID NO: 167244 - DNA, 122 bp, Homo sapiens
ggcagctggcgtcgagaggcgcttgggaaatggggtctaatttattttagaccctgtccccgactgccgcgccctgactggcaccccctttcttaaagggtggtgggctcgaggtgggtgag

SEQ ID NO: 167245 - DNA, 122 bp, Homo sapiens
gcacctctgccaccaccggaacccacttcgccaaagctcaacgcgctcggaagcaacttccgccgatccgataggaagtgacataaagtcgttcaattgcgcggacacactcctccggaaac

SEQ ID NO: 167246 - DNA, 122 bp, Homo sapiens
tcggcaggacctaggtgtcctgttccatgaccgagttatccggttactagagacttcaagcggcaggcaccctactggcttttaactgcctaacccatgcccgcagatcgcggctttgacaa

SEQ ID NO: 167247 - DNA, 122 bp, Homo sapiens
tggcacagagggcaggcaaaggaaaatcggcacgcgttctgagtaaacggggcgctctttcgtgagtccattcaaggttcatgtggctgttctcaaaataacagattggaaaccgggtcagt

SEQ ID NO: 167248 - DNA, 122 bp, Homo sapiens
ggctctgcctggcttcccccttccctgtcacagcctgcacactctttcaaggcagtaagccggagcagtgatagggttcacagcatttgtttcccatctctgagattgctacccttcattgt

SEQ ID NO: 167249 - DNA, 122 bp, Homo sapiens
agtcagaatttggaatttggagaggacgtacccatgcggccttacaaacaagaaggtgcacgtttgctgcccacgtgtgcctgcgtttgtgtgtgctctgcttatgtgacgttttctcttag

SEQ ID NO: 167250 - DNA, 122 bp, Homo sapiens
aagcccctgctgagcatgcgcactggtgtgacccgcgtctcctccgtttgtgaagtctggcgggtcgcgtgtatactcagccgttctctcttcacaggcacgtggacacagtgtcacctcct

SEQ ID NO: 167251 - DNA, 122 bp, Homo sapiens
agcaaagtggggttatctccagtgagatgcaaaagcagtcattcatatgtacaagttattcggtttacatagagggctgctacttgtatttgatcaacacctatatagtgcaaaatgcacac

SEQ ID NO: 167252 - DNA, 122 bp, Homo sapiens
tcaggccttgcaggtgcgcggcagccttctcaaacagctcggccaggcaactggtctcctcgatctcagggctatgggggaactccacctccccggagtcgtcccctgagctcagctctcca

SEQ ID NO: 167253 - DNA, 122 bp, Homo sapiens
tgtattggaagggaagaggggtttgaggtcaattctgtttcctggggttttcacgaatttcggggcccacagtaggcttgccaactttaacttttgcctaacactttacgagaaatcctatt

SEQ ID NO: 167254 - DNA, 122 bp, Homo sapiens
aatggggggcgggggcgagccacgcaggaaacaattttcaacagaactcaagcaggtgaacggaatggctgtagggagccacctctcagagctccaggggaggagaagagaactgcagcttc

SEQ ID NO: 167255 - DNA, 122 bp, Homo sapiens
gctgggtccgaggcccgcggaccgtccgaggggggcctctgggttcgaggccgcccgcaccgaccagtgctgtggctcgggcagttcaccgccctctcgggcctcagtttcccgccctggca

SEQ ID NO: 167256 - DNA, 122 bp, Homo sapiens
ttgcgggatgctgccccaccacggctggaaccagggcttcagcccggcgcacacccagctcgtttggaggtcacggctcaccataaaaatggtgtgagtggccagctcttttttcactgtgg

SEQ ID NO: 167257 - DNA, 122 bp, Homo sapiens
cgctgtgcacgacccccaccctccggcccagcagtgcctgcttagccacgatggcccccgcgtccccagaggtggcctcggcctcaagcaccaggacctgcccctcacccctacgccatctt

SEQ ID NO: 167258 - DNA, 122 bp, Homo sapiens
cgagctcctcggcctcaaggtggggttgggccagcaaccgggacccggggcgttctgtcccgtccctgcctggcgactgcggcccggaagccttctctgagcagctccgcgcccgcaacctc

SEQ ID NO: 167259 - DNA, 122 bp, Homo sapiens
gctgtgcctcagtttcctatctgcagcttgggaggaataacagttctgaactcagagggtcgttgtgagtattgaacaagtcagaactcagaacactgcctggtacatagtaaatgctcaat

SEQ ID NO: 167260 - DNA, 122 bp, Homo sapiens
gcacacgcagcggccgtccacgcagcgcccgccctcgccacagtcccaggggcagctccgcgtaccacagtcctcgccagtgtagccggggtcacacacgcagcgcccgtccttgcagcgtc

SEQ ID NO: 167261 - DNA, 122 bp, Homo sapiens
aggcagctgcgcctgtttaactgggagccggttgcttggcaacccgaggcggctcattaccgcggccacagtgattaaccaaaaaagaaaaaaaaaaaaaaaaggaaaaaaaaaagagagaa

SEQ ID NO: 167262 - DNA, 122 bp, Homo sapiens
gaggcaggcaaggaggtgggaagcaaaggctgagggagagcgtcttgcatagttaatggtcgtataacaatatgggttgaaattccatttggttcattggcttaaaaatgataggaggaaga

SEQ ID NO: 167263 - DNA, 122 bp, Homo sapiens
ccggtggcacgggcagaaagatcaagcgcggcaccccgtgacaggatgggacagattccccgggctccgaggccctaggatggcgcagggcagcgggctggtgcgggaaaactacagagcaa

SEQ ID NO: 167264 - DNA, 122 bp, Homo sapiens
ggtggcccctgccacccactggcttacttggccacagtgagatgtccccatgcaggatcccgcactagctcggcttgctgagaacccggccaaggcaggtatcaaatacggtaacccgagaa

SEQ ID NO: 167265 - DNA, 122 bp, Homo sapiens
atattcttgagtccagcatcaaagccattatggtgctttgatcaataagtttgttctccacggaagtgaggcttaatggcttaggtgaccgactaactttctccttagttgctctagaagtc

SEQ ID NO: 167266 - DNA, 122 bp, Homo sapiens
agatacttgatgtctacggtccacagaaccagaaaggcctgcaaggcatgccccgtaacacgagcacgcagaccaggcatcctgctgccactgctctctggggaggcaggctgcacagcaac

SEQ ID NO: 167267 - DNA, 122 bp, Homo sapiens
ctctgtcactgcagacccagggaccactgaggacaatgtgactgtggacccagggaccaccgagggctctgtcactgcagacccagcgaccaccaaggactatgtgtctgcagacccaggga

SEQ ID NO: 167268 - DNA, 122 bp, Homo sapiens
tcggggcggccggactggcggctgttgctaagagaccggagccatgacacagggaaattgcggcagggtggcggtcggggcccgcccggctcggcggagtcggggggcgcccccgcccccgc

SEQ ID NO: 167269 - DNA, 122 bp, Homo sapiens
tcgcccgggcgcgcgcgcgtccacgcccctctccccggggacgcgcccagcccgcggccccggcccccgcccgctccccgcgacccccgccccacaaggccgcccctcacctcgtgtgcgtc

SEQ ID NO: 167270 - DNA, 122 bp, Homo sapiens
ctcctgacgtttgttgtccagggtccttaagtccaaccaggttgcgctgtgagagccccgcgggcttcctactggcttgtcccacccctgcgtcctggccatttgtgcctctggggaagggc

SEQ ID NO: 167271 - DNA, 122 bp, Homo sapiens
atggaggctggagttgagcgagcagagcgaggacccggcagagcctgtgatgaggtgggccgtggtgaagcgcttcccatagagtgagggtggattcaggatgcggttccgggcagcccggt

SEQ ID NO: 167272 - DNA, 122 bp, Homo sapiens
atgctattcaggaggttgacaaacagccttttcgggaatgggactcgaactcgtaagccacgtctgttcctccatttcccgcctcagctggatgacggagagggatctccgggattaaagaa

SEQ ID NO: 167273 - DNA, 122 bp, Homo sapiens
tgagtgctggccgctcccctctccacaagctgctgtggtctctgggggctgcacctgaggcggcagtgggaggagaggggtgaagggcaacgcgcccccgtttaaacacctcctggcctgga

SEQ ID NO: 167274 - DNA, 122 bp, Homo sapiens
tgtgtgtgtgtgtgtgtgtgtgtgtgtgtgtgtgtgtgcaaatgcacatgcctgtgtgtgcgtgtgtacctaggccccttgaaaaattataaatgccagatgtgctggttaatctccatttg

SEQ ID NO: 167275 - DNA, 122 bp, Homo sapiens
actgatggtaaagttgtgtggagctggtttattagaccaagtgaccattgtgtcattgaacgtatagagaaggggggccagattccagagatacttgaggtgggattgataggaattttggg

SEQ ID NO: 167276 - DNA, 122 bp, Homo sapiens
aaagggatagtgcccttgagactcggatctcagcctctcaggcgaacccgaacctggacgcgctacgatgagagcgagttcgagtccaggctccactggctgggtagaaaagcatccgaggc

SEQ ID NO: 167277 - DNA, 122 bp, Homo sapiens
attcctgaagtgttctttggctgtttaacaattatttgtatgagtgttttattaaaataacggctgctgtctttggtaacatagatgagggtggatttttaaatggctttgtatcgacccct

SEQ ID NO: 167278 - DNA, 122 bp, Homo sapiens
agaactaatgtgaaggcctcagctgccttaagagaattatgccctgatctggcacagtgacgaatgtctgtggttatactgctcgtgccgctggtgtgctgctggtgaggtggtggggtgtg

SEQ ID NO: 167279 - DNA, 122 bp, Homo sapiens
cagtgcttcccctggccttgcgctctttgccctgttttctaaccctttgtcgaggctggtcgtggttctggctcccagcctgcagggttttccagctgtggccacatccccttgctctcagc

SEQ ID NO: 167280 - DNA, 122 bp, Homo sapiens
gtgaagggttcccccctcgtggagcttaggttccagcaataagcaaaacatgccctgcagcgaaaggcttctgggctgccggcgacattttcccaacgttcacaaccgggttccttccggac

SEQ ID NO: 167281 - DNA, 122 bp, Homo sapiens
tgagctccagctacatccgcctgagcaagactgggcctgtagcctgtaaggctgggggctcgagccaagtgtgcagcattccttagtcctgattgtggctctgggcttccacacaaagctgg

SEQ ID NO: 167282 - DNA, 122 bp, Homo sapiens
gccctggtcccgcctctccgggcgccctggctctgattggcaaggaggccacccttttgccgggcggaattgcacgaagccacgcccacccactgaggagccggccaatagacggacaggtg

SEQ ID NO: 167283 - DNA, 122 bp, Homo sapiens
ttggggatggggagggtgaagtctgcagagcgcgttgtacttttgaaactcggtgtgtcccggagccggggacccgcacgccccactccgcgcagcgtgcgctcgggccggcggggcggcca

SEQ ID NO: 167284 - DNA, 122 bp, Homo sapiens
gtgagcctgggcatcgacatttgccatcctgacacctttagctaccccatcgagcggggccgcatcctcaactgggagggtgtgcagtacctctggtcatttgtgttggagaaccacagacg

SEQ ID NO: 167285 - DNA, 122 bp, Homo sapiens
ccctcagcctccgcgcgcgccgcccgccccgcgagaaaactcgccccgaaagccgggccgcgcgccgcccccagagcaagactacaactcccgggagaaagtcgcctgggccgtgtttccca

SEQ ID NO: 167286 - DNA, 122 bp, Homo sapiens
tcccgggagagttccaaagcggtgcgtccaagttttccggcagtgggcggggcctaggaacgcccccgcgccccgcgccggcggagcctcgaagggacttccccccaagagggcggggccac

SEQ ID NO: 167287 - DNA, 122 bp, Homo sapiens
ataggtctctccatctataacctgaagcaaaacaccaaacaactgtccttgcagatgtcgcgtggcaggcctggtatcagcaagctctaaggagtaggtgccagctcagtccctgcaaggag

SEQ ID NO: 167288 - DNA, 122 bp, Homo sapiens
aggtcactacaccctgacacagcagtctccagtctctaccactcattgtttgcaacatgacgtaatgtcaacagaccacagagaagttagcaacagggaagggaaaacactttaatctcaag

SEQ ID NO: 167289 - DNA, 122 bp, Homo sapiens
cttccttagggttgcaggcaaggaggctcccgcagggaatctggagcaaggtgcatccggcggccagcaggtgtcactgctgccccagagacggccggccacgggctgtggcgacacggtga

SEQ ID NO: 167290 - DNA, 122 bp, Homo sapiens
ccaacaggcctgtgccccacctgtgggtgggggggcgacatctcccttctggagtgcaggcgggggccacgggacaaccccctcctctacaagccacaggctgtgcgcactggcagggacag

SEQ ID NO: 167291 - DNA, 122 bp, Homo sapiens
ggcgcccgccctcgtctggcgcagagacctggctggaaagacacagcgtggcttcgattccggcgcctgcgtgtcaccagcccagggtggccgtggaagctggacccgagccgcaggccccc

SEQ ID NO: 167292 - DNA, 122 bp, Homo sapiens
tgacgtcgggagggcagcgacgcgcggaggcggcggcggagcctcctcctgctgctgctgcgccccatccccccgcggccggccagttccagcccgcaccccgcgtcggtgcccgcgcccct

SEQ ID NO: 167293 - DNA, 122 bp, Homo sapiens
gtcagaacttcctcctttctgtcccccaaggccaatgtaatactcattatattggcaaaacgaaaacatcagtatagaaaaatccacaggtaccaacaccagcagcctttaccttaatttaa

SEQ ID NO: 167294 - DNA, 122 bp, Homo sapiens
cctgcatttccggggcctctctaggcgcctgatggggtgaggtgcatctcgctggtttatcgtcctagccccgcccgacgcagagggtcttgacggtttcccgcatcccgaggaaatacggg

SEQ ID NO: 167295 - DNA, 122 bp, Homo sapiens
cagttttctagccgatctaggcagatgttgggcgggcctccaatgcaggcaatctgttgccgcctcttccagtcagccagctcctcgtccgtgagagttttctgcacgtactccatcgctga

SEQ ID NO: 167296 - DNA, 122 bp, Homo sapiens
ccaactcctgccctacctgggcgggtagctacaactgctactctcggctcgggccctggtcgccgcggaggggaagcgaggcttcacttggcgctgtccgctgcggtggccgcttgtccctc

SEQ ID NO: 167297 - DNA, 122 bp, Homo sapiens
cattggggggtggtgggaggctgccgccatgtggcagatggaaggtctctgttccgggagcgtgtgccttagggcatgtcctcctggggagaataggcctcgatttgcctctcatctcattt

SEQ ID NO: 167298 - DNA, 122 bp, Homo sapiens
gctcatgcagctcggcagtgactgagctagcccttgagtccaatcggtggccctcctcctcgagccattgctgacaaattcccagttctcaggggagttgtgtgcctggcttcagtgatgcc

SEQ ID NO: 167299 - DNA, 122 bp, Homo sapiens
aacaaacaactccaccacctaattctaatagtgttagaaaaaatccctgacttggccaggcggagtagctgtcacctgtaatcccaacattttgggaggctgaggtgggtggattgcttgag

SEQ ID NO: 167300 - DNA, 122 bp, Homo sapiens
ttgaacctctggcctcaaccagtcctcccaccttggtccccaaaatgttgggattacaggcgtgagccagtgtgcctggccacaaaagagatttaaaggaaggagagatggtatggctgtgt

SEQ ID NO: 167301 - DNA, 122 bp, Homo sapiens
tgagggtgttagaataaaggtgcaaggctggccggttactcttcctgacgtgcagagacacgtatttggcgttaaagttctctatcatggccctggaggcctggtccatcagcttctgggcc

SEQ ID NO: 167302 - DNA, 122 bp, Homo sapiens
atccaatggctgcgcgcgagagcgagaccaaccgcatgccacgggggagagacaggagcgcgtggcccatcaatgggacaataggacctgaccatgcatggggccctaaaggatccccgggc

SEQ ID NO: 167303 - DNA, 122 bp, Homo sapiens
aatgttttggggtgagagaagatatgatccactttccctctgggcccacagtcatatttgcggtagtggatgtagcactgacaagggtgatggctgagaccttatgatggttctgctccagg

SEQ ID NO: 167304 - DNA, 122 bp, Homo sapiens
tgttttatttagaaatatagaagagagtaaggtaattatttgccagaacactgtgtttagcggtagacacctgtggaaaccctgtctgtcttttttgggtcactcactaaaaagactttagt

SEQ ID NO: 167305 - DNA, 122 bp, Homo sapiens
acatctataatcccagctactccagaggctgaggcaggagaatcgctttaacccaggaggcggaggtcacaatgagctgagatcatgggactcaagcatggaggacagagcaagactccgtc

SEQ ID NO: 167306 - DNA, 122 bp, Homo sapiens
ggctttagcgcgagctgggcggtcggcccggtcccaccgaactgcatagggccgtgtagccgggggaagtcagccccctgctctgagaagcagactctgcatctgtaaaaggctaagcgtgc

SEQ ID NO: 167307 - DNA, 122 bp, Homo sapiens
tctgtaaaatggggataacacctacctcataaggttgtgttgaagccacaagttcatgcccgtgcagctttgcaaggcttaatacgtgctggctagcgctgttattatccgtctctcttcac

SEQ ID NO: 167308 - DNA, 122 bp, Homo sapiens
agcagcttctcagaatcctgagtcagagaaaagaaacacctgtgtgttgagagaacaaatcgtggctcagtaccccagtttgaaaagagaaagtgaaaaaatcattgaaaacttcaagaaaa

SEQ ID NO: 167309 - DNA, 122 bp, Homo sapiens
gcctaaaataagaccagttcctaaagcaatttctctttttgggaaaaactgatacacttacgcttttaggataaaaaataatgccatttcattaaaataattaacatcactctttaaaaaga

SEQ ID NO: 167310 - DNA, 122 bp, Homo sapiens
gttctgatgtctgctggcgaatagcgaattgacaccagagcaagttatttctcaggtatacggttgtttcatccttgtaaatagttccaaagggaaacagtgttttattttaaggagtactt

SEQ ID NO: 167311 - DNA, 122 bp, Homo sapiens
cactgaagagcccacagtttggaaacacattattttttttggctcctgtattgcttgcatcgtttgttattgtgcaataagcaacacacaaccttctgttttagggggtcatattagccaac

SEQ ID NO: 167312 - DNA, 122 bp, Homo sapiens
attacaggcatgagccactgcacccagccggattatgtgattttctaaatgataggagtacgatagattttattcatagtaaatgcgtgagcgtgtgtatgtgtgtgcgtgtgtgtgtgtgt

SEQ ID NO: 167313 - DNA, 122 bp, Homo sapiens
ccccggccgcagcctcctcctcgccgcccccctccccagccccgccggccccgggccccccgcttctgcctgcgctgtgaacccccccccagccgccggcacggccccgcccccgctgcccc

SEQ ID NO: 167314 - DNA, 122 bp, Homo sapiens
gggcgcaggcctcgtgggggtgcccgccagtggggctcgcttttggctgactaggggcaccggcggccgcgcgtgggtccctcccgtcgtgttgtctgcgggggacgaatggctccgggagg

SEQ ID NO: 167315 - DNA, 122 bp, Homo sapiens
cgtcagttgtggagtggcgtagacgagttaagtcctggtctgcgtggaggtcgacgactccgtcgcagactacggacctgtctgggtctcagccgccaaagaccccgtccggtaggtgagtg

SEQ ID NO: 167316 - DNA, 122 bp, Homo sapiens
gagtcccccaagggagggtcccaagatcaggggctggtaatgggccccaccacaaggctacgctgctggcttttgtttggaacaatagcgctcccatgatacctcactcttgctgacaatat

SEQ ID NO: 167317 - DNA, 122 bp, Homo sapiens
agttactctagccacggagtcatcagtctccttcattaccacctgcccaccctcctctgccgcacagcaaagcccattaagacagcagcaatgcgagcagcacgtggtgcctttcatgcatc

SEQ ID NO: 167318 - DNA, 122 bp, Homo sapiens
ggcggggacaaggcggtggttctgtgggatgtggcatcagggcaggtcgtgcgcaaattccggggccacgcaggggtgagtgaaagcctggagaccctcatttgagtggaggggacccgtat

SEQ ID NO: 167319 - DNA, 122 bp, Homo sapiens
gctctatggagtgggaagcgctgagggtggggcctgggcgcctgctctcagaactggtgccgctgaaagcttgcagagcccaaacgctgcgaggaggtcgcaccagcaagtgaggaagcaga

SEQ ID NO: 167320 - DNA, 122 bp, Homo sapiens
gtttcccctttgtggatgcacagaggctttgttaaaagatgagcaccatttcaaatatcccgagaatgcagctgttgggccgtttagttctgttccaacattttttcctaaaaaagcatgga

SEQ ID NO: 167321 - DNA, 122 bp, Homo sapiens
atccacctgcttcagcctcccaaactgctgggattacaggtgtgagccaccgcacctggccggatgaggtctttgatggatatgatatgtaggtcaagacctgtgacagggggctgggtgca

SEQ ID NO: 167322 - DNA, 122 bp, Homo sapiens
ccgccagggggcgcccgagatggcagggggcgtgggaagcccacatctgcccagcaggtgcgcccaccccgagcaaacagggggccggggcccggggccttggagataaggcctggacagga

SEQ ID NO: 167323 - DNA, 122 bp, Homo sapiens
ggggatccccagttgccaaaggatggagggcggagctggaggacctcaggctagtgagcacgcccttgcccaggcctgcagtggctgcactcgccagctggcccatggccctgtccgactcc

SEQ ID NO: 167324 - DNA, 122 bp, Homo sapiens
ggtcaacgaactgggactgattgtcgattatgccataccaaacccaggttgatttcgctccgcaggatccctccttccttcctcccaaaagtgtccccagataaagactggaattatagcaa

SEQ ID NO: 167325 - DNA, 122 bp, Homo sapiens
agcatgttagcgggaggaggacacagtggccacttgatattttccaatacggggttcaggcgggtcggcccacgggctggcagaggctctccgtgtccttgccaagtgactcattccagatg

SEQ ID NO: 167326 - DNA, 122 bp, Homo sapiens
tggcttcatcttaatgcatgcaaatcagttccctttagtttttccctaaatttcctagtccggttgaccagataaaaaaatgtgtagaagactctgccttctattccttccttcatccccca

SEQ ID NO: 167327 - DNA, 122 bp, Homo sapiens
ggcccacatgaactactccttctggatcgaggccgtcaatggcgtgtccgacctgagccccgagccccgccgggccgctgtggtcaacatcaccacgaaccaggcaggtaggcggagaaact

SEQ ID NO: 167328 - DNA, 122 bp, Homo sapiens
cagcagccctgtcccccgccatcccccaccagggactttcaggacctctgccccctcctccggcccagaagctggccatggccccacaacccaggctgaaggggtggccctggccacgcccc

SEQ ID NO: 167329 - DNA, 122 bp, Homo sapiens
gggcaggagacgcagcgtggagcctacctcccgacattcacgcttcgccccacgctgctccgactggctgcagcggacactgcccaaagcagaggggagtctcagtgtcctgctagccagcc

SEQ ID NO: 167330 - DNA, 122 bp, Homo sapiens
ccagcagctcccagaacggaccctggttccatctttgacctgccctgcctctagcaagctcggttgaccttgggccagggagctctctgggccttagtcactcatctgccagatgtatggga

SEQ ID NO: 167331 - DNA, 122 bp, Homo sapiens
gcagagccttcagccctcaatgggaccacacaaccagactccaagtgagcaccttctgagcggcacccccaggcctggctcaccaggggatgctccctggctctggccccaggaagacttcc

SEQ ID NO: 167332 - DNA, 122 bp, Homo sapiens
ggaggcagaggttgcagtgagtggagatggtgccattacacttcagcctgggcgacagagcgagacttcgtctcaacaaaaaataaaaataaaaataaaacaaagggcctttccccttccat

SEQ ID NO: 167333 - DNA, 122 bp, Homo sapiens
ccgcccgaggccttcctcttggggacccccatggccgagagggcggaagcgcgacggaaacgacacacctgaggggacccggcaggagcactggcacagacagcagacacgcgcttcaggcc

SEQ ID NO: 167334 - DNA, 122 bp, Homo sapiens
ctgctcagacaacagacacgcgaggtcaggaagaagccgcttataaattaccgcttccttcgcgccgccgccaacgccgagccccgaggaccgcaagcccagaggacaagctgcgccaagag

SEQ ID NO: 167335 - DNA, 122 bp, Homo sapiens
actcaagcggaggagccggaaggacaccccgcgaggcttcggggcgcgcttttagggaggcgccgcctccagctttgtgccagaaagtgggggttgcggctcaggcttgaatccaagaaagg

SEQ ID NO: 167336 - DNA, 122 bp, Homo sapiens
tgcgtttaccagggaagcagctgggtccctgcgagcaaagagtgggagggcgggtaggtgcgaagaccaggctgtccttgggctgagcaggcctctcccagtcgccctgcactagtggatgg

SEQ ID NO: 167337 - DNA, 122 bp, Homo sapiens
ttgagggccgacgggggcggcagacttgcaggaagggtgcaggaggtgccctgtcctgatcgccgaccggagagcgatcagactccccttcctttctgtctccccccacgcacccagctaga

SEQ ID NO: 167338 - DNA, 122 bp, Homo sapiens
accctaacctctgacccccgcaatcgctccaggtctcccggagcccgtgctgcgcaaagtcgagctcccggtacccactcatcgacgcccagtgcaggcctgggtcgagtccttgcggggct

SEQ ID NO: 167339 - DNA, 122 bp, Homo sapiens
catcgctaggaaaagtgattggtattaacccgttttcccttttctggggtagggtgctatcgtggctgtgactggtgacggtgtgaatgactctccagctttgaagaaagcagacattgggg

SEQ ID NO: 167340 - DNA, 122 bp, Homo sapiens
ggtctgaaactgtataatggaatggccctgggcaagcagggaaaggacgttgggaatttccggaagcacaatccccctggccagcactggtgttaattaagggcgctgctggtgttttgcag

SEQ ID NO: 167341 - DNA, 122 bp, Homo sapiens
gttgccaagatctactccatcaatgtcaccaatgttatgaatggtgtggcctcctactgccgtccctgtgccctagaagcctctgatgtgggctcctcctgcacctcttgtcctgctggtta

SEQ ID NO: 167342 - DNA, 122 bp, Homo sapiens
cttggatgtggctattttttatgccagtgttctcctgctctgaccctacttgaacttgaccgcaaccggccccgccttgcaggccaccctcccgcagcagaaaactgtgcggagctcgcgct

SEQ ID NO: 167343 - DNA, 122 bp, Homo sapiens
tttctttgcacactggcgtggtttattaattgatacagatttccggttcagttcaccctgcgcccgcggttgagcaatgatctgcgtggtcagagtttgtgactgcggtggtctcgggggcg

SEQ ID NO: 167344 - DNA, 122 bp, Homo sapiens
gcacactccgccccgtggcccagtgatccaggtttgggggagctccatactcaggagaggcgctactgccgcttttccggtgggcacgcacccgcacccgcaccgtagccagcgtggctgga

SEQ ID NO: 167345 - DNA, 122 bp, Homo sapiens
ccgtgtgtctgattagggatacccgcgcactgcgggaacaggtcagggccgtggaatgctcgtaaaagggttgcgcaagcaggcctggccgagcagtattccaggcacacaaacgcagttat

SEQ ID NO: 167346 - DNA, 122 bp, Homo sapiens
ccccggtgatgtgtagagcgcggaagacccgggagctggagtaaggcggtggggacgcctcggcactggctgaggacacagggtctgcggggcttttcaggcctcagtgaggccttctgctc

SEQ ID NO: 167347 - DNA, 122 bp, Homo sapiens
tactcagaaggcttaagcagaagaattgcttgaacctgggaggcagaggttgcagtgagccgaaatcgcgccactgaactccagcctgggtgacgaagcaagactccatctcaaaaaacaaa

SEQ ID NO: 167348 - DNA, 122 bp, Homo sapiens
ttttctcatatcctatcttttctccacaataaaattgtgaactcttcttggaccagaacccgaataacgaagtgttcaataaatattacgttttttggtttgtttgtatttgtttgtttgtt

SEQ ID NO: 167349 - DNA, 122 bp, Homo sapiens
acgtctctatggtgtgccgggggccgcgcgggccgggagttgggtgggctgggggacaggcgcgcccgcgccgcccgctccagctgggctagtgctgcacattccggccagcccctcctcaa

SEQ ID NO: 167350 - DNA, 122 bp, Homo sapiens
aggtcgctcccttatgcttcaagcaagctttgcagcgcagccaattgccaggggctgtcccgcctactccccgtcctcgcagccacttgcctgcgcgaaatgcctgccaacttctgactggc

SEQ ID NO: 167351 - DNA, 122 bp, Homo sapiens
tgcataggcctcagccgtcctgcatgaggacactgggaggcaggtgctccctatcaaccccgtgttacagttgaacaaactgagccccagaaaagaaaacgtatttgcccaggtcacacggt

SEQ ID NO: 167352 - DNA, 122 bp, Homo sapiens
cctccgggacgcggggcacagagtacccgccgctgtttctgctgctgctgcttctgcagccgccgctcccaccgccgccgccgcccgcgcctctcgcgccgcttacattaacacgcggtttc

SEQ ID NO: 167353 - DNA, 122 bp, Homo sapiens
ggttgaaattaattcagagattacttatcccaatcttaactcctcttgggaatattgcatcgagtttctaaagttaatgctgtagattcctcttaatcattccttgagtcctgcaagatgat

SEQ ID NO: 167354 - DNA, 122 bp, Homo sapiens
ggccgccccgcctttaaatttaaaatttcccaaacgccgcatctgattgagccgtggcctcgtgacgtcatgggccattccacgtgcggagcagcgcgggggacgcaaggcgggcggcgtga

SEQ ID NO: 167355 - DNA, 122 bp, Homo sapiens
ccatgttccccacctgaccacgccgccgaggggtaccgaacgtcccaaagcacccacttccgtaacttctccatgttgactcctggctaacagcagcttcaaaggtggttttgcgcacgcgc

SEQ ID NO: 167356 - DNA, 122 bp, Homo sapiens
cggcaaggcgtgtgtgagcgagcaagtacggggtccggccactgtacacagcaagcatgccggctgctgcagcggggtgggtagctgccgcagcggggcgggtagctcctggcaccgtcacc

SEQ ID NO: 167357 - DNA, 122 bp, Homo sapiens
tagggccagttgaggggcatcccctaaggggagtttccaaaatagcaaccaagcattggccggtatcataagtgaaattgcacaaaacggaaaagaaaactgaaatagcctccggaaattcg

SEQ ID NO: 167358 - DNA, 122 bp, Homo sapiens
ggtgccacacgttagagggcttgtgcctgccagcagtggaaaagtaccgccttgagtcaccgcggtgctgaaggtcactgggcctccttacgcaagccctggacccggcgcccatgaactcg

SEQ ID NO: 167359 - DNA, 122 bp, Homo sapiens
tttcttttgttcagtaggagtctctgaggcctccccagtaccatgctgcatgggtgaggccgaggacacagagaagtatcaggaaaagctcttgcccctttatcaggcagggctccctctcc

SEQ ID NO: 167360 - DNA, 122 bp, Homo sapiens
agatatctagatggagcagggtctcagtctatacacaaagaaggcgccactgccgcactgcgctctggtactggtagtcagattcccaagcaggtaacggccaggaaactacagggtccaga

SEQ ID NO: 167361 - DNA, 122 bp, Homo sapiens
gggccggcaggcgggttagggggcagccgggcactgaggggtcgatccgggcgaggagggcggcggggccggcctccctgcagcggccaggccgggcttgggggtcccatcgggggcgcggg

SEQ ID NO: 167362 - DNA, 122 bp, Homo sapiens
tcactgtgacctcattggagacaaattctaagcagcgcagacgaccaggccattctcccccgccccatgctcctcccttaaaggtgagcaggtgtcccttgtttggagatgacaccagggga

SEQ ID NO: 167363 - DNA, 122 bp, Homo sapiens
cgtgggccttgggttgtgtgggataatcctgtcttattcctattgttccaatgttccatccggctactgctgcctctaacaaaactaacccagtttggaagataaattaagtcattagtcga

SEQ ID NO: 167364 - DNA, 122 bp, Homo sapiens
gtggaaaagagaattgtatcgttgtgcttgacactaggggtttagttggaattgttgcttcgtagctgtgctcggcccacttttaatgttaagggacacagcattctcagagtcgtcaaact

SEQ ID NO: 167365 - DNA, 122 bp, Homo sapiens
cctcctccgccggcctcctctccggtgcccgggacactgtcgagcctcaccagctagcaacgacccatgtagaggcctgggaggcttctccttggagagactttgttccaaaaataggcgcg

SEQ ID NO: 167366 - DNA, 122 bp, Homo sapiens
agacggctccgggtaggtcacgggctgcgcgcttcgtcgactctccggggccgagctgcgcgcagaagctggggacccgaacccaaaggcccgagggaaacccccagagactcacccgcgac

SEQ ID NO: 167367 - DNA, 122 bp, Homo sapiens
ggagactaagacatctggcctggtcttgtagtgtttctgtaaaattggggagggggggagcggaggctgtatttaaatgtcctgctgtcaatcaaaagacacttcctacaatcacagtcacc

SEQ ID NO: 167368 - DNA, 122 bp, Homo sapiens
agaagggtggcactgagacccgtagggagggggccagtgaagtgagtaaaggtggatcgacgaagaaggaaatccttggggagagaaccaccgacgcgcgcttctttcccccccccgccccg

SEQ ID NO: 167369 - DNA, 122 bp, Homo sapiens
gggaggcatgaaaccaattattcgacctgtctggggtcatgagtgcagaggcggctcctacgaaccatctgcctcttcaagtgtggatgagaggtgggtatggcggatgcttgtcatttccc

SEQ ID NO: 167370 - DNA, 122 bp, Homo sapiens
ccctactgctggcctaggcctcgggctgtctggcggccgcgactcagcgctgacctcgggcgcaacccagtcaggcttcgtgtccttcaggggttctaggctaacaggcgaaaggaagggcg

SEQ ID NO: 167371 - DNA, 122 bp, Homo sapiens
ggacggcctcttcatgtgctggggggaccagggggctgcactactcccacgcggaggtagcgccagaaggcagccataaggaatgagagatgggtgggtgcagatgggaggacctcacgtgc

SEQ ID NO: 167372 - DNA, 122 bp, Homo sapiens
ccggggtatgccagacaaccacagggaaagtcattccaaatcatttacgggacactgactcgatacacagtcttgtgctgggttctgtggaggaccaacataaaaactcaaactcagtttct

SEQ ID NO: 167373 - DNA, 122 bp, Homo sapiens
tgctgttaagagccaggttcttaaatcaacccgccccacacacatgttgcttacatgctgcgttttctcacggtaagtaagtaggcatcagaagagagctcagaaagggaaaaataaacatg

SEQ ID NO: 167374 - DNA, 122 bp, Homo sapiens
gctcacacttaccctggctttggcactgggacagcctgtcatgggagcagcatgtgggggcgctgaccctctctaacccggctgtttgagattccagcagggaagaggggcaccaggctaac

SEQ ID NO: 167375 - DNA, 122 bp, Homo sapiens
agagcttcaagaccaagataacagccccttgaatttggattgggcttttcttccaaaggtcgtagcatcttcttacatgctttgtcccaaaccccaagaaggaacatttctcttagaaatgt

SEQ ID NO: 167376 - DNA, 122 bp, Homo sapiens
accaagctcataccttgggtgcagaagatcctggctgccaactgagcccgcggctccctccgaccctgctccccacagagcctcagtaaacccatggaacacacgtcggcgctgtccgtctt

SEQ ID NO: 167377 - DNA, 122 bp, Homo sapiens
tctcctcatctctgaaatgggccgtagcccatgcagggctgtaagggggttaatgtaactcgggacatgcagtggtcacccccagagacgcgcaccacccagatgggagtctgagccccagg

SEQ ID NO: 167378 - DNA, 122 bp, Homo sapiens
ggaggctgaggcgggaggatctcttgagcccaagggttcaaggctgcagtgagccacgatcgcgccactccactccagcctaggtgacagaccaagatcgtgtctctaaaaaagaaaaaaaa

SEQ ID NO: 167379 - DNA, 122 bp, Homo sapiens
ctctctcccaggggaaggcagggtgacatggcgagcctgggccacacagtgagcccaggccggagccagcagccggttcccaacactggctagggcccttctgcaggcctgaccctgagcac

SEQ ID NO: 167380 - DNA, 122 bp, Homo sapiens
gaggacccatctggctgagagctgaggagagtgaggctccaacaaagatgcaggggtgtgcgggaggctagatatttcagggcctcataggctggtttaaacactgtgatgtgattgtgtgt

SEQ ID NO: 167381 - DNA, 122 bp, Homo sapiens
ctttaggttacctttgttctgtattgttttcacatttcacatcaaaattcaatactggagcgtccataagacaacactagacataactaatttttattatccatacaaataagttggaactc

SEQ ID NO: 167382 - DNA, 122 bp, Homo sapiens
tgtcatgaaaaccaaaacaaaaacacaaaaatgcaaaagcaaaagagatggggcagggggcgggggtgctctcgattaaaaagaaacaaaagagcttcagcaagcaggggcgtgtgagattc

SEQ ID NO: 167383 - DNA, 122 bp, Homo sapiens
atgcgggaactcacagccccaaagagtttgcatctgagcttcctgtagcatcctggggcacggacaggcggaaccgggccatcagccgtccctgcgcacagaggcgcacagattggatccgg

SEQ ID NO: 167384 - DNA, 122 bp, Homo sapiens
accaattgcaatcataggaccatatgtgtgtccattttgtttttcagtctgttttctctacgagcctaaactatgaggacgagggatgtgcctgttttatttaccactacagtgcttggcat

SEQ ID NO: 167385 - DNA, 122 bp, Homo sapiens
ccacgtggcgaagccgcacctgaagccccacctggtcgcaaaggctggtgcaggggaaaccgttggttcagctgcggttcctgggaagggggtgccgctctgatcacgcgcacttctgattc

SEQ ID NO: 167386 - DNA, 122 bp, Homo sapiens
cccggagcgagagaggactggagggcggggtgaggggacgcgaggacccagcctgcacggcggggcaccctccccgctggcacctaccacgtgggcctgcatggcctggctctcctcggacg

SEQ ID NO: 167387 - DNA, 122 bp, Homo sapiens
tgtccagtggagttcttcttccttctcctttttctgctccttctttcattgttggctcaacgtcaaagcagaaatctctaaagtttgctgatcgatcttcacataactgttctggtgatatc

SEQ ID NO: 167388 - DNA, 122 bp, Homo sapiens
tacgtggacagagccagctccgcgcagcgctgccgggcggcaggaggcggggggggagggcgcggcctccaggtccgcccagtgcacctgccgcgcagacctcgctacaggaggctccgaga

SEQ ID NO: 167389 - DNA, 122 bp, Homo sapiens
tcctctcctgctgctctagggtgataaaccaggcttgggatattctcacaccaatctccacgccctgcagacctaccgatacaagtcagcaagtaatggttggccctcagtataggcaaaca

SEQ ID NO: 167390 - DNA, 122 bp, Homo sapiens
cccccggcgcgcgcagcctcctgcttcttggactttggtgaaattgtggctgcgggcccgcgctgcttccgatccacggcgccgctcaagcgaaggctcagggggtcccccgcccgaggcgg

SEQ ID NO: 167391 - DNA, 122 bp, Homo sapiens
gccttgcaggcgggtctccaagtgaatgagcggcagagtcccatcatgcgcatcagcctgcgtgaaccagtgcgcagcgcgcctttcccgggcaccctctaggtgctggcagctggcgccca

SEQ ID NO: 167392 - DNA, 122 bp, Homo sapiens
gcgagggggctgagccagccccgacattgtacacacagcaccacacacgggcatacccaacggttctttacaggtcttcgagttacacgtcactgctgtttggatcccaaacaccagcggaa

SEQ ID NO: 167393 - DNA, 122 bp, Homo sapiens
accccagctccttcctcccaaggcgagtatgtttaccctgctgggcacccttccgctccgcggggaccactgcgggatcgcgctctctaaaactcctctcaactgccccgcagtgcgcggcg

SEQ ID NO: 167394 - DNA, 122 bp, Homo sapiens
tgttccgtgaagcgggccatgaaagctacctgatcttccaattaaagtaggtgataagaccgtcaattcagaggggagaaaatgtacttggaggaaataaacgaagacacagagatgccaaa

SEQ ID NO: 167395 - DNA, 122 bp, Homo sapiens
tggtcctcgccttgcaggtgcagccccctcaccagtgcccagtgggtggtacaaagtacacgcagcagtgcacccgggtgtctgggatgtggcgctggcgggtgatgaggatctcctcctgc

SEQ ID NO: 167396 - DNA, 122 bp, Homo sapiens
gcaccttcactccccaggaccgtggtcgttgccacatttgctgggccaggtgctgacagacgtgcccgtctgcctggagggaatgttctccacaccacgcggggcacggtggacatgctggg

SEQ ID NO: 167397 - DNA, 122 bp, Homo sapiens
tgcaggggtgggagggtgtgcgtggtgacactcaggaacacggtcgggtcagtcctgctgcggtgggagggtgtgcgtggtgacactcaggaacacggccgggccagtcctgcaggggtggg

SEQ ID NO: 167398 - DNA, 122 bp, Homo sapiens
tcatcttgcacaacagaacctccgcagtcccacctgcagcacacaggagttacgatgtctcgccgtcctcgctgacactcccgactttctgttcctggccgtcctcttggggcgaggcagtg

SEQ ID NO: 167399 - DNA, 122 bp, Homo sapiens
ttccctttttatagtatcttcacagctgaatcttcatgcatctcagtgtggctttctcttcgagcatcacttttaactcagacaggcaggaagctgaaggcaaaggaactctctatctgatt

SEQ ID NO: 167400 - DNA, 122 bp, Homo sapiens
gtccttaatgaagctgtaaagagtattcattttactccattttgagccttgattacatgacgtttaaatattttgtgtgacaaatgggaagtgcgcataaagcaagtctgctgcacaccaag

SEQ ID NO: 167401 - DNA, 122 bp, Homo sapiens
agaatgatcaataaatactaagggaactcagaggccaggatggatcctccgtacgctgaacgctggtcccctgggcccccttatttctttctctatactttgtctctgtgtctttttctttt

SEQ ID NO: 167402 - DNA, 122 bp, Homo sapiens
gaggcggcaaagcctccagtgggagatacgaggctcgtgggttgcggtttgggttctaaccgggtggctttgagtgagttccttatcctttcctcagcctccatctccttatctgtaataat

SEQ ID NO: 167403 - DNA, 122 bp, Homo sapiens
cccggccgcttttcggttgaggggccgagcactccagcaaatttctcattgccccgcccccgagggtgtcccctggtctggctggtccccagatgacccttccggagagggtcaccggctgt

SEQ ID NO: 167404 - DNA, 122 bp, Homo sapiens
ggccggggtgagcagctgagtccgggtgccccggggaggcccctctgcccgatttcgcagcgctgcccatcagcttcagcggaggcctgattcctgaggtgctctgactggaaggaacctcc

SEQ ID NO: 167405 - DNA, 122 bp, Homo sapiens
cctagacctcgacaactgctggtctgttttctgcccctgtagttttgtatgaattctttacgtattctgtttgcccaggctggagtgcagtggtgtgatctcagctcactgcaacctctgcc

SEQ ID NO: 167406 - DNA, 122 bp, Homo sapiens
ggcgggcgggcgggcgggcgggcgaagctgggctcggggccaagcgaggtctagccggagcgactgtgccccgcctcctgggcggagcgggcggctccccatggtcagagcctcgtgccggc

SEQ ID NO: 167407 - DNA, 122 bp, Homo sapiens
ccaaatgcagcgttggcaggaagggggaccggtgccgtgccacgtgaccctccagctgtgcgcgcccagacttctggagctcagctccgccccggcgccaggagcactccggcctcagagtg

SEQ ID NO: 167408 - DNA, 122 bp, Homo sapiens
gagggaggcatccaagccccagggctccttgaggaaacaacaggggtgccagacgtggcccgggcccctggctgggcccagttcggggtgtgtgggagctgaggactcactgggcttgagga

SEQ ID NO: 167409 - DNA, 122 bp, Homo sapiens
cgcaggcctctgccccgtcctcaacacgccacgctcgttcccacctcggggacttcacaccggctgcttctgtgccccagtgtttctgtggtagcccttagccctcccagccggcctctctg

SEQ ID NO: 167410 - DNA, 122 bp, Homo sapiens
ctcactggccacgcaggacggctctgggagcgtccaggtgtagagggattgaggggccgccgagtgaccctgccaggaccatgcggcatgaggtcagaagggaccactcactgcctgtgatg

SEQ ID NO: 167411 - DNA, 122 bp, Homo sapiens
ggccgagacaggaggatccctggaggccaggagtttgagaccagcttgggcaacatcatgcgaccccttctctacaaaaacttaagaagttagccaggtgtggtggctcatagtccttgtgg

SEQ ID NO: 167412 - DNA, 122 bp, Homo sapiens
ctaggacatagtaagcattatacagatgttaggaattattaatcctaaaatattgaaacacgagagaggtggagcagatgcttttgatgcttcatagacatcccatggccatttctgatttc

SEQ ID NO: 167413 - DNA, 122 bp, Homo sapiens
aattctggcagcctttggatttggcttccacgttttccagatttccctcggcctctagctcgcttgcgtcagaggggccccgaggggcggcccacccgctagccccgcccccaaccgctcac

SEQ ID NO: 167414 - DNA, 122 bp, Homo sapiens
aatccggatgatttccgtgtagatccgccctgatttctccattgcacacgtgttctgctccgtggcaatgatcttctcagggttctcactgcatcgaggggagaagtcaatggcgagctccc

SEQ ID NO: 167415 - DNA, 122 bp, Homo sapiens
ccgcctttcccgagcaggctacacctctccctggcgcatctttactggaaagccggcaggcgaggggagaagtgagcgccgtctccgcgcctcctcggtcctgctggctgagcgcggggatg

SEQ ID NO: 167416 - DNA, 122 bp, Homo sapiens
ggaatcccagagaggacacgccatgtcccgtgtataaattacactgggattttcagatgacgcctgaactgcacatatgtgagacagactccaaggagctcaattaaggctaaaagaattga

SEQ ID NO: 167417 - DNA, 122 bp, Homo sapiens
caggctagagtgcaatggtgcaatctcagctcacggcaactttcgtctcccaggctcaagcgattctcctgcctcagcctcccaagtagctgggattacaggcatccaccaccatgccaggc

SEQ ID NO: 167418 - DNA, 122 bp, Homo sapiens
ctcctgatctcaagcaaactgtcctccttggcctcccaaagggttgggattacaggtgtgcgccaccacgcctggccatgagttgttatataagaaacagaaggagggctgggtgccatggc

SEQ ID NO: 167419 - DNA, 122 bp, Homo sapiens
tgagcgaaccattgcccactgcctccaccagcccccagcaaaggcacgccggcgggggggcgcccagcccccccagcaaacgctccgcggcctcccccgcagaccacgaggtgggggccgct

SEQ ID NO: 167420 - DNA, 122 bp, Homo sapiens
ctcccgggtagggaattgcccgggtggaatgcctctccagagcagggcatggtagggccccgcggaggattaacgcagcggatgaacaccggcaaggaatcggcgcttggagtcgcttggtg

SEQ ID NO: 167421 - DNA, 122 bp, Homo sapiens
tacggagctgaggataagggtaagccctatgatactgtagccgcctagttttaggagtaccgctgcaagtactactgagccggcaataggagcttctgcgtgggctttgggaagtcataggt

SEQ ID NO: 167422 - DNA, 122 bp, Homo sapiens
ccggagagactggcatggtggcgaccagctggggagtggtgcaccacccctttttttggccgcctctgaagtccctgtacccccaagctcctccgttagcggctcgggccgaggctccggaa

SEQ ID NO: 167423 - DNA, 122 bp, Homo sapiens
tcaggaaatagaacctagtaaaatgatttatagcagcctacagtctggtggggaacatgccgggattgaggcaatgaattccagcccctccttgtctgtgcccaggtgtaaacaaacagtgt

SEQ ID NO: 167424 - DNA, 122 bp, Homo sapiens
cctcattcctcatgctcttggtaagtaacctctgacttctacctcaaatctaacctatttcgttctttggaggaaaagggttctttctcctttatgatccctgacctttcgatattccccca

SEQ ID NO: 167425 - DNA, 122 bp, Homo sapiens
gattcctgccaagagtcaccggggaatcctcccaaatagaatggatgctggaagctggaccgccaaaacaaacagaacaatagcaacaaatgcccattatatattggggaagcaattgtgtc

SEQ ID NO: 167426 - DNA, 122 bp, Homo sapiens
gtacatctcacagttacttattaggttgaaaggtatatggagaatggtcattagacgtctcgacagccacctgctgttgaccacttgcctcctcaacaggagccgctgtcgtctgcatatgt

SEQ ID NO: 167427 - DNA, 122 bp, Homo sapiens
tctgttttcttatctaagagaggagcaagtttgcctcataataagttcagacagcaaatgcgcacagtggctgtggtcatggtctgaaaagaaaggtggcttgggaatgaggaaaaatattt

SEQ ID NO: 167428 - DNA, 122 bp, Homo sapiens
caccccggttccttcagaacctcaggcctcccattcagccagccattgtcgccgataaagcgtcttgagccctaccgggtgcgtgtggcgggaaccccggttttgttaccgggcggcaggac

SEQ ID NO: 167429 - DNA, 122 bp, Homo sapiens
atggaactgaggggcgtgggaggtggaggatggtcctctggtgagaaggggaatggctgacgagagataggcatctccacactaccagggccagagctgtggggcttggagactccattcaa

SEQ ID NO: 167430 - DNA, 122 bp, Homo sapiens
acgagagattgcaaaacatgcctctactcaacggcttaatgtctgagcacttacctcccccgctgctctgccgttgggagcactggtctctgggtgagggacttccagcaagaagtattcac

SEQ ID NO: 167431 - DNA, 122 bp, Homo sapiens
gcattttgtgaaccctgggtttttgaaactttgactgaaaaaactgcgtgcgatgctatccgctgggagcgctggggccttggcgctcaaaaccagccgcggtgctaaccgcagggagctct

SEQ ID NO: 167432 - DNA, 122 bp, Homo sapiens
acgcacctctccccctggcaactgcactgtgtgtgctgccagacacagcccccagcttggcggactccagctgcttcgtccttttgctgctctgataatgcgcactgatgcccatttctttc

SEQ ID NO: 167433 - DNA, 122 bp, Homo sapiens
tgtctatggtactcctaccttcatgtgaccattttcagttatttgtagagcctgacgggacgcatacagcatgcatacagagagtgaaggaaagaaagaacagacccaggaaatgcctttcc

SEQ ID NO: 167434 - DNA, 122 bp, Homo sapiens
cgctcggggggcccgctccgcccacccgcccgcgcggggccccgcgctgcgcagccgcggcgccatgcccccgcccctctacggccccgccaatcagcgcgctgggagggggcggggcctta

SEQ ID NO: 167435 - DNA, 122 bp, Homo sapiens
gttttaaaaatcactaaacaatcccacatagtgtttatggaaacaaccgtggaaaaagtacgaaaagaggcttgggactgatgcacaccaacttcaggatagcgattacctctaggaggagg

SEQ ID NO: 167436 - DNA, 122 bp, Homo sapiens
aaataggtccaagtgtgcgcttctattggtggctgcggaggcccctgggtcctactgctccggtctaaactacacagcaacactaggcacgcagctttggagacgccgaggggaaaatggat

SEQ ID NO: 167437 - DNA, 122 bp, Homo sapiens
gccacctaagagttgtgccttggctccagcccccgcaggcaggagagaaacgaagcgatgcggcggagctgggctgctgggaaaaggcttcacccaggattaccccagaagggcttgggctg

SEQ ID NO: 167438 - DNA, 122 bp, Homo sapiens
ctaaccctcctatcccgccctgactgttaggagccatggctgttcgcccctctcgttcgccgtgtttccgacactggaagaaatatcatctccatatgatggaggagtctgcaccccctgca

SEQ ID NO: 167439 - DNA, 122 bp, Homo sapiens
gtgacgtcactggcatgttgaactacaaagtccatgatgcagtgcgggatcgcagaatgccgcgagtgcgccctggttaggttggagtcccttggccatcaaccttttcacccggtagagct

SEQ ID NO: 167440 - DNA, 122 bp, Homo sapiens
tcaaaagacaatgtcatgttatttatagagtaaggagttgcctcttctaagaagggaaggcggcatcacgtggtgaccagcactacgagctttggagttagcactgggttcaaattccaact

SEQ ID NO: 167441 - DNA, 122 bp, Homo sapiens
gatctggtgaaagggtgggtgtggaaggaaattttcttttccagatgtcagtggtccttacggttatgacataagctattttaattttagagcagtttgaataattgaaaccagcatttaca

SEQ ID NO: 167442 - DNA, 122 bp, Homo sapiens
agtgaggactcagcgatggagcccgcgggtggggctcagtccctgagtccctgctccagacggacgccctgtctatgcatgggctaacctcgcctgacctcatcgtccaacaatgtcgggtc

SEQ ID NO: 167443 - DNA, 122 bp, Homo sapiens
cccccagccccgggcggccccgctccagcatcccagctcctgcactctcgcagccgccgccgccccccgcccggaacatggactctgactcttgcgccgccgccttccacccggaggtgagt

SEQ ID NO: 167444 - DNA, 122 bp, Homo sapiens
gaggtccagcacactgcttcaacaggggctagagatggaggtctacctctcattcattgacgtgggttgcaccaaggggtctgtccaggcttaggatggggttctcttttggcaaggggtag

SEQ ID NO: 167445 - DNA, 122 bp, Homo sapiens
agtccaaagagcaggaacttgtacttgcgggccgggtccagccccgagacggcgaccgctcggaggtctccgctcacaggcactgcctggggctgcccctgcgcgtccctgtactgtaccag

SEQ ID NO: 167446 - DNA, 122 bp, Homo sapiens
ggtcatgccgtctcacttctccctaccccagttttctcatctggagaagacaggactcatcgtcgccacgtaggttgtatgtattgagtcagtcgacgcatgtaagagcttagaacagactg

SEQ ID NO: 167447 - DNA, 122 bp, Homo sapiens
gggcacaaccaacaggccgggggaaatgagaggtgatccatactaaagggtcaaagtccccgcaccaggcagaggccccaaaacaccgcagcgtacatgtgctgcaaggcgagtacgggttg

SEQ ID NO: 167448 - DNA, 122 bp, Homo sapiens
accctgctgtgtgcaggtgacaatgacgctcagaactagacctgccacagagtcaacaagcgtggaccgcctgcgggctccgagctgagggagaagcacacgccgcccctgccctgtgagct

SEQ ID NO: 167449 - DNA, 122 bp, Homo sapiens
gagacatctcgagtggtcagattcacagacagaaagtagaatgctggctgccaggggctgcgggaagcagttattgtttaatgggtatagagattctgatccagatactgaaaaagttctgg

SEQ ID NO: 167450 - DNA, 122 bp, Homo sapiens
tcgtgcccagcaatagctccctaacccacacacaccaaacctcatgcttatgtaagcactcggcaccggagcggagagtgagagctctcgcttggactcccggctcttgccgcagatcctga

SEQ ID NO: 167451 - DNA, 122 bp, Homo sapiens
gacacctgatgggcatttgataaacatctgttgaatgggcaaatgaatgtaatttaactacgtttacttcactgactccttcattagtctctgagaccctgggacagaaactatgccttttc

SEQ ID NO: 167452 - DNA, 122 bp, Homo sapiens
cctgcctgcaggagagctccttacctcgcttgcggttggctgccatttaaacgcggccatcggtccggccatcatccccttcacggtactagactccgggatggtgagatcctatagaggga

SEQ ID NO: 167453 - DNA, 122 bp, Homo sapiens
cgctggggagtgaggagcagaacgaggagcggcagcggcggcgagcgggagcccagggaccgcccctcgggccggccgcgcgcccgcccgggaggggcaggacccgctctccccgccccggg

SEQ ID NO: 167454 - DNA, 122 bp, Homo sapiens
tcttctgcctcagcgaccagctctaccgaaggcagccatctccttcactgcctgcccctgcgcccgcggcatcccaggcccgtcttctctggcctccaggcttgcaacagcccaccgaggtt

SEQ ID NO: 167455 - DNA, 122 bp, Homo sapiens
ctgccgagaatcatacgggccccacttccgtggaaaacaatccgaattccctgtgtatcacgggcagaaggctgaaggaagtctcgagccaccgtgcggagagtgaagctggcggtgtcgcg

SEQ ID NO: 167456 - DNA, 122 bp, Homo sapiens
aggcattcagtctctgaaagcttctgtgagcccgcagtgggttctgagctccaggtgcagcgctactcgcccttctctgatctctgcacctcgcgaggctgttcctggattcctaacgtggg

SEQ ID NO: 167457 - DNA, 122 bp, Homo sapiens
caaagtgaaggaaagctggatagctcggcctctccaaactgattgattagtcatgatccccgcagttttaacagggactcattcaattgggaaggtggagcgctggggagcagattagcata

SEQ ID NO: 167458 - DNA, 122 bp, Homo sapiens
ccccaaggctccccactgccctgccacacccccgccaggccccagtgtctcccaccgagtcgctggcactgccctcagctgcagcctaactcctgggtccccctcgcccttcagtccattgt

SEQ ID NO: 167459 - DNA, 122 bp, Homo sapiens
gcaaggcaaaggctcgctggaatgaggcaaggaaatgggattttgattgcatacacaaagcgtggcacagccagagaacagtgacaagtgacatgtgaatcacacagatgagggcttcccag

SEQ ID NO: 167460 - DNA, 122 bp, Homo sapiens
actgctcattctggaatggtggagctcaaggcaggcatctgtgtgaccttgcacggttaacgtgccctttccgcctcagttggtggtccctcaaggccgtggctcctggcctcacaaagggt

SEQ ID NO: 167461 - DNA, 122 bp, Homo sapiens
ccccacgagggccgcaccgggctgtactctagcgaggccagaggctgcacgacccgccagcggagcccagctgaggcccgccccaaaccacccaagagagaatgtatttttattgaacttat

SEQ ID NO: 167462 - DNA, 122 bp, Homo sapiens
ttgagggaaagggggagggggcggatcatcttggaaacccagcccctgggctggagcaggcggggagaagtcagagaggctgcctaggattaacattctcgttctcaccctctcccgccctt

SEQ ID NO: 167463 - DNA, 122 bp, Homo sapiens
cgccctacccctcactgggcggagccccgggcagctgcccgcatcccggtggaggcctggcggtgcccccggcctaggctgtgccgctccttgcaggtgggaatcctggatgtggacctgtg

SEQ ID NO: 167464 - DNA, 122 bp, Homo sapiens
ggagcgggaggagcgactaggagcttctgggagaaaggacctcccctggggtggcagaagcgctcgcctgttcacagccaacggagggtacggtataaaagtcaagccaggtttcaaataaa

SEQ ID NO: 167465 - DNA, 122 bp, Homo sapiens
actagatgatggctggattctgtcagtctcaggtctaattaggagtcagcgatttggacgcgacaagcaatgttctcagtgagcttctcactcatggtcttgcagagctgagagcaataaag

SEQ ID NO: 167466 - DNA, 122 bp, Homo sapiens
gccgggcaaccacagctagaacactttgtttccggagcattttgagaatgattacacttgcggggttgggttgggttggttggggtttttattattattattattattattctttctttctt

SEQ ID NO: 167467 - DNA, 122 bp, Homo sapiens
ctggccccccgcccgggctggggcgcctgccgcccgcgagccggaagagcgccccattcacgagcaggcagccctggcagagggttaattgaggatcattgttgttggttccaggaggagcg

SEQ ID NO: 167468 - DNA, 122 bp, Homo sapiens
cccggccgccctgagaagctccgcgggcccggctgggcgagtgtctggccctttaagggccgcccccgaggaggtgccaggcccgggtggcgccgtccgtccttcctggtcctgcgggtcca

SEQ ID NO: 167469 - DNA, 122 bp, Homo sapiens
cgtgatttgcctgccttggcctcccaaagtactaggattacaggcatgagccaccgtgcccggccagggatcctattcaaacccagccctgctggacctcagaaccctgccttttcattgcc

SEQ ID NO: 167470 - DNA, 122 bp, Homo sapiens
ggtggtggtttttttgtttttggtttgccccaaaaggcaaataatcaggaaacttttatacgaggcttgagcggaaagggaattacttattgacaagtaaatttttgagatcctagcactct

SEQ ID NO: 167471 - DNA, 122 bp, Homo sapiens
aagagagagcacccggctcgtgtcagggctgtaaggtagctgccgcttactcccggaaaccggtggccagtgacagatgctagcggtccataacttcggctttcatgcagctcccgtcgtcc

SEQ ID NO: 167472 - DNA, 122 bp, Homo sapiens
cagcagaggcgagggtgggaaggggcggccgcggcggcccgcagcggttcaggcgctgcgcggctgctctggcgtccagtcctacccgcaacccgccgcgacgttactgctgcagtggagga

SEQ ID NO: 167473 - DNA, 122 bp, Homo sapiens
ggacactgtacacgacatcgctaatgaggactccgtataccacatcgctaatgagggtgccgtatatgacatcgctaatgacaccgtacaaggcacgctaacgaggacgctgtacacgacat

SEQ ID NO: 167474 - DNA, 122 bp, Homo sapiens
agcggctccaaggccaagacctggatggtggggaccaagctccccaactcagtgctggggcgcatctggaagctcagcgatgtggaccgcgacggcatgctggatgatgaggagttcgcgct

SEQ ID NO: 167475 - DNA, 122 bp, Homo sapiens
gcggacacctgttgcttccagggtagatctcgggccactgggaccgcaattccgggtgcacgactcgtcaaagcctgaacctgattgttcagtgcgacccctccccgagcgtccgcgctttc

SEQ ID NO: 167476 - DNA, 122 bp, Homo sapiens
aaaaatacctcccgccctccctccttctctcgcctctccccgctgcaactttctttgatccgctcaaaggtggcttaggtgaaattggagtaattcccttatgggggtcttaaaatgtaagt

SEQ ID NO: 167477 - DNA, 122 bp, Homo sapiens
gttggaattaaacctcacgtcaaatacaatttatgtccgggctcatgtgctattagttaacggggagccgaatcacgggggaacaaacaaacggagacagaacggcgggggatattaattgt

SEQ ID NO: 167478 - DNA, 122 bp, Homo sapiens
gaccaccggcccagtcagcacagtggccacaggggagaatgctgcagggcaggactcggccgggtcacccccaacacccgtgtctgcacagcccacgcacgggccaggttgagtccagtcgc

SEQ ID NO: 167479 - DNA, 122 bp, Homo sapiens
ggcctctcatatggtcacaccttctatttgcatctacagctgattaaaagcaaaaatctacgagatgaacttttcaataataattgtcaacactcagtttagaccaaacagttgaactaaaa

SEQ ID NO: 167480 - DNA, 122 bp, Homo sapiens
aggccagcccgccccgcgccgcctccgccttcccacccaacacgcacacgacagccctgccgggcagcactgcacacagagccagattacgggttagtggcacctgggagcagggcgcaagg

SEQ ID NO: 167481 - DNA, 122 bp, Homo sapiens
gacatctggatgtggtcagacctcaccaaatatatgccttcgtggtggtctccctccttgcgccctcttgggtggccagcgttcctactgcagacggcccaacatccagtctttccccagga

SEQ ID NO: 167482 - DNA, 122 bp, Homo sapiens
ccccagcagcagatccttcccttttatagcaccaatcttcgccgccactgccacactgcgcgcccgctatccactcaccgcacaccgagaaggcctggcggagacagcgcagggggaggagg

SEQ ID NO: 167483 - DNA, 122 bp, Homo sapiens
cttggtccagaactcaagaatggagaaattgaaatgagtaccacgatgtgcaattttaaacgactaaactttgacagtgtccggagaagctgaatcagtgcatggtgagcctgccctcatgg

SEQ ID NO: 167484 - DNA, 122 bp, Homo sapiens
ccaggacattctaccacattcattccagaatggaatctttgaaacatatggttgccatgacgagtgtcaacatttcaaagaatttgcttggttgataactacctagagtattttacctttgg

SEQ ID NO: 167485 - DNA, 122 bp, Homo sapiens
gtcatcggtgaaatgacagcaaaagagaccggaaatcgacacccccctgcccccgccgcccgcccaagcccccaacactaaggagccctccacagtccaagctaaaagcggggcggggcgaa

SEQ ID NO: 167486 - DNA, 122 bp, Homo sapiens
ttgacttctaatttaatccccataatcctggacgggggaattatgtccatttcactgttgcggggctgagggaaagggaaggggtgccctgtctgggcgacacgctggaaagcagcagctgc

SEQ ID NO: 167487 - DNA, 122 bp, Homo sapiens
tgcagccagtaccggaacctggtgctccagagcagaagagctgctccttgacaatcagaccgagcgcgcattcatttatggacaagctttgtgttccacaatggggtcctggggtgggtcgg

SEQ ID NO: 167488 - DNA, 122 bp, Homo sapiens
cctcttgcagcctcaggaggcctcactgaagagctgctttcgagacccggctctccgaaccgtgcccctgattcataccggattccggaagccgctaggcctcatagacgccgaagctggac

SEQ ID NO: 167489 - DNA, 122 bp, Homo sapiens
gcgcgccctcttccgtgggaatggaaacatctgccacacgtgccggaagccaagtggtggcgacaactgcgcgccactccgcggcctaccgcgcagatcctctacgtgtgtcctcgcgagac

SEQ ID NO: 167490 - DNA, 122 bp, Homo sapiens
ggagtcacaagttcaggtgggcctgtggcagggctgcccatggcccctggtgagcatgtgcggccagccgggccatgggggtgaggccggcttggtggcttggattgcctactcctctgcag

SEQ ID NO: 167491 - DNA, 122 bp, Homo sapiens
atcacacaaaaagtgattgttgggggaagttcccaggcctgactgctgtctgtccttattcgtggttaccagtgaaccttgctccaaacactgtctgctactaccacctggcctaagagatg

SEQ ID NO: 167492 - DNA, 122 bp, Homo sapiens
tccaggcagggaggggcggtccctcggctttggaggcggtgcgggggcggagccagggtccgggaggcagtgtgggcggggtctgaccaaggagccggagcggcgaattctaacgccacctt

SEQ ID NO: 167493 - DNA, 122 bp, Homo sapiens
tgcagccgagcatcctccgagcacaatggccgtgcaggcttccccggcacaaagccggcgcgctgcccactcggctgcctccgagaccccccttggagcgcctgcatttttttttcctctaa

SEQ ID NO: 167494 - DNA, 122 bp, Homo sapiens
attgcagcaacaacggaactgcgggggaccacgtggcctaatggataaggcgtctgacttcggatcagaagattgagggttcgaatcccttcgtggttaagtggggttcgttttcgggcatg

SEQ ID NO: 167495 - DNA, 122 bp, Homo sapiens
tagggtttgccttttcccctcttgtacaacagctccactacacaagaaatttgctaaaaccgttcgctgggcactaatatgaaatcacttaaaaggaaacatgccactttcggctaggggac

SEQ ID NO: 167496 - DNA, 122 bp, Homo sapiens
tgcatgctgtggattctgctcttgccacatccgctactcagccctttttgtgcctaaatccgctggagagcaactattagtccctgggggaagtgacaccacccttggaatggaacctggct

SEQ ID NO: 167497 - DNA, 122 bp, Homo sapiens
ccttccttcccgccccctcgcagtgcggtgcagcctcagtggaagctttggcgaacctggcgcgcgctgcggtgcacagagggttaactggagttggcgctgggtggagaggaggagacgcg

SEQ ID NO: 167498 - DNA, 122 bp, Homo sapiens
gtttggggcgcagaaagcgggaatgaaagacaggagctaaagccgaagttttttctctctcgctacttaaaagctgtaagataacgaattgatcagcaggtggcagtgtccgcggaggctcg

SEQ ID NO: 167499 - DNA, 122 bp, Homo sapiens
taaagcgtttcgtcctggagttaactggtttgtccctttcgggctgccgtcctacagatccgccatattgtctactgaaagctgccgctgaagctgccgccgttgcctccgccgccaagagt

SEQ ID NO: 167500 - DNA, 122 bp, Homo sapiens
ccctgcctgcaacaggctgcctgccccgccttccccaacacctcgctccatatgatagagcgtggcagctgggagcaggcccctgcccgtggtgggcccctaaagcaatagcaccgtaggcc

SEQ ID NO: 167501 - DNA, 122 bp, Homo sapiens
cggtcgaggctgcggcgagccatcccagaccatggagacctaacctcgggaatcaggtcccgggaaaaaagcactttccgttctgctcaccaaaaaatcttgtcctagggaggtggagcccg

SEQ ID NO: 167502 - DNA, 122 bp, Homo sapiens
tgcctgccgctgcccgagttcgtggacaacacgcaggtgcccagctactgcctgaatgcacgcggcgagggggccgtgcgcaagatcctcctgtgcctggccaaccagttccccgacatctc

SEQ ID NO: 167503 - DNA, 122 bp, Homo sapiens
catttcatgtaaatggaatcatacactatgtggtctttgtgtctgacttctgtcacttagcgtgatgttttcagagttcatccaagttgcagaatgtatcagtacttcattccttgttactg

SEQ ID NO: 167504 - DNA, 122 bp, Homo sapiens
tctgtttgcattcaggattgtcagctcccaggataatgggatgtgttggttggcagctgacgttcaagaagggaacttgggaaccttaggggcccataataagatgcttggggcaatcttaa

SEQ ID NO: 167505 - DNA, 122 bp, Homo sapiens
ggagcgatgtcatcagtgcaagttctgtcaacccgaggctcaaagccggggcgtgggcctcgtgctgtgcaagcgtctagggcttcgtaggtgtgttttgatgaaggtcacagacgcgcctg

SEQ ID NO: 167506 - DNA, 122 bp, Homo sapiens
tcggagacaaaggcaagtccttgttttctttgttttgctgagcttgtctggggcgggcgccgagttggggtcctattccgtagtggaagaaacggagagaggctcttttgtggcaaatctag

SEQ ID NO: 167507 - DNA, 122 bp, Homo sapiens
acattcccgctagccgcataggagggcgccatctctctgcatccttgtctgcacttgctgcggtccgtcttgttgatgacagccgtcttggtgggtgtgacgtctccctgccgttgcgattt

SEQ ID NO: 167508 - DNA, 122 bp, Homo sapiens
tccttccagactcagccacaccttccagctggttcctcctagggggatctgcagcatctccgttctcatcatagtaattctgtggtttcattctctagtacatctagtacataataggcagc

SEQ ID NO: 167509 - DNA, 122 bp, Homo sapiens
gattttcagattacagatgctcaacctgtatatatgaagcactaagtacagggtctcacacgcagaagaacctacgtaagagtttactaacactttatgctaaacaacttcatgtctaacta

SEQ ID NO: 167510 - DNA, 122 bp, Homo sapiens
tgtcacggcagccgtcaatcgctactctcccttcatgggtgtggaaggatttacctaccccgggtcatgcagagagtccaggcctggccagagcccctatcttggccccttcccaaggaccc

SEQ ID NO: 167511 - DNA, 122 bp, Homo sapiens
atgacctcaagggaactgctacctccaccgctacagtgaacagtgagactgtacctccaccgccgcagtgaacggtgacgctgtacctccaccgccgcagtgaacggtgacgctgtacctcc

SEQ ID NO: 167512 - DNA, 122 bp, Homo sapiens
acgacatgatgatcatgggcaagaagcctgaccccaagtgtgtcttcacctatgtgcagtcgctctacaaccacctgcgacgccacgaactgcgcctgcgcggcaagaatgtctagcctgcc

SEQ ID NO: 167513 - DNA, 122 bp, Homo sapiens
gtagggatgacacagatagcaagtcctagtcagagctgccgctacatttaggagaaacagcggtgtctgcggctcccacccttcggggggcccgtggggggggcggtgtcaggggcatggac

SEQ ID NO: 167514 - DNA, 122 bp, Homo sapiens
ccccggcctccgcctgcacgcccccccacgcccggacgtgccctctccgcgcgggggactcgcctaggtctcctacgtctgcccctgcccggctcccggcggccccagctgtcaccggtaag

SEQ ID NO: 167515 - DNA, 122 bp, Homo sapiens
ggggaacacccaggcggctggggctggctctaggtccccactgctctgccttgcgggggccgctccggcctggtcgccttctccgggcgcatccagggaactcgctcggtcctccttaagcg

SEQ ID NO: 167516 - DNA, 122 bp, Homo sapiens
aggccccagctcttaatacactggcaatcaaatttcaaagtatgtatttggcagtgggaacggacggcagggaacacatttagaccacagtaaccacttaacaagctacaaaaaaaagtaat

SEQ ID NO: 167517 - DNA, 122 bp, Homo sapiens
taaagtgagaataacaaatggtagctaaatcataagattacagtgaagatagaaaatttacgtagagcatttatcacactgcttgaagcatcctaactactcgataaatgcggtcggtgtta

SEQ ID NO: 167518 - DNA, 122 bp, Homo sapiens
tccaaggtcactcttcatcttttagaacatgaccagtaacatggaatgtgagaaagaacgcgatgatcaggagaaatgctcttattttaaatttagtgaaaagagagcccagtccccaacag

SEQ ID NO: 167519 - DNA, 122 bp, Homo sapiens
caccaaggcacagaggaaggattaaacaactgagcgcccggggcaccggccatccgcccgcgtcctcccacggggagcgcaaggcccccgctcccgccccccggccacctcggacgcccagc

SEQ ID NO: 167520 - DNA, 122 bp, Homo sapiens
ttctagaccaagaagacagacccccaaagtaccaaaacaaaaacgtgcaagtccacgctgcgacaaaccacgctcaggtgaacgataaatggggagcagagagaagcctcccacgcaggtgg

SEQ ID NO: 167521 - DNA, 122 bp, Homo sapiens
atggtgaggtcccaatacagccaatggatgcaggacacagcaataaggacaacccaaatgcgtaagggataaatatgtctcattttcctttgttcaagtttgctctcgacattgttccatct

SEQ ID NO: 167522 - DNA, 122 bp, Homo sapiens
cgtcctgccctggagaatgcggggagcggcgcgaggagctaaagaatgggccggcccaggcgggtaggaggtccgctttaggggagcagacaaaggagccactactccctaagcctcacgcc

SEQ ID NO: 167523 - DNA, 122 bp, Homo sapiens
tgggaggctgggaccccgctggccttggctggattggagcagaggagttggagaggagggcggtccaggggaaatatcttggtgactaatgagcgggcaattgaaagctgcagtgtgtcagt

SEQ ID NO: 167524 - DNA, 122 bp, Homo sapiens
acctcggccactgctgacctgggctggcctcccccagccctcccgtggcggagccggcagcgatgctacaggcctaagttattgtttgcataaaaagaatcatgttccctgtgtacatttaa

SEQ ID NO: 167525 - DNA, 122 bp, Homo sapiens
gtcccacagggtcctgtcctcagacagggactccgggcagcagctctgaccttctccccacgctccacacccaccgcctgggtcagctccactgcagtggcccctggaagttccggcttcca

SEQ ID NO: 167526 - DNA, 122 bp, Homo sapiens
accccaagggtggctgagcgtgcggtgaggggacgcgtgtgtggctcttggccctttgcccggcacccactgtacgttcagtctgcacgccggcctggccccacctgttgaagcgtgaagca

SEQ ID NO: 167527 - DNA, 122 bp, Homo sapiens
tttgtcagccctcacccttacctgctaacacccgccgtaatggatgaaagcagggggtgacgataatcactgtctgctgcccagccccgagtgagctgcctgagtctgcacaacagtccgtc

SEQ ID NO: 167528 - DNA, 122 bp, Homo sapiens
cagtcagtagccctcaactgctccttgtctgtaaaatgtggctattaatacctactcctacggttgtcaatggagtgcctagtacagggtgacaagcatgaattcatttgaatccttagaag

SEQ ID NO: 167529 - DNA, 122 bp, Homo sapiens
ccgccgagcgtcgtgtaacccttggagggctgggtttggagcccgcgacccgaggtcgggcggggcggtggactttcccggggaacgccgcctgagggacacccagagcttcggcggagcgg

SEQ ID NO: 167530 - DNA, 122 bp, Homo sapiens
gggcctacaacccgcatacaactgaaacggggcaaagcagactgcgcagtctgcagtcttcgtggcgggccaagcgagcttggagcccgcgggggcggagcggtgagagcggccgccaagag

SEQ ID NO: 167531 - DNA, 122 bp, Homo sapiens
agtgtccatcttttaactgtgcttctgctacttacaagctgttgaacaacatctgtcagacgcatgtaccgagcgatatgaagtgtgcattgtgctcggagagtgaagggcgttaaacgaca

SEQ ID NO: 167532 - DNA, 122 bp, Homo sapiens
gttacagagcaatagctttctgctcatcgggggcaggcaagcagccggagcagccatggacgaaagtcctcggctcttttttgttggatgagggcagaggtatgtgtggcgcaggcagcccc

SEQ ID NO: 167533 - DNA, 122 bp, Homo sapiens
ctctcccctgttcagtccagagtaagtgcacagagcaccgtgtaaagaacgcgacttgcacgtgggaaggcttcagagcgcagggccacggccgccgaaaggctttgctgctgggggctgcg

SEQ ID NO: 167534 - DNA, 122 bp, Homo sapiens
gctcccaacccaaagcagcggcccttccccaaaacacgcgggcgaagtcctcccctgtcccgcctcccacaataaagtctggagcatcagagtcggagggaacccgagtcggacctagccca

SEQ ID NO: 167535 - DNA, 122 bp, Homo sapiens
ttgtgctcactgctctcttgattgtagctggaggtcatgggtgagtttgctctcagattccgagctccaccaacttgtgttctgagctctatgtgtttatttgagcaatagttaggctggac

SEQ ID NO: 167536 - DNA, 122 bp, Homo sapiens
gtgtatttggcaaatgacctaattatcacagagctggttctttctcattgctctacttcccgctaattgcagaactgctggccttctccccctgacaaggaagaaaaacaaggacaggagtg

SEQ ID NO: 167537 - DNA, 122 bp, Homo sapiens
cggggcctccgcagggggtggagctttcccaagatttggcgggccgggctgggctgaaagcgtgattcgggatgggggcggggtttttaggggcggggctaaggcgtgatgggcgtgaccaa

SEQ ID NO: 167538 - DNA, 122 bp, Homo sapiens
ttcctctctgggtttagcacaaggaattcctcccgaggtctccaggagccactagctgtgcgtggcagcagggagacgggggggatgcgggtggcccccggaaaacaaagcaacagcccaga

SEQ ID NO: 167539 - DNA, 122 bp, Homo sapiens
acaccgcttccgtcgctgctgtagtcgcttcctgcggccagcccgggttcaatcagcggccgacaactgtctagggctcagacaccaccagccaatgagggagggcagcgtggagccgcccg

SEQ ID NO: 167540 - DNA, 122 bp, Homo sapiens
attgcctatgtggtccctgacagacaacgtttgcaaccctgctctttaggatctgaccaacgtgattagcacagcacagcagctgagactgaagacagaacaggacggccccacgtggctgc

SEQ ID NO: 167541 - DNA, 122 bp, Homo sapiens
ttccaggattttatataaatggtatcatagtacaggtaatcctttgtgtctggcttctctcgtttagcataacacttctgaaaagcaactggttagatatggctgggtcaatttctggactc

SEQ ID NO: 167542 - DNA, 122 bp, Homo sapiens
tgctcccacccccaggggcaccagagccaacggctgctcccccagcctcggaccttcctgcgcggctcaaccaagcctagaagtgggggcggggaatcttccgccctcctctggcgctcatt

SEQ ID NO: 167543 - DNA, 122 bp, Homo sapiens
caacgttccaccccgcaatcacctgcaccagggactcagagacccggcagcagcatggttcgcaccacagtccccaactcggtctgggccctgggaagtcctcttcacaaagccaatacact

SEQ ID NO: 167544 - DNA, 122 bp, Homo sapiens
cggcggcggccggaagtagccgaagccagcggcggaagtagccgaagcggctggagcgggcggcaaggcgaggcgaaagctgcacagggccctacgcggccgcctcagcatgtcggacttcg

SEQ ID NO: 167545 - DNA, 122 bp, Homo sapiens
ccttactctaccgttactccctctgtgaaaaactctcctgcaaagctgatctacacaaagcgtcctctttctaatgtttatgacttgtatatagaacatgtacaggtcttcttagatgtctc

SEQ ID NO: 167546 - DNA, 122 bp, Homo sapiens
cttgtgtcacggtggcaccgggacctccacccactacatacacacgcgcgcgcgcagccccgtgaaaacctgcgccgtgtgccccagacctgcagcccgcatcccgccgtgtcccccgttcc

SEQ ID NO: 167547 - DNA, 122 bp, Homo sapiens
gacaagtggagcaggcaccctacctggtgtgcaaccttcagaaaccaggtccccgggggtcgaaactagtgccccacccacagatgaccaaggacgtagccacaaacgtctcaggctccatc

SEQ ID NO: 167548 - DNA, 122 bp, Homo sapiens
aatggtgagtgtgtggggcaggtcctcccgaggcgactggggaggcctcatcagaaccgacgggaaatggcggcggcgggaccgagtctgtgaagagagtcccctctgccgccgctcagccc

SEQ ID NO: 167549 - DNA, 122 bp, Homo sapiens
ttggatccccatggattcaatgggagctcgcatgctgtgaagaccgcggtgcattttaaacggcaccagcaaggaggctacactgtgtatcccgtgtccccatttctaccgaagagcggcgg

SEQ ID NO: 167550 - DNA, 122 bp, Homo sapiens
gaccggtgatgtgcaatcaatgctctgatgtggccagtgctgcaggtgcaaaatacacaccggatttcacacacttggaactggaacaaggatgaagaatatcccaataatttttttttttt

SEQ ID NO: 167551 - DNA, 122 bp, Homo sapiens
ggcggagcaaagtcgccgggggtgtggggtgttccacgctatgttgggagtgttcgctttcgaggtacatgactacgttctaaattttttttttttgagacagtttcattcttgttgcccag

SEQ ID NO: 167552 - DNA, 122 bp, Homo sapiens
accacgtggggcagagaacgcgagcagtacctgcaggacccacagccggtcgggctctggcgccagcctcgacggcggccccgccatctccgcccggctgcccgcggcctcacctcctccgg

SEQ ID NO: 167553 - DNA, 122 bp, Homo sapiens
gtgcttccggcgcgcctgcgcagttaaaagaacggtggtgcgcaggctctaacactagtgcgccagccggctgcgagaggcggggcctagctttgggggcggggctggagcgccctctgcag

SEQ ID NO: 167554 - DNA, 122 bp, Homo sapiens
tcaccaagcaggtgctgaaaggctcccggagctccgaggtgagctggaagtggactctcccggcctgatagtccggggagtcgcagtctttcgttgctgtgggaaggaggtcgcgttgcatc

SEQ ID NO: 167555 - DNA, 122 bp, Homo sapiens
gagagccacgcggacgctcggtgagagcccgggaccttcctagagagtcacgtggacgctcggtgagagcctgggctcttcctagagagtgagaacaccaccactgaggctgctcctcagga

SEQ ID NO: 167556 - DNA, 122 bp, Homo sapiens
tctttttgtgactctcaaggaaagtcggttttctgagctcttactggcttagtagcgtggcgttcaacgcagagcattctaggtaatgtagttttcatagatcccgaggtgggtgccgggga

SEQ ID NO: 167557 - DNA, 122 bp, Homo sapiens
tttacaacagggctttacctctaactcagaattgcacgtaagaaggctatttaaaaagtacgataaaaatttgcacaaatcagacttaagaattgagtcagtatgctgtacactttctacaa

SEQ ID NO: 167558 - DNA, 122 bp, Homo sapiens
ctcagctatgatgttcactggcccatcactcacctcctgcaggtgcggccgatcaggggccgggattggggacctctatcttagagggttttaggcgaatcctaaatagtgtgtctccacta

SEQ ID NO: 167559 - DNA, 122 bp, Homo sapiens
gccgggatgggagtcccaagcggggactgagtggggtcgcgttgtgtgctctttccacttcgccccacaccccactccttcaagttcccaaaagttgcttttccgcaccacccttctaaaga

SEQ ID NO: 167560 - DNA, 122 bp, Homo sapiens
ctgctcagggccagccaccgcattccgggtggatggagacagccccgagagccggctgaccgtgccgggcctcagcgagaacgtgccctacaagttcaaggtgcaggccaggaccactgagg

SEQ ID NO: 167561 - DNA, 122 bp, Homo sapiens
tcagcccccccgtgacgcccgcctctgccctctccacagacctcacgtggtgggcagtggcggcaacgacaaagaaaaggaagaatttcgggaggccaagccccgctccctccgcttcacgt

SEQ ID NO: 167562 - DNA, 122 bp, Homo sapiens
caactgagctctggcaaaagcaaggcgactcagtgtctcccaagtttgccaggtgaacaccgaaggatgacagcacatcaccttgtcggtggcgagtatgtgacttctgttcccttgtccct

SEQ ID NO: 167563 - DNA, 122 bp, Homo sapiens
aaaaacacatctgaattgggaaagttgtacagctggaggtagggtaggtggctgctgagacgtagggcagttcccaggtagggaacaaaacatggttggggatccatatgccactggtaaat

SEQ ID NO: 167564 - DNA, 122 bp, Homo sapiens
agccttagaatctatgaagcaggcagaagccccatttcacacagagacacagaggcttaacgaggtgaaataatttgtccaaagcggctgaactagtaagctgtagggttgaggttgaaatc

SEQ ID NO: 167565 - DNA, 122 bp, Homo sapiens
gctagtggggcgccggggccatctgggttgagagagcggcgattgcggccgctgctgaggcggagactccccgccgccgcttcctccacccccagtccgccggcctcgcggcgctgagggcg

SEQ ID NO: 167566 - DNA, 122 bp, Homo sapiens
gcccccgcctcctccgcccccatgaacccccttcccacaagggggttcccactgcgcacgcgcagtgtttaacggccggtcaggaacccaacaattagtcccttctcgtccgagaggaaact

SEQ ID NO: 167567 - DNA, 122 bp, Homo sapiens
cgtctcggcaggcggccggaacgtgaacgtacgcggctgcggctcccgagacctgtgcagcgccctggactggacccacgggctctctgtgctcccaagacactggctgtcgagccactgca

SEQ ID NO: 167568 - DNA, 122 bp, Homo sapiens
ttaacaacttccttatgccaggatgttgctcagaagggattttttcaacttaggtgcaggcgcaataaatcaacctaaatgtcctaaacttgacccagcttattagaatatcgtacacacga

SEQ ID NO: 167569 - DNA, 122 bp, Homo sapiens
tgggggcgccattcgacttcgctcctacggaaatggggcttcgatgtctttctgcgcttgcgcggcacggaaactcacttccggccctgcgcactcagggtctgaggcagctagtagccggg

SEQ ID NO: 167570 - DNA, 122 bp, Homo sapiens
cttctgcaccgtgtgcttaggaacactgagtgtttgagacactgcacccccgtccacctccgaggagcagggcacaggcaggaagggctggggacatccccccagggccttccgagccaccc

SEQ ID NO: 167571 - DNA, 122 bp, Homo sapiens
atgcagaagtggcaaggccatggcctccggagcggcgggctctgactttttaggggaaatcgaggttcccaaggggtgtggtcagaactttggggcggcccagagggtacgaggtgggtggg

SEQ ID NO: 167572 - DNA, 122 bp, Homo sapiens
gctgcggccggggaaaccacccacacagtctgagaggacagctgattctgagcggaccgacggaaggagattcgcagagccccttcccggaagtgactgttgtcgcggcaactgccaaaaca

SEQ ID NO: 167573 - DNA, 122 bp, Homo sapiens
aagctgggctgaatttccccgagggtccagaagagagccacgggctggtgtgtcaggcagcggagctgacactcccagaaagcaagatcttcgaactacagggtgcgcgcaggctctcgctt

SEQ ID NO: 167574 - DNA, 122 bp, Homo sapiens
tgtcatgaaaaccagacaaatctgcaatggctagcagaagaaggatggccctggaggcctcgctcacagtcagagagacctcactgacagaactgagaaatgatggccctccctcaggtgta

SEQ ID NO: 167575 - DNA, 122 bp, Homo sapiens
gagtgtagcaagggaaggagatcagctacagaagagattagagaagtcaacagggtttagcgatgcaacatcccttaggctatgaaaagagatcaatgtttgtagcaggattttattttgag

SEQ ID NO: 167576 - DNA, 122 bp, Homo sapiens
aaccgcctggaagggtgggtccgcccgacagaagcaggtgcctgggcgacactcgctggccgggtgtggccgcctgcctttaagctgggggtctgcacgtacaattcctggcggggcacctt

SEQ ID NO: 167577 - DNA, 122 bp, Homo sapiens
caagcctcgattttaccaactggaaggggccttagagcccaagggaaacgtgcgtgtgttcgtgctcacacagttgtgtcagtgcgattgtgagcatggctgggggtgcgcgtgtgtgctca

SEQ ID NO: 167578 - DNA, 122 bp, Homo sapiens
ccatatgtctacactgcattcttgctcagctggggctttgcagaccaaaatctatcctgacggttgacctgaaatacagacaatttcccacatcagtgaactgctggagcatgtttttttaa

SEQ ID NO: 167579 - DNA, 122 bp, Homo sapiens
agacgatcagtcaggcaacctgtattgacagtggcctctgctgctacgatgacagctgtgcgcgagcgcccccagattatctgtgtgtagggcggaacagggtgcccgaggagtgtccaccc

SEQ ID NO: 167580 - DNA, 122 bp, Homo sapiens
tttgggctcagcactgatttggaagctaaaacgttttgagataaatacaaaatagagtcccgtcccaaatgacacaggcctttttaatagcaacgaaggtaaaataaagcaggacagcacgt

SEQ ID NO: 167581 - DNA, 122 bp, Homo sapiens
cgccttttataaacctctaatttattttgtcgaatttttattatttgttttcccgccaagcggaaaaggttttattttgtaattattgtgatttcccgtggccccagcctggcccagctccc

SEQ ID NO: 167582 - DNA, 122 bp, Homo sapiens
agtgtggaaaatctggtaactcagagaacgctgggtagagtactcaaaaggtttttgcctcggtagtggggaaaatactagccctagactaattgctgccctggtcctgtctaacaaagctt

SEQ ID NO: 167583 - DNA, 122 bp, Homo sapiens
acctggtgtcacagcactggcctccagcgcatccagccgcgggccccttttgctcaataacggtttctatggagacatctgtgatgccaccactgctcccaggagcccacaggacctggagc

SEQ ID NO: 167584 - DNA, 122 bp, Homo sapiens
ggtgattcagacaacagtaatgcagtgatccagggcccagggcaagctggctgtaaggaacgggtgcggggcctcacaggtgctgccggcctggacagggaagacaagggcctgggatcagc

SEQ ID NO: 167585 - DNA, 122 bp, Homo sapiens
cactcaaaataccagaaattatcaaggaagttgccagttggtctcttgggttcttcctcccgacaggtatacacacctattgtaaagatgaacacattaggctgtgagaaaccaatactgtt

SEQ ID NO: 167586 - DNA, 122 bp, Homo sapiens
tacctctctgtgtgccaacgtttcgcctgtgtctgtgtctgctgcgtatgtaaatacgggcgagcctctctgtgggcaaagccataggtgtgcatggtccttgttcccataggcgacatcgg

SEQ ID NO: 167587 - DNA, 122 bp, Homo sapiens
gagccttttaacccttaattaggaccatgtttcttctaaaagtcaaccacattagtcaaccggagacaaaattcactttgcaattgaaaggctgccttctttctttcaacagtagccaccat

SEQ ID NO: 167588 - DNA, 122 bp, Homo sapiens
cggagcggaacttccggcgtcctccctgtggcgggcactttggcttgtgtcagttccatccgcgggtgccggatctggacctaggtgctgacagcgagaaggcgcgaggagagtcgttttct

SEQ ID NO: 167589 - DNA, 122 bp, Homo sapiens
cgctgcgactgtgcccgcaggttgaccttgccaagccctccaggtgatgcgcggccatgccgggtgaggagaactgaggctgagatcgccacactgagggctccctaaagccgaggtggagg

SEQ ID NO: 167590 - DNA, 122 bp, Homo sapiens
gaggtatggcagcgagggaaagacaagaaggaggtgagatgggagaagagggcgaacggccgttccaggatttcactgtgaaatctgagggtggtcggtcacagtccacgtattcaccaagc

SEQ ID NO: 167591 - DNA, 122 bp, Homo sapiens
aggcaaacgggtgaggtgggactgggggcgagtgctgaagaggaataagtaggattgaaacgttgcctgaggaatacttgtgacaaaacccagagaaggtccctgaagattagaactagaag

SEQ ID NO: 167592 - DNA, 122 bp, Homo sapiens
ggctgcaggtgcggcagccactctggggacccagtgagaatggggtcgcctggctctgcgcgaacccctcacgtgggtgcagctcctgagccgccgagggaggcggtggtaatgtcgcccag

SEQ ID NO: 167593 - DNA, 122 bp, Homo sapiens
acttccggactacaagcccctgaatgcaatgggcagcgaaacgcggccgaagagcaacttcggatgtacggtttcggcaacactgatcaacgtgtcttaaagtcagtggctgttgttactac

SEQ ID NO: 167594 - DNA, 122 bp, Homo sapiens
ggagaggacgtgggcagctcgtgaacccggggtcccctcctggagaggacgtgggcagctcgtgaacccggggtcccttcctggagaggacgtgggcagctcgtgaacccggggtcccttcc

SEQ ID NO: 167595 - DNA, 122 bp, Homo sapiens
tgcacacctcgacccctctggactatgaggccacccgggagttcaacgtggtcatcgtggcggtggactcaggcagccccagcctctcgagcaacaactccctgattgtcaaggtgggagac

SEQ ID NO: 167596 - DNA, 122 bp, Homo sapiens
caacgggcttcgagtgttcgggagataatgcacacttcgcagtggatcttctcggggccccgagcgttgcccgcccattaggtggcgccggtcccctcgaacaggtcgctcaacaactcccg

SEQ ID NO: 167597 - DNA, 122 bp, Homo sapiens
ttgaacccacagggcttttggcacctttcgccccaaaaattctacttccagaaagtggggcggcaaggataggagctgttttgcagagattggtaatttcagtacaacacgtagtggaaaaa

SEQ ID NO: 167598 - DNA, 122 bp, Homo sapiens
tctgtcccttccccatttgaaaccattcaatggattcttagtgctctttgaataaatacccgcctccttctgtggcctacaaagctgccttcactggccctgctccccactcttcccttgtc

SEQ ID NO: 167599 - DNA, 122 bp, Homo sapiens
gggctcagactggttgaagacaagtttccccacaggcatgtcttatgcaaaagaataggacgcgctgagctcttcttggctgagttgctttatttcttttttttctttttgagacggagtct

SEQ ID NO: 167600 - DNA, 122 bp, Homo sapiens
ctgttgctgcgattgccccggatatgccagaggaacctgatgtccctgctgatggccgttcggccatcgctgccggaaagtgggctcctctctgtgctgcagattgcccagcaggacctagc

SEQ ID NO: 167601 - DNA, 122 bp, Homo sapiens
atgctgcctgccaacaggggaaccttggctctcctctgcaggccccttatccttctggggcgagactggcttacttacacagaggtctcagagcagagttccaagaaggtgaaagtggaagt

SEQ ID NO: 167602 - DNA, 122 bp, Homo sapiens
atccaataacaatataatttataacattccctttaaaattctgttcaataatatatgactcgtagactaaattaaatgcagtccttagaaaacaatatacatagctctccccatggacactg

SEQ ID NO: 167603 - DNA, 122 bp, Homo sapiens
cagagatgggatacgcccctttaccagagacagtgcattccgtccactgggagtgacacacggccaagccaggcttcaaagagagaggttcaccgtattccagtagtgactactgggattta

SEQ ID NO: 167604 - DNA, 122 bp, Homo sapiens
gtgagccgtcccagggagggcagccaagctgtgaagcctgagaaactgacctgtgtgccacgagcttgtggtctgctgcccggtggaggaagtgcaggtgcgcccaggctcctcattccgtt

SEQ ID NO: 167605 - DNA, 122 bp, Homo sapiens
gaactgcaggcacttctgggacgcaggcgggactgccctgcgcagtctcctctcttcctccggaggtttaaatctctgcccaatcgtcttgcccctacatctggcgccccgtcgcccaggga

SEQ ID NO: 167606 - DNA, 122 bp, Homo sapiens
atacgtatgtcaggctgcagggggtggccgggcctggcctcttaggagcccagggacagccgggcagggccaggcctccaggatcaaatacctccatgggagcctcacctcgatcttgtctg

SEQ ID NO: 167607 - DNA, 122 bp, Homo sapiens
gcttcccaccctcctgccccagaggcggctccccgcctcttccaaggagtcgtcagaaggcggccacctgcccctggggtaagagtccccctccagacgtctgggggagcaactcgtccccc

SEQ ID NO: 167608 - DNA, 122 bp, Homo sapiens
tgacatcatgtctcctagcaaccgcgggaagggggcgtggccggaagcctggacgcctggcgccccagatctgggcctgggtgaaatgcctctcaatcactggcgcgcacggagcagctgta

SEQ ID NO: 167609 - DNA, 122 bp, Homo sapiens
acgcagaagaaaaccaaggccggggaggggccgtcacttgcccagcgtcgtgctagatctcgggcctccgcctctggctgtgtagtgctccccactaagcccctcgtccccggagtgccacc

SEQ ID NO: 167610 - DNA, 122 bp, Homo sapiens
gacttttcttttttctttcttctctttttttctctttttctttttttcttttttttgagacggagtctcgctctgttgcccaggctagagtgcagtggcacgatctcgactcactgcaacct

SEQ ID NO: 167611 - DNA, 122 bp, Homo sapiens
tgtccctggtcctgcaggacagcatggcagcgattgaccgattgaccattaggtgagctgcgcctctttctctttcggcacaaatgtgggaagaaagggtttatttgtcggtgaaatccctt

SEQ ID NO: 167612 - DNA, 122 bp, Homo sapiens
tcagttgctgtcagcagcagggcaggccactcaaagcagctcacaggcaccaaagactcccgtgctgcaggggagcccagcggcctggggacctggagtggctgatccaccaggggtcacag

SEQ ID NO: 167613 - DNA, 122 bp, Homo sapiens
tgaaagctgaggatcaggagggcttatgcccacagccgctgggccccaggatgctggacacgttcacccatgacgcgggatgggttcacttctttgttaataaatccatcacacgaaaacag

SEQ ID NO: 167614 - DNA, 122 bp, Homo sapiens
tcctccttttctagtttggttgtggagatagctgtccagctcacatcatcatccacaatccgcattctaaatgagaataagaagatcaaaaagagtcattctaggataccagcataaaaaca

SEQ ID NO: 167615 - DNA, 122 bp, Homo sapiens
acttctgttggaaactaagatgttttcttcttgtcaagttgaactgatttaagtcaaaatcgatttttgcgagcctggtggactccatcgggtcttgccagtgaggctgaagccagttaagg

SEQ ID NO: 167616 - DNA, 122 bp, Homo sapiens
ccgcgttcgccgccctcctcgcccgtcttcttcgccagcccgtccccaactttccgcagacgccttcggcttctccgcagctgccaggatttgggccgccaggcttgggctggggctgggta

SEQ ID NO: 167617 - DNA, 122 bp, Homo sapiens
caggtcctgagccctgccctgtggggaggcagctaaggcccggggagaaatccagcgcagcgccagtgggccggcactactgggcgacccagtacaccctccgcagccgctggcccaggtgc

SEQ ID NO: 167618 - DNA, 122 bp, Homo sapiens
agccaccgtgcccggcctggctggttgttttttgtatatcaattctgtcaggcggacgcgcgtgaaaaattccaatggaagctgtgaccacacacacgcctgcgcagtacaacttacatagc

SEQ ID NO: 167619 - DNA, 122 bp, Homo sapiens
ttttctgagagccatggaaggatatgtggctttagattcaagttggaattagaagttaggcgtagaagtgtcagctttgcaaatgtggacttcagtcctatatttcaaaaacacgcagagta

SEQ ID NO: 167620 - DNA, 122 bp, Homo sapiens
acgccctcccgactctggcctgagagctgtccggcctcgcctctaagagagcagtcaccacgggccaagcccccaaccctgacagtcagagtgcctgcagggccgccgcctcggcggctcgg

SEQ ID NO: 167621 - DNA, 122 bp, Homo sapiens
cccttcagtactcggcataccggaaggaggattcctgctcccttctctcctcctagaccccgaggcttggagcttactctccagatgagactaaaaagccctaaattaatccccctatagcg

SEQ ID NO: 167622 - DNA, 122 bp, Homo sapiens
gtggccgcctggcccacctcccaccaacttcagcagcttgggtgagcaatcttgggtgggcgtgtggaccctctgcacccttctccctgggcctccccctcggctagggtgggaccctcctg

SEQ ID NO: 167623 - DNA, 122 bp, Homo sapiens
cccgactccttcccgcgggccgttcgccccctccccccgccagagctctccggagctccccggagcccctccacggggtttagccccagtgggacccctccgggcccagtcgccccactcct

SEQ ID NO: 167624 - DNA, 122 bp, Homo sapiens
agtgaaaagaacaatgcttccaaaacggtcacgtcctcgctttttacacaagtgcgcgtgcgcactgggcgctaggcctctgacgtcaccaagtgcatccgcccctacaagttagcaaccga

SEQ ID NO: 167625 - DNA, 122 bp, Homo sapiens
aacgctgctgatttcttatcaaatgtaaaaccggcccggctctttcttaaatggttaccacgagcatgaaattgacattgtgaatcacatgtgacaccggcttgtctgcgccgtaattgatc

SEQ ID NO: 167626 - DNA, 122 bp, Homo sapiens
ccgcaacgacataaacttgaaagtgaccgctgtcccggagctccctgctcccaagggacccgtcgcgttgcagagttgtccggtcgggcctctggggcgggcccggatcctggaccagggcc

SEQ ID NO: 167627 - DNA, 122 bp, Homo sapiens
gcgccgggaaagtctttccttctccccggccgggcggagagggaagccccggcttcggggcggggggaggctactcacccggaaccccagaccccagtccccgaccagacacaatggagccg

SEQ ID NO: 167628 - DNA, 122 bp, Homo sapiens
agagtgtagcaccaaaattatttcaagtatattaatttttattccccaactaaattatcacgggctccttgagggcagagcccttattactgtacttttgttggactcccccatgactggta

SEQ ID NO: 167629 - DNA, 122 bp, Homo sapiens
gcgggagagggcgagcatgaactggcccggaggacccagctcgagccgccaggacacagacgtacaggcctcctcgggagggagcgcctccccaccactgagccatcctcagcagcgtccgc

SEQ ID NO: 167630 - DNA, 122 bp, Homo sapiens
gggttagtatgactctggagttcaagtgcagggcagaggggtggggcttcgatgtgtggccggtgaaagccacacaaggtgctagaagcacagaagtgtaccggctttggttaagctttgtg

SEQ ID NO: 167631 - DNA, 122 bp, Homo sapiens
ctcacacgcctcacagtgccacacgtctgcacgcctctgcacacgtcacgtgcctctatacgcctcacacgcctcacagtgccacacgtctgcgtccccacagccatagtggccacttcatg

SEQ ID NO: 167632 - DNA, 122 bp, Homo sapiens
caagaaacttacaatcatggcgaaggcacctcctcagagggtggcaggagagagaatgagcgctagcaggggaaatgtgtcaggcacttataaaaccatcaggtctcgtgagaactcattca

SEQ ID NO: 167633 - DNA, 122 bp, Homo sapiens
ggtatctcgaaggcgggtaaagctgcaagggaaggaagtaagggcgagcccgtcggactacgaagcgggacggaaactacaattcccagcaggccttgggcctcagtgcggccgcgaagcag

SEQ ID NO: 167634 - DNA, 122 bp, Homo sapiens
cccaggttcgcccttccacacacggaataagctgttggactggctgcctcacctaggacccgagttgcgccagagaaaatcgcggatgctgctttcccgcgggctgcagtgtctgtcacttt

SEQ ID NO: 167635 - DNA, 122 bp, Homo sapiens
tgcctccatcactaactacgccgctcccagcctccctccccgctccccgccactcgctcacgctctcacactcgctggctctcacgcccgcccgcccgcccgccgctcgcgccccgcaccgt

SEQ ID NO: 167636 - DNA, 122 bp, Homo sapiens
tcactcgccccaaagatgaggagtatccggaaagaggagagaggccattgggtagctgggcgtggaatggagcagcggtagtccacacagtgatggggctgtatgctcctgagctgaggatc

SEQ ID NO: 167637 - DNA, 122 bp, Homo sapiens
ttagcaccccggccagtggctgcggagggtatactgggtcccccagcagtgccggcccaccggctctgcgctcgatttctgctgggccttggctgccttcccacggggcagggctcgggacc

SEQ ID NO: 167638 - DNA, 122 bp, Homo sapiens
atacaaatgcagaaatactgtatatatttgttttttcaattctgtcactggcacaatatccgttatctttgctgctaagtcattggtgatgcaaaacagcagtaggtcagcagcccaagagc

SEQ ID NO: 167639 - DNA, 122 bp, Homo sapiens
attttgagagtgacttaaagggtttcttccatgcataaagcattcaaccctcacaaaacacgtttagtaacagtatcctcactttacagaagaggggcttgggacctagactaagtgacttg

SEQ ID NO: 167640 - DNA, 122 bp, Homo sapiens
tggagacaaacttggtgtctcaagttcagggcttcgaaagtcccgaatatttgtttgtcccgagagaagagttttgactttgaagaggtccaggtgggactcgctgggggtggggtgctccg

SEQ ID NO: 167641 - DNA, 122 bp, Homo sapiens
gcgaggggcggggagcgggaggcggggtcggacctgcacgccccgcccccggactcctggcggccgctgatccggggccttcccattggtcacctctcgtggcgaactcggattgggccata

SEQ ID NO: 167642 - DNA, 122 bp, Homo sapiens
gcacacacgaatgtggatccgctcgatgggaacctgaccccctttggtgcaactagggcgcgggcatcattaggacgctttttactgacagggcttcggtttgggaggaggagttacaggct

SEQ ID NO: 167643 - DNA, 122 bp, Homo sapiens
cccggtgagtgcttgccctccctggttacctcgccagtctccggatccccgcgcagcacgcgcagggcccgcgaggcaaatccaatgtcagaacctcaagtaagcttgagtcccctgaaagc

SEQ ID NO: 167644 - DNA, 122 bp, Homo sapiens
ggagaaggaccttcggagcacccgtgtgctgtgaatacagggcctcagctctgctaggggcggcgtggggaagacatagggcgggtgtgagtcagccacttcggctaagcctggaacagccc

SEQ ID NO: 167645 - DNA, 122 bp, Homo sapiens
agaaccaggcccgcctcggggtcccctgggcaatgtagtaacgtgaaggtctccgagtcccgctagcactcccggggcgtgggggtcccaagtgggactggaaccaccgcgaaagaggcggg

SEQ ID NO: 167646 - DNA, 122 bp, Homo sapiens
gaatcttcaagatctgagttggctcatgcttcttcagtttcaccttctcactccccagctcgaatcagtactacagatatttccctgaattcagtgtgtctcttgtgctcttatgtacacat

SEQ ID NO: 167647 - DNA, 122 bp, Homo sapiens
gctctgtggtagtacctggtggtcacagatgaatacgacacaggcatccagtggagaagacggaaggggagggatcctacctttgtccctgacaaagagcttcagggagggaaggaggggaa

SEQ ID NO: 167648 - DNA, 122 bp, Homo sapiens
atatgcattcctctcaggtgagccaagggatgccctctaggcctgtctttgtcaaggtaccggtgaagataagctgttagtttacattgtcaaggtgaaatagaacagcgttctgttttagg

SEQ ID NO: 167649 - DNA, 122 bp, Homo sapiens
atgaggtcacagaatgttgaagatgaaatgaaagtggctcctgagtcacaaagtcacaggcgggtggggatcctttcaacagggctcccagcaatagagcagtcccactctcccagatgagc

SEQ ID NO: 167650 - DNA, 122 bp, Homo sapiens
ttcctgcgcccagggtcggcgggcagagttcctgggtccagcttggcgctgagcagcccccggccgcagagcagctcccgccggtcgggagacgccccctggcccccgcccccgcgtggccg

SEQ ID NO: 167651 - DNA, 122 bp, Homo sapiens
ggcggcaggcctgctccaaggtccagagagcttgctggtctttgcagcgtgcacacacagcgcgcgaggaaggcgccacatactgagcccgggactcgggatgagcccaaggccctgagagc

SEQ ID NO: 167652 - DNA, 122 bp, Homo sapiens
aacccaggtaacgggctgggcgggggcggcgggcgggtcggggaggcccgaggcaggtggcgctgagagcaggaccccgcgaggctccgcgccccgcctgcattcggggagccgcggcagga

SEQ ID NO: 167653 - DNA, 122 bp, Homo sapiens
ccagacaaaccgtagatctttcagaggtacagcgactctcctggttccctaagatagtctcgacttttcctttccctttgcggccctctcacttgactactgcagccaaccatacccctgat

SEQ ID NO: 167654 - DNA, 122 bp, Homo sapiens
gaacttctacggaaattccaccaggaggcagcagaagagcgggtttctcccacctccccccggacgccggagacaccgcggagcctgatgtccctcagagctttaatcttcccctcagtcgc

SEQ ID NO: 167655 - DNA, 122 bp, Homo sapiens
cggcttcctctctctttagccggcctctctctctccgccctctccctccgtctctttctccgagcacactgattagacagacgccagacctccgctctctgcttgtctctcactgggggggt

SEQ ID NO: 167656 - DNA, 122 bp, Homo sapiens
gttgttttgttttgttttgtttttgagatggggtctggctctgtcacccaggctggagtgcggtggcacaataatagctcactgtagcctcaaattccagggttcaaatgaacctcctgagt

SEQ ID NO: 167657 - DNA, 122 bp, Homo sapiens
ggagcgggaggggcggggtcccggctgacaagccagcatagggcattcggtggccagagccgagggtcctcccacacgtgctcacccacccgcagcctaggcaggctctgcatgctatgcca

SEQ ID NO: 167658 - DNA, 122 bp, Homo sapiens
tgctggagcccgaaaccggcgcagaggacggacagacagacaggcagggacacagaggcacgacttacgtgtccaaagaaaagaaaaggcagcaggaaggtgaggccccgccacatccagga

SEQ ID NO: 167659 - DNA, 122 bp, Homo sapiens
gaagacaatgggaagcccccgtcctccgccccgtcccggcccagacccccgcggaggaagcggagagagtccacctcggcagaagaggacatcattgatggatttgccatgaccagctttgt

SEQ ID NO: 167660 - DNA, 122 bp, Homo sapiens
agggttgtgctgaggaatacatgtgtatgtaagtttatttgcaaagcacttagaacagggcgcacggtccttgttgctgttattattattggctattattgcgcaaaggggaagggaggcgg

SEQ ID NO: 167661 - DNA, 122 bp, Homo sapiens
cttccattgccctcccttctgcaaatcacagtctgtatttctccttcttgcaaaaggctgcgctccagggataaattctttttatttcccttttttgttttttttttttttttaacagaaag

SEQ ID NO: 167662 - DNA, 122 bp, Homo sapiens
ccaccctttcggagccccttggaagctgccctacaaggcttgctgtctgcctctggtgcccggcacgtggacggaggcctcctgtacccctgaccgggtgctcctggagggcacggcctggg

SEQ ID NO: 167663 - DNA, 122 bp, Homo sapiens
ggcttcactttgatgttctccaagttcagagcgggccaggcctcctctgctggcgttacacgcttgtttatttttgtcactgtgtaggtttttgtgatttctccctcccaagggggacagct

SEQ ID NO: 167664 - DNA, 122 bp, Homo sapiens
gcaggagaactgcttgaccctggaggcagaggttgcagaggttgcagtgagccgagagagcgcgcagcctctccgaactggacgcacagggaggactgatagtccctggagaagcgagtgaa

SEQ ID NO: 167665 - DNA, 122 bp, Homo sapiens
ggagcggtgcagaccaggatgcgagctcagatgagatgttccctaggagaagcccctcgccgatggggaagaatggccgggaagggattgtaggctgagggccttctgtgggcagagccgct

SEQ ID NO: 167666 - DNA, 122 bp, Homo sapiens
tcccactgcgcacgcgcagtgtttaacggccggtcaggaacccaacaattagtcccttctcgtccgagaggaaactctgtgagaagatgggaccgtgagcactctctttaacaaggacattt

SEQ ID NO: 167667 - DNA, 122 bp, Homo sapiens
aagaccagcgtctcatttgtgggccctggcgcgtacagacgttccgggcggttgaaagagcgctggtattcaaacgtggtcccagcgaaggggaactccccaggccagtcgatgctccagcc

SEQ ID NO: 167668 - DNA, 122 bp, Homo sapiens
ctaaataagctcaggaaacatgattctcaacatcctcctcagatgcacccagagagaagccgcctctcttctgctcacacctgagagctctcctgtccacctgcgcccttccccagccccag

SEQ ID NO: 167669 - DNA, 122 bp, Homo sapiens
atcaagtccaatttttctccttttacttcttgtctatcctcctcactccttgctcagccccgcccgcttttctaggcccgcccctccagggccccaccctcaggccgctcctccagtctagg

SEQ ID NO: 167670 - DNA, 122 bp, Homo sapiens
gtgcccaggggccctgtagtcttacctggagcatctccatccttggtgcatcccctgcctcgtgtatctggctatatacctcggggttgtgggggcggcaaggccaccaggaggtgatagga

SEQ ID NO: 167671 - DNA, 122 bp, Homo sapiens
agttgacgatgttgttgtcctgggtgtagccctttccgtctgggcagaggctgtggaactcggctgcaggggcagggcggccgtggggagggaagaggcaggactgagcgcgcgcgtgggct

SEQ ID NO: 167672 - DNA, 122 bp, Homo sapiens
cgccagtcgcattcgctttcgcttttgctttggcccccgagggctcggagaggtgcaaagcggtgacagatccgtgactcagcgtccccacccctgctggggaaggagccccgccggccgcc

SEQ ID NO: 167673 - DNA, 122 bp, Homo sapiens
tataaggaccccagggactcctctccccacgcggccgggccgcccgcccggcccccagcccggagagctgccaccgaccccctcaacgtcccaagccccagctctgtcgcccgcgttccttc

SEQ ID NO: 167674 - DNA, 122 bp, Homo sapiens
tttcctaaagattcacttcttatcctagtaccaatgtacaggaactaatcaagtgcagaacgtgatacagcactgaatacagtttatccccaaactgagaggtgggaatgagggcgatttag

SEQ ID NO: 167675 - DNA, 122 bp, Homo sapiens
ggggcagccggggggcagggagcccagcgaggggcgcgcgtgggcgcggccatgggactgcgccggatccggtgacagcagggagccaagcggcccgggccctgagcgcgtcttctccgggg

SEQ ID NO: 167676 - DNA, 122 bp, Homo sapiens
ccacttttctttaaatgtcctttgaagctaacaggcggatcaccttccctcccagaagctcggggctgcctgcttggggatttgcccatgtattttgtctgtaatgcataatatatatgcgt

SEQ ID NO: 167677 - DNA, 122 bp, Homo sapiens
aagccacaggaaagctgtctcccacagtcccggaggccggagtctgaggtgcaggcgtggcggtgccacaaggccgctcaggctccggggaagatgcttttggcccttccagctgcaggtgg

SEQ ID NO: 167678 - DNA, 122 bp, Homo sapiens
gagaagagggagaggaaaggctaaaaaggcaagtggagtgttgggtaataaaagatccaccgccacctccagcacacacaggcaggcaccctccagggccacaggtcgccttttatctgtaa

SEQ ID NO: 167679 - DNA, 122 bp, Homo sapiens
cgcggtctcctcgacgatcacgcccgaggtcccgcccacggggagcgaccgccgctggtgcggaaaggagcccccggaacccgcccgcccgccagcccggcccctcctaactttcgcccgaa

SEQ ID NO: 167680 - DNA, 122 bp, Homo sapiens
cggaaggctgtgcttcgcggaggcctgcgtggtggtgcctgcccggagcgtggctctgagcgaccactggagaggctgatgcatgggtctaggtgagaacggtgcattagcgatggcgttga

SEQ ID NO: 167681 - DNA, 122 bp, Homo sapiens
cctgcaggtttgggtagcatggcccaggagggtgccccgggcagccccaggatggggagccggcacctctcgaccctctgaccccgacagcgacccctaagaacctctgcgccctggccagg

SEQ ID NO: 167682 - DNA, 122 bp, Homo sapiens
cgagttggcgttaacaatttatggcgtccgccagcgctcgctttccgcacgtggcctctgcggagggtcagcccatcttattaaatagtggattctattagaccctgatacccgaggctaat

SEQ ID NO: 167683 - DNA, 122 bp, Homo sapiens
agtgtattggattgttgagagcgattttaattctcattctgtacctgcagatgccgcggccgccgcgcccggcctcctcctccctcctgcccactgcgcggggcggacgccggcccggccgg

SEQ ID NO: 167684 - DNA, 122 bp, Homo sapiens
cctccctgcttcctctcagggcttttcctgaggaaaccaggccggaggggcgggctgccacgaggcacctccctgagagggagggggtggctggaaagactgacactcaaaaaaagaaaggg

SEQ ID NO: 167685 - DNA, 122 bp, Homo sapiens
attgcagaaaaagatggactcaaattttgattgtgggaatgatgaaaatgacaatgaaatcggctactgaaaaaggaaatatatcaaggtttggaatcaaaaggtattatctggtgaaagaa

SEQ ID NO: 167686 - DNA, 122 bp, Homo sapiens
cactgaccgggcgaggacgccgggacctgtgcttgcctgtgcgctgagtgcctctagggccgggctcggcttagtccaggatggtggtcagggttatacttccctgagcccttgctctctga

SEQ ID NO: 167687 - DNA, 122 bp, Homo sapiens
gcccacgctgcagcggaaggagcccccgcccgcagtgctagaagctgacctgaccgagggcgacctggctaactcccatctgccctctgaagtgctttatatgctcaagaacgtccggtcag

SEQ ID NO: 167688 - DNA, 122 bp, Homo sapiens
gtcaagagcgaggccttgcgcagcgtgtccatctcacccggaacgtggtgcttttttaaacggagtccacctttactacattattgttggtcatcagtggagacggtttccatttaacccta

SEQ ID NO: 167689 - DNA, 122 bp, Homo sapiens
catggcaccggggctgcgggggctgctgggccactgggctcactcggtttcagttgctcccggcggagcaggggcatgcagctcagcggccaccgagcctctggggctcgcccggccgctcc

SEQ ID NO: 167690 - DNA, 122 bp, Homo sapiens
ctctcaagggccagtttctggatttctccacaatgcaagctacagagctggggaagttgccggctggaggagttctctaccctccaccttccttcctctactctccggctttctgccccagt

SEQ ID NO: 167691 - DNA, 122 bp, Homo sapiens
ttctggtttatgcccttatttgccttagaaaacattagttatgaatgtctgtgaagtctccgttataacactaagcttctgtgatcttatatccttacttagtataaataaataatattgtt

SEQ ID NO: 167692 - DNA, 122 bp, Homo sapiens
gcagcctggcttttgggggctttggtggtcccccagctcttgggctttggccatggggctcggggagcagagagggagtgggagggaggctggggaggtgcccaggaggaggagcgggagag

SEQ ID NO: 167693 - DNA, 122 bp, Homo sapiens
ccttctgcagtgccgcaggcaagcagaacagaaacagtaaatgagacaatgaattgtgtccgtggaagactccatatggacagtgattcattatgttaataaggaggtgaaagccagaggtt

SEQ ID NO: 167694 - DNA, 122 bp, Homo sapiens
atccgcccgccttggcctcccaaagtgctaggattacaggcgtgagccaccgtgcgcggccgacatgcatgcttttgaaataccacaagggcactggggactggaaacaggaacggaaacag

SEQ ID NO: 167695 - DNA, 122 bp, Homo sapiens
tgtgtctgagtacacgtctcattgcagacacgtgtgtacgcgggcattatgtagccagcccggccctgttagggagttctgctgcagacccctgactcggctggctgtgcactgcgtggagc

SEQ ID NO: 167696 - DNA, 122 bp, Homo sapiens
tgagccagagacctgctggggaagctatcctgccgcctcactcccctcaggcagcccccacgccacttcctcctgtgtccagccccatgccagcaggcgagggaggccagctcctgtccctg

SEQ ID NO: 167697 - DNA, 122 bp, Homo sapiens
atcaagagtcgagatggctttgatggacaggcatagcgcgagtgcgggctttcgcccaaccggcgggccgctgtcccgaaaaaggaccaatgaggaggcggcaggggtggggcgaaggggcc

SEQ ID NO: 167698 - DNA, 122 bp, Homo sapiens
aaatatttacatcacactgtaaagatatcagtgattgccaagtgatgaaactgtgcccaacgaactgcaggatctgagctccaagactcaaaattatgtctgaccactttctattgtttact

SEQ ID NO: 167699 - DNA, 122 bp, Homo sapiens
agcttattgtggcatgcatattcccattgcaatgccctattcacaaatgaacatctttttcgttcagagtctccctgtgctttaggtagaccttgtctagatgctaactcgtagagaagaac

SEQ ID NO: 167700 - DNA, 122 bp, Homo sapiens
gaaaaatcccacagcctgcccaccccaaggccctccctcccagcctcgtgaccctaatcgcggcttccagcacctcaaacatgaccactagctcacagcaggccccgcccaggaacacccgt

SEQ ID NO: 167701 - DNA, 122 bp, Homo sapiens
ttagcaggtaatctttgagtgcccactaaattccagacattgatataaaacgggatattgcggtcaacaagacaaagcccttgctttcatggaataggcgaaagactaaatacaaggggtag

SEQ ID NO: 167702 - DNA, 122 bp, Homo sapiens
cctgtaaaccccgtgcccaacttgagaacacaggcagtcggagaacaggcagtcggagaacgcgccgcctgctgcccacaggcggccaagctgcaacccccaagagccggggtccacaggcg

SEQ ID NO: 167703 - DNA, 122 bp, Homo sapiens
ccgtggcaagcgccgagccgggagacagcccgaggaaccacgggttctggagctaggagccggaagctgggagtccggaggagagcggagcccggagcccggagcccggggcggcgcgtctg

SEQ ID NO: 167704 - DNA, 122 bp, Homo sapiens
attttcccatctgggcttgttaagccatttgcctggtactgccagggaagcaatagggctcgcttatacacctgctttgcatttggttaagatcaggttttgagtgggttttgagtctgttc

SEQ ID NO: 167705 - DNA, 122 bp, Homo sapiens
tgcggagcctgcggagcccacccagaattctagctggcctggaagtgccacttgcagccccgtttcccgcctgtgcatctccctccacacctcgcggcaagccgagggagccagctccggcc

SEQ ID NO: 167706 - DNA, 122 bp, Homo sapiens
ggggtggggatggggtggggtgggtgggccggtcggggcacacacccgcacacaggagcccgagccgccgccgccgccgccgccgccgccgggggaaggaaacaagtttgaacagcggcgcc

SEQ ID NO: 167707 - DNA, 122 bp, Homo sapiens
tatgttgcctgtcccacctattagactgtgagcttcttgcaggcagagaccctgtgaccccggcctctagcacctgtgccctaacctgacccatgagtgttcacatgctttcccacccaccc

SEQ ID NO: 167708 - DNA, 122 bp, Homo sapiens
ttcagcttcgcaagctttattgacagagccaactgccgatgacagcatttttctgttttgcggttgtaccgcactctattaggtttcctgcaggtcccatcaaaatgcaaaccctacctcct

SEQ ID NO: 167709 - DNA, 122 bp, Homo sapiens
accgagcctgggccgtccctgctccattggtgtccgggctggccggaacacctcagtggacgctgctggtcatctgcatccccggctctgctcatagcacaccccacccctgttttcatggg

SEQ ID NO: 167710 - DNA, 122 bp, Homo sapiens
ggtctcggctgtggccatggctggctggtgcccaccctgggcctcaagcctcctcttcctcggctgcctcgtgaactctgaggctgtgatagccccttcgagggctcctctctgtccttagc

SEQ ID NO: 167711 - DNA, 122 bp, Homo sapiens
gaacgtcccgacccccagcagcaagaggccgcccagggccccaaagaagatgccgaagaacgcgtcgagtttcatgctcaggtgctcacagtgctcgccccaggccgtgtagatggagaagg

SEQ ID NO: 167712 - DNA, 122 bp, Homo sapiens
ttgggaactgagggagagggactggtaggtccacaggcaggcatccttgccagcagccctcgtggtgggtcctgtagtcagagacaaagaaccttgtgatatttgtaccctagatcctgaga

SEQ ID NO: 167713 - DNA, 122 bp, Homo sapiens
gttgatgctgagcatggtttcacttttgcaaacatttatttatacccttcgagagaaaaacgtctcagctgtcacaggaagctgcttcggggggtgagcaaactttttaaaatgcagaaatt

SEQ ID NO: 167714 - DNA, 122 bp, Homo sapiens
gccctctatttgggtttatgcatccgttcatctggtctacttggggtcagcaaggtcctccgtgttgttgagtctgatggccaatttccaggcctggttctccctgactttgcgcaggcatc

SEQ ID NO: 167715 - DNA, 122 bp, Homo sapiens
ttcacccagaggcactattcaaatagcaactcgtgtggcatgggcaccggccactcagaacgggcagcggcagggacagcgggatggcaggaagtcctgaccatccgacctgccctgatgtg

SEQ ID NO: 167716 - DNA, 122 bp, Homo sapiens
ggcatggggggagtagggaggagccagctgggttcccagacttccagagcagcacagaggcggagagggatttttttgcgggtgtgataatgagttccattcaggacaaactgtatttgtga

SEQ ID NO: 167717 - DNA, 122 bp, Homo sapiens
gcggggacggcctggcagctcccagcagcgaggggcgatccccgcccgcgcagcagaccccgagctgcccaggcccttcctgcgccacgtgtacccagagctccgcccgggggagacttcgc

SEQ ID NO: 167718 - DNA, 122 bp, Homo sapiens
cgcgagggggcgggccctggctgacacaaacttcaggggacgtcgccttctgtccccaggcgcccctcctctccggcgcgctcggtccgggcggcttcttcacccagccctgggagccacgt

SEQ ID NO: 167719 - DNA, 122 bp, Homo sapiens
ggatgtgtgggaaggcctttgggacatctttctccacagctgccaggtagctgcttttgccgtggatgatgtggctcttcctgtcaaactccctccacccggtctgactccttacacaagga

SEQ ID NO: 167720 - DNA, 122 bp, Homo sapiens
gcagcgactccacccttagcctcaggtcgggggccccagcatttgtctgatctgcgcttgcgtactcctaggccaggtggccactcccagaggtgtcccaggctcgcgcggtgggcggggcg

SEQ ID NO: 167721 - DNA, 122 bp, Homo sapiens
gttgggtgggcggaccaaattcctttaagaagcgttcaaggcctgaagtggctggctgtccgtgaggctgccttggttggggcatggtgagggtgggtggcagcctggggcagggctgcgag

SEQ ID NO: 167722 - DNA, 122 bp, Homo sapiens
attttactttttagtattggccaacatctccactctccccatgggacacttgagtccaatcgttattataagatgttagacctactctctctccaggacaggaaaatgccagtcaccatggg

SEQ ID NO: 167723 - DNA, 122 bp, Homo sapiens
gccggtcctcagggagttttaaggcggcgggcaccagcgggctgatcctgaagcgctgctcggagccggagcgctactgcctggcgcggctgatggctgacgcgctgcgcggctgcgtgcct

SEQ ID NO: 167724 - DNA, 122 bp, Homo sapiens
gggtcgggccgtccaggtccctgacttgaaccttcccggtccccagccctcaacaggaggcgcagaaaatcttcaaagccaaccaccccatggacgcagaagttactaaggccaaggtgaga

SEQ ID NO: 167725 - DNA, 122 bp, Homo sapiens
ggccaggcgagcaggcgggtggctggggcgcctccacctcctcttcctaaagcggcgaggcgcagaggagcggcatcactcgagcccaggtcccagccaccaccactcacagcgctcggcgt

SEQ ID NO: 167726 - DNA, 122 bp, Homo sapiens
agagctatctgagcgtaggccaggggaccaagcttctcggcctctacgaccgtgcactcacggccccattttacagacggggaaactgaggccatcagccgtgcctctttcttaggccgagg

SEQ ID NO: 167727 - DNA, 122 bp, Homo sapiens
cctcacccccaacccctggaccctggtccagcccccagcctgccctgactcaccagaccccggggggcggcacagggagcacaggtacccccacatgccacttgaacccacccggctgctgc

SEQ ID NO: 167728 - DNA, 122 bp, Homo sapiens
cggggacggagggagggaggacggctgcgaggacgtcagaggaggctggacccgcagccacgtcaaccggcaaccccctccccgccaacacgtgaccggacccccaccccaacaggagccgg

SEQ ID NO: 167729 - DNA, 122 bp, Homo sapiens
ctctgctcaacccttcccacactcaatcggtcaaatatccaccctcaacctcattcccgccgcctaagcctagcccggcctcacatgatggtcactacgctctccgttcactcccgtttcct

SEQ ID NO: 167730 - DNA, 122 bp, Homo sapiens
tgctctgcctgcttccctgcagcggatgtctgcccaggagagcacacccatcatgaacggcgtcacaggcccggatggcgaggactacagcccgtgggctgaccgcaaggctgcccagccca

SEQ ID NO: 167731 - DNA, 122 bp, Homo sapiens
tataagaaaaaaaaaaaaaacgaaaaaaaaaaaaccaaaaaaaaaaaacagagggtcccacggcagtactggtggccatggttcccgtagccagaaggagtcgctcacagagccccacacac

SEQ ID NO: 167732 - DNA, 122 bp, Homo sapiens
gcgcctggctctcacgatgatgaagaagaagaagtttaagtttaaggtggacttcgagctcgaggagctctcctcagtgcccttcgtcaatggggtcctcttctgcaagatgcggctgctgg

SEQ ID NO: 167733 - DNA, 122 bp, Homo sapiens
tgggcccgaatctccctctgagagagtaaactgagggtccagggggagggcacctataggcggggcccagggcattgcattttgaacagcgcttcccccaggtgatccgatgaggcgaggat

SEQ ID NO: 167734 - DNA, 122 bp, Homo sapiens
atacaaaaaaaaaaaaaagaaatacattgatctgtgtgatcgaatgtgaattaacaatgacgttgacttgatactacatttctgagtggttaccacattttattgattgtatgcttctcacc

SEQ ID NO: 167735 - DNA, 122 bp, Homo sapiens
aaggcccaggcgccgccttgcaacccggaaatgcagggtgcagtgcggggggtaagggaccggccaactatgttgacccgactcagagaaaccccgcccttgccgccaccgcccacccataa

SEQ ID NO: 167736 - DNA, 122 bp, Homo sapiens
tcagaatctgaaattcaactttttgttgttgttgtttttagtgtggtggcttgtggtagacggtgtattgcaaggagttagaggacttgagtgtatattctgacttcaaaacttctaactat

SEQ ID NO: 167737 - DNA, 122 bp, Homo sapiens
gctgtggggagatgcacggctgcaggacaatgtgcacggctgccaaacgaggccacatagcgtccacctgaccagcccccaccacctactgaggaagacagagaagctgcaagaagggaatg

SEQ ID NO: 167738 - DNA, 122 bp, Homo sapiens
agcgcacgcgtactcaaatagcagcgctccgacggagacgcagtgcgcctgcgcaagagccggtgcgtatttgcctgtacctacgcgcgatgccagtacttctggtcagtttccaggagcgg

SEQ ID NO: 167739 - DNA, 122 bp, Homo sapiens
ttaagcctcttgagcttgtccttgtagaatagtgtgggaccactgactaaaggaacagaacgttctggatatctccttcctccagctttagccacagggctgtgcacagctctgttgatttc

SEQ ID NO: 167740 - DNA, 122 bp, Homo sapiens
ctgtgccctcaactaccacctgcaccctttacctgctcctctgcttccgccatggcgccacgggagagtcacctgacagacccggaaataagaggaaaccacacacttggcccagggccttc

SEQ ID NO: 167741 - DNA, 122 bp, Homo sapiens
agaatggcgttctcttatctctgagtcggggcctggctcgttttgacatttttgcgcccacgagtcttcggagagggcgtcgccactccagaccttccagcaagcttgaagtcatctgacgc

SEQ ID NO: 167742 - DNA, 122 bp, Homo sapiens
gcgtgcgcagctcaggtccgggtgggggccggcagggggtcctgggcttggcaacgtgggcggagggcggccaagcacggtcccctgcgttttgcacccggccgcgccttggtcccaggggg

SEQ ID NO: 167743 - DNA, 122 bp, Homo sapiens
ctgctcagacggtggcgggagtggaggtcgctgctgaagggtgacggtgtggccatgacacgggcagcacgggaacggaagacgccggagacccagaaggcgcatgactgcctggcctcgag

SEQ ID NO: 167744 - DNA, 122 bp, Homo sapiens
gatgatttcactgtggaaataaaggttgggatgaaaggaaatcatcctgccaccggtaaccgggatggctgagttcctccacctgccagatcaaggagaaagaggatggattcaatgggacc

SEQ ID NO: 167745 - DNA, 122 bp, Homo sapiens
cccgccccctgctttgtgtgcggcgcgcggattggccgacgcgcgcgggggccgcgtcagcgcccgcgagcccattcatctgtgcacttgggcgttggaccccgcatcttattagcaaccag

SEQ ID NO: 167746 - DNA, 122 bp, Homo sapiens
gggggcctcgtgcctcgctgctggggcgtctgcgccatcgtgcgggctgaagacggtgtgcgtggagggctcccagctggtgtgtgtctccttgctgggttctgcctcgcccaccatgcccc

SEQ ID NO: 167747 - DNA, 122 bp, Homo sapiens
ggccttgggagaacggaaccgccctggccgtccagcccagccctgtctccctgccagccgcgcacaggctgtccccggcatgtcccaggagtggagtggcctctgtcagggagaccgcctgt

SEQ ID NO: 167748 - DNA, 122 bp, Homo sapiens
cctcggcctcccaaagtgctaggattacaggcgtgagctcccgcgcccggctgatgccagcgttttaactctacaacaaactgaaactcaaacgagaggaagtggacctctcacaccaactc

SEQ ID NO: 167749 - DNA, 122 bp, Homo sapiens
gtgagcgtgtggagaaaccgcagcccacgccctgcaggcgggaaggcaaccctgtgaggccgctgtgggagacaatctggcacttcatctgatggccccacacagggcgaccgtgtgcccag

SEQ ID NO: 167750 - DNA, 122 bp, Homo sapiens
attgaatacttaagcaaggataaatcgtaatgtaataatgccatgagtgaatcgcctaggcgagtcaggctcctttcagttagtgggaaatggagaaagattatgtagttaaggtcatgaat

SEQ ID NO: 167751 - DNA, 122 bp, Homo sapiens
cgcagagacccagcgggaatgcaggatggcagggcggcctcggggcggcagcaggcactgcgcggtggcccaggaagacgcagcgcggccgggctggggcgcagggcggcttcggggcgcca

SEQ ID NO: 167752 - DNA, 122 bp, Homo sapiens
gtttcccattgattctctaatttgacatcctgaacacaaacttctctaaccttaggatcccgggaatcaacttttaggagactgttaaatttcatccagtaggcttctccattttcaaaaat

SEQ ID NO: 167753 - DNA, 122 bp, Homo sapiens
gggccaggaagaccagggaagcctctctctcctctctgaccaggcaggccgaccacaccacgctgtccagcaataccttgaggcccgggagtaccaggagcaccctttgggaggcaaacagg

SEQ ID NO: 167754 - DNA, 122 bp, Homo sapiens
agggggggcgtctgcagaggactcagggtcccacagcacagaccctgccaggtgttgggccggggccacgtgaggggctgctgcggaggcctggaggaggcggctggcagcaggtaagggga

SEQ ID NO: 167755 - DNA, 122 bp, Homo sapiens
gtcctcgttaggattcttgggtccctaggggagcccagactgcgaagggagccccagctccgcctgggggactcggcttcctcctgtctaccgcgttcttccttcctggcctggactctggg

SEQ ID NO: 167756 - DNA, 122 bp, Homo sapiens
cgtggccaaagcaccttgatgatgcgctctgtccccggaggcgcgttccacggccgctgccggcacctaggcagagggatacgttccagaaacacctcagcttagcgcggggatggccttct

SEQ ID NO: 167757 - DNA, 122 bp, Homo sapiens
aggtctaggatggaaactggaggccccatacctggccttaatcctctgtgttctttcatgcggctctgcgccttgccctgttgattactcacggtggctggtcccttggatagtatgttgtc

SEQ ID NO: 167758 - DNA, 122 bp, Homo sapiens
ttacgctcagggcttggcctcccctcaggtaatatagcaggagggagagaatagggagggcggaaatctgaactgcaagagatggtatcaaaaggcaaggaagggcatttaatgatctgttt

SEQ ID NO: 167759 - DNA, 122 bp, Homo sapiens
gacatctggcatccctggggtctcagagacacgggtggacagcgacgagggccttgtggccgccgtgtgtacccgtgcttaccctctgtcctccctacaggcgcgcggcgtccgccatggaa

SEQ ID NO: 167760 - DNA, 122 bp, Homo sapiens
gaaattcggaggttaaaatcgcttggaggctgctggtcctttccctgagctctctgccttcgggccacgtagacgcttttcgtcccgtttacctgcttaaaaccctttactgaccactcctt

SEQ ID NO: 167761 - DNA, 122 bp, Homo sapiens
ggtcatagagcttactgcagacctcctcagacaccaccgacacgttcacgcactgcagcacggtaggcattctgcctgggacgcagagctctgggtcagcccccgcgactgggcagaggacc

SEQ ID NO: 167762 - DNA, 122 bp, Homo sapiens
caggggcgcccatctgcggcactctcggtttggctcagtttctgcctacaagtgtctgtgcgtgtgaggagaaaataaagtcatgagctcatcaccatcccagtggcgtctcatttaatcgt

SEQ ID NO: 167763 - DNA, 122 bp, Homo sapiens
ttcccaagttgtgagcaatagggtgatgaaatgaaaattgcaactcaggaaatatttctacgactgggtatagggataagcagaaacagggagacagcttgcggccttttgcaaaataaaca

SEQ ID NO: 167764 - DNA, 122 bp, Homo sapiens
gccacccgccaccggcctggtctgctcacgtcccctggacccgcgggccagccaaggagccgctgcccttggcacctgttctccgtgcctgcaaacagacaaggccctgcacttttctcctc

SEQ ID NO: 167765 - DNA, 122 bp, Homo sapiens
gaataattataacaagatgataatgaaagggtgaagttcgtgatatatgggattagctaacgtggactaaatagttactatgtgtcaggcagcgtaaaatatgctatctgtcatttattcct

SEQ ID NO: 167766 - DNA, 122 bp, Homo sapiens
ttgttgatttatgatcgggtttctgaggcaaagccgagttctgcttctggtttagggctgcgtgcggggaggattcggagggcagctctcccagctgatgggtacttactgtttgtataatt

SEQ ID NO: 167767 - DNA, 122 bp, Homo sapiens
cactctggagtctcagcattctagggtgcagcctgggaggaagagagggactgcctcttccgtgggtgtctttgtgccctgactggcgccaggctgtgcatggcaccctctgatggggcctg

SEQ ID NO: 167768 - DNA, 122 bp, Homo sapiens
tgagaaaatttgttactagtctgtattactttgcatggcagccctagcatactaatacaacgtgttaccaaaccagacaaaaacatcacaagaaaactaacttctgaattctatgtacttta

SEQ ID NO: 167769 - DNA, 122 bp, Homo sapiens
tgctgcctcaaaagttctgtgagtttcggggtcagtgtcccacccttcacttcccgagggcgggtgagtggagagcagagccaggagctctggcagctgtggacagatgtgcttcctgagca

SEQ ID NO: 167770 - DNA, 122 bp, Homo sapiens
ggtggcgccaggcaattcccgtggtgacgtctcggtgttcctcaaacatggcagctggcacgaagggccggcgcacgtcccaaacatagatgttgtggtccaccatcatggagcacgtggcc

SEQ ID NO: 167771 - DNA, 122 bp, Homo sapiens
aagcccggaacccccgaccctgaccccggggtcccgaactgcaagccttggaccctggaccgtgaacctccagacccagaggccccagactctgatccctgtacccgggaccccagactcct

SEQ ID NO: 167772 - DNA, 122 bp, Homo sapiens
cagttcgcgtgggagggacgcagggctggcgcgcagagggtggtgtgagtgcgcggaacgcggcgcgcctgagggctatagctagcgcaggccgacgcgcaggtgaatgggagccctgtggg

SEQ ID NO: 167773 - DNA, 122 bp, Homo sapiens
ggacttgaggcacttgcgtcctctggcggctgcatggcgccccgcaactctccacctccgcgtcctgcctgtgctaggcagggccgcctttactggtgtgagggttgcttgaacccttgagg

SEQ ID NO: 167774 - DNA, 122 bp, Homo sapiens
actcctcccccttactactccccaaccttgactaccagggacttctattagggagtgggccgatttcaccagtccctgctacccacggctgccattctccctgcgggctgaatccccttccc

SEQ ID NO: 167775 - DNA, 122 bp, Homo sapiens
ccacatctaacttaagtattcaatctaatatagattattggtcccaatggccttcaacaacggccatcaaagggacatctgggtgaccctgggttcctagagtacagagaggtcatggcagg

SEQ ID NO: 167776 - DNA, 122 bp, Homo sapiens
gcagacgggtgggagctccgaaggggtgccggggcggtgatcgggaggtctccagcggcccgaaccagggtgaagaagaaggtggagtctgcggaggccccaggccggggagggggcgggtc

SEQ ID NO: 167777 - DNA, 122 bp, Homo sapiens
tagctgcactcgcccttgtctttccaccaataggaggggcgaatgactccactgaggccacgcccaatgttcaagtctataaaagtcggtgccggaggctcccagctcagatcgccgaagcg

SEQ ID NO: 167778 - DNA, 122 bp, Homo sapiens
gagacggaggcgggcgtgggtgattttattgcaaactttggggagccccttccttggctgcggccgcccgctggtgttgcccccgaaccctgggcatggggcgagtggcccaagcccggacc

SEQ ID NO: 167779 - DNA, 122 bp, Homo sapiens
agtaccaatgactcaaaaatagagtagtctctcctgaaattcatgtggttttacaaattacggaggaagttctaggctcagtgtggattgccaagtggtgaaaatttgttatgtatcttttg

SEQ ID NO: 167780 - DNA, 122 bp, Homo sapiens
atgcatggtgcctgtctagagccagggctcccggggccctcagcctgcagggaggccactcggaagcccggtgcctggggtgttgtctgtgtgggtgggtggggtttccctgagcccctgtg

SEQ ID NO: 167781 - DNA, 122 bp, Homo sapiens
tcaacctcaggacaatataaaactttaaccatgtggctttttctttgagcttttcatatacgataagacttctatgcacacatgttcacattaacaaattgtgtatcctttttctcctatta

SEQ ID NO: 167782 - DNA, 122 bp, Homo sapiens
cttccttctctggctgggccagggcgggatgcactgtggttggggtctgggtcacgcccacggcaatgacaggccccctcgctcagcagggagggacgcacaggcccctgggcgcttcgccc

SEQ ID NO: 167783 - DNA, 122 bp, Homo sapiens
acctcccaccccctcagacggctgctgcacccctgacagcttcggaggcgaatcaaggtccgccatcttggtccccattcggcacttccggtcccgcgaggccccctcttcgttggcgccta

SEQ ID NO: 167784 - DNA, 122 bp, Homo sapiens
ctcacccgcagccggcgcccaaagacagtgacctggccccgagcctgctctttgcgctggcgccactccaccaggttgaggccgttgtcgatgggcagcgtgacattcctcttgcccacggt

SEQ ID NO: 167785 - DNA, 122 bp, Homo sapiens
tctttgcagggtttctcctcaccatacatatgccagttgccatggaaagcctcctctaggcgcagcagcctctagatgggcatgggagaatgggtatccttatagttttggggctcctgaaa

SEQ ID NO: 167786 - DNA, 122 bp, Homo sapiens
acttgcactaaactgctacgctacttcttgttatggtgttagactgaattgtgtcccccacgaagatgccttcaagtcctaactcctggtatctgtgaatgtgacattatttgaaaatagag

SEQ ID NO: 167787 - DNA, 122 bp, Homo sapiens
ctcttttcctccccagggaaaagacaagagctcagagatctctctctctcaatcatatcacgctgtgccttgaggaagaattatgattagtgccaggaatttctctagcagtgtcaatgggg

SEQ ID NO: 167788 - DNA, 122 bp, Homo sapiens
tgaggtcttcttacggtaaaaacaccggtgtcttaaggtttcccagtggaatttgggggccgggttgacttcggagctggagctcgcaaaggccggggctgctgcagattctgacgctttgt

SEQ ID NO: 167789 - DNA, 122 bp, Homo sapiens
gctgggtttggacttacaaccccaactgtagcctaactgtaggggaagccatactgtggccgtggcaactgaagacatcccgtcccaaactctggaaaggatgagggagggggctgatgcct

SEQ ID NO: 167790 - DNA, 122 bp, Homo sapiens
cagacctttcccatatctgggccctttcccacgagggtgttgggccctctgcttgattcacgatctttacattctaaaatactccggttcggttttgttttcaggcaaggtgaccccatggc

SEQ ID NO: 167791 - DNA, 122 bp, Homo sapiens
cgctggttctggtagaactgccacttggtctccagcagcttgttctgctgctccaggaagcgcacctgccattcaggtggaaagaagaagtcagagggagcctggggggaggcacctggtcc

SEQ ID NO: 167792 - DNA, 122 bp, Homo sapiens
caccgctaagtctgcccttcctcgggccgctgcgccgcggggcggggcggaggcggcgctcgctgtggccccagagcagcccccgcagcccaggaccaggcttgcatggggacgggggtctg

SEQ ID NO: 167793 - DNA, 122 bp, Homo sapiens
tttgcagcggcgactgggcgcccagcggcgtgtactgggatttctgtgagcagaggctgccgagagggggcgcttggagggccaccggcggcttcgaaagcttcgcagccggaagccgccgg

SEQ ID NO: 167794 - DNA, 122 bp, Homo sapiens
tccttcgccaaaggacaggggacaaagcctcagcgcacagccgggagccagggggagagacgctggactcttcaaggacagagaagaatgcagttagagctcttacgggccatttcttttat

SEQ ID NO: 167795 - DNA, 122 bp, Homo sapiens
accactgcccccggtcccacccggggctctgattccactggtcacccagtgtggatttcacgagccaaatgggcagcctgggctgagagcccaggcccagaccttcccccaggaggcccctg

SEQ ID NO: 167796 - DNA, 122 bp, Homo sapiens
aaagcagagtcaaggggatataaacagattacaagaaacacaaaaatcctgcttatcaagcgctgtctgttctgctatcactattattgaaatcttaagaaactttgagttttcagtaatca

SEQ ID NO: 167797 - DNA, 122 bp, Homo sapiens
ataggcagcagtcaatgatttggagaatctctggactggcatttgtgatctagtctcaagcggggaggacaccccacagtcagaaccaagaggtgaatgtggtgtgagctccagctgcaggt

SEQ ID NO: 167798 - DNA, 122 bp, Homo sapiens
ggggaggaagagggcggcaggctgtgtgtggagtcttggcacggcgtacattacacagcccgatcaaaagccagcccgttcacctcgaccaagccagcatccaccaaagggccagaagttta

SEQ ID NO: 167799 - DNA, 122 bp, Homo sapiens
acgtactggcggatccaggacacgtagctcgtcacgcgggtgtacatgccgggatagccgcgaaggccgcagagtttgccccagctcaccacctccacctggacccaggtgcaattccgcct

SEQ ID NO: 167800 - DNA, 122 bp, Homo sapiens
agagagagttttcaaactcatccacagtcccttcagcaccttcgcgggccagccacaagccgaggtgcccgctggtgctcaacagcgccaaagcgtgtggcccctcccaggacgctgcgccc

SEQ ID NO: 167801 - DNA, 122 bp, Homo sapiens
cacaaatatcacttcatcagagagatcttccctaatatcatctcaaataccagtgccttccgcctccaccctctggttcctgttgtatttttcgttgccccttgatattacactatgtgttt

SEQ ID NO: 167802 - DNA, 122 bp, Homo sapiens
gaggaactgagccccgggaggaggtgctcctgtgcagccccactgagtcagctcatctatcgcctgccctccacctggccagtccctgcgggcatctaactgctaagcctccgctcagccaa

SEQ ID NO: 167803 - DNA, 122 bp, Homo sapiens
aatcaggactgagagggtgagggtcatggcgtcagctcccactggactcagctgtgcaggcggatgagaccacggtgcctggcaggacacaaaaacacgcagagtgtggactggaggctggg

SEQ ID NO: 167804 - DNA, 122 bp, Homo sapiens
ccgctgaagaatgcgtgagcacagctcggcctcttcacacaggggaacgccactcggcagcgaaagaggaggaagtgctgacacacccacagcatggacgggccctgacatcacgacaccga

SEQ ID NO: 167805 - DNA, 122 bp, Homo sapiens
tgaaggctggcaccatgtaccttacccaaaggttgcaagggctggaatgtgcaaaggccacgtcagcagatggttaggtgcaatttcacgcctcaccgcgcagcgacacaaagggaactatt

SEQ ID NO: 167806 - DNA, 122 bp, Homo sapiens
gtgtggccctgaggccgtgtccctgccgctcaggggacagcacgtgtgggctggggtctgcggtctgtggagccatgtgggttgtgggttgtgggttgtgggccacgccgctgacgggcccc

SEQ ID NO: 167807 - DNA, 122 bp, Homo sapiens
ataggctgcagacgacgctttcgcgtatcttgggaaatgtagttccagtgttggcgaagacgccacgcggtgacaaacaggagtaaggcggtccccaggcgagggccaattggcagccgcct

SEQ ID NO: 167808 - DNA, 122 bp, Homo sapiens
gaatagtccgcgtgctgagaataatatagattcctgggcctcggcccaggtttacagaggcgggatgctcaaggatgcccagccaggctcgggacttgctcttcgcaagtcctgtcgcgcgc

SEQ ID NO: 167809 - DNA, 122 bp, Homo sapiens
ataaaagccaagttcaactgaaaggtgggagaggaagggtctaaggaggagggcgtttcccgggagaacgcccagagctcggctcacctggcgatcctaattacaggggagtttcaccccca

SEQ ID NO: 167810 - DNA, 122 bp, Homo sapiens
cactgcctcctacaccttgccatgactagatcttctgaaggttaatgtaattcctcaccccgaggaaggttgaaagtacagtctacataatcatgccccacaacggctatctttagcattaa

SEQ ID NO: 167811 - DNA, 122 bp, Homo sapiens
ttaaggaagctacacaagacctttgcccttgtatgggcgaggaagatggggtacaagggtcgggggcattgttcatgaaggaaggtaagtgatagtttcctgctcaccccttcgttttaggg

SEQ ID NO: 167812 - DNA, 122 bp, Homo sapiens
gagataccaaggcaagctcaggattgatgtgggtgatgctggaactgtcgcggcgtcatgcgagaggggctctgacctccctgtgatcgcggaccagggtaatgtacgtcctgcagggcttt

SEQ ID NO: 167813 - DNA, 122 bp, Homo sapiens
ggatgcacccataatcatcataagagaacacaaattattactgtgtatcagacattgtttcgaatgttttacatgcgtcagctcttttaacctttatgacaactccataatgttatttcccc

SEQ ID NO: 167814 - DNA, 122 bp, Homo sapiens
ttttatctggcaatggatctaagaattttggggtgaatcacatatggctcccatttccagcgatggtgtgtcctgggtgattttagaatttatctggggctactagttcatgcagtgccagt

SEQ ID NO: 167815 - DNA, 122 bp, Homo sapiens
gatgcagatctgggccaggctgactttagcaagatcttactcttggttagggtcgaataccgaggtcagcaaactctttctgtaaagaggcacgtagtaaatattcggctttgcagggcgta

SEQ ID NO: 167816 - DNA, 122 bp, Homo sapiens
gagaggccactggggccgtgttagtctgccggtggggactcttgcaggtacaggcgcggtcggggctcctcgtggagagccgggggctcctgccggcctctgactggggtgtcgttgcaggg

SEQ ID NO: 167817 - DNA, 122 bp, Homo sapiens
cagcgcgggagtggggcgttgaggggccggcctagcttggggctctggccttgcgtcttccgaccgaatcaccgctcctgagcccggtgcggggctgccgctatcgcctggccgtgggtgcc

SEQ ID NO: 167818 - DNA, 122 bp, Homo sapiens
ccatgccccctccacaacagccctgaaaggggagaatagagaagcaactaagattcttcccgtattctagatgaggcactggaggcccagagggattgactgctgcaggtcacccagtcagg

SEQ ID NO: 167819 - DNA, 122 bp, Homo sapiens
gtgtcagctattttatgttctatttttaaatctgctttttaaaaaatttactacagaagccgtaggctaaaaaagaaggcatttagacaactctgccctgccaacacttccctgctcagaat

SEQ ID NO: 167820 - DNA, 122 bp, Homo sapiens
ccataccctatctgcctaagtgatggcttcttaactcgtatatattaacaacactgtattcgtactagatgccattgccattgaattatgtgccttaaaataattttgttttgtgaattaca

SEQ ID NO: 167821 - DNA, 122 bp, Homo sapiens
gagccccaccgaagtcccaccctcgactccaccacggtcttttgcaggtataaagactaccgagagccgccgtggtcggaaaacaagtacgacatctccaaggacttctgggccgtcctggc

SEQ ID NO: 167822 - DNA, 122 bp, Homo sapiens
actatcctcctacctctctgaccatttcctctctgtttctttgtggagttctctcccaggcgtccatccccgtccatcatggggaccctgccagggagggtgggaggaggaagccagggatc

SEQ ID NO: 167823 - DNA, 122 bp, Homo sapiens
gcgatgccagctgggcgcttctccatgcctcggtttccttgtctgtagcagggatgagaacggctcctgcctcccaagctgttgcggggtcctctggggtgagggcaaggtttgtggagcag

SEQ ID NO: 167824 - DNA, 122 bp, Homo sapiens
tgggagaggccaggacgcggcgggaggggtgtggcctgtgcccggagcccaggctggaggcggccttcagcagactcagggtctcacgagctgctgtcagggcagggcagagtattgcggta

SEQ ID NO: 167825 - DNA, 122 bp, Homo sapiens
atgtaaaggtgcaagatgagagcccagagaaatgggaaaatctgggggggtgttgggacccgcagtcttttgagaagaggtcaccacaggaagagactgagttgaaagagataaggcagcag

SEQ ID NO: 167826 - DNA, 122 bp, Homo sapiens
cgagcagagaaagcctctgctgtccgctgtgagtggcaaggaagccttcttggtaatgtccgtgtgcacctgttagggggtcttatagacagccagctatgactcgtcccatcatttaatgg

SEQ ID NO: 167827 - DNA, 122 bp, Homo sapiens
accgtcctcttaaaggtgcacgcactttttactcttaaagggtttagggattgctcacagcgccctctccctgagcttcaaaacgagacacaggtcgggctcacgcacctgtgaacccagca

SEQ ID NO: 167828 - DNA, 122 bp, Homo sapiens
ctccggctccccattttcctcattagcattcccgtgagcaggggcgtctcttccattttccgcctcttccacaacttccttcttctcctttaagtcctcggtggtgatttcggagctggtgt

SEQ ID NO: 167829 - DNA, 122 bp, Homo sapiens
agaagggtaacgtcgcgggggcggctggctggcttcctggggggaagggaaggaagctgccgagaacaggagggagatgcaggatcccctaccccgttccaggcatgcacacatcccccgaa

SEQ ID NO: 167830 - DNA, 122 bp, Homo sapiens
aggtgggccgcgggacatgtggtcaaaggatcaggaggccaatggggaggtcttcctggccgaagtcaccacagagccagggccatatccaagggggacaggtgtcacagaaggggaaaggg

SEQ ID NO: 167831 - DNA, 122 bp, Homo sapiens
agggatgaatggattgcaaactagagggaggggccgagcttccgtgccttgattcgcccgcgtcagttgcttcaacaacatctgcagtgcgtggggttgagcgatcccactggtggggctgg

SEQ ID NO: 167832 - DNA, 122 bp, Homo sapiens
ggtggcactggcacagggtcacagtgaaaagcctctacgcagaggacagcagaaaccccccgcagcctcaggaggcagcatcagatttatttattcctactcaacatgacccgggaacacag

SEQ ID NO: 167833 - DNA, 122 bp, Homo sapiens
gggaatctttaagcaggagagagacgtcagttttgtggcttacaaagatcactgtggccacggtgtgaaagatgattgaaaggaaggaataagactgagacttcaggggaatgttgctactg

SEQ ID NO: 167834 - DNA, 122 bp, Homo sapiens
gcaactttctttctcaaaagtgcccctttggtttgatggcttgcctggtcaccctgtgtccgtgtgaccctgagcaagctatgtgatttctctgaacatctccttactctcgtctgtaaaaa

SEQ ID NO: 167835 - DNA, 122 bp, Homo sapiens
ttggctaatccacttggaatatgtgtaccacatccaagtctcagggttgcccactgctaccggtcagttctgattcagcagttgtggtgtcagatcagccttggtgagggaaagttcatgga

SEQ ID NO: 167836 - DNA, 122 bp, Homo sapiens
cgtccagggccagcccgtacaccaggacgccctgtcttctacgtaactccttatcttaggcgaatttgtcttggtcccaggacaactaggaagaattaggtgaaggatggaggagttctcta

SEQ ID NO: 167837 - DNA, 122 bp, Homo sapiens
ttctaaaagtaatttagatttttatacaaaagttagctcaaaccctgatatgctctgcaacggcttaatgtgaaaaacataaagaccatataaactgagaggataggactttcttttgctta

SEQ ID NO: 167838 - DNA, 122 bp, Homo sapiens
aagctggggtcggcggaggctccacactaacaagacgggtcccgggttcaaagctggggtcggtggaggctccacactaacaagacggatcccgggttcaaagctggggtcggcggaggctc

SEQ ID NO: 167839 - DNA, 122 bp, Homo sapiens
tgaggttgagttgactggtgcgtagcacagagcctggagcctcccttgctccctttagcgcgtgccttgccctgtcttttctgctcaggttgcccaggtcgcccaggtcttttttctctagc

SEQ ID NO: 167840 - DNA, 122 bp, Homo sapiens
gttaccaacttcaacccggggccggccacggagcctcccgccgcccctaccccgcgtccccggcacccccggcacccccggacccccgcgcccgcgtcacttactcctctgccgtcgccacc

SEQ ID NO: 167841 - DNA, 122 bp, Homo sapiens
tgtccttccatcttccatgagcaaggtactcagctggggggtttttcacttcactggtcacgtctgatctgacctcagacactccctgtgtggtactaagctctaatgacactgctgcaggg

SEQ ID NO: 167842 - DNA, 122 bp, Homo sapiens
gcccgctcgcccagccccagcacgcagccctgggagcatgtgaatgccatccaggaggcccggcgtctcctgaacctgagtagagacactgctgctgagatggtaagtgagagaatgtgggc

SEQ ID NO: 167843 - DNA, 122 bp, Homo sapiens
gcggggtgggaggtgggcgggtattggaggcacctggaggggtgtcctgaagtgggaccccgctctctgaggcctggacgtggggacagccccatccctagcgagcgtcccaaaggcgagga

SEQ ID NO: 167844 - DNA, 122 bp, Homo sapiens
gccggttttgttgttattgcgaggattgtctggggcccctttaagccggaacaggcagggcggaagtgcgtcaccggcggcacgcccctgcacatggacctcccccgtccccgccatccctg

SEQ ID NO: 167845 - DNA, 122 bp, Homo sapiens
tcagcgccacacgcacaagcgcgttcgcacgattggtgcaggcggacgcgcgaggtcccgcgcctgcgcacacccccgaggctggcacgcacaccggtctcctaggggactggcgcctggcc

SEQ ID NO: 167846 - DNA, 122 bp, Homo sapiens
tagggtcctccctggaggagcacagccacaggagcggctcgcgtgggcactgactacggtcgggagccccagccagctcccagtcgacagtcagcaccactgccagccccgggagggccagc

SEQ ID NO: 167847 - DNA, 122 bp, Homo sapiens
agttccatttgactcctcattaaacctctcacagggattctagctgcttctctgtgtctgcgcttgcttttctatagaagagatagatgtgaaccacgtaggcaaagatacatttctacata

SEQ ID NO: 167848 - DNA, 122 bp, Homo sapiens
gatttggtctggaaagtcttctaaaaccttccacatgactgtggaataagtcatgtggggcgcggggataagcgaatctctcaaattccaccacgtatgccctcattcaacctggatcctta

SEQ ID NO: 167849 - DNA, 122 bp, Homo sapiens
atctggccacaagccctgaaccccccgtaaaacgggggtggctccttcttgcagggcccacgtggagaccgacaggggcacactgaacacccagtctgttgctgggctcccaggaacacctc

SEQ ID NO: 167850 - DNA, 122 bp, Homo sapiens
tgtgcttaaggagctacaggatgaaaaatgcaaatacctgtgaacacatagacacacattcgccagaataaacaaaatctgctcaaccaccaaggccaatgtctagaatttgtaaatatcca

SEQ ID NO: 167851 - DNA, 122 bp, Homo sapiens
cccgagcaggcggggtctgcaggggacgaggggttcccgccccaaaccccggctcctgtccgcaggccccgcccctgcagcggctccgccctgcgtcccgccttcctcgcactcccctacca

SEQ ID NO: 167852 - DNA, 122 bp, Homo sapiens
caggcccaagcacatgcaggcgattgcgtatggctacaaacacagcactctcatttctgtcgccctcgtaggtcaccatggcctgtaccaggcctccggcggagaagctgggcaccacgtac

SEQ ID NO: 167853 - DNA, 122 bp, Homo sapiens
ctctgtcgcccaggctgtagtgcagtggcatgatcttggccaactgcaagctccaccccccgggatcacgccattctcctgcctcagcctcccgagtagccgggacgaaccagtcctggccc

SEQ ID NO: 167854 - DNA, 122 bp, Homo sapiens
tctcacacagtagacagacggagttgagatgctggaggatgcagtcacctcctaaacttacgacccaccaccagacttcatcccagccgggacgtcctcccccacccgagtcctccccattt

SEQ ID NO: 167855 - DNA, 122 bp, Homo sapiens
cgatctaaggaatgaaaggagcctggcttcttttcttgagttatgctgccatctgctggtcgtgagctggaaaacagctcatctttgaaaaccccaaccctcttctgagcgcctccatgaat

SEQ ID NO: 167856 - DNA, 122 bp, Homo sapiens
taagagttctcagcatgttatacagttggatccctgctatataatactggacagaggaaccgctcttatatagtttctattaattctactggaattcagatgctcggcctgcttaaaaaaca

SEQ ID NO: 167857 - DNA, 122 bp, Homo sapiens
cctcgcaggggctgtgggagcacccagacgggggatgatggcacagcttcgggtgtcctgcgagtggtgtccctggtgcagtcctctttctcactccctgtccacactcggctgctggttat

SEQ ID NO: 167858 - DNA, 122 bp, Homo sapiens
tgggaagggaaagggaagcagaagctctataagttcctgagccttgctccatacctgggacgggactcggcattttctgtgagttcccgagctctgctccatacctgggaccggactcggaa

SEQ ID NO: 167859 - DNA, 122 bp, Homo sapiens
accccaatcgccacggagcgtccccacccaccaggagaactacgcccctggccagaccctcgccctagcgggcccgacatgcccaccacccaggtgaaacccacccgcggacgcgcccctcg

SEQ ID NO: 167860 - DNA, 122 bp, Homo sapiens
ggggaggcaccctgaggccagagggagcatggccccggggactgagcatccggctcagagcggcttggcagaggtcggtggactggggttaaccacagaggtctctggagggcagacaggag

SEQ ID NO: 167861 - DNA, 122 bp, Homo sapiens
agctaggaccacaggcatgcaccaccatgctgggctaatttttaaacatttttctagagacgagatctcactattttgcccaggctggtcttgaactcccggcctcaaggcatgagtcaccc

SEQ ID NO: 167862 - DNA, 122 bp, Homo sapiens
gctcccctatctgggcaccacacaaagaggccgctgaacgcgcgcgcaccctccccgaggcgtgcgtcaccgccgacgtacggcagcctagggctaccagccaatccccgcctcgctcccct

SEQ ID NO: 167863 - DNA, 122 bp, Homo sapiens
tgggccacacggcaaaacactatctctacaaaaagtacaaaaattccctgggcatgctagcgtgcatctgtagtcccagctacgcagggaggatcacctgagcccgggtaggttgagactgc

SEQ ID NO: 167864 - DNA, 122 bp, Homo sapiens
cagcaggtgagggcgtggccggcacctgcaccctgccgggcccttcccggcacctgtgtgcgctgcgcttggtcctccagacgagtctgatggcatctcactagcaaaggggagcgggggct

SEQ ID NO: 167865 - DNA, 122 bp, Homo sapiens
gacagtggatgaagaagaacctcccaaatatgtaaagtcaaagctgcagggggcaatggacgaagaaaatactcactgagagcagaacaagaggctggttaacccaaacaactaatacatca

SEQ ID NO: 167866 - DNA, 122 bp, Homo sapiens
gcagacggaaactgacgcgctccccctggaggcagcgcaggatgctcccgggggtccaggcgtcccagcctgaggtccccatcctcgtgtgcagcctgggcgcctggtacaagtcggggtaa

SEQ ID NO: 167867 - DNA, 122 bp, Homo sapiens
gtgttggtcatgtctggtcgcggcaaaggcggaaagggactgggtaaaggaggcgctaagcgtcaccgtaaggtcctgcgagataacatccagggcattaccaagcctgccatccggcgcct

SEQ ID NO: 167868 - DNA, 122 bp, Homo sapiens
ctcctttgggtgcgtgtgctggtctggggcggcggagccttcctctcccttgacgtcttgcgagctcttggcctggaatccagaaagggtgactcgtgaggcacagactctcggaggggtct

SEQ ID NO: 167869 - DNA, 122 bp, Homo sapiens
gcagtccccatggccagctgcagcctcccgcaccagctattcagcaacgtctgatgctgccgtggatttagcacaaggatcaagaccgagttagaccttgaggctccaattaagtctctggg

SEQ ID NO: 167870 - DNA, 122 bp, Homo sapiens
cagccaggaggagagatgcatagtgaaacgagtttgccaagtgattggaagattaatatgcgacccgctgtcagtctctggttaagccggtagtccatctatgaggcagttattcactgtta

SEQ ID NO: 167871 - DNA, 122 bp, Homo sapiens
tctccagggagagagggtggtcgtctgtgcattccaggttactgcacttgtctgatgtgacgtagcaacacccaggtcttcttaaaacaaagtcatcagctttgccaggttacatactttat

SEQ ID NO: 167872 - DNA, 122 bp, Homo sapiens
tggaatccgaagggagcctcagcgagagggctggccaggacggcgcgtcctggcgcccggcgtctgcagtgcagagccagtccctggctgcacgcctgccgggcgtctcccagcaacagccg

SEQ ID NO: 167873 - DNA, 122 bp, Homo sapiens
gttttatgttctgctcacagacattgctttcaaatgttagctgctgaaatccacaataaacgtcatttaaaaaaaaaaaactttgtagactgaattaactaccatgcttcacataaatcaca

SEQ ID NO: 167874 - DNA, 122 bp, Homo sapiens
ggggcggcgggcggcggcggcggcggctacaggagggactgacaaagccccacggcacgccgctccctacttatagcaccggcgggtcgccatggagacgcaccagctcaaaccagccacga

SEQ ID NO: 167875 - DNA, 122 bp, Homo sapiens
ctttgttggactgccactgtgtccctggtgatctttggctgattggtctaggtcatagatcgacctgccggggtgcagaggagggtggagagtaactcagagggtcaagcatgaaagatctg

SEQ ID NO: 167876 - DNA, 122 bp, Homo sapiens
agtcaacctctcctctaatatccctgcctccccctccctcatcacagctcctgaggcttccgaactcagtccctgtcagcagaggccaagaaatccatagtgaggcccctggctgtgcagaa

SEQ ID NO: 167877 - DNA, 122 bp, Homo sapiens
ccagcgaggagtgaggctgccaggacatagtggggacttccccggcaccccagaccccctcgggagctgctgccaggccaggacagtgtctggcaggcacctgaagtcccgccctgcgcggg

SEQ ID NO: 167878 - DNA, 122 bp, Homo sapiens
gggagttgacaaaaaagaaacgtagctgaccttgcccttccccacacccttcagcaaacacgtggccaaaggcttcccacagacaggatcttcccatagggctggtctggagcccagctcac

SEQ ID NO: 167879 - DNA, 122 bp, Homo sapiens
ggcaagcccacctgcatacacatggcattccacatcctccacacccatgctcccctgacacgcacacatgcatgcagacaggcaaaccctcctgcccacagccccacaccacagtcgcacgc

SEQ ID NO: 167880 - DNA, 122 bp, Homo sapiens
ctctcgccctcccagtccctggcccagagagtggaaagcggactgttgttctccaacagccgcatccctccccaactttgaacccattctgagaagtggagagtagtgtcttccgcgagccg

SEQ ID NO: 167881 - DNA, 122 bp, Homo sapiens
cacagaaatagggcaagggatagggcgagggctccagggcaggcgtcctagggcacctggcgcaggggcggaccggaaaccccaggcaaacgcagagtcggagatggcattccaggcggaag

SEQ ID NO: 167882 - DNA, 122 bp, Homo sapiens
cagagggagggacgacccgggggagggcgggacctgcagagccagctcctttccagtagccgcgaccccctgccgccagcgtgacacacaagtctttaaaaggctctctgctcaggggagag

SEQ ID NO: 167883 - DNA, 122 bp, Homo sapiens
agaatgagcaaaagcctggaggcagaagggtgtcttggtattatatgttttaaataccatcggaagctaatatggaagggacacagggagcaaggagcaagtggctaaagatgaagttgcag

SEQ ID NO: 167884 - DNA, 122 bp, Homo sapiens
gcccacctggctcccggggagctgagcccctgaactccctgccaggccagagtgacagcccgggtgaccgaccaggggacagagtgctgggaattcacgtccctgaacacactgcaccctcc

SEQ ID NO: 167885 - DNA, 122 bp, Homo sapiens
actcatgggggctggttttcccgtgctgttctcgtgacagtgaataagtctcatgaacaccgatgattttataaagagcagttcccctgcacatgctctcttgcctgctgccatgtaagaca

SEQ ID NO: 167886 - DNA, 122 bp, Homo sapiens
acctctagaaaaatgttgttttattcttctcgatacattcagtaataatgctgacaaggccgacaaagtgttgactgggagaggaagttatgggactttctggaatatacaaatcagaatga

SEQ ID NO: 167887 - DNA, 122 bp, Homo sapiens
caggggtgtgaggccacggatggctgctgcttccttgcttccttcttttgaagccagaatcgactctgctcttgctcgatgacagcccctcgccggaggcgcggctcctggcctctgcgggg

SEQ ID NO: 167888 - DNA, 122 bp, Homo sapiens
ctccgccgtctggatatcgcaggaccacggagaatcccaccggcccttgctgagtcattgcgggccgaggtccgggctccgcgccggcgcgcctgcgaggtggactgtcccggtcaccggcc

SEQ ID NO: 167889 - DNA, 122 bp, Homo sapiens
ccttgtagcctgagcccccagagagagacagaagctcttcaaagctgagccggtgagaggcgcatctggggccctggcctcccacagctctgctggccaggcccctgcacccccactcacca

SEQ ID NO: 167890 - DNA, 122 bp, Homo sapiens
ccagcggatgcccccgcggggcagaacagcggctactcctcccggcccccgggccagagccgccagccgaggccccgccccggccaggcccgcccccattaaccccacctttgccgctgccc

SEQ ID NO: 167891 - DNA, 122 bp, Homo sapiens
ctgcatattgatagtggcagcgtaatgtgatccttttcccttgcgcaatgctttagatagcgctctggatgtccagcttgggaaaaggccacatgagacacacaacaaagatatttagtagg

SEQ ID NO: 167892 - DNA, 122 bp, Homo sapiens
gcaccaccccctgacacgtgcggcaccaccccctgacacgtgcggcaccaccccctgacacgtgcggcaccaccccctgacacgtgcggcaccacacagctagtgccggaactttttgtgca

SEQ ID NO: 167893 - DNA, 122 bp, Homo sapiens
ctttcaccgctcctggtcctcgtttgctccccagtgatgtcaacagctgaggactgctcacgctgcaacaaaaggctctgcagtcgctgtctagcttgccctagtcgtctctagagttctgc

SEQ ID NO: 167894 - DNA, 122 bp, Homo sapiens
aatcgtcgtgatccacctccccaggaccttggagccacgtttacaaataggaatagggtacgtgggagggatagaacgtacagccaataaaatcatgtggcgccgatgggcgtgttgaggcc

SEQ ID NO: 167895 - DNA, 122 bp, Homo sapiens
tcctggctgaggacaccccctccccctccacgcgcacacactcgcttcctttcctgccgccgccacctggttcacagggcctgtcactgctgtccatctgccactagggggcgcctagcaga

SEQ ID NO: 167896 - DNA, 122 bp, Homo sapiens
catctcacagaactgtaagtcccatttgcagctgggttgaaaaagttgacataaagaaaacggatgttgctaaaaagcagaaggccatttaaaatacttgttgtgaattattaatttcttta

SEQ ID NO: 167897 - DNA, 122 bp, Homo sapiens
tcagtgagtttgggaccagccgcggccacaggggcagctgacccgggctctctgaggaggcgccgcggcggcgggaggccccgggcgcggggtccggacaaggagtggcggggaggcagccc

SEQ ID NO: 167898 - DNA, 122 bp, Homo sapiens
ccccgggcgcgcatatccactttgtcgccagtgaacgctagggagtcctcggaggggggtcggggccaggccaggagaggtgcccgcgggacacgggggacggggactggggggggcggttg

SEQ ID NO: 167899 - DNA, 122 bp, Homo sapiens
tgtggggatgaattgtgggaagagggtgcagcactggaccccttccctgccacccatccacgtgcatcatcagtgtaatctctgattggattcctaattggggaggtcttgcccatctctag

SEQ ID NO: 167900 - DNA, 122 bp, Homo sapiens
gggcagcgtgcggggagctgggggcggggcgcggccgcagctccgtttccggtggctcgtcgcgctcgctcactccagctgcagccactctcgcccgtggctgcttcctccatcctggtatt

SEQ ID NO: 167901 - DNA, 122 bp, Homo sapiens
gccgtcgtagcagtgcggcagccatttgtctcacctcataacctgctcttctatttctgacggcatctaagaggaaggtagtcttacacagacctgggatattttcatagatttcctctgct

SEQ ID NO: 167902 - DNA, 122 bp, Homo sapiens
agccccacagcctcctatggttccgtggtccagtccttcagcttctgggcgcccccatcacgggctgagatttttgctttccagtctgccaagtcagttactgtgtccatccatctgctgtc

SEQ ID NO: 167903 - DNA, 122 bp, Homo sapiens
ctatgattttttaaatcttgtaaaccgcacgcagcaatgaaagtgctaaacgccatggtgcgtgacccgcgccaccctcacgctgctctcctttaccccccagactccacttttcctccgcc

SEQ ID NO: 167904 - DNA, 122 bp, Homo sapiens
agggaggagcgagagagggtggggctgaggaggaggctgtgtgagaaaaggggcggggcgcgcccaaagtctggcggaagagcgttaccctggcaaccctcccgcggaggccgagagaggcc

SEQ ID NO: 167905 - DNA, 122 bp, Homo sapiens
tgggcaggcccaggctccgatcctggggacaggcagaggctgctgggccacggggagccccggcaccacggaggcgatgaccaggtgtcactcttcacaggaagaaggttagggtccgtcca

SEQ ID NO: 167906 - DNA, 122 bp, Homo sapiens
cgggacgggggacgcggctccaggcacccaacagcactgacggcgaacacttcacgggcgcgcgatgcctcgacaaggcggccgccaccaccacctcagctgccctcgcgggcagcacggcg

SEQ ID NO: 167907 - DNA, 122 bp, Homo sapiens
catataaggaaaaccagagggaagattagatttgttttacagagacttgtttcacctccacgtcaggaaggcatgacttatttgtcttagttgtggtgtgatctaggcctgcttgtatctct

SEQ ID NO: 167908 - DNA, 122 bp, Homo sapiens
aaacacctgcaggaggcagctgccccctaagctaaggctggggacccaggaggggtggtccgtgcaggagctggggaggccgctggggaaaggggcgccccctgggctcggcctcggaggag

SEQ ID NO: 167909 - DNA, 122 bp, Homo sapiens
ccgccaagtatttattagaaggcttgttaaaccacaaacatccaccagatgggtttttgccgtggggtcatgaggcacatacggccttgtaaaagcactcagaccacattcctaggaggctg

SEQ ID NO: 167910 - DNA, 122 bp, Homo sapiens
aataggtgcaaggaagaggttgcagggcccagaggccttgtcctttctctccccagcaaacggggctaggactgtcctttcttctaaagggcattcacatgtaaaacaggcccaggcaccaa

SEQ ID NO: 167911 - DNA, 122 bp, Homo sapiens
ctagtcagaagcactagcattggaagtggggtcgttgtgtgggactgagccctcgacttgcgggatctgacgcgacctcgagatggatggcgtcgggattgaattgaggatacccagcagtg

SEQ ID NO: 167912 - DNA, 122 bp, Homo sapiens
gctacttctctggggctccaggtcctgcttgtgctcagctccagctcactggctggccaccgagacttctggacaggaaactgcaccatcctcttctcccagcaagggggctccagagactg

SEQ ID NO: 167913 - DNA, 122 bp, Homo sapiens
gggtggctcctccgtcgtgggggacagcgctgagagctgagagtggggcggctcctccgtcgtgggggacagcgctgagagctgagactgggacggctcctccgttgtcggggacagcgctg

SEQ ID NO: 167914 - DNA, 122 bp, Homo sapiens
cctgtggactttaacgggcggagtggcggtgggtcagcatctaccatccaagagcctgaacgggcaagagtgggaacgggtcctcagccttccacaagccggcggtcagggccttttcttgt

SEQ ID NO: 167915 - DNA, 122 bp, Homo sapiens
gtaccccataattttttagctcaacaggagacctgcctttatacccaccaagttaagcagcgcagtagccctctaagggccagccccacgcccagaggctcctctgacagcgtggacagatg

SEQ ID NO: 167916 - DNA, 122 bp, Homo sapiens
accttacctgacttgggcaatgtcaccaggtggacgtcggtgtcctgggactggaagttacgtgcgtcctgccagggctcctgggcgcgcatgttccctggcaagcaggtgcaggtgatggc

SEQ ID NO: 167917 - DNA, 122 bp, Homo sapiens
cgtgaacttcagtctcccctcgcgttcctccccttccttgctgacgtcatccaggagagccgcagactggaaacaacgctactaacggcacttcctcatcacgtgacgagtcacgcccctcc

SEQ ID NO: 167918 - DNA, 122 bp, Homo sapiens
tggaatcccggtggggcaggcagtccaacagtgcagtgccctctgccttgcccatgcccacgccgctgcagcaggcaggcagagccgcagaggaagatgtttgtgtgtggaacaaggctcgc

SEQ ID NO: 167919 - DNA, 122 bp, Homo sapiens
gggagatgacccaggggaccgtgcgggacagggccggtgaacccgattccgcgaggcgggcgtctcgaagggactggtctgcgtgcctcaccgggttccccagcctggctccgaggaaaggc

SEQ ID NO: 167920 - DNA, 122 bp, Homo sapiens
cctctccctcagtcacagaaaccacgcccacgtggaatagagtctagggaaaaagttggccgaagttacattcacaggaaatcaccattgttgggggccctggcaatgaacttgaatgacat

SEQ ID NO: 167921 - DNA, 122 bp, Homo sapiens
agttagcgaatctttgccatattaattttccaagtggtgttgtatcgaattaaaatagaacgaaaaatgttcaattactagtttactggggacttgcttgcctcgcctgttagcatcctggg

SEQ ID NO: 167922 - DNA, 122 bp, Homo sapiens
actttcttgaccttgccagggttggggccctggagtcaggcctagctccggcggggctgacgtggccaggggctcaggcagtggctggacacactgagctgtggagctggagggcctcaccc

SEQ ID NO: 167923 - DNA, 122 bp, Homo sapiens
ggcctctcctaggtttgcagcaaggatgaaggcagaaggccgggcacagtaggcacttaacgaatgctgattctgagcagccaggactgctgccagggccgggttagcagcacacagcgccc

SEQ ID NO: 167924 - DNA, 122 bp, Homo sapiens
cagacacgcaatggcttctcttcgctcttggaataaagacaaaaccctttcatgtaggtccgcaaggctccttccggcttccgccaccgccacatccccagttccagctgcggcctgtgtcc

SEQ ID NO: 167925 - DNA, 122 bp, Homo sapiens
ggctcaccatcggtgtcacaagaaaaccttgcagactcgccctcgtagacggtcatggaccgtggctttgttagaattcttgctgccaaagtcgtcttgatctttctggttgtggatttttc

SEQ ID NO: 167926 - DNA, 122 bp, Homo sapiens
ggcccctggggtgccctcggcagcttcggtccagcctgcatctgcccctcggccttccgacgtgggcggtgggccccagccccacagaccagcccagcattcaggttagttctacttcttca

SEQ ID NO: 167927 - DNA, 122 bp, Homo sapiens
aagaacttgtaaacaaaatatacaaataactcttaaaactcaactataataggccaggctcggtggctcacgcttgtaatcccagcactttgggaggccgaggcgggtggatcacaaggtca

SEQ ID NO: 167928 - DNA, 122 bp, Homo sapiens
tgacccaggtcccccaagaaagccaccggagaaagaaaatttgctctcagacagggacaacgttaaggtgagcagccctccacagtggtgtgatgtctcctgcgccaggcctcctatggcca

SEQ ID NO: 167929 - DNA, 122 bp, Homo sapiens
gcgcggtccgcacgggcgttttgagcacctcctgacagacggggcagtaggatgtggccgcggagaggtcctcagccatggcgggggatgggggaacaaggcgatggtgacagcggcagcgg

SEQ ID NO: 167930 - DNA, 122 bp, Homo sapiens
tcattatttctgagctctgagtcctgtggtcccatcagtcctgcttcctcccttctgccccgcagtgctggcctctcccagctggccagttgtttatgaagaaccccagcggagtctccctg

SEQ ID NO: 167931 - DNA, 122 bp, Homo sapiens
tcagccctactctctgtttgcctccataacttaatataaccagtggatttataattatgacgggctgtaaaaatatacacacttcattaggctaaagtagggtttcttgaccttggcaacat

SEQ ID NO: 167932 - DNA, 122 bp, Homo sapiens
ctcggactctccaaacttcgcagtgaatttggaagggttgctggtggtaactgagcgtgccggctttggggacctgttggaaatagacgaatgaatgaaacgtagatttcccttggcaaaga

SEQ ID NO: 167933 - DNA, 122 bp, Homo sapiens
aaggacagaagcccgacaaaaatgagcacataatgtatgattccccccttttttttgagacggagtttcgttcttgtcgcccaggctggagtgtagtggcacgatcttggctcactgcaacc

SEQ ID NO: 167934 - DNA, 122 bp, Homo sapiens
gcgggaagccgcggagcccgaacctgagactggacctgaggagacctcagcctcggtgctcgggccgccccgcctctgccggaaagtccgcgccgccgctgccgccaccgtccgcagcccga

SEQ ID NO: 167935 - DNA, 122 bp, Homo sapiens
tgatgctgccgccccggttgctggccgagctgaagcccccgccactgactccatagcgggcgccagagatggagccaaagccgctgccaccgctgaaaccgctgctgccgccgccaaatcca

SEQ ID NO: 167936 - DNA, 122 bp, Homo sapiens
gagagtggctgcattgaccccggatacctctggaagtcacatggagtagcatgagccagtcgtggaaagtccacttgcagaagaggggtggaattttggcctgggtgccggtactttcctgt

SEQ ID NO: 167937 - DNA, 122 bp, Homo sapiens
agggggcaccagactccaggttcacatacaacacatccctcaaagaatatgcgtcaagctcgcccacagtttccaaggctccagggtggtccagtgtgggcctgcgggtctgtgcagctcca

SEQ ID NO: 167938 - DNA, 122 bp, Homo sapiens
agtgcacgccaatccggccaggcgctcgcgctgggttctgctcacgcccgtaggggcccgcgttcgctgcaacgggcccttcctgatggccgatcgtcggactcctaccccttttgccggct

SEQ ID NO: 167939 - DNA, 122 bp, Homo sapiens
tgaataaaggaagtctgactcacagctggcaccgtcattgtcctcaggccacctgcccagcgttgaatttgccactgagcccaggaccagacccagggcaagctcaggtgaccctccctgcg

SEQ ID NO: 167940 - DNA, 122 bp, Homo sapiens
ggtcatcccacgtacaggcctgacgggtggggagcaccctaactccataaaccccagggacgcgaggccgtgccaggggcaacaacagggggaaatgggatccacgggggtgtggggctgtg

SEQ ID NO: 167941 - DNA, 122 bp, Homo sapiens
tcaggccagattccagaaccctgagggcattccaggcggtgggcagctgggccagccgtgcggaggtgggcatgactgtagcttctagctaaaccaggcatcggtccaggcatcggtggcgg

SEQ ID NO: 167942 - DNA, 122 bp, Homo sapiens
gagacggcggcgggacccgcagtttgcgcgtgcgcggctccgccccaggctcctccctcgcgctggcactcccgccttcgcccggccctccccgcgctttacggcccggcacgccactttta

SEQ ID NO: 167943 - DNA, 122 bp, Homo sapiens
aactgggtcttcaatgacctccctttgcaggctccagattgaccttagctcagagtcagtcgcctcaggcttctccaccccagtcaaggctactcacttacccttacatgccttacatgggt

SEQ ID NO: 167944 - DNA, 122 bp, Homo sapiens
tttgatcgccaccgagcgggttggtgcagcccccctccccatctcgagccctcctacctccgcctgcacaaagccggacgcctgcccgccccaccgtgggtcgatgcaccctgccaggggag

SEQ ID NO: 167945 - DNA, 122 bp, Homo sapiens
gctcgaatccgaggcagagggtcccgccgccgatggggacaccggagacaggggacagagcgttcggagacgcggaggaggaagggacttaggccagggggcgggcagaaactcagtgtttt

SEQ ID NO: 167946 - DNA, 122 bp, Homo sapiens
ttcgggctcccacggctgccgcctggggcaagtgcgtctccccgggcgcctacgcggccccgcgcgctcctggcagcgtcgcccccaagccagccccgcctacccagagagggccagtcctg

SEQ ID NO: 167947 - DNA, 122 bp, Homo sapiens
aggtggactgcgactacagtggcaacagcattcagaagcagctggagtgctggtgggaagcgtgggtgacctccaccggccttcaggtgggcatcaccgtcaccgacaacgccagcatcggg

SEQ ID NO: 167948 - DNA, 122 bp, Homo sapiens
ggagctacacttcccaacatgagattgcaccattgcattccagcctgggcaacaagagggcgggccgggttttaccacccgaagcgacggccttaaggatcccggaagcggaggacacgtgg

SEQ ID NO: 167949 - DNA, 122 bp, Homo sapiens
ttaagtgcctgacctcaggcaagccccccccacccagggtggaaggttaatgtggctgcccgccatgcaggcctgggcctccaggaggctcctcgaagggacaaaggaccagccccctgtct

SEQ ID NO: 167950 - DNA, 122 bp, Homo sapiens
gggggtggtgggagaaggaggaggcggcgaatcacttataaatggcgccgaagcaggacccgaagcctaaattccaggagggtgagtgtgcgcctttgggaaaaaggcacctaacggcgcag

SEQ ID NO: 167951 - DNA, 122 bp, Homo sapiens
caagctgtgatgctgctggttttatctctagtgaaataaagtcaaaagttatttaattcccgtcacctgtctcagtgtcatctgtgtggttggtgcagggctctcccaccccagggcccatg

SEQ ID NO: 167952 - DNA, 122 bp, Homo sapiens
tgcctcaggacctttgctccggatgtaccctcgtccacgttcgccctcattggccctcctcgagctctggctctctgtctgaaaaataaatgtggccggatgggtgcagtgggtcaagtctg

SEQ ID NO: 167953 - DNA, 122 bp, Homo sapiens
tttctccggtatgagttttctggtgcttactgagatttgacctgccactaaaggccttcccgcactcggcacacacatagggtttctctcctgtgtgaactggctgatgcaccaggagctga

SEQ ID NO: 167954 - DNA, 122 bp, Homo sapiens
gcctgacctccctgaggaaggacaacacgggctatgacctgaagcagctgttcatcgggtcggagggcactttggggatcatcaccacggtgtccatcttgtgtccacccaagcccagggct

SEQ ID NO: 167955 - DNA, 122 bp, Homo sapiens
ctgctgggattattttgaccccccagggcagagtgtagccatctgactggctttctctctcggcaggagacggggcgcacgcctgcaggtgggggagccccaatacgtcacacggatgagcg

SEQ ID NO: 167956 - DNA, 122 bp, Homo sapiens
acatgcaaataaacctcgtctcttccaaccacacctcaccctgactctctgggtgtgatccgtggacacagtttggggaccaaaacaggatgttctcagcaaatccgccgagttccaggccc

SEQ ID NO: 167957 - DNA, 122 bp, Homo sapiens
cgcaggcctgttctccctccatggcctggaagactcataaacatgcttccaaagtggcctcgctttcttcagctacaaatgtcagactggccctgctgacccctcctcacccagagaaggag

SEQ ID NO: 167958 - DNA, 122 bp, Homo sapiens
aatactctgtggccatgtttaacttgggagcaagtagtggcaaaacctcctatacaaaaacgtgaccacacctcattcatgcctttgtagagctaagcaaaatgctttagatcaaaaattgc

SEQ ID NO: 167959 - DNA, 122 bp, Homo sapiens
cacaggttacataacttgcccaagttctgatagctattaagtggtgagtcagacattgcacgtgcttaagaccaatggtaataaactggccctgtgcctctgctttttaatctgtctgctta

SEQ ID NO: 167960 - DNA, 122 bp, Homo sapiens
ctgcgggtcttcccgcgacgtcctccgagcctgagctgctgccgagacaccctcagcgttcggtgattcccatagctccgcagagcctccgctcccacaggtgagctgggtgggccttgctc

SEQ ID NO: 167961 - DNA, 122 bp, Homo sapiens
tcactcgcccaaggccacacagacagcaggtggaggctgcaaaccccatttgtctgaccccgtggtctgtgccctccctctggctgggccgcctcagagggccccacgtctgaactgtgtgc

SEQ ID NO: 167962 - DNA, 122 bp, Homo sapiens
agctcagattggggggaaatggcccagcgactgtatttcatctttctggtcccaagaggacgctggaatggagagtcgtgcgtgagtgtgtgcgcgcgcgtgagggtgtgtaagtaaaatgc

SEQ ID NO: 167963 - DNA, 122 bp, Homo sapiens
gaaagacgacctccccccaccttgtgccacaggagcccctggaacatgggataatggctacggcagacaggcaggcaatcagcacacgtaccagtcatgttttatttggaggttaattccta

SEQ ID NO: 167964 - DNA, 122 bp, Homo sapiens
cccgccccggcccccgggaccccggccccgccccaccccgcccgggccccgcccagaccccgcccagaccccgccccaccccgcacgagcagccccgtggggatcgaagccctggggtctcg

SEQ ID NO: 167965 - DNA, 122 bp, Homo sapiens
gatgcgtcatgctggcagaatgacaagctctgggcagggctgagcagaggggccgggcaacgcggggaactgatagcggtccactttattgcagtgccttcacggctccgccgctgcgccct

SEQ ID NO: 167966 - DNA, 122 bp, Homo sapiens
ttgaggctatttaataacgatgatgtactattctgtaatttagaagatagttttttcttacgataaaatgttttactacaacaatcaattctggtatagtacttggcactttacaaagtgat

SEQ ID NO: 167967 - DNA, 122 bp, Homo sapiens
tcctcaccttatctgctcgtccttatcctgcctagcaggctgtcatctccacttcacagacgcaaggcagtcatttgcctgcagttacctggctgcaaaaggtcccatgaccctagatgact

SEQ ID NO: 167968 - DNA, 122 bp, Homo sapiens
gggacatagtggcagggcggcagggtccgggagaccgctaggagcgcccggtggaggggccgcctttatctgctgggggattccaggagtggcccggaaagtcttgcttcacaccctgctgg

SEQ ID NO: 167969 - DNA, 122 bp, Homo sapiens
cgtggggcggggcaagaaaaggggaagagcccaacggtattaacccctcggcagccgcggcgctgctatgctgcagtctcccgcagagcccttgggaaaccatcccgctagccaattcagcg

SEQ ID NO: 167970 - DNA, 122 bp, Homo sapiens
ccaggtccctcccctcctggcctgagctgacaggcagaggtggagagggtcagtccccatcgacagaagcaaagagatcgtcctggggcagtttgcacgctgatggcccaaggtccgcgacc

SEQ ID NO: 167971 - DNA, 122 bp, Homo sapiens
agcaaggcagcaaacagtttgttaagcagaatgcaatcagcaacggatcaggctgacctgcgagtggtatcagccccagtttgttatagttcatggccttttatatgttttttcctcacttg

SEQ ID NO: 167972 - DNA, 122 bp, Homo sapiens
gccccggagccactggggcctggctgaggcgaccctgcacctgggccccgtgggctcgagcgggtccacagaggacccccggctgcccctctgtgcagaaccctccgggacgggaccgtggc

SEQ ID NO: 167973 - DNA, 122 bp, Homo sapiens
gccagcctgggtgacaaagagatactgtgtctcaaaaaaacaaaaaacaaaaaacaaaaacgaaaagaaagacagaaaagaaagcgtgtggcattgcaaacctgtgaatcctccctagatgt

SEQ ID NO: 167974 - DNA, 122 bp, Homo sapiens
ttgcctagtccctgtggttcctgagagtgttgctggtatgctgtcagggcatcctccggccgtccatgtgacagggtggctgtctttctgtagtgtgcagaacagctggtagaggcacttcc

SEQ ID NO: 167975 - DNA, 122 bp, Homo sapiens
ctggggttgcactgggactccaggaaaggcttagctgttgacgaaggaccggggcggggccggggggcggggcgaaggccaggatctccaggtacccggaaccccaaggggcgggtgtagca

SEQ ID NO: 167976 - DNA, 122 bp, Homo sapiens
gggttggaatttctgactctcttctctgccttgactcagaataggaaaccgaatcctgaccgcgcgtttctttttatagaattaaactttcttgccaacttcctccagagcacaagattacc

SEQ ID NO: 167977 - DNA, 122 bp, Homo sapiens
ggctggggaccgcgggtcgggtccggtttccagggggttcctggtgctcgaggctggcggcgaggaaggtactggctgagggcccgcgtcgggcccgccctgcgcacgcgtcgtgatcaagg

SEQ ID NO: 167978 - DNA, 122 bp, Homo sapiens
acgctgtgccgcaagccccgcccccagctcaaatcctctttccttccccttcgccgctgccgcctggccaacgccacttaccctgtgcaacctcacagggccgggccttcaacgtcagcact

SEQ ID NO: 167979 - DNA, 122 bp, Homo sapiens
tatgttggtgatgcccaggggcaccaagaaccggatcaggggccagtagtgcgtgagcgccgggaatttcaccatagtccccgccgtgggctgaccccacacacatctgctgccgcgagggg

SEQ ID NO: 167980 - DNA, 122 bp, Homo sapiens
gcgcggagagcggagcaggcgcggccaatggcgcctggggggcgggccgatggagggtggcgcgggcggggtcgggggccgggtcgggcgcccgaggtcctgggccggggttccgcgggttc

SEQ ID NO: 167981 - DNA, 122 bp, Homo sapiens
ggtcccctcctggcttcaaattcaacccaatcagctctgccgatggtttgaaactgcacacgccgacccacccgccccgaagtctgaaagttatgccctggagacctgcgagctgcggagtg

SEQ ID NO: 167982 - DNA, 122 bp, Homo sapiens
tgtgtttgccgtggctgttcatgtttgctgtggctcatgtttgccgtggctcgtctttgccgtggcccgtgtttgccgtggctgttcgtgcttgccatggcttctgggcactgctcctgagg

SEQ ID NO: 167983 - DNA, 122 bp, Homo sapiens
tgggggtgacgcagagaggaacgcttgtacaccacatgtggtccactttcctccgggctccgagaacccttgggcccaccgtgcaggggctcaatcaggtactcttcctcgtctgccacgat

SEQ ID NO: 167984 - DNA, 122 bp, Homo sapiens
atatagcgtggggagggaataaagatgagtaaaatacagttctaactctgatgggaggggcgcatatcaattatgtcaaagatcatgagaagatagtctgctgtcatgaagagagaaaaagg

SEQ ID NO: 167985 - DNA, 122 bp, Homo sapiens
aatgatcactcagccaccctgagcagtgagtctcattcttttcagtaaatcctctcgctgcgtggtgagaaaactgatgcctggagtctgtgacctgcctaggaccacagaactcggtagta

SEQ ID NO: 167986 - DNA, 122 bp, Homo sapiens
taaccctgtggactctcgatgactagaagtttcatgtgagcagcgcacacacccagtcagcgtgagcagcagcactggcccacgcaggtccacggcacggaaaggagattcgattcacaaat

SEQ ID NO: 167987 - DNA, 122 bp, Homo sapiens
aaaacacacatacacacacacgtttgggaccatccctatttcctcgctctgcctaagctgcgtcacaccattcatcactaggtgacatcctactacagataccttgtaagcatctgtgtatc

SEQ ID NO: 167988 - DNA, 122 bp, Homo sapiens
ccctccggccccgcccgcaggttcctgggtctctccttcaagaccacatcccccagagaccggcggagtttcgcacagccttctgggacttatagttctttaaggacgcggagtgggctcac

SEQ ID NO: 167989 - DNA, 122 bp, Homo sapiens
cagcagtgtgagctctctgtcctcctctttcccaaactgcccacccacagagggcacttgcgtaacaacccaccagccagcttgtgaccagctgggcagctgggatggccccaggcatcaag

SEQ ID NO: 167990 - DNA, 122 bp, Homo sapiens
tgcttacagtgctgtccagcgccccctgctggcgccggggcacggcagggctctcttgctcgcagtatagtggtggcatgccgcctgctggcagctaggaacattgcagggccctcttcctc

SEQ ID NO: 167991 - DNA, 122 bp, Homo sapiens
tccgaagtctgcaccccgcgcagagcactactgtaacttccaagggagcgctgggagcagcgggatcgggttttccggcacccgggcctgggtggcagggaagaatgtgccgggatccgcct

SEQ ID NO: 167992 - DNA, 122 bp, Homo sapiens
ctcagtgatcccgcagtgctcctctgtagagtgggaacccaggtccatttcaaatatctacgttggaatgagtggatctcgctgggggtgagaggcactttgtctacccacactgccagtcc

SEQ ID NO: 167993 - DNA, 122 bp, Homo sapiens
ggtgagagggagaggaggggaggaggccccaggacgccagggtggccggctgctgggccacgtgctgtccgtggtgagccctgccgctgtcccatggcccagggagccactggtgcggagcc

SEQ ID NO: 167994 - DNA, 122 bp, Homo sapiens
ggaggcaggaagagaggatggagcagcgccgggcggggccgtgggtcacttactggggaccggcctcagcacgtcggggatgagaatctccaccagcgcctggtagaggatgtggtcgcagc

SEQ ID NO: 167995 - DNA, 122 bp, Homo sapiens
tctggcaggacaggcttcagggggatcagctcagcttagctggggaacgctttctgctctcgtaagcccctcatccccataccacactcaactcttcccttttgtcaccttcaaaaggtttc

SEQ ID NO: 167996 - DNA, 122 bp, Homo sapiens
gagaagggaggcagctgcggcaaagttagagcaagtactgcagcagccaggttgggtccgcgccgtcgggtttctgagaaaagggaggaaagaggcggggcctgcacggtgtgtccccgccc

SEQ ID NO: 167997 - DNA, 122 bp, Homo sapiens
aaaatggggaagatgcccacctgagtatctttctgcataatactgggcctgaggtcctgacgctagggaggggtgtttgccgctttgggcaaatgtccaaaattccacagcaggacaccctg

SEQ ID NO: 167998 - DNA, 122 bp, Homo sapiens
ggcataattcaaggccatcctccggctgggtggcctctggttcctcaatcagtagagcctcggcatccacccacaggggcacctccatgtccattgggtcctcagaggagcgcagggcgaac

SEQ ID NO: 167999 - DNA, 122 bp, Homo sapiens
gaggcgccgagaagccacgcgggctcctgttcccggaccgcaccgctggggcgaggctaccgagtcaccacgacccccaggccagcccaggccacgggtgactcctgggggctgcccgcggc

SEQ ID NO: 168000 - DNA, 122 bp, Homo sapiens
gcgcagcgcatcacggcggagctgaagcgctacagcatcccgcaggcaatcttcgcgcagcggatcctgtgtcgctctcagggcacgctctccgacctgctgcgcaaccccaagccgtggag

SEQ ID NO: 168001 - DNA, 122 bp, Homo sapiens
ccagaactcaacccaggacgcaagagctcacgctcccggcctgggcgcacgcttaggatccggattcctacttccagggctggtcctgcctgattttgggggctaacccattcttccgctct

SEQ ID NO: 168002 - DNA, 122 bp, Homo sapiens
atctgtttccagctctgccctctctcactagctggaatcccgtctccaactctctgcagccgactccatctgcgcatcactccgatctgtattacagtgattactccggcgtctgcatctcg

SEQ ID NO: 168003 - DNA, 122 bp, Homo sapiens
acacgcagataggagaaaaggaagggggaactctgcggttcccaggaatgaggctgtcagcgtttggcatattgccaccgagtctccatacacgggcaggacgtgtgtccaccacctccgcg

SEQ ID NO: 168004 - DNA, 122 bp, Homo sapiens
ttgggcaagtcacctaacctctctgggcccccgtcccctcccttgtcagagagtggcctccggggcagcccgctgaagtctaaagaaggcaaaaactccccgacccctcaaggggaagacgc

SEQ ID NO: 168005 - DNA, 122 bp, Homo sapiens
tctgagccaggtgtgggatatagtctcgtggtgtgccgtttcttaagctggtctgaaaagcgcaatattcgggtgggagtgacccgattttccaggtgcgtccgtcacccctttctttgact

SEQ ID NO: 168006 - DNA, 122 bp, Homo sapiens
tcccccacctgccacctcagagggtggacacccggcagggcctggcgaggggcggcagggcgggttgtgtgcctggggctgggggatgagtgttggggtctgccggcgctgacagtggggtg

SEQ ID NO: 168007 - DNA, 122 bp, Homo sapiens
ttcgcattgcaaaatgctttattacatgactgggttgccattctaggagcattcactgagcgctcagagtgggaacgtttatcaggcatgcaaatgctaacttactttctagagaatgttta

SEQ ID NO: 168008 - DNA, 122 bp, Homo sapiens
atattctaaactaaactttctctgacacttaaaattttccacaggggttcttttaaccttcgacacttgttccaaaccttcttttagaaggctccaactttatttttcctcatacagatccc

SEQ ID NO: 168009 - DNA, 122 bp, Homo sapiens
catgcggcccctttggttgctcctcgcagtgggcgtctttgactgggcaggggcttcggacggcggcggcggagaggctagagccatggacgaggagatcgtgtccgagaagcaagccgagg

SEQ ID NO: 168010 - DNA, 122 bp, Homo sapiens
ctaaatgactgcagataaagtggtagtcatttttctcccactttttgattatttttcttccgcttttactgatcactctaattgtgctaagacactgtagagctggacacagtaaatgtaga

SEQ ID NO: 168011 - DNA, 122 bp, Homo sapiens
ggggccctggcccaaggcaggctggtcggccggacactggcctggaagtggggccgggatcgagtgtcggccaggcggctggatggtccaggaaagagtccggtgtcagcagagtgcgtctc

SEQ ID NO: 168012 - DNA, 122 bp, Homo sapiens
gcaacgggagacgcccccgcgcagcgcgagcgcctcagcgcggccgctcgctctccccctcgagggacaaacttttcccaaacccgatccgagcccttggaccaaactcgcctgcgccgaga

SEQ ID NO: 168013 - DNA, 122 bp, Homo sapiens
gaacaaagcctatctcatcatcatatgggatagtaatgtagataccagtagcaacagagtcgaaattgaaaagggaggaaggaggaacgcttctagatccctgaggagtaaatgacacagtg

SEQ ID NO: 168014 - DNA, 122 bp, Homo sapiens
cccaacaatttattctgcagcatcaccgaacggcagcccattccagcggccaccggggcacgctaagcaggcactgtgccaggctgcacagaggtgaccaagtggcctttccactaattaac

SEQ ID NO: 168015 - DNA, 122 bp, Homo sapiens
cgatagcacccgtcaggatttttattaagctggaagaattaggtaacgcccctaggtgcccgttagatgcctccgattggttacaccctctgaaggattggcctgtgaccaatcagaggctg

SEQ ID NO: 168016 - DNA, 122 bp, Homo sapiens
aggggaggagggtggaggcagctgagggcagtactgggccctggcctcaaaatcccagtccgagcatagggccccagttcatagacacccccctcatcccccagtacctccttcagcctctg

SEQ ID NO: 168017 - DNA, 122 bp, Homo sapiens
tctttgttggcggccccattgacttaggggcgatttgttaggggtaagacacgtgttcggcgagcaggctgctgctgctcactcccttgagagagggcaggcctccctctgggatgcacgct

SEQ ID NO: 168018 - DNA, 122 bp, Homo sapiens
tggctttctggcccacgcctatttccctggccccggcctaggcggggacacccattttgacgcagatgagccctggaccttctccagcactgacctgcatggtgaggacagctggccagggt

SEQ ID NO: 168019 - DNA, 122 bp, Homo sapiens
tgtggaagggacaggatacgggaagggctgctggatccaaacctggctctcaggactccccggaagcagcccaggtggacaaggctgggcctggctgagggggcggaggggcgcaggtggtg

SEQ ID NO: 168020 - DNA, 122 bp, Homo sapiens
agggagcaggacatttggacctcactctgctgcccccttggctgtgtgacatccaggtcacgttgcctctctgggcctcggtctcctcacctgtttaagaggggttgacagtcgtatctgcc

SEQ ID NO: 168021 - DNA, 122 bp, Homo sapiens
gtggccttgttcccagtcaggcactcttctcttgctatcctgcatcctaaacctgctggccggccccaactgctgccttgatacctgtccacagctgcccaccctacatggaaccttgaaac

SEQ ID NO: 168022 - DNA, 122 bp, Homo sapiens
ccaggcagatctgggcacggacgggtgccgcgctctgcaggcaaccttccgccgccccgccgccagcacctctctgggtaagagctgggttccgacagcagctcagcttaaccctctgccct

SEQ ID NO: 168023 - DNA, 122 bp, Homo sapiens
ccgacggccgcccgcccgcccgcgccgccgcacggctcctcccctccggcgcgcggggcccgctgggggctggagtcctgcctgcgctccgaccacaaggtccatcatgcccggcgcccgcc

SEQ ID NO: 168024 - DNA, 122 bp, Homo sapiens
ctcccagcccgcacacggtgtaagggacgtgtgccgggtctgcccaaccacgcgcgctggcggctgcccgggggagagtattttaggaaaaaagaacaaacaccaaaccacaaaaactttcc

SEQ ID NO: 168025 - DNA, 122 bp, Homo sapiens
tcccgcacttgccgaagtccctggggctggcaagggtgcaagacgcggagggctctatgtcgggaaaggggctctgaagaccacgtgggggcgctctaaggggtctggggccaccctgctct

SEQ ID NO: 168026 - DNA, 122 bp, Homo sapiens
agctgccgtccttcccaatgaccagagacatctttgcaagcatagcatggctggaggatgcgtttcaccaaacgcgatgtaagcaccaccaggtgcccagcgcggaggtggatgtgggcgaa

SEQ ID NO: 168027 - DNA, 122 bp, Homo sapiens
gaggcgggctccggctgcgccacgctatcgagtcttccctccctccttctctgccccctccgctcccgctggagccctccaccctacaagtggcctacagggcacaggtgaggcgggactgg

SEQ ID NO: 168028 - DNA, 122 bp, Homo sapiens
tttgctttgtgatgtctttgcttctgccttgcgggggtggggtgattatatggaaccgaccgtgtgtgcctacgcgtgcagaccctcctggcccctcaggtaaaggaaccgacggtgtgtgc

SEQ ID NO: 168029 - DNA, 122 bp, Homo sapiens
gagacaggccttgcatttatcaggccttcttccacaccactttaatgtggggcctaggcccgggagaagtgctgcttgtgggtggctcactgaggttcagactgagggtcctacccccatcc

SEQ ID NO: 168030 - DNA, 122 bp, Homo sapiens
gtgaggacacaagctgttgtctcgtttgctgtgtgctgttcgcagacacgtctcactaggcggtttgctcagaactccagaggacaagggtacgtcattcaggccacggtgcagcagacgca

SEQ ID NO: 168031 - DNA, 122 bp, Homo sapiens
tgccccagttctcactcccattgagtgtcgggtttctagagaagccaatcaatgtagccgcggtcccggttctaaagttcccacgcacccaccgggactccgattcttcccagtcgccgagg

SEQ ID NO: 168032 - DNA, 122 bp, Homo sapiens
accgcaaactatcaacaacccccaaccaccatctaccactacggccaccccaaaggaccccgacgccaacagacagtcaaacgctgatgttgcgggcagaaaacataaaagaggtgacaatt

SEQ ID NO: 168033 - DNA, 122 bp, Homo sapiens
tcagctctctcatctatttgccgaggggcacaggtttagttcccttgaactgctgaactccgcggtctgtgatcctgagaccatctctgtctcatccacatcctccaccccatttctcccca

SEQ ID NO: 168034 - DNA, 122 bp, Homo sapiens
cggggcctgagccagctgtgtgcggatggggcggggctttggaggccgcgtgaccagcggcgggtcacgtgacgcggtgcctggcgccgagcctcccaagatggcggtgtgcatcgcggtga

SEQ ID NO: 168035 - DNA, 122 bp, Homo sapiens
gatacctgttaccatggctgcgattgttagcacttcatctacacagtcaaattcacaggacgctaagatagacttcgagagttgtggatcaagaggaaactctgacatgatgattccaaatt

SEQ ID NO: 168036 - DNA, 122 bp, Homo sapiens
cccgtgacgaaccgaccagtgcaatcccagtgagcagcggctcagaaacagcctgccacacgtgggaaggcattgtactataaaggcggcatctcagatcaacgggcgaaaggcgggttgtt

SEQ ID NO: 168037 - DNA, 122 bp, Homo sapiens
gaaaagaaaagaaaaatcataggtatctgtgtggaataaattaactacaaatccccaagacgactcttgtcatcaatatttcaatccataatttagcaaacacacacagacatcccttatag

SEQ ID NO: 168038 - DNA, 122 bp, Homo sapiens
gccgatgttttaatttttggtagacatgaggcctccctctgtctccaagctggccacgcccggccgatgtttcaatttttggtagagatgaggcctccctctgtcgccaggctgactgcgcc

SEQ ID NO: 168039 - DNA, 122 bp, Homo sapiens
aactgcgggggcgggggccagcttttggcggagaggggccaggaccagggcgaatactcacgtcatgaaacagtgagcagcggagaggacccaggagggggcgatgagggagcccccgcaga

SEQ ID NO: 168040 - DNA, 122 bp, Homo sapiens
aggaaagaaactggctggcttccacgggccttgctaaatgctcatgtggcttctatccctcgatgatctctgtgcaatctgggccaagtccttgacctctttgggtctcaatgtcctcaccc

SEQ ID NO: 168041 - DNA, 122 bp, Homo sapiens
agcgcgctcaccaccgccaccgccgtcgtctcggctttatttacccagcccggcgcgcgccgcccgggaacaggaatagcgaggccttctcatgtttcctgactgccggtcccagccggcga

SEQ ID NO: 168042 - DNA, 122 bp, Homo sapiens
cccacctcaggacgcagttccgcggcgtccacccggccccctcccctcagtcccacgcagcggctcagccatacccaccccggcttctctgagttcaatccagcagcagctcgagcagcggc

SEQ ID NO: 168043 - DNA, 122 bp, Homo sapiens
gagattgcctcgaggctttcctttcatctctagtttgcatgtcacttccccccctccccccgccttggagaaatggtaggtttgctgaagattaaaactgtgctcaaacgctctctggagga

SEQ ID NO: 168044 - DNA, 122 bp, Homo sapiens
gcacggcgctcggaactcggaggtgccagaggctcgggcaaagcaggcctggggagggcgcgaagccgcgttgttccgatcctcagccacctgagtcccagcctggaaccttcggaccctcg

SEQ ID NO: 168045 - DNA, 122 bp, Homo sapiens
caaagcttgttggatttgcacgtatacacccaggcctctgtgaaggggtctgtgttactgcgttgttatccaatagtcaaaaaggatacatccagcttctcatgtaaagcatttatcatagt

SEQ ID NO: 168046 - DNA, 122 bp, Homo sapiens
ctccttcctgcagacacagggaccaggacacagggaccacgtcagcgaaggccgtctcggcgcatctcagacaatgagcgcagtgtgcaggagcgaggggttggcagaggccaggaagctcc

SEQ ID NO: 168047 - DNA, 122 bp, Homo sapiens
gaggagtgggcggctgaatggccagaggcccagggatccgttcaggtcagcgctggcgtccgggcctgagtttggaggtggcgggtgccttacaagaatgctcgcgtgatcagtgtgttggc

SEQ ID NO: 168048 - DNA, 122 bp, Homo sapiens
tatccactcagtgaatttgcagaggttggtgtagacacctggcacgccaacttggccacacggggcttttccgaaagacacaaggccctgcaagtacccgttgcagatcaggggccccccag

SEQ ID NO: 168049 - DNA, 122 bp, Homo sapiens
ccgcagctcctctgggccgtgcctggccggatctctgggtccttggagtgggtatgtggccgcccttccgtgggcgcctgccgggaggaggggtctgggcagcgcctgtgctccagggagac

SEQ ID NO: 168050 - DNA, 122 bp, Homo sapiens
tttggctgtgatgtgtgtggaaaggagtttgcccggggatccgacctggtgaagcacctgcgggtgcacacgggtgagaagccctacctctgcccagagtgcggcaaaggtttcgcggacag

SEQ ID NO: 168051 - DNA, 122 bp, Homo sapiens
cagggtgaaacactgtctctacaaaaatacaaatattagctgggcctggtgactcgcacccgtaatctcagctactcatgaggctgaggcacaagaattgcttgaacgcgggaggtggaggt

SEQ ID NO: 168052 - DNA, 122 bp, Homo sapiens
gccgaagagtaccatccccggcatggcgaaggtcccgtagctcgcactcaggagagaccccgcgcgccgttcaccgagaacaaaccagcaccctccggacgccgccaccaaattatcggcgc

SEQ ID NO: 168053 - DNA, 122 bp, Homo sapiens
tttcggaataaaaccactgaaacacaatcagggctacgtgcattacctgtggccactttccgttggactgcgcccgtctcttgatttcttctactgttttcctgcgagaatcctggtctgac

SEQ ID NO: 168054 - DNA, 122 bp, Homo sapiens
cgggcgggcagacacgcgcgcgcacacacagcccttttccaacgacgacggctccggcggcggcctctggctcccgcagcagggagactacaaagacagcgacctccttctcctcctccttc

SEQ ID NO: 168055 - DNA, 122 bp, Homo sapiens
catcagggcaaggaggcccagcagcagccacaatgcagacatgatgacgatctggctctacggctcctgaaacacttttaaaacaaaaattagcttgagaatacaaaaatatcagtcatcat

SEQ ID NO: 168056 - DNA, 122 bp, Homo sapiens
tggctgtccaggcctgagtggagcgtgcccttgttagcttgaaagttctccctcgcagcccgtttggatgcgtgcgtctacagcccagtcgcactttggtgaccggcctgggctgtgaagca

SEQ ID NO: 168057 - DNA, 122 bp, Homo sapiens
ccgcccgtgctacctcgtaccgcgtccctagcccagctcagggacttggcgtttcccctgcggtttcgcaaccctggggttttagagggaaactgcttggattctccaagcattagggctgt

SEQ ID NO: 168058 - DNA, 122 bp, Homo sapiens
agggaaaaatcccaagatgatttgtgagtgctgttaaaaacccactggcaggcaggcgcgcgcacactacacgcacgcacacacacacacacaccccactgacaaagttttcacatcagttt

SEQ ID NO: 168059 - DNA, 122 bp, Homo sapiens
tgcacgtggtgaccatagcacccccataataaagcagcccgtgagggcagcctggctgttcggcgatgtgtgcactgaggtcatctctcctactctgtctcagctatttaaaggctgtgact

SEQ ID NO: 168060 - DNA, 122 bp, Homo sapiens
tctttatctctgaaagtgaactccctgctacctttgtggactgacagctttttatagtcacgtgacacagtcaaacattaacttggtgtatcgattggtttttgccatatatatatatataa

SEQ ID NO: 168061 - DNA, 122 bp, Homo sapiens
tcgaagctcctcccagaatgcattttgctgtgaggatcctttctaaagaagcatgacccacggtcactggaggtcctttattctgatcgaatgtgaccaattttatggggcaggagggggac

SEQ ID NO: 168062 - DNA, 122 bp, Homo sapiens
tctttctgcattccccactctgtgcgaccccccttattctcaactccgcgatccgcctgccgtcctgagctgctactgcacgcctcttggagcgtccccggctcctgttcgtgcccactttc

SEQ ID NO: 168063 - DNA, 122 bp, Homo sapiens
tgtgactccagagcctacttgttgggacagcagagtgtaagtggctggggtctgcagccccgtttccaggtcagccgcttggccctggtcccgggaagtggtgggggcggcagtcggggcgc

SEQ ID NO: 168064 - DNA, 122 bp, Homo sapiens
gcgcggggcggggattggtctgtggtcctctctcggctcctcgcggctcgcggcggccgacggttcctgggacacctgcttgcttggcccgtccggcggctcagggcttctctgctgcgctc

SEQ ID NO: 168065 - DNA, 122 bp, Homo sapiens
ccacaatcaatccatcagcacagacttattgaacgacttctctggccccagcagggccaacggctgtggggaatacagcaagactgcccctcccctgaaagcatttatagagtcaagcgtgt

SEQ ID NO: 168066 - DNA, 122 bp, Homo sapiens
gttgggtgtcttaggaaatgttggccaagtgcccctgcaggactcctgacctctacctcccggaatgggcctgtccacaggtagctctaaagagggtcttagccatcaggcccattcctgta

SEQ ID NO: 168067 - DNA, 122 bp, Homo sapiens
catttccccttacatcttcccctttgagttcttatcaccactctagtaagggagggccctcgtttcacagatgaggaaactgggctggaatggggtggaactgggctggaactgtaggaggc

SEQ ID NO: 168068 - DNA, 122 bp, Homo sapiens
cttgctccttcaggccgaccagctctcttggaatttcaggaaccaccaaccccaggagcgcgtgaacaggctgctggcacggcgcaccgtccgctgctccgaggttcatgtcccacgctgag

SEQ ID NO: 168069 - DNA, 122 bp, Homo sapiens
ccaggcagcgcgctgcccctgcgcatcgccagccctgacagacgtgcaccacggaagggacgtgattgtggctgccttctcgggagactcaaattctttggatctgcgcacgattcctgggt

SEQ ID NO: 168070 - DNA, 122 bp, Homo sapiens
ctgcccctcccacaaggtgagccaattgctagagatagtaaagaactcactggccgggcgcggtggctcatgcctgtaatcccagcactttgggaggaagaggtgggtggatcacaaggtca

SEQ ID NO: 168071 - DNA, 122 bp, Homo sapiens
ctttaagggggccacagcgcagctttcttttcccctcacaggcagagctatcagtagccacgtcgggtagaacagaaggcattctgggaacgcggtgctctcacatcctgcaaagtacaggc

SEQ ID NO: 168072 - DNA, 122 bp, Homo sapiens
gtgcaaaacagcaaagtgaatgtttgctaccattcgtgcacaaacacatccgtgagcaaacgtgtgtatgcacgcacacacacctgttggcttcaaacgtgtgtgtgcacgcacacgcacct

SEQ ID NO: 168073 - DNA, 122 bp, Homo sapiens
ccagccgcctcccatgattcgcactacggccgccgcgcgccgtaccgccccaccggcctccggtaggttgcaacccatgtcactcaggatgaatggcttacccattggctatgcgctcgcca

SEQ ID NO: 168074 - DNA, 122 bp, Homo sapiens
atgtgaaactagggcactgggttgctcttaggtaatacaaggagatgaaatgcagcgatgcgatgatgagtgaagtagagcctgacctggtattgccattgcttcactgttggctttgacca

SEQ ID NO: 168075 - DNA, 122 bp, Homo sapiens
gcaacaccagcaaccaaacagagctcgtaacaatacggtgtgtgcattttcctaagctgtcgttgtatggactagtattatcttttctgactgtcttcttatctttttaacatgattcacga

SEQ ID NO: 168076 - DNA, 122 bp, Homo sapiens
cgggcgaacccctggactggccctccaacagggccccagactcggggtacccagggtggccgctgaggcctggagaaatctgggcctcccctgtgcaccatccaactgcgcgccccagaggc

SEQ ID NO: 168077 - DNA, 122 bp, Homo sapiens
gcaagcccatccttgaaagcccagcttgctgcctcctttctgaagcccttcttaaatcagcgtcactgcctctctctctctgcagccgcaatatgttgtgcacagctctatgataaccattt

SEQ ID NO: 168078 - DNA, 122 bp, Homo sapiens
aattttaatcagtgggaaatgctgactgccacgctcatttaagaggaaaggtcaggatttcgtgagctgcattgttcactgacatctactttaacgactccagcccagcctgagctaatctt

SEQ ID NO: 168079 - DNA, 122 bp, Homo sapiens
acagcttgggcctcttccccctcctccctcccacctccagccgccaggtccccagccgcccgccaggcttgggcctgagtggcagaggcgcctgcagctgccaatcccaaaaatattctctg

SEQ ID NO: 168080 - DNA, 122 bp, Homo sapiens
actttccagcgatgtcacaggttctgtctctcgttccgagaccacccacatgcgtgacagcggtgcctggaggactgggtctttctgactttagtgaacgtgtgtttaattggattgacgaa

SEQ ID NO: 168081 - DNA, 122 bp, Homo sapiens
aatttcaaattttacaagtgctgtgcagagctctgtactaagtctaactcaaagttatttcggctgaaaataacagaaagcttacataaaaactagagttaactgaaagggtactagaccac

SEQ ID NO: 168082 - DNA, 122 bp, Homo sapiens
atggatttggcttggaatcacggccctgacgttccatttgattcagcttggctggggtaacgctcaggtcttttgtagaagagttcacaacactggccagttaaagggtggtgtgccctcag

SEQ ID NO: 168083 - DNA, 122 bp, Homo sapiens
aatcttaactctacattgtggagatcggatttgttctcacttgacagaaagccagtcccacgagcagcttggtacccaaataccagtctgtttagtgctcattagagatgaagaaccatatt

SEQ ID NO: 168084 - DNA, 122 bp, Homo sapiens
ttgcccaggctggtcacgaactcctgggctcaagcagtcactcctcctgccttggcttcccgaagcactgggttataggtgtgagccatcacacccggcaaggaatctgcatttttaatggg

SEQ ID NO: 168085 - DNA, 122 bp, Homo sapiens
cgccgacagacaacacgaggcggtgtggagcgacaggctgtttcagcgagcgcccaggtgcgggcggctcgaggcctaaaatggcgtcagcaccaaatgagggcggggcaggggttttatgg

SEQ ID NO: 168086 - DNA, 122 bp, Homo sapiens
aacacttgcaactttgaggtgaatgaatgtattggctcctggttgcaatatacaatcacacgttgtgctactttgtattgtcaggagatgtcctggactcccacagaaactcagggctatgg

SEQ ID NO: 168087 - DNA, 122 bp, Homo sapiens
ttccagcgggagcgggaggcgctgttgttcaggaaaggaagttgtgtgtttgtgaatgagcgcactttgtggttcatgtgtttgggcaggacaaactacaccacagggttgggcggggctgt

SEQ ID NO: 168088 - DNA, 122 bp, Homo sapiens
tcccatcccgacctcggagacggtgacaccactgttcccgtggcacaggctttgcccctgcgtggtttcacatggccaacaaaatactaactcatttaacctcggcagcacccccacccagg

SEQ ID NO: 168089 - DNA, 122 bp, Homo sapiens
aagaagaaaggcaactttgtaagagatctgacttctagctccagttctgtctctagctaacgtgagatgtacccgtttgaggcctgttttttaattttgaaaatgaaggactgaacttagat

SEQ ID NO: 168090 - DNA, 122 bp, Homo sapiens
aattccggcccgccgctcgttctatctggggcagcgtagcctctctagatggcgggaggccggggcgactctgtggttcagccccagacctggtcccactagccctgaggccagagaccctt

SEQ ID NO: 168091 - DNA, 122 bp, Homo sapiens
cacgcgttccaggtcgtccttcatggagtagctcaggtccataaggtagtacaggtccaccgggtatccctcagcacgaaggaagcggacctggagctgctggggctcccctagggggtggg

SEQ ID NO: 168092 - DNA, 122 bp, Homo sapiens
atttaaaagatagcgcgatactgtcgacagcaatagacagggtaattgcagagcggctgccggggtataaattacacggctctaagtggtggagtggccgcgggagactggagaaattcctg

SEQ ID NO: 168093 - DNA, 122 bp, Homo sapiens
cctccagcctcccctcccctggggacgccaaggaggtgggccacacccaggaagggaaagcgggcagccccgttttggggacgtgaacgttttaataatttttgctgaattcctttacaact

SEQ ID NO: 168094 - DNA, 122 bp, Homo sapiens
ccggccggcgcgctgatgtggctgcaaacctgggtatcagatcagccgccgtggacacgccgatgcttctcgctggcttcgtgccctcccggggctgttgcttgtcgtcctgtcgctttctc

SEQ ID NO: 168095 - DNA, 122 bp, Homo sapiens
cacggccacccgtcaccggcggccaatctaacgtaacttcgcgagatccggactgggaggcgcccttcgaccagtgcgcatgcgccctgggcctgtgcccgccccaggaagagcgctcccgc

SEQ ID NO: 168096 - DNA, 122 bp, Homo sapiens
ctcacgtgctgggggcaccagatgcccgggcaggggcagacctggggggaggctggtgtgcgctttgccagcctcactcctgtgcccgcgtggctcatctcacacggggcatggctccattg

SEQ ID NO: 168097 - DNA, 122 bp, Homo sapiens
ctcccagtgttgggattacaggcgtgagccaccgcgcccggccttctttttgtttttaaacgtggtattgacattttaagatgacatctgcaactcgcaacactgggacaagggattctggg

SEQ ID NO: 168098 - DNA, 122 bp, Homo sapiens
tcctgaaagggtgcgagttgaaaggctgagtattttggtaaattgccacggctagcatctcgggtccatgattgtccctgcgtctcaggtctgtatgtataactaacttctgaccatgttct

SEQ ID NO: 168099 - DNA, 122 bp, Homo sapiens
tggatcgtggaccatgccatgtggtgtccacttcataattcagcccccattccttggtctcgtctgagcagttaggttccgcctgtggttgcacatttggttcatctgaggatgttcaggtt

SEQ ID NO: 168100 - DNA, 122 bp, Homo sapiens
aaatgaaggaacactttttttaatgctggagagtggccacatctcccagggaagcaggaacgcagggccgggaaggagccgcagcagcttcagagtccgggggggtttccatagattaagag

SEQ ID NO: 168101 - DNA, 122 bp, Homo sapiens
gagaggtcacttcgcagttttcgctacatggaaacgctgcgcgtggagcagtgaagcaaacgccgccctctttagtgcaaaccttgttctattctgcacttcccccaccccccacgtggcag

SEQ ID NO: 168102 - DNA, 122 bp, Homo sapiens
cccaaattggaaggtgaagagtgaagggcaagtgcaaagtggggtcatttcaagctcatccgtcccgagtccgactctagccgtaggacacaggacaaacgcttcgcactgacctccgccgg

SEQ ID NO: 168103 - DNA, 122 bp, Homo sapiens
ctctagcaggaagccctgtgtggggcgtgggcagggcgtccgtgctcccccgactcaccgcgcccctatccctgctgcccgcctcagtactgcctcagccagaaccccagcctggaccgcta

SEQ ID NO: 168104 - DNA, 122 bp, Homo sapiens
ttattcccaaatgaggtcctacttacaggtactgggggtcaagacttcagcattcttttgcggggggccacaatcagtgacaccctgactcgcaagcctcaatcacctgttccagtgagaaa

SEQ ID NO: 168105 - DNA, 122 bp, Homo sapiens
ccatgttgcccaaactggactccaacttctgaggtcaagtgatcctcctgcctcagcctccgtaagttgggggattacaggcgtgaaccaccgtgcccagcctacatacgctcctttaacac

SEQ ID NO: 168106 - DNA, 122 bp, Homo sapiens
tcctcagtcgtgtggcaggccctgagcaggcagctgggtgtccccgctcagatccaggcccgagtgggctgggcggctgcagagccagtcacctgagctacccagggtgggatccctggccc

SEQ ID NO: 168107 - DNA, 122 bp, Homo sapiens
aggtggctgacaggcagcctggcctggtacttcccaaataggaagtgtgccaggcagggccgcagcgtgggtggtctgccacactgaggggagtgggaggtctggggtgtggtccctgccga

SEQ ID NO: 168108 - DNA, 122 bp, Homo sapiens
aacactagggctactgtggcatctatgtagacaggaaagacaaacgtgtttcataaaattcgttgttgatggtattgattgaaactatctgagccatgtaatcaaaaaataaaagttttctg

SEQ ID NO: 168109 - DNA, 122 bp, Homo sapiens
gggctgctccagctggaagtcattgtgcgggctggcgtctgcgttgtcagggcgaccgcccggccggcgccagcggagcgggggaggcgggctccgtgaatgggtgacgtcacgcagccggc

SEQ ID NO: 168110 - DNA, 122 bp, Homo sapiens
ccaacatggtgaaaccccatctctacttaaattacaaaaacttagctaggcatggtggcccgtgcctgtaatcccagctacttgggaggctgaggcaggcgaatcacttgaacctgggaggc

SEQ ID NO: 168111 - DNA, 122 bp, Homo sapiens
tgaggacgctcttccagcacagaactcaccaccaaaaagagacggcgcccagctggcgcccgccccgggcacattgcagtaaatgcctggcagcgacttctcgcttctccttcctcctaccc

SEQ ID NO: 168112 - DNA, 122 bp, Homo sapiens
ccttgaaatacatatgttgacaagtcttgacaggtggctgaggttaatggagcattgctacggtttagttcaaaaactttctgttgtctgtgtatgtaataggttctctttaaatatgtagt

SEQ ID NO: 168113 - DNA, 122 bp, Homo sapiens
aagggccagagtcaccttgaatgatagaacttgaacagctcattcatacagagtagaacacggaggcacagcatgctgctgtcttccctgaggctgttggataaggagctgctgggatgaaa

SEQ ID NO: 168114 - DNA, 122 bp, Homo sapiens
aagcgattcccctgcctcagcctcctgtattagctgggactacaggcgcacaccaccacgcgcagctaatttttttgtattttagtagagaaggtttcacgatgttggccaggatggtctca

SEQ ID NO: 168115 - DNA, 122 bp, Homo sapiens
atctagtggttaaggattcagggactgagaatgtaaagattaaattataggttctggaaccggactccttggatgccaatttatgtatttgggtaattttacttaattctctctgcttcagt

SEQ ID NO: 168116 - DNA, 122 bp, Homo sapiens
ccagcccgagtaggatggaatcaaacacggtgctggaacattcctacccggaagtggccccgacccccctccccccgtcccggcctcccacgcacggggggggggggggggggggctgatcg

SEQ ID NO: 168117 - DNA, 122 bp, Homo sapiens
ccatgtgctaccagatcacaaggagttttctctctcctaacttggctcgtgctatcccttcgtgggaggaccccatctctaccttccccctgctctcgttatctcatcagaatctaggaggc

SEQ ID NO: 168118 - DNA, 122 bp, Homo sapiens
caggcatggggtgggaggggctcccgccctgtccgggagtttttctgtccagctttccagcgctctgtgtaggcgagaggaggagttaaatccccaacccacatggctcctttatttactgt

SEQ ID NO: 168119 - DNA, 122 bp, Homo sapiens
cctcctagaacaaagatttgagactgctgtcacgatgccttcagtctgtgcttcgagggtcgctgagagtaggaacacatggcttagttccctcgccattcccttcccaactccgcaaagtg

SEQ ID NO: 168120 - DNA, 122 bp, Homo sapiens
gacggcagcctgggtcctgcccttcacctctggcggctttctctacatcgccttggtgaacgtgctccctgacctcttggaagaagaggacccgtggtgagtgacctgttggaggaagagga

SEQ ID NO: 168121 - DNA, 122 bp, Homo sapiens
tgtcttttttctccagttctcctgaagctggaagcattaggaaactggattcgtttcctgcgggagaggaatatcaaagacccggttctgttcagtcctgggaagaagcaaactgggggcgc

SEQ ID NO: 168122 - DNA, 122 bp, Homo sapiens
tgaaagtaggatctcgaagagatatttgcacatccatgttcatagcagcgttattcaaatcgccaaaaggtgaaaggatcctagtgtccatccacagatgaatgaataaaatgtagcatata

SEQ ID NO: 168123 - DNA, 122 bp, Homo sapiens
gggcgcccgggctcacctttcatcgctgcgatcacaaaatacatcatttaagccgcggtgcggagagcgcagggagagcggatggtccgaccccggagccccctctgccgccgccgcgccgc

SEQ ID NO: 168124 - DNA, 122 bp, Homo sapiens
ccgcagccaacctgcggctccttcagagcaaagctgtgtggacacaaagggaacgccactcggagctggcctctccctttacctgtgagttcccgcccaagccggctgccttctgtcccctc

SEQ ID NO: 168125 - DNA, 122 bp, Homo sapiens
agaagtttgccttgtctgtttgggagatgctgcgaggccggtttcccgtcgggctgcaaacggcagagcacgcggccctgtcccgggcaggctcggctccaggtggaacccgggacacgtgt

SEQ ID NO: 168126 - DNA, 122 bp, Homo sapiens
aagcaggtgtaattaagttaaaatgggaccatgctggactacagtgagccctacacctaacgtggctggtatttttagaagagaggagacacagagacaggcccagggagaatgcccatgaa

SEQ ID NO: 168127 - DNA, 122 bp, Homo sapiens
gagccgcagggtgcggctggtggacacaggggacaagttccgcttcttcagcatggtgcgcgacctcatgctctggatggaggatgtcatccggcagatcgaggcccaggagaagccaaggt

SEQ ID NO: 168128 - DNA, 122 bp, Homo sapiens
ccgagggtattcggaactacgcaatgatttggagaacctgagctgctgcccaccgcaggccgggggtgggaacccctggagcccggccgcgcagtagccgcgatcctgccaccagggggcag

SEQ ID NO: 168129 - DNA, 122 bp, Homo sapiens
tcgccttcgcggtcgcgggcagggagcgcgcgtttccatcggttgattagaagcgggagtcggaggagcccccgcccgccggcggccagcgcacagcccggccaggggcgccctccctgccg

SEQ ID NO: 168130 - DNA, 122 bp, Homo sapiens
ctctgtaggtacaagtcaggataaaggcgttgtttactcctgaggccctcccgctgcgtccgaggcagctgctgctgtagttctgtcagggaaggaaggcgggtagcggtagcagagtttga

SEQ ID NO: 168131 - DNA, 122 bp, Homo sapiens
cctgcggcaaaaagccaagtaatgaccgggcaagccctgcggaggggtgatgaataactccggagagctgtaatttgaaaggggggcctttgaagcatttaccttacatgggacgccattgt

SEQ ID NO: 168132 - DNA, 122 bp, Homo sapiens
tctggcttgtggcttgccgaaaacactagccaagcctgcaaattgaggcttaacccactccggagataacctgcctttttttgtgtcaaatagaagtcaggctctgcaggcttccaagatca

SEQ ID NO: 168133 - DNA, 122 bp, Homo sapiens
ccagagtggaagccggcttcatgttactcaccccaccctgtgatttcctgatggaggatccggagacctgaactctggtccaggtttacagacaactcataatcatggttgaggcccctttc

SEQ ID NO: 168134 - DNA, 122 bp, Homo sapiens
ccccctccagagccagggggtgtcgaagcctggggcaggtgccctgagagaggtccgcgccgcccgcccgcctgccccacacatggctctgtcccctgaaggtcgcctctcccctacaggcc

SEQ ID NO: 168135 - DNA, 122 bp, Homo sapiens
ataacctcgcccgcaacccggatccaggccgcaggtcccccgaggctccgcccctgacggcgacactcaatcccgggtgtccccgcccccttactgaattttggccccgcctccgccctccg

SEQ ID NO: 168136 - DNA, 122 bp, Homo sapiens
cctggatatcccactgggtcctctagtgaccccaagcttcagcctcgcatgccctcttctcgaacagagaaggcaggagggaagcagggaccagcccctgctccatcttccaggattccagg

SEQ ID NO: 168137 - DNA, 122 bp, Homo sapiens
cccccaccccggccgcctgcgacccgggccgtgcgtgctgccgcccgcgccccggccccgcgtcgctgcctagctcttatcctataccggctgcagccggtctccgccggcctcgggggcgc

SEQ ID NO: 168138 - DNA, 122 bp, Homo sapiens
aaaacaagactaattctgggaaaggctcctccagaagccccggtccccatggccacggctcgtggcttccagcactcaccaccttcaccagctgagacatggacacctcgaaatggatgatg

SEQ ID NO: 168139 - DNA, 122 bp, Homo sapiens
cctatcacagcgcattaaggggcacataatgcctgggactccgggatttcgagcccctgacgccagcggcgcctctgtggctctgggacctgagcgcacgcgccttaaagccacgcctccgc

SEQ ID NO: 168140 - DNA, 122 bp, Homo sapiens
tatccatgctgctgcatataaacccagcttatttatttaaactgctgcatggattcccgccgtggataatgcctaccgatgggaatttaggtgacaaaaattttcaggttggtttttatttc

SEQ ID NO: 168141 - DNA, 122 bp, Homo sapiens
ccagggcgctgatgtgcactaccctgtggggcaccgaaatagcttaactctatttaagcccgcagcagggatgtgatcagcccggggtttggcgcctggatgaaaaggaaacaaacttgagc

SEQ ID NO: 168142 - DNA, 122 bp, Homo sapiens
aaaaatcattgctttgtttgcagcagtaaaactgacggtagagtttccaacacgaaagcccgtgtggtcgcgccgggagctcacggcgttccaagcggcacttatcccgcgttgatgcccag

SEQ ID NO: 168143 - DNA, 122 bp, Homo sapiens
tagacaccacagatgggttctctgtgtctacccattctggacatttcctgtgaatggaaccgtgccccctgtggtcctctgtggtggctccttgccccgagcgtggcgttggcgtggtccgt

SEQ ID NO: 168144 - DNA, 122 bp, Homo sapiens
gctcctctattttttcttttcaaagcttcacctgcttaacttgtgccaatttacaaacaacgaatcagagtgttgttttctcagtgaggcccagttgtcctctgcagtccttgccattaaat

SEQ ID NO: 168145 - DNA, 122 bp, Homo sapiens
attccccttagcaactgtcagagagtcctcaagaaatgagcactagtcaggctgtgaaaccggtgaagccacatgcacctggctttgcacagttgggtgtaattggagttttcagaatagag

SEQ ID NO: 168146 - DNA, 122 bp, Homo sapiens
tcatgcttgcccaagccatcaagtaaatgctactcagtggtaaaggggacaccatgcaaacgttctccctttcccaacaaggaggtagattatagactaaacactgagtaagaaataaatta

SEQ ID NO: 168147 - DNA, 122 bp, Homo sapiens
gacactgccttctcctgtaagtgctcccccaaaacgtggcaaggcaggcgtcttcctatccgtgtgtgtctgagttgtgtggtgggcagatggggctcacccccaaaaaaggacccttatct

SEQ ID NO: 168148 - DNA, 122 bp, Homo sapiens
caggaagtctcgggctccggaggtccctctgccgcccctaacccctgcggcgcccagtgccgcgcagagccgcattcgccctcctgcaggggtgggcatttcctaagtcctctccagccccg

SEQ ID NO: 168149 - DNA, 122 bp, Homo sapiens
ggcgccctctggctggagccctgcgcccggcccagcccaggccgctgagggtgccctgcgcgggcttcacagctttgccaggatttgcagccatcagacctgaggacagaagggttcgggct

SEQ ID NO: 168150 - DNA, 122 bp, Homo sapiens
tacagcttcaaggtctaaagtccttgctgcatttgtgcaaagccctggaagcttcactctcggctccctccttctctcccttcttgtgggtgctgcctccctttcactgggcaccaaactag

SEQ ID NO: 168151 - DNA, 122 bp, Homo sapiens
cccctgcccgcgccctcgaagtccccgtctgggcccgcgcgctcaccccgtcgtcccgcgcggcccctttaagaaaagagaacgagagagtgagtgagagaatcccaactctccccctaccc

SEQ ID NO: 168152 - DNA, 122 bp, Homo sapiens
aattgattaccttgctattgatgggcatttgggcagtcgggttagggctgtcacgaacagcgctgctgctatggatattccttcagtgcatatttcttggtgcacacatttctttcgagtcc

SEQ ID NO: 168153 - DNA, 122 bp, Homo sapiens
gggagagaccagggtggtcagagcgtgcactgccctttaatccaggcctgggttctttcccgcgtcacggccagatcccatctcctcttcaacacatagcgctgtggctaccacattgcctc

SEQ ID NO: 168154 - DNA, 122 bp, Homo sapiens
ccttgcgcctaacagtccaggaaacgtttgctgaactcttaattgtggctctgtggccggcgctgggtagaaatgggcggttgggtgaacagagaagctaccctctcacctgcagggacacc

SEQ ID NO: 168155 - DNA, 122 bp, Homo sapiens
tttgattcaattcagctttatagatgagagaactgaagttcagaggaaataagtgattatcgtttgtcacattgctattatccatctgctattgccagagctggcctggagcccagaaatct

SEQ ID NO: 168156 - DNA, 122 bp, Homo sapiens
gcgcactctgaccccgaccgacgcggcggacgggcgggcgctgtggccaaccgctgagcccgctgccgacccctttgaccaatgggctgcagtcaggcggggcttcttctccccaaacgctc

SEQ ID NO: 168157 - DNA, 122 bp, Homo sapiens
tgtaatgacctggtcgtcgtggtaaatgcacattctgattcagtaagtctgggctagggtcggagagccgacattcctaaccagctcctcagcgatggtgacgcctcttgtccctggagtag

SEQ ID NO: 168158 - DNA, 122 bp, Homo sapiens
aagaatggacagcggttgagagaagacgactccttttttttttgagaaaggatctcactccgttgcccaggctgcagtgcattggcgctatcattgctcactacagcctggatctcctgggt

SEQ ID NO: 168159 - DNA, 122 bp, Homo sapiens
cagggctctacctcaaaggaatcagggtgagaagagatgaattagcattgataaatgactcgcaaaatagaaaatgctgtagaaaggttctaaatatactataaagagtggagacagcatgc

SEQ ID NO: 168160 - DNA, 122 bp, Homo sapiens
acgctcgccgcctgatggggaaggccgccacgctcgccccctgtatggggaaggccgccacgctcgccccctgatggggaagcccgccacgctcgccccctgatggggaaggccgccacgct

SEQ ID NO: 168161 - DNA, 122 bp, Homo sapiens
tatccaaggaatgccaggcatcccagggctgtcaggaatccctgggctgcctgggaggcccggccacatcaaaggagtcaagggagacatcggagtccccggcatccccggtttgccaggat

SEQ ID NO: 168162 - DNA, 122 bp, Homo sapiens
tccaggccctgtccccggggaagcaggctgtgtctgaccagccaggggacgtttgggggccggccaggctggcaggggccctgtggggcaccgctggggccaatgacagggccggccccctg

SEQ ID NO: 168163 - DNA, 122 bp, Homo sapiens
ctgcggggcttcccaagaaccctgggtccacgtaggtgtgagacgtgattctcagctgggcgaggcccacgggcctcctgaaagaggcccgcagagtctatgggtgacaggggcgttaggtg

SEQ ID NO: 168164 - DNA, 122 bp, Homo sapiens
ggcaacttcggagtgccagctgcagctccacttgggaggactggaggcaaagttttgggacgtgggcctgtcggggctttccttcctactctccgccaggccggggcttcctctcccgggag

SEQ ID NO: 168165 - DNA, 122 bp, Homo sapiens
gtgcacatgaagtcaaagtggaagtaagctattaagatcttagtatgagtcaaaaagggccggctgacagtccttggctatatgactgggagcaagtgccttaacctttctcaacatcagtt

SEQ ID NO: 168166 - DNA, 122 bp, Homo sapiens
actttagctctagaattactctgagaccttgaaaaagttttaccttaaatttttaaatttcgaggaaaactctgggacaatcttagcaaaaagtagtaaacaacttagttaagagtaaatgt

SEQ ID NO: 168167 - DNA, 122 bp, Homo sapiens
cccagggaaacacgagaactcactccttgcattgttttactcactgcaactggcgccatccggcgagggtctggagggtgcccaatttcagtagccgtttgaatgagagatctcagtcgttg

SEQ ID NO: 168168 - DNA, 122 bp, Homo sapiens
gtctggggtggggcctggcatcctcatttccgacaaggcccgggtggagtgaggccccaccggtcccagaccaccctctgagcagccccaggcacaggcgcccagtctgcaaacatcagctc

SEQ ID NO: 168169 - DNA, 122 bp, Homo sapiens
tggcctgaggcatctgactctttcccctcaaggagtctctgagtctcccggagtcagcgccggctgttgtggcttttccccgggtgataactgagccgaatttccgcgcccgcttcagtggc

SEQ ID NO: 168170 - DNA, 122 bp, Homo sapiens
gaaggccaatgacaccgggagtaggtttgaaatatgagggtgtgggagaaaacgccgagacgggattagcagcaggtaaaagctttgtgcccggtggatagtgatgtgtgtgtgcactcgtg

SEQ ID NO: 168171 - DNA, 122 bp, Homo sapiens
aagacaggatttcagatttatttttaccaaggccacccccttgctaccgtggcggtcgtgcgtgaaactggtggtgagcagtggcgggccaggccacctttagttgtcctgctgttcgcaag

SEQ ID NO: 168172 - DNA, 122 bp, Homo sapiens
gaatggggaaaggggagtggacaccaggaggcccctgcagaaatgcaggaccgatccactcgcgagctgacaatgccacgcgctagacttggcctgacggtggcaacgcttggcacctgggg

SEQ ID NO: 168173 - DNA, 122 bp, Homo sapiens
cagatgtaggaaggaattgcactcacacactcagcatgagacaggcgctcagtaaaagcccgtccaggggatatgagatcagtgagggataggaaagcaaggtgggcagaaacagcaaaacc

SEQ ID NO: 168174 - DNA, 122 bp, Homo sapiens
ctcccaggttccagcgattctcccacctcagcctctcaagtagctgggaccacagacatgcgccaccatgcccagctaagtttttgtagttttggtagagacaaggtcttcttatgttgccc

SEQ ID NO: 168175 - DNA, 122 bp, Homo sapiens
cgaactccccctttcccgtcacgtcacacaatatcggatcgtccattcgctgccgccgcccgccactcaagaaatcccgtggatgataggtagctgcggcagagtgccctgccccacgtaag

SEQ ID NO: 168176 - DNA, 122 bp, Homo sapiens
gaggccgaggtggccgcggggcggggcagaagggctcctgtggggcccagatagtttcctcgcgcaggtgcagaagccaggctgcggtgctggagtggcgggttgcgggcccaggaatcttc

SEQ ID NO: 168177 - DNA, 122 bp, Homo sapiens
gcgccccgcgcggcaggggcttggacgttgccaaggagaccggtagtggccccgcctccacgcagggaaacaggcgggaaccacgtgacccggaaggctgtacgcaagcgtccgcggcgcgc

SEQ ID NO: 168178 - DNA, 122 bp, Homo sapiens
tccttcaacacaggtttaatttccttcctcctgcaccccttgcgctgccgcgggtggaaacgcaggaatggtttctctcaggggagggcgggcgcccctgaccacacatcacagatagaaac

SEQ ID NO: 168179 - DNA, 122 bp, Homo sapiens
tggctgtggggcttggtgctcccagagagctcagtggctacagaatgggtggggattctgcgtgtctcccggagcctgaacccctttcctggttatggccggtagctgtctccagggctaac

SEQ ID NO: 168180 - DNA, 122 bp, Homo sapiens
cttcatgtagaggggacgtggaggcggggagggcgttctagggtcggctgcgtaattatacgaggcactggaaagtgatgggttagtgtccttggagtagacccctgggttttattgaactg

SEQ ID NO: 168181 - DNA, 122 bp, Homo sapiens
ccggtaccaaggatggactgaggtggtggcgactgcgacggtggggtctgggtgcccggccgtggaggcagctctccccgccaggtccgggctccgccgggctccggactgtggaggccgtc

SEQ ID NO: 168182 - DNA, 122 bp, Homo sapiens
gctccactgaaggaagcaaaagtgtttatagagaacatccaagttgactatgagcgactccgttagatccttgagaccctgactgtctcaggcatgaatgacttggcttgaggagcaacaga

SEQ ID NO: 168183 - DNA, 122 bp, Homo sapiens
ttcccccagcccacggcgagctcagatgacacaaggatgatgctgtggtccgggagagaacgataaggattgtcactgtgctttgcactctgtcattctaagtttcttctcctcacgtgagc

SEQ ID NO: 168184 - DNA, 122 bp, Homo sapiens
agggagactcctttctcaagacttgcgaggtcaccttcaggtgactgtccctcaaatctccgcagcagctccaggacacactgtgccccgagtcaggattggatcaacacacaggacgcacc

SEQ ID NO: 168185 - DNA, 122 bp, Homo sapiens
cattgcttctgcaggactgtgagccggctcatttctgggctccatcggcacaggaggggccggatctttctccgataaaaccgtcgccctacagacccagctgtccccacgcctctgtcttt

SEQ ID NO: 168186 - DNA, 122 bp, Homo sapiens
ctcagggctgggtttggagataatgtgacagggcaggtccttctctttttaggaatcactcgaggaaccattctgcacatactggttttatcaactgatgctggaatggctgttgccacagc

SEQ ID NO: 168187 - DNA, 122 bp, Homo sapiens
atcttcaactgttaaaacatttcaggttaccccactcaggactccctatgaaacaaaacccgaaaaatgaacactaactataaccctttcactcccaggttctcactctttccagtgcctgg

SEQ ID NO: 168188 - DNA, 122 bp, Homo sapiens
ttttctttgctcgtttgtctgtgtattaagaagagactaaaatagccaaacgacgctggtcgcatgcgctggctgtggtctgtctgctgaatgtctatttttgtctcctgacgagacgtgag

SEQ ID NO: 168189 - DNA, 122 bp, Homo sapiens
caccgagcacaaaggcagcattgattctccgccaccctcagagcggtctccggaaggctccgccaccacgcgctcgcctcacccctgcgcggagccaccaagagcaccgtgttccgaccctc

SEQ ID NO: 168190 - DNA, 122 bp, Homo sapiens
agggctccgttgcttcttcctcggtgctgggaggagtgggtcgctccgtgcggtccgcaccgggcagtggctgcaggagcccccacctgggtccccaccccagacctgctggcgggtggggt

SEQ ID NO: 168191 - DNA, 122 bp, Homo sapiens
tactcagagttgtagaagacctccaacttgaccacgggcggcgaggcgggcctcggccagcggatgatgtccttggtgcactggcccaggtacatgaccagcacccagatgaccacgagcct

SEQ ID NO: 168192 - DNA, 122 bp, Homo sapiens
agtctttgttatgtacatggtgtaatatttgctccacaacctcagaacagatagatcattcgcgactcctccagtgtgggaagatcagagtatcagaatctcagattactcaaagcacatct

SEQ ID NO: 168193 - DNA, 122 bp, Homo sapiens
tacaaagggggagggccgggaccgagggggcgggacggtgagaaacgggaatcgagcaagcgcagaaacaaacagatgttaatggaggcgtgaaggctactgcgctctcactttccgaactg

SEQ ID NO: 168194 - DNA, 122 bp, Homo sapiens
actggagatgcctcttccttctctcaggacagaaccatgagcctagcggcagcgccggttcgcgaagctccccctccgccaacgggcgcctcctcagagccgtccgtgcccgccctgccggg

SEQ ID NO: 168195 - DNA, 122 bp, Homo sapiens
ctgacagcgctgtcccggccaggaaccagtgagtgtgcggggcggggttgcggaagggggcggagtggagatgctggaggggcagcgcttgggagccccgggagacttggaggagggacccc

SEQ ID NO: 168196 - DNA, 122 bp, Homo sapiens
cctggctttgtgtcctgacagagatgccgtagtgggggccctgatgccggccgccatgatcgccccggtggagtgcccctctgcggctgcttcggacgcatttgcgatggctagtcccatga

SEQ ID NO: 168197 - DNA, 122 bp, Homo sapiens
gtggcagatagtttggcaacacccctactcccgcagcttaatggagggaaaaaagctcaacggtcatgtgattagaagaggctcgttaggtagtggcagaacctggctgtgaacccagggcc

SEQ ID NO: 168198 - DNA, 122 bp, Homo sapiens
catttcttccttcatggaactggatttggatttcttgaagcaggcagcttcatattataccgatttgttctctgtctttttgtgtctctctgtttaccccctcccttgccccctcttctggt

SEQ ID NO: 168199 - DNA, 122 bp, Homo sapiens
tgtttgaataatttaggatggggcataggccagcccacacagcgcatttgtgtgacagggcgtcccactcagacgtctccatttccggtatctagagccggctgccctctaaaaatccccct

SEQ ID NO: 168200 - DNA, 122 bp, Homo sapiens
tgaggaggacagagggcttctgtgacgtcaggacaatggcaatctcatctgcgtcctggacgtcgtccacggcatacttctccttgaagtgctccttggaatggatctttcccatccaggtg

SEQ ID NO: 168201 - DNA, 122 bp, Homo sapiens
gctcccgcgcggaacgtagaggcgaacgctgggctgccggcgcctggacagtaaaagcggcgcgcgccggcccctccccgcctcgccacgcctccgcggccgcgctgcccagcggactggag

SEQ ID NO: 168202 - DNA, 122 bp, Homo sapiens
gcagcgcgatgcggctgcgccggctgcgggggtcgccacgaggaggctgcgcggtgaggacggcctggtgggtcccctagccggcccgaggacccaaaattgagggtccaggaccccggact

SEQ ID NO: 168203 - DNA, 122 bp, Homo sapiens
cttctctttctcctgcccctctgggataggtgggcctctgccgtcggctaccgcggctcccgcccgcacctgccctgctcccagcatgggctgcggtagaccccgccccccgcggcagacca

SEQ ID NO: 168204 - DNA, 122 bp, Homo sapiens
aaaatgcagcacgtccagagttctttgcccctcccagtggatttacagtctcgctggcttcgggagtgaagctgtagacctttaccgtgagcgttgcagctcacaaacgcagcacagacaca

SEQ ID NO: 168205 - DNA, 122 bp, Homo sapiens
caatcctccaactcggtggctctgcatgaacacaaactttgccatggtgaccatatatctcggtttgtcctcaacagtccaggtttattactcacagtgcttgtataattattagtggtgcc

SEQ ID NO: 168206 - DNA, 122 bp, Homo sapiens
ctggctcctcacaggatccagacgcggttcccatccgtccccagccctgcagggcacacgcgcgcgtgcacacgcacgcgcttacactccagctcacactcgcgcgtcctcactccctgcac

SEQ ID NO: 168207 - DNA, 122 bp, Homo sapiens
gtgtgcgctgccgcccgcgccccctcctttgagccgtggtggaggtgggcgctggaactccgactacatttttctatgaggcgccattttgtgctggaaatgctcttggacccacgtcctgt

SEQ ID NO: 168208 - DNA, 122 bp, Homo sapiens
ctccctactaggccttgaaagcaacaagtcctggccccctactcttcactggcccccagacgggatcggaactctgaggcaactcccactgtgaaccagatatctctcaaatgcatccaggc

SEQ ID NO: 168209 - DNA, 122 bp, Homo sapiens
ggcgactttcgcggggccgggcaggaagcggagttagtcgccatctttgagtggggcagacgtgggccgcttttgctcgcggtcacttcatcttaagttgtatatatgtgcagagcgcggcg

SEQ ID NO: 168210 - DNA, 122 bp, Homo sapiens
tgaggaaaccatggtattattcctggcctccctgcgcttccctctctcctttcctggtgacgtttccagctgtcaccagcattccatggcatacttcttattccccaccttcccttactctc

SEQ ID NO: 168211 - DNA, 122 bp, Homo sapiens
agaaagagggagtctccctctaccgggaggttcactgtccaccacactcccaaatgcagccggacaccccttgggctcctggctctggaacagaaacagagagcaggccctgcggccaagaa

SEQ ID NO: 168212 - DNA, 122 bp, Homo sapiens
tccaggcaatatgaagataggaggcccacgggcctggcagtgagaggtgtggccccacaccgatttatgatattaaaatctcaactcccactgcctgcctcttaaattactacagtactgga

SEQ ID NO: 168213 - DNA, 122 bp, Homo sapiens
ctgtggttggacaagcgtcaccccagggagtccaagcccctcctttgtgccctccccatgcgttgtcccacctacaccagatgcaggtatgtcactgtctcctccaggaactctgactggac

SEQ ID NO: 168214 - DNA, 122 bp, Homo sapiens
cgcgtgtttttatcatgctgggaacacgctgctcctgggagtgataagcattaaaccggccggcaggctgtcagtctcagtttgagggtttagaaatattgggacgaataattagatttcat

SEQ ID NO: 168215 - DNA, 122 bp, Homo sapiens
cactgtgcaggtgtccttgagaatgcagccaggcggggtttctcctgccttcccagagctcggcttgtggcgggagtgacgtgacagtcacccactcagtgccacgaagggaggtaaagtgg

SEQ ID NO: 168216 - DNA, 122 bp, Homo sapiens
tggtaaggagggcatgatggaaagccggcgtggagggagagaggaggcacgcgcgtgcagcgccgtgacgtgcatttagttacacgacggcttctggaggcccacaactgattaatatacac

SEQ ID NO: 168217 - DNA, 122 bp, Homo sapiens
ggagagccgggttccatgaggtgcactgagcatgctctgcagggtccggcgtgggagggacgcgctggcgctccccaggcccgggcggaagcggcgctcgcaggcgctgaaagcgagcgacc

SEQ ID NO: 168218 - DNA, 122 bp, Homo sapiens
gcagtgagctgagatcgtgccactgcactccggcctaggttacagagtgagaccctgtctcgaaaataaaacttaaaatgtcttttgagactgggcacagtgactcacgcctgtaatcccag

SEQ ID NO: 168219 - DNA, 122 bp, Homo sapiens
acacagtggtcactcctgcaatcccaacactttggttggctaaggtgggaggatttcttgcggccaggggttcaaggctgcagtgagctgtaatccaccactgcattccaggctgggcatca

SEQ ID NO: 168220 - DNA, 122 bp, Homo sapiens
ctgttttcctcattgctacaaaatcttgtaactgtcattcagagtgcttggggagcggagcgctatcgcctatgaaacagccccgtgtggatggccattcaggccatttgtaaatgtctgct

SEQ ID NO: 168221 - DNA, 122 bp, Homo sapiens
ctgagtgtctctcacagcagggcctcccctccccgtcagacgcgctaaagccgggcaacacgtggctggggtggacacgctccctcctgtcagacaccttaactccgggtgatgcgtggctg

SEQ ID NO: 168222 - DNA, 122 bp, Homo sapiens
cgaaagagcgaaaagctccctaccaagccaggctttgttccctgaacctaagactttacccggcggctggcggcgggcgggccgggagcgagcgagcggaggcgcgcggccatggctgccgc

SEQ ID NO: 168223 - DNA, 122 bp, Homo sapiens
atgtggccagcttgactaagccgccagcgcacagcgcggcaggacgcgcccgggtctcagcggacttgtgcatgttagctgtgtagatttatgtgagggcttgtaaaactctggtcttgtaa

SEQ ID NO: 168224 - DNA, 122 bp, Homo sapiens
gaactgtcttcctccgcaggcgcgaggctgggtacagggtctattgtctgtggttgactccgtactttggtctgaggccttcgggagctttcccgaggcagttagcagaagccgcagcggcc

SEQ ID NO: 168225 - DNA, 122 bp, Homo sapiens
agcgacgctagaacagttacgtccagaagcgtaccacccctgccgtcagcccggaggccacgggctgccggatgtggctcatcctgacttccgctttgaaggcgaggaccccagcgagcgta

SEQ ID NO: 168226 - DNA, 122 bp, Homo sapiens
cagaatgacatgtggataattctttgattacacaggttttccaggtttgtaatagaaaaccgaacaagtgaagatgagtatgaggtggctttgcaagcagtttctgcctcgtgggatataac

SEQ ID NO: 168227 - DNA, 122 bp, Homo sapiens
gagccagtgcagcgcctggccctggacaggctcctgggacagacgggcggtggtctcaggcgtagacccctctccagccccaccgctgggctatgccgggtagtgcaggggagacacacaag

SEQ ID NO: 168228 - DNA, 122 bp, Homo sapiens
tgagggcgacaaagtgacaggttcttggctgcagccttttcatgcagggcttcctgcttgcgctgggcctggcccagcccagggggcattttcatttaaccttttgtataaggttatatcca

SEQ ID NO: 168229 - DNA, 122 bp, Homo sapiens
atcgttccggcagcgcgactagttaacagcagagaacaagttgggggactagtcctgagccgccgggtgagggtggggaccggggggcgccccggcagggggagccgtcgaggcgtccgcgc

SEQ ID NO: 168230 - DNA, 122 bp, Homo sapiens
ttgtctcctagcctggatctccttggtgaccgctctgcatctagtgctgggcctcagcgccgtcctgggcctgctgctgctgaggtggcagtttcctgcacactacaggtaccgcccccgcc

SEQ ID NO: 168231 - DNA, 122 bp, Homo sapiens
ctcccaggtcctgccacctctgagaacctgaggtccttctccccaacccctctgccccaccgggaaggcactattcagtcactgaccataaccttgtagagcgcagtaggtctttagtgcag

SEQ ID NO: 168232 - DNA, 122 bp, Homo sapiens
gcgccgagccgggggcgcaaggtggtcgcggtgacgcgccggggaagcgcagagaagcagcggcggcggcggctgcgccttccgagcccgggcggcggccgaggcacgcggagctgtccgtt

SEQ ID NO: 168233 - DNA, 122 bp, Homo sapiens
aggcacgcgcggcagaagccggagttggcccggccagcgggcggagaggagggaggggggcgcaggctgttccctggcgcatcccgggctgcaaatctgccgcctgcgtccggtccgcaagc

SEQ ID NO: 168234 - DNA, 122 bp, Homo sapiens
acgcgaggagcggagcaggaaggggcgaggcagccccgcccccggggcggtctcccgggacggccccgccccttgcccgcttccgcgtcagtgcctcaccaccacctgcccgcgcgccgccc

SEQ ID NO: 168235 - DNA, 122 bp, Homo sapiens
gtgccgctcagtgggaaaatccctttgtcagagagtggcccgaggggcgcggaatgcagccgcgcccaccccgccccgcgtcaccgcgtcttccggaagctccacgcccctgggtacttggt

SEQ ID NO: 168236 - DNA, 122 bp, Homo sapiens
acctcgtaaccccttccccacccctgccccagtgcaggtctgggaaaggggagagtggtgcgttgtgaagcgcagaaagacctcaagtgtctgggcaagcctgttttgagtcgggtgtggcc

SEQ ID NO: 168237 - DNA, 122 bp, Homo sapiens
tgggggactgtgtggtgttggggtgtccgtgcctcgttactgcggggactgtgcagtgtccgggtgtccgcgcctcgttactgggggactgtgtggtgttggggtgtccgcgcctcgttgct

SEQ ID NO: 168238 - DNA, 122 bp, Homo sapiens
cgtcgcgaggattaagtttaagacttcgcgagaacagaatttcttttggcacctcctctccgcgcgttcttggggtgaggctgggtaattgttcctgcagggtggtgggtgatagtggccag

SEQ ID NO: 168239 - DNA, 122 bp, Homo sapiens
ctatagaagttagcatacatcaaattaacccagtaattgagtcaaccgtgaacttctgaacgcgctccccaccccgaggtgctggttttaggagaaaggcaccgactggtgtttggtattct

SEQ ID NO: 168240 - DNA, 122 bp, Homo sapiens
taccggcggctgcgggcactggccgactacgagaatgccaacaaggcgctggacaaggcgcgcaccaggaaccgggaggtgcggcccgccgagagccaccagcagctgtgctgccaacgctt

SEQ ID NO: 168241 - DNA, 122 bp, Homo sapiens
tggtttccttgactgtgggagaaacgccgggagccggagtaagtagggctccgggcggggcgaaaggaaaagttgggtccctagagtgaagaccgagttctttctgtccgtctacactgagc

SEQ ID NO: 168242 - DNA, 122 bp, Homo sapiens
gcgtgtgatctcttttctcaccaaggaataaaacgtctctgaataccacagacgtgatgccgggcttttgggggccggggggtgtcctagggccccgagggaggagccctgtgggtgccgaa

SEQ ID NO: 168243 - DNA, 122 bp, Homo sapiens
gttgttgctaggctgttgtcaggactggcgatgcgtaggccactgagagcacccggagtccgagtgacggaatcaggcgggcgcccgcgtcgctaaggagtgcgtcacagtgcgcgggcggc

SEQ ID NO: 168244 - DNA, 122 bp, Homo sapiens
aagtttgtttccttccaagattccaatgtgaaaatcccaacctgggaaggaatgaacaaacgctgctgaacccaggaggcccagcaagtgggcagtgcgctccagtgggcctggaaggcaga

SEQ ID NO: 168245 - DNA, 122 bp, Homo sapiens
tttgcacttttcaggtagggctgttcttccttgggcaggactgtgctgagccctgcaggtcgtttattatccacggctcctgcccactggatgcaaatagcactgcccagtcatgtgacaac

SEQ ID NO: 168246 - DNA, 122 bp, Homo sapiens
ccccgctcggcgctgctggcgaaagagccaacaaaacgctgggtgctgccaccgtgacaccgactttaggaccccggcctcggatggagaaaggagggtacggagccaccacataacttcct

SEQ ID NO: 168247 - DNA, 122 bp, Homo sapiens
ggaggaccggatactagtgaacactagtaatgtttaccacaaagcatgtgactttgaattcgacagtctgctgacctcaaccccttcagcccttccacagatttcagaagcagtgaagtgcc

SEQ ID NO: 168248 - DNA, 122 bp, Homo sapiens
ctgcggaggctggactagcttcagctacttttatttaggcttcaaaaggaggaccttggccgccagcagctgaggtctgcagggcaccagaggtaaacttctgccctgagtctccaaaaata

SEQ ID NO: 168249 - DNA, 122 bp, Homo sapiens
gtccccgggccagcacatcggccttctcctcgacaagcagcttgacagtggccaggtgtccgttgcgggcagccaggtgcagagcggtgtagccgtctgaggtcatggcctccttgccagcg

SEQ ID NO: 168250 - DNA, 122 bp, Homo sapiens
tttttgtagctgttcagggcttaattactcctccttgatccatgggactagacacgacaccgccaaggttaaaatgccccgaacagcgctgagcagatgtgagcgagctggcagacgcgcaa

SEQ ID NO: 168251 - DNA, 122 bp, Homo sapiens
gccgccgccgcgcccgccgccgtgtcccccgcggccgctgcctcatgtcggaagagctgccgccgccaccatctccggcccctgccccgcccgctgtcactgacagacgcgcgcccgcgccg

SEQ ID NO: 168252 - DNA, 122 bp, Homo sapiens
aaatgcagaagctgacaggcgggctcggggctcatcctgggcaccgggtgggactcgagacgcagagggatgaccctttccatgtggcctcctccacggggtggctccagggctgtctaagg

SEQ ID NO: 168253 - DNA, 122 bp, Homo sapiens
cggcgtgggggccaaggcacagctgggcgcggaggcggcgcgggcttttccctgggctagcgtgcgccgcggcgccttcaccagggcgggaaccgccgcctcctctagggctgctcgggctg

SEQ ID NO: 168254 - DNA, 122 bp, Homo sapiens
cgcctgcgcctcgccagccgccactgccgcctcgggcgccgccgcctcctcagcctcggccgccgccgcctcagccgccgccgcccccaataatggccagaataaaagtttggcggcggcgg

SEQ ID NO: 168255 - DNA, 122 bp, Homo sapiens
ctcatgcgctttccaaaaattccaaacgctgatttcagtagcatctctgtgccctcctagcgtatgtctgcgccgggtgcttttccttttagcagtcgcggcattcgctttgtgattcccta

SEQ ID NO: 168256 - DNA, 122 bp, Homo sapiens
tctttaccattgatttcacctttcgagcacagtcactgcatggcaaatgtatgaaacagacgtttacagcaaataagtaccagtatgtacaggaagctgccagttaagacagacccggaaaa

SEQ ID NO: 168257 - DNA, 122 bp, Homo sapiens
agatttgaacaatgtactaaagaaggaatggagctgtcactaagcccaagaaaaggtcctcgacgccactcttcacggacacgcaataaaagccacagtgagacagtacacacctatgggag

SEQ ID NO: 168258 - DNA, 122 bp, Homo sapiens
ttaatcttttggtcattgctgttttgctgtggtctgtctcccatggcatgaggggaaatgcgttatctgcctctgttgtagaaagatgcctgaggaaaataatcctcagttgatgtctcagg

SEQ ID NO: 168259 - DNA, 122 bp, Homo sapiens
cagccctttagtcccaagtgaagggagcactccagtgttggtcagctttatttgggggtgcgttgttgataatctgccacccaaatggattgcgtgatacaactgcttcctgcttcgtccct

SEQ ID NO: 168260 - DNA, 122 bp, Homo sapiens
tttcctggccccttagttgtgggttttcctgcgggcggtggagcccgtttccatcagaaccgcccagaggcgggcgctgccttccaggggtgaagtgttttcggaccccggaatctgtgggc

SEQ ID NO: 168261 - DNA, 122 bp, Homo sapiens
tagttactttctcttttgctacactgtaaatgtaaggttctgagggggcggactcgccgccgaccgacggcgggttgggccaataagaatccggagaaagccgaccgctacctcacagagcc

SEQ ID NO: 168262 - DNA, 122 bp, Homo sapiens
ttccgcaagaagacggcagtgctcaggcggcaccatcctcccgccatccccaccccagcacgcagaccctggtggctgtccccacccccaagagcgctggcccctgacacgcacctggaaga

SEQ ID NO: 168263 - DNA, 122 bp, Homo sapiens
gaaaggcagaaggcttgaaggcaaggcgtgagggagcgcccaggacgctctcggaggggccgggccggggtctgcgctgcagcccgcacgcacctcacttccgcgtcgcggcgctcggtcgc

SEQ ID NO: 168264 - DNA, 122 bp, Homo sapiens
gcttagatttctcacattccagcacatgcacatggtctgacagtggttcttcatgaggagcggaggtggggagcatggagagtgtgtgagagccacctgggcacctttttgtcaaaatatac

SEQ ID NO: 168265 - DNA, 122 bp, Homo sapiens
tgggcgcccgcgttccgtgtggtgcgttccgtggggggtttcctgggggcggggtgtgcccgtgggtgcggcccattttgtctgtgggatgcgtgtccatgttcccgggggggtgtccctaa

SEQ ID NO: 168266 - DNA, 122 bp, Homo sapiens
acttctggcctctagaactatgaaagaataaatgtctgttgttttaagccacccagtttgcggtcatttgttatgacagctctgggaaccacgtacacctccccatcaaggccctccttcca

SEQ ID NO: 168267 - DNA, 122 bp, Homo sapiens
ccccctgcaattgtgcatttcggagggactcttgctgcaagctcggtaggcaatagcatccgctccaagactacacttcccagaaggctgtgagtgggtggggggggggggggcgcggggaa

SEQ ID NO: 168268 - DNA, 122 bp, Homo sapiens
agaccagcctctgcaacatagcaagatcccatctctacttaaaaaaaaaaagttgctgtgcgtgcttcaggctgagcagggaggatgttttgagcccaggaattcaagtttgctgtgagcta

SEQ ID NO: 168269 - DNA, 122 bp, Homo sapiens
accttatattttccttccattgtttctgtggtgacctcacttgcaccattgtccctgagacggcctcaagacgcgtccgtctctgtgggtgtatctcgggacctcccctctcatcattgctg

SEQ ID NO: 168270 - DNA, 122 bp, Homo sapiens
tccagcaccagcagcgggatctcctccagccggtccggccgctccttgcgccgcaggtagcgccgcctccacgtcgccagcctctgaagcagcctctgcaggctcgaggggccccacaggcc

SEQ ID NO: 168271 - DNA, 122 bp, Homo sapiens
cactcttgttcccttgtagtctattctcagcacagcagccacagtgaccctttcaaaatacgtcagattactcctctgctggagagccccctggcttcccatctaacttagagtgaaaggtg

SEQ ID NO: 168272 - DNA, 122 bp, Homo sapiens
gggggcgggggtaggctcggcacaggctaaaaacgagcggagccgccggggcttaggcatcgcggcacctccgttgaacgggtctaagaacagaactcctgaggaccctccgtttccaaccg

SEQ ID NO: 168273 - DNA, 122 bp, Homo sapiens
gtctaaaaaaaaaaaagacttgtatttaatgtgatttaatcgactgtgcccatctcactgcggacactgagtgcgcaacctgagcctggagcagttgagggagacggcaagaccccacgcgc

SEQ ID NO: 168274 - DNA, 122 bp, Homo sapiens
gctttctgggttaggggatcgacttgcacgttcacactgccaggccgggcagtggcttcccgcccctcggcctcgccgccgccccggccctgcagccgcggcccgggacccccacgacacgc

SEQ ID NO: 168275 - DNA, 122 bp, Homo sapiens
cagcgtcaaggctgcgacgatgctcgtgacctccaccgcgaagtcacctccgcaaggcgacgcaaggacctcggcgatcccgggcgccgtacacccgccactttccagcctcatgtaacccc

SEQ ID NO: 168276 - DNA, 122 bp, Homo sapiens
agtcttataaaattcatacacagactcaaaagactcctggaatgaactgatgaattgatacgcacactagttacataaaataaaatcttttttaacttttttagtgttttacattttataat

SEQ ID NO: 168277 - DNA, 122 bp, Homo sapiens
tctactgtggagcttccccatctagcttaaagtgctgggtgtgtcctgttaatgtttctccgcgtgactgaagggaaacagacagcctggctatgtctgggaagaagacagggatagagagt

SEQ ID NO: 168278 - DNA, 122 bp, Homo sapiens
ttatgtgacttgaaacgattctagagcattctttcttctattttttttcccacaggtggtcggtttctgggtctgcatggctcagtagaggatgaagtccaaccccccacgctcctccctag

SEQ ID NO: 168279 - DNA, 122 bp, Homo sapiens
tgccaaggagacttggactcaacggctagctaaccccgcaaagatgagctcagttctagtcggttacggtagaatgccaataaacccaaccccttcagtaaactgtgaagaccgaggggcca

SEQ ID NO: 168280 - DNA, 122 bp, Homo sapiens
cctcttcttcccctcttccagagcttccacggtgctggcaaagtcctgcagcttcttcttcgagtcggagagctacaaggacagcgtccagggtagggtgagagggggaccatgagtggccc

SEQ ID NO: 168281 - DNA, 122 bp, Homo sapiens
ttcatgagtagtcttctttcttggctgaacgtctagattgggactctctctgcagagaaccggtactgaagcaactgtcattttcagtttttgtttcatttggctttttctttagctgttca

SEQ ID NO: 168282 - DNA, 122 bp, Homo sapiens
aagtgggcgggaaacacaaatcctgagttatagtatttgcccatttccatgatgtaaatacgcccactacagcccatttcaagcaaccaacagtttaacagccagcttttaacattcctgaa

SEQ ID NO: 168283 - DNA, 122 bp, Homo sapiens
acttccggcgccgccgggtgtggggcggaggtgtggggcggcttccggagaacccagcggcgcgggactggggcgggacttccggcgacaccggaagtgcattagcgccaggttggggttgt

SEQ ID NO: 168284 - DNA, 122 bp, Homo sapiens
ccagccttgcaatccatgccgagaggaaggcagtgcgagcccgcgccagcgcccagctcccgggacagggtcggcaatgctgctgagcagaacttgatcgcgctccttcctcgctgctagtg

SEQ ID NO: 168285 - DNA, 122 bp, Homo sapiens
gcagctttgacaggtggtgtctgttggacaccagcttctggcctggccctgctttcttctcgggtaccagacagggtgtgagggcagggaactagctccggagatcactggaggactccgag

SEQ ID NO: 168286 - DNA, 122 bp, Homo sapiens
gaggctcctgatcgatttgacattacattatggctttgtaacaggcaaatcagcacccaccgcttttgagtcataactcacacacttactccccaaattgtcagttttgatcccacctctgc

SEQ ID NO: 168287 - DNA, 122 bp, Homo sapiens
ttttcaccatgatgagcaacttgtcaaaagaatttgcaaacagacaggtgcggtggctcccgcctgggattataggaggctgaggcgaggggatcacctgagatcagaagttccagaccagc

SEQ ID NO: 168288 - DNA, 122 bp, Homo sapiens
gcgtcctcggcaagggccaggcccagggctactgcgtgcgggagctgcaggtgtggcggccgggccaggtgagcctggcggctgtggagcgtgcctgctgtcggcctgcactgggagacccc

SEQ ID NO: 168289 - DNA, 122 bp, Homo sapiens
cagcactggcttgctgtggtacctgtgcaatcaaattgaaggcaggatcccaggaaggaacgcagcgcttgcaggatcaccgaaaaccttcttagagttgtcttgacaccactgatgtcaag

SEQ ID NO: 168290 - DNA, 122 bp, Homo sapiens
ggctaggtttttactaaagcccttactccctctagtgggaagacggagctgtgcagcatccgtagcaaggtgtgtgctcttcagggctaaaagtcctttggaatcaagattgtttcttgttt

SEQ ID NO: 168291 - DNA, 122 bp, Homo sapiens
ctatcccagtcctctgaacgatttccgcctatttgcaagccttctccctgtcattctcaacgcttctcctttctctccacctcccctgccactccattttatccatcaaacctctccacttg

SEQ ID NO: 168292 - DNA, 122 bp, Homo sapiens
gagatctcagggccatggacagtgcagctgcctgtcgctccctgcaacttactcccgacccgggcctcctcagagacagccacaatgcagacagtccacacataggatggctcaggactctc

SEQ ID NO: 168293 - DNA, 122 bp, Homo sapiens
gacacacatagcagggcaggcgcaagcacagacttcattttaaatcattcgccttcttctcgtttggggctgtgatgctctttaccccacaaagcggggtgggaggaagacaaagatcaggg

SEQ ID NO: 168294 - DNA, 122 bp, Homo sapiens
taccagggaatgaacagaccaggccactcacatccacgtgagggctccaggagccacttccgggcccagtcaaccacgaccaggagaggcagcgctggagcctcaatcacgtcgacggaaaa

SEQ ID NO: 168295 - DNA, 122 bp, Homo sapiens
gcagtcggcccaggacacttctgccttgggccctggacctgccccgggactctgattgagcggggagcagaggaggcaggttgcaggtctttgctgcagaccttagttcctccctagcaagt

SEQ ID NO: 168296 - DNA, 122 bp, Homo sapiens
gtgtggttgcagaacagcaactaggaatgatggcgggggggtgtgggggtgggggggggccgtgggcaagaggcaataggggcaaatgaggtaaagaaacacctgtgggccacattgaggac

SEQ ID NO: 168297 - DNA, 122 bp, Homo sapiens
ggagcaggacaaggaggggggtgggagtgggaagaaggctctggaagccccgtcagcgggcggttcaggagctgtcgggccccagctaacagaggcgcctgccgctgccttggtgtggcgag

SEQ ID NO: 168298 - DNA, 122 bp, Homo sapiens
cgccggctccttgcgtgtagggccccacgttacatgggaggataccagcaccagcagccacgtgaagaggagtccctcaatggtgttggagaaggtccttgtgtagaagaccagggtgacgt

SEQ ID NO: 168299 - DNA, 122 bp, Homo sapiens
agagagaaagggagagctttcccaattgagttagagaggtccacgagggctgcccaagagcgaggaaggactccctccccccaggctcatgtacacaggctggcccaccaaccccaccctcc

SEQ ID NO: 168300 - DNA, 122 bp, Homo sapiens
ttcatttttttaatctgcctactatgggtctgctcaagggcttcttcccagacaccactccgggatatggctggcaggtcttccccatcctacagtaaagctggggctgtgggtgacgcgct

SEQ ID NO: 168301 - DNA, 122 bp, Homo sapiens
atgtgggggagtaaggactagaatcctggctttggaatccggatccagtgttctttaggacgcagccaatttcctggcataacattccagggaagattccttcctttatgggtctgagactg

SEQ ID NO: 168302 - DNA, 122 bp, Homo sapiens
tcggagcacgtgcgtcgtccggcccagcctggcgggctattcccaggcccgcgtggtcctcgaaggccccagtcctcctgcgccatggagaccccggcctcgcgacctcccccctcccggcg

SEQ ID NO: 168303 - DNA, 122 bp, Homo sapiens
caaaaaagcagacagaaaaatgtaaaacaagaaatccagtcaccccggttgtcaagagtccgaagaattgcaaaggaccggaacctccctctagccatgctgaagaccctctccccaaagac

SEQ ID NO: 168304 - DNA, 122 bp, Homo sapiens
cgaactcctgacctcaagtgatccgcctgccttgacctcccaaaatgctgggattacaggcgtgagccaaagcacctagacttgctgtttttttaaatgttggcaaaagctagtgactaagt

SEQ ID NO: 168305 - DNA, 122 bp, Homo sapiens
ttttaagtgaaaggcttaatgcatagatgggatctgacatatgagtgctgctcactagttcgctgtcagagcaggtctgaataattagcaccggcagctcttctgtgcagatattaatatct

SEQ ID NO: 168306 - DNA, 122 bp, Homo sapiens
gggtgtgggttccgatgcctgggtcctggaggtccggggagtcgcggagggacctccctccggtaaccgacggattggggacaaatgctctgcccagtctgatcccagacatccttgtaacc

SEQ ID NO: 168307 - DNA, 122 bp, Homo sapiens
ggtgcgggtctggggcaaggggctttccgagggacacacattccaggtggcagagttcatcgtggacactcgcaatgcaggtacctcctgccccagagagcccccattccagcgggtgcctc

SEQ ID NO: 168308 - DNA, 122 bp, Homo sapiens
atctgagccctgggtggaggaatgtgtgcagtgggtcagatgggatgacacaaagacagccggcctctgttccctgaactaatgtggcctggaactgtctgggggacttggcttcagtttac

SEQ ID NO: 168309 - DNA, 122 bp, Homo sapiens
gtgttttagaacagctgggaggaacagctgttgcctccctgggacagagaatgcaatgcacgaactgtccaggctgcaggacattcttatccctgaagctgggggtagagtcatttgagaca

SEQ ID NO: 168310 - DNA, 122 bp, Homo sapiens
gtgatcctcccgcctcagcctctgaaaatactaggattacaattcctgtttttctaaaaccggtttttgttttgttttgtcattagcatgtgtgacacaagaggtcgacattgaacttagcg

SEQ ID NO: 168311 - DNA, 122 bp, Homo sapiens
tttttggctccacccctaccgactgagcccggcctcctcctgatgacgccatgggccatgcgttctagccacggcccccgcatcggaacaggttctggccccgcccccaccagtgaggcatc

SEQ ID NO: 168312 - DNA, 122 bp, Homo sapiens
ctcagtgattggttcagggctgggagcatttcacatttcaccatgttgcccaggctgggccgatgagactgagtcctgagacttctgcttgtactgcactgttggaatggggacggcttctt

SEQ ID NO: 168313 - DNA, 122 bp, Homo sapiens
tgggggtactctgttttggggctccatttgaggcctgtggctcaatggaagacatagaggcgcttcgccgcacaggtttaatcaagcaagggcttgatagaagtattcatcccacccccgcc

SEQ ID NO: 168314 - DNA, 122 bp, Homo sapiens
agctggactgacagggggaggtactgctgctggcgtagctggtgctgctgctggcgtggccggtgctgctgttgctggacctagtggagacatggctctcaccaaactgcccacttcgttgc

SEQ ID NO: 168315 - DNA, 122 bp, Homo sapiens
ggccagcactggtttaattcactggctgttccttcctgtgagggctttccgctaggccggcgaaggctggtgagaaagccggctctgcgccctgccctgtgctggccgccctcacctggcgc

SEQ ID NO: 168316 - DNA, 122 bp, Homo sapiens
tggacacggcacacgtttacccacgggcctgtgggcacaatcctcaaacacaggtgcacacgtgcacacaagcacacgtctgtggaaacagccatgagtcgtggggtgggtgacacaatgtg

SEQ ID NO: 168317 - DNA, 122 bp, Homo sapiens
gctgcaaatccttgggtaacctcaccggcgtttggtccaagaatatgaaatcctatcacccgatcctttaatacagaaacaaaacaaagagaatcccagtaggttaatggtctgaatatgga

SEQ ID NO: 168318 - DNA, 122 bp, Homo sapiens
cgccccggagccggcgcctttataggcacatttattgcaataataaagtgaggcgcggggcggggggcgggggggcagtcgttcccgcggggaccgcgctggctccaggaagcagggaaata

SEQ ID NO: 168319 - DNA, 122 bp, Homo sapiens
gagttttagggacgtggcaataactgcgtcccaagcagctcctccattcagggcccgtgacggtctggagtcggaggagccacagaccaccttctggttcctccattgcactcaggtgggca

SEQ ID NO: 168320 - DNA, 122 bp, Homo sapiens
agggtcattcgagggctttctctcgcctttgctctttcacctgatcctcgcggacagctccgcccaaggtggcaagaatgaccatgtgtgaataaggggtgtggaagctgggctgatgcggg

SEQ ID NO: 168321 - DNA, 122 bp, Homo sapiens
agtgcctggcacagggctgccccaacagtggtggttgctggcgcattcttatatcagccccgcccctggcgagtcccacccatctgctgcctgtggggtgcccttgcggaactttggggccc

SEQ ID NO: 168322 - DNA, 122 bp, Homo sapiens
agaatggagaataaagaggagcgtcgcaggccggcttcctgtgccccggccagggtggatcgcaccagataatgactgatagccgtggaaacggggagacaagatagaggggaggccggctg

SEQ ID NO: 168323 - DNA, 122 bp, Homo sapiens
tggaagggtgggtggcactgttttggtaattgtctcttttctgcatttcactctccacatcggaaatacactccccatataccatgaacaaccaaaagggaaattctgaaacctgttcacat

SEQ ID NO: 168324 - DNA, 122 bp, Homo sapiens
ggaggcctcggcgcgcagctgggcgagtactaactgtttgcactctcatcagacctgcctcggtcatgggagaagttgaagactttctgcaatgcagcatcttcaagcaatacacacatgga

SEQ ID NO: 168325 - DNA, 122 bp, Homo sapiens
ttctccaagaaggtaggctccacccgctttgcccttctccactcgctttttttctaggtccgtgctgttgtaagtcatttgagggacctgcgtacaatcccagacctactcgtggggcatgt

SEQ ID NO: 168326 - DNA, 122 bp, Homo sapiens
gttcgaaagacggtcttgaaaaattccttcaaagtatgaaatcccacgcatgcaaaactccgtgcctgtctcttcgtgatactctgaagtggtgcgcgcacacagtgggtaaccaaggatga

SEQ ID NO: 168327 - DNA, 122 bp, Homo sapiens
ggaggcagccggcattgaaccagcctcagccaccatctgcttttaacagccagggaaggccggtagtagccagcagatcgcgtctaccaaccagtttcaccaactggcagataactccgggt

SEQ ID NO: 168328 - DNA, 122 bp, Homo sapiens
gtggagggaaggagaaagttgggcgccgcttggagcgcctcttcccctgctgtgtgtgtacgtgtgcacgctcacgtctcccccgcgccggggccggggacaggaactgctctcggtcccgt

SEQ ID NO: 168329 - DNA, 122 bp, Homo sapiens
cggaagggtgccgaagttcatgtgaagttctgcaaaccaaagcctgatgaggatttccgccgggtgggacaggtttaagaggacgaactcatgagaaagaagtctgagcccaaaccccagaa

SEQ ID NO: 168330 - DNA, 122 bp, Homo sapiens
gaatgaggtgtggttggaaatgtacattgaagccagatggcgggggggcctcaagtttcacgggaaaggggtcatatttgaatatctagcagttgagagctgctggaacactgtggagtcac

SEQ ID NO: 168331 - DNA, 122 bp, Homo sapiens
aacttggtgagcttagccttccgtttttggaaagcagcctggagctggcctttaggaattcgtgtttacatgtaaacacacgtgttacatggatacagctcctagccagaagcaagcaggct

SEQ ID NO: 168332 - DNA, 122 bp, Homo sapiens
tcgccgcgcccagacccctgcggcggccgcagccgcttgggactcgctgcgagctggtttcggatccatcccgcctcccggcgtctcactgtgtgccctaccctttgaaacacgcccccgcg

SEQ ID NO: 168333 - DNA, 122 bp, Homo sapiens
gactggtaaaaaagagacaatcgaggaatgaggacaattttgacaacttttgaccacttgcgctaataaaaaaaaaaaaaaactactcttatgtccactttacaaaagaaaacagcattgtg

SEQ ID NO: 168334 - DNA, 122 bp, Homo sapiens
gagggggtagagatttagtccaaggcattatccctaaaggcaagacttctggcctttcagcgttcttctactttgtcatgcatattaggaggagtgagtgtctctgtaaaacaaacaaacaa

SEQ ID NO: 168335 - DNA, 122 bp, Homo sapiens
tattgccatatcattcctttgttcaaaagcttctaatggttttccataagacttagaaggcggggatacaaagtccttacccctacctacaagaccctgctttgtcctccccgcaccttaac

SEQ ID NO: 168336 - DNA, 122 bp, Homo sapiens
caagccagtgcagttccgggtgggcatgggcttggccgccccacactgggagcagcaggccggcgtcaccagccccgggcagtgaggggcttagcacccggggcagcagctgtggagggtgt

SEQ ID NO: 168337 - DNA, 122 bp, Homo sapiens
gcttgggtagctcacaaagcagctcctggtagactaggtttactggcccatagctttattcgttagtggagacaatggccattaccctaagcagcacaggctctgtttttaaagggagagaa

SEQ ID NO: 168338 - DNA, 122 bp, Homo sapiens
caaatcctttattctggtgtggtaggggcactgggcaatgcagatgatgagcaagatggtcgtaggacagtaccagccacaagatatgcactcaaaaatattaagtgaataaatatgtaatt

SEQ ID NO: 168339 - DNA, 122 bp, Homo sapiens
ggtgccaggagcactggtggtaggttatgaggtttgacttgagacggagtctccctctgtcgcccaggctggagtgcagtggtgcgatctctgctcactgcaagctccgcctcccgggttca

SEQ ID NO: 168340 - DNA, 122 bp, Homo sapiens
gggaggacaacgcccctctctgagcggacccggtgggaatccgagcggctccctcgggagcggggactgctggaacagcggctattcttctgttattagtatttttcttactgtccaagatc

SEQ ID NO: 168341 - DNA, 122 bp, Homo sapiens
ggagacgacgagacaggcaacccaaagagagggtggggaggtgggaagagggcggagaggcggcctggagccagcagtggggactcaggacccctgcccagcagatggcagcccagatgaca

SEQ ID NO: 168342 - DNA, 122 bp, Homo sapiens
tatttctactccaagagtttaccttgctttctgacccttgcatgcctttggggtggggggcgtgggatttgacaccgtagtttctcttctcggttggccccgtatcacaccctaatttggaa

SEQ ID NO: 168343 - DNA, 122 bp, Homo sapiens
ctgcgccgggctgcagcctctctgaaacgtgaacatttcctgtttcctgcttgtttgggtcggtgctgacttgaaggagaggtgtgtgcctgttttttaggaagtgatgtaattctgcagga

SEQ ID NO: 168344 - DNA, 122 bp, Homo sapiens
tatctgtctaacttacgtctcttcttcaaggtctgtttcaagcattcccttctccagttccggagaactgatcctgattctgatcatcccttaaatatattatttctctccttacaaaatta

SEQ ID NO: 168345 - DNA, 122 bp, Homo sapiens
taggccccttctcagacatgggttcctccctacactgaagtttgtatacccccttcttcccgtaagaacaaaagcttcacatataactccgtactttgttgcaccaccaccaggctgcaacc

SEQ ID NO: 168346 - DNA, 122 bp, Homo sapiens
ccacttaggaggaggggacgcgggttggggcggcgacggtggtctgaggacgggaatagacgcctttgcggaaacagcgggtcaagcccggggcggcggagcgcgaggagcactgcggcgtg

SEQ ID NO: 168347 - DNA, 122 bp, Homo sapiens
gccggtggcgacgtcgcccccgccccacctccctgcgcaagtgcgaggctgccggcagcgcggcgcacgctccggccgttcccggcttccgcgcaaaacttccatcctgtccacgtgaagtt

SEQ ID NO: 168348 - DNA, 122 bp, Homo sapiens
ctgttgcgactggcatccgcatccggcagatgtagatggaaccaaagtccagaagttacgcgtcacccttgctctacagccaaacatgcaggactctagtaacccgcgaaatgatgggatag

SEQ ID NO: 168349 - DNA, 122 bp, Homo sapiens
gggggccagagtcatctttgacgactataaaccttatttgcgattggatccacagaatggcgacttgctcttaaacgagcagctggaccgggaggcactttgtgatctcacagagccatgta

SEQ ID NO: 168350 - DNA, 122 bp, Homo sapiens
atagccatacattctctggacttcctttataatgaagatgcaaatgatcaaaaaacaagtcgactttgtgccattgctgctgtcttctttacaaacgagaccctcatatcacttatctcacc

SEQ ID NO: 168351 - DNA, 122 bp, Homo sapiens
tatacctagtgaaggtatcttacccttctgagccatccacaatcctaagaacaaaatcttcgactagagacatctccaaagaagaaactatcccacttttccttgttccctttactttgtct

SEQ ID NO: 168352 - DNA, 122 bp, Homo sapiens
gcttatccttcatcatctgtgaaataggctggctgatggcaccaaccctcatagggttgtcgtaagggtttttcagtaataaagagcaaacagcgacgtgcttctcaagataaagtccagag

SEQ ID NO: 168353 - DNA, 122 bp, Homo sapiens
tgagccccagggggtgccgagattgcggcgaggagagccgcagcacaaggcaaatccacgcggttggtccccgctacgcccccgtagtcacccgcagcccctcgccaaagggcgctccgcgc

SEQ ID NO: 168354 - DNA, 122 bp, Homo sapiens
gctgggctgggcccgggaggctggcatccctgggtgctccggtgcggtactagggggcgacggctgagccgtgggtggagccgctgggtcagtctcggatagaaataaactgggaaactgct

SEQ ID NO: 168355 - DNA, 122 bp, Homo sapiens
gtgaggggctggggcccagggagtccgaggggtctctgtgagggcgctggggtgtccgagcgagcagggaactctggaaggggacaggagccgggggagctgcaggcggccgccgtctgcag

SEQ ID NO: 168356 - DNA, 122 bp, Homo sapiens
cgtccacctgtgtgcccagcccctgacgttaccggtcggcttcagcggcctgcaggattccggctcccaattggtcggcccgtccacggcttgcgcagctcaccaatggcagcggtgctggg

SEQ ID NO: 168357 - DNA, 122 bp, Homo sapiens
gctccaggagaccggggaggcccggcacagcctgtacatgttccaccccaccctgccgcgcgtgctgctggagctggccaatgtctctacccacattgtcgcctttgacggtgagtgtggcc

SEQ ID NO: 168358 - DNA, 122 bp, Homo sapiens
tcacctctttcctgagtttattgtgacagcatcctaactggtgtgccagttcttttaatccgctctctgtaatgcacattgtgtgcatatgtgtgtgtaatgttaatcagatcatagctttt

SEQ ID NO: 168359 - DNA, 122 bp, Homo sapiens
ctagtatatgccataaaatcagtaagcaatactggatttgcagtcatcccccttgtgagacgtctgtgtatagtctccatgatgtctgcttgccaagtaacactgtagatgcttttagagaa

SEQ ID NO: 168360 - DNA, 122 bp, Homo sapiens
tcctcgggcgttggagctgtattaggcagcactcgtagataatattgatgagagctttgccggagcctgacatcaaattagtggccttcgtgtaaaaaatctgggaagaaatgtctaacatg

SEQ ID NO: 168361 - DNA, 122 bp, Homo sapiens
acacagagccacatggcgtgggtccgtggctcagcgttactcggcggctcagccctggcacggcaaagtcttgcctggttacaggcctgtgctctccaggcagaacaagcgcagcggcctgg

SEQ ID NO: 168362 - DNA, 122 bp, Homo sapiens
tcatccatgaaatgagagaggatgtccacacaataacctatatgtgaatgttcataatagcgatattcacagcagccaaaagtagagacaacgcaaatgtccatggacaaataaaatgtggt

SEQ ID NO: 168363 - DNA, 122 bp, Homo sapiens
tgggcggaggatggacagggcttcatcgcgggaactagctcctgggccagcagggtaacccgggaaatcctgtccaaacggctacataaacccccctgcaacgctgagcaggagagcaggag

SEQ ID NO: 168364 - DNA, 122 bp, Homo sapiens
ccaggcaaaattgttggcaacgttttccctcccctttagaatgtttctcgctggcctctccggcctctccttttctgactctagtttgctactgggcaaaagtttcctccttttccatgcag

SEQ ID NO: 168365 - DNA, 122 bp, Homo sapiens
cggccagtcggcgggggccatgagcatctcaggactggtgagagcaatgcccagacggaccgagcacagacttaggctcctgcgttcccacaaatgtatgctccactgcacaggccatgtgc

SEQ ID NO: 168366 - DNA, 122 bp, Homo sapiens
aggcctggtagcattaaccacagttgactgaaaaacctttgtgccttaaataaacatcagcgatagccagacagtactcactgcgtagagcagtggtggccatgggcaccatggccttatgt

SEQ ID NO: 168367 - DNA, 122 bp, Homo sapiens
cgggggaagtaggggggaagtgggcgggcgcccgcggggggcacgcgatgccgggaggggcgcgcccctgccgccgcacctacgcgcttctcggggaaaaggccggggctgccgggtccgcg

SEQ ID NO: 168368 - DNA, 122 bp, Homo sapiens
tcacctggccaaagctcttcactgacataatttttatttatttatttattttttgtcacccgagagtataaactgtatgctttaccttgcatttcctagcaggactccttggcctttttcct

SEQ ID NO: 168369 - DNA, 122 bp, Homo sapiens
ggaggctctggagtcccgcccgccccggcgcggctgagccctgggtacctgcattaagtccgcccggttcagggcgctggccgccaccttcaggaggacttcaccctcccccgggctcggct

SEQ ID NO: 168370 - DNA, 122 bp, Homo sapiens
agagacgcggggagaggctgaccagaagaaaggccgacgtgcaagaaacccaccctccggcgcacagggcacacgtgtcccaaggcacacgaacacacagacggacagagagagaaagagag

SEQ ID NO: 168371 - DNA, 122 bp, Homo sapiens
gcgatctcagctcactgcaatctccacctcagcaggagagcaggaatcttcagtgatccacgggcagatctgccgccattgtgggcacctgtttctcccgcaacctttgtgcccgcctctct

SEQ ID NO: 168372 - DNA, 122 bp, Homo sapiens
ctaaaacattttggggcaccctgtgcggtggactgagtggcagtccccacgatggatgtccgcgtcctagtgtcttggcgcccggggatgtcacctgatatggctgaagtgaatttcatctt

SEQ ID NO: 168373 - DNA, 122 bp, Homo sapiens
agagctgcggccgggaaccgcggccctggcctggcgggtgcgagcggcgggagcgactggcgccccaaagcctgtcatgcaacatcccctttgccactggggcggaacgcacgctctctagt

SEQ ID NO: 168374 - DNA, 122 bp, Homo sapiens
ccagccaccatcgtcatcgcctgctacttctacgagcaggccttccgggaccagtgggaacgcagctgggtggcccagagctgcaagagctacgctatcccctgccctcacctccaggcggg

SEQ ID NO: 168375 - DNA, 122 bp, Homo sapiens
tcacccagacagaaactgagaaagcaaagggaccctgcctgatcctagcctggcggagctcggaaagaggtggaaatctgtctgaagtttgcaggagacccgcgctgcctaggcaaagggac

SEQ ID NO: 168376 - DNA, 122 bp, Homo sapiens
caaaaatatctcgcttggtggaaaaactgcggaaaaccgacggaggacataatttccagccgacctaaacgaagggaaccggaaatgcgtcatagcgcgcgtctgtttggatgtggaagccg

SEQ ID NO: 168377 - DNA, 122 bp, Homo sapiens
aataatgtcgctcaccggggcccgtgtcaacaccgcgtcctccgcgttcatgatctagatcgcaccgccttcaaagtctaatccagtcgtttggagttcattttaaccgattgctggagggg

SEQ ID NO: 168378 - DNA, 122 bp, Homo sapiens
gttcctccctggcccttcctgccgaagacatgcagatgtaaatgttgacccgctcccttccggaggagcagtaggtaccaaatcatacccatggggcaggagtgatgtcagggccaggcctc

SEQ ID NO: 168379 - DNA, 122 bp, Homo sapiens
acctaccatatgtcagttaccacagtgaaaatttgtttcgttactgatagtgatgcctgacgtaaggtaaggtctctactttgcagagctgtggatacagtcagaacaatttcacttcagtt

SEQ ID NO: 168380 - DNA, 122 bp, Homo sapiens
tactgtttcccttcctgctgtctttgttctgcggggccatctcccagcagatccgatacacgattccagaggagctagccaacggctcacgggtggggaaacttgccaaggatctggggctc

SEQ ID NO: 168381 - DNA, 122 bp, Homo sapiens
tggtgcacacgcgcgagcggccctacaagtgcgagctctgcggcaaggtcttcggctacccgcagagcctcacccgccaccgccaggtgcaccggctccagctgccctgcgccctggccggg

SEQ ID NO: 168382 - DNA, 122 bp, Homo sapiens
tgttaataatgttttgctccttatctatattattttaaaatgtacccgggtacagtgggtcgtgcttataattccagcgactcaagagactgaggcaagaggatcttgaggccaggaattca

SEQ ID NO: 168383 - DNA, 122 bp, Homo sapiens
cgcgaaaaagttcccccggcttttgctggagactcatcgctttgggaagtgcatttgcttcgtggctccgccgagcctgctgaatcctgtcctcgcggctcgggaccccgggatcgctgacc

SEQ ID NO: 168384 - DNA, 122 bp, Homo sapiens
tgcggcggaatccctccttcctagccggttgcatttcgtgcctctttgaaatgccacattcgcttccagcttaagtgtcttgagattgtcgcggtgtctgcagctgcggcttctccagcgcc

SEQ ID NO: 168385 - DNA, 122 bp, Homo sapiens
tttcagggcctgagacttgcaagctagtgacagaccgctccagcttccagtggacccgggcgggggcactgatcaacccacttgagcagtgggatcaaggtcttcagccttagcagtgggag

SEQ ID NO: 168386 - DNA, 122 bp, Homo sapiens
agttcaagaaaagaaagcaatttgagggtgctcgtgcctggttcttcctcagagggatgacggtgagaacaacggcaacagctacaggaaactgagccctcagaggccctgtgaggtagctg

SEQ ID NO: 168387 - DNA, 122 bp, Homo sapiens
gggaatgccctatttggtcacattggggtgggacagacgccatttttgtggggcctccttcggaagatagcgggcttttgctgctgatttcacgccagacggaaaacgtataggtagggacg

SEQ ID NO: 168388 - DNA, 122 bp, Homo sapiens
ctgccatgtgacactgtacttcctccacggtgggctcagccctgccctcatcctcacagccgcagccaagctgcagttggtaggggatccaccgacacaccaggctgcctgggctggtctct

SEQ ID NO: 168389 - DNA, 122 bp, Homo sapiens
ccagtgcggtatgttcgatttccttttaattggttttaagcccctttgctcaatctcgtccggtccagtcatctgggcgccaagtctctcctcccgatcagaggttcggaaattttacttag

SEQ ID NO: 168390 - DNA, 122 bp, Homo sapiens
caggtttcagaagcccccaaagaaatggggaaagcccagaccgcggggcagcacggccaccgtgccagctactaaagtcacctcgatgaggtcaggaggtgtttcttttcttatccttcaat

SEQ ID NO: 168391 - DNA, 122 bp, Homo sapiens
actaacattaacgagtaaagctcgtcgcttttcgcccaattccccctcccccccgcataacgaatgcactgacccttttccaaggattttacgttgcggcttgttagggtgattcgaattcg

SEQ ID NO: 168392 - DNA, 122 bp, Homo sapiens
gggtcggcgcctctctcctgtagattttcggtacgtcacctgcgcaatccacaattgctccgagaagatgctgacagccccattcgcaggccccattgaccacgggtctctgaccgtgcagg

SEQ ID NO: 168393 - DNA, 122 bp, Homo sapiens
gaagaacatggtaagatgacagcaaggccaggagcctgcagatcagtaacttgcgcgcagcgaggaagggacggagaaagagatttctccctctcttacctgaggcccaggaggtcctttgg

SEQ ID NO: 168394 - DNA, 122 bp, Homo sapiens
ctgctctgagcttttccctactcaacctgacctgtcctgaaagcgtaagggtggcctggccgcgcgtgtgggaccgacccgaggagggacgagagacagcaaagaaggctgtggttcctgcc

SEQ ID NO: 168395 - DNA, 122 bp, Homo sapiens
acccagcagaaggcgacatgcgaggtttgtttacttgtggcatcaaaggctgggagccggcgagctaaggagggagcgaaagagcgagcggtggggacagccaccgctaaatgccagcccgg

SEQ ID NO: 168396 - DNA, 122 bp, Homo sapiens
agggagaatgagagagagagagggagggggaagtagagagagcaaaagcaagccggagcacggaaggggctagtcacagaagtcaacgtggaagccgtgtgtgcatgtacaagagtacgtga

SEQ ID NO: 168397 - DNA, 122 bp, Homo sapiens
agaaatctactttacaaaggatttcccacagtctcttttgctgtataaattatccaaagtcgcttatgttcataaatgctcctggggaatcatcaggatgcatagagggccatatacagttc

SEQ ID NO: 168398 - DNA, 122 bp, Homo sapiens
gactgtgttcgtcagaccagggccagatggacgcgtgaaggcgtgtgtctgacagatgaccgggtcttttaatgaaccactcacttgaaaattgtctttctgcaggtgatgtatcacccatc

SEQ ID NO: 168399 - DNA, 122 bp, Homo sapiens
gctgacggctgcgccggccgtgtatggctctgtccatggttctgaacccacagtcggcttcggagctctgtccgcggttctgaaattcagagccgctttggagctctgtccgcggttctgaa

SEQ ID NO: 168400 - DNA, 122 bp, Homo sapiens
ccgacgacagagaaactagaccggccaggacgtagaagggtcgcttcccccaggctggtccggggctgagcggggcaccacagggagcggagacagcggaggcggtgagagcctcgggagcc

SEQ ID NO: 168401 - DNA, 122 bp, Homo sapiens
ctccagttacacagacaaattttcacagagctgccttaacattgagcaaatagttaaacccggcaaaatcggcgcccagacagcaaagctagaaatgaaacatatggtcagtaggagccttg

SEQ ID NO: 168402 - DNA, 122 bp, Homo sapiens
acaacggcggaggcggctgtatctggagcagtcggggcgggcaggcccagctgagaggtgcgcgggcgaggacagcggcagcgatggtgaggcttcccggggccaggcgggctgcgggcgcg

SEQ ID NO: 168403 - DNA, 122 bp, Homo sapiens
gcctgacctggctccttccccacagtttagcctgtggggcccttggatgacccccccccccgcccacccccgcctgggacctgggacataggacaaacactccagcctgttctctgtcccac

SEQ ID NO: 168404 - DNA, 122 bp, Homo sapiens
gcggcggagagccgggcgacggtacgcggggcgacgccgagatgcagacgctgaaggatccggcagctgcacctagactgatccaagcaacggaaacgccagcggccccaccccggccctgc

SEQ ID NO: 168405 - DNA, 122 bp, Homo sapiens
gccgggccgggcgggggcgtcgggagaaggcggcgagagaaggcgaacggcaggagggggcggggacacctgatcagggccaccggaaaggaaaaacaacttcggccaagctattcatcttc

SEQ ID NO: 168406 - DNA, 122 bp, Homo sapiens
acaagttttgataggcatgtattccagagatgtatagaaattctagttactggctgggcacggtggctcatgcctgtaatcccagcactttgggaggccaaggcggtggatcacgaggtcag

SEQ ID NO: 168407 - DNA, 122 bp, Homo sapiens
aatttgatccactctaggggctgggtcgaagagcgagggaggaaaacccaccttagtcaccgacgcaggagagatgtaaaagggctcgcacatattcactgtctcaagcttcatcccaactg

SEQ ID NO: 168408 - DNA, 122 bp, Homo sapiens
tagaattctcctttgctatgaaggctgccgggcacattccacaccagccaccctccacctcgcatgtgcgtttatcgatgaaacgccacagtgggacctcctggatcaaatagtgcaatgat

SEQ ID NO: 168409 - DNA, 122 bp, Homo sapiens
aggaaaaattttaactaatgcagttagatttgaactatgcaaatctccatcaatttctcacgtctcctttttttcctccttctctttctcttttgttttctgctcaccaacctgcttgtcat

SEQ ID NO: 168410 - DNA, 122 bp, Homo sapiens
tcggggcttgcgcgggagggcgggacttggcgccggctgtggctactcaggggccaggggcgggcacagggccgggcttcgtgcggtggggctcgctcgcgcggcagcggtggccgaggcct

SEQ ID NO: 168411 - DNA, 122 bp, Homo sapiens
ggacttgggacaggtttcttgatttcccaaagcttctccccttggtttgcctgggttactcgtcttcaactgaaatgcactgaaaaccaactgtgtgcccaccccaacccaaacacacagag

SEQ ID NO: 168412 - DNA, 122 bp, Homo sapiens
aaccggccaaccaccacgtttttaggccgacctgggaggcagggggaacgcaacagactgcgaagtccttaaggaagaatctaaacaagtccgccgtttgctgtttgggagtgcgatacaaa

SEQ ID NO: 168413 - DNA, 122 bp, Homo sapiens
cccaatcacaagcccggctccactcctcgggcctcgcccccttccgcacccaccccaccgcgctccgcctcacgataacgcactcaccgcagcgttctggaactttcaagctcgcccccgct

SEQ ID NO: 168414 - DNA, 122 bp, Homo sapiens
gccaacatggtaaaaccccatctctattagtaatataaaaactaggcgggcatggtggcacgcacctataatcccagctacccaggaggctgaggcaggagaatcgctggaacccgggagtc

SEQ ID NO: 168415 - DNA, 122 bp, Homo sapiens
gtgaaatctctgtgtctcccctttgcatactctctgcttttctggcagtctctggttggtcggtccgaatgcctggagacagacagaaataaacaaaaacttgtggttggaagaggcctgtc

SEQ ID NO: 168416 - DNA, 122 bp, Homo sapiens
tcctgttgcatttttaaagcaggctcagtcaggttactgagtgcctgttgctccatcacacgaattcccaagttgtgggactcaccttcaggggtgtcttggtggagcacctcttgggaggt

SEQ ID NO: 168417 - DNA, 122 bp, Homo sapiens
gccccccacttccagtgcccaggttgtttgacctgcgcttgggaccgacggggcgtaacccggtgacctcctcaggttgcggtaatttgctagagtggctcccgaactcacagacatgtttt

SEQ ID NO: 168418 - DNA, 122 bp, Homo sapiens
tttcgaagtttgcagcatccaatagaaaggtgggaggcggagttaaagcgctaagagaagcgttactccgcgagactctcctgaaaagtagtccccgaggtcacaaggcagtggcaggtgtc

SEQ ID NO: 168419 - DNA, 122 bp, Homo sapiens
taatacatgtgtagtacttagaactctgcaccttggcccagagcaagggctatactattacgtgtaattatcagaggagactggcagcatcttctgatcttagggacatttaatctctctgt

SEQ ID NO: 168420 - DNA, 122 bp, Homo sapiens
tgcgggcttacttgggggtggtggagcgcaccaggaccctggctgcttcccgaggggacacgtgccgacaggtcactacaaggcggggtgccacagccactccggagccccatacggtgccg

SEQ ID NO: 168421 - DNA, 122 bp, Homo sapiens
tcagaacaacctcaacacaaaatcgactacattcgatggtgtgcagatgcctcctagccccgccgtcatgtaggatgggaaggggaggtaccaggacaaatggcaagaggcacagctcctaa

SEQ ID NO: 168422 - DNA, 122 bp, Homo sapiens
agcaggagcctgtgaggccctgcagtacgtctgcccgggatgcttggcacagccacagcacgtgactcagggaaggggcaccgggcaaggctgctgagcaagttcaccaataaaatcaggaa

SEQ ID NO: 168423 - DNA, 122 bp, Homo sapiens
caggaagcgctgttttcggaagtgttgacccagcagctggtccctgctgctctaatgacacgatgtgtgctttcactttttcactcccaaaacgacgtggtttggagtcttgagagccttgg

SEQ ID NO: 168424 - DNA, 122 bp, Homo sapiens
aattacggctaaataaaatttaaaattcagttcctcaattacactagcccacatttcaagcgttcaatagccacatgtggctcatggttatcatactggacagattacagaacatgtccatc

SEQ ID NO: 168425 - DNA, 122 bp, Homo sapiens
gacgcactactattggttgaaattaaactgcagccctaaccaacaacacgtcttctttttcgcgcccaatagtgtttataaaaagcgccgcctttcccgttcactttgtggttgctcgtagt

SEQ ID NO: 168426 - DNA, 122 bp, Homo sapiens
cccacggcaccaagagagacaaggtctccaccaatacagcgtgagcagggagggggcagacgaggaaggacagttctgtgtcccagcatcagtgactgggttttagataagtaggtctaggt

SEQ ID NO: 168427 - DNA, 122 bp, Homo sapiens
ccagaagcgcaccgctagcgagaacggttaggaggccggaagtgcgtcacgcttgtggggcgcttggaggccagaagtgcgtcatgagcacggctgctctttctacggtgcaacttttccgc

SEQ ID NO: 168428 - DNA, 122 bp, Homo sapiens
tcatttgatctctgttctccttccaagttctggatgagatcaatccccagtctgttgttacgagtgccaaacaggatgagaatatgactcgatttctgggaaagcttggtaaggacttggta

SEQ ID NO: 168429 - DNA, 122 bp, Homo sapiens
caccagtgggtctacagattcagctagctcagtaagcaccttgctggggtaccaggtaaccgtatccctttcctgcaggcaccaccattctctgtgaatggatctctggaaggctccttatt

SEQ ID NO: 168430 - DNA, 122 bp, Homo sapiens
ggccctgagcctccccgccggccatggtgacaccgacggccccatcagcctggacgtgcccgatggggcaccggacccccagcggaccaaggccgccattgaccacctgcaccagaagatcc

SEQ ID NO: 168431 - DNA, 122 bp, Homo sapiens
ccgtgcgtgtttcctcgaatggcttatggtcgcttcagaaagacactgggtgtttgttggcgttcgggctgccagggccatcgaatccggttgtctgccagggtgtgcagggggagtggcgc

SEQ ID NO: 168432 - DNA, 122 bp, Homo sapiens
ggtataaaaattaatggagagtataaagccactgcagacttcttggattactagtagattcgaaaatgaacaagtatttgcatgagcagtagtttgactgcttattatactttgctcttttc

SEQ ID NO: 168433 - DNA, 122 bp, Homo sapiens
ctttcttcaaggtctgggactggggaacccggggtggggcagactgcttttctgcacccccggcccacagccagcaccatctcagcacctgacgtggcaactctgttagtccccacagcctc

SEQ ID NO: 168434 - DNA, 122 bp, Homo sapiens
tggattatttttctttctttctttctttttttctttcttaagaagaatattctggttgttcgcctgcttggtaaccctgaccctggcagaagaatgagggaactcattgcttcaaattgtcg

SEQ ID NO: 168435 - DNA, 122 bp, Homo sapiens
cgggtggagggagaaggctcaatccgaatcgctggggccccactctggatcaccttcagccgccatcttgtttcttcccgttcaatatactaatgattcttaaatccatgtagatttcaaga

SEQ ID NO: 168436 - DNA, 122 bp, Homo sapiens
aaagatttagggaaccccaaacagatttcccaattttttttttctgcctatttctctcctcgctggaatgctgtctcagtgttttcagccacctcagtctcactgaagtctctagtctctcc

SEQ ID NO: 168437 - DNA, 122 bp, Homo sapiens
gctgccaggctgggcgtttcccccagggaaggcacgagagagcgaatgcagggccggccgcggggcctggggactgtgccgctcagcaccacccacagggcgttccttggggcgtggcctgg

SEQ ID NO: 168438 - DNA, 122 bp, Homo sapiens
tggatggggaagaagccctcagcccaagtcccatcctggcagctgagtccccggcagctccgggcgtccccagcgccacgcctagaagccccatcttgactcatctcaagtccggggatcca

SEQ ID NO: 168439 - DNA, 122 bp, Homo sapiens
aggacacagtccccctaaaacacaccaagtgcaaagccattgccaccccgtctcaccaagcgccggcaggactgcccaagtcccacggtcctcccgtccccgcagctctcgtaaagaacaaa

SEQ ID NO: 168440 - DNA, 122 bp, Homo sapiens
tgaggcttaaacggtatatcgcactaagcttgggacaaaacaggtgctcaatgaggtgcacgccccccacgtttccttcccagtccccaccacccaggtgccgcagccggcgctccgcggcc

SEQ ID NO: 168441 - DNA, 122 bp, Homo sapiens
tttctggcttaaaacaacttcttttcatttcaaagtccactgatacttagttgaagttaacgaaagagggaggaagaccaagaggggaaggaggtaatagagagtaggaagaagaagaaaat

SEQ ID NO: 168442 - DNA, 122 bp, Homo sapiens
acgagcagtactgactccatggcggttccatctacttcccgagtgtgtctgtgttcagagcgctccgccatccacaaccttcctactgactggttagaaggagtacctcctttccactcact

SEQ ID NO: 168443 - DNA, 122 bp, Homo sapiens
aggcccgccatgtgatcgctgtccatgcagtcgggccggtgtgcagcaaactgacagatacgaccaatatgtcatgagatagttactgagcacctactcagtagttgctagtgatttagagc

SEQ ID NO: 168444 - DNA, 122 bp, Homo sapiens
gggaacccctgtgtggggacggggccggcctaggaaggttgtgcctgcggtggaacggcgcggtgcgcaggagtcggcattaacagcagccgcgtgtctgggtcttagatttggcctagctg

SEQ ID NO: 168445 - DNA, 122 bp, Homo sapiens
aaagaaagaaaaagtaagcagggctggcttcgcccgcgttctcgtcgtcggatcaaggagcgcggcggcgttttggacccgcgctcccatcccccaccttcccgggccggggacccactctg

SEQ ID NO: 168446 - DNA, 122 bp, Homo sapiens
tacggacatgttcttgtggcccttcttgaagcggttgtacttgcagatgtagtgcagtctcggcagatgacaatgatcctctgcatcttcgtcttggtcaccacgccagagaggacccaccc

SEQ ID NO: 168447 - DNA, 122 bp, Homo sapiens
agtggaatgcttctttctgtaggatccacattgggctcttgaaagagattctgataaaaccgtttaatgcattgttcacgagtctttttattttttttatgaagctttttgcatcgccatga

SEQ ID NO: 168448 - DNA, 122 bp, Homo sapiens
gagcggcgcctgcaggagcgcaagacgctgcgggagagcctggccaagtgctgcaggtagcggccgcgcgggcctgcgtagagagaagcggagcggggcgtccacgccttggggagggaagg

SEQ ID NO: 168449 - DNA, 122 bp, Homo sapiens
gcgcttttcacccaaacctgtgccccacacagtccccaggaaatcggaggccaggtgaatcggaactcacctgaggccccacggccgctctgggaggagccagctctgccagtacctggacc

SEQ ID NO: 168450 - DNA, 122 bp, Homo sapiens
agaccgtccccaaaccgctccaagctgtccaatgtggcgcgcaaggctgccctcttgtcccggttcagcgattcctattcccaggcccgcctggacgcgcagtgcctgctgcggcgctgcat

SEQ ID NO: 168451 - DNA, 122 bp, Homo sapiens
gcagcctccgaaggtgctggtgggagactgcggcccaaggctgaggaaggcgcctctgggcgtaaacgagggttttaaccttgaccgggcgcactcgcctggggcgcgaagcttaaagagga

SEQ ID NO: 168452 - DNA, 122 bp, Homo sapiens
aagcgttttgtaatactaattaactaattcccagccacatgaagagaacctgcgaagattcgccggaggcaaactgctaaataaatggtgacagatttctcagttttcaattagatgaaatg

SEQ ID NO: 168453 - DNA, 122 bp, Homo sapiens
cacattcttccgccccggaggaagtcacctgtcacaggtgttcaggatgtggcaggcccacgggagtgactggtcaggcagcgggcctggcacgtctaaagcttcctaggctcccacagcac

SEQ ID NO: 168454 - DNA, 122 bp, Homo sapiens
tttgtgatttgattttttccttcacctatgggttattagaagtaaggttgttttatttcacgtttggggcttttctagatgtgttattgttttttatttatatttaatactgttgtgatcag

SEQ ID NO: 168455 - DNA, 122 bp, Homo sapiens
ggaatggggtgctggggagcttggacctggacactatcattaattagctatggttccttgcgccaatcattagtgtcctcatctgactgtggaggtcgggccaagccaaccctgggtctttc

SEQ ID NO: 168456 - DNA, 122 bp, Homo sapiens
ctgtcaggcattccccacacacagtcccgttcacatagcttcaacaggggcaagggcagacgctttaaaatacgcagacgagagacccagcatttctgacttccagttctgacgagctgacg

SEQ ID NO: 168457 - DNA, 122 bp, Homo sapiens
ccacccaccttggcctcccaaggtgctaggattacaggtgtgagccaccatgcctggcctcgtgagcttaatttagtctgttgagaattgtatatgctttccttaacaatgaagtaatttgt

SEQ ID NO: 168458 - DNA, 122 bp, Homo sapiens
aaggtggggtgggagggccagagttttaggccccccaagagctgcaggatgtcaggcctacgcaaccttttaactttccaggtagagaccgaggctcagtggcggaagaggcttcctggaaa

SEQ ID NO: 168459 - DNA, 122 bp, Homo sapiens
tggccctgcgcggtgacctgtgggacgggacgcagcccgtgatgtgtttgtgacgggtgtcggtatcaccttttgagcaggtgtcttggccaggtccctggcgtgagttggtggaggaaggg

SEQ ID NO: 168460 - DNA, 122 bp, Homo sapiens
gagcggatccacctggaagagaaacactacaaatgccccaagtgccaggagagctttcggcggcgctcagacctcaccacgcaccagcaagatcacctaggcaagcggccataccgctgtga

SEQ ID NO: 168461 - DNA, 122 bp, Homo sapiens
ccgtggcccgggcagggccgggcagtgggcgcagcggaggaggtggacccgcccaggaggcggaagccgcgtcctagtaccctcatcaagaagaactgcattcctggcccgatcggccacgt

SEQ ID NO: 168462 - DNA, 122 bp, Homo sapiens
taaattatctccggatggtggataataccatgtcattagtccatgaggcatctagctcagcgccacctgggtcttaaagcacttaaaaatgtaattatacaacaaatacaccaatacctgtt

SEQ ID NO: 168463 - DNA, 122 bp, Homo sapiens
tacagagcacaaaaagcaaaacccttcctcaaccacagactggtgactgagctaggaaagcggcctctgattggctcggcttccctgcttcagtcagctgaagagcgttccctcggagagtg

SEQ ID NO: 168464 - DNA, 122 bp, Homo sapiens
agccacggagtgccggggtcagccgtggaggaccctctgagaatgtcttgtggaaaggggcgccttgcctgcccggtagacaggatgagggcgccccagagccccaggggcttctgagagct

SEQ ID NO: 168465 - DNA, 122 bp, Homo sapiens
caagaactgcctgtccggaagggtgactgcaccagctccgctccggatatcttggcaggacgcgccctctggcggcgcctcgctcataggtgggccccagcgcgcagtcgcccgcccccgcg

SEQ ID NO: 168466 - DNA, 122 bp, Homo sapiens
ctagctacatttcagctcaacaatagccaatagcatatgggatagcgcaaataaactctgcgtctctgttgcttctttgggtctcggagacctcaaccctttcttcagattgcaaaccttct

SEQ ID NO: 168467 - DNA, 122 bp, Homo sapiens
ctgggccagccagctggagagaagacatacagatgtagctggctggagtttgaggggtaacggggctgtgcagtcagcctagtatcctgcagtgggctacagactggaagtctccccctctg

SEQ ID NO: 168468 - DNA, 122 bp, Homo sapiens
tctccaggagccaatgcgagactttggctccgattaagcgacggcccgagactcggggtgcgcgaggaggatcgacagagtggtgaggggacctaggagggcgggagtggcagaggtatgag

SEQ ID NO: 168469 - DNA, 122 bp, Homo sapiens
ccctcccctctccggtcccggccccgcccacagccttcccgagtcccgccccagaccccgcggggctggcgcagcccctttgcgctccctgctcgtctcatgcggaaagtccaagtcctaac

SEQ ID NO: 168470 - DNA, 122 bp, Homo sapiens
tgaaaattgaatgtcagttttattatggtggattttctcccgtgtcttcacgactcacagcgctgagtgtgctaaccaatggtgggcttaattggggtactaggctcaggaaatagctgcca

SEQ ID NO: 168471 - DNA, 122 bp, Homo sapiens
gcaggtagtaggtcccgtccaggggccctgcctcagagacccagggtagctgggggctgccgagggcctgcgggcccggggacggtggcagagagaggctgggtataggcccataggcgggc

SEQ ID NO: 168472 - DNA, 122 bp, Homo sapiens
caaaaaaaaaaaaaaaaagctcatgctgtctacagggaaagcccctactggagacagctgcgcttgagtgagtgggactacagtgccaacgctagggcttattgtgttgactgtggggtcac

SEQ ID NO: 168473 - DNA, 122 bp, Homo sapiens
gcgagaatcacttgtagtgagccgagattgcgccactgcactccagcctgggtgacagagcgagactctgtcaggagaacgaaagaatgaacaaatgaaagaaggagaaagagagagagaaa

SEQ ID NO: 168474 - DNA, 122 bp, Homo sapiens
ttttctcattgagcaggtcaactgtgaacccggggccgggagcagttccctaaatagatccgctacgtagccattaattaatagcatctcgaaccagaaacagttttaaccttggaaaagca

SEQ ID NO: 168475 - DNA, 122 bp, Homo sapiens
gacggcggaaacagaacagagcccgaatctaaagtccttgcccaaatctaaagtggctaccgcagccccggccgctacggccgcagagaccctctgtgccctgagtaaagatggccgccgcg

SEQ ID NO: 168476 - DNA, 122 bp, Homo sapiens
aatgaacactaaagattagttttaaaaacatgcgtaaatgtatccagagccaccgctccccgcccttcctgccccgggcttgggcagcatgaagcgcccgccctctcgggcttccccctttc

SEQ ID NO: 168477 - DNA, 122 bp, Homo sapiens
gagaagtgaacccagcaggagaggacctctgcccgaggaggtccagaggagcaaactgtgcgctccggtgcccgggcgccgggctcgcggaaacgcgagcgtgtcgctctggctcgggaggc

SEQ ID NO: 168478 - DNA, 122 bp, Homo sapiens
gtgaagccgtcaagtgctgaagctgtgaaagctggggccggcggatcgggtcgggactgccgctgtgatcacttttaggccagcgtcagcagaagcctgtgtgattgcaggcagatctacgc

SEQ ID NO: 168479 - DNA, 122 bp, Homo sapiens
ggctggccggtgaggccgcggcatggggcgagtgcagctcttcgagatcagcctgagccacggccgcgtcgtctacagccccggggagccgttggctgggaccgtgcgcgtgcgcctggggg

SEQ ID NO: 168480 - DNA, 122 bp, Homo sapiens
gaggcttggaaaaagcggagacaacgttggaaagaatgaggcctgagaacgagtcagtgccgcctcatccgcgtcaccacatccctgtaggatgcagtgtcttcattcgtaaaacaagggtg

SEQ ID NO: 168481 - DNA, 122 bp, Homo sapiens
ttggcctcttgtggaaataccacatattctgttacagttagaaggtagggggccagcaggcgtaggctgtgaagggtgaggagcctgttgagatcttggctcagcaactcccacacctggtg

SEQ ID NO: 168482 - DNA, 122 bp, Homo sapiens
aaccagatagaagttaattttttgtcttagaaggcaggaggtagtttctggaattagggccgaagactggagagagacagcagaagagttgaactccatgagtttgctcaaggactgaaata

SEQ ID NO: 168483 - DNA, 122 bp, Homo sapiens
gacagctgagcccttcagggtgggcgccctgtgggggctggaagcaacagccaggggtgccgggggtgtcaggagcattgtttggggcctgggcctgtgattcgctggtagctggtggggat

SEQ ID NO: 168484 - DNA, 122 bp, Homo sapiens
atctcgtacgcgaagtggccgagacttagccttctccaggaccacgtgggtgctgcgggccgtttcccgggtctcaggttccgaccgccccgtggacccgaaggtggcgctgctcggggccg

SEQ ID NO: 168485 - DNA, 122 bp, Homo sapiens
agagtaaatggtacaccgaggggaagatagaaagatggagcgtgttaaaagcgtaaataacggaaacagtctttagagccaagactccggtttgaatttgtattttggtagttgggcaactt

SEQ ID NO: 168486 - DNA, 122 bp, Homo sapiens
tcctgtgtgtcagatatcaccacttgagcaaaaagcatggacaggaaatggtgcaagtttcgtgtcactctggaaaggaattccttcactctactaccctaagaacgattttaagcctggtc

SEQ ID NO: 168487 - DNA, 122 bp, Homo sapiens
aaacagttttctggaatgatgatgacaggctatgaaaaggacaggaaggtacctgatgggcgagaagcttaaggcaacaaccgggaaactaggaaaccattggcccaggttttgtaccaatt

SEQ ID NO: 168488 - DNA, 122 bp, Homo sapiens
ttctttgtggggtttccccttctttatttttcccacggactcccagtgcctcacaggtcccggtgtgaacaggagaggagcagcaatgaatcagtgcttttttgaagctgttttccagaagc

SEQ ID NO: 168489 - DNA, 122 bp, Homo sapiens
tgcctgactacccacaacagagtcccgggtgggggtgggagggtcagggatgggctgtggcgtctgcatgcaggcttgcctccactggcctgaatctcagcaggaagaagcagctcttccct

SEQ ID NO: 168490 - DNA, 122 bp, Homo sapiens
agcggctttacgattgtctgccaggcgggctcctgaagtgtgggcatttaacactcgtcacgtgagcgctggcgacgtcacctagcaacagccaatcagaagcaaacggccgcggagctccg

SEQ ID NO: 168491 - DNA, 122 bp, Homo sapiens
aagttaaacaacaaaaaaacttttcctttctcacaggtggacattgaagtgaacctaattcggttttccttttaaaagccccccataaacaaaagtagtttaaaacctatttaaaatgaata

SEQ ID NO: 168492 - DNA, 122 bp, Homo sapiens
gttctgccaaggagatggactgacagctgggctcaggaccttgcagtctaaggcagacaacggtgaccaaaactggctcatggagacactggctattcccactgacacgccgcccttgggcc

SEQ ID NO: 168493 - DNA, 122 bp, Homo sapiens
cgccttcactgtccctcaatcccaaagctcttagctcctacgtggtccaggctttgtcagcgccccacccccaccccccgccaccacccacggtcccttcagggccaccacggctactccag

SEQ ID NO: 168494 - DNA, 122 bp, Homo sapiens
tgcgacacacggtgcgagcgcacttcttccttcccagcctcgtcctggtctcttctgtggcgatgccaacttccccacgccacgcctggcatggacactctcggagcatgggcctcctccct

SEQ ID NO: 168495 - DNA, 122 bp, Homo sapiens
cgccttccccatccctgcccctttgctccaggtccagaggccccccgccccggaggcccccgccccagccctgccttgcgccacctagttgacgcccggggccgcacacttccaggtcccac

SEQ ID NO: 168496 - DNA, 122 bp, Homo sapiens
gcgacggagaagctgaggtcccagtcacaatccattttacctcatttatcatgtagtattcgtgtttcctaaactaaatacgcaatacctagattaataatgcacaacagccatacagggaa

SEQ ID NO: 168497 - DNA, 122 bp, Homo sapiens
tgctctgggcaaagctaaggaaggcggcacagaagttcatgcacacagagggattccagccgtcacggtcattctggagcaggcagaggaggaggcagaagatgggcagtgggggtggtggg

SEQ ID NO: 168498 - DNA, 122 bp, Homo sapiens
gatgtccatcccctccttattcattcaaacatttccactgccataatatggcagctgcaacgccaagaaagaagaaaggaaaaaagactaaaagaggtgaagaatgaaaaagacctcaaaga

SEQ ID NO: 168499 - DNA, 122 bp, Homo sapiens
caatgaatgagagttcctgttgtgccacatcctcacttgcatttggtgttgtcagtgttccggattttggtcattctaatgggtgtgtaatagtagttgttttaatttacaattccctaatg

SEQ ID NO: 168500 - DNA, 122 bp, Homo sapiens
atcacgtctgcgctgccctgagacacggagctccagcacattctgcagagctcacactatcgagtccagcgcgcatgtgagaggcaggaagggagagtccacgggtcggcaactctgggcag

SEQ ID NO: 168501 - DNA, 122 bp, Homo sapiens
catggagaagagattaaattatgtttaataaatgttcattttatgttcattctttgaaaacgggcactcattgagtgacagatcttttaccacacacaaacactaacagatacgcgtaactg

SEQ ID NO: 168502 - DNA, 122 bp, Homo sapiens
cgcctcagactaaatcgctcgcgcgagagacccggatggcacaaaggcgaggaggcccggcgcgtcgcacagcttgctgggagaaaaaggggcggtaacaaaagtttctataacaacgcaat

SEQ ID NO: 168503 - DNA, 122 bp, Homo sapiens
gtagcaccttccccgccgcggctcccccaccccgccaggtacccgcccccccgctgccaccgcaacctcgtccgccgaaggcccctcgctggaccaggagcccatcgcctccgcccaggcta

SEQ ID NO: 168504 - DNA, 122 bp, Homo sapiens
tgtagtgagagtgaggaattcctgaaggttactattgtactttcttagactgggtggcagcgcttgggtctcctgagggttccttgaacctgcgtctacagacgcattcctgacgccagaga

SEQ ID NO: 168505 - DNA, 122 bp, Homo sapiens
aacccgtgtagacgtggtctatggagccctcggccgtctggcccctgcggctcccgaagccgaataacttcatggcggtgactacttctcagacccccaaccaccggctcttgagcgggggc

SEQ ID NO: 168506 - DNA, 122 bp, Homo sapiens
ctttcacaccaaatacaagtcccaaaggctgaaccattttcccctccacctttgaattggcgaaccttcattttcccgacccgccctgaaacagtctgctcaggatgctccaggttagggtc

SEQ ID NO: 168507 - DNA, 122 bp, Homo sapiens
ggcggaatgggaggggcccggccgccttgccccactcccccgagacgctcttaccgcgcccggccctccatcagttatgcagccctcagccggctgctggcgttcccggatgtgcggtggcg

SEQ ID NO: 168508 - DNA, 122 bp, Homo sapiens
atcaactgggactgtgacctggacctgcctgcatcggagtgcaaccccaagtactccttccggaggcttgaccccaagcacgtgcctgcctcgtcaggctacaacttcaggtgctgtacttg

SEQ ID NO: 168509 - DNA, 122 bp, Homo sapiens
accgtgaccccgctaggaataaggggatttacacaatgacactgcctcccaattaataaacgacataggccagccgtgtgcaaagggccaaaaaggcatgccacctcagtccgcatttttac

SEQ ID NO: 168510 - DNA, 122 bp, Homo sapiens
aacgctgcactactacaaaatgatcaaagcagcattaaactgtggactgttcggtaagtgcggagctctagagacgatgaaggggagagcatctctgctcagaagaagctttcatgggcagc

SEQ ID NO: 168511 - DNA, 122 bp, Homo sapiens
gttagccacggtggggggactctcttgggctgcattgctggcgcaggccccctccaggcacgtcctggctgcaggtccccagaggggagtttcctagtctgggagggtattcccaaagccca

SEQ ID NO: 168512 - DNA, 122 bp, Homo sapiens
ctgttttcccatctgtaaatgggggataatagtgcttttcacatagagttgaggcgtcaacgagggcctagcgcatagttaacacttagtaaatacaagccggttttattataaggtcagcc

SEQ ID NO: 168513 - DNA, 122 bp, Homo sapiens
gggctcccagggcaggcagtgttgagcgtcttgtagcggcgctggtgggggcaggatctccggcctgtgccaccctcacagccactgcagaaacaaactcagccttccccagcgccacgtgc

SEQ ID NO: 168514 - DNA, 122 bp, Homo sapiens
cctacccataaggagaagagacaacagctgcctttattcttgttggtttgctttgcaatccgctccgtgtaaagtcagctaactctctcggtcacgggcgtccggctgtccacaggctcctc

SEQ ID NO: 168515 - DNA, 122 bp, Homo sapiens
gccttctggcatggttggggttcgaacccggggccagggctagagtctcagcttggggtgcgggggccgactctgcccgggctgggtggatagttgttatcgggagctcccaggcccgcgcg

SEQ ID NO: 168516 - DNA, 122 bp, Homo sapiens
ttccgagcagataaaatagtggcatgattgaccaaactccttttaaaagtacacatattacgatgcatcatagttataaacagatggtatttggcctccttcctattctcaacatttggaat

SEQ ID NO: 168517 - DNA, 122 bp, Homo sapiens
ggaagggacctgaacagacgccaccagagaagaggcgccgaggtggagaagcacgggaaacgctgggcacgtcagtcactggagacacacagattgaagccagggctaaatgtgctgctgcc

SEQ ID NO: 168518 - DNA, 122 bp, Homo sapiens
gggccctgaagacagacccaggttctgccacttaccagcagagtaaccttggacatgccacggaccctctctgagcctcagtttcctcacctgagcaatgagtcactgcaaaattgaataca

SEQ ID NO: 168519 - DNA, 122 bp, Homo sapiens
ttctgccttttgccctttgaagcatgtgatctttgttcctactccctgttcatacccccccgccccgccttttgaaatccttaataaaacctgctggttttgtggctcaggcaggcatcacg

SEQ ID NO: 168520 - DNA, 122 bp, Homo sapiens
gaggttaagtgcctttcaggtcccaggagacttttccttgctggaaaagatctccagcagcggagtttctgaccctgcccccttcaccaggtgcagccttacccacactaggctcattagag

SEQ ID NO: 168521 - DNA, 122 bp, Homo sapiens
gctaaaggccagaggagcagacatggccttgaggccctacaggtctcaataaagaactcacgccttaggaaatggggagcccctgatggctctgaaggagggaagtgacctggtctgattaa

SEQ ID NO: 168522 - DNA, 122 bp, Homo sapiens
ttaggacctctaattcacaacacactgctgcccccttgctgtctctcccatccacagctccgtgattgacagttatatcccaaatgccccgagcacaaggcagccgctcagaacatcagaag

SEQ ID NO: 168523 - DNA, 122 bp, Homo sapiens
aaaagctaaaaaggtagctagcttttgaggtgttgtggcagactggcatctagtggccagcgataaaggtgcagactagtgtccacacctaagtggggacagtgcaggctgtaatgtccata

SEQ ID NO: 168524 - DNA, 122 bp, Homo sapiens
gggggtctgcagcggggcggggggattctcaaggcatcagagataggttgggggagagaccgtgctaagtgcaaggacgagtcataaaataaaatttgtatgatgtgaactctcggaaaaaa

SEQ ID NO: 168525 - DNA, 122 bp, Homo sapiens
cggcgggggaggggaggccacctccaggcggctccagtttggagctcttgccctttggcgcgttgcgccacctcacagtgctggcagccaggagagcgcagggcagcggaggaagagcgcgg

SEQ ID NO: 168526 - DNA, 122 bp, Homo sapiens
ctcgctagagaggcgtccagcagtcttccgactctgcccagcccatcctctccttattcccgtagcactgtaacatgcagatacctacactgcattgctctcacatgctgatagtttctcat

SEQ ID NO: 168527 - DNA, 122 bp, Homo sapiens
atggaagcacccagcaggaagttgattgatggggtgtggaatccaggagaggggtgtgggcgtgagacacagatttgggctttatttgggtagagatgcagccaaagccacgggcccagatt

SEQ ID NO: 168528 - DNA, 122 bp, Homo sapiens
ggtccctgacactgaagccaggtgtcacttgccatttgtcatcttacatgcagctagctacgtgggttttcattatcttcctggcctctaaaaccagtctgtcatctctcaccactgcttaa

SEQ ID NO: 168529 - DNA, 122 bp, Homo sapiens
ctacgccacgaccagcgtgctgcgtcacggcggtgcgccggaagtggctgcggatttcgccggaaatcccggaagtgacagctttgggggtttgctgctggctctgactcccgtcctgcgat

SEQ ID NO: 168530 - DNA, 122 bp, Homo sapiens
aatgtcctcaagattcattagttttgtcgtatacagaattttcttctttttaaagaagttcgcccttcggtgctggaaaggcaactgttgggatcttcagaggctctgcagccaggggtgga

SEQ ID NO: 168531 - DNA, 122 bp, Homo sapiens
ccaggtcagaaggctgcgggctgcaggtgtgtttccaggggcacctgacagggcagggaccggtcattgaaggcacctggagttaaagggtgctgtctgataccagctggtgggggagaggg

SEQ ID NO: 168532 - DNA, 122 bp, Homo sapiens
ctcggggagtgccccctaagggggcgaactgacctcaggcatgttttgtaactgtagaggcgcctgccattaaacgtgtccgctgctgtggcgacagatctgatgtttctagagtcttctgt

SEQ ID NO: 168533 - DNA, 122 bp, Homo sapiens
ttatggtaacctttgtctatccttcaaattggagccttcctgagaagagtgtgccttactcgtttccatattctcttcctctcctcctcccgtctctgcccagcccctggcttccctctaag

SEQ ID NO: 168534 - DNA, 122 bp, Homo sapiens
aactgagggaagtgagggagcgcaggaggccagggggctcagccagctggtaggggcggccgagacaccacccctggagtgatggaggaggaggatgtcattgtaaataccaccaggacagc

SEQ ID NO: 168535 - DNA, 122 bp, Homo sapiens
tctgcctctagagtagaaagaaccaggaaggtgccggaagctcatgcttgactggagttgcgtgaagatgaccttgtgtgggccccgccagggctttagagtgagccccccaggtgggttcg

SEQ ID NO: 168536 - DNA, 122 bp, Homo sapiens
cacgatctgcctaaagccacacagcaagactgcaaagacgctgccatggaaagtagcattcgcaggctccagggatcaggccgtgcctatctttgccgtgcccattttccagcccgtggaag

SEQ ID NO: 168537 - DNA, 122 bp, Homo sapiens
cacctcaagtgagcatgcgcacaactccagtaaacatactgcgcatgctcccttcccaagcgctggagccactgtgcatgcggacagcccacaacaagggaggaattgggagaagtaacaca

SEQ ID NO: 168538 - DNA, 122 bp, Homo sapiens
catttaggactggtagacacaacagagtattttgaggccagcggttgtataaacacccaacgagttcttgtccactgctcagagagagccaatttatcaagacaggggaattgtaataggga

SEQ ID NO: 168539 - DNA, 122 bp, Homo sapiens
gacgtcagttcctcctttcggggctctgattggtcagagcgcccggcgcttctggttggccggccctgctatcatcccagagtgcattgcggggccgcttcctttccgctcggctgttttcc

SEQ ID NO: 168540 - DNA, 122 bp, Homo sapiens
gggctgctccgggcggcggggggcgggatccgagcgggctgtgtggaggcttcagactcccggcgccatttagcgcggagagtttcccgggtggacgcggctcctctctcggccactccgca

SEQ ID NO: 168541 - DNA, 122 bp, Homo sapiens
ccaactgacaccaaactccccatggcccctgcatgctcaaacatcacccatatgtccccacgcctaaggctgacttctgtgtcagcttcttgtgggtatgtgagtgccagcatcaagtagga

SEQ ID NO: 168542 - DNA, 122 bp, Homo sapiens
atttacatgtaattgaaagtgggtataagcgagtatatatacagttgccaagagcccacacgttgcagactctgggtacactatctatgagttagtgctgttccacaaggagcagtactgtt

SEQ ID NO: 168543 - DNA, 122 bp, Homo sapiens
gtgagatttagaataaccccccagcaacttcaacaattgcttacatttagttgtagaccacgaaagaggtatttttaatataaaaggatgggtattgctgggcaacaattaaaacttcaaac

SEQ ID NO: 168544 - DNA, 122 bp, Homo sapiens
gggctacaggacaatctcccaagtcctagcctcacaaaacctagttgaagatggaagctgcgaaagtgaggaggtggtttgagggagcacgctcccctactcatccctctcatctcaaactc

SEQ ID NO: 168545 - DNA, 122 bp, Homo sapiens
aaaatgtacacacagttcatgagggacacagctgaggttctgaaccaggttctctcactccggagacaaagttctcttttatcatatcaaaatgcttcttcccagaggataatacattttcc

SEQ ID NO: 168546 - DNA, 122 bp, Homo sapiens
ctggcaccctgctcctctaggtaccaaacgccttgatgctgagacagagcaggcttgtcccggcagattcccaggtcagaactgcgacttccttactcgacctcacctgggatccctgcccc

SEQ ID NO: 168547 - DNA, 122 bp, Homo sapiens
gcaagcctgcaaagggaacggggacgggcgtgaaccatttcctccaccagcagggtcctccgatgccgcagcatccaccccacaccttaaacctcatggtattagtgggcaatttaaaagat

SEQ ID NO: 168548 - DNA, 122 bp, Homo sapiens
gcctccccgcttgtaaagccttcatcacctgcttcatctgtgtgctcctctgctcctcctcgccctccgcttcttcctgtccacgttgccgtctccagccttccaagatcaacctatcccta

SEQ ID NO: 168549 - DNA, 122 bp, Homo sapiens
ataaaaacaaacaaacaaaacaccactaatatatgcaccgacattgatgaatgtcaaagacgtggttgggcacagtggctcatgcctgtaaccccagcactttgggaggccaaggtgggcaa

SEQ ID NO: 168550 - DNA, 122 bp, Homo sapiens
tagaaacccaccagaaggaagaagctccaaacacgtcagaacatcagaaggaacaaactccggacgcccctttaagaactgtaacgctcaccgggagggtccgcagcctcattcttgaagtc

SEQ ID NO: 168551 - DNA, 122 bp, Homo sapiens
ctggactctgccccatgcccaagatcaatgccctgttcagttcctattcgcagtccccagcgcccaggaacatagtccttccagcagtggcagtaataggtcgccaggtggtgctgtggagc

SEQ ID NO: 168552 - DNA, 122 bp, Homo sapiens
tactatttcttgcctcagagtttcatcaactcaaggttataatacttaaacacatttttgcgtagctaatattttctgaatgccagctatgtaccaggcaggtgctgtgctctaagatataa

SEQ ID NO: 168553 - DNA, 122 bp, Homo sapiens
gttctgtggtgctgggtgctgggacttgaggggcataggggcacctgccctggaggaggccgaggcgcagccccccaggaggaaggggtgcctctggtgactttcagctggactcttccagc

SEQ ID NO: 168554 - DNA, 122 bp, Homo sapiens
tggagaggggctcattattggtcgcttgtgtgcatgtgctgttgcctaggagacaggacccgcccaactcccacccagatagccttactcttgccaatagagtaagggtccttatctgcacg

SEQ ID NO: 168555 - DNA, 122 bp, Homo sapiens
gctcctcccctctcgccctggacccagccccttctctcggcccctccctccacagaggggcgtgtcctcacccggcccagccacagggtcctctagtggccacccctgggccggcactagga

SEQ ID NO: 168556 - DNA, 122 bp, Homo sapiens
ccgaaggtcaccccgcacctttcgtccacggcgcccaagttcccgcccgggcggtgcccgcgacctggggcaacccgctgccgccgcagtccccgcgcctcactccacccctctcccctcct

SEQ ID NO: 168557 - DNA, 122 bp, Homo sapiens
gggagagggacctcgtgggaggtgattagaccatgggatgctattcccccatgctattttcgggatagtaagtgagttctcgcaaaatctgatggttttataaggggttttctcccccttca

SEQ ID NO: 168558 - DNA, 122 bp, Homo sapiens
ctagggacggttggagaccctatctaaccctaagaaggtggggaggtcgaattcgtgtgccgattgctgtcggccaacccactcaaccaccagagacccgcgggaggggcgtgcaaggcgga

SEQ ID NO: 168559 - DNA, 122 bp, Homo sapiens
tttccgttccttgggtttgtgtgtctgcatctccatcttaccccttgcctgactgtaccccgtagacccctgtttctcctcctgcacctgtgtccccatctgcccttcttgttgctcctgtc

SEQ ID NO: 168560 - DNA, 122 bp, Homo sapiens
gggagggtctgacgggcttggaggctgggccaaaaatggtaagtcctcacctgtctggtccgggctcaaagagccagggcgagggatgccccagcctgttctgtgcgcgcctccccctgccc

SEQ ID NO: 168561 - DNA, 122 bp, Homo sapiens
agtagccaaacaaacgggaataatttaagctgcagatcataagctcccggtgggcaaggacgaaaccttcatctgttctccaaaatgttccacgcagctcagtgggcattctctgatgctga

SEQ ID NO: 168562 - DNA, 122 bp, Homo sapiens
tcacgcagccgttcacggcggtgggcttctgggccgttaccacgtagttgtacgacatgtcgaggcttggagcggcccgtcgggactcgagcgcgacactagaaagagggacacaagcgaaa

SEQ ID NO: 168563 - DNA, 122 bp, Homo sapiens
ctgttcgctccggaaatacaaacctggggctcatagccatataaatgtcatttaaagccacgggactggatgagatcattaaggcagaaggtctaggtcgaaagaagagggccaggaccact

SEQ ID NO: 168564 - DNA, 122 bp, Homo sapiens
tgcttctaatacttcacctaaacctagatgttgcaccagaagtctggatctccacgcagacgtgtacacttagcatcactttcccgacagcttcatctttgtgtccagtaggcaactcacag

SEQ ID NO: 168565 - DNA, 122 bp, Homo sapiens
agagtgagggggattgttctgccccaatggcctcttcagagctgcgagactgtgcccacgcgaggcagtggtcgccacacccacactgccgtgctgcgcaggtgaggcctggtgcacggagc

SEQ ID NO: 168566 - DNA, 122 bp, Homo sapiens
tcaactgagcctggcggccacctcagggtgggacccggggagatgtgtctgcctgcgccccgtctctctcccctctgcactgccagagggcacctttctgctcctcgaaattacgtgggagc

SEQ ID NO: 168567 - DNA, 122 bp, Homo sapiens
tgcctgcataccagctatagtaactgtctttgcccccaagttatgcagtctttataaagtcgttcagtagcagggcaatgagttgggaaaactgatattgcatctgtagcatcaggtactat

SEQ ID NO: 168568 - DNA, 122 bp, Homo sapiens
gcacggacttcaagaaccaacttcattccttgcaaggtgctttagttctggccgttagggcggcaaccaaacagaaacctgccccgcctctgggagagaaggcggatccctaacgccagcta

SEQ ID NO: 168569 - DNA, 122 bp, Homo sapiens
atcccacctctccgggccctaagcatgcctcccagcccaaagcttttgagaaactttcgccggacctttgtcccgacccagatcctagcgtcctctatgccctgcctcctctgcacttgtag

SEQ ID NO: 168570 - DNA, 122 bp, Homo sapiens
ggcgatcccgctacccttcccacccagtttccctgggaaaacgccccacagatccattaccgggaacccaaggctcccccgctggctcccagcagctgagctccactctgggcgcgctcgct

SEQ ID NO: 168571 - DNA, 122 bp, Homo sapiens
cgccggcccctttgtctaggggcgagcctgttgttgtggctgctgctgttcaggatgtcccgggtgggaacttggaggcgtcccccgcagcctctacccaggcctgccaggctccaaaatac

SEQ ID NO: 168572 - DNA, 122 bp, Homo sapiens
tagttgtctctaatcctttctttaaattcttcattatgaaacataaaaacaaatgccaggcgcggcagctcacgcctgtaatcccagcactttgggaggccgaagcgggcagatcacccgag

SEQ ID NO: 168573 - DNA, 122 bp, Homo sapiens
gagccatggcgaggatcttccaggtcagcccccgtcgtgtgtgatgttccttgggctctgcggatgctcggtgctttcatcggtgtccacacctctttattccgctcctcctttgcttgtct

SEQ ID NO: 168574 - DNA, 122 bp, Homo sapiens
tgcattgtggggcttgtagtgcgggactgggtctgggtgggtgggcgcggccgcagcagtcgcagcggggccatcttcggcgggcgagtgggctcggcctgtgcaacccgcacctgcgtccc

SEQ ID NO: 168575 - DNA, 122 bp, Homo sapiens
tgaaacttctcaacatgcgctcccatggctaaacgtgtttattaatttagaatcaaaatccgtgggagaaacacgtagcatatccaagacttgggcctatatgtactcaatggcatctgcta

SEQ ID NO: 168576 - DNA, 122 bp, Homo sapiens
gactccggcgtagcggtgagtgcggcgccggttgtgggagcggcgggagccggttggcggcgcggcctccgcgtgcggttcggctgggcccgaggggctccccagcctcggggcctgggacc

SEQ ID NO: 168577 - DNA, 122 bp, Homo sapiens
ccactccgcccctcttggaatgcggctgagcggtggatgtcccttttcgggcgccgtaggcgcgttcctattggctagctttgttcggcgccaaagcgcggagcggaggccgaggcgagagc

SEQ ID NO: 168578 - DNA, 122 bp, Homo sapiens
gcccctgagcctaccctataggtagagaggacgccaatctggattcagaggtcccttttccgcggtaattggaccatttgtccgccagtgcaaaccaaccgacctttccttactttcgggtt

SEQ ID NO: 168579 - DNA, 122 bp, Homo sapiens
tcagggcctggtctggccgcccctccatccttgtcggtttctcgggtcgcggaccccgcgcggcgccgggcgatgctggcctgcccgtggccaccacctcgcttcattcccgtctctttggg

SEQ ID NO: 168580 - DNA, 122 bp, Homo sapiens
ctcccgggctgggattcgcctctgcaagaaacgtcatgttttctctcccagacatcgttccgggagccccagatgtaaaatcagaggtctcttatctggcattattgatctctgtgctaata

SEQ ID NO: 168581 - DNA, 122 bp, Homo sapiens
tctctccatcagtctgtaagaatgtaaaactacccagagtttatttaaacctagcacccacggagttcatgagaacacaccacttccttgatgtcattatgactttttgatcaagcggtcaa

SEQ ID NO: 168582 - DNA, 122 bp, Homo sapiens
gtattcgaggctggcaggctcggggtaggcccaggttcttaggtttctagctgggctgcccgccccgccccccatcgtggggcctgcccccgtcctgacctgtgcaccaggcccagctcctc

SEQ ID NO: 168583 - DNA, 122 bp, Homo sapiens
ctcccttttctcgcttgttccaacatcattctccccccagtcgggccatgggaagaatgccgtgtcctctgaactggggccaagagtgacaggtggcggcagtcccagctgcatggcccctg

SEQ ID NO: 168584 - DNA, 122 bp, Homo sapiens
ggctgttgctgtccactccggatcctgaggccgcccagggtactcctaccccgcctgcctcggtgcccctgacctgcagtcgtcacctgcactccaggcgggcaacaacagcgaggacaccc

SEQ ID NO: 168585 - DNA, 122 bp, Homo sapiens
ctgtgaaccaaagagaatggcttctgcctggcccctcagctcatgagtcatgcagctgcccgtctgcagtggggaggctacaaacagatcctggctccaagtccagaagcagacccaccccc

SEQ ID NO: 168586 - DNA, 122 bp, Homo sapiens
ttcttgcgctagatccaagaaccccctcttggggtctggatcgggacccttttcctgtaacgtatttctggcaaccacagaagggactatagtgcagaaacctgacccaatggctacctttg

SEQ ID NO: 168587 - DNA, 122 bp, Homo sapiens
aaaatcataggaagagcttgttctctcagacaagccactacccagtaggcaaagctcaaacgagagcccttaaatggtgtggtctttggccaggccatcatcgtggggttattcctaggttt

SEQ ID NO: 168588 - DNA, 122 bp, Homo sapiens
gcccccttcagcttgggaaagcgaaagcgtggcaggggccggacctgggagcggaggaggcgggtctccatagaaacctccacctgtttccggccgggctgtgagagattaggggctgctgc

SEQ ID NO: 168589 - DNA, 122 bp, Homo sapiens
cccaacacgctggggcgaactccccagcacccccagcccttcttaaaaacgctgagtccgcgcatgcgcctcaggcgccctccgcgacactctagcggctctgcgcttcactgcgcctgagc

SEQ ID NO: 168590 - DNA, 122 bp, Homo sapiens
gattcctcgtaggaaaatccggctagaacctgcattcatccccaaccggaagcccaggaccgtggtgccctcgccgcgccgctcccgggtctccaggtgggcgccgcgctcccgctggctga

SEQ ID NO: 168591 - DNA, 122 bp, Homo sapiens
ggacatcggtctctgcttcacttcacctcacgggtgggcccggaaggcttcgtcttcctacgcctcacctgaagctaggctgtgattttttaatgagctcttccatacatttatggagtccc

SEQ ID NO: 168592 - DNA, 122 bp, Homo sapiens
agagcacgagagtgacaccaaacacatgggacagcagcaccgagtcttggacaaggggcgcgaaggagtcaaggatgttgccaggcctgtggccgaaactgagaacagaatagagaagcagg

SEQ ID NO: 168593 - DNA, 122 bp, Homo sapiens
aaatccgaatcaactgtggggctgtggaatactaacactacaagctctcgagacgctcttcggctgcctgaaagctggatttcttctttgtcaccatcagaaaaggcaaaggttattcagtg

SEQ ID NO: 168594 - DNA, 122 bp, Homo sapiens
aataactggaaggttccttttttcctgaggtcatgaaatgttctggaaccacagcgcccccgccagccctccgtgggagcacagaggggcaggccttgattggtcttctcaccctacagcca

SEQ ID NO: 168595 - DNA, 122 bp, Homo sapiens
ccattcaagccccgctgcctggcgccctctagggtcgttcttgggaacgggcggacctttcgtcaacactttgcctgcaagatcccccattgggggaaccgaggaggaagttaaaggaagat

SEQ ID NO: 168596 - DNA, 122 bp, Homo sapiens
caggccgggccccagcttgccagtcctgatggactccgccagccacttggtggagaccagcgcccggtagagcacctgatgaaccatggcttcagctctgcgtgtcacctggcacgggtggg

SEQ ID NO: 168597 - DNA, 122 bp, Homo sapiens
gcccagctccgagtcaggccgcaccacgcgctccttgcgcacggtgggcttggcccgcagcgcccgcaggccagcaccagcgccagcagcatctccaggacgagcccgaggactagccccag

SEQ ID NO: 168598 - DNA, 122 bp, Homo sapiens
tgttaatatctgttgggataaaggtatttctcactgaggattcaccctcaccaagcttcccggcatgtaaaaaacatcactgtcactgcaggcagatgtaaggaataagaaaacacccacac

SEQ ID NO: 168599 - DNA, 122 bp, Homo sapiens
caccgcaagcctgatcccaggggctgacctctggacggtctcagggactgactagggatgcggccgcgggagggggcagccgagcggggagaggactgggggaggggcgcggggtgtgctct

SEQ ID NO: 168600 - DNA, 122 bp, Homo sapiens
aggtccagagaggcacacacttgagaggcattgatgtagaaacagggcagggaggccacccgcctcctgactccccgccagatgctccttccctctctctcactcctgcagccctccaggca

SEQ ID NO: 168601 - DNA, 122 bp, Homo sapiens
gttctgaccataccactgctatctcagtcttagaggctgattttgtggcccagagtgtttcgttcagatatctttgtgttgaggtgatattgagccagcagccaaagaaatgcatggccaag

SEQ ID NO: 168602 - DNA, 122 bp, Homo sapiens
tgagaagctaaagtcatgatctcaccaagggatcaagaggtcgatattggcggcttgtgacggtaaacacggcaccatcctcctcctcatcccagacggacacaggggcctggaggagcaag

SEQ ID NO: 168603 - DNA, 122 bp, Homo sapiens
tggcctgttagtgtgtctctgcctgttacaggcttttggctaccgactccggagggtcatcgcagccttctacttccccaaggtttgcccctccccagacctctccacccctacacacctgc

SEQ ID NO: 168604 - DNA, 122 bp, Homo sapiens
gcactaaacctacaaattcttgtttaccacctttgccacaaagtgccaaggctccgtcggcgcgaataataaagtctaacttaatgtctgacagaggccttacagtctagtgggggagacac

SEQ ID NO: 168605 - DNA, 122 bp, Homo sapiens
ggctggcagatcactcgcgatcaggagctagagaccagcccggccaacacggtgaaaccccgtctccaccaaaaaatacgaaaaccagtcaggcgtggtgatgcgtgcctgcaatcgcaggt

SEQ ID NO: 168606 - DNA, 122 bp, Homo sapiens
cacggggcggcccgcgttcacagtgacctcgacgctgggtgtacagtacgggtggagaaccgcgggcccgggccgggctgggcgggccggaccggtcacagcctggtctgggcctcggggat

SEQ ID NO: 168607 - DNA, 122 bp, Homo sapiens
ggtgcagctaacagtaggatctaatgatatatttctacatagttgccttccacttcttttcggggggcagagggctggattctcctgtctgcacatcaccccttggttgttttccccaaagc

SEQ ID NO: 168608 - DNA, 122 bp, Homo sapiens
tgcgcctgagactcaccggttcgcaaaccgcctgcatttgagactcaccggttcccaaaccgcctgggcctgagactcaccggctcccaaaccacctgcacctgaaactcaccagttgccaa

SEQ ID NO: 168609 - DNA, 122 bp, Homo sapiens
aaggcaagaaccgaaacccaaactgaaaaatgccttttatgtacttttctatccctgacccgcaggagatttgggaaacggataagaggtggacgaagagaagcaaagcatctgttttgggc

SEQ ID NO: 168610 - DNA, 122 bp, Homo sapiens
cgccgcttcacgcgggtggagatggcccgtgtgctcatggagcggaaccagtacaaggagcggctgatggagctgcaggaggctgtgcggtggactgagatgatcaggtgggagttgcggcc

SEQ ID NO: 168611 - DNA, 122 bp, Homo sapiens
tactctcacccactctcccaccgcccagccctacgccaggcgagggagcagtgcggtgggcggtaccccaagtccgctgggggcgtggccctggagccatgcctcgcccccagcgcgcgctc

SEQ ID NO: 168612 - DNA, 122 bp, Homo sapiens
ctccccgcgccgagcgcagcccgccgggaaccagtgaaccgtgtgggatcaggacttggccgtaccttcagactccaggggatggccggggtttgcaagcgccccataggattagtccgagg

SEQ ID NO: 168613 - DNA, 122 bp, Homo sapiens
aactgcaacccatacatttttactatcctcctcctctgtttgataaatatttgtgtgtagcgagcctgccatggcaattcctgcccttcccctggcccagcttagctcttacgtctccccac

SEQ ID NO: 168614 - DNA, 122 bp, Homo sapiens
acaggtaattaaaaggctgaagaccgagtgctgtagaacagggcttctcaaggtgtggtccgcaaagcagcaaagcagcagcttctcctgggagcttattagaaatacaatcggagcctcac

SEQ ID NO: 168615 - DNA, 122 bp, Homo sapiens
cagtctttttatgaaagacacccaaagcctaagaaacaatcacagtcttcagaattgcagcgtgaacaatcctgacacgttgattcttcatttaaacacactcaggaacagccaacaaatgg

SEQ ID NO: 168616 - DNA, 122 bp, Homo sapiens
gtgcctggccaagtcactgcttgagcctcagtctttgggcttgcacctcctccctggcagcggtgtgaccggagggaaaggcagcggcgagggccttggaggacctgcaggcagtgccccgc

SEQ ID NO: 168617 - DNA, 122 bp, Homo sapiens
tgagaaggggggagtcccggagccgagggaccgtgagggtgagtgcctggcgccatggaacgccaccagggagggcagcgggctaccctggggacctgggtcccgtgtgggtttaaggagac

SEQ ID NO: 168618 - DNA, 122 bp, Homo sapiens
tttgggcctttaaagtcggccatcccagattgagggggcctgacccctgggcgaggccgccgcctctcagttttggggcggtggcgaccccagtccgggagtggccccggtaggtccccgca

SEQ ID NO: 168619 - DNA, 122 bp, Homo sapiens
atttctgacctggcacttatagaagacctcctcccggttctgggccagaggtgcagatcacgctgaatgtcagccattccttatctcaaatgggggtctcctttttggacactctcctgggt

SEQ ID NO: 168620 - DNA, 122 bp, Homo sapiens
cgcagcgccccgctccggatgctgagggaaccgctctgtccagagcggggttcgaggggccggtccgggctgccaggagggagctaggccacggcacggggcttcgtaccgcggcaggggaa

SEQ ID NO: 168621 - DNA, 122 bp, Homo sapiens
aagatgtctgcacctgtgttttcaggctaccggggagcccgcgttcatttccagtctagtcgtacttccctgagtcctgtccatgaatactggatgagccgacagtagcgtgtttaaaacta

SEQ ID NO: 168622 - DNA, 122 bp, Homo sapiens
ggcctgggtgcacccaattcccactcatttggctgcctgcctgcactctgtgaacattgacggcggctgctggcctcagagagcttcagttgggagccagaaagagcttcctgttaacaggc

SEQ ID NO: 168623 - DNA, 122 bp, Homo sapiens
agtgaggtggtgactgtcactctccataggagaggacgcctctcgccatggcaacggggacgtcaccagggacgtgtttgccggagcacaaaagagggtgtcggggaaacacccgcactctg

SEQ ID NO: 168624 - DNA, 122 bp, Homo sapiens
ccccccaccccaggcccggatcctggaatcacctgggccccgcgccccacgccccgccgccgggcccacctgcgcgcccagctggttcagctgctgcatgtcgccgcccacggcctccggca

SEQ ID NO: 168625 - DNA, 122 bp, Homo sapiens
gctgatcgtctggggagtctgtttaattttttcaaggacgcgctacactgttttgtatggcggctgctctgcacactcccaccctcggccccctctttgcctgttttcctacgagaagctca

SEQ ID NO: 168626 - DNA, 122 bp, Homo sapiens
ctcccaagcggcggtacttgatttcgtacttgaggatgagtccgttggggtctggtggctcgagccagcgcagaaggacactgttcttgctggaggcctcccaggccacctttcctggaata

SEQ ID NO: 168627 - DNA, 122 bp, Homo sapiens
gtgctgatgtccatcttctcttggctctgcgactctgctcggtttaggaatggcttgggccggaccgatggcttggcccggggacaggaggtcagcccagcgttcgcatcagcatccttctt

SEQ ID NO: 168628 - DNA, 122 bp, Homo sapiens
ttggggctcagtggaggtaggtgaaggcggctcccattgagggaagcccacactcacacccggccttcctgtgttaatctggcatgctcttctggggcttcccaggctatataggagagtgg

SEQ ID NO: 168629 - DNA, 122 bp, Homo sapiens
gggcccgggcgctacataaggggtcccggggcctctggctcccccaggcagcgccccacgcgcaactgcaccccgcgtgcccgagcgactttcgctttgctccccgaggcgcgagcacgcag

SEQ ID NO: 168630 - DNA, 122 bp, Homo sapiens
cagagactgctgctgacagtgggcgggggagtagtttgcttggcccgtggttgaggaattcgttggcggaggagggatcctgagaaggtactagaaatactgaacccagtcctgcagaagct

SEQ ID NO: 168631 - DNA, 122 bp, Homo sapiens
atctcattctaatggccccaacagagacggggatgccacgcaagggcacagacgacattacgggcacagatgaccacattgcaggtacggagaagaccacaggctgggctcacacaagggga

SEQ ID NO: 168632 - DNA, 122 bp, Homo sapiens
caataaagagtagaggccggtggagactgtagtccctcttccaataagaagcgggaagggcgtgtcttgccactttcactagggctaaggcagggtttgccgaaacctcccgaagccggcca

SEQ ID NO: 168633 - DNA, 122 bp, Homo sapiens
aaacggataaaaaggggaggtctctggcccttggtacgctaggtggagagacagctttcccgcccagggtggaaccgccccactgagattaacattgggtggctcccaaccactgacctcag

SEQ ID NO: 168634 - DNA, 122 bp, Homo sapiens
gcttaagttaggagagcagcgggctgaagacattgccaagggggcgggcccggccggtgacgtgagcccgccagtccggggcccgcggccaatggcggcgcagacagggcggccgagccccg

SEQ ID NO: 168635 - DNA, 122 bp, Homo sapiens
agtgacaataaaatgatttctacaaagtgttgacatcagagctgacatttttttttttggcgggagggagacctgagttttattattactcaaatcagtctccccaagcgttcagggatcag

SEQ ID NO: 168636 - DNA, 122 bp, Homo sapiens
atataaaacttttagaagacaatttaccggacacacatacacacacatctcaatgccacgcgtggtatcgcaggactttgtccagcaagttaaactgcccccatgggctcgcagcaggaaaa

SEQ ID NO: 168637 - DNA, 122 bp, Homo sapiens
cacagcccgacccctaagtttattcgttggcgtgggtgcagggtggcggcgggtccgctccgcccgcctcgggtcccagcccccaccccccggagcttccctcccccaccccaccccgcccc

SEQ ID NO: 168638 - DNA, 122 bp, Homo sapiens
ctgatccctctggagtctggatgcctgaggactgcactctctggggaggaacacccttcacggatttggttggggtcagagagaggatggagactcaagggaataacgggagcccggagaag

SEQ ID NO: 168639 - DNA, 122 bp, Homo sapiens
aaggggtcgctcagggctctgcacagctgtccagggggcatcgggagataggcagccgaccgggggctggagtcaagggaagaagaaagagggggaagggaggtgcagggagtgaagaggag

SEQ ID NO: 168640 - DNA, 122 bp, Homo sapiens
gcttttcaaaagaatgttttcaacattaagcgcatgcacacagtggcttgaacacggccacgtcgggagcagtaaatccccagaggctccgggagcccagggaaggacccttgctgtgaaac

SEQ ID NO: 168641 - DNA, 122 bp, Homo sapiens
acctcttcaaaaagctatacctgactcaccctagagaatttggttcctctggcgtgtgctcgtgatacttcatttgctggatggaacatgagtgaatggagtggtggcattcctgtcggcct

SEQ ID NO: 168642 - DNA, 122 bp, Homo sapiens
ggggctcgggcatggtgctgcggcagctggacccgccgcgagctccccgcgctccgccgccgcctgcgccgcggagttggcccagctgcaaataaacagcagtccccccgcctcccccggcc

SEQ ID NO: 168643 - DNA, 122 bp, Homo sapiens
gagcttctgtctcggtaacaataacacaggaaataagcaacagggtcttgtgaaagacagcgacctcgctcaccatccccgtgtcgttgaatcaccatggagatggcgactagcttaataat

SEQ ID NO: 168644 - DNA, 122 bp, Homo sapiens
gccctgctggtgtccgggacgtgggacgtgagtggggtggccagagcctagggaactcatcgcctgtcaagacgtctcccctcctggtcccctctctgacctatgctccacatcttcacagt

SEQ ID NO: 168645 - DNA, 122 bp, Homo sapiens
ccttggcaggaaggataatggaataacagtgttgatgagacctttttagcttcaaggtttcggagtctaaacaaatggatgattcatttggaatgaaactcacaatgcaagtagaaggacct

SEQ ID NO: 168646 - DNA, 122 bp, Homo sapiens
tgcattccaatggacccttgagttctgaccatttgcaagagaccctgaaggcctgagatgcgtcctgtcttgctgggtgaggcacaagcccagtcatctgctgacatgtggcagccagtctg

SEQ ID NO: 168647 - DNA, 122 bp, Homo sapiens
gtctttccgcattgtgagggataaatctcagggttgtgtccaactctctgccctcagcctcgccctggagaccagctgagtttaccaggctttatgtggccactatgtacaaacaagcccca

SEQ ID NO: 168648 - DNA, 122 bp, Homo sapiens
cccgagaggagatcccccttggtcgagatctgagagctgggtccccttggcagagctgagcgagggtgagctgacagtccaggtggaccgcgcatagctcgcaggggcaaagggaacagcgc

SEQ ID NO: 168649 - DNA, 122 bp, Homo sapiens
ttccacagatctgggctctcctgctctttgttttctaaactttcagcggactcgattgggcgaaagccttccggctccctttactaagtcgtttaggtggtggctggggggacaaaggaggg

SEQ ID NO: 168650 - DNA, 122 bp, Homo sapiens
ggtgcgaagaaccaaatcctagcgattaatgtcccaacaacgtgaacacttcctgcaactcgaaatcctcaagggaaactctgtcgaatccccaccaagtgaacgatgacttgtttctacaa

SEQ ID NO: 168651 - DNA, 122 bp, Homo sapiens
ccgtccgctgtctgtctcctgaaccagggagtctgacccactcacagctcccatggggtccgtgcagccaaggccccgcagccacactcactctccgccccacagtggctcctggggctgat

SEQ ID NO: 168652 - DNA, 122 bp, Homo sapiens
tagtccaagcagggctgctctgtaaaggcttagcaattttttctgtaggcttgctgcacacggtctctggcttttcccatctgtaaaatgggtgaatgcatccgtacctcagctacctccgt

SEQ ID NO: 168653 - DNA, 122 bp, Homo sapiens
gattgactggctgtgagggtgagtggcaagaaggaatcgaagacgagttagggtggatggcgatgccatttgctgagacaactgggaaagaaaaagatttgggaaaaaaagttgagttcagc

SEQ ID NO: 168654 - DNA, 122 bp, Homo sapiens
ggtatcaaagaaatgaaactgggaacttgaagaggaatctggccaccgcgttcattgcagcgctgttcacgatggcccaacggtgggagcaacccgagtgtccgctgatgggtggtgggtaa

SEQ ID NO: 168655 - DNA, 122 bp, Homo sapiens
cctccggccagggcttgcgaagccggaagtgtcctgagtctcgaggaggccgcgggagcccgccggcggtggcgcggcggagacccggctgggtaagtgagacggccgcgggctgaggggcc

SEQ ID NO: 168656 - DNA, 122 bp, Homo sapiens
cacgtcatctccatgaagcctcccgcatttgctccaggaaaggcccgttcgccaccctggcgtcattcactctgtgttgctgatattgagtctgtttccttcaaggggaaacaggctaccca

SEQ ID NO: 168657 - DNA, 122 bp, Homo sapiens
gacaaaaactccaatcagattttccagtcttgctgtctgtagactcccataaagttaattcgggagacagttcagaaacatcctaggagagtattaaagtcttgacgaaacattcggagcat

SEQ ID NO: 168658 - DNA, 122 bp, Homo sapiens
tcatttaggagatttcacactcggctgtttggcctagcccagtgaagtcccttttcatcacgcaaccctaatgactcttagggctgtcactgccgtctggtgttgccagggatctgactaaa

SEQ ID NO: 168659 - DNA, 122 bp, Homo sapiens
accaaggcccaccgcaggcctcagatcctcccacgcctccccgctgctacccaacgatgacgcaagtacgcatgcgcctccccagctgccgctgggaagagcgcgctccccagggccccgcc

SEQ ID NO: 168660 - DNA, 122 bp, Homo sapiens
actgatgttccaaattatccttggtaaagtcacatcaacaaggaaggaagcagacagaggcgcacttgttccttgcagttttgttttgatgtgctgattaaagtagcgcagagggcatgatc

SEQ ID NO: 168661 - DNA, 122 bp, Homo sapiens
aggaggcccctgacactagacttgggttgctggtttctcttggtcttggggtttcagtgccgtgctagaatctaaatgttcagaacatgtttatgcctcctccctggccttcctgaaacaca

SEQ ID NO: 168662 - DNA, 122 bp, Homo sapiens
gctccctctttcctgggtccgggataaccgagaagatcctggtgtgggtttatttttcgacggttagatttcttccatgagtcaaggttgcatttattggatctgtcctataagctgaagta

SEQ ID NO: 168663 - DNA, 122 bp, Homo sapiens
tcccttttggagcatccccaccagtgtgggtctctagcttgtgctgaggaagagccatgacgtaaaggccttggcctctgcttgagcaagctgtctcccgctctgagcttcagtttcctcac

SEQ ID NO: 168664 - DNA, 122 bp, Homo sapiens
cgcacaccccgcccattgacccggaattcttctctgcctggtcttcaggtcccaatcctccgcttccgcgcttgcgcgccaagacggctcggatgccggcggtctctgctgaagagagaaga

SEQ ID NO: 168665 - DNA, 122 bp, Homo sapiens
ccctccagctggcctgcgaggtgggacccgggagggggccgcagaggggctcatgggtggcgcctgcttgtctctgggcttgcaccagcgggtacagaccggaaacctgggctggctctcac

SEQ ID NO: 168666 - DNA, 122 bp, Homo sapiens
gtgagggccagtgggttggggtgcagctggggctgggggaaggtgggcggtgtcttggatcgtggcagctattttagggcctgagctggctgacctcccccagcgtgatctccgtctgctct

SEQ ID NO: 168667 - DNA, 122 bp, Homo sapiens
cctccaccctgtgaatcctgctcagcaatccgagggatgagcggttgattcaggcaacaccgcggatggatctcagggcatcgtgctgaagtcccacattctagcaaggtgctgcttcctgc

SEQ ID NO: 168668 - DNA, 122 bp, Homo sapiens
agggagtcatctgatgtgcagtgaggtaggctctgggcagtgtgagctgcttcttctctccgagtgccgggttacagtgttaacaagccttgggaagggacctcggcgcctcgcgctggctg

SEQ ID NO: 168669 - DNA, 122 bp, Homo sapiens
agcagggccggcagagcctgtagtgacggaggggagcagccttatctccgggaacccgagcgccccgtgcgcggcggggagggggcagttcggggcgccccggcgggtcccaggggctgact

SEQ ID NO: 168670 - DNA, 122 bp, Homo sapiens
cggcttatagcattcaacctcctctaggtggcgctgcggagcggggactcggctgctgatcgcggcgccccctggcggtctgttcccgtcaacatttagattaagcgcagagccggttccgc

SEQ ID NO: 168671 - DNA, 122 bp, Homo sapiens
tgccctatgtgtgcttgagctcgagacaatgcttccttcatccaagagccgggctctcggcgatttttgagaggagaatggggttgaagcgatgttgctcttccgtcttaaaactggatttc

SEQ ID NO: 168672 - DNA, 122 bp, Homo sapiens
caccgctgtccgacctgcagcaagagcttctcccgcctggagaacctgaagatccacaaccggtcgcacacaggtaagaggccggggccgggcggcttggcccatgaagggggcgctcagct

SEQ ID NO: 168673 - DNA, 122 bp, Homo sapiens
agcttttgggatccgaggaaaggcgtcagtgtccctcctgtcccgtggttttggatctagcgatgttaacgcacagacatgactataggttggtgagttacatgctcttccctttgcacacc

SEQ ID NO: 168674 - DNA, 122 bp, Homo sapiens
acacagtgcaatttcccactcaaacacaaaggacagacttgtggaccctggctaagcttccggatctatgtcaaagtggggcacagctaccggcaccaattcaaattcaatcatttaataca

SEQ ID NO: 168675 - DNA, 122 bp, Homo sapiens
aaacgcacggacgcgacacacccaagagaaacaagcacacgcccccaggtggtccgcgcacgcacgctcccagcagcatggctcagggccatcagagagcggacacagccagacatccacat

SEQ ID NO: 168676 - DNA, 122 bp, Homo sapiens
gaacgagaagcctgaggccgggccggtgggagggcgtgatgcatgggaggagctggactgcggtcagccgtcccctcgcgccctccggtctctgctgctgtgtttacttggctcccttcccg

SEQ ID NO: 168677 - DNA, 122 bp, Homo sapiens
cggcgtaggcggcggcgggtgtgggccgagccggtatttatagctccgtgacagcagcagcggcagcgacgccgccggcccgtctcgccgcgcttcccagcgaggccgccggcgcgccgagg

SEQ ID NO: 168678 - DNA, 122 bp, Homo sapiens
cccgatcgagtcccgctgccctccgttctcaggcccctgctttagttgtttccgggccaccggggacagccatccttacaaggcgatgtgttcaccggtgtccttccccgccacacccacct

SEQ ID NO: 168679 - DNA, 122 bp, Homo sapiens
agaaggatttagatggattgtgaagggtaagttacccaagtgttaatgaaggtctcttcccgtacagggctttttatacctcaagctggtgggcacaacacatctgtctaaacatcttccca

SEQ ID NO: 168680 - DNA, 122 bp, Homo sapiens
ctctttttctctatttttctttcaagcaaaatacaagctaccataggaatgcttttctcccgttcatgatttttcttgtatctccaccaccaaccctgttttccagttctgtcagttggcag

SEQ ID NO: 168681 - DNA, 122 bp, Homo sapiens
ctgagctttctcacctcccacctcccttctcccctggccccgtggagacctagtgttgaccgagaaactggctcctcagcccactctgggaagacccagccaaatgtagctcagcggatgcc

SEQ ID NO: 168682 - DNA, 122 bp, Homo sapiens
cagcgcgctttctcttcctggcccctgcgcctcctccgggccccgcggtggcgtgaaaggcgctcaggacagacttgtatttgaatccaagctgttccacccacacgcttttgttcttgggc

SEQ ID NO: 168683 - DNA, 122 bp, Homo sapiens
ctgggaccttggctccatccctgagggccaggggaaccggcagcctcgagactgatccctcgccctggagatttttccaatcaggcaactctgaggacaactgcgacccagagcaccacagg

SEQ ID NO: 168684 - DNA, 122 bp, Homo sapiens
cacacagtgcttagggttctgaacctgcgggtggcgggggaggctcaagggtcatctggccgaagcttcccccttcacaggtgggaaagcctagacatctttagtcctttgtttggagcttt

SEQ ID NO: 168685 - DNA, 122 bp, Homo sapiens
caatggaaaagtaagaggtgaggctttccaagctaagcttgtggtcaactgctcctttagcggtagagtacagcattgaagaattgaaatcatacttaaattccatggaggaagagacagta

SEQ ID NO: 168686 - DNA, 122 bp, Homo sapiens
ctctgagcaattgcgtgagaagtttcctgattacaacgaaaatcacatatcaagaaaagccgggagtacagaatcaagttatattggaggaaaacactgcttttatagacttctaagataaa

SEQ ID NO: 168687 - DNA, 122 bp, Homo sapiens
acctaagaagaataggataaaccagcacattctaaatcacccaaattgtcagcaagcacacgcgagtggcactgcagtgtttgcgcgtgtttctgctcctcaatcgcattggtgtggagccg

SEQ ID NO: 168688 - DNA, 122 bp, Homo sapiens
agcagctgctggaccaggtgctaagcccttcactgcccagggcaggcggggccagcaggccgctctgagtgccgggcccgccgagtccacgcccacccggaactcacgctggcccggaagcg

SEQ ID NO: 168689 - DNA, 122 bp, Homo sapiens
caaaagcacagcagaggacggctccttactcgaggaatgcgggcggcggtcgtccagagccgatgatgaaacgggctatttctgccccgggacatcagcagggctctgggctctggctccaa

SEQ ID NO: 168690 - DNA, 122 bp, Homo sapiens
ctccttctcctcctccacgcgtgctcccaccttccttctgcaaccttcctcttgggcaatcgccgccttcccaagggcccggctgctgacgtatactatttattttgtatatcatgattttt

SEQ ID NO: 168691 - DNA, 122 bp, Homo sapiens
cctccgtcccgggtgaaggtcaccaagtcatggaactccaccgtgcccaccggctggaaccgccatgtcaccgacacggggacccaggcagggtagtggggtttgatgatacactgcaagtc

SEQ ID NO: 168692 - DNA, 122 bp, Homo sapiens
ttctttccattcccagaatatgtttgctgctttttcctctccccactggcctaaatggatcgctccgcctgtttcctccccagcacctagggcgcaatggaatattccattgcccctcctgt

SEQ ID NO: 168693 - DNA, 122 bp, Homo sapiens
gcggacatccatcgatgcctgtgcctcgagtccctgcttcaacagggccacctgctacaccgacctctccacagacacctttgtgtgcaactgcccttatggctttgtgggcagccgctgcg

SEQ ID NO: 168694 - DNA, 122 bp, Homo sapiens
cttaaacatcactcgcccattgaagctgctgtccctgtggactgcaaggcctggccttagcggtgacttattgaagggggcagccataggccaaatcccaaggtctgggaacagccatgccc

SEQ ID NO: 168695 - DNA, 122 bp, Homo sapiens
gccgtctctggtccgtcggggtctgcgttcatttgcttcagcctctgtgaggaggcaccacgaggggtggcctgtaaacaaggaccctgattgctcgagatgctgaaggcggggaagtccag

SEQ ID NO: 168696 - DNA, 122 bp, Homo sapiens
gcgtgcagttgtccagtgtaggagcctctatgtggccaacccacactcactgtccttggacgacccaaggaggtcagtaggaatgagcttacagcacttacaatcccagcgcaggggcccca

SEQ ID NO: 168697 - DNA, 122 bp, Homo sapiens
catgaccctccagggtggcgtctctctggacgcctgtgagcgcagggtgtgaggaggcaacgcatctctgcgcacatgaggaaaagggggttcagaggtcgcagcatcgcggagcccctgaa

SEQ ID NO: 168698 - DNA, 122 bp, Homo sapiens
tattccaagaaagcagcagggtattctgcgtgtcatttggacacggtaccttggaggtcacgcggtatgggcaaggcatgcatgctgatgtgatgtgtgaggtgtcttccacgttagccgct

SEQ ID NO: 168699 - DNA, 122 bp, Homo sapiens
gtgggggtatcaggaagagaagaaactgagattcagagaggttaacggacgtgactgaggcgacagatggaagtgtgtggggacgtggcccaccctaggtctgtgtgcctagacaaaggctg

SEQ ID NO: 168700 - DNA, 122 bp, Homo sapiens
gaaggaaggcagataccgcagcccagtcagggtaagccgctgacccagaggatggaactgcggctctggagattagaaagaggaggacttcgccgcgttcactagcccaggaggaaagccag

SEQ ID NO: 168701 - DNA, 122 bp, Homo sapiens
ttcgggacaaagatcgcgagatttaatggcgagtcacagctacttcttcctggcagagaccggaagtgcggtccgcggagcgtctctggcgcttaccctgctttgggcctgcgttgctgctg

SEQ ID NO: 168702 - DNA, 122 bp, Homo sapiens
taatgaatttattggccgctgctcatcaaacaaggactggagagttcgcgtctgcacccgcggcctggcggcggtgctcaacacaactggggttcagtctccaggggctcagcgcctgcttg

SEQ ID NO: 168703 - DNA, 122 bp, Homo sapiens
caagggagaagaaacaaaaataggggattgaaggagagaggataggcacttatgtagaagcgtgaggatataggaagctacgtagtttctgggaaacagtgggaagatgagggtttctggaa

SEQ ID NO: 168704 - DNA, 122 bp, Homo sapiens
ccaggctccttggctccactggggtctccgttcccttctcccggtcccccctccaggtcgcggctcctttgtccaggactacgcaggggcttgaccccagggcgctggtttaggccggatct

SEQ ID NO: 168705 - DNA, 122 bp, Homo sapiens
ggattgcaggcgatcccccagggaccaaggttgactgcgagggcagacatgggggcctggcgacgagagcaccacagtgcccatcccaggctgcatggttgcgtgtggtgtccctcacaggg

SEQ ID NO: 168706 - DNA, 122 bp, Homo sapiens
ggccaagcaggtgggggctgtgtcctatgttgagtgctcctcccggtcctctgagcgcagcgtcagggatgtcttccatgtggctacagtggcctcccttggccgtggccataggcagctgc

SEQ ID NO: 168707 - DNA, 122 bp, Homo sapiens
aatggtcccggccccgttaaacattgtttcccaagtccatgtgatcccaggtaaaagattcggtatcggccgggcgcggtggctcacacctgtaatcccagcactttgggaggccgaggcgg

SEQ ID NO: 168708 - DNA, 122 bp, Homo sapiens
tgccagggcctctgaaatgcagaggctgaaccacagaagaagtggctcacccggagactgcggcagcctgaagtcggctgaaccacagaatgagtggctcacccggagactgcggcagcctg

SEQ ID NO: 168709 - DNA, 122 bp, Homo sapiens
acttaccgcgccgggaggctgctgccggcggcgacccggaagcgcttcacccagcctgagcggaagaacccaccagaatccgggactcaccaaacgcatgcgtccttcgtctccttttgttt

SEQ ID NO: 168710 - DNA, 122 bp, Homo sapiens
gcctacttttgacccacgctcgttcttgagaagcgtgagaactgccctccaataaggatccgaagagaagtaaatctaagccaatcggaggcttgaaagtagaggtgtcccgcctcgagcca

SEQ ID NO: 168711 - DNA, 122 bp, Homo sapiens
gggattccctgtgaatccactctagttgggatatagcctctctacagctcagtgacgtagcgcgccaaaaccaagtacccaccccggcaactggaagacctagctgtcctccatcccgcctc

SEQ ID NO: 168712 - DNA, 122 bp, Homo sapiens
gcactgccttccaggcaagcctgtggctcggagctttgcactgccttccaggcaagcccacgtcctctccacgtgggcagtcacacactcaggtccccgccccaccgcattcaggccctcga

SEQ ID NO: 168713 - DNA, 122 bp, Homo sapiens
atgtccccctcctggcttccccagagccccctcccccagcaccagcccttggacactcaccgactctccaggcagccctcgaggcccaatctccccgtcatctccctggaggaggaggacac

SEQ ID NO: 168714 - DNA, 122 bp, Homo sapiens
gcaggggcggcggcggcggcgggcacaggccggggcgggaggaggccactccgcacggtgcggtattgtttccaaaatacgcctgctcggggcatcccgcaaacagctgatgaggccccgcc

SEQ ID NO: 168715 - DNA, 122 bp, Homo sapiens
acgtacgaaaaatcagccggtagtattagcgaagtcgcctgtcattcctccgccctgaggcgttgctagcgcctacatcccaccttttcccctttgatcttagaagcttcttgtttattggt

SEQ ID NO: 168716 - DNA, 122 bp, Homo sapiens
ttttaaagttttgttttttgtttgtttgtttagtttgtaatttagaaccgtttgaaacaacgtttctcagagtgtgctctgtggaacagagggccctcaaaaggtacctcaccagaaaaagc

SEQ ID NO: 168717 - DNA, 122 bp, Homo sapiens
tatattaccgccggtacacatccgcccgacactgaaacttttccttttgcatggtagccacgaccgcccacagtgaggcggctgtagcccgcttccgcccttacagacaccccaggacgcga

SEQ ID NO: 168718 - DNA, 122 bp, Homo sapiens
aactagtctagactgagtcctccatttttggtccagagagcagaggtcaacagggcagaacgagggttagagttggggccctagtgcccccgccccaagtccagggagcctctgtcctgagc

SEQ ID NO: 168719 - DNA, 122 bp, Homo sapiens
cagggacgcactctttacggcttcggcggctaatgctaccgcttaaacgactcagcatctcgacttcccaaatcaaaggcccttttcagggccgcccacagttttccgcaaaagagctcatg

SEQ ID NO: 168720 - DNA, 122 bp, Homo sapiens
atcttctgtgtctggcttctttcactcggcacgttctcaaggttcgtgtgctgtaacacacgtcacccatgcatttttttttttatgatggttgggtttttataaatggctgggttttggta

SEQ ID NO: 168721 - DNA, 122 bp, Homo sapiens
tctacactgctgagcacttataatggacccaacatatatattatttatatcatctctaatcgtcatcacccatcaccctgtaaaatgaacacccactgttaacattttatagataaagaaac

SEQ ID NO: 168722 - DNA, 122 bp, Homo sapiens
acacatgtccgatgcaacgtatttaaccagtcatctccagaaactttgttccaatttacacgttcaccaaattggcctgagtgctttttttcttccaatgcattgcgcacttataatttaga

SEQ ID NO: 168723 - DNA, 122 bp, Homo sapiens
caaaacttttaatgaaattaaaatacatgaacgctggcaggagggagacctgtgaagttccgcggaaagctcgtggttcgagttagcatacagtctacaaacaccattatgtgttctgagtc

SEQ ID NO: 168724 - DNA, 122 bp, Homo sapiens
gtttgggacggcccccggcgcatgcccgttgagcagctgaatcccgttctggacgaggtgcgtctccccgtctggaaccacgtctggcaaggggagagtctggggtctgctactgagttcgt

SEQ ID NO: 168725 - DNA, 122 bp, Homo sapiens
gattgctctttgtgctccccagagcgaggtgcagatgccagggaccctctccctgggtctcgtctgctgcggattgctctccgtgctcccggccgcctgtgcagctggggctggactctgga

SEQ ID NO: 168726 - DNA, 122 bp, Homo sapiens
ggccacatcatcacgacatggggtgctgtgttcccagggactagccagacacacattccccgcccggtggtggaggtggaacccagggttttgcttctgccatcccctcaagtagccccagc

SEQ ID NO: 168727 - DNA, 122 bp, Homo sapiens
actcggaccttataaagcgcgcccgctgctcccacaaagccgggctgtcccaggctgaggcggttgctcccctgccgggtgtgttagaagcaagttagaggaagaaggtcttggggactacg

SEQ ID NO: 168728 - DNA, 122 bp, Homo sapiens
ggcagctgttgaggctcagcagcgccaggctgagggtgtgcaggatgtcgagcgtggaggcggcgcgacaccggtctccgttgtcttcccccccagccacctagggcgccagcagcaggtgg

SEQ ID NO: 168729 - DNA, 122 bp, Homo sapiens
gagccctgggcagtgcctgtgaccccagccctgccaggctctgctgtgccctgcagccctcggtcagcctggccagcagagtggcctccccgtcactccccagctggacctggctttgtcta

SEQ ID NO: 168730 - DNA, 122 bp, Homo sapiens
tgaaaaacaggccaatagtaatgaagaagagaagcttcaggacccggcttctccagggggcggggactgttcaaatagacaaaccacgcggccagtggcaggtgaaaacaggcttgggtcca

SEQ ID NO: 168731 - DNA, 122 bp, Homo sapiens
ttgcaccgccctcggatagtctcttgttattgggcatatctttctgacgtcatgagagtgcgataccaggattggtggacggagctggcgaccgccctaggcgcgctgggtcttgtgggtgg

SEQ ID NO: 168732 - DNA, 122 bp, Homo sapiens
gcagcttaaaacaatatacatttattatctcatcatttccacggctcaagagtccaggcacggcttagccgagtctgctcagggtcttaccaggctgcaacccaagaggctggccaggctgc

SEQ ID NO: 168733 - DNA, 122 bp, Homo sapiens
atgagacttcggctggggcagagaggccaggaattcgctgctacatcggccatcctgccacgtgaccaggtggctaacagctcggggctcgaacaccggggtaatccctccctctgtccatt

SEQ ID NO: 168734 - DNA, 122 bp, Homo sapiens
acagatcgttgaagaactcgcccgacaggctctcctcctcttcctcgtcacagacacccccgaagaacagtgtctggtgattcggggccatggccacggaaaagccagaccgtggggtgggc

SEQ ID NO: 168735 - DNA, 122 bp, Homo sapiens
caaatgaattaaatatgcacagtaaatggttcaatgcacagcaagagagtgccgcctaatcgttggggaagaaagcagagccagcagagcagcaagcctcacgcggtcattcctacagtggg

SEQ ID NO: 168736 - DNA, 122 bp, Homo sapiens
gcaggttaattgtagaggggggaaagatgagtaccactgtgtgcatgttggctccaagtgcgagagacatctgggggaagaagtatgcccagcagtaagaaacgcaagcctctttggagaac

SEQ ID NO: 168737 - DNA, 122 bp, Homo sapiens
aatctggagccttgtagcagcctcgtgaggctgggactggtactttggccctgacttaatcggcagagaacttgtgcattccttgaaattgtacagcgtatgagtggcagagcctggctcaa

SEQ ID NO: 168738 - DNA, 122 bp, Homo sapiens
ggccaggactgccccccgagccgccgccgccgccgccccccgccgcccctggctggggcgcgccaccccccacctgcgccgcgccgtcggcacccgggttctgcttcttccacttggtcctg

SEQ ID NO: 168739 - DNA, 122 bp, Homo sapiens
attgggaactgggacgagggaacgttgttaggggcaccacctgctggggtccggcgcctccgcgctcgggctcggaattttggcagcctccgccccctggagacttgggaggagcgagcgtg

SEQ ID NO: 168740 - DNA, 122 bp, Homo sapiens
ctgcctctcgctgtcttggcgggagcctgctcaatctgagtgccgtgggcagcccctccccggcctgtgccaggtggccctctgtggtcccttggcctgctcccatcagctgagtctctggc

SEQ ID NO: 168741 - DNA, 122 bp, Homo sapiens
tgtgcagcgcggaccggcgcatgcagcgagcggggctgcgagggcgctgctgtggccaggcgtctggcatgctgaccacgtcgcgctgctgtaaaggaaacctgccccgcgcagcggcggtg

SEQ ID NO: 168742 - DNA, 122 bp, Homo sapiens
cagccgcaggcgcggggaggggtctccgtgcgctctcacagccgcgtgtggctctgtggtcgctggattccaaaagacggtgcgccggaaaaaaataaacatatctctctatctataatatt

SEQ ID NO: 168743 - DNA, 122 bp, Homo sapiens
tggggaacatctgcacttgagcaacagaagtctaagatccctatctgatttgatgttttgcgacccttttaaggcgcagggcgcgaaagaacagaaacagaagtgtccgttcaagtaggtcg

SEQ ID NO: 168744 - DNA, 122 bp, Homo sapiens
gggaagttctgattctcttggctctggtcaatctcatcccagggctgacattttccccgtcgccttttcctgtccagtgagacatgagagatggctcagaaagtgcaagctctatcttgaca

SEQ ID NO: 168745 - DNA, 122 bp, Homo sapiens
tgacccattaatttcagtctttaaaagtaaacacgtattgttactgaaagcccaggaattcggtctaggccctgctgctcagctcacagaaagccaatcattaagacattgagtattgctga

SEQ ID NO: 168746 - DNA, 122 bp, Homo sapiens
gcggtcagtggcgctcagcggcggcgaggctgaaatatgataatcagaacagctgcgccgcgcgccctgcagccaatgggcgcggcgctcgcctgacgtccccgcgcgctgcgtcagaccaa

SEQ ID NO: 168747 - DNA, 122 bp, Homo sapiens
attcgctcgcctcagcctcccaaagtgctgggattacaggcatgagtcactgcacccggccgaagagatgtctttctaattcactcacagatgctatataggctagctggggctctgcacat

SEQ ID NO: 168748 - DNA, 122 bp, Homo sapiens
gcgaaatggccgccccggccacgggggcggggtccgaggcaggagccaatcggtgccgagcggagtcaggttgctggtccaggattccctccaggttctgagctcgcgctggatgttcagag

SEQ ID NO: 168749 - DNA, 122 bp, Homo sapiens
ctatgagaaaatgaatcagaagaaagaggcgaagggtgccacggcggcggcagcagcgcacgggctggaaacctgggttcagccctccagcgcagacacacatcacgagtcagttaaagaaa

SEQ ID NO: 168750 - DNA, 122 bp, Homo sapiens
gatctggcgcggtgggtgatgggacattctctccccgcgcctgagcgcgctaagggagcacggcattctgggagttgtggttttgactccccagagacgcctaactgggcaactttttgaag

SEQ ID NO: 168751 - DNA, 122 bp, Homo sapiens
aatgtaagcatttaacagcaacttacagggtccatcctgcaacctgggaacttaatggtacggcgaagaatgtttccctgacccgtaagtgcagccgctgcttcggccaagcagcgtaacag

SEQ ID NO: 168752 - DNA, 122 bp, Homo sapiens
ttattcactcattcattcattcattcaacaattgttcattgagtgtttccttatatgtcacgccataggaatgtaactggacaaaatgaggtacctgctctcatccttaacacagacaataa

SEQ ID NO: 168753 - DNA, 122 bp, Homo sapiens
agcgattctcctgcctcagcctcatgagtagctggtattacatttgcccgccactatacccggctaatttttgtatttttagtagagacggggtttcaccaagttagccaggatggtcttga

SEQ ID NO: 168754 - DNA, 122 bp, Homo sapiens
ccagatgcattttcccattaaatgatggctacatgaaaaaggaagctccaaaaccaaatccggggcattaccaggtgtttctcaacaagaacaaataagtgctgtttgcatttttaatcatt

SEQ ID NO: 168755 - DNA, 122 bp, Homo sapiens
tccccactcccctgttgtttccactgcctcataagacttcccaccactcacaaagcacagcgcttttcctcacaaagctgagtgggctccctaggttcaggatggaagtaaataggagtacc

SEQ ID NO: 168756 - DNA, 122 bp, Homo sapiens
tgagagagcctgggctcgctcaggggtagaagtgggatggccctacaacaggtgtggactcgcttccctgtaagcacctagagcatgtggatgtgtacagggcagagggagggggctttgtg

SEQ ID NO: 168757 - DNA, 122 bp, Homo sapiens
gtccctgcctttctcgtgtgttgctgcttcccagcagcatgtagttcagggcccggggcacgttaagtcctcggtacatatttccagttccggattccttggtgagcctggacaagcccctc

SEQ ID NO: 168758 - DNA, 122 bp, Homo sapiens
tgccccatcttcttcctgtacctgtcactgcagcaagttctggggagcaagacgagggtccggacagtggctggtggttattcttccccatccttggggaccagtccaagcatcccatgggc

SEQ ID NO: 168759 - DNA, 122 bp, Homo sapiens
ggcaggacggcaccaaggatggcagggagaactttggcctcggacctggctttggcacagcgcatctggggcctccccactccgtggctgccctcctgagatcccagggtggggaagagctg

SEQ ID NO: 168760 - DNA, 122 bp, Homo sapiens
ccgcgtcttgtgacgggtgtgtgggaagccgcccgcctgtgcatcttgcttccgggtattcgctggctgatttactggttttagagatggggatgggcacccagtgctggactgaagaccag

SEQ ID NO: 168761 - DNA, 122 bp, Homo sapiens
cctttccttgaaaccctaggctactgtagcactacacttttctggttctccgcttaccttcgttacatctcttttgtttttttttttcccggatccctccagatgtggcctaggaatccttt

SEQ ID NO: 168762 - DNA, 122 bp, Homo sapiens
gactgaggtgcctcgactccagagaaggcaggaaacggttccccccagagcccgctgaggcgggaaacggttccccccagagcctgccgaggcgggaaacggttcccccccagagcctgccg

SEQ ID NO: 168763 - DNA, 122 bp, Homo sapiens
ccaaactcttcaggtgatcagatgttaaaatatttcaatcaaaatggactaaatttctaacgtgggctataactgatgtcaagaagatgaggaggatttaaaggcttactttaatagacata

SEQ ID NO: 168764 - DNA, 122 bp, Homo sapiens
gcagcgaggataattcttgccttgctacaactgaatcgcaggttgcctttaaggtggccacgagggagcaattgtccattgtcacagctgcttcaagcacagcagtgcagatggggcttaga

SEQ ID NO: 168765 - DNA, 122 bp, Homo sapiens
ccccgcgctgctgttatggccgcctccttgaggtagtatccgcacatggaattctagggccgcaggtgtatttacggtaactgtcgccactagatttcagcgcctttggactctcctgtttt

SEQ ID NO: 168766 - DNA, 122 bp, Homo sapiens
tgctgacaaggctctgagcaaaccagctaccttcaggtttccaagtctttgattaggttacgtcctctttcccaccagcctgatgaactcctacacgtatgtcaaaacccagttcaggtgtt

SEQ ID NO: 168767 - DNA, 122 bp, Homo sapiens
gaccagtctgcctttgcaggactaataaatcagctgcaaaattagaaattggccgggcgccgtggctcacgcctgtaatcccagcactttgggaggccgaggcgggcagatcatgaggtcag

SEQ ID NO: 168768 - DNA, 122 bp, Homo sapiens
tattgatgtatttcaatacaaatgtgacattagggataaccatttgttctctcaaatttacgagatacagttatctttgccaaaaacggagagcatctcagttccctttctgttcccaccta

SEQ ID NO: 168769 - DNA, 122 bp, Homo sapiens
cacattaagatggagacataatgcaaaggtctgggcgaggagtggtccaggcaaaagaaacgctggagacagacaacatctggacgttgttgctgtgattaccagtcgagtcacaaggaact

SEQ ID NO: 168770 - DNA, 122 bp, Homo sapiens
tttgtattcgttttatatttgatttatccagatactctaaggagttgaaacagagaggaccgttagagaggtgctgttgccagattttcaggggcaaagtctttgaaatatatattttaatg

SEQ ID NO: 168771 - DNA, 122 bp, Homo sapiens
gagaatctgtttgtggctcccctccatgctgctgctgtctcagaggacttagtcagtctgcgtgggtgttgtttatcttttcatccattccccagtccaggacacagtctgttaagtgaaac

SEQ ID NO: 168772 - DNA, 122 bp, Homo sapiens
gcccccaccctcccttctgccctctctaaagctggcgtccaaccccagcatcccccatctcgtcgccccgctcgatatttgttaaggggtctgtttgcatctgaggtttccttgtctgctca

SEQ ID NO: 168773 - DNA, 122 bp, Homo sapiens
gcgactgctgcaggcgcttgctcgcccgccggccccagtttaccgcctccttttcccgcccgagctgttgccatgcaaatgttattcctgggccgatcacgtgtcctttgaagggccacgtg

SEQ ID NO: 168774 - DNA, 122 bp, Homo sapiens
ggacgttgtctgcaggtatggatgttgttctcttttccctgtctttatttccttaccaatcggctgccatccgaggagctgaggaagcctagagctctcagaagcagtcctttgagctggtg

SEQ ID NO: 168775 - DNA, 122 bp, Homo sapiens
gaccggctggtcacttgctgccacctcgcaaaggcgcatctctagttcagtggtgagctgcggccgggtcgctgcaactcgctccaggcctccggactcgtggcctcggtgtccctcgcgga

SEQ ID NO: 168776 - DNA, 122 bp, Homo sapiens
tcaaccttggacggctgcggcaaggcaggggcgctcagaaaggcagccagtcctgcgcaccgccagtgcctccggcacaccccactctgcgccaggggctccccagggtcgcgcgagcatgt

SEQ ID NO: 168777 - DNA, 122 bp, Homo sapiens
ccctagtctggctcagcgaggaatgcataaaattagtggactcctctgagtgacgttccccggctccaatcagcgggcgcgcaggcgcccccggccccgccccactgctgactctctttggc

SEQ ID NO: 168778 - DNA, 122 bp, Homo sapiens
tctggctcagctcttcttcccatagtttctttgcagctagcagctcctcatttctcttttcgtcaattttcttcttatttttaagtatgatgtggcggatcttttttgcaaaactacgggca

SEQ ID NO: 168779 - DNA, 122 bp, Homo sapiens
ctgacacctcacccctcccatcctcctcccactccctcctccagggccccgaagatgccacgtgggcattgtcctctagctggaccctggctccagccatctcagctccatttcacagatag

SEQ ID NO: 168780 - DNA, 122 bp, Homo sapiens
gcatacgcctctgttcttgtcagctcagggaaaacagatctggggacctcttcatctctgcgttgggaagcataggtggtataatcccctcctgtcacgtccaacgttgcatagtcagaagc

SEQ ID NO: 168781 - DNA, 122 bp, Homo sapiens
taggctatacgttggtttagcccaaaaagacaggacttgttagagcaggggtttgcaagtcgtagatttcattcaaagatttcctgatgggcaattggttaaagatttaagctttgcctaaa

SEQ ID NO: 168782 - DNA, 122 bp, Homo sapiens
ccctctcccgttcccctcttctagagcaaaagtcttccaaagccttgacctcttagacaacgctactttagtgaccgaagcacttttcctttccctttcatgcgagttttttgcaaccatgg

SEQ ID NO: 168783 - DNA, 122 bp, Homo sapiens
aagactcagttaaaatgggcgttgtgtggacagtggtcaatggtgatgttgcttgaatcccggcagtcaaaatgtcaaaagactcagagccggggggcaccagtgcagtgactgcggattca

SEQ ID NO: 168784 - DNA, 122 bp, Homo sapiens
aggggcccctgtgaggtacgaggcctgtcattgactaaagcacagccgtgcagcccaggacggcagttccttgccgagggcccgtgtgtttgtgtctggtgtgcgctgtgttccgaggatga

SEQ ID NO: 168785 - DNA, 122 bp, Homo sapiens
ccgggggaaaggggcggctggtgggaattactcggagcaactggtaattggtggggcacgcgcgtgccctggtgttcagagttctgaatcgttgcgagtcagttacaagctgaaccactagc

SEQ ID NO: 168786 - DNA, 122 bp, Homo sapiens
catgatgaatggagggatgtcgctggtggcctttgtcttgcttaatgaatgtgtgggcaccgcctactgggcacttgcaggtactacttaaatcatgcagctctggactgggtgagcagctc

SEQ ID NO: 168787 - DNA, 122 bp, Homo sapiens
ttaacactttggtggtgggaagggttggggccctccaggacgagggaggcggctactgagcgccaccatctgggctgaacttgaggggagaaagctccacccacctcgtggcttttccgagc

SEQ ID NO: 168788 - DNA, 122 bp, Homo sapiens
cctttgctcgccgccgccgccccagccgcgaccggttcgtgggcagccgcgtccactccccggaccagtaaacaaccccgggtccgtgaatcggctccgccagcaccagcctagaccgcttc

SEQ ID NO: 168789 - DNA, 122 bp, Homo sapiens
gcagagaggtaacaggagagcctggaattcaatcgacggtgccacccaagattcctgcgtcgccactccctggggctcagcccacccctgcccgctctggttcctctccctctcaactgctc

SEQ ID NO: 168790 - DNA, 122 bp, Homo sapiens
tgactggggttgcggaatgagtgggaggtgaggacgtggaactagaaaaatggtgaggaccgctctttgaagaagataatttgggattgttttatggtgtttttttaaaggctaaccggcag

SEQ ID NO: 168791 - DNA, 122 bp, Homo sapiens
ggcttccgggggatcctgttttcaggccccccgtccccattcctagcggcaaacgtggagcgcaggcaccttccaggcaccctgctctcccgctgtgtgcgactgaaggcgataccttctat

SEQ ID NO: 168792 - DNA, 122 bp, Homo sapiens
acaccccgcggggcaggggatggggcaggggtctccggggacttccacagcctatgtccacgcggcgcctggaggggagcgggaggagcaggcaggttcccaccctccgagcccaggcaagg

SEQ ID NO: 168793 - DNA, 122 bp, Homo sapiens
gggccatgtgaggggctggagtgtgtgggagacaggcgtttccttgggtctccgtgtggccgccgggcgcagggcacggtcgagggcgctcgatggctgagtccgcgtgagccgaggagcgc

SEQ ID NO: 168794 - DNA, 122 bp, Homo sapiens
caacaaggcctctgcctctgtgacagatagggcctccatctgttcccacggccttctatccgtgaatgaaaaagtgcaggagagaatgtccaataggatgatccaaggccacatgtcccctg

SEQ ID NO: 168795 - DNA, 122 bp, Homo sapiens
ggggtccatcgggtccacacgcggcaccacccccaagcaagaggtaactactgaagtgcccgaataaaaagaaactcgagtccctgctcctgtcgtggtccttttcaggtgaaatgagttgt

SEQ ID NO: 168796 - DNA, 122 bp, Homo sapiens
tgggagaggtgggagaggctgcagtcacttcccaggtactgtctggtgcactgatttccccggaggagccctgagagggcagtgcaggcaggaccggagggtagtttctgcagcacggcctt

SEQ ID NO: 168797 - DNA, 122 bp, Homo sapiens
tggggaggtgtcagtggcaggtgtttcgtggtgctaccggacaggcagaatgaccgacctcgccgggcgaccgctcccagccgcgagaatcctgtattcgtttatctgggagtgaccatcct

SEQ ID NO: 168798 - DNA, 122 bp, Homo sapiens
gtacagaatcttactacaatgtattccagaaaaacaactggaaatcagtggtcatctctgcgtgtgaacgcatgggtgatttttatttacagccgggcgcgcatctccattttccaaaatat

SEQ ID NO: 168799 - DNA, 122 bp, Homo sapiens
gcccaccagctgccgcctgcaggtgggcaagggtgcctggcacctggagaagcacttcagcggctggtgtgacactgacctgagccttctgggaggcactgagaaatgctggctgtgatttt

SEQ ID NO: 168800 - DNA, 122 bp, Homo sapiens
ttcttcacaacgtcctccccttctcttcgtttttgaaatgtgcattcccagagatatccccggtcccctccctccccctccccccttttctccaaccccgcggcaagtccgtggaaatgaag

SEQ ID NO: 168801 - DNA, 122 bp, Homo sapiens
cagctgctagatggcgctgttactccactctgcgcgctccgcctgccgacaacttgaccccgctgacgtcacggccgtctgaatcatcaaggccattttcaaatcccattggtctagccgtc

SEQ ID NO: 168802 - DNA, 122 bp, Homo sapiens
ttacataggcatgattaattgactctttgccaacatgattgaactcgatctccactcccccgtatcctcctctacagtgaggggcctactttgaaagacagagacattcctatcacttgaga

SEQ ID NO: 168803 - DNA, 122 bp, Homo sapiens
ggcgtgagccaccacacctagcctccctaagaatttgtcagtcttattattcatctctgacgcttactggcttgagtcagccctttctgtcgcataccgtgcagcttgcccgaggctgccca

SEQ ID NO: 168804 - DNA, 122 bp, Homo sapiens
gctgggcgccggtgaagacgcggcttctgtacctgataatggcacgtcccctctccaccccgccctaggcacaccctagcgcatctgacacccgccagtcgcggtgtctccgtcttgcacac

SEQ ID NO: 168805 - DNA, 122 bp, Homo sapiens
gacgttcgaggaggcggagaaagccgcgaagacggccttccccacatcttccagcacctgcgcgcctgaatccgtcccacccaggcccagacgcaggcttcttctcgggtcttggtcctgca

SEQ ID NO: 168806 - DNA, 122 bp, Homo sapiens
ggcggagcctcggcgtctcaggacccaaccaggtcgggtcaggtttggaggcggagctggcgccgagaggcggggcgcaggatgcggtgccgcggggcagcagaacagaaccgaataggtct

SEQ ID NO: 168807 - DNA, 122 bp, Homo sapiens
gacgactagtaaagtttgcaaacataaatgctgagcttgtttttaacctaaaatggtgaacgtctgtgttggatactgtgagaagggctttaatgtgttatgctgaggcatctgttggatct

SEQ ID NO: 168808 - DNA, 122 bp, Homo sapiens
aaggtcgtttgttgttgttgtttttttaaaacaccaagtaaccccccccccccccccccacggacttatactttgtttatgagatttctccaaccttggtggtttggagaaatgaggtgggg

SEQ ID NO: 168809 - DNA, 122 bp, Homo sapiens
cctgtccctagaggtaagaagtacccttgcaccatcactgagtttggattagttctctcacgtgaaagtccctttaggacctgatgaattagaaagcagctccctcccacagcccatctgaa

SEQ ID NO: 168810 - DNA, 122 bp, Homo sapiens
tgaataataatgttaatcttgaacgaaggttgtgtatggaatgaatgagacgatgcttgtcggtcaggtgcctagcacagtgcacagcacttagagaagacagtgaacgtcagttccccgat

SEQ ID NO: 168811 - DNA, 122 bp, Homo sapiens
aaatgggagtgccttcctgacctcagtctttattgatcttggtatccgcacctccagtgacgtgtcctgaagggtgggagagaattcacaagtgcctcacacacagggaaagaaggaagtcc

SEQ ID NO: 168812 - DNA, 122 bp, Homo sapiens
gggagccgccgccccccttctgctgctgctgcaggtgcaggaggtgctggctgcgatcgccgttctcgctaaacgagcggtcccggaatttgttctccttgttgagcagggctgtgccgccg

SEQ ID NO: 168813 - DNA, 122 bp, Homo sapiens
agggattggtcattgtaaacagagttatacaaaatgactacagcaaggtggacaaatatgcgtggcatcaggatcctgggagaatctttgatgcttgcaaaattttgctctttcttttttct

SEQ ID NO: 168814 - DNA, 122 bp, Homo sapiens
gaagagtaaaagcacactcactggaagaccaggacagagcccaatgcctggttggctgcccgttcttcctaacttctcccctctgggagagggtggtactgacctgatgccacaagagctct

SEQ ID NO: 168815 - DNA, 122 bp, Homo sapiens
cgggcgggacgaagcggggctgggggtggggagcgcaggccggggtcggggcagcgcaagcggggagcgagagcgcaggccggggtgaggggagcgtaggccttggtagggggagcgcagcg

SEQ ID NO: 168816 - DNA, 122 bp, Homo sapiens
agcctgtgctgggtgagattatctgcaatggaccgggttaatgggaggcttgctttggctcgctggaagaacaaatgaagggagttttacttcaaccatttgtgacttctggccaagaggaa

SEQ ID NO: 168817 - DNA, 122 bp, Homo sapiens
tggggctcctgacgccccaagaggcggacgtgacttgcctagggctccgcagcaagtgagcggaggctttgagattcagcttttcccatccagcagaaccgagctgcaaggcgccttcctta

SEQ ID NO: 168818 - DNA, 122 bp, Homo sapiens
ttctcttctgtctcttgtaaggacactggtcattggatttagggcccccccccgcccccacgtagtccaggatgatctcatttcaagatgcttcacttaatcccgtctgcagagatgctttc

SEQ ID NO: 168819 - DNA, 122 bp, Homo sapiens
gatgctgaacccctcagaatccacggaagtgctgccgtgccccgagtccttctccacctccgctctgtccgtagggtcactgggtccgtgactggaactcactgcctctttctgaggtctca

SEQ ID NO: 168820 - DNA, 122 bp, Homo sapiens
ccttttccctctcctttcggtgacttctctccctgcttcccatcccgtctgctaaactagcgttgcccagtgacatctcacagccaacccaagaacatcttcagggccctggcaaggagggt

SEQ ID NO: 168821 - DNA, 122 bp, Homo sapiens
agatggaagctcctgttcatagaggtatccttggagcagccaaggtggccctgcctccgccgtggccaaaatcaaggctttttttttttttttttttttttttgagacagagtcttgctctg

SEQ ID NO: 168822 - DNA, 122 bp, Homo sapiens
gcgttcattcagccatccattcaatcacccaggcatatttacacggatggaacacattcgcggagagatgtgtgtgtttgagttccaatcactgcagcccgtattggcgcggcgctttgtct

SEQ ID NO: 168823 - DNA, 122 bp, Homo sapiens
ctgtcttactcatctttgtattcctggtgtctggcacagaacagatactcaacaaacactcgataaaagatgaatgaataaacaaatgaaatgtagtaatgctcaacttcctatgtgaggaa

SEQ ID NO: 168824 - DNA, 122 bp, Homo sapiens
gggcacccagctccagaggctaggtgggcgtcgctggtgggtggactcctgggcgctgcgcggagccgcgccggctgggttagcgcgggcggggcgcttagtcccacccccagaggaggcgg

SEQ ID NO: 168825 - DNA, 122 bp, Homo sapiens
ccatggtctgtccagcctggcccacctgggtatccttgctttcccaatatggttcagatgcgcccctgcgctcttgggccaagctctgacccttgctggaccgctgggtttcctcccactgg

SEQ ID NO: 168826 - DNA, 122 bp, Homo sapiens
tcctattcatttctattaccccggctttaagggaatctcagacccagagaggttgagaaacgaatgaagatcgtacagctaataagtggcagagccgggattggaacccagctatttagtaa

SEQ ID NO: 168827 - DNA, 122 bp, Homo sapiens
atatgtagaaaaccctaaagattccacacacaaaattgttaggccaggcgtggtggctcacgcctataatcccagcacattcggaggctgaggcaggtggttcatgaggtcaagagatcaag

SEQ ID NO: 168828 - DNA, 122 bp, Homo sapiens
gcgggagtcttcggggagctatgctgagaccgggtggtgcggaggaagctgcgcagctcccgcttcggcgcgccagcgccccggtccctgtgccgtcgcccgcggcccccgacggctcccgg

SEQ ID NO: 168829 - DNA, 122 bp, Homo sapiens
cacacggttttcctcatattgcccaagctggtctctaactcctgggctcaagcaatctgccggcctgggactaccaaagtgatgggatttcaagggtgaatcaccacacccagtgtgatatt

SEQ ID NO: 168830 - DNA, 122 bp, Homo sapiens
cctcctggcgttgctggccctgtgccctggagggcgcccgcagacggtgctgaccgacgacgagatcgaggagttcctcgagggcttcctgtcagagctagaacctgagccccgggaggacg

SEQ ID NO: 168831 - DNA, 122 bp, Homo sapiens
cccttctgtgacattgttcctaatatccggagggggagagggtgatattactcgcaatatcgcaggctgtgtgcacccaccctctgatattgttcctagcagccaggaagtgagaggacgat

SEQ ID NO: 168832 - DNA, 122 bp, Homo sapiens
actggatcatgggggcggtttcccccatgctgatcttgtgatagtgagtgagttctcacacgatctgatggcttaaaagtgtgtggcttctttcacactctttctctcctgctttgccatgt

SEQ ID NO: 168833 - DNA, 122 bp, Homo sapiens
ctcggaggcctcagtgagcggcccatggggacaagcgtccagtcaggggcatgtcagagccggtgtcacatgtgcgtgcactaggggaaggcagcctggggtcgctccctggggccatctgc

SEQ ID NO: 168834 - DNA, 122 bp, Homo sapiens
tgcacatgtaccctaaaacttaaagtataataaaaaaaaaaaacaacttcaagggagtcccgggtgcgtggctgtcatccacacctgacctccattgtgtagtcaggggcctgctgggggct

SEQ ID NO: 168835 - DNA, 122 bp, Homo sapiens
tccatgctcatgaacacaactctcccatcctaagttcagggagaagatgtgcttcctgaacgtgtctatgggacatgtaaaactatctctgtgagcttgagggagctgcctcacctctgtct

SEQ ID NO: 168836 - DNA, 122 bp, Homo sapiens
attaacttctgactttacctcttttgccaaccctatgccccatctataaaactaattgtgcgtagcatgaaaaagatctgaaatagtttcatataatatgaattgtgcatagcatgaaaaag

SEQ ID NO: 168837 - DNA, 122 bp, Homo sapiens
acggcgcgccaggttgggaccgggaggccaaggcctcttggccggggcctcccgaggctgcgctctgcagactcctctgggatagcctgtattcagctttgattttcgaaacctcattttcc

SEQ ID NO: 168838 - DNA, 122 bp, Homo sapiens
ccgcgttgtgcggtgatgacgggaggggccgtaggggagaaccccggctcggggttcgggcgtgggaggagctgtggtccgtggggtccgtagtcctttctttcttttgttaaaaattaaac

SEQ ID NO: 168839 - DNA, 122 bp, Homo sapiens
ggcctggctctgctcctctccccactggcggcttcaatcagtgtcgcggtggtcgcgcatcgcctttatataggcatgggtcagagtgggtggggcttcttcttgattacgttggtacttta

SEQ ID NO: 168840 - DNA, 122 bp, Homo sapiens
gcacaagtcccttccctggagctcagtttgtgtctcttttgcaagatgcagggatagagtcgctgctaaaaatgtacccagaaggacagacatgttgagatcaactaagctgtctccaacat

SEQ ID NO: 168841 - DNA, 122 bp, Homo sapiens
ggcaaagggatttgcattgtccccgtacagagtgggacactgaggtcgccaggggcatggcgactgtaagggacagtgctggatgtgagcctcgcctgcaggaggcggtccaggaagcgtgg

SEQ ID NO: 168842 - DNA, 122 bp, Homo sapiens
agagatggtgtggactgaactggcttctatttggggaaaatttgcagaatataggaggtacgcaataaatgtttattgatggtgaagatgagaaaaccctatttctgctgatctttcctttc

SEQ ID NO: 168843 - DNA, 122 bp, Homo sapiens
aagcagggctgcgtactagcaggaaaattaatgaattgctaaagtccaagtgtaggcaagcgtgagcgtatagaatccttgggagctgcagacacaaagacagttcataccctcttgtaggt

SEQ ID NO: 168844 - DNA, 122 bp, Homo sapiens
ttgtgcaaaaggaccaatccaccgggaaacaagggaaacgcgcacatttcctcaacttgccgcttcttgggcacgtttaggctcttattagagccgcgctttggagttgcctcctcctgctg

SEQ ID NO: 168845 - DNA, 122 bp, Homo sapiens
agcattacaacacatttatcaaagaacatttgaaggtgccaagatacttccagtaataagcgtgattatatgattaaaatgcatttgcatagcctttggggaaatggaggagggagacaagg

SEQ ID NO: 168846 - DNA, 122 bp, Homo sapiens
taagacttgtaacactcctcgcgaggatctccaggttccctccttgagctagcgagatcacgaacccaccagaaggatgaaactccgaacacaacatcaaaaggagcaaactccggccacgc

SEQ ID NO: 168847 - DNA, 122 bp, Homo sapiens
aggcagaaaggacttacacgacgtgctgcacggacgattccgagagaaaggccttgtgcacgacctgaggggattccttatcatatacgctgatgaagtagaccgagccatcctccgtgccc

SEQ ID NO: 168848 - DNA, 122 bp, Homo sapiens
agctcggccctgcctgagcccctcttgcccacccccggggctagcgggatccgcagccctcgcttccttccgctgtcacccaggccctgcgaagcgggtatgcacccctcagctttccgagc

SEQ ID NO: 168849 - DNA, 122 bp, Homo sapiens
tactcgggaggctgaggcaggagaattgcttgaacccaggaggcgggggttgcagtgagccgagattgcgccactgcactccagggacagagagagactccgtctcgaaaaaaaaaaagaaa

SEQ ID NO: 168850 - DNA, 122 bp, Homo sapiens
gggattggttgcagaggttcgtgacagtggcgcctattggctgtggcagcccccgtgacgcggggtggtgactggctccggagtctgaggggttcgggcttgtcaggttctaggtaggtgcg

SEQ ID NO: 168851 - DNA, 122 bp, Homo sapiens
cccaccacgcccccgcggataaagggtgacgcagcggaccccgcccctgccccgcgggcccggccgcctcgctcacccacacgaagaggctgtctgagagcaggtactgggccacatcgcgg

SEQ ID NO: 168852 - DNA, 122 bp, Homo sapiens
ggccctgagcgccgccccagaagaggtcgagggaatgttgtgggctggggcacaccagcacggcagaaactggagaaagcgagagacgtcgccagggacccagggacctctccctccagttc

SEQ ID NO: 168853 - DNA, 122 bp, Homo sapiens
cgcccctcccgccccgcatcgaggcagacaagcctgttcctcttccctgggctgcgattgcgacaggccggcctggctcccagcgctccctgtccccgccccgcggccagctcgctccactc

SEQ ID NO: 168854 - DNA, 122 bp, Homo sapiens
gcgcgcggtggctctttttcctctccggggcaggcgcgggtgcaggcgcgggctggggaccgcagccccggaccgggggctcggccgccggcgcctccatcgcggcctccctcggcctcagc

SEQ ID NO: 168855 - DNA, 122 bp, Homo sapiens
ctctccccagctccacccacattggcctagacccagtctctaagggctgaaaatattgcccggaagctcccgagcagaatcagatcgcgctaagtagggcacaacgcagaggcgacaaagct

SEQ ID NO: 168856 - DNA, 122 bp, Homo sapiens
gggccgggcggggccggagcggggctgggactggcgagcggggcagaccctggagggacccgggagtgggctgctggggaggggggccgctgggggacgcggggacattctttccccccctc

SEQ ID NO: 168857 - DNA, 122 bp, Homo sapiens
tgctcggggtccccgcgccgccctcctccctccgccggtgggagtggcccgcgctgcctccgctctgccaggaacatgaacggactctgggcaccctagctttggctgcagcccaccagagc

SEQ ID NO: 168858 - DNA, 122 bp, Homo sapiens
gaggaaatactgctggctggaatgatcctgcctcactgagtgctgagggagacaccagcccgccgcccttagggccctggtgaggggcgatggcggcggcatgattcactcctctcagttct

SEQ ID NO: 168859 - DNA, 122 bp, Homo sapiens
tgatccacgcgctgctctcactttccgccctccgcctttcccgtctggagtgcctggccgcgcccccacccaggccctccccacggcccctctggctgggaagtgcctgctgcccttggaag

SEQ ID NO: 168860 - DNA, 122 bp, Homo sapiens
gagcctggcagtgaccacttgggggccctgggcattaaataaacttcttggggcccgtttcgttattacacttggctctagatttgttgtgcgtttcagtgagaagtacctgtatgtggttc

SEQ ID NO: 168861 - DNA, 122 bp, Homo sapiens
gcaccgtgggtcaggacgtaactcacgtggcatacgcggcgccccgcgcccagctgctttcgctctagcaagcctgtttgggaaacatcttgttgccatgatggtcttagtgctctgtgtgc

SEQ ID NO: 168862 - DNA, 122 bp, Homo sapiens
atttagaaagaatggcaacttaaatctctatttttaaaatttcaacctataggctgggcacggtggctcacgcctgtaatccgagcactttgggaggctgaggcgggtggatcacgaggtca

SEQ ID NO: 168863 - DNA, 122 bp, Homo sapiens
ctcgccctttgtggctgacacggtgctggacacagctgcagcctataacttagggtgattcgatcaacgatcttgtctagagtgggagatagctgggagcagtggtgaaataagaacatgaa

SEQ ID NO: 168864 - DNA, 122 bp, Homo sapiens
ccgtgtttctggtgagaagcctgggatggaagtctagatcaggagaagtaagcaggaactcgacaggaaagggcatggtctgcccaggcaaagaatttgtgcccttatttggtgggccactg

SEQ ID NO: 168865 - DNA, 122 bp, Homo sapiens
gcctgttgggggctgggggttgtcactatgttcccgaagtggtgccgggcagacaggggccgtccgactcccaggactgccgtgtgggccagagcggagtccccggggatgagggtccctgc

SEQ ID NO: 168866 - DNA, 122 bp, Homo sapiens
gcttcggcagttcttacagagcgcgcgtcccggaagccgcgggctctgcgttctgagcctcgcacctcattgagaggttattaatagggagtttgtctggtgtcagagcgcagacataaact

SEQ ID NO: 168867 - DNA, 122 bp, Homo sapiens
atctctgttagactggtagaaaggtggcagggtaggtgcgctctctgcggctgcactgcccgcttgcggggtggtaggggagcgggtgtggcgtgcttttggggctgcactgcctgccgcgg

SEQ ID NO: 168868 - DNA, 122 bp, Homo sapiens
cctttcctaactgtgccattactaacctcaggggccgtggtccctgcacacatgctgtggcgtccacttacgaaggggtgcttcgtgtccatgtacctcctcaaaccctagtcccatctcaa

SEQ ID NO: 168869 - DNA, 122 bp, Homo sapiens
gtggacacgaaatcctgtttggatcatctaactggaggctctctgttcttcacctccacgcgccctcttgaccccaggaggttcaggggaggaagtacgccactctccactggcaccctcct

SEQ ID NO: 168870 - DNA, 122 bp, Homo sapiens
agcgtctccacctggcagccacctcgtccgggagggaggtgggggggtcagccccccgcccggccagccaccccatccggcaggtgaggggtgcctctgcctggccgcccctactgggaagt

SEQ ID NO: 168871 - DNA, 122 bp, Homo sapiens
gggcagtacaggcctagattttttttttttcccaagaaaaaaatattagatgttacccttcgtggaagagggacagaattttagagagagaaactcatttgagaaatgggaggtggggaaat

SEQ ID NO: 168872 - DNA, 122 bp, Homo sapiens
gtttatccacatacacatgtgcacgcatgtgcacaaacacattgcaggcaggcatgttgacgcctcaggcagcggaggaccctgactctgggccctgctgacccaggcaaggccccattgtg

SEQ ID NO: 168873 - DNA, 122 bp, Homo sapiens
aacgtacaggagcggtgaaaaagaagaggcaagaccggcccccagaccgaccaaagcccacgtgccgccacaccccacgcccagcgcgccgacgtcccgccactgtcgctgccaccatcatg

SEQ ID NO: 168874 - DNA, 122 bp, Homo sapiens
tccagcctcttcccgggaggcgtggagcagatgctcattcacacggctctgctgtgcaaacgcaggtggttgtgaagttaccggctctgcccgccgcccgtcagccccgttcatccttctga

SEQ ID NO: 168875 - DNA, 122 bp, Homo sapiens
gctggctttgtcttctcctttgcaaaagcaaagtcctgcggaggctgggcttcgcctgagcgctcgctagggtggaggaagcagctgtgggcctgcagccagggctcgctccaaacgctgga

SEQ ID NO: 168876 - DNA, 122 bp, Homo sapiens
ccaccgagaaactaaacctgttactgctgcgaatacgccggcagggtccgggtggcggggcgggcggggcggacgcagcgtccgctgggcggtgggaagaaccccaggcatctgagtcaaga

SEQ ID NO: 168877 - DNA, 122 bp, Homo sapiens
ccgcctctaccactgcgaggccgagcaggtggccgtgtgccagtactgctgctactacagcggcgcgcatcagggacactcggtgtgcgacgtggagatccgaaggaatgaaatccgggcaa

SEQ ID NO: 168878 - DNA, 122 bp, Homo sapiens
ttgggtggtcgatgggaccggacgccctggagcagggggcggggctggtcagggaggctccggctgcacaggagccgacagagtcgggggaggctcaggcatggcgggctgcaggtcccgag

SEQ ID NO: 168879 - DNA, 122 bp, Homo sapiens
tcctcacttctcatatggggcggctgccaggcggagggtctccccacctctcagacggggcggccgggcagagacgctcctcacctcccagaggggatggcggctgggaagaggcgctcctc

SEQ ID NO: 168880 - DNA, 122 bp, Homo sapiens
aataacttagggagaataaggggccccagtggcaaatgcaagctcccctgcctcccaacccgattcctctgagaacctgctgccatctgcctggacctcctgtaagatggctcctacgcgac

SEQ ID NO: 168881 - DNA, 122 bp, Homo sapiens
taggaaacggcgagtacagaggccatagaaaaagctaagactcagtttgacgtcgtcagccggcttggtcttctacccagtgactcaaagcactaaaagtcagcataatcggaactgaagtc

SEQ ID NO: 168882 - DNA, 122 bp, Homo sapiens
cagcctcttaggaggagcaggggacagattcctccgggaggccaaggctgtagcccccgtcggccctgcatgctgggctgtattcagcatgggcagcctcgtccggtctccgaacctggcct

SEQ ID NO: 168883 - DNA, 122 bp, Homo sapiens
acgtaactgaggacgcccccaacccatggccacggcccctcgggccgtcacacagggctgcggctcatggggccctgctagagcaggcgtctgtcctcagtcagtgcgaccgacttgaaacc

SEQ ID NO: 168884 - DNA, 122 bp, Homo sapiens
cgccgactgggaggcccggggccgggccggagggactcggaacctggaaacgaccaggcgcgacccccagaggactacaggcgcggcttttctggccgccgcccggttcccgcgggcgactc

SEQ ID NO: 168885 - DNA, 122 bp, Homo sapiens
tgtaaactgttggaaaaatcgtcctcttcgggtgtcagaattccatcagtggttgtgcttcgaggtcgcaccctgagcatccccgctgcgagaaaggcgaagcggcagggccgggggttggg

SEQ ID NO: 168886 - DNA, 122 bp, Homo sapiens
cagctccctgcagacacagccctccccgtatctagtcctctcacgctgactccctcacagcgtggccatgtgccttgtaccgctcaatcagactgcagcaaatgtgatataagcagagacct

SEQ ID NO: 168887 - DNA, 122 bp, Homo sapiens
cagcatctccttcccggctttcgctttgctgtccctccttctgaaatacacacgctcatgcgcgtgttaatttagcagtagcaaaaagactgagagcgagggaaggaataggagaaaatggc

SEQ ID NO: 168888 - DNA, 122 bp, Homo sapiens
tgtggtttccgatggacaatgggggaagccatctctgactctccactgccaccgatgccacgatgagtccactgagagggccatttccagcagcaggcgaagatctgaaaacagacacagga

SEQ ID NO: 168889 - DNA, 122 bp, Homo sapiens
tcctctaaaagataaagaaacagtatctctttgttaaaaaaattgctaatcacccaaaaacgtgtcccccgctccccactgccactggcccgaaaaggcgattcatcttcctttgttagttg

SEQ ID NO: 168890 - DNA, 122 bp, Homo sapiens
caaaaagcctattgattattacagcttgtactgacaacattgtatatacatagctggcatcgtttgtagcagtttgctcgtgtcctcaggcagggtactaacccagaatgggcacccagcca

SEQ ID NO: 168891 - DNA, 122 bp, Homo sapiens
cttttccctgtaccgtaggaacagtgtttgtcttgatcacttctctacctagtaattagccgcgcttagtactgtattcattcatcacatgaatgaatgaagaatgaatgacagacgggtca

SEQ ID NO: 168892 - DNA, 122 bp, Homo sapiens
gacggctatgcgggccgagacgttccccggggagcgggcaggcgcgcagaggccatgggtcgagtatgtgtctttgggaactacagtttcatccctcaaagggtcgtctttacgggttggga

SEQ ID NO: 168893 - DNA, 122 bp, Homo sapiens
tcaaacgacaactttttttgatcccaggtgttttattatagggttttctgatagtcttaccggaaaggaagttttcattctgcttgggaatctggggatgtctctagccatttctaaacttc

SEQ ID NO: 168894 - DNA, 122 bp, Homo sapiens
actgtcccatggacccaggaaatgcagaaacgtggaggccttggcttcttggtggggtggcgagacccaggctgaggctccgtgggtgcagagcacacccacccaccccccactagacctgc

SEQ ID NO: 168895 - DNA, 122 bp, Homo sapiens
cagggccggagttagagaggcctctgcagccagcagcgacacctcttctgccaaggccgccgggggcatgctggagcttccagcccccagcaacagggaccataggaaggctcagcctgccg

SEQ ID NO: 168896 - DNA, 122 bp, Homo sapiens
ctctagggcggggccaggatgagcgttatgaggcgggacctggggtggggccaggatgagcgtcatgagggcgaggcctggggtagggccaggataagcgtcgttggggcaggtcctgggga

SEQ ID NO: 168897 - DNA, 122 bp, Homo sapiens
tgctgatcaagcccgtgagccaggcccaggtagagggtaaggaggaaagcaaggaggagacggtccgtgcccagggtaggcaccacccacagcactgtcagcagctccacacacactgggtg

SEQ ID NO: 168898 - DNA, 122 bp, Homo sapiens
ggcaaggcagggctggcgaggtggatgttgcagctgtcaccactgctaggtgttgggaaacgactctcctgcctgtgcattgacccgaaggcattttccatttcctaggcccctcccgcttc

SEQ ID NO: 168899 - DNA, 122 bp, Homo sapiens
gaaaaaaaaaaaaaatatatatatatagagagagagagagagagagagagcgcaagcgtgcgagcacacgaaggagagtcgattaaggaagtattactcaaatcaataagaaaattctgcaa

SEQ ID NO: 168900 - DNA, 122 bp, Homo sapiens
cgcgggcagtgggtgtggtggctgcccggccgggcgtgctcctaccttaccctcccagggcgctgtggagctgcctcctgaccttcgggtgtcctgctcttgcttgcaggtggtacaagaga

SEQ ID NO: 168901 - DNA, 122 bp, Homo sapiens
tgcttgacgtggggcaagctcggcgttgaggtggacccgcgcgccacccgctggccaacgcgcctaagcgacaggagtgcaaagaaacgaggctgcttggcaattcagctggtgcggccctg

SEQ ID NO: 168902 - DNA, 122 bp, Homo sapiens
taccccaaaatatatttctttgacatattttgaaatagttgacatatttctaaatattgacgtatttagaaagccagccagtagagctaatgcaaagctgtccttggtgcggaagatttgca

SEQ ID NO: 168903 - DNA, 122 bp, Homo sapiens
ggagaagagccgtgcggggctcaccttttgggcggcagggtgaggctggctgggctggggcggagctccctcagagtggctgtgggcctggcggggacagactggccccgagccccacacag

SEQ ID NO: 168904 - DNA, 122 bp, Homo sapiens
ccctacccctgcttcctggggtcctgcagcctgggcctccccacaggccggccagggccgcgtcccagcagcgcggcctccaaccctttgtctccggccggtcccgtctggcctctgcggtc

SEQ ID NO: 168905 - DNA, 122 bp, Homo sapiens
tagctcagagggagaagctacttagaacttcgtgaagcacagaggatctggagcgagccccgcagctgggatcagtggtcttaagttgaacccgcttacaggaagatgcagcccagctcaca

SEQ ID NO: 168906 - DNA, 122 bp, Homo sapiens
cattcggcgcctcagaatgacgtctgaaatgagcgccgacgctgcccaaacaggagcctgcgcatgcgctctgccctggcagcggccctgtgcagatccctgagcgtgtggcagcagtgcgg

SEQ ID NO: 168907 - DNA, 122 bp, Homo sapiens
tttgaaggtgatggtcgtcgtcttctctctcatagccagatccgatgccggttcttcgtgcgagggaatggccgctgccccttcaaatctgagtgtatctacctgcaccagctcccagctaa

SEQ ID NO: 168908 - DNA, 122 bp, Homo sapiens
acttgcttctttgggtcgcaggcacaacctagctattctctgatgcctctcatctctgggcgattgtccctcaaatgagggggtttagagatttcctgcctggagcctttggcatcattttg

SEQ ID NO: 168909 - DNA, 122 bp, Homo sapiens
aaattttaaaataattgtgattatattgtttccgtttgtgaacaagtgtgtctgtgtgtgcgtgcgcgtgcgtgcacaatttataaacggacgtaacctcacacaacagaagtttaaaaatg

SEQ ID NO: 168910 - DNA, 122 bp, Homo sapiens
atggcggcggcggttcggatgaacatccagatgctgctggaggcggccgactatctggagcggcgggagagaggtgcacggggacggggaggggtccactcgaaacgaggccgggggtcctg

SEQ ID NO: 168911 - DNA, 122 bp, Homo sapiens
gatgaggcatggcggcagcgacgaaagcagtcgtcatctgagatttccctggcagtggagcgggcccggcgacggcgagaagaagaggagcggcgcatgcaagaagagcgccgggcagcctg

SEQ ID NO: 168912 - DNA, 122 bp, Homo sapiens
gttgcatgattccagttgtaatgccggtgagatccaaacacttggctaaataataaacatcgattagacgtacacctaagagtggccgggcgcggtggctcacgcctgtaatcccagcactt

SEQ ID NO: 168913 - DNA, 122 bp, Homo sapiens
actgacagtttttaaaggtagatgagtttccagacttctcttaaatttccagtgtgttaacgttgaaaattatttgaacttgttgcttccaaatcctgcagtaatactgatgctccagaaag

SEQ ID NO: 168914 - DNA, 122 bp, Homo sapiens
ccttccagagagagccgaactggcagcttccttaggactgacacaaacacaggtaattcccgagaagcccaagtatccctgaaatgctggtaccgcttgcagatcgggcagggagcacatca

SEQ ID NO: 168915 - DNA, 122 bp, Homo sapiens
aggtgggacctctcacttagaagtaagcacagcaagtgggaactgcagggagccaggccgcggctgggtttggtgctgagccgtggtctgaagctgcctggaggggacaaggtcctcctgtg

SEQ ID NO: 168916 - DNA, 122 bp, Homo sapiens
gggaggccacacctggccggagggcagcccaagctgggcggattcaggctggatctcccccgccccaacgtgcccacggcacagctcatttccctctgcgccaggtgctggctcctctgcca

SEQ ID NO: 168917 - DNA, 122 bp, Homo sapiens
ttctggatttcaagctgtggccagctgccaccctaaggctattgcatgacttggccccaccgtgagtcagctcattagcataaactatcaggcatggtcccaggagctcatgatgagtggcg

SEQ ID NO: 168918 - DNA, 122 bp, Homo sapiens
ggttagctctatcactcaactctttaaaaagtttatatgaatatccagtcaaaaccaacacggtattgcccttgaaatgttaactagacggatttccaaggagaccacaggactgtatactg

SEQ ID NO: 168919 - DNA, 122 bp, Homo sapiens
tctcttcctctctctttctcctcacaaatatttgggggtcacgggttccaaggcctagtccgggaggtacccctgcccccttcgccatccctggaacttgcagaagttgccccacgccccac

SEQ ID NO: 168920 - DNA, 122 bp, Homo sapiens
cgcggggctggcggcccggaggcaggctcgggaggtccgggcctggggactgggcgggcacgctgcgccgcggaacgctcgggtcgggcgggcgggcgggcagcccgggcgcctttgggggc

SEQ ID NO: 168921 - DNA, 122 bp, Homo sapiens
gtaactgacctggcgtccctgcccttgcctggcggcggtggggctagaggccgggggccgcgggtcgtagctataagcagcttcccgcgcagcctcctgcggacttggacttggcccgggtc

SEQ ID NO: 168922 - DNA, 122 bp, Homo sapiens
tatttcaaagctctggaggcgggggcggggcaaggctggtttccatcaccttcctgttggcggccaaaggtcggcgtgcacggacagcggccagtatgctgcacggaggagatgtgggcctg

SEQ ID NO: 168923 - DNA, 122 bp, Homo sapiens
taactgcccggctcccggcccgtttgaggtgtgtctttggagaaggatacccattgcatccgttttgatccgttaaggagtttccagagcccggacagctctttgctatacttcagtaaagc

SEQ ID NO: 168924 - DNA, 122 bp, Homo sapiens
gcatggggggaaggccttggtgcagacagaggcgagaggcagggagcagggctgggactgcggctgcagggtggaaacaggtagagacgctaaagtccaggttccaaagaaccagaaagaag

SEQ ID NO: 168925 - DNA, 122 bp, Homo sapiens
ggaaccgtggaagggggcaaaatccacccactggaggggaggcaggagggtgcgggggggcgtgtgggccgtctacctaggtccagcagccaggctgctgaggagtacccccgccaaaggct

SEQ ID NO: 168926 - DNA, 122 bp, Homo sapiens
taggattgttgaaattgtagtcgtcattgataattatctgtacattcgttatgaaaggaacgactcaaagttgctggaggatctatatgttattgttaatatagtggattccattttggatg

SEQ ID NO: 168927 - DNA, 122 bp, Homo sapiens
gcttgtgtctgtgctggggaccaccaccatgcgtgtggacattcctgccctgggcgtgagcgtcaccttcaatggccaagtcttccaggcccggctgccctacagcctcttccacaacaaca

SEQ ID NO: 168928 - DNA, 122 bp, Homo sapiens
aaggcaggaccgaaccgctccttctttaaatatataaatttcagcccaggtcagcctcggcggcccccctcaccgcgctcccggcgcccctcccgtcagttcgccagctgccagccccggga

SEQ ID NO: 168929 - DNA, 122 bp, Homo sapiens
cctggagggtgaggaggagctgaccatgtatgggcagcggggattgttctaggcggagaccgctgtagcgaggacctatcccctgtgacacacgagtggcccttcaggatgccatgctgggc

SEQ ID NO: 168930 - DNA, 122 bp, Homo sapiens
ggccatggaccaccataagaaccccacgcgcactctggacgtggccctgctgatgggtgccgccctgggtcagtacgccatctcttactactccatcgtggctgtggtggcgggcacacccc

SEQ ID NO: 168931 - DNA, 122 bp, Homo sapiens
tgtaaatgttgaaccttttcggcctggtttgttggcaaaggccctggcctatggtgacatcgagagactcatcctaatgtaggggttggtggacctgctccagcagctgctgctgcatcaac

SEQ ID NO: 168932 - DNA, 122 bp, Homo sapiens
ggcctggctggaggcgcatcaaagccctcctttgtgtgctcctgctctggagttcctgctcggccatgtggaagcccggctgtggggctgggatctgggccagtcccattccctcttttctc

SEQ ID NO: 168933 - DNA, 122 bp, Homo sapiens
cagagtgagactgtgtcccccaaaaacacataaattaataaaattaaactaaataagagacggggttttttttttggttttttttttgagacagagcctcactctgtcacccaggctggagt

SEQ ID NO: 168934 - DNA, 122 bp, Homo sapiens
ggacacataatggaactgtcattctgaaaggttataaagaccagaaatctataaagtggacgaccataagaaacagttccatccttatgtaacacagtttggaaaaacctcagttactttag

SEQ ID NO: 168935 - DNA, 122 bp, Homo sapiens
ccagctaatttttgtatcttaagtagagatggggtttcaccacgttagccaggctggtctcgatggtggtctcttaccaggcaaaaaaggaggggcagtgtcaggcagttggttgataacag

SEQ ID NO: 168936 - DNA, 122 bp, Homo sapiens
aatcccttcctttctcaagagaatccctgaacaaaaacgaaagtttctgtaaggtgtcaccgctcttcaaaggtgtcaggaccctgtcttctctaaaggttttactgtgttaaaaagcagct

SEQ ID NO: 168937 - DNA, 122 bp, Homo sapiens
gttgaaaggtttttccctctagctagtgaaagataaacttggaaatgcaggtttctccagcggttggtggtggggacaggggtcgcctagggaacttgcaggggccgcggcctctgttgtgc

SEQ ID NO: 168938 - DNA, 122 bp, Homo sapiens
acagggccattataatgttgctggtgttgtacaacttcatcagaaggtatgaatatgacccgcagaaaaaacaatccacgaagaaaacacaatgaaaaaacaaccactgttttacaaatcac

SEQ ID NO: 168939 - DNA, 122 bp, Homo sapiens
actcatccctcggatctctgcctctgccgtccgtggccttctcgctgtgtgtgttcacatcgtctccctccgcctgtgctgtctctgggtctcttctcctcttgtaagggtagcattcaggg

SEQ ID NO: 168940 - DNA, 122 bp, Homo sapiens
gcatacttgatctctctgtgctagggattttatatctaatgatcagaaaaacttggaacacgatagactaatgttttccaaaatttttagaacagtttcttggcctcgtgtatggtgaggaa

SEQ ID NO: 168941 - DNA, 122 bp, Homo sapiens
tcgttctcccaagagtgcacacccaaggtaggggatcggtccaggtctgtctcaagaactcggggtaggagcattgatgaagtcacctctgcaactcaaagcagagcaccaagtagccttgg

SEQ ID NO: 168942 - DNA, 122 bp, Homo sapiens
cactgtctactctgatagcccgaaggaaacagggaccttaatcctacaattgccagaaaccgaattctgccaacaaactctacataagcttgggggagaaccccaatcttaagatgaggata

SEQ ID NO: 168943 - DNA, 122 bp, Homo sapiens
tcctcaaagcctggctcccacggaaaatatgctcagtgcagccgcgtgcatgaatgaaaacgccgccgggcgcttctagtcggacaaaatgcagccgagaactccgctcgttctgtgcgttc

SEQ ID NO: 168944 - DNA, 122 bp, Homo sapiens
aaagttggtggcttaaaacaaaggaaatttattccctcacggttttggaggatagaagtccgaattctgcaggtgtcagcagggtcacacttgaaggctattggagggaatccttccttgcc

SEQ ID NO: 168945 - DNA, 122 bp, Homo sapiens
atcccggccgccgcctccctctcccgggatcaactgagccctggagaactggggggcccgcgcgcaaacccagtgaccttcaaggcccggagccgcctcctcgccccgcaggacgccgcgcc

SEQ ID NO: 168946 - DNA, 122 bp, Homo sapiens
agcacagtgctaatctatccacaaaacataccacctcccaaagtattattattggaaaatcgaggaagtgacgcacatttagggaaaaactactcaccttagaaaagtcactgaaatccttt

SEQ ID NO: 168947 - DNA, 122 bp, Homo sapiens
aaatagccctggccaggcatgaccgcggcattgccgtggcgacgggggagcggctgctgccgggtgccctggggcccaccccccacagacacccagcagcgtcccaggcgggccccgggagg

SEQ ID NO: 168948 - DNA, 122 bp, Homo sapiens
agtgttttagaaagcaggcagaagccaagacgtcaggaagggttgcgagggcccgggatccggcggccacagggatgggaggggcgaggagcgaggggcggagtggcacctcccacaacgcg

SEQ ID NO: 168949 - DNA, 122 bp, Homo sapiens
agaagccgaggctgcgagaggcagcgagatgggcctcgcagaggctgcgggggccgaccccgtccgcgcccctccccccaggggcccagagatgctaacccctggattcgtggccgcccctc

SEQ ID NO: 168950 - DNA, 122 bp, Homo sapiens
tgcatcgcctccacacagcaccctgccatgtctctgcctcacaggccacggacccagacacgggcgcgtggggccaaattacctacagcctgctcccaggaaatgggtaagggctcagggtg

SEQ ID NO: 168951 - DNA, 122 bp, Homo sapiens
gggaactgttggccagagcctccaggtatgcccagaatggaccattctccccagggtccacggaatcgcacaagtcacttaggttctcccggatccctgcagagtcggtggtgggtacagca

SEQ ID NO: 168952 - DNA, 122 bp, Homo sapiens
ccaacggtccctctttgcctgaaactattataggattagcagcaaaagtccgctgtgtcccgggaagtccctccctgaggcttcagaagtcccagtttccctggatgagtgggaaaaatttg

SEQ ID NO: 168953 - DNA, 122 bp, Homo sapiens
gggccaccccaagttggaggagctgggacccccagcacgtggcggtcttccttcccttggcgtctgccactccttacccgacatgccagagaggctgcggcctcttgccgtcctcgcctgcg

SEQ ID NO: 168954 - DNA, 122 bp, Homo sapiens
agctgtagaagaaaagattgaatggctggaaagccaccaagctgctgacattgaagacttcgaagctaacaagaaggaactggaagaaattgttcagccacttatcagcaaactctatggaa

SEQ ID NO: 168955 - DNA, 122 bp, Homo sapiens
gctgcactgaaaacaaactgggcatgtcctaattttgctcagggctacttctcttagagtcgttaaggttttgagcatattaacagcaatactgatcatagctaatatgcctctatgtcagg

SEQ ID NO: 168956 - DNA, 122 bp, Homo sapiens
tctccttcctcttctggcagcgagtgcgacctcttttatcctagcaggccaccaccttcgcggcaacaaacatcatttcctatgcagttgcaaagcatgctcccttgcaatcagcgatcaat

SEQ ID NO: 168957 - DNA, 122 bp, Homo sapiens
tgccctagtcacgatcaccccatttctttgcctcctggcttcctatatgcacatcacctgcgttgtcctgagggtcccatccacaaagggaagatggaaagccttctccacctgtggctccc

SEQ ID NO: 168958 - DNA, 122 bp, Homo sapiens
gggggagagaaatgtcctaaatatggaaaaggctgactctttgatgagttgctggagagtcgttgacagttggctgggtttaccaccttcacgaccacgaaatctgaactagtctgatttgg

SEQ ID NO: 168959 - DNA, 122 bp, Homo sapiens
ggtcatttgttacaaaagatatggaaaatcaacgcaccagtaactggagaaaattgatcacgactgaaaggcagtgggcaaaacgtactgttgtaggtcagcccagaccagaaactgtaagt

SEQ ID NO: 168960 - DNA, 122 bp, Homo sapiens
gtcgggtcgggggtccagcaaagccccatccagtcgagcctgggcaagctgagaggctgtcgggtgcgctccagttacgctcccctgcgtcgtggaaaacctagagagccctacagcgtcag

SEQ ID NO: 168961 - DNA, 122 bp, Homo sapiens
cgtgatctcggctcgctacaacctccacttcccagccgcctgccttggccccccaaagtgcggagattgcagcctctgcccggcctccaccccgtctgggaagtgaggagcgtctctgcctg

SEQ ID NO: 168962 - DNA, 122 bp, Homo sapiens
gcggccatcggtctctgggggggcacaggaggctgctggggggttttcccagaggggggccggtctgtggaaacacaaggttattaaagtgaaaggggagtatcggccaagctcaggggtct

SEQ ID NO: 168963 - DNA, 122 bp, Homo sapiens
ggccgaaaaaaaaaaaccccaaaagctgtaatgtatagagaccacatacctgactgggggcgcaatctggggtgtctttgtcgcttcatgtgctctgctttgtcagctggagtgagccgtgt

SEQ ID NO: 168964 - DNA, 122 bp, Homo sapiens
ccgccggccccgccatggagctccgggcccgaggctggtggctgctatgtgcggccgcagcgctggtcgcctgcgcccgcggggacccggccagcaagagccggagctgcggcgaggtccgc

SEQ ID NO: 168965 - DNA, 122 bp, Homo sapiens
ggcagctcgggcctgggccgggccacggccccccgccccaagaccccgcagggcaggaggcggagacagagctggtcctggcaaagccaccaaggccaagaggatgtcctgggggcggataa

SEQ ID NO: 168966 - DNA, 122 bp, Homo sapiens
ccactccttcgtccaacgtcagtttcctcaactgtgtattgggaggttgaggtgggtgtgcgggacgtgagttggtcctttgaagaagaaaactgcagtttagggcaagagatcataacatc

SEQ ID NO: 168967 - DNA, 122 bp, Homo sapiens
cccattggtcagtcccgggggtgggcgggcggcacagacggctgagccggggcaaggactcgcgggaatcgcgccgcccgggtcgctgccggagctcgccggtcgcccctgcgctgcgcgga

SEQ ID NO: 168968 - DNA, 122 bp, Homo sapiens
aggccggctgaacttggacgcggcccctcccagctccccccacagcccagctgttccctccgcggattctccggggctggttcatcacctccgaatattcctgtgacaggagacgcttgcaa

SEQ ID NO: 168969 - DNA, 122 bp, Homo sapiens
agcaacatgccgaaaccccgtctctactaaatacaaaaaatagctgagcgtggtggcgcacgcctatagtcctagctactggggaggctgaggtgggaggatcgcttgagcccaagaagtcg

SEQ ID NO: 168970 - DNA, 122 bp, Homo sapiens
ctttttgttaaggagcctattttagtcccttttgtgctgctgtaacagaataccagagaccgggtaattgataattacagggatgagccaccatgtctggcctgatatacctcttactgaag

SEQ ID NO: 168971 - DNA, 122 bp, Homo sapiens
ttcatggatgagaatgagatgcatacaccttgctccgtttacttcacaggatggtagtgacgatgtgagacaatggatgtgaagctgcttcccagagtaaaaatgtgttcttatcatcctgt

SEQ ID NO: 168972 - DNA, 122 bp, Homo sapiens
gattagcccgcccctggggctcctgcctcctctgtctaggctgcaaagaatcaggcagttcgtcactagcccgagaaatactggcccctacaccctcccctgctcccataggctatgagtct

SEQ ID NO: 168973 - DNA, 122 bp, Homo sapiens
cctgcgcgcccactgcgtaggccaggcccgggacgggaaggcggatcggggacacggacgcgactccgcaagcccacccccgctcccagcgcctcggaaccggccaagggagtggggcccgc

SEQ ID NO: 168974 - DNA, 122 bp, Homo sapiens
gtctctcgtcctaaaacgtcctaaaatgctcctttctggaaggatggcatggtctctgcacgagagagaacgaaggcttcactcaaacctgagaggtggtttgtggcacgggccaaccccct

SEQ ID NO: 168975 - DNA, 122 bp, Homo sapiens
aatcatactaaggcatagatgaaccttgaggacactgtgtgcgatgaaataatccagacacgccaggcgcggtggctcgtgcctgtaatcacagacagcactttcggaggctgaggcaggca

SEQ ID NO: 168976 - DNA, 122 bp, Homo sapiens
gtgtctgtagagccgacagagtcccagatcagtgcagtccagagctgcctatccccgggtcgcggttccctgcggggtcgagcctgcgccgggctgcagctctctgtcccactgcgcggcgg

SEQ ID NO: 168977 - DNA, 122 bp, Homo sapiens
tatcagaggtggcggtgtctccggctccaaggtttacaggcttgcaggctacacacggtgcgtgaggcacccccaaagctccgatccgcatcagacttagcccagccgaagcccccaaattt

SEQ ID NO: 168978 - DNA, 122 bp, Homo sapiens
gattctggggaggaagaggtggtaggagctgagctgagatcggaggaggctggaaccccacgccgtgctaacacacgggctccaggagacttgcaggtgatccccggagaagagggttaagg

SEQ ID NO: 168979 - DNA, 122 bp, Homo sapiens
ggggcaggagcactgattcctggacagtcactcaaaagctgcgcccaaagttttaaaaagcgcggggacggtggagagggaggcgaagagcccgcgctgctgggctgggctcgggtgccgcg

SEQ ID NO: 168980 - DNA, 122 bp, Homo sapiens
ccagccagggggcaagcgtgtaggttaggggatcaatcataaagatttggctcaagcagccgggagccatgggggcacctgaaggcactgtttaaggaggtgtgggtgaacaaggacagtgc

SEQ ID NO: 168981 - DNA, 122 bp, Homo sapiens
gttatcgtttatgtcattaagtaactttttcctatataatatttgtttgacttcctaccacgagattcacatgggtactgtgttattcctgaagagataaagtaattctgaatgctaagaat

SEQ ID NO: 168982 - DNA, 122 bp, Homo sapiens
gaagtgttagttttctagcagtagcttgcagggcatagagttctatcttctttccttctccgtacctacctgctttccctacccctccaccaagtgagagcagggacctaggtcatcttgct

SEQ ID NO: 168983 - DNA, 122 bp, Homo sapiens
gtccccctcccgaggagcgccccagaccccctggggccggcgtggggactgcgtatgggacgcggtggccggcgggcgcccgtcgggacccagggactggccgggacccgaggggagggacg

SEQ ID NO: 168984 - DNA, 122 bp, Homo sapiens
aaaaattggaaggtgggacctccttcagtttatctgttctgtataccaccccccacctctcgcttacccgtcatacctatagcactaagcacagtgcctcgcacaacagctcagagaatgtt

SEQ ID NO: 168985 - DNA, 122 bp, Homo sapiens
cccacttcagtctctggcacataggaatacaacattaaactttttttaaaaccccaaaaacggggccgggcatggtggctcacacctgtaatcccagcactttgggtggccaaggtgggtgg

SEQ ID NO: 168986 - DNA, 122 bp, Homo sapiens
tacagagccagtggctgagttttgtaaatcaggtgtgttcattgagcgaactttccacttcggaatattcagcatctgaggaggttcagtttgattttgtctatcgctggcggggcgcgggc

SEQ ID NO: 168987 - DNA, 122 bp, Homo sapiens
catgcacacacacatatgcacaccctcgcgcacacagacactcccgcgcgcgctcacgcccgcacacactcagggttataacaaaggaagaggggccagcgctgccttacttttgtctctct

SEQ ID NO: 168988 - DNA, 122 bp, Homo sapiens
aggggaccaggcgccgggtgaaggtggcagtgaaggtgtagatgagttcctgtgactctgcgttggtgaaagtcacggtgcccccttcataatccagggcgatgcccactctccggggccgc

SEQ ID NO: 168989 - DNA, 122 bp, Homo sapiens
cccatggggagaggcttggggatgggctatgcagcaaatgatgaggggaagggcactctacgtgagccctggagacggccaagctaggccccaaggagagcaagaggcaaatggggtgaggc

SEQ ID NO: 168990 - DNA, 122 bp, Homo sapiens
ggcgtggcctcggctcggcgcacagtcagccacggtcccatcctgctccgcgccggtcaacgagagcaaacccagtgactcacctccgccgtgctaactcctcgctagctctccctctcaca

SEQ ID NO: 168991 - DNA, 122 bp, Homo sapiens
ggacaaaggagggagctgggtcctgcttcctcctggtcttgtcgatgaggatttttagaccgtggagactgcgctgccctgccctgcacctaccctcactctccgtgttctcactaaggtgg

SEQ ID NO: 168992 - DNA, 122 bp, Homo sapiens
tcccagagcttcgtaaccccttgactcctgtcatgggaatggatattgcagttaacaaggcggccgcggggtggggagtgagggagtctgaccgcaaagcttagatctggggtgctcaacgg

SEQ ID NO: 168993 - DNA, 122 bp, Homo sapiens
tcacaaggccctgccaagctaaaacagcaaagaatggattttgcttacaattagtttgttcgctgcctctttaatcttgtctactttggcttctgagagtcctttgacattgcatagagctc

SEQ ID NO: 168994 - DNA, 122 bp, Homo sapiens
ataaaataaaactgttaaatcactaaatttgtggtcatttttgacagcagcaacaggaaacgcctaaggactcttgttttccttcctcccagcctcactgaccctcataggcgcccaagtat

SEQ ID NO: 168995 - DNA, 122 bp, Homo sapiens
cttcggacgccccggcaccggcccccgttgctttgtagcattctgcagctgggctgcaggcgccgtgggcctccgccagttgtgttcgagacgcggttcggccacagaagttttagcttgtg

SEQ ID NO: 168996 - DNA, 122 bp, Homo sapiens
cctccccggagaccgaccagcctgccctaggtgggaccctgtccccgccgtcccggcctgcgccagcacagcccccaggacccaggcacacacaagcccgtggctggccacgctcccagcag

SEQ ID NO: 168997 - DNA, 122 bp, Homo sapiens
aacgttgttctatggtgtgtgcgtgtttttaatgttaaaatcagtggttagattaaaaaacgttatcagatttgaaagtggtgaggagtacaaagattaaccctgcacattccacatttgaa

SEQ ID NO: 168998 - DNA, 122 bp, Homo sapiens
ccaagcttggtgggagtcaaggtgagtgcaaagcactacagcgctggggtcccactaactcgaggtcaccgctgtcagtgggaggggtcctcatgagtctggactcgctttcatccgctttg

SEQ ID NO: 168999 - DNA, 122 bp, Homo sapiens
gcatcttcaccggccgaggagacgcccctggaccacctgcgtgggcaggatccaggcaggcgacagggctcagggctgcagccaagtcccccagaaacagtccccctgggacggtggcttca

SEQ ID NO: 169000 - DNA, 122 bp, Homo sapiens
gcgaggagtagtggaaaatgctgagtcctggagctggccggaacggccttcgcctttccacgcccaaagccagccgctctgcccacctgcagctgcaatagcaagcagggccgcagcaggca

SEQ ID NO: 169001 - DNA, 122 bp, Homo sapiens
gccaccctggcgtttttctgagcgcccccaggcaggttttagcaccgagcattctagtgccgggccaggctggcggccaagagctaggcctgcttgtttttcctgcgtcgggcccaccaggc

SEQ ID NO: 169002 - DNA, 122 bp, Homo sapiens
ttgattccttcttcctgcgtgttttctgtccaaatccttttctgatttggacagaaaacacgcaggtggcacacagtaagcgcttaataaattttccggctacctgatcttcttggaattga

SEQ ID NO: 169003 - DNA, 122 bp, Homo sapiens
gtaaaaatgaggaatttatcattaagtgctataaaataatgctgtcgcccttggttttttcgaggatataggagaaattacttggcaaatcctttcaacatagggcatactgcccttattat

SEQ ID NO: 169004 - DNA, 122 bp, Homo sapiens
ccttcatctgttcttgttcttggtgtatgaggcatgtcagaccccccgccccccgggctccgagtctcagtcacccgtccattattggggagggaggagtggcctgcactgtcctctgcccc

SEQ ID NO: 169005 - DNA, 122 bp, Homo sapiens
cgcatttgagagcaagggcctacttggccgggactgaagcttgcgagttgagctccagttcggccggcagttccatcccgcttcaggaacaggaatccaagggcccacgctctgtctgccaa

SEQ ID NO: 169006 - DNA, 122 bp, Homo sapiens
tggagcgtctagttgggctgctgctttccttttctgcccctgccatgacagtggtggccgcgccgggcagtggggaagggaaggatgtttcaataagcgatgtgcagacagctggatcccct

SEQ ID NO: 169007 - DNA, 122 bp, Homo sapiens
atttattcaactgacatttgaatcactttccctgtacctaactatcccaccatgggctgtcgttactaatctgaatttaaagaggtccctggtgtcaaggagagcctggctgattgtgagag

SEQ ID NO: 169008 - DNA, 122 bp, Homo sapiens
caaaagccagccaaatacaaagcttcagacttcactaaaggtccacagtgaatgctgaaacgtccaagctcaggaccggctataaactcggcagtactacattaaccatgtgcaaaccaaac

SEQ ID NO: 169009 - DNA, 122 bp, Homo sapiens
acgggagaccccccgcccaaggagttagcttctgtgggtttacctggggttacaggaaggcgtccccgctgtcagacaacattaatttcatgcagggcaggaacatggaagcaacatttgct

SEQ ID NO: 169010 - DNA, 122 bp, Homo sapiens
ctgaggagccgcagggaacccccggcctagccgcgcccgcgtgtggccggagctgcgggccgggactgtgtccaggacagagccacaagcttgtccccagctcagggaggtccaggggcggc

SEQ ID NO: 169011 - DNA, 122 bp, Homo sapiens
ggatagagatcatgcggcattaagtattgcacgtggtccttttattctctgcagcaaaaacgattcctacttgctgacgcggaaagctcaggtctggagagccgttatctatagatgcgagc

SEQ ID NO: 169012 - DNA, 122 bp, Homo sapiens
acagccaagggggccccgagccagccggagtgctgggctggggcttccggctgcactaggcgcgctgctctggtagcaccaggtgtgtacccggcccggcgaggagagacccttccgtccga

SEQ ID NO: 169013 - DNA, 122 bp, Homo sapiens
gcgcacctgagctgtcttttatcccggtcagtgtcaggcgcggggtgagcgggatactggcgaccagcggatcctccgctcagcaaagtggccggtgcggggcatgcgggcaccgtcttcat

SEQ ID NO: 169014 - DNA, 122 bp, Homo sapiens
tgaactcctgaccttaagtgatctgcccacctcaggctcccaaagtgctgggattataggcgtgagccaccacgcccggcagagtttgcatttctaacatgctctccaggtactttttttgc

SEQ ID NO: 169015 - DNA, 122 bp, Homo sapiens
gcctggcgtgcagctgccctggttgtggccctggaatcctcgccgggaggaagaaggcggcgggcacgagtaggagagcctctccagctacggaggaagagggttaaacctggagaagggga

SEQ ID NO: 169016 - DNA, 122 bp, Homo sapiens
agacggtacttaaggttaacctattttgcactgtgcttgatgatataaaatggaggctttcgagagagcaaatctttgctcgaggcgatgaacccacagatcactcatcaaacaagggaaat

SEQ ID NO: 169017 - DNA, 122 bp, Homo sapiens
tgtgaattacttcattactgagatccttccttgttttctttttggaactcttacttgccacgtgctgggatccaataagctcaaagaatttcacacacaaaaacataaggacaaatacatca

SEQ ID NO: 169018 - DNA, 122 bp, Homo sapiens
gggcagagctgtgctccctctggacgccttttccctcttccagcatctgttggctgctggcgccccttggcacgtggtgcatcgctccagtctgggctctgtcttcctggcatgctctcctg

SEQ ID NO: 169019 - DNA, 122 bp, Homo sapiens
gagatagccaatactaaaattcatctgtaaagtgatcatactatgaatttagctccttctcgggttgtgacttgaagagtttatgattcagtgtttcccagttgtgatatactgaccattaa

SEQ ID NO: 169020 - DNA, 122 bp, Homo sapiens
tggtccggttatctgacccggggcctgccagcgccagacaatagtcggagtcaaattattcgccatggagacgctgtcagtcactggtaacccgagcctcggcgggccgggcggctcccccc

SEQ ID NO: 169021 - DNA, 122 bp, Homo sapiens
gggctggaataaagtcggagctgtttacccccactctaataggggttcaatataaaaagccggcagagagctgtccaagtcagacgcgcctctgcatctgcgccaggcgaacgggtcctgcg

SEQ ID NO: 169022 - DNA, 122 bp, Homo sapiens
tcccgccctctgtggggttggtggtccttgagggacacgtttgctttgaagtgtcagcagcgcacctctggtctgctctttgtaggggaaatgcgggggtacctgcctttcctgggaagggg

SEQ ID NO: 169023 - DNA, 122 bp, Homo sapiens
gtgccccagcgagacccttcccgcctcactacattgtaaccccatttctgatccccctttcggatccataatcagatcagaagaggagtccggagagcccagcggcaccctgaagctcctcc

SEQ ID NO: 169024 - DNA, 122 bp, Homo sapiens
ttacctatgtttctatctggcttacaagtttaggggagggtcaactcttcaatctccccacgccccctttgagttgatccccagatggggctgcctactccatgataccgatagtccccgca

SEQ ID NO: 169025 - DNA, 122 bp, Homo sapiens
catcatttgaaacatagaggctgcagctttcagagacatttctgaagcaagcatcttcgacgcctatgtgctttctaagtgtgaagctacatcactgtgtgaattgtgccatccacagcaag

SEQ ID NO: 169026 - DNA, 122 bp, Homo sapiens
aattaccctatccatacagcatatgcttagcagagaccctgttgtaaacatctccaccaccgctgatcaggaggttaaaaatcagtctgggatccctcaaaaagctgaatttttatagactg

SEQ ID NO: 169027 - DNA, 122 bp, Homo sapiens
gtgaaatcattgtttcatcaagaagtgtctgtattttatgaggtaaactaagattattcccgatttgattcacaggtattctaatttcatcattagatgcaaaaggacaagtgaggtacaag

SEQ ID NO: 169028 - DNA, 122 bp, Homo sapiens
cagaatgtgcaggcctgtgctgtgatgagcgctgctccagctgctccgtgccccgcactccgggtcggttgcataatggaggtgtcttgcattgactgcccacctaccctgctgtcagctca

SEQ ID NO: 169029 - DNA, 122 bp, Homo sapiens
gccttctgccccacagtgaccgacctggagatcaagtttcagtaccgggggcggccaccccgggccctcaccatcagcaacccccatggctgccggctcttctacagccagctggaggccac

SEQ ID NO: 169030 - DNA, 122 bp, Homo sapiens
tttctatgcatatagagctgacttcaacagcacataggccagtatgtatagaattattcacgtgtcctgatgattgatagccagcctatctacctgtctttcttgcagatgtgttttataga

SEQ ID NO: 169031 - DNA, 122 bp, Homo sapiens
ctaagtgataagtttatatacataaacattaacttttgccttccatatagtaaactaaaacgtgtatgcggtttcacaaataccaatacatttataccacgaagaccatgtaagagtcatct

SEQ ID NO: 169032 - DNA, 122 bp, Homo sapiens
ccatgcagagctttcgttccaggccctctttggtgcagcactcagcagtgcctgggtgaacggggaatggagaattactttcacaggacttggcagacagtgctgaggtctggaggagaagg

SEQ ID NO: 169033 - DNA, 122 bp, Homo sapiens
gtatgggcaaaaggcgacccgtctactgcagcaagcagaatgctcagctcaaggggaagccgttcgaaggaaaatggttcccaaatgccaatggtctccccacgccctggatgtggggaccc

SEQ ID NO: 169034 - DNA, 122 bp, Homo sapiens
tctgaaactaccttcagcaggagagcacgggccccagagagaccccgaggttcagagccccgacactgaaggcagggacagcgttgttgatctgagcctacaacaggccgagaaacagatct

SEQ ID NO: 169035 - DNA, 122 bp, Homo sapiens
ccggtctgagaagtgaggagcccctccgcccggcagccgccccctccgggaagtgaggagcgtctccgcccagcagccaccccatccgggaggtggggggcagcccccgcccggccagccgc

SEQ ID NO: 169036 - DNA, 122 bp, Homo sapiens
tcaattcaaagaaaattaattatctacagaaccaaaaggttcaaaagcacttaagttcaacgtaacgttattactcaacatagccttttaatgtaattcaggttgtaactccaacctctaga

SEQ ID NO: 169037 - DNA, 122 bp, Homo sapiens
ttacccctcaacaaatatattagggaggaaactgaggagaagaagccagtgtcccgcaagcggcttcgggattaacactgcatttgttctgagagagaaacttgaagaggaaaagcaaatga

SEQ ID NO: 169038 - DNA, 122 bp, Homo sapiens
attgattgctcgatgatataaaatgttaagtaccatgaatgatgctgttaggctggaatgcgccaagcataaaggtggggcatggcatcaaaaggtaggtcaacatattaaataattccatg

SEQ ID NO: 169039 - DNA, 122 bp, Homo sapiens
taccagagctgctgccccgactctttctagcttcaacctgtctcccttgggtctacaggtcggctgccgggaaaaaggggatttgaaggaatgggaatggggacccggccgctctggcaaag

SEQ ID NO: 169040 - DNA, 122 bp, Homo sapiens
gcgcggggcgggccgtacctgggaaggagcagagggaagtagagttggggcacagggtcccgttgcccacccgcggcacaaccttcaggctcaggatctgctgcaggagcccggccgacccg

SEQ ID NO: 169041 - DNA, 122 bp, Homo sapiens
gggccagcacagggctgccgcttcagcctccacaggatgcgatcggtccatgcaggcttgcgttttttctcactgcaggggcagggggcataaagaggaagaatggggaaagaagaaagggt

SEQ ID NO: 169042 - DNA, 122 bp, Homo sapiens
aataataaaaatagccgccgttcgggagcgcgggctgggcgccaggcccggtgccgagcgcggtacgagctcggcccccagagccggccctcgccacaggatccccattttccagagcggga

SEQ ID NO: 169043 - DNA, 122 bp, Homo sapiens
ttcccctgccacccttggcctgtgatgctctgctcaaagatctcagcacaggctgtccttcgcttccttcaggtatccactcaaatacccaaaagagcagctccgcccaacactctctagcc

SEQ ID NO: 169044 - DNA, 122 bp, Homo sapiens
tgcagaaaccaaaaaaataaaacccggagctcaccatcttttcttggccaagtctccaatcgtaaaaacaatacacaggcagtttcaatacatgaagatttgcacggaagaagtgtgtggcc

SEQ ID NO: 169045 - DNA, 122 bp, Homo sapiens
gggaggatgaggaggccgaggaggtgttgaggatgttcctcggggcctccgtgtccccgccgcactcccactggagatgggagggtgaatatattcggtgcacggtgggtccatgatagccg

SEQ ID NO: 169046 - DNA, 122 bp, Homo sapiens
ctcctgggacctgggttccgcgctggagggcagcgggggcgcgggcggggcctggcaggacgtggccggactctctccctcgcctccccggggtgcaaaccccgcgcacatcagctggagca

SEQ ID NO: 169047 - DNA, 122 bp, Homo sapiens
tcgagtgctaaacttctgggaagcctgacacagccagggtatgacacaccttctgggccacggggagctgctgcttgggatggaaggggcccagcagtgcgggggagtctggctgcccctca

SEQ ID NO: 169048 - DNA, 122 bp, Homo sapiens
aattaatttcaaaatcatacatgccaatttttatgacaacctactgtgtacctcttgtttcgtaggttgtgaagtgcaaggcaacaattgttcaactcctggcctcactagaaaatagctat

SEQ ID NO: 169049 - DNA, 122 bp, Homo sapiens
acgaggggagaatgagggcaggggcggggaggggggacaggtgtcggcaagatgttcctccgggacgacttacagggaaagttgtatggaatgagttttccaataacgtaggagtgcagcca

SEQ ID NO: 169050 - DNA, 122 bp, Homo sapiens
tagacattctgccctacatggaagagcaattgggggaatggaacttcatcctttgagccacgcctgcctgaaattccagggagcatgggaaatgccggttgcctacccctctcaaaatgaaa

SEQ ID NO: 169051 - DNA, 122 bp, Homo sapiens
caaaaacagaacttgtcccactttccatgtccttcattccagaaatagccaggtgccctccgtgggttgtggggagcactgtgggctgctgtgttttgattttccccagaagtgatcagaga

SEQ ID NO: 169052 - DNA, 122 bp, Homo sapiens
ccacagaaccttactcacaaaacaacaagaacagccagagagccacagtgtgcagacctccgtgtcagagtgagatccatccccagtccagctcacctggcctgacacctgctgcctctctc

SEQ ID NO: 169053 - DNA, 122 bp, Homo sapiens
aaaacttgagcgagatctctgaggacacagtcaccttccctgaagccagcaggagcctcgcggtggctgagacaccagctccagggatccctgggccatgtgtccccaccatctgcggtggg

SEQ ID NO: 169054 - DNA, 122 bp, Homo sapiens
cacccacacgcccaccctgcgcttgcctgtgattcccagggagatgcagtgtctggcacccgttttgaagagggggcgggtgggcctcccttttttttttttttttgtcccatacacacttt

SEQ ID NO: 169055 - DNA, 122 bp, Homo sapiens
taattcaatccagcagccagagcaagctgagtccccagaggacactaatgagcaagtgaccggtggccggcctgctcccaccctggggacgcactctgagccaggtctgggcccagcactgc

SEQ ID NO: 169056 - DNA, 122 bp, Homo sapiens
aaaacaaagcactcctatcaaactggttggttaatgatacccagcacagcaaacacccagcggattggcagaacgtgagccaggttggcttctaacagacccagcttaagacgcccagaatc

SEQ ID NO: 169057 - DNA, 122 bp, Homo sapiens
gttcaagctcttaactcctatattgtactaacagaccactcaacattaagcccacaaaaacgttatgaccctaaatgcaaagaaagttgcttcagcacatgaacacacctatgggtgtctac

SEQ ID NO: 169058 - DNA, 122 bp, Homo sapiens
agctgatgtcacaagtctatccacaggggaccaagatgtttgcctttgctgtagcttagtcgatttctgctgattcaacattttccctgtcctctattcctccagttatttataagaccctg

SEQ ID NO: 169059 - DNA, 122 bp, Homo sapiens
cgggtcacacacggtgtgaaaagggggcagatacagcaccagggcagacaatcgccccaacgggtggctcccccacatcccaggactctaggccccgtagacgcaagattcccctgctgcca

SEQ ID NO: 169060 - DNA, 122 bp, Homo sapiens
aaaatgctatgacacaggtgacgtgcgtgacgcaccatccagagtgctgctgctgctctgcggggctcctgtgacaccccgacctcccccggcccccggcactgggggcaggtcttgataga

SEQ ID NO: 169061 - DNA, 122 bp, Homo sapiens
aggtggtgttcaatgggaatcacaaaggctatggtagaagtgagtaatgagagctgggctcgagccctggtctgagttcagtgtggatgtttaaaggcgaccattcttaagaggcaagagaa

SEQ ID NO: 169062 - DNA, 122 bp, Homo sapiens
tgcccagggtgagcctgtgtcctagcacagcgagtcatgactgactaccttcccacacttcggctgtttctgtttcatggctgcaaaacccaacacttccagaatctggagcctcacataag

SEQ ID NO: 169063 - DNA, 122 bp, Homo sapiens
tgttgggcacttggctcctaagctgttgtttttatggtggactttcccatcagttacatgcggctctttttgcagtcactgcagccaaattggcttagtcactgggaccaacactctctgta

SEQ ID NO: 169064 - DNA, 122 bp, Homo sapiens
tagaggaggggaggagaccggcgcgggtgctggaggtcagcaggggccgtgggcggtggacgctggaatgccttgggttccgagggacccagctgcctgaatggacacgagtaggaggtttt

SEQ ID NO: 169065 - DNA, 122 bp, Homo sapiens
ttgcccctctcccattggctttcacctgccagagggtcggcttcaacaggcctcttggcccgtcaatcaggcccgccgtgctccgccccgcccctcccgggggtttataacgggaattccca

SEQ ID NO: 169066 - DNA, 122 bp, Homo sapiens
tcactgtcttagtgacttgcgggtgtgcggggttcactgtcttagtgacttgcgggtgtgcggggggttcactgtcttagtgacttgcgggtgtgcagggggttcacttagcagtgacttgc

SEQ ID NO: 169067 - DNA, 122 bp, Homo sapiens
agctccaagaacctggcaccgggagtaagccactgccggaggcggagcaaagcttgcccgcgcaccatagagaaccggaagtaaggaaggggcggccgaccggaagcgaggcgtagaggccg

SEQ ID NO: 169068 - DNA, 122 bp, Homo sapiens
agagatagcaccgggagctgccggggtccccgcctgtctcggactccggggcccagaacgcgagtggttcaacctcgggctcgtctagcccagtgcctgcgcatgccgccttcgtctcacgt

SEQ ID NO: 169069 - DNA, 122 bp, Homo sapiens
cctctgatgtcatgcggggcccgcggggctgcggggctggggggcgtgcgcccgcccacccgagcccgcacccgggcaggagagaacctcctcgccgtacccctgagagccccccggggggg

SEQ ID NO: 169070 - DNA, 122 bp, Homo sapiens
agaagcccccgccgccgtcgctcctcgggaaaggaagtcgcgggtgaacaaccgaatatgcgatgaaaagggcaaagtaagaaagcgcacagcggcccccgccccgtggagcgctcctttgg

SEQ ID NO: 169071 - DNA, 122 bp, Homo sapiens
cgctgccttgagggccggatgggagaactcggcgcggcctctgggagcactcggggagcacgtgtcttcccgccccgtgctcagtgagcccaacatctcccagcttctcttcaccaacagag

SEQ ID NO: 169072 - DNA, 122 bp, Homo sapiens
tctgcgcgtccagcggagcctgcgggcccggccccagagcctggtccacccggctccctgcgaaaatcacgtcctggagccgcagcttgacgtctgcgcgaaaactcgcagtgccccgggtc

SEQ ID NO: 169073 - DNA, 122 bp, Homo sapiens
tagggctgaaagtcaagggccacaccggtgtttgagatgagtcaggctgggagggttccacggcaggtggtatagaaagagagcagacaaggccgggcgcggtgtctcacgcctgtaatccc

SEQ ID NO: 169074 - DNA, 122 bp, Homo sapiens
tgcctcccgctcccttgccttttcctcttggccctcatcccgagcttctttccctctccgcggcctgggcccccagacctgccctgctcgcccggttcgtcccccgccaggttactgcctcc

SEQ ID NO: 169075 - DNA, 122 bp, Homo sapiens
ggacagtgatctctccagaagtggagatgacaccattcctcctctaacatggtccaatctcgtgcttgttctgctttacaggaaagttgactcatactggtgtccagtgaagaaacccaggc

SEQ ID NO: 169076 - DNA, 122 bp, Homo sapiens
tataattaattaaatggtaatataagttttaaggtatcactatcattattggcattaagacgtgaaagagttatacatcataagcagtgtggcaaagaaaaagacatggagagggaaacaaa

SEQ ID NO: 169077 - DNA, 122 bp, Homo sapiens
gtgagctgtcgcaggatgggctcggttacggccaggtgtgcaagcggacatgcgggtgggcgtgagggtgaacacacaggtggaagtgggctcaggctctgcctgcctccgtggcacctcaa

SEQ ID NO: 169078 - DNA, 122 bp, Homo sapiens
gcggggcttgggaaggaagtgagacctatttccgtcgcaaaagctgacgacttcggtctgcgccggaagtgcatgagctgccgatgtggtgcttagtgattgcggtttcggtcgctctcccg

SEQ ID NO: 169079 - DNA, 122 bp, Homo sapiens
ctaattaagccagtccatctaattacggggtgttccatcaaatatttctccagatgcttccgatgcagcctgcgggcgctggtcaaagctggcgaggcttgtgatcagggctgccggccctg

SEQ ID NO: 169080 - DNA, 122 bp, Homo sapiens
gcccgtccgcactgtcgtcgtccgcctctgcgcccagggcagccgccgccggcactgcgccgccctcccgccgctccttgtcgttcggcgtctgagagcttgaggccccagaaggccgcgca

SEQ ID NO: 169081 - DNA, 122 bp, Homo sapiens
cacctggccgcaagggacctcgttctcagggaagacggcgacattccgcggaggtggaaccgccgcgcgccgtccgggctcggaccttccccggaacgtgggggcgccttagcgactccttc

SEQ ID NO: 169082 - DNA, 122 bp, Homo sapiens
cgcttgtgggccagctggagttccgggtgggcatgcgcttggcaggccccgcactcggagcggccggctggccctgctggccccaggcaatgagggacttagcacccgggccagtggctgca

SEQ ID NO: 169083 - DNA, 122 bp, Homo sapiens
ccagcttccccaggactgggaaaatgggccaaacatgatggcacactctcccccctcccccggcccctctggccttcatcgtagaccttctgagctctcatggcaccaatgaggaaactgag

SEQ ID NO: 169084 - DNA, 122 bp, Homo sapiens
tgcggagggtgtgctgggtcccccggcagtgccggcccaccggagctgcgctcaatttctcgctgggtcttaactgccttcctgcagggcagggctcgggagctgcagcccgccatgcctaa

SEQ ID NO: 169085 - DNA, 122 bp, Homo sapiens
ctcggggctgtttggacatggcaccttcctccagcatctaggctgagttctgggtttccccgccccgttctgctctgcgtactcgtccctggcgttgccactctgtgaccttgcctgcgtgt

SEQ ID NO: 169086 - DNA, 122 bp, Homo sapiens
gagaaatttggtaaggccctgccctgccccccttccctttctagaatcaaggtagagaaacggggggaaaggtgactggggctctgcttagacagacacttaagctttgcagatgatggggc

SEQ ID NO: 169087 - DNA, 122 bp, Homo sapiens
ttagactcctctcctccccagatcaccactaatattcacaatgctagggcaatcatagaacgaaaataaaaattccagagaaagcatgtgtcctaagaggacaaacttacaaatacagttct

SEQ ID NO: 169088 - DNA, 122 bp, Homo sapiens
cggtaataatcaggaatgtcagtccaagctgaaggacaagtggcatagaaggaaccccaccggacagaccctacagggaaccctcacaggccagctggaagtgggcagaaaccctgtgggtc

SEQ ID NO: 169089 - DNA, 122 bp, Homo sapiens
ccatcttgtgttttcacctccccgtgtacgggtgctggctgacgatccgatcacatgagccgcgtgaaggctctgaatctccacggtgccatctccagtttctgggcatcgcgttcctctca

SEQ ID NO: 169090 - DNA, 122 bp, Homo sapiens
acctgacagcagggactctgggaaccagcacaagccaggccagagagccctgcccctgggcgctggggaagagatggctaatgtgggctgggttttgctatttactaagcccacgtcactgc

SEQ ID NO: 169091 - DNA, 122 bp, Homo sapiens
aggagggaggcagttgatgggcctgaaagggctaaaccagggtcagccacctggtgcccacgcctgcacacaaatagaaacatcacagaattaatggtctgttctctcaaagtgcagagcag

SEQ ID NO: 169092 - DNA, 122 bp, Homo sapiens
ttgccttcttctccaatcaacaccaggggtgtggtgtcttaggcaaggatgggtgctgtgcgccctgccgcccaccataggcagggcctgggaacccggggaggactctccccacctccagc

SEQ ID NO: 169093 - DNA, 122 bp, Homo sapiens
ggcgggctgaggaactggcgcgccctcgtccgcccacaagtccttggaaagcgcaggcctcgtgcgctctccagcgcccttccagggcgcaagggcaggacaggtacatcccgcgtgctgcg

SEQ ID NO: 169094 - DNA, 122 bp, Homo sapiens
gtgcactgcagcctccatggagcttttacagcctgggcaccacctgtgtaggcttaggtgcgttgtggtaggtgcagtgtgtctgtatttctgaaaggccccatcataacatccgctcctgg

SEQ ID NO: 169095 - DNA, 122 bp, Homo sapiens
ccaattgtcatgcctctcgtgggttagttgtaaatggaacacaactctagcatgacattgcgacttaaaagagcatatccagtatttcgatgatcattctggaaatatatttcctcttcaaa

SEQ ID NO: 169096 - DNA, 122 bp, Homo sapiens
accggcccgcccgcccgggtctgtgctgaggagaacattgctctgccttcgctgtatctccgaagtctgtgcaaaggagaactcagctccgccctcgcaaaggcacacagcgccggcgtggc

SEQ ID NO: 169097 - DNA, 122 bp, Homo sapiens
tcccatgctttgtgagcggggcgtaggccccgagggccacgtgtgtagagacagctgccacgcgggcaggctgcaggcctggcaccccagccaccagcacgtactggccaggctgcacgtgg

SEQ ID NO: 169098 - DNA, 122 bp, Homo sapiens
aaaggtcccgcaggtcgcctcgctcgtggcacgggctcggcagcgttgtggttagtgacacggaggaagacagaaagccatatgcacagcacgcagaacaggaggaggggggaagaaagagc

SEQ ID NO: 169099 - DNA, 122 bp, Homo sapiens
cggctaattttttgcatttttaatagaggcagggtttcaccatgttagccaggttggtctcgatctcctgacctcatgaatccagtgatttttctaaacttgcaatggggttcccaggggtg

SEQ ID NO: 169100 - DNA, 122 bp, Homo sapiens
cattccccatccccccacacacccctgcagggccagcctcaggggtgcatggatttattccgcaggtgcagcaggaacagaggtcaaaaagctgacatcctggaaggatgccttcctatgtc

SEQ ID NO: 169101 - DNA, 122 bp, Homo sapiens
tgctccatccgccctactcctcccattgcctgggacctctgcagcgtccccgtagagccgcgcaggttagggtggctggcttggaagaacagaaacccctcggcccaaccctcccctgtccc

SEQ ID NO: 169102 - DNA, 122 bp, Homo sapiens
ggtgtctggggtgttaggagagttttgatctaaccaaccccttgaaagggtctcgtccctcgaccgcactttgagaaccactgtgttagtgtcagcctgggaccaacgtgtttggtgaaagc

SEQ ID NO: 169103 - DNA, 122 bp, Homo sapiens
aataacatgcccccagggaagaagggcccaccaagagaactcagattgctcacccacccacgctttggacagatagacaggaaacgttcatctattgaaggcaacacttggcagagtgtatc

SEQ ID NO: 169104 - DNA, 122 bp, Homo sapiens
tccatcaaggccacacttttggcaggtggccctcttcataaagttaccctctcaatttttcgtaagcactccctcccctctaccccttgaagcctaggagtgtaatggctcccagatgtcat

SEQ ID NO: 169105 - DNA, 122 bp, Homo sapiens
gaagtaaagggcttcccaaatctttaaataacaaacagcaggagggagtttcagtaaatccgttttttaagactaccaaatggagaagctctttgaagactgtaaaatggcactgttctcac

SEQ ID NO: 169106 - DNA, 122 bp, Homo sapiens
gaggtctcgccactactgggcccgttttttcctcactgctgctttggggacacagtcccacgacagccgcgtgacatcgtccaagatgagaatttgctgttagcgaaggtcttccagaagag

SEQ ID NO: 169107 - DNA, 122 bp, Homo sapiens
gggaagagggcacagggacccacccggtgtgtaatgtaacgcttgcctttcctctctgcacgtccaggctgccccccggtgtggaccccacccaagtttcctcctccctgtcccctgagggc

SEQ ID NO: 169108 - DNA, 122 bp, Homo sapiens
taccccaggaacaaggagtgtcctacctgccgaaagaagctggtgtccaagcgatccctacggccagaccccaactttgatgccctgatctctaagatctatcctagccgggaggaatacga

SEQ ID NO: 169109 - DNA, 122 bp, Homo sapiens
cgcggccccgcgcccttacctggagcggcctgcagcaggcacaggagcagggggccccagcgctcgggccccgccatggccttcctgccgcggcgtccccgcccgggcccaggtccccgcct

SEQ ID NO: 169110 - DNA, 122 bp, Homo sapiens
ctacagtatctgatctactttgacttttaggagacagccctgtagcctagtagttcaaagcgcagcttctggaaaaggctgtcggggtttgtatcctggctcctgcacttattaacccataa

SEQ ID NO: 169111 - DNA, 122 bp, Homo sapiens
aatattgtccctccaatactttgtcattctctgtcccttttaccctgccttatttttcttcggagcgcttaaacgtatctgatgttatactaaatatttgtttgctgactggtttactgttg

SEQ ID NO: 169112 - DNA, 122 bp, Homo sapiens
ttctgcccatgggcagtgagaagagaaagaactagagcagggttccctctgttatgccttcgttaattcataatacacttatccctcacatataggtggacagaggctggatggtacatacc

SEQ ID NO: 169113 - DNA, 122 bp, Homo sapiens
caggctcgcgaccgctgaaggccaggctctactgcatggctgcaccagccgcctcacgttcgagacctgtgccaatcccatggacactctcccagccagcccctggacacgcttctcatgtg

SEQ ID NO: 169114 - DNA, 122 bp, Homo sapiens
gtggaccgggatggccaaaacactcagtccacacaaacaatggccgcagcccggctggaccgaaacggaagtcccaggtcttggagtagacactcgcagtgtttccatggatacgggagggg

SEQ ID NO: 169115 - DNA, 122 bp, Homo sapiens
cgccggagcccccggtgtttgtgtttggggtttttcaaagtggttaagctcctgtgagtgcggccacgtgtgtgttgagggaaaactcattgtatgcgtgtttgtctgcatggggtttgtag

SEQ ID NO: 169116 - DNA, 122 bp, Homo sapiens
cctggctcagtcaccagccctggttagttgatgcctggtacacctctggtccccgttaaccggggctaacgatgtctctgctgccctttccgcagcccagcggtctaagctgctccaactcc

SEQ ID NO: 169117 - DNA, 122 bp, Homo sapiens
ggaactctcaggctcaggtgatcctcctgcctgggtctcccaaagggctgggatttcaggcgtgcgccgccatgccctgccgcaggctttccgattctgaaccatagagtcaatgaaactgt

SEQ ID NO: 169118 - DNA, 122 bp, Homo sapiens
atcgagctctgggcgttgtgccagcatttgaagaagcgatctgttgcaaagcgatccacacggagagccttagttatcgcgagacttgacaggcaccctcaactttagcccgccggaagcgg

SEQ ID NO: 169119 - DNA, 122 bp, Homo sapiens
ccatgacttcaacggccccatctcaggaagagccccaggctggcgtttgtggaacgaaaccggcagcctaaggcaggaccttcctaacggctggacaagcggactacggcttcattcaccac

SEQ ID NO: 169120 - DNA, 122 bp, Homo sapiens
accccgcccggagcgccccatgtaccggggccgccgctcgggccagtctgcggagcatggcgcgggcagcgcccgactccccaccccggcgggagctgctgactcctctactccccagcgaa

SEQ ID NO: 169121 - DNA, 122 bp, Homo sapiens
gtgctacatctgagatactgtggagctgcaatgtccaatacagtccccattagccacatgcggctactgagcccagaaatgtggctagtccaatccaagacttgcttaatcataaaatatac

SEQ ID NO: 169122 - DNA, 122 bp, Homo sapiens
cttaactagtttcacctcctgtctgctctctcatcttcatcatgcaaaaattagactttccgtgttacctctgccttactcaagtagtcaaagtggtccacagtctactaggcttagctctg

SEQ ID NO: 169123 - DNA, 122 bp, Homo sapiens
gggggctcaccccccgagcaggcctcacttcctgacaggagggtgtgtctgcagggaggccggtgtggggtgcgtgtgtcccctctgctggtgagcatggcaggccgtcactaaaggtgcgg

SEQ ID NO: 169124 - DNA, 122 bp, Homo sapiens
cgcaatgctgactcaaccagaaagaagttgctgctggaatgaattatgtgtctgtgatttcgcagaggcgccataaaccaaacaacacccaatggtgttatggggtccctttaaatttatag

SEQ ID NO: 169125 - DNA, 122 bp, Homo sapiens
ccgtccccagcctcccggtccttcggggttggatggtgaggtgggtcaggcaaggggggccgagctcgggtgacgcggcgctcacgtgacccgccgggcgcctacgtgggcaccagcccccg

SEQ ID NO: 169126 - DNA, 122 bp, Homo sapiens
gtaagcgccctggctgggctgctcggccttggccgtgcccgtgaccactgccctctcctccgcccccaccccgctgcgactctcactacccgccaggtgcaaggatgctttccgcctacaca

SEQ ID NO: 169127 - DNA, 122 bp, Homo sapiens
aggccaacaggaaagcactggcaacagggcgggggcctggccagccaggcggcccagaggcggtcccctccatcccagggtactgtccacacctcccagtgtcctgaggggagtcctcctgc

SEQ ID NO: 169128 - DNA, 122 bp, Homo sapiens
ccgggggctcggccgggagggtggtggttagggcggagagcgtgcctcggccccagcccgcgcccctgccaccgcgcgccgcggcctcccgaaagcgggcggggtgccctgcgcgcggcgtg

SEQ ID NO: 169129 - DNA, 122 bp, Homo sapiens
ttttctaccacacagcgagcaaggccaacttccctaaactaagaatgctgagattcttttcgacttataatgttctgactgtctctctctgtttccccttacctcagaatttgtttaataga

SEQ ID NO: 169130 - DNA, 122 bp, Homo sapiens
cgaggccgcgagcgcagggagaagccgagggcggaaggagcccgggtagccgcccagcagcgcctcaccccgctggccgcagcatctccaaggtggcctcttagcgccccggagccgcctgg

SEQ ID NO: 169131 - DNA, 122 bp, Homo sapiens
gcattccaagggaatacctcttaagcataagcttttaaagatactctccaacacagcgttcggttctgaggggtttttccctgatttatcttgacagtactttactttcaatagcacagtct

SEQ ID NO: 169132 - DNA, 122 bp, Homo sapiens
tccctttgccggctgcagcaagtccctctcttctaagctgctttcactctgattaggtgtcggtcatgcagtgtggtctattggaaatggcagccgaaatacgaactgaaatcctgttgttg

SEQ ID NO: 169133 - DNA, 122 bp, Homo sapiens
ctgactagcattggaggggcgcgaccagcctggtggagacccccggggtttcctgaaggtcggggccgctgaggtgggagggggtgtaaacacagcctacctcgacccggcgtccagttcct

SEQ ID NO: 169134 - DNA, 122 bp, Homo sapiens
ccaggaggggacgaggaagccgccccacggggtccctgcggggtcctccagcccccagcccgcagtgcccacctcctgccgcggcttgtacaggtactgctgtagcgtgtggtgcgtgacca

SEQ ID NO: 169135 - DNA, 122 bp, Homo sapiens
agtcgggctgtggtggttgccatgatcagagggctgggataagaatttgggttcttatagcgtctcagtcccaaccaactggtagtatccatccagagtgatgtctatgcatagtacaacca

SEQ ID NO: 169136 - DNA, 122 bp, Homo sapiens
cactagaagcctcttggaacacttctgttacgggaggcagggaagtggcatactattgcccggtgccacaaaaatgcttccttcagtggcgctttgccagttggaggggtggtggactgtga

SEQ ID NO: 169137 - DNA, 122 bp, Homo sapiens
aggaaatgctttgtgttgctgatgaacatgaaaaggcgcaacctcactagtaatcaggggcgtgcccatcagaagcgccagggactggttccccggttggaagagcagactgctggcgcaca

SEQ ID NO: 169138 - DNA, 122 bp, Homo sapiens
tttgcctcagtttactctgagatacatgttctcacaggttgcaaaaaataatatttttgccgggcacagtggcttatgcctgtaaccccaacactttgagaggccaaggtgggtggatcact

SEQ ID NO: 169139 - DNA, 122 bp, Homo sapiens
tttggaggaacacactgcttagaacaatgtcagatcggatcgtagttgaggggatgggagcgggacacagtggaggatatgtgttttcccctgattagcctccagctgcctagggtggttgc

SEQ ID NO: 169140 - DNA, 122 bp, Homo sapiens
agacgaatccacttaattctgaaaaagaaaaatgtttttttctgagtgcctactgcacgccgggactatgcaagatgctgaatatgggtatgaaaacaaacgagattgcttttgctttgtgg

SEQ ID NO: 169141 - DNA, 122 bp, Homo sapiens
gcctcatctctggggacagggtagggcttggtgagggaaggctctgaaagagaccagtgccgtttggttgtgtagggttttgtgtgttggttacacatgtttttttgttgttttgttttttt

SEQ ID NO: 169142 - DNA, 122 bp, Homo sapiens
aggagcccgcgagctcccggccgcggctctctctgggccccgagccgcccggctccgcgccgctccgcgcccctccgcgccgcgccccctcagcactggccagctccctcccctgacgtcac

SEQ ID NO: 169143 - DNA, 122 bp, Homo sapiens
aggttcacacacccgctgattgtgattctgccccttggctctggcggcctggagtcctcgcgcctctgagagctgcattcgctcgtctgggctgcgtcctgctgtttccgagaagctactgt

SEQ ID NO: 169144 - DNA, 122 bp, Homo sapiens
tcagccaatcctagctcgttaaacgggaagcacttaaccaatgaggggcgaaggcagcaacgaggaattggaggggcggaacgacagcttgacgggcacaaaagccagccagtgagagccgg

SEQ ID NO: 169145 - DNA, 122 bp, Homo sapiens
tggtctaaaactctcccttgagtggaccggacactaaacccctccaggggtcacagctgccgctcccgccgccactttgctccttgcctgctcccttcccgcgttccgcctgggaccctcgg

SEQ ID NO: 169146 - DNA, 122 bp, Homo sapiens
cacccagggcaggccttaaggttgggcacacccatgtgtgggctctgccctggccttaaccgagagagggaaatgttgacggggaagaaagccctgcccaccaggcagccccacccacctgg

SEQ ID NO: 169147 - DNA, 122 bp, Homo sapiens
gaacaattttgatgtcacaggtggcatttaaaacccattccttgctggacctggtagagacgcccccagtccgtcaggtctctcgctgcagttccgcagtttgaccgcaggggacggaatct

SEQ ID NO: 169148 - DNA, 122 bp, Homo sapiens
aaacactctccttctgcaaactcaaaacggtgcttgtaatcccactctccaggattgttccgggttctgtacccatagccaccaatgagaaccggaatgactggcctttttatgaaattttg

SEQ ID NO: 169149 - DNA, 122 bp, Homo sapiens
ttcaccttctcctagcaactccacacagtaggtaactgccaatttaaccagtggaaaatacggcagctgcacacagcctgctctatgaatcctttggggattaaaaaataaataaaatgaaa

SEQ ID NO: 169150 - DNA, 122 bp, Homo sapiens
gacagaacggcccctgcgcatttgcaggggtcctggtgggcttgccgggcagagggcgtgcgggtctcagcaagctgccgggtccgcccaggccccgccccatgcccattcaggccccgccc

SEQ ID NO: 169151 - DNA, 122 bp, Homo sapiens
aggaagagaaagctggccagcccggccagagcacagtgcgttgcgggaggagagtggagacgcagcagggatcagtcgggggcttgcatgtctttgcaaagaatctgattattgtaaacata

SEQ ID NO: 169152 - DNA, 122 bp, Homo sapiens
cctttcatagagcaggtttgaaacactctttttgtagtatatggaagtggacatttcgagcgctctcaggactgcggtgaaaaaggaaatatcttccaataaaagctagatagaagcaatgt

SEQ ID NO: 169153 - DNA, 122 bp, Homo sapiens
ggttggcaatggctgataaatgacactttgagacatctccatctcatctcaagtcactcccgccagcagatgaaggtacagtgagcatgggcgttcccggccggcgctgtggcggtgttagt

SEQ ID NO: 169154 - DNA, 122 bp, Homo sapiens
ttgcggcaaaagatcaaatcaggatgatgtttagccatagctcctaactaagccggccaccggaagcttcgggaacttccgtccgacctttaacccccattgttcctgcctccacgtcgctg

SEQ ID NO: 169155 - DNA, 122 bp, Homo sapiens
ggtggcagatgtcataggggagaaagagctttcccagcagcccttcagtcaccagatgtgcgtccccaggagcagagcctggggcaaggatttgggtgcaaggagtttatttgcaaggtggc

SEQ ID NO: 169156 - DNA, 122 bp, Homo sapiens
acggaaccacacgctcgctccatcgtttgttgggggttccgtcaagtgccaggtcctcagcggggctccaggggtgcagaaaacgtgcaggacagctccaagttcacagagtcccggggagc

SEQ ID NO: 169157 - DNA, 122 bp, Homo sapiens
ggaaagttgttgactccaggttctgagaaaccagttgactcaaattccatcgcccttcttcgagacaaagcggcctcagtggtgacgtttgttcctgtccaagtctttgtgagtcgctgcac

SEQ ID NO: 169158 - DNA, 122 bp, Homo sapiens
tgacctccctgagccctgctaagagcacccatgcacggcaatggcggaaaataaacgagacggggctgtgagacatctccccggcccacggcactcagcagtgctagctgacaacgcgccag

SEQ ID NO: 169159 - DNA, 122 bp, Homo sapiens
agtcctgggggccgctggggcggggtttcaggagtgcttgagagaagctctggggccgtgcgtgggtgaagggacgaggcacgggagaggccagaggggcccctgtcctgtgggcttccagt

SEQ ID NO: 169160 - DNA, 122 bp, Homo sapiens
ggcctagccacagagcgcctcgagctgggcagtcaatcctggggaagccctggtggtcttcgcctcgccgggttcggaacagcaggctgggatcagcaaccatcgagacgcatccgccgaga

SEQ ID NO: 169161 - DNA, 122 bp, Homo sapiens
gaggagcttagcacccggaccagcagggtttagcaaccgggccagcagctgaggagggtgcgctgggtcccccagcagtgccagcctaccggcgctgcgctcgatttctcgcggggccttag

SEQ ID NO: 169162 - DNA, 122 bp, Homo sapiens
atcggtaaaatgtacgtatatctgagaaagagatagttattatcctcattttacagatgacgaatcccaggctcagagaagttatcttgctcaagaattcattagagaaagcagagtcagga

SEQ ID NO: 169163 - DNA, 122 bp, Homo sapiens
gggtaaatctggctgctgtttatactttgggtccacactgcctctatgagctgtaactctcgccgcgaaggtctctagcttcactcctgaaccagcgagatcacgaccctaccagaaggaag

SEQ ID NO: 169164 - DNA, 122 bp, Homo sapiens
gagaagaatccctgggagctattgaagctgtttaaaactctttgtaaacaacagcagtcacgggagagttttggacagggtaatgatcaatcagattttgcatattagaaagataatgatgg

SEQ ID NO: 169165 - DNA, 122 bp, Homo sapiens
atcacttgtaccaaggaggcggaggttgcagtgagccgagatcacatcattgcactacagcgtgggtgacaagagcaagactcactcagcagaggcagtctcaaaattaattaaataaataa

SEQ ID NO: 169166 - DNA, 122 bp, Homo sapiens
gccactgtgtctgccatgtcattaaccaggctcctgtgaggacaacagcctgggcctcggcgtcaatcatcgataagaagcctctacagcacccctgccccctaatttatacagaaaccgga

SEQ ID NO: 169167 - DNA, 122 bp, Homo sapiens
cactctccctcccaggcgaattctggagaccgcggccccaggcgtctcacccattttctccgctggggacccgctgggctccccatccacgcctactcggtccccaccccaccagctcagtc

SEQ ID NO: 169168 - DNA, 122 bp, Homo sapiens
cgctccgctcccttcggacgggctcggttccttccggccgcgctcggctcctcttccggccggcctgggcttctccggtcatactcgggtctctccggctctattcggctcacggctgcggc

SEQ ID NO: 169169 - DNA, 122 bp, Homo sapiens
ccgtactctggcctttgggaggctgctgacccacaagcccttgtcccggcagccctcggacgacgagaacagcgacaacagcaacgagtgtgtggtgtgcctgtccgacctgcgggacacgc

SEQ ID NO: 169170 - DNA, 122 bp, Homo sapiens
ttttctttcccgcgtggaggctgtagtacttgaggcccaggtcaacgtgcgtgggagacccgttccagaacctggtgatagaagccgtgaatcctgttcctgaaaagcctacacgcacgtgc

SEQ ID NO: 169171 - DNA, 122 bp, Homo sapiens
ccagagctaagtgggagtagctcctaagtagcctagacgctgattcaggcccggactgtgcgggaccagggccagggaactccggggagactcccctgtccaaactgtggaaacccagcgtt

SEQ ID NO: 169172 - DNA, 122 bp, Homo sapiens
ttcacagggtcccctgggcccgggggtcatggccagaacgcagagactttatgatgaggacggtgcccacgatgatgccgactaggcccagcaccaggcccagggcacagagcacagtctcc

SEQ ID NO: 169173 - DNA, 122 bp, Homo sapiens
agatgtgttaaatcagttgcataactctacagggggcccacataaaactttatactgctccgcaccaccccattccaacctccaacatgagttgccctgactctgcagcacagtgtgggatt

SEQ ID NO: 169174 - DNA, 122 bp, Homo sapiens
ggccaggttatttttggctctgatgtccactctgtggagctgtggtccacacagagacaccgcctgctgacctgtcctgccaacccacaggttctttacaggcccttcccctaactctgcct

SEQ ID NO: 169175 - DNA, 122 bp, Homo sapiens
ttttcttgctccttgctcttggagttcttctcttagtccctgttccctggatgaaagcatcgctccgagcctcatgggaggaatgaaggaagaatcgagactaggtgagtggtggtctagat

SEQ ID NO: 169176 - DNA, 122 bp, Homo sapiens
cgtgagtctgacggcgagctgggcaggtgtgacctggaagggcgggcaggtggggcacggcgccccggagggagccaggggccactcgctggacactgaacgtgctggttgtgcctgggacg

SEQ ID NO: 169177 - DNA, 122 bp, Homo sapiens
ggattggcctggggttcctcacacttttcagacaaaagggaagggctgtcacagctcccccggcctgagtcagtgtcaggatccaggtatgtgggtttcataccttgacttgggtgttcttt

SEQ ID NO: 169178 - DNA, 122 bp, Homo sapiens
ccagttcttgcggcgagatcaggaatccctaaaagtagccgctcccccgccccggggccccgacagtgcttgggcacacaaaggctcctggggcgcagctggccctgagatttcccgcgtag

SEQ ID NO: 169179 - DNA, 122 bp, Homo sapiens
ttaagtgttctccattttttgtccattgattagtactatagttatcacaggcaggggacccgggaatactccatttcctaggtcccattggacagtgacaagggtgagggcagcttcagtga

SEQ ID NO: 169180 - DNA, 122 bp, Homo sapiens
gttctctggggctgccacaatgaccacgtcctgccccctggtggacgccagggaccctggcgagaagacagaccagcaggcagccttaccattaggcatttgccatgcgatacctcacctga

SEQ ID NO: 169181 - DNA, 122 bp, Homo sapiens
gaagactcctaccactcgtcgccgcctcagacggatcctttgccccgcccaccgctgctacgcaacccggcggaagctcgtcaccaaaccccgcctctttgtttaactcagcccctacacca

SEQ ID NO: 169182 - DNA, 122 bp, Homo sapiens
aatttcctccgggaggacgctctggtgggatccaagcacttcccccgctgcgtctgtggtcgcttttaggtgcaactggagaaggcactgaagccctacgagattcacaccgtcttcggtct

SEQ ID NO: 169183 - DNA, 122 bp, Homo sapiens
ggggactcaatcagacggctgtggaaagtcagtcacaccacaacgagtaagtcttgcagccgcagggaatcaaatgacagcagggcaagtgacacctgattggaagccagcattccagggca

SEQ ID NO: 169184 - DNA, 122 bp, Homo sapiens
agttgcttctgccgacatgtactaagtgcatgtcgacctctgcaagtggcggtgcgtatgcgtgccactgaacattaatcttgaaagcagaatcaaccatgcagcaagcccttatgttgtcc

SEQ ID NO: 169185 - DNA, 122 bp, Homo sapiens
ccctggtgttcatgacgctggtgttcatgtcgctggtgttcgtgacgctggtgttcgtaacgttggtgttcatgtcgctggtgttcatgacgctggtgttcatgtccctggtgttcatgacg

SEQ ID NO: 169186 - DNA, 122 bp, Homo sapiens
gttctctccagcgcggctcttcccgacctcgcgatcctgtcccctgcccgggcccccagccgcccgctggtcccatatattacagcagcgacagaaatatggtagtggtcgccacgttaggg

SEQ ID NO: 169187 - DNA, 122 bp, Homo sapiens
tgccgccttggagttggtctgggtcgcagcctgagctgccgctcttggccccagagacgccgcccccgccagcttcttttttcttgttctctcctgccttcagcacctcgaaggggtccgat

SEQ ID NO: 169188 - DNA, 122 bp, Homo sapiens
catctctcttcagaccccagcttggtccaggttgccccacgccccaaggtagtctctccgcgctgctatacctgctccgccacggcgcgaccccgtgcagtaatcccagacatcggtgcccc

SEQ ID NO: 169189 - DNA, 122 bp, Homo sapiens
ccaggggtatttttaaagctccccaagtaattttcgtgtggatcatcaattaattagcagcgtcctgaacaaacacgtgagaaagaatccttgtcctgatccaaagagagattaaaggagtg

SEQ ID NO: 169190 - DNA, 122 bp, Homo sapiens
agactccgtctcaaaaacaacaacaacaacaaatggtgaagggatgaggctgaaacatcacgggaagtaaaataaataattgtaacaagaaaacaataaagcattggagaatccacccaggc

SEQ ID NO: 169191 - DNA, 122 bp, Homo sapiens
attaacctcattttataggtgaagaaactgagaaacagattggaaatgatttgttttgagcgggggtcaagagcaataacgaaaaatgtttgtcataaaccgtttttcattattgctcctga

SEQ ID NO: 169192 - DNA, 122 bp, Homo sapiens
caaacttcgtcttaggatcttctggcaggtgtcctggttggatcgtgggtggtgcttgtccggctgcctcaaggatccagcctagggacatgttctttgagcacttgatgtgagagttttat

SEQ ID NO: 169193 - DNA, 122 bp, Homo sapiens
agatcgggcagggtgaaagaatgagctggagattccgaaataaaccagcatccctgactgcggcagacacggcccctccaacgtctgcctctggtccgcagtaaaagtatatttattccttc

SEQ ID NO: 169194 - DNA, 122 bp, Homo sapiens
aaaattctactgccattcctgtgccccatcttaaccagcattttccaagcttttgcatttcgtcttctttgtctgcctctgtgtccaggatcccaggcccatgagcgggacaaaccagtcga

SEQ ID NO: 169195 - DNA, 122 bp, Homo sapiens
ggaagcgtccgcgaagcacaatgcagcactgagccgcggtggaggttgcagcgccacggccgccgcagcaccggccggggctgggtggaggtggccgcggggaccccgggggcgcggagcga

SEQ ID NO: 169196 - DNA, 122 bp, Homo sapiens
aagaagttgagttgctcaaggccactctgctgagaaggccaggccgggccagcattcagacggagacagcctggttttagtcatacccttggctctccacctcctccctagcccagggaatg

SEQ ID NO: 169197 - DNA, 122 bp, Homo sapiens
tgaagtacaagaagtttctgcttctgccttgctggaattgctcatgtaacctgagatccacgtgcactcagagaatgtgaaggtgccagggcagaaattccactggctcctgtattatcact

SEQ ID NO: 169198 - DNA, 122 bp, Homo sapiens
ctacatgctgtgctaacaggggacgagggctatggggaaacggggacctggagggcggggcgcagagagaacaaggagagaaccagagacctggggcagctgcagagttcaccacgcttgtg

SEQ ID NO: 169199 - DNA, 122 bp, Homo sapiens
ttcccggctagcagttttctttcttggggctcttggtcgttatccagtccacgcaggggccggagtgcgggctgccgcggtgctctcctgcgcggagcccgggctggcgggggcgcggcggg

SEQ ID NO: 169200 - DNA, 122 bp, Homo sapiens
gaaaaagaagcttctgtgaggaatggatgatctgagcaaccactgtgttattctctgaaacgggcacatcttggccttccagttcaggtcataagcataaggaatccaaattccacctgggt

SEQ ID NO: 169201 - DNA, 122 bp, Homo sapiens
tttatgttgcagctgtttgttttgagacagggtctcaccatcctggctggagtgtagtggcgcgattttgtgttgttgttgtttttagatggagtctagctctgtcgcccgggctggagtgc

SEQ ID NO: 169202 - DNA, 122 bp, Homo sapiens
ccttgccagcagattctgagttttggcttcccccagctttgctcagtgacatgatgagtccgaatcatttctacagattccccagagacaggagccagcttttactttttctcttgcagcat

SEQ ID NO: 169203 - DNA, 122 bp, Homo sapiens
aggacatcttcattttatttccaccctcaatccacatttccagatgtctctgcagcaaagcgaaattccaggcaagccttagggaaaaaaggaaaaacaaagaaaatgaaacaattggcagt

SEQ ID NO: 169204 - DNA, 122 bp, Homo sapiens
aacaagtcagaactatctctaaacaaaacgattactcgctttccgcagccttttatataacggtagagtagacctttttgaaaactgaaagaccaggaaaggcgggaaaacgtattcagtcc

SEQ ID NO: 169205 - DNA, 122 bp, Homo sapiens
gctgtcgatgagtcccagtgggccacctggagcggaagtggaggagcggccggaagtagccggaatctctgaaagactgaccgactgactctgacaggatccggggctgagggaaggaggcg

SEQ ID NO: 169206 - DNA, 122 bp, Homo sapiens
gagggaggggcttgggggcgggaccaggtaggggcggggccggggccggggcctggcagacgctgggcggggcctgcaggaagagtgaatagggtgggtctgggctctgagaagcaggacct

SEQ ID NO: 169207 - DNA, 122 bp, Homo sapiens
agccagacagcagcatctgcaggtgcggtgccctggacctgccccagggtgagccggaggcggggccagggaggggagggaggtcgccccgcccaccccagctccttcctccctctgtcatt

SEQ ID NO: 169208 - DNA, 122 bp, Homo sapiens
tagaaatgaagcatctgatttgcagcacacggtgtcacctccacacaaagcctcacacttcgggacaggaaggaaagaataatactgtatccactagtagctgcagggggacttttcgggag

SEQ ID NO: 169209 - DNA, 122 bp, Homo sapiens
ggggagggcgcgtgcggggtggccggcgcagtgcggtgggggcgggagcgggtgggcacgcgcgcgtgtctctgtgtgcgcgcgggaggcggtggggcgggagatgggggcggcgcctcgca

SEQ ID NO: 169210 - DNA, 122 bp, Homo sapiens
tggctgccctttgagcctgggcgtgctccctttaagggctcatccaggaacatgtgccagcgacccaaagacggtcctaaaaattaaagcgcactccctggtctcacagacacctggggagc

SEQ ID NO: 169211 - DNA, 122 bp, Homo sapiens
ctccaatgggacagcccgcagctgtgaacaagcctgagaataagctgtaccttctgttcccgtgggggcagacctcccagatacattgtttagcgcaaaagcacgtgcagtgctgggtgtgc

SEQ ID NO: 169212 - DNA, 122 bp, Homo sapiens
cggctgtgtctgcctgcttccccctgcgtggccggccctctcatttccatcagtgtctggcgtcgggtttcctgcaggaagagctggtacccctggatcgggcagcttgagacgagtttaac

SEQ ID NO: 169213 - DNA, 122 bp, Homo sapiens
acaatttcctttctgtcctttcaacctgaagggatgccatttggggcctgggtgggaatgcgtgggggtccgtgcagaattccaccagccgacttcagggaaggtcaaagttgtgcaggatg

SEQ ID NO: 169214 - DNA, 122 bp, Homo sapiens
aatttttaaaaatttttacttaatagtgcctctgaagcacctctcaagtcctacctcctgcggctcctttaacagcggccaagacaccgaagaggcgggggtgccagacaggctgacgtcat

SEQ ID NO: 169215 - DNA, 122 bp, Homo sapiens
tcgtggtagctagcgcccacaggagaggtgtgcgcgtcaatctgcgtgtgaagccccgggcggccctgggagggactcagcaaagggtcgaatctgtccccacctccagccaggggccgggg

SEQ ID NO: 169216 - DNA, 122 bp, Homo sapiens
tccgctgagggcgctggggcgggggttggggttggtggccagctgagcctggttgaagggcggcttgggccccgcccaccaccccagcacgttcgaggagggctaagcccagcgtgaggctc

SEQ ID NO: 169217 - DNA, 122 bp, Homo sapiens
acttccttactcacagaattattacagacttactgaaggattgtctaatcccatgaaaaacgtgggagagaatttcctgtagatttgcatctatgtactactagagatgctctcaacaaaga

SEQ ID NO: 169218 - DNA, 122 bp, Homo sapiens
gcctggggcgaaaccctgtctctactaaaaatacaaacaaatcagttttcaaggttcacgcgtgctgcagcgcgggtcagcacatcagcccttttatggctgagtgattattccaccgtgcg

SEQ ID NO: 169219 - DNA, 122 bp, Homo sapiens
ttagaaagtatctgttctgtttttatggctcttgctctttggtgtggaactgtggtgtcacgccatgcatgggcctcagtttatgagtgtttgtgctctgctcagcatacaggatgcaggag

SEQ ID NO: 169220 - DNA, 122 bp, Homo sapiens
gcgcggggtgtggtgggtgaggcaaggatttgggatcctgatcccaagggtcgcagggagcggcctaagtaaggccaagaaggaaggatgctgtggaaactggagcttcgcgctgctgcctc

SEQ ID NO: 169221 - DNA, 122 bp, Homo sapiens
cctcgcctcctgcgtgtccctacagagccccggcacaatcagactgccccaagccagctccgaaacccgaaatccccgctccggcgcttgcccaccacggccaaagttgtggaaacagcttt

SEQ ID NO: 169222 - DNA, 122 bp, Homo sapiens
tcctggtggggtcttttggagggtttagcaccttgcatcctagaatacaaaacacttttgcgtgttttttggtagaattctctgatcccctacctccaatctgaattaggtctttcatgttt

SEQ ID NO: 169223 - DNA, 122 bp, Homo sapiens
gccagggaaccgttttcatttgctggatcgcacgaagccttgctcatggtaacacaatatcgctggggaagaaagccgcagctttcgcagtgagaaggttctagggctcaaggtcaagtctt

SEQ ID NO: 169224 - DNA, 122 bp, Homo sapiens
gggtccagcttgtcgcctctggtaagtgagaactcatctgttctcctgggatttgtggggcgctttccttctcctttaactcctttgagccgctaggccaagatcctcttccatccttgggt

SEQ ID NO: 169225 - DNA, 122 bp, Homo sapiens
ttcaagtgattctcatgcctcagcctcccgagtagctgggattacaggcgtgcaccaccacgtgaggcctgcattttgtatttttgctagagatggggtttccccatgttggccaggctggt

SEQ ID NO: 169226 - DNA, 122 bp, Homo sapiens
aagccgcatccccaggagcctcgtggccgttcctgacgagtgtttgtgataagtgtgtgccggaggtcaggtgctctgcctttgcttgtaaaatgtgggctgcagtcaatatctttgtatgt

SEQ ID NO: 169227 - DNA, 122 bp, Homo sapiens
cacgccctggcccctctcaccggtaaagccgcttagtgtggaggacttttgcttcgggctcgctgctctcccctgtgggggggccttggctcatggtgcccgggtccgggggcagctcccgg

SEQ ID NO: 169228 - DNA, 122 bp, Homo sapiens
gagaaaggattgtgtttgtgtgaagaaggctttatctgccctacatccaactgagatggccgctcagtttggcctgctggaaggaactcaatgaagcaagagcgacaagatgactgatcttt

SEQ ID NO: 169229 - DNA, 122 bp, Homo sapiens
gtgccacctcgcggctgcaagatgctatcccccctctgagcctgtttcttgcgaagtagtcggggaaaccgggtgctccgggggctgtgtagaagcggactggcacccagcgagggccgcgc

SEQ ID NO: 169230 - DNA, 122 bp, Homo sapiens
ctcgcagctcggggaaagggcgggctgcgccctcaggacctttctcagcagccacagcagcgcatcccagcacctcctccaggagccccgccatctcctgccacccggactttccccacagc

SEQ ID NO: 169231 - DNA, 122 bp, Homo sapiens
cacagtaacacatcacaatctgtttgaaaaatgagcatgatttatcttaccagccagtcccgggaaacaggtctctgaaagaatggaagcctttcaaattctttttttatggagatggctgg

SEQ ID NO: 169232 - DNA, 122 bp, Homo sapiens
actgggctcaattacagctttgtggcaggataaggttaagagaggtggagtgggcagggacgagggagggaggcagaagcagaaaaatcaattcagattactttgatgacagtgacttccag

SEQ ID NO: 169233 - DNA, 122 bp, Homo sapiens
atatattttctctaaaactaatttttccaaacatagtatcatttacctattactggcagtcggtcttggtcaagtcttattcttgcaaaaccatcctaaaacgaaaacatgattttaggaga

SEQ ID NO: 169234 - DNA, 122 bp, Homo sapiens
acgctgtcaacaaaatgacaatcaagatgaatgaatcggatgcagtaagagctgatttttcggcttgaataatgagatgaattaatgagcccaacaattgcattttaaagctgtacaagtgg

SEQ ID NO: 169235 - DNA, 122 bp, Homo sapiens
gggcgcgccggcactgcgctccggagaggcccggccagggaagaagcaacttccctccgccgccgcagaccagccgggcagagacttccagccccaccctcaagccctctcggtggctctgt

SEQ ID NO: 169236 - DNA, 122 bp, Homo sapiens
ctggtcagcctgggccactgaggcagggacatgtgctaccaaggtgaaggtggactgggccggaggagcagcagagtcagggggccccatagtcaagttcccaaatgtgttcgttacactgg

SEQ ID NO: 169237 - DNA, 122 bp, Homo sapiens
tcccttgctgagactcaagggcagactccttgatcccagacaactttccaagggagttcacgcaaggctctgaccagtgaggctccagagcaaaacccaggaggcttataggtttaagtgtc

SEQ ID NO: 169238 - DNA, 122 bp, Homo sapiens
agcagcccacagcagacccgtgatttaggtgtcgatcttcagctgccgagtgtcctgttccgttcaccgagtgtgtgatcggatgaatttcttaagcaggttggctcatcttgaaagctctg

SEQ ID NO: 169239 - DNA, 122 bp, Homo sapiens
tccccgcgcctgggcccccaggacctcttgcagacgggagtccctcagacagtgcagagacgggagcacgcactgggccctgcacccacttcgtagcgccctggcctgggacgccccaccac

SEQ ID NO: 169240 - DNA, 122 bp, Homo sapiens
caggcagagaaagagaggcgtgtccctgctcttgaaacaggccccctggatccaggctcacgaggaaagttctgccaagtcttggtcactaaagagccaaaaattttaggtgttgttctggt

SEQ ID NO: 169241 - DNA, 122 bp, Homo sapiens
ttggctgcggcctggcaccaaaggggcggccccggcggagagcggacccagtggcctcggcgattatggacccggccgaggcggtgctgcaagagaaggcactcaagtttatggtgaggaga

SEQ ID NO: 169242 - DNA, 122 bp, Homo sapiens
cagaggacttgagaagtaggcttaaaacctccacaggcagaaacaatgcctgaaacatgccgctgctgagttctggtctgagcagcttgcctagctgacccttctggcagtgaacttgaccc

SEQ ID NO: 169243 - DNA, 122 bp, Homo sapiens
cttaataagcatctgaatgtttggttgtggggcgggttctgaagcgatgagagaaatgcccgtattaggaggattacttgagcccaggaggtcaaagctgaggtgagccatgattactccac

SEQ ID NO: 169244 - DNA, 122 bp, Homo sapiens
tgcctgtaagtgggcccagcagacaccccatggagccgaggcaagccgtcccagctgaaccggcttaagctgcaggcccacagagtcatgagcagtgaagagaggttttcgccctctgaggt

SEQ ID NO: 169245 - DNA, 122 bp, Homo sapiens
tggggttcacttagactggggtcctgagtaggtgataggctacttattactgggtggaagcggagaagtatggcagaagaacaataggcaaattcaatactcccggaaagaattctagttag

SEQ ID NO: 169246 - DNA, 122 bp, Homo sapiens
tcctgctccgcgccccgcagaaaccgcggctggctggccaggggctcttccaacttccagcgggagcaggtgcacaggtcaggcccgccccgcccctaatgccttctacccccattacccac

SEQ ID NO: 169247 - DNA, 122 bp, Homo sapiens
ttccctacatggaggtaactttggacacatgttctccacctctctcccagatggtgagaccggaggaagacttgcattgggcctgttgttcctgggccagtggccatcagcctgttgcccag

SEQ ID NO: 169248 - DNA, 122 bp, Homo sapiens
gtctccacaggtatctccggctgactctagagctcaacttcccctttaaacttcaccctgcgcttgccgatttgcttcgggaatgcccgaggcaccggacgaagcagtcgggtctggcccca

SEQ ID NO: 169249 - DNA, 122 bp, Homo sapiens
agaaagacccatgtcagtatacctaaacaggtataccttgttttattgtgcttcactttacggagttttttttagatactacttttttttttagttgaagatttgtgacaaccctgtgtgga

SEQ ID NO: 169250 - DNA, 122 bp, Homo sapiens
aatgctgtacactgctgtcctgaacccagacctcgcaccagcaaatgaggcagtggacagcgaaccctgggataagaggacctgctgtgtttccctgcaacgccacgtacctaggtgcgacg

SEQ ID NO: 169251 - DNA, 122 bp, Homo sapiens
tggctctaactcaaaacaaaaatagggtaaacccaatcagtcaagcgcagcaacctgctccgtggcgatctgtgactcatcagaagctgaggctctcaccaggactttctaatgagcttcgc

SEQ ID NO: 169252 - DNA, 122 bp, Homo sapiens
cagatgaaacaaaagccagtcaagcagcaggccaagggcggacagagatccagagagggacggcatgtgacgtggcaggccctgggcgccgggcacagggcgcgcgctgcggcagcctctgc

SEQ ID NO: 169253 - DNA, 122 bp, Homo sapiens
gggaccggagtgagaaaccggtgtctgtcactgactgcaaagtgagcgagaagcaggctgcgggccgtcccagcacgacgtggagccccgcggagacctcgagatgccccgcggggaagctc

SEQ ID NO: 169254 - DNA, 122 bp, Homo sapiens
tttcgggtgttgcttgttttttggcctgagactatgtcacctttgagtttttgtgcacctcgaaataaagcacaagtgactcctttcctcacgtgcttgggtggtgagtcagtcagctgccc

SEQ ID NO: 169255 - DNA, 122 bp, Homo sapiens
atgtggggctgcaataatcccgccttgctggattcattgaccccgacatctcggagcagccgtccccatggtgcctcaccttccccgtcggctcctaccttcccagcaaaatcttttttcct

SEQ ID NO: 169256 - DNA, 122 bp, Homo sapiens
tgtcctccccagctggacttctggcgggggcctgcccaccctggctcccccatcgacgtccgagtgcccttccccagcatccaggcggtcaagatctttctggagtcccacggcatcagcta

SEQ ID NO: 169257 - DNA, 122 bp, Homo sapiens
tctgcgggagagctccccggccgcccggcccagccccgagaaggttcctccggtgctgcccgctcccctgacaccccatgggaccagccccgtgggccccccgaccccaccgcccgccccca

SEQ ID NO: 169258 - DNA, 122 bp, Homo sapiens
gtgggcggatggggatggggaagtgtccggttagagggggtggtcaagaccccaggattccgtgggagaccactggagagagggcactcggcgcagaggaaggcaacctgaggtgtgctttt

SEQ ID NO: 169259 - DNA, 122 bp, Homo sapiens
ccagaacgtgaagatgtcttagcttttagagccgggagaggagggggcttaccttgctgacggtctctagaactgccacctggcacctgagatggctcaggctcaacacaatgagacagttc

SEQ ID NO: 169260 - DNA, 122 bp, Homo sapiens
agaaggccacggccaggaggtggacgcagaaaaaacttgcaccctggctcagattcttcccgtgtgacccaaatctccactcgtggcccgtgccctgctgctagacgccctgacctccgcgc

SEQ ID NO: 169261 - DNA, 122 bp, Homo sapiens
ggatagttagtattgcctcgtgggtaaccattgttacccaatggatactcactactgcctcgtgggtaaccactgttacctggtgtataataagtgttgcctcttgggtaaccactgttacc

SEQ ID NO: 169262 - DNA, 122 bp, Homo sapiens
ataacgaccgcatgaagtgttccatcattagcattgatttttaacaccttgggtatgagtcgttgtcgtgtaactgtttaatattagggcataaccaagaccccctcctattatttgctctc

SEQ ID NO: 169263 - DNA, 122 bp, Homo sapiens
gcgcctcgggcgcaagcgtttggtgtgtctgcgtcgggggcggagcctcttgtccctctgcgcggcccgttccgcctctcttctcccaccgcctgtcggctgacgtgtctgcagttcctccg

SEQ ID NO: 169264 - DNA, 122 bp, Homo sapiens
gggcctcccctaccactctgccgctcatatcccaagtcccaggggctgaagctgaagggtcgagtgggggatggggagagcctctgtcaccctccatgcaatcagctgagtgtggcataaat

SEQ ID NO: 169265 - DNA, 122 bp, Homo sapiens
taacgtgggtggtggggtctccggtcggagcaattcctcccccgtccttcgaggggaaggcgtctgtccaaacacgtccaagctgtccccaggcccagcaggggcggggccgggtggagggg

SEQ ID NO: 169266 - DNA, 122 bp, Homo sapiens
agtgtggtgggcatttgggcactgcggtgtgggccgcagaggcggagagcccagatcccccgaattgattgaagagcaggaatctatgactggctgctgctgagcaggacgcaggctggaga

SEQ ID NO: 169267 - DNA, 122 bp, Homo sapiens
ctgcaccgtggctggaactcatcgtcactgcattgggacgttttcatgacgacgtcagaacgaggaaaggagaaaaggggactttcagggctgcacttcgaagccgcagtgaactctggatt

SEQ ID NO: 169268 - DNA, 122 bp, Homo sapiens
aggaatgtggagaaagggcaggagacctgtgggatggggttgggcccccgagggtggagacggtcactcacctgcatctgccctgggcagcaggaggaaggccagcagaagcaggattggtt

SEQ ID NO: 169269 - DNA, 122 bp, Homo sapiens
tccccccaacatctggaccagctgccctggcggagagacagcaaggggccggcaggtgctcgatgggccccccagggcttctccagggcagcacagggaccccggatgaagactctgtcccc

SEQ ID NO: 169270 - DNA, 122 bp, Homo sapiens
ctctgccctagcccatcaaacacacacacacacacacacacacacacacacacgcacacacgcactcatgcagtgggaggaggggaaggcccctgagccaggcctgtctccctgccatggcc

SEQ ID NO: 169271 - DNA, 122 bp, Homo sapiens
gtgacccacgtggcttcagggcccaggcctgccctgtgactcacgcggcctgtcacccgccgtttcatgtttcaggcctcgcctgtacactggtgcttctcaggaagtcttagggaagatga

SEQ ID NO: 169272 - DNA, 122 bp, Homo sapiens
gcgcacacgctggcgctcactaccgcgcccaccctcgccacggccgcgcggtccatggaccgggccctcatgcgcgtccaggcaggaaaaaaacaggcaactctcggagactgcgagtctcg

SEQ ID NO: 169273 - DNA, 122 bp, Homo sapiens
taaaactatccatagtgaacacacgcaaatgtcaaatggccatcatttagcatctgccctcgggcttccgggtccatcacgtggttactgacaggcaggccgcgcatgcgcgctgctactcc

SEQ ID NO: 169274 - DNA, 122 bp, Homo sapiens
tgtagcagccagcgcttgcaacccgcaatgagcatagagtatttcttttctgaggggggtcgtctagagtgtccgtgaagggaacaggcacgcgaggctggtggaaaaagcgggtgctttga

SEQ ID NO: 169275 - DNA, 122 bp, Homo sapiens
gtcgccgtgctctggcgtgtgactcgaaagtcagcctgcaggcggggtccaaggttagggcgcggtagacttgacccgctttcctcaaactctgttaatgccagaacccggataatctcaac

SEQ ID NO: 169276 - DNA, 122 bp, Homo sapiens
acccgagccacagagatgagtcacacaaacacctccaggctggctgaaagaagccagatacgaaagaatgcgtacatgggactctatttttttttttttttttcgctctgtctcccaggctg

SEQ ID NO: 169277 - DNA, 122 bp, Homo sapiens
atgacttcctgctcagcctctgtgggactatgaacaaaaaaaatttacctcaggagcctccggggcaaatctcatctgccacaaagaacaatgcctgcctacctccttccccagctgtccta

SEQ ID NO: 169278 - DNA, 122 bp, Homo sapiens
catgaggcaccaagcccagcaggtggctcagttgtcagcaaccaaggtaacaggtgtccccggcgtcgggggggtctgcactggacccctgtagacggcactgagcttggagtggtgaaact

SEQ ID NO: 169279 - DNA, 122 bp, Homo sapiens
ccgccggttttctccccgcttgccggggtggtcctcttccctttgtcggtaagtgtgagacgagcaccccgaggtccctccgccttccggggtccgggcggggcgggggccgggagccggga

SEQ ID NO: 169280 - DNA, 122 bp, Homo sapiens
ggcaaggcagggctgggccgggggcggcccaggcgactacaggtagcaggagggcggggacgagagccgttgcgccaccgctggcgcgccggttttgttgttattgcgaggattgtctgggg

SEQ ID NO: 169281 - DNA, 122 bp, Homo sapiens
aggaaagaggcttaattgactcacggttccgcatggctggagaggccctcaggaaacttacgatcatggagaaagtcaaagaggaagcaggcaccttcttcacaaagtggaaggtaggagaa

SEQ ID NO: 169282 - DNA, 122 bp, Homo sapiens
ggcgcgcggcgtgcaggtcgcagctgtggctcgggtgctggcaggtgctggcgggactggcggggatcgccgtggactgcctcaggggcgccgcagcccgctcggcccgagggcccgcctaa

SEQ ID NO: 169283 - DNA, 122 bp, Homo sapiens
attccccaaagacagtgaattacacttcaatctactattttagagacttaagaaatgggccgggtgaggtagttcacacctgtaatcccagcattttgggaggccaaggcaggtggatcact

SEQ ID NO: 169284 - DNA, 122 bp, Homo sapiens
gccgcacctctcatctctccggctcttacttgaaaaagcacttggaagaaactgtgtgtgcgctgggagggccgcggggtgggccggggccggctgcgaggctgaggggggccggctggtgg

SEQ ID NO: 169285 - DNA, 122 bp, Homo sapiens
gcgcgggccggggagccggagcctgcatgcctagcccgtgccgcgcaaacttgagacgggcggatggcacctccaaggctcggaccttggggccctgcagccttgtcgaggccacctcgaag

SEQ ID NO: 169286 - DNA, 122 bp, Homo sapiens
agaaggctcagcaaatcctctttccacgccactatcaccattttcctttccaccaatcagcgcctgccagacgctgattttcccatcagtggaacaaggaataaatattccccagccgtcta

SEQ ID NO: 169287 - DNA, 122 bp, Homo sapiens
ggaagagcactcggtctagtcctgggtggggaacctggtcgggttagctttctgctccctcgcttgcttcgccagagagccggcccagggtcgagaacaaacagctactgcttttctgttcc

SEQ ID NO: 169288 - DNA, 122 bp, Homo sapiens
ccaaacgtgatctcacagtcttcagacacagctcaggactccagtcactgctatgtgattcgaatgcacataccttttctatgcccgtttggtttcatatttcagtttcatgctaggaatcg

SEQ ID NO: 169289 - DNA, 122 bp, Homo sapiens
gtgtgtccgtgtgcccggtgctggcctgcgttgggtgtgtctgtgtgtctggcgctccagcggggagtctgtggggggcatgttgctgaggtgctgggagctgggcctgacacttctgtgtt

SEQ ID NO: 169290 - DNA, 122 bp, Homo sapiens
ttttcctgaaagtctgttttttcatccttccttccttttcatcatctcccgttttcaaaacggctcttaaaccatgcgcaatgcgttaacgttaagtcgtcatttccatctactcaatgaca

SEQ ID NO: 169291 - DNA, 122 bp, Homo sapiens
ctcgctcatcaaaggtcaggggccggcctagaatcgggcgagaagaaagggacgcgccctcggccactaaaaggagcctgaggcctccgaaccggagccatcgctccctgggccccgtccac

SEQ ID NO: 169292 - DNA, 122 bp, Homo sapiens
tccgcggccctgctcagccaatcagcgagtgggctcctaggcaggtcctgagtgacagcgcggcgggctggatcaggagatgcgcgtgcgcggcccggcccggctgatcgcttcgggtgctc

SEQ ID NO: 169293 - DNA, 122 bp, Homo sapiens
agtgcggggcccgctgagcccacgcccacccggaactcgcgccgacccgcaagcaccgcgcgcaaccccggttcccgctcgcgcctctccgtccacgcctcccagcaagctgagggagccgg

SEQ ID NO: 169294 - DNA, 122 bp, Homo sapiens
tcctttaacctccctcgcctttgccctggggcctttcctcactgagaccccactgtcttccgcagcccacgccctctgtttgcatcagggcgttggccgtgtttcttagcaggtttgaggca

SEQ ID NO: 169295 - DNA, 122 bp, Homo sapiens
cgtgaattgtcttggacgcagcagcagcgttgggcgttgaattcactttgccgggcacctcgcgggtctgatgtcccacgtgtggtaagggagacacagctcctgggaagttcagtgcctct

SEQ ID NO: 169296 - DNA, 122 bp, Homo sapiens
tgtgagaccacgggagagagttccacgtacacacagcacacggccaacaacacgctcacacgggctgagtattagtaatattattgtatccacgtcagcttcctgactttgtaacagacagc

SEQ ID NO: 169297 - DNA, 122 bp, Homo sapiens
gagagaggacggaggaggtggcgacgcctgggcacccagacccacagccttgtaaggtgacgaggcctggctggagcggggtgactccggaacagcccatcccagagaccaaagtcaaaccc

SEQ ID NO: 169298 - DNA, 122 bp, Homo sapiens
gcgcagcgacgtggccaccagggccactcggcctggcgtctggagcactggcggcatcggcgaccacagcctctagagacaaagttctgtagtgcactgacttctatcatactcagagtcgg

SEQ ID NO: 169299 - DNA, 122 bp, Homo sapiens
tacaataggatacattttatcaagcatatttcacattcattgaaatcactgaaggctgtccgaggtccctgaaaaaaatggcgaatattttgccactgatgattatactactggattaatat

SEQ ID NO: 169300 - DNA, 122 bp, Homo sapiens
ctgaggagtgtgcatgctagaaaggctgtacgaagagaggggaggaggggagagcccagccgcctgggcgttttaggagttctgattttacacagaactcaagtgagttttgtcaaagctct

SEQ ID NO: 169301 - DNA, 122 bp, Homo sapiens
gggccagcaatggcacagtgtccgtggcagggaagctcaggcccccttcacagatgaagacgctgcggcccagacgggcactcgtggcgcttgcagtcagtgtcgaaggccccttgcttttc

SEQ ID NO: 169302 - DNA, 122 bp, Homo sapiens
attaaatatttcaaaaataagaatgggtgagatgatcctgaagtaatttgcaagtttaaacgttcaggatttgaatgcattcaaaaatgctatcaaagtggaaatggaagtctaaggagatt

SEQ ID NO: 169303 - DNA, 122 bp, Homo sapiens
ccagcagacccgcgctgcgctccgccgctgacatgtgtgccgctcagatgccgcccctggcgcacatcttccgagggacgttcgtccactccacctggacctgccccatggaggtgctgcgg

SEQ ID NO: 169304 - DNA, 122 bp, Homo sapiens
tcagcacccgagggtgcgcagtgaagtctgcccaacgccacgaagaggagtcccggaacacgagggtctcagggtccctgtagatttgccgcagccttggggagacaggcaagccgtgggca

SEQ ID NO: 169305 - DNA, 122 bp, Homo sapiens
tgtccacctgccaaatgggacaatgatcgttcaggctctgctctgaaatagcgcctgtctcggtagccgtggtctcctgcagtaaacctgcaggccgaggagctctcgggcgtgcttgggca

SEQ ID NO: 169306 - DNA, 122 bp, Homo sapiens
gcacacaactcctcctccttctcccccgagacccctgtaccctccccgcgcgccatctcccgcccctcataacaggcccgaagagtaaacccccaaacgcgtccagaagcggctcccaactc

SEQ ID NO: 169307 - DNA, 122 bp, Homo sapiens
ccccactcccgcagccgagccccgccacgcgcgccttgcccgcccgccggccgcccccgccgcccccgccgcccccgggccctgatggactgaatgaaggctgcctacaccgcctatcgatg

SEQ ID NO: 169308 - DNA, 122 bp, Homo sapiens
cgggctctctgggcagccagcgcctgccgcatcccccggcccgggtctgcaggtcgcccccgccaccgccgctcgccgtgcgtcctcgctttgctccacacttacagctgtgccccgggccg

SEQ ID NO: 169309 - DNA, 122 bp, Homo sapiens
ggtgcctcaggggccctctcttcctgtcctgcagcagaagtcagtgtctcgaagaaagtgcgcagcctgcaagattgtggtgcacacgccctgcatcgagcagctggagaaggtgggtgggt

SEQ ID NO: 169310 - DNA, 122 bp, Homo sapiens
cggggtttcactgtgttagccaggatgacctttaattctttaaaaacttatttttttggccgggcatggtggctcactcctgtaatcccagcattttaggaggccaaggcaggtaggacacc

SEQ ID NO: 169311 - DNA, 122 bp, Homo sapiens
agaaaatcagtgtattcttactctgattttggaagaatccaaagagaaaatcagaccgtgcgtactcttgagtatggaagaatcgaaagagagagaaaatcagagcatgcgtactctgaact

SEQ ID NO: 169312 - DNA, 122 bp, Homo sapiens
gaaagagaaggggaacactctaaggctcttggcaaggtggttagctgtggacatagcagccggtccagatacggctgtagaatagcatggtagccttgcactccttggctccagctctgggc

SEQ ID NO: 169313 - DNA, 122 bp, Homo sapiens
tgcaaatagaatgtcaggcaaagaaagaaagagccaggcacacatggagagatggcagcgcgagtgtaagtggtgagaaacccagcgaatgaaaacatctacataagaacgcagacacagcg

SEQ ID NO: 169314 - DNA, 122 bp, Homo sapiens
agataaatacaaaaccatacctttacagggtagagaaccgcttgttatgattttctaaaacgttagagactggagttaccaatgcttcaacaattgacaacttccaatcacatgtcctcttc

SEQ ID NO: 169315 - DNA, 122 bp, Homo sapiens
ggcaagacacaaattaccaatatcaggaatgagaaatgacatcactacggaaaggataatcggggactattattaaggactttaggccaacaaattcagcagcttacactaaacgaacaaat

SEQ ID NO: 169316 - DNA, 122 bp, Homo sapiens
cacaggggtcggtgacgagcagagatactcaccatgtccgcgacgtggcggtgacacgggcgctgacgcctgcccaaaagttccgggggccggccctgaagtggtgtcaccgcacggcccag

SEQ ID NO: 169317 - DNA, 122 bp, Homo sapiens
aaaatacagagcatctcaccctgtgaaaccgatcaccctctttttatcttctctgcgtctcgcactgattaaaagctgtctccaagattggaaattaagaaaagttgctctttctcatgcat

SEQ ID NO: 169318 - DNA, 122 bp, Homo sapiens
cggccaccgtctgcggcgctaagaaaagcgcgggaggtgcccgtagggcgggtcgcgtgacgcgccggtgtcgtgatgcgcctgaagccatccgcgccatcttggttgaggacgagtgccag

SEQ ID NO: 169319 - DNA, 122 bp, Homo sapiens
tttttaggttctgggcctcagtttccctgtgaatgaaatggcgaaaacactcccacataacgggaccttgagaacgaaatgaaaagtatcaagggctgaccgtgagcaaggtgagagccatg

SEQ ID NO: 169320 - DNA, 122 bp, Homo sapiens
cagctttccagcctagcagaaccagatgccccctcctgcatccaaaaagagctttcttgacgctcccctggggaggagggaggcggccaggaggggagaggaagaagcaaggtgcggggatg

SEQ ID NO: 169321 - DNA, 122 bp, Homo sapiens
gcctaagggttgcccaccaggcacaattcaggatcccccccccaaccccccccccccccccggctggcagagacaaagcagtccaaaggcagggcacaaaagcaaatgaggcagtggtgatt

SEQ ID NO: 169322 - DNA, 122 bp, Homo sapiens
gacaagcggtaacaagtgtagtgagcagcgggcgctgagctctggagtctctctcctccacgtgctgagaggcgccctctgattggctctcgccagaggccgggctgcgtcggcctgtgggc

SEQ ID NO: 169323 - DNA, 122 bp, Homo sapiens
ggagtacatataaaggacattattggaataataggggaattgggttatagagtatatattcgataacataatatcaatgctaaatttctggattgtggtcactgtaatgtggctgtgtagga

SEQ ID NO: 169324 - DNA, 122 bp, Homo sapiens
tcgtcagcgagcctcagcgtacttaggacaccgcagtttatctttccttagcgctcctaacggttatggaaaatagcgcttgaaaacctggtaaggactaggcattgttgctcaactcttga

SEQ ID NO: 169325 - DNA, 122 bp, Homo sapiens
tgctagggttctcggcattatcctcagggtgcgacctgttcacccccttttcagtttctccgtttgcatctgagggattcttgggaatgcgaagcacttttgaaatgctctgtgttggttgt

SEQ ID NO: 169326 - DNA, 122 bp, Homo sapiens
ctggcgtgtccaagcgcagtgtcgccggggtcgagggagggcgccggggagtgtctcgggcgggcggaggggccgagagtggagggaggcaggagtttctttgtctccagcacggccgcttt

SEQ ID NO: 169327 - DNA, 122 bp, Homo sapiens
gtgaaaggtcttgggaagtttcccctttctagaccgggggatgcctcttgccaggaaattcgaatgagtccaggaggaaggagaaagcctggacctgacgtaggcctcagagagcctggtct

SEQ ID NO: 169328 - DNA, 122 bp, Homo sapiens
gctcgctgcgccgccgctggagaagctctgggtcggggttggggtccgcgcccggggcggcgctggagtctggatactagaagctgcggttgctcccaggctcgggaactgagacgcagaac

SEQ ID NO: 169329 - DNA, 122 bp, Homo sapiens
agtgtctgccaaagagaaaaaaaaatgtattcaaactagataatctattggtacaaataccgagacacagaagtgataacagctttaagccaatgtttgatggtggtagtcccagcaagctc

SEQ ID NO: 169330 - DNA, 122 bp, Homo sapiens
ccctccgccgccaccgagctcgtcacctcgttgggcccccgggcctcagcccccgccccgcgaggaaaacattctttggcagagcccgacttactaaccagaacctccaggagagctcagct

SEQ ID NO: 169331 - DNA, 122 bp, Homo sapiens
gcccggccgggcatggggccagacgccccggatccgggtttgcaaacgccccaggatttgcgtacatatgctcctcccggatataaagccccaaaccacgccacttcttaggaaaaactaaa

SEQ ID NO: 169332 - DNA, 122 bp, Homo sapiens
ctgccggaccggccctacctcagcaggggagccggcggaaggatgaagtcatgcagcatccggggctgaggagccaagcggggcctcctcccccgcgcctccgcctcccgggccgctgggca

SEQ ID NO: 169333 - DNA, 122 bp, Homo sapiens
gggcactggaaggaggaaaagacagagacggtgaagtctcgcgagaaatacaaactctcgcgcgaggtcgctcgactcacgtgactccgcgcgccctctagccagtccctggctgtcaggga

SEQ ID NO: 169334 - DNA, 122 bp, Homo sapiens
gaatctcagccatttcctggagctgttcccggaaggccaaggccaggctctggggctcagcggaagagtatccagcctttgttcccaattgttcctggccagcttctctgcagggcccctaa

SEQ ID NO: 169335 - DNA, 122 bp, Homo sapiens
aatccgtaaacttagttgctccctgcgctatgacggatccatttcccatcccaggtgaaccgcagctctgcgtcctggttgtataaggagactactgcatcatctctctaacttggaataaa

SEQ ID NO: 169336 - DNA, 122 bp, Homo sapiens
caaagagagaaagatctggagcctctttgccttcttataagggcatgagggggccatcatcgtggcctcatgtaagccaaattacttccaagggccccacctcctaatgccgtcgctttaat

SEQ ID NO: 169337 - DNA, 122 bp, Homo sapiens
gacttcacaggtgtgggctgggggcttttccggacgctgtggcagaggaggcccgcgcgccgcacatctgctgggacccttagctcgcccaggattggtagggagatcctggaagaccagcg

SEQ ID NO: 169338 - DNA, 122 bp, Homo sapiens
ctcccaaacatctatcaagcttgtccaacctccagcccagggaccacatgcagccaaggacggcttggaatacagcccgacacaaattcataaactttcttaaaacattatgagattttttc

SEQ ID NO: 169339 - DNA, 122 bp, Homo sapiens
gcctctcctggggctgccgcgaaaattgggccggttggggtaacatctaacctggggtcccgcgaaagagcccatcagttccgcttgggggccccactgccctcccacctcctacgctgggc

SEQ ID NO: 169340 - DNA, 122 bp, Homo sapiens
aggaagtcaggccccttctcactctgagcagctggtgcctgggattttaggctgtcacgacgattccacccggccagggcaggcccgaaccagccggaggccacaggagaaccaatgagcct

SEQ ID NO: 169341 - DNA, 122 bp, Homo sapiens
gcagctgagctctggcccacagtggttgcagatgatgtcgtagaaagggcccagaaatagcgaggggtggtggtggcggcaaacctggcagcagagcctgtgacaagtgcagtgacgcctca

SEQ ID NO: 169342 - DNA, 122 bp, Homo sapiens
agaagcgcttcgcctttttgccaaggctctctcgcctccgggtgcctgcttgccgtcgtgcgttggcttctttgctgtccctgcgcaggcgtatctggcgcacgacaccttcaaacagcgcc

SEQ ID NO: 169343 - DNA, 122 bp, Homo sapiens
ctgtgtgcgtcttcatgtgctcagtcagatggtgcttcatcttgaactttttgttgcacacggggcagtcaaacggccgcagattgaggtgcatgttcacgtgccggtcccgcatgctcttg

SEQ ID NO: 169344 - DNA, 122 bp, Homo sapiens
ctgttcacctgctcttccagcttcagcaattacaaacaaagcagttagaacacgtgtgtccgtgtctcagaggagcatgtgctgccacttctcccggcgtggactggctggatcacgtggtt

SEQ ID NO: 169345 - DNA, 122 bp, Homo sapiens
tggatttgcttatgtgctgcgaccacacagaactgtatataggctgacgtcaccggatgacgtgtcttttgtttgggttttccagaagctttactgttataaagcaccatgctttgtaacag

SEQ ID NO: 169346 - DNA, 122 bp, Homo sapiens
gctgagcctgaaggacagcaccttacacctgtgcagtccacacttgcctttccaattcgccgttgcatttcatcctcacgtcccttgacaccaaggcccagaagcggagaaggcgcacgtcg

SEQ ID NO: 169347 - DNA, 122 bp, Homo sapiens
agaatggagcgctcccctgtattcttattcttctccgtatgtatgagctgtttttctgtacgtagctgtttgagtcgcaggaaattgaaactagagctgtaataaagcatctcctgaggaga

SEQ ID NO: 169348 - DNA, 122 bp, Homo sapiens
tttccatgcaagatactaccaactaaacatagcaaaacccataaatgaccttaggtcccacgtagtgaatatgacaggtggttcaaatgggacttgtaatttcaggtctttcttgttcagct

SEQ ID NO: 169349 - DNA, 122 bp, Homo sapiens
gctgggctgggtctttaatatttaaagagctctcccggacatttcaagaactccccgacacgattttctgtgatgcgtgggctgtcgggacatctgtcttctatacctaataaagtcgcccg

SEQ ID NO: 169350 - DNA, 122 bp, Homo sapiens
tgaaagcgatccaaacacagccagagggcgccaaaatgccgcaaataaaagttccaaaggcgtcaactggcttttgcgggaaggtaaaattggcttttgtgtaatcaaagagctaccgttgt

SEQ ID NO: 169351 - DNA, 122 bp, Homo sapiens
gccatcgtctcgtttcaaaattccactcccaaagtcattgagtgcttcaacgtggaatctcgcatcctgtgcatgctgtacgttcccgtcgaggagaagcgcagagagcctggggcaccccc

SEQ ID NO: 169352 - DNA, 122 bp, Homo sapiens
acccctcactccactgtgggacgctgggtcagacctactacgggcaggtgctgaagagatcggcagacctccagaccaacggctgtgtcaccacagccaggccggtccccaagcacatccgg

SEQ ID NO: 169353 - DNA, 122 bp, Homo sapiens
actatacggagcagcctctgtttgagacactggtatgcagcattgaacaagaaaaacagacgaggtcccagctcatttgcagtttgtatgcagcgggaggtggagaaaaaagaagcaaataa

SEQ ID NO: 169354 - DNA, 122 bp, Homo sapiens
cctcagcaagtcttgcccggcacccaggtgagcctctggtgggggtgggtagtcaccactcggctctggaggatgaggcctgggccataatccagttgcagggacggatgatctccatctcg

SEQ ID NO: 169355 - DNA, 122 bp, Homo sapiens
caaacactgcgtctttaaacggcgcgccctgcggctaaatgctgaagggtcacagccacacgaaggaaatgggagggagggcgacaactgcctttgatttttaggaataaataaagaagaaa

SEQ ID NO: 169356 - DNA, 122 bp, Homo sapiens
tctctgtggcaagcccagcaagatgactgctctgaggcgccctagggctgagggaggggccgtgacaccagccccgccccccagccacctgggaaaaggaagcacaaaaaggagaagcagca

SEQ ID NO: 169357 - DNA, 122 bp, Homo sapiens
ggcccttcccattgtctcagaaccccaggtgatgccaagacatgggctctcctgggatgccgtgcttggtgacccaggagaaggactagattgctcctggtggttgctcccccttgcagagt

SEQ ID NO: 169358 - DNA, 122 bp, Homo sapiens
tccctagacatactgatttaattggtctgaggtggaacttgggcatagattggctcaaaacgctccccaagtgatcttaatgtatggtctgagaactactgctctgtaaacaaaatgttagt

SEQ ID NO: 169359 - DNA, 122 bp, Homo sapiens
ggtccatcctagggcccctccaggttcaacggtctcctaacctgtagtcacccacaagagcgtgccctttctgcccgcccttcctagcgttgctccctgcttggctgagcactgcggagttt

SEQ ID NO: 169360 - DNA, 122 bp, Homo sapiens
tcattaacttttaaaaactagaaggcgttgagttgaggaattcatgcgttcatttttgagcgtgtgtggtggcaggcctggtgtttcaaagcctctgaagtctcttaggcggttccaccaga

SEQ ID NO: 169361 - DNA, 122 bp, Homo sapiens
atgccaccagcaggaagtagtctgtgatccgcgccatggggagggacgctgggcgggctccgcggctcggggactcgagggctgcgcgctcatggcccgggcctggccctggaccgcacacc

SEQ ID NO: 169362 - DNA, 122 bp, Homo sapiens
ggaatcatggatagaatttggagggtggaaagcagtccacctgtaagttcatttattccacgtgtatttgttgatttcttactatatgctgggcaccattcccagcacaggggctatcacag

SEQ ID NO: 169363 - DNA, 122 bp, Homo sapiens
ttctgccagcccagaagcccaagggacctgccccctgcccgccccccagccctgaccctgcgggggatctcccagacatctgacctttagccaagcccatgtgtgtgtgtgtgtgtgtgtgt

SEQ ID NO: 169364 - DNA, 122 bp, Homo sapiens
tatggtggtaataagccacttaaatagctgtctgcctatgttacaataacatgctctttgcgttccttccaacagctcccaaaggccatgtgctgtggacagtcacactttgtgggtacctc

SEQ ID NO: 169365 - DNA, 122 bp, Homo sapiens
cagctaggacccccgcctctgtcccttgctcccccgtggccttggcaggtccgagcccagcgcccctccagcccgagtcctggtcttgcctgcgcgtccgcccgctcccgccgccgccgctg

SEQ ID NO: 169366 - DNA, 122 bp, Homo sapiens
ttaatgaggttctcgtcctgggcaaactttagcgctggtctttaattgtcactgaactcccgcacagtccctggggaagtgacttccttcctgtccctgctgggtggccttgagcaagccac

SEQ ID NO: 169367 - DNA, 122 bp, Homo sapiens
gtgttagggctttcccctttgttatgtatgagcagacccagatgccagcaccagatgacacggcccctccctccattccctgtgtcccctctgggaaggaccgcacaccttcctgcaggagg

SEQ ID NO: 169368 - DNA, 122 bp, Homo sapiens
agtaatgggtgaggacacaggccaggtccacaatttgtgcacttgagagattaaggcctccgagatcaaattaccacagcaaactgagacagaattattgtagggatgtttggggaggatgc

SEQ ID NO: 169369 - DNA, 122 bp, Homo sapiens
caggcctgtcacctcccttccccagcagagctcccagtccctgcatacccagcggggtggcgactcgggaagagctgagctggagacggctctagaccaagtccggccaaccaggcggttct

SEQ ID NO: 169370 - DNA, 122 bp, Homo sapiens
caccctggaagtcagcgggaaaaccagcagacggtttggccttcctgccctcatctgtttcgcagctcccgagacttgcttggccagagaagttgcaagcgtggcagataacgtagggtcag

SEQ ID NO: 169371 - DNA, 122 bp, Homo sapiens
gccaggaacgtctcgcgctctgctggcatcagcgtgtggaaggggcagcgggcaatcctccggtcctgcggcacagcaccagggtcaccacagggtcccgggcccgcccctcactgctgggg

SEQ ID NO: 169372 - DNA, 122 bp, Homo sapiens
tctacgggccttgtcttcttgactccctgcctgtctagtcatgtatgagaagacacttcccggcagtgtgtgaacaggcacctgtggtgggaacgctgctgtctctgggctggccatctaga

SEQ ID NO: 169373 - DNA, 122 bp, Homo sapiens
gaacaatgcttgtgttcagtcagtacctagcaattattatcatcatcatcttcttcatctcgggaggtgggaacatcgaaagctctcatgtaagatggcaactacgatgaccccagggccct

SEQ ID NO: 169374 - DNA, 122 bp, Homo sapiens
atcaggatgggccagaaaagctcatgccaagcccagctcctgatgctccaggatccaggacgcaaggacctctttctaaacagaacgcagcaaaccctgaggggtggctgaggctggctttc

SEQ ID NO: 169375 - DNA, 122 bp, Homo sapiens
actgagattggttgacattgcaagctcagttttcattcaagcagacacagcatccgacaccgcctatggaccagagtttgattacataatactcgcaggttaccaaattatttacacaactt

SEQ ID NO: 169376 - DNA, 122 bp, Homo sapiens
ggcttcccttactccagtctggaatgttgtacacacggatgagccagcagctcacgcccacgactgctggggtctccggactccctcatcagcctcctgctgtgctgtgtacaaatcctcct

SEQ ID NO: 169377 - DNA, 122 bp, Homo sapiens
cagtgaccttgactgttgccggctgcctcatgttctgcagtttcctgataagtgtgtttccggcttttgaagttatgtctgccgaaaaccacatctggttcaccgccgcctcaacagacaca

SEQ ID NO: 169378 - DNA, 122 bp, Homo sapiens
cctgggaccagcgtggggcagacagccagagttttagtttgggcagcagggtcacaaagccgccccctccctcgcagcagctagagcctggggctgcgtccaggttgggttggaaatcttgc

SEQ ID NO: 169379 - DNA, 122 bp, Homo sapiens
tttataaagtctcctgtaaacaggaagtgtctcagtctgatgtaactgctacgcagtacgcggacggcctctctttccgtcttcagcgggtacgtgtcttccgggcagccctcttcctgctt

SEQ ID NO: 169380 - DNA, 122 bp, Homo sapiens
cggcggactgcgggtcccggcttcggagcccgctgtccagcagggtccaggaggacgtggcgcccactcaccgctgctgctggtgaagtagaacaccatgatcccgggagcggtgcggtgac

SEQ ID NO: 169381 - DNA, 122 bp, Homo sapiens
ttctttgactaggaaagggaactccctgaccccttgcacttcccgagtgaggcaatgcctcgccctgcttcggctcgcgcaccatgcgctgcacccactgtcctgcgcccactgtctggcac

SEQ ID NO: 169382 - DNA, 122 bp, Homo sapiens
tagcatgctataaaatttcaggttagtttaatagtgggcaggaaaatacaccattcttcacggagtttagagctgtattcatttaggaaaatgaatttcaaaagctttcaaagcccagttaa

SEQ ID NO: 169383 - DNA, 122 bp, Homo sapiens
tgcagaaggaagaaccttagctcactgcagcgccacgccggggacggccacccctgccttcggtcccatcagggctcctccaccagccgttcccctgccttgagtccgggggcacatcccca

SEQ ID NO: 169384 - DNA, 122 bp, Homo sapiens
aatgctcactttaatttagataattagagtgttagtccctgaaaaaatattcactaaattcgactgcaattaatggacttgaaatggcaggtttgctttagcccaatgaacatgaatatttt

SEQ ID NO: 169385 - DNA, 122 bp, Homo sapiens
atgaggaaagtaatttgcaaaacagcacgtgcaccatgtgatcccattcttataaggacacggtaaaataactaataggaataacaacagctaatgcttactgggtgctgactaagcgtgca

SEQ ID NO: 169386 - DNA, 122 bp, Homo sapiens
tggcgagatggcagggacaggattcaggcttgcctggccggaatgagggtgctggtcccacgggagggcggctccggcaggcgggggtagggaagctggcggggagctgggcagggcgctgc

SEQ ID NO: 169387 - DNA, 122 bp, Homo sapiens
gcatgctacaatgaccagatagctccatgttgactaggttactgtgggtcccttcagctgcggacacaggactgagagtagacacaaattcaattaaggatcccatcatgttatttattcca

SEQ ID NO: 169388 - DNA, 122 bp, Homo sapiens
ataaatagcatgcttagacatttggatactatcctgagggacccaccaaagggttttaagcgggggcatggcataatcatatctgagcttgtagctctgtagacactacctcccccaatccc

SEQ ID NO: 169389 - DNA, 122 bp, Homo sapiens
agccttgggcgctggggaccagccgccgcgcccgcctcggagtcgcggcccgagtcccggcgccagcagccagcccgctgcgtccccttcccgggctgcagggctgcctccgccgcgccgcc

SEQ ID NO: 169390 - DNA, 122 bp, Homo sapiens
cgcatgttacggggcgagggggctgttggcgtcaggagcgccctgggaggaacttcgtagcggattcgagagacagagggaattcagcaaacttgctgccccgggctgccggctggagcccg

SEQ ID NO: 169391 - DNA, 122 bp, Homo sapiens
tttcattttgatccaatgttaggtttgaaagccacccactgctgtaaactcagctggatccgcgggccgtgattaaacacattgcccgctttgttgccgagatggtgtttcggaaggcgctg

SEQ ID NO: 169392 - DNA, 122 bp, Homo sapiens
atctcggtgctgccgggggaggcgggaggaggagacaccaggggtggccctgagcgccggcgacacctttcctggactataaattgagcacctgggatgggtagggggccaacgcagtcacc

SEQ ID NO: 169393 - DNA, 122 bp, Homo sapiens
ccatttggcaagcagcacgggaagaagcgtagaaggcagtgttctcaagggagctgagatcggcaggcaaaagtatgagaaactggctatttccgtagtccccagataccttttcataagac

SEQ ID NO: 169394 - DNA, 122 bp, Homo sapiens
gtcctcaggaggaacagaacagctagccaacaccctgtgcctccccgacacagcccgcctcgcctcagaagaggagccagccttcagggaagctgcctggagcatctcctcctgcttgttcc

SEQ ID NO: 169395 - DNA, 122 bp, Homo sapiens
gggctccgaggaccctgctcgcacatcgccgctgaccccgcagggcccctgggtcctcgccgccagcagtctgagtgcggtgccccgacactgacatggcctccaggcagcaacggccttcc

SEQ ID NO: 169396 - DNA, 122 bp, Homo sapiens
ggctaaagcctagccagaatcacttcccttcttttggcactaacaccctgacacatctttcggaaacaccacctacctcattttcagtctacctggttaaggaatggtttacctctcttccg

SEQ ID NO: 169397 - DNA, 122 bp, Homo sapiens
ggcctcctcccatccacaggaccgggtccccagcggtgggggcgcagaacccaaggagggcgtggcctgcacaggtgagggtgctttttggagttaacccagcccaggacaggggcctcccc

SEQ ID NO: 169398 - DNA, 122 bp, Homo sapiens
cagctgaagagatgcccagaaggaaacagaaagcagcagcactgggcagggatattgtgccgcatttaggaaatctagataccatttgttctgtgaataggaggaaacttttcaggattcac

SEQ ID NO: 169399 - DNA, 122 bp, Homo sapiens
gatccccgcggcccgggaccggggagggcggtatctcccagttccacgtgttagtgacggcgcccccaatgtccccaggtccggacaggccgagatgacgccgagccccctgttgctgctcc

SEQ ID NO: 169400 - DNA, 122 bp, Homo sapiens
cagtgggccagtgggcctgcgcgccggggtcaggatggcagggcagtgtgtccatcctggcgggacagtaattgccccgggtctgacacgacgccgggggctcagggcgcctccatccatct

SEQ ID NO: 169401 - DNA, 122 bp, Homo sapiens
tgaatgacgacggctcctatggcttatgggtcatttcacgtttgctactgaatatttaatcgtcaccgtggcatcatcatggactggaaaactgagctgtgttgaggtcgacggtctgctag

SEQ ID NO: 169402 - DNA, 122 bp, Homo sapiens
tcatggcttcatcaaaagacgcttcaaatcctgaagttgagatagctctcacctggagcccgtgtgttgttctaccctttggctgggaacacagtcacctgggaatcattccagcaggtggc

SEQ ID NO: 169403 - DNA, 122 bp, Homo sapiens
aatctccgagcagggcctctcacattcccgctcttcgacagcgtcttaattaggccagaacgctgccctccccaccccggccctgtgcccacccctgtgcaggaaggtggcgatctgatgct

SEQ ID NO: 169404 - DNA, 122 bp, Homo sapiens
gtgtgatcgacgctccctgccttctgctccagtggcctgtctcccctgcagcttcgagagcgaacccacccctcacatcattccctggcgaaggctgttatgaatctctacaaagtaaagcc

SEQ ID NO: 169405 - DNA, 122 bp, Homo sapiens
tgaaaatactcttgtcagggtcatccgtgaccttctgtggtcaatccaaagggcacatcgcggtcctgctcttaaataatatgggggtcacatttgacgctgtagctcacttctccctggac

SEQ ID NO: 169406 - DNA, 122 bp, Homo sapiens
attccgagagaactctggaacataggccactcttcaaggacacagaacaactaatggatccgcttaaaatgaagacaacaaagattacttatttgcaaagagggagcaacactcccggaatg

SEQ ID NO: 169407 - DNA, 122 bp, Homo sapiens
tttattgacttcttcattctctgggtagtggtgaacagccggttctttcaggccttccagcgccggagcctcgggcgtgggcaaaaagcgtccatacgcagcctgagccacttgggagcccc

SEQ ID NO: 169408 - DNA, 122 bp, Homo sapiens
ctactcaggaggctgaggtggggggatggcttaagcccaggggtttgaagctgctgtgcgcgatgactgtggcactgcaattcagtcttggtgacagactgagaccctgtctcaaaaacata

SEQ ID NO: 169409 - DNA, 122 bp, Homo sapiens
ggccgcaacgggagacgcctggagtatccgaagcgagcagtgtggacgagtcaccagcaccgtctggccacgcagggtcctcccaggagtggctgcacctacctgcccgcccctcccctggc

SEQ ID NO: 169410 - DNA, 122 bp, Homo sapiens
ctctgctgccaccgcccacgcccacaccaaggccgcccagcagatctctctaccccaccgcgctgtcctccagctggttcccgacatggcagccaggccgattttctcaagaggcaaatcta

SEQ ID NO: 169411 - DNA, 122 bp, Homo sapiens
tccacctctgaaccttcctgtgtgttcttaatcctatcagcttcctctcagctgggatcgcgccgcgtcaacttccgggcggatgcccgccagcacggcctccgccgctccccttctttggc

SEQ ID NO: 169412 - DNA, 122 bp, Homo sapiens
cagcctaggtgctggggtggcggccagggagcacagaacatcacacagtcacattcgcaccgtctccaaatcgcatttcttactgttgacagtgaagtcaacgtttctgggttgaccagaag

SEQ ID NO: 169413 - DNA, 122 bp, Homo sapiens
gggaagggcggaactcaacagctgttcaggacagcatttcctctttcctgagagcagggccggggtgacctcctcctgttgccaccagggatgcctcgggtgggagacagacaaggggacca

SEQ ID NO: 169414 - DNA, 122 bp, Homo sapiens
gtggcccccgctaggccttgcggcagaaagccccggcagcctttgtccccaaggcctgagcgcctcggttttttgcacttcatgccctggggatgtttccctgctgccaggatggagtgcca

SEQ ID NO: 169415 - DNA, 122 bp, Homo sapiens
tttctctacctcggacattcccaggacaattagggctgaagttttcgggagaagcagccccgagcccgtgggataagggggcggcccggctccgcccaggacccctcccggacctccccccc

SEQ ID NO: 169416 - DNA, 122 bp, Homo sapiens
ctggcccccagcctggggcctctcctgatagacccccagaccagggctggcctgtggacacgggggcataccctttcccctggtcctgcctgccccagatgccccgggggtaaagccccttt

SEQ ID NO: 169417 - DNA, 122 bp, Homo sapiens
ccacttctccttcaagacactccatttcctgctgactgaggccctgcagctcctgggcagcggccagcgtccaccccggtgccaccaggtgttccgaggtgtgcacggcctgcgcttccggc

SEQ ID NO: 169418 - DNA, 122 bp, Homo sapiens
atgagtgaagcatgggggagacgggtgtgttcactgcagtcctctcacctccagaccagacgctgactccctcgcagttggtgttctgtcactcttgattttactattcctaaccctctgaa

SEQ ID NO: 169419 - DNA, 122 bp, Homo sapiens
gactcacactcttccagaatcacagcatgtcactttcaacctgctgtgtaacatacatgacgccagtcacaaaggaccagcaaagggtcttaaaataccttctggaaaatctctataactca

SEQ ID NO: 169420 - DNA, 122 bp, Homo sapiens
agttgtatgagagtcctcctcttttctttctttaaaagaagttctttctttgaagaaatccgatacatatacagcctacagtgcaaaatatttaatggtataatttagatcaagttaaaaac

SEQ ID NO: 169421 - DNA, 122 bp, Homo sapiens
tgcaccgaggacccgcacgcccggggtcccacctgcccctctctgcctgcctcccaccggcgcctgggcatcctgcgccggctacaggtccttgctcactgaagcgtcacctctcactcccc

SEQ ID NO: 169422 - DNA, 122 bp, Homo sapiens
aaaactcatcagaggactctgagagggtttaatcaataagaaagtgtggcatcatgatggcggagagaagtatttccagatgtgagtagtcaaccacgtaaagtagctgccaggtagaggga

SEQ ID NO: 169423 - DNA, 122 bp, Homo sapiens
tcacctgttagtcaaatgaggagagggcctctatcgctcattagcaaccatttgtcacttcgcacagagctttgaaaggatttctttgaactttgtttgggattgattttctgcatatgctg

SEQ ID NO: 169424 - DNA, 122 bp, Homo sapiens
cactagctgaattgacatgttctacaatacaatttgcaaggcactgtgtgagtggctgctcgagcatggtcacacaaagagatgcctgcatttataaccccaagtttctaaagccactgggt

SEQ ID NO: 169425 - DNA, 122 bp, Homo sapiens
cggatacacaaatgcacattcagagcataaagacagatgcacccacagtgattgtgcaaacgcttgcatagacacacacgcatgcacgcatgtagataccaatcaacgctggggcgatgtct

SEQ ID NO: 169426 - DNA, 122 bp, Homo sapiens
gccgccctacataacgtccccacataaaaggggcaggtgtgcaggtggtcccagggatggcggcagctctgtctgactcccccctactggggggctatgggggctgtgggagtggagggtga

SEQ ID NO: 169427 - DNA, 122 bp, Homo sapiens
tccgcgcctcccccccctccagtccttcagccgggagggagcctgcatgcctgtctagaccgatctatcaccggcacaccaacaacacccgcgagagcgcggagaccctgcccaggtccccc

SEQ ID NO: 169428 - DNA, 122 bp, Homo sapiens
gcatggcctctaatggggaaaagtgtgataaaccctcaggttaactaaccctgggctcttcgctaaagcagtggttcacagagtatggacattggaccagcagcatcaacatcccctggaaa

SEQ ID NO: 169429 - DNA, 122 bp, Homo sapiens
gaagttcatcaatgtcaaagcacatcatttccagaagaggcacaaatacagcccctctgacgtcttcatcggctaccactcggacgcctgcgcgtctgtggtgctgcaggtcatagagaggc

SEQ ID NO: 169430 - DNA, 122 bp, Homo sapiens
agttgtgataaaagatatataacaaaactttacaattagaatcaagaggaagaaacaacccgactatagcaacagtgctgtgcaaacacagagtgcaactgattcagtgaatgagtcattca

SEQ ID NO: 169431 - DNA, 122 bp, Homo sapiens
ctgagtacttgtcactgctgtatgtccccagatggacactctgcaattgcctggagatagcggcggattggacagtccaggtcgctgagtcaagctaaagcaccgttgttttgactcactct

SEQ ID NO: 169432 - DNA, 122 bp, Homo sapiens
ccggtggacgagaataggagtgggtggcggcccggggacctgggaaagccgggacctgcgcgaaggctcggctctgcggggcccctgaactgcacccggaagatggcgcgagtggccgaaca

SEQ ID NO: 169433 - DNA, 122 bp, Homo sapiens
acagcttggctgggtgcttctggctcatggtctctcctgaggttgcagtcatctgaagctcgactgggaccagaggatctgtttccaaaatggcacgttcacatggctgttggctggaggcc

SEQ ID NO: 169434 - DNA, 122 bp, Homo sapiens
ctccccagctcaggtgctgggaggcctgtggaatcccccttagtctggagtgggggctaccggggtacatgtgggagagatgaggcttctgcttatccccacagacaagaaagaagctagca

SEQ ID NO: 169435 - DNA, 122 bp, Homo sapiens
tcttcaccttttctccacctctgggattctcccggtccggctcagtgtagggccccagcacgccaaaccaacaggcctatcttgtccccacgcgccccgtggtacttggaaactgttcccgg

SEQ ID NO: 169436 - DNA, 122 bp, Homo sapiens
ccttccaagttcctgcaaagcacaagattttgcatcacaaagctgtgagcagctccaagccgaggatcactatttaaatagcactccttctagctcaaatgaattattttgttctgtacctt

SEQ ID NO: 169437 - DNA, 122 bp, Homo sapiens
tatatgggatcagttccaactgaggtttggaggagtcagacaaaccctcgcgaactctagcggaagctgcgggcgttctggagctggacggcggcgacggcagcgcgacagtgtcactgtgc

SEQ ID NO: 169438 - DNA, 122 bp, Homo sapiens
gggctggggtggaagagggcctcactcacacgtgcaaggccttggcagagacatggcctccgaggcacctgaggtctctgtcattcactccctcattctcaggaggccaactcggcctgccc

SEQ ID NO: 169439 - DNA, 122 bp, Homo sapiens
gtggccaccacagctggaagcgtggcctggtgccctcacagctgtctgggagccccttcccgggaacgccggcttttcccgggtgcaccattgcagctggagccattgtcggccgcctcgaa

SEQ ID NO: 169440 - DNA, 122 bp, Homo sapiens
catcttgcctaataacagtaccagtcacagcgggggtggtgggcggggggagggtgggcgcgacactgaggccagcattgctgtcaccatggggtgacagccctcttatagccacacccctt

SEQ ID NO: 169441 - DNA, 122 bp, Homo sapiens
cacactgccgctgacgccttgcgctcactccgccattcgcgtgcgtggctgagagacccccggccccactgcgtgacccacccatgtcgcactggggacagttcgccccccgcctgtgagca

SEQ ID NO: 169442 - DNA, 122 bp, Homo sapiens
tgtatatggttaaaaagggagagtcaaaagctgtaagaaaagtaaaataaatagcagatgcgaacccaggcacaggtgaaaagagtttaactgtgggctgaataaaagatgtatttcccatt

SEQ ID NO: 169443 - DNA, 122 bp, Homo sapiens
agtattaggagtgttcttaaggatgttaaaaataaaactgtcagaaccctcatatattgacgatgggaatataaactggctcagccactttagtaaacagtctggcagtttttaaaaaagtt

SEQ ID NO: 169444 - DNA, 122 bp, Homo sapiens
tgcccagggctctccttgctggcttgttggaatctggcttcaggtctacacggggcctctcgtttggtccagaacagcctggctcatcggctggggcttgcttgtgcagggctggagcgagc

SEQ ID NO: 169445 - DNA, 122 bp, Homo sapiens
acgtgattatcaggtgcagtttttacagcagcaagaaacctgtgcttacagaaagaaacacgtgctagcaacccacctatgcggaaagccacacagagccattgttttctgcactctcaggt

SEQ ID NO: 169446 - DNA, 122 bp, Homo sapiens
tcaatatttccatttgcaccgccctcggatagtctcttgttattgggcatatctttctgacgtcatgagagtgcgataccaggattggtggacggagctggcgaccgccctaggcgcgctgg

SEQ ID NO: 169447 - DNA, 122 bp, Homo sapiens
cagcgccaggcgcggagcgctcagcaggcgcgacaggacccagaccgccatgcctgtagtcgcctccgcgcagtcccgccagtccccgcgcagactacgcctgcgcaccacaccggggtcga

SEQ ID NO: 169448 - DNA, 122 bp, Homo sapiens
taaatcatgaattctgtcttctgaaccctgaagatcctcggggccagaggctatacacatcggtgaaggagagtattttgaacttaaaccttgcctgggagagccctgggtttcaaattcat

SEQ ID NO: 169449 - DNA, 122 bp, Homo sapiens
cacttttctgccatgacagggatgctttgatgggtctgtgctttagcaactgactaggagcgaaggtccaagtgggactctggactgggagcgagggctgagactaaagtcgccacatcagg

SEQ ID NO: 169450 - DNA, 122 bp, Homo sapiens
tgcagtccttttctctttcttcttcaaaaaatatgcctcctttttcccaaccctgaatgacgttcttatttccacacatggttttcataagactaattcaacacataaaacttgactgggcc

SEQ ID NO: 169451 - DNA, 122 bp, Homo sapiens
attgaatcagctatgcagtaggctgggctagcctggcctcctgcaactgatttatgcttccgtgtaagccgttgtattgaggaattgtgttgtagtggagagctttttgattttgctctctc

SEQ ID NO: 169452 - DNA, 122 bp, Homo sapiens
ggccaaaatggcgaaaccccatctctaccaaaaatacaaaactagcctagggcaatagtgcgtgcctgtagtcccagctacccaggagactgaggcaggagaatcgcttgaacctgggaggc

SEQ ID NO: 169453 - DNA, 122 bp, Homo sapiens
accagcaaccagtggcgctcagtgaagggcaggctgggtctgttccgccatttgccggaccggggtggccgagccgaggacctggaggagaagcgccctgcgccctcggtccgcccactccc

SEQ ID NO: 169454 - DNA, 122 bp, Homo sapiens
tcccggccacttgtgtgccccagggccttgccgtaatggaaagggtggtggccaccaccacgtcgatgcggtccactgagaaggggttgaactgcttgtccggccggcgcatgaactcatgc

SEQ ID NO: 169455 - DNA, 122 bp, Homo sapiens
gaagtctgggtggtccagcctcggcgagtaaggtccgcaaatttggccggccccggcgatcggctccctacacacagctacccctggggcgcttcatcccctgggagaagatggagggctct

SEQ ID NO: 169456 - DNA, 122 bp, Homo sapiens
tttctctccactaaggctgctgggtggggccaaaatagtccaggcagccaagtgcagaggcgttgggggcggcaaagatgcaaaggatccccactgtggctgcaccccgaggaggagtccgt

SEQ ID NO: 169457 - DNA, 122 bp, Homo sapiens
ccgaggcatgagcgggggaaggtgaccaggacttggaatttcataaacgtccccgtcaggcgtgacgggtcgtcagggctgctatcaaagtcagtccgcccatctaccctcaaacaagccac

SEQ ID NO: 169458 - DNA, 122 bp, Homo sapiens
tccttcctggtaactgcaacacttcctctgcatctggatatgaagggagccccagaaaagcggaagaatttagacgcacactgggtaggtttgaatttgttttgttttcaaaaattaaacaa

SEQ ID NO: 169459 - DNA, 122 bp, Homo sapiens
aggaggcgcggccagagcggtgggaccggtaacaccaagagccgagaagacgcagggacccgggaccgcgcgcgggaggaaacgcggcggccgcccaagctgtcacctccagcctctcccct

SEQ ID NO: 169460 - DNA, 122 bp, Homo sapiens
tctgaacacctactgtgtgccagacccagtgcttcacaacagttccctttctccaagcaacggtgggaggtattattgctccctcttaacagatgtggaaactgagatcggacccttgacag

SEQ ID NO: 169461 - DNA, 122 bp, Homo sapiens
gcttcttccacccacttcctcccaggaacacgcttctctctgcctccaacagctattccacggtctaggtgcagggaataccagtcgtccacaaaggtgaagtgagacagaatgaacccaca

SEQ ID NO: 169462 - DNA, 122 bp, Homo sapiens
ggccaaaccccctcctctgcctcgctccaacacaggtgagtggcatggcgggccttggcacgggctctgctcccactggcctggtgctcccggtgacggcaatgtggctcctctctgctgag

SEQ ID NO: 169463 - DNA, 122 bp, Homo sapiens
aattgccgctgacccctccgggaccctacccactgcgagggcacccactggtcacggagccgccgcttccctggccgcctcctccagcatagaaccgctcacctgcgaccccggcggcacct

SEQ ID NO: 169464 - DNA, 122 bp, Homo sapiens
gtttggcaactgttttgggctaattatgagtatgaaagaaaaccttatatcacagtttcacgttcatgtaagccactgtgcaacatgaatgaatctttaaatgtgttgacactgaaatcaat

SEQ ID NO: 169465 - DNA, 122 bp, Homo sapiens
tttggaatcatacacccatgtctacttgtctgtttccggcaagcccttcgggaatttgcacgggctccttgacgtaatcctcttcgctcggcctaaactttctccctatgcaatagctttcg

SEQ ID NO: 169466 - DNA, 122 bp, Homo sapiens
cacatcagcactgtgtatttttggaagggtattgcatttttcctttgtggtggattggtccgtgcacttgaaaatacattcacagtgggaaggcaccaactctgctgcacatttatagttga

SEQ ID NO: 169467 - DNA, 122 bp, Homo sapiens
catgtgtttggaaaaacttttgtctcctcataactccagcacagctcagagatgggaaggcgactttttatattaacctgaggagggtattaaatgaagaaggcaatccagacaagtggcta

SEQ ID NO: 169468 - DNA, 122 bp, Homo sapiens
ttcaggctcaggattttcactcttctcgaatgggggtgtccctcccccaatcttctgagtcgcaacagcatctccctccctccaggacctcagagccagagctgggcgagaggccctgacct

SEQ ID NO: 169469 - DNA, 122 bp, Homo sapiens
cattaggacagttgcttaatatctgtgggtctcatttcttcatctttaaacatgttcattcgtaattgatagggctcttggtgaggattacgtgagatgaagaatgtaaagcacctggcata

SEQ ID NO: 169470 - DNA, 122 bp, Homo sapiens
agtcagggctgccagtgagggaaagagaagaaagggtggacggttgaaatggtgatcactcgaagtcagaagatacaagtgagggctttgagacccgctcaggaataactcatgagcaatca

SEQ ID NO: 169471 - DNA, 122 bp, Homo sapiens
accaaatgtctcaaactcaactgtctacaagagccaagtaagtgccctaatgaatgaagtcggccaggcaggaactgagaattacagaagggaggcgtccaccatcacccttgcttggaatg

SEQ ID NO: 169472 - DNA, 122 bp, Homo sapiens
gagcaggctcaggttgacaatgccaactgcacagtcaaccttcaaactccagcaggcatccgccctctgtggcagccagattcagagactccggccagatctggcagactggtagacagcca

SEQ ID NO: 169473 - DNA, 122 bp, Homo sapiens
gagacagaactcaaggtggaagtaccggagtacctggggccgctgatgtttgtgaaactgcgcaaacgtcacttccttcaggttctgcagctggatctccgtgtagggccccggagccgggg

SEQ ID NO: 169474 - DNA, 122 bp, Homo sapiens
acgcttgtctccgggctattagccgatgcatgggagtcgccatcttagcgcggtcaaagccggccgcgcagggttttgggaaactcctcggaagggcggggcttccaaccgggaggccgtag

SEQ ID NO: 169475 - DNA, 122 bp, Homo sapiens
aaacaaagatactcacaaatgcatacacatgctcatgcacaccaactatacacacagacacgtgcatgcacgcacacacccatccatgaaaccacatagacctcttgctgccattaatgcat

SEQ ID NO: 169476 - DNA, 122 bp, Homo sapiens
gtgtcttgctctgttgcccaggctgaagtccagtggctcatctcagttcactgcagactccgcctcctgggatcaagcgatcctcccacctcagcctccagagtagctgggaccacaagcac

SEQ ID NO: 169477 - DNA, 122 bp, Homo sapiens
gccggacgcccaggagcctcaatggggacacgtcgggtggggacggaggcagctcctgtccggacagcgaaacccgcgaggcccaggagagcggcagccagcgcggcacagcccgggagctg

SEQ ID NO: 169478 - DNA, 122 bp, Homo sapiens
tcgtggctttctgggcacataggctggcctctcaaggtgaccctcaaaatcttcattccacgacttgtagtgcaccctcccctggtgctcgggatcccgggtctgactttcggacctctccc

SEQ ID NO: 169479 - DNA, 122 bp, Homo sapiens
cggccagccccgcccccgagcgcggcctccgcccccagcggcgctcatcccaaggctgggcggtctaagcctgcacggggctgcggcagcaggaccactgactgtcctgccggcctccccct

SEQ ID NO: 169480 - DNA, 122 bp, Homo sapiens
ttagcccagggcctgcacatagtaaaagctcgataaatatccattgcatggatgggtagacggaatgaacaaacaagtgcctttttgctgctccgaacaagaacttcagaaacagggaagca

SEQ ID NO: 169481 - DNA, 122 bp, Homo sapiens
tgccacccgaactgggagtgggtatgtgcgtgtgaacctacccgggacatgagagaggctcgtttcgtccaatgaggagtcctggggtaggagtggtgtgtgtatgtgtgtgaatgtgggag

SEQ ID NO: 169482 - DNA, 122 bp, Homo sapiens
cctgttctctgtttccctgggctcagcaggaaacaggccggaggtcatccagcgggggtgcggccaggccggggctcgaaccctgctccgcctgacccagaaaccagacagggctggagaag

SEQ ID NO: 169483 - DNA, 122 bp, Homo sapiens
cccctcaaattgctgccgcagtccgtgttactgaatcaaggacttggtgagcctggtgtccgttcaaaggatggtcttccaaatgtccgttcccacatggggagacttccatgttaacaata

SEQ ID NO: 169484 - DNA, 122 bp, Homo sapiens
tttgaggcaggtaacagggccggtacccacaggactaagcactactaagccatcaaggtccggggcaagctgacctgtgtgggtgtaactaggcacagacttgatgtttcataaacaaacat

SEQ ID NO: 169485 - DNA, 122 bp, Homo sapiens
ccatgagcaggagcaggatgttggggggctgcggggcgcccgaggcccccatccccgcggcgctgagcaccagcaacagctgccaccacctcgtcgccgcgacaaccgccgccatggcaacc

SEQ ID NO: 169486 - DNA, 122 bp, Homo sapiens
tccaagagaaacggattaaattacagaggtgaatggtggccacggccagtgcgcagctcacggcgggcgcgaacaggcatcaggtaggttacagtgtcgttacaacttggttttctaccaca

SEQ ID NO: 169487 - DNA, 122 bp, Homo sapiens
tttagaacaggaatgaaagaaagtaaagtacacttggaagagggccaagtgggcgactggcgggatcaagtgtgtggtttgtccttttgacttggagtttgatatgttgacatgcttcctgg

SEQ ID NO: 169488 - DNA, 122 bp, Homo sapiens
ctaccgagtgtcattgaagccgatgccttcgaggggctgctccagctcatttattcagggcgtctccgcctgccactggatgctcttcctgctcatctccttgtggccagtggccttcaaat

SEQ ID NO: 169489 - DNA, 122 bp, Homo sapiens
catcgttttctcaaacggtctcagtcctggacaattagctggcgtgtttgctggttggagcgcggaagccctttctgtgctgcccaaggcagcaagctcagcccctcggatgggagacctcc

SEQ ID NO: 169490 - DNA, 122 bp, Homo sapiens
gaccaaagggatgtaaatggaggtgtcacaagcagcttctagaaacttctagagctttcccgagggatactattcccctctgttcctccatcttgctgcctggcatgaggacgtcaccttct

SEQ ID NO: 169491 - DNA, 122 bp, Homo sapiens
cggtcgagccccgggctgcgcaccccgctaggaggtgggtactcgtcctccaggagttgccggtgagcccttgaccgtggcaggtcccctccagccgcgagcgacccctcagtacctgccga

SEQ ID NO: 169492 - DNA, 122 bp, Homo sapiens
ataaagaacaatagtatccatagctttttttcaccagaaaatatactcccaaccttttttcgaggcagatcttgatcaacattaacatgggatacagtatgtggaaaagcagtagttgataa

SEQ ID NO: 169493 - DNA, 122 bp, Homo sapiens
gtgcacgcagggacggagtcgggggcgagcagcgagagaggccgggcttgacccttgaggcggggtgggcagcgtccggggagcgcgccgagccgcttctagcctggggtccgcgcgcgccg

SEQ ID NO: 169494 - DNA, 122 bp, Homo sapiens
aaagtatatattttgttaatgttattaaaaagtaaggcaaagactactgcaaaattcaggcgcatatattaggttatgtttataggttttacgtttataggttttacgttcagccttcagac

SEQ ID NO: 169495 - DNA, 122 bp, Homo sapiens
tcgccgcgggcgctctgtgggcgatgagggtctcctgagcgagcaagaccagtctctccccgactcgccacgcgccacgcgccgcgcgccgcgcgccggttcctcggcttcccacgccgggg

SEQ ID NO: 169496 - DNA, 122 bp, Homo sapiens
actggcaactgcagggaagtgataaggatggaagccataatgcaagcaattgagtattaacggaagtgagagtatggcaaagggaaatatgtactactctttcaaggtgctctgagatggag

SEQ ID NO: 169497 - DNA, 122 bp, Homo sapiens
gcaagaaacctaaaagggaaacagtaagtgtctggtcctccggctacgtttttttgcccccgccctcatttttaaacccacgacaagtaggggagatcgtttccgccccaggctagtgtctg

SEQ ID NO: 169498 - DNA, 122 bp, Homo sapiens
aggtgagaaaaagagggcaaaaatcttctttattgagccctcgggcgaggttcactggtccgcagggggagggccagggaagtcgcgctgtgccaaaggtgcagcatgcttttatggatgct

SEQ ID NO: 169499 - DNA, 122 bp, Homo sapiens
gctgaaggccgccctgggggccattgcggaggcagaggcctgggcacggatgctgaaggccgccctgggggccattgtggaggcagaggcctgggcacggatgctgaaggccgccccggggg

SEQ ID NO: 169500 - DNA, 122 bp, Homo sapiens
ttccgcctctgcgtgcctcagtttaccctttccccctttgcccaagggggcaaggtagagcgctgtcggggattgggtttcataatccccttccacttgacctccccgccacacccactaat

SEQ ID NO: 169501 - DNA, 122 bp, Homo sapiens
gaagatgatgctggtgcgccggttccgcgtgctcatcctgatggtgttcctggtggcctgcgcgctgcacatcgccctggacctgctgcccaggctggagcgacgcggcgcgcggccctcgg

SEQ ID NO: 169502 - DNA, 122 bp, Homo sapiens
gtgtgtccttgcacaagtgcatgccagcagcatcatggtggcagtgctctgaggtctgtgcgtgcatgcatgcctgctggtgaggcactgacatgatggggtttgcatgtgcacaggtgtgt

SEQ ID NO: 169503 - DNA, 122 bp, Homo sapiens
ttatgcatgcagatggcaggcactaagtgcttactctttttgaaggtgattgcctctccccgcgatccccctacattgcagtgttttgttttaaacagctttcttgatggagcctaatctta

SEQ ID NO: 169504 - DNA, 122 bp, Homo sapiens
taaagtcctgtgcgatctcccgtaccaagcgctgaaaaggtagcttccggattagcagctcggtcgacttctggtagcggcggatctcgcgcagggccacggtgccggggcggtagcggtgg

SEQ ID NO: 169505 - DNA, 122 bp, Homo sapiens
gcttgtaccgcagccccatatgctacggcctcatcagggttgatgctcttgttgagatcacgtccattgaagtagtcctgaagcagccgctgcaccttggggatgcgggtggagccccctac

SEQ ID NO: 169506 - DNA, 122 bp, Homo sapiens
ttgcagttgctggttgtgggggacagtgtgaataccttctttgcagaagtcctcagtgtacgcccgccctgcaaagaccatgttttcctctgacgggctcacagtttatttttaacaactgg

SEQ ID NO: 169507 - DNA, 122 bp, Homo sapiens
tggcgccgccgttgccatagttacagacgcagccctgcgagggggcgggctctggccgcacgtcattcccggcgcgacgctcctccgcgctcccgcctcctcctggtcggagaccctcggcc

SEQ ID NO: 169508 - DNA, 122 bp, Homo sapiens
gaaattcatttttaatcagtctaacgcatttgagttagtatgacatggtttccctttcaccgatttaatgtcgcaagtccaaagtttatagcattgcatcagggtagttatatgaagggagc

SEQ ID NO: 169509 - DNA, 122 bp, Homo sapiens
agagctcagaggcggcgatgggggactcagagaggctgcaaagggctggggtctgggagccgcaggcgggacttcccccgctgctagccactgccgagcgggaggaggccgggggccggggg

SEQ ID NO: 169510 - DNA, 122 bp, Homo sapiens
taagttggtcaagctagctgagcaatttcttaaggctcctggcaaaagacaggatatttccgatgaggtttggtttcacaactgaactctcctccgtggagacatttgggaaaatacagcca

SEQ ID NO: 169511 - DNA, 122 bp, Homo sapiens
cacagctcctgcgtcctcattggacatcatgggcaatccaagcactggagtccgagtccgcgcactcgttacctgaacaggcgttacaggccctttggcgcctgcgtattcgtgaagtgtga

SEQ ID NO: 169512 - DNA, 122 bp, Homo sapiens
ctctggtgagctgtgtgactcacggcagtgccctcgcctctctgctgagtgtctttacctcgctcgcgggttgtgggagggcttggaccagcacctggtgtgctcttacgctgtttgctgct

SEQ ID NO: 169513 - DNA, 122 bp, Homo sapiens
tttgtaattggggtttgcttattgcagcaaggtctgataagcaaagtctgctggcttcaccgtggtgcctaggtaagggcttagaaatgtaaagaggcttgggggatgggtggacagcacca

SEQ ID NO: 169514 - DNA, 122 bp, Homo sapiens
gcctaggaggactggaagaactttggacaacatttccgcggagaccggcgcgaccacctgcgcggaggtcgcggctcacgctctggccgcactgagcgcggggcggaggcttttgctgggct

SEQ ID NO: 169515 - DNA, 122 bp, Homo sapiens
aagatatattttccatctgaggttggttgaatccccaaaagtggagttcacggacgcggccggctggctatatcatgcagccataaaagggaaagacgtacagacaccccacagatgagtcc

SEQ ID NO: 169516 - DNA, 122 bp, Homo sapiens
gggaggacccagagtcgggctggcctgcgccaggcagacgggctggtgtggggctgtggccgggcactccccacccgccccagcaggctgccgtcccgcaggagcgagtcccgaggcgccgt

SEQ ID NO: 169517 - DNA, 122 bp, Homo sapiens
ggtcagaaatttcctgcccaacccatggggtggagttttctcccttcctatccatcctagcgaatataaaccccgacttgatgtcagtaactggaaggagcagctgttagaattctgatttc

SEQ ID NO: 169518 - DNA, 122 bp, Homo sapiens
ctgctgcctacagcctggacaggacccggaatcaaaccgcaggccctgggtcaccgctgccggaaagagccagttcctgtccgtccatgcacccaccaccaaaacccaggccttcctggagg

SEQ ID NO: 169519 - DNA, 122 bp, Homo sapiens
tcccagatctgccccttaaaagcctagagcctttgaacaagttatgtaacctctgtgatacgaattcctcacatatcaattgaaaattataaattgcctctctcatagtattgctgaaagca

SEQ ID NO: 169520 - DNA, 122 bp, Homo sapiens
tggagtcgctgtgttgatggggctgagctttgggtgttggtgcctgtggcccctccccagcggccagtcccttgttctgacccctgcttggtggtcagaatcacacactgagagctcctgaa

SEQ ID NO: 169521 - DNA, 122 bp, Homo sapiens
caacttccactctaattcagcgaccaagggccctggcagcggtttgcagcctgggggccacgctccccaggctcaggcctgctcgttggcctgctcctagtgcctggacccagttgggggag

SEQ ID NO: 169522 - DNA, 122 bp, Homo sapiens
ttgtatgtcgcagctgcccttggcttaccagaggttgcataggtctgtcctgccacttggcggcggggggcgctgggacagggcccctgccgggcgacttgcctgcccaacccttcggtgcc

SEQ ID NO: 169523 - DNA, 122 bp, Homo sapiens
tccagctctcctttccatccctgggcttcagcctcctcgtgtgacaaattgacagtgattcgtcggggtcctgccgcctgggggagggggccagggcgctcttctgatgcgggaaccagggc

SEQ ID NO: 169524 - DNA, 122 bp, Homo sapiens
gctgacatgtacagtgtcttctgcaatttactaattagtgtaacttgtttcattctcacccgctcaccttgatacctctccctactgtcttgtgatcagacttgctccctcaaaatagatgg

SEQ ID NO: 169525 - DNA, 122 bp, Homo sapiens
acttgggaacagcaggctggccttcaacacctggcttcagaggcagggtgggactccaggcgcttgtgcaggtggttggcaaaatccacctgggtctgggacaggacctggttgatgatgct

SEQ ID NO: 169526 - DNA, 122 bp, Homo sapiens
tacttgtcaaaaattattacccatctacatgtgagaccttcaggtctcagccttactcttcgtttactaatctgaagttttggatttctggcgtatgagaatttctggtttccagcacatct

SEQ ID NO: 169527 - DNA, 122 bp, Homo sapiens
gggaggaatcatggcttccaccccacaggttacagcggggtgggggaatacccaggcccacggtcacagtagaaacacttcagaagtctgagccaaaccccgctgtctcctgagagagaacg

SEQ ID NO: 169528 - DNA, 122 bp, Homo sapiens
attggcttgcattttctaagacagagtgaagcaagagtcaaatactgcacagagagccctcggtaaacattcagttctttttttctctccagctagacagagatgacagcattctgaaacca

SEQ ID NO: 169529 - DNA, 122 bp, Homo sapiens
ttatccaaagacaattaacacaaactgcacacaaggaaatggattgtctgaactctgctgcgctcttttcacctttctgcaagtcagctggaatcctgtatatcactgagaatatcaaatca

SEQ ID NO: 169530 - DNA, 122 bp, Homo sapiens
cgggtccctgctgacagtgtggcgaggggcaaacagtgcagggtctaaggccagactacccgggtccctgctgacagcgtggcgaggggcaaacagtgcagggtctaaggctggaccaccca

SEQ ID NO: 169531 - DNA, 122 bp, Homo sapiens
aatgaccatccataaagccttttgtagactgaaaatccctctgcaaagtggtcagtgcttcgtctactggaaagggcctcagaagcctaagagagagccctttgcagcaggctgcctgggtt

SEQ ID NO: 169532 - DNA, 122 bp, Homo sapiens
cctcccggcccgcagtcccctacccgcggctcgagcgcgctgtacctggggttctggggccgccctcacccttgcgccgccgccaccaccactgccgccggcctagctcccccaggaccgaa

SEQ ID NO: 169533 - DNA, 122 bp, Homo sapiens
cattctcctcttccttcttccgtactgacagaactgcgggtttggggtggcagggtgcctcgctgcatactacttactctccaagtctcccctgcagctaggggtggccatgtgacccagtt

SEQ ID NO: 169534 - DNA, 122 bp, Homo sapiens
tgaactcctgacctcaggtgatccgcccgctttggcatcccaaagttctgtgattaaaggcgtgagccacctcacccagctgtgtaaacataacttctaaatgcatacggacaccaaaaaat

SEQ ID NO: 169535 - DNA, 122 bp, Homo sapiens
tccttgtccgggtcaagggggtgggcatccccaagggggcatttcagggacacgattcagcgacccatctccgggaaaaaaaccaaaactgtgtgtgtgtgtgtgtgtgtgtgtgtgtgtgt

SEQ ID NO: 169536 - DNA, 122 bp, Homo sapiens
ctggcaggtcctttcccttccctttcagaagccctgctgtgtgtcctctggttctagtctcgttgactatctctcttgaaacatccctggcccccacagaaactcctcttcctcaccctcac

SEQ ID NO: 169537 - DNA, 122 bp, Homo sapiens
atatttacagaaaattacctgaagagttccaacctgaggcctcctcatggatgggtcaaacgtgacatcatttgttgttgaggaacccacgaacatctcaactggcaggaacgcctcagtcg

SEQ ID NO: 169538 - DNA, 122 bp, Homo sapiens
agggattttccaattcctgggcacctccttaccagacccagtaaaccgtgctctctcccgcgccctgtaacagcgagtttaccacccctaccctgctgcaggcctgggggctcctctcccca

SEQ ID NO: 169539 - DNA, 122 bp, Homo sapiens
tcccgcggccccaggtgtacagctccccctcggcagtgatggccgcactgtaagtgctcccgcaagcgatgtgcaccacgtgcttcccggcctgctttccagagaaggcggagatcacctta

SEQ ID NO: 169540 - DNA, 122 bp, Homo sapiens
ggtatgcaatcttcttggagtttttgctcctaacatagtcacttgatttgggatgtttaacgactgtgattttgtaatgggacaatataagagctcattacattaaaacataaatacttggg

SEQ ID NO: 169541 - DNA, 122 bp, Homo sapiens
ggatagtctcagaaggcgctagtctcctgccccggtgatcggggatagtctcaggaggcacgagtcgcctgcctcggtgatgcaccgtttctcacaccggctgctctggcccgagctaaagg

SEQ ID NO: 169542 - DNA, 122 bp, Homo sapiens
ttaaccaagagcaagttagtgacaaagtaggaacatgggcagtggttagtgcagaggatccgggaggggaaagaagctgggaaaccttcatgaaatagatgagcttgaagaaaagaaggatt

SEQ ID NO: 169543 - DNA, 122 bp, Homo sapiens
taggtgctgcaatgggtggctacgtgctgcgatgggtggctaggggctggcggcaccctgcgggtatttagaagcacagacccgaggcgcagggaagaagctgtgggcatacagacaggtgt

SEQ ID NO: 169544 - DNA, 122 bp, Homo sapiens
tcggggccgtgtcattgtcagctacctggggatgcgcctctcgctccctcactgtctttgcgtgtgtgttagtgtgtgtgtgtgtgtgtgtgtgtgtgtgtcggcctgtctacgcactacac

SEQ ID NO: 169545 - DNA, 122 bp, Homo sapiens
cagtggggagtggctcccgtggctccgtctcggggaggggcgctgcagcctggcggatgccgctgagcctgctcccctgctgtagtacgaagaggatgaactgagcctcgagctgctggcct

SEQ ID NO: 169546 - DNA, 122 bp, Homo sapiens
tccttccctggcccaccgggaactcccactccctccttaacggtcccgcgggaagcttcgcgccgcagcgcccttaccggaagtgactgggcagacacttttcatagcgcccagatcccgaa

SEQ ID NO: 169547 - DNA, 122 bp, Homo sapiens
aatctcatcggccatctcggtgtccctgcagcccctctcgctctctgcgcccccaggcgccggctgggcagggggcttggtacccgggaacccccacttgctgcccccttccagaggccgtg

SEQ ID NO: 169548 - DNA, 122 bp, Homo sapiens
gccctcactgtgttctgactgtggcctgcttcccataagaaataaaatcagaattctagtcgctgtctcctgagctgtgtggcaggcggacataccttcagttatgtgaggaaaggcacggt

SEQ ID NO: 169549 - DNA, 122 bp, Homo sapiens
gggaggcgccggggcacaccgcgtgggaggtgccggggcacaccgcgtaggaggcgctggcgcacaatgcgtaggaggcactggccttgagagggcttcctcactgtttgcaacacttcatc

SEQ ID NO: 169550 - DNA, 122 bp, Homo sapiens
gcagtgtgtgtctgcattttctagtcccctcgttacactaggcatcccagccaactgcctcgtggaagttgtttttgtaaaccttctagtagtgctggttggttgatagtcactgtttaatt

SEQ ID NO: 169551 - DNA, 122 bp, Homo sapiens
cgtattctgtggggacagatgtgtgtccacccactggcgacaggtgggttgtgggccttgcgcccagtcggccgccccagagcccgcgtcgcaggcagtctctggcccgccttgtgcccggc

SEQ ID NO: 169552 - DNA, 122 bp, Homo sapiens
cggaagtttgttcttggatggccagaaatcctccggaggcagacggtctggggctgaaaccgccacaggccggaaaggtgcgggcgtgaacgtcctgcgcgccgacgtccccccgcgccggt

SEQ ID NO: 169553 - DNA, 122 bp, Homo sapiens
cctgtgcggaatgcggtgtccccagagtggggcgcagggtcggggctggaacacgacaggcggaaggttatgcatatcgtagcgatcttggcttggtaatttgcagtctttcctaccgtgca

SEQ ID NO: 169554 - DNA, 122 bp, Homo sapiens
ctgctggcctcaccaagggccgctcccacagggggacgctggaggggaacaccatgcctgcggtgtcaacggcatcggccctgctgccactccacagcccactgggaattccagccccaccc

SEQ ID NO: 169555 - DNA, 122 bp, Homo sapiens
actggctcatggttgatagtccaatatgaggttcaacaagaggatccacagcagctggggcggcagcaagttgcacggcagcaggtggtctgacagcagagtggacggcagcagctggacac

SEQ ID NO: 169556 - DNA, 122 bp, Homo sapiens
ccctgatactctggagtgtccctgccagagttctgaactcatctggatggttgcaggagccgaccaacctgtgatggttcctaaatctctatccctccaactggggggtcctgactgacaat

SEQ ID NO: 169557 - DNA, 122 bp, Homo sapiens
cccggggctgaccgggtgattcaggcagccctacatcctgctggggtggtgggcttcgagcgcgggtcccaggacgcagtggggcgcagtgcctgcggcaggcggcaggaggcgagcgtggc

SEQ ID NO: 169558 - DNA, 122 bp, Homo sapiens
gaggtgggaaccccggctggcgtccggtagggggaggttcccggggaagcccgcggaaggcgaggtgcctggcctgccatgtaggggctcgttccaagccgcagaccccaccgccctccctc

SEQ ID NO: 169559 - DNA, 122 bp, Homo sapiens
aatctttctgaaagcttgccctcatcgtaagctttgaaaccgttggtgtcctgttagtggcgaggcctgagagacacacggaaaataaaggagagcgacggtgtggctgagagcccccagct

SEQ ID NO: 169560 - DNA, 122 bp, Homo sapiens
ctcaaatggttttagagcttacaacagtgcattgttagcacatggggctttggccattaccgggctgctacaatttatgatagaccacaccctaaagctagccagaaaggaggatgcactct

SEQ ID NO: 169561 - DNA, 122 bp, Homo sapiens
ggattagggtctctcccacagggtttggggttctctctgcagatttgggggagtctctcccgcgggatgagggggggctctccgccgcacccgcctatgatggcccagaggacccgagctcg

SEQ ID NO: 169562 - DNA, 122 bp, Homo sapiens
ggctggtttcttagggatctgagatgcctgctctccagactgctgctctctcagggatggcgcggtgcctgggtcccagactgcccagatagaccactccctgatggagaggggactgctcc

SEQ ID NO: 169563 - DNA, 122 bp, Homo sapiens
agaagaggtgtaaggagtgacagattgatggaaaggcacggcaccttggctggacaggctcgtcctgtttctgggcgggcggggcgcacgccttccgtgtttggtggagaagcagcctgtgg

SEQ ID NO: 169564 - DNA, 122 bp, Homo sapiens
tgtgctgggaccttgccttccagttaataggggtattgtccccgccctgcgggaacaaggcgagctcagctggccttagtcacaggtcaattgcttcatacaaatccgcagggatccgcgga

SEQ ID NO: 169565 - DNA, 122 bp, Homo sapiens
attgtaaaactcagcccttatagaggatggacacatagacggacagaacagacgtgcagacggacagaatggagctgagtcgagaggtcaaccctctcacctacatgcaacaagagtccaga

SEQ ID NO: 169566 - DNA, 122 bp, Homo sapiens
tgagctgcgcgcagggggcgctgaggctgcagccgaagtagagacccagcagcgagatgccgcgggcgcccagcgagtgcacgtccacctcctcgccgccgcccgtcaccagcttctcgccg

SEQ ID NO: 169567 - DNA, 122 bp, Homo sapiens
ccacgaaagcaccagccaggttaactgttaagtgaacacaggtatagagtctccacctggcgccccagggctggcttcctggagctttatgaacctcctaaaattgtatgtgtaattaattc

SEQ ID NO: 169568 - DNA, 122 bp, Homo sapiens
cttgtcttcacacagcctttggttctgcatgcagctcctaatgtaggcaagcttaatgagcgtggtgtgaatcacacagtcaaggtgtcaagcatatgcctttttgactttcacataagttg

SEQ ID NO: 169569 - DNA, 122 bp, Homo sapiens
tcctgtgtctgtttctgtctctctgacccgaaacgcactttcggttatagacagacaaggcgctcaaccaagggacaggcaaatggaataaacagctgaggagaataaacgacctaatgggg

SEQ ID NO: 169570 - DNA, 122 bp, Homo sapiens
ctcgtggtgcaccgttttttaagccggtcggaaacgcgcagtattcgggtgggagtgacccgattttccaggtgcgtctgtcacccctttctttgactcggaaagggaactccctgacccct

SEQ ID NO: 169571 - DNA, 122 bp, Homo sapiens
agggccgcccagccccggggtttgcgaaggtccggggtaggagggctgcagcctgcgcgacgcggcgggaggctacccgggggcgatgggaaggcgggcgcagtcgacccaagggtggagaa

SEQ ID NO: 169572 - DNA, 122 bp, Homo sapiens
agaaacacagaaggtgagatcacagctctgctggcagagattactagcccttggctctctcgtttggcttgggtattttatattatttctgtcataacttttatctttagaattgttctttc

SEQ ID NO: 169573 - DNA, 122 bp, Homo sapiens
atggccaggcacacagcctactctaacaaccctgcccaggtagggagatgcccccctctgcgcattttgagaatcacacaggctagatatcttgggtcaagcagtggctccactcatccaaa

SEQ ID NO: 169574 - DNA, 122 bp, Homo sapiens
cccaggctgcccaaacaactgggtaccctggaacgtggcggcctcgtggattctggaggccgaggcctccgcatcctggtgaggtgcatggcttctctctgggcctgctgtgtctgtgatgt

SEQ ID NO: 169575 - DNA, 122 bp, Homo sapiens
gaagaaaaacagacggaggaggcgctcagcctggaagctgccgggcaggaaccacggggacgggacccgggaaaactggcttcccatctccccaaaccccatccactccactgctgcccgga

SEQ ID NO: 169576 - DNA, 122 bp, Homo sapiens
agaaagccgcatgcagtggctcacgtctataatctcagcacattgggaggtcgaggcgggcggatcacctgaggttaggggttcaagaccagcctggccaacagtgaaaccctgtctactaa

SEQ ID NO: 169577 - DNA, 122 bp, Homo sapiens
ccacatgcccacttcacagagctgctgtgaggactggatgagaaatgtagagaagtatttcggacaccataaagctcaaatacaaggtgttggttaggaaaagtttcaactgacttgtaccc

SEQ ID NO: 169578 - DNA, 122 bp, Homo sapiens
tcagcttgcctaggctctcgttttaggggcaaaactgccggctccagaggggcagctctgcggtgaggcggtgagcctgggcacttctggggagcatgtgggccggtgtcgggggatgaagg

SEQ ID NO: 169579 - DNA, 122 bp, Homo sapiens
tccgtctccgctccctgcccggaggagcgaatctaaggatggggacgcaaccgtggcttccggtcttccctcctcccctaagccgctcccagccgcgcaggccgagcctccgcccccgcctt

SEQ ID NO: 169580 - DNA, 122 bp, Homo sapiens
tccacggcggctggaatgcaattaactgagctggaaggcgtccagcatgcgctctcctctcgtgaagaaaagctctgtgcaaccttcatgaccacgtcagattggacccttggtttcacatc

SEQ ID NO: 169581 - DNA, 122 bp, Homo sapiens
agggtgagggcttctgaacagggagtcctgtgggagtgcttcttggggtatgttgtatgtcgtaatttagactaccatcatttgtgttatttttgaggcacctaaggacttctttccacttc

SEQ ID NO: 169582 - DNA, 122 bp, Homo sapiens
ccggctgggtgacatcgggtctcttcttcaagtgcagcatgtttaaaatgtgcttcttgacggcctccaccatctctggctgagagttgggtacatcctttgggagggcggccagcgcacag

SEQ ID NO: 169583 - DNA, 122 bp, Homo sapiens
tctagactcttcccataaattgatgcgggcgcagcattaccctttgagatctggacattgcgaaaatgcctttaaggctgctgtgctgctgcaccctgtcatttaattgttgtgtgctgttt

SEQ ID NO: 169584 - DNA, 122 bp, Homo sapiens
ggggagagcacgctgcactcaagatgctagcaagcctgcagcaggcggcccagcgagacacggtcccccgcccggccaccaggcgcccgcgcacgcgcacagccgcgctcagtccgcgaggg

SEQ ID NO: 169585 - DNA, 122 bp, Homo sapiens
cccagatgcctgtccccaggttccgacgagcttccgaccgtagtcttcctgtcccggatccgctcaccttacagtcctgcagcacttcgtcgcaatacagcgacaccttctcgtcccgccac

SEQ ID NO: 169586 - DNA, 122 bp, Homo sapiens
cctcgtcctcatctttccctcgtatcctcatgtgagatggggcaatcctactcccccaaacggtgcatgtacacagtgcgtggcgtgctcaccaatgtgaggctctgctgctaccgttctcc

SEQ ID NO: 169587 - DNA, 122 bp, Homo sapiens
gaggttagctgccaggggcagacagttgtaataatgccgacagaattgaggcttgtaagccgggcttcacacttctaaaatgcagttatggattctttcatcggtgttagatcaaggcacca

SEQ ID NO: 169588 - DNA, 122 bp, Homo sapiens
agtcccagccccatttcttttcagcgcgccgggaaaacggggagggggacaaaggtgctgcgtgctgtctttcaactcccgactttttgaatggcatacaatcgtccggccgcagagcggtg

SEQ ID NO: 169589 - DNA, 122 bp, Homo sapiens
agtattcctctgctattatttgcttttaaagaagagccctctgcttcctagcggctgctgcgtatgcttggtccagccacgaagacataatcctctgcgggcagcatcacgtggagcgaggg

SEQ ID NO: 169590 - DNA, 122 bp, Homo sapiens
ccttgcaacattatgggcttggctgaagcttgccaaaaaggaaacagcacaatcctaacacgggtaagcaagcaggtctgctgataatacttaaaaggtgggaggagcaggggaggcagaat

SEQ ID NO: 169591 - DNA, 122 bp, Homo sapiens
tcggccgcagagcttgccccctccccacccgcagacaatgtccgagtccaagaacggccccgagtatgcttcgtttttcgccgtcatggcagcctcggccgccatggtcttcagcgccccgc

SEQ ID NO: 169592 - DNA, 122 bp, Homo sapiens
ggagaagaggagggctaaggtgagaagccagccagagaggagagaagagagccatgtgaacgtcatctgatgatcaaggctgcactctcacaatccgtggccaaaatcagccgtcagagtgt

SEQ ID NO: 169593 - DNA, 122 bp, Homo sapiens
caaccagtaaaatgagtaaatacaggattttatcctccttggagagcagtcaagcacattcgacaaatcttccttgaatcagaaatcactctgaactgcaggtgaaaatgccactgggtttt

SEQ ID NO: 169594 - DNA, 122 bp, Homo sapiens
accgcagctcccacggaaacccctctgggggttcctctggtgggcctgccctggcacctgcgtgtcccccaacacacatgccctgaaagaagtgggcccagcatccggaggagccccggcag

SEQ ID NO: 169595 - DNA, 122 bp, Homo sapiens
tgcttggatatcagcttatcaacagacttccaccaccaccaccagcatataaacagagtccgcgtaagaaaactacactgaataggaatggcagcttttaaaagtgggggaactacagtata

SEQ ID NO: 169596 - DNA, 122 bp, Homo sapiens
ccaacgtggtgaaacccatctctactgaaaacccaaaaattagccaggtgtggtggcgggcgcctgtaatcccagctacttggaggctgaggcaggtgaatcgcttgaatttgggaggcaga

SEQ ID NO: 169597 - DNA, 122 bp, Homo sapiens
aaggggaagggccgggatttggaatgaaaaatgaaagttcttgccccacgaaatggaaaccgtagcagctgttttcaatttcctgcctagtaggcgacatgcccactccctccctcggtctc

SEQ ID NO: 169598 - DNA, 122 bp, Homo sapiens
gcccattctgccattttctcttcgtggaggttgggctcgcgtgctgctctgcgctgtggtcgtcatggaccggaagcgtgtgcggcgcgcctgccttgaggccagcagcagggaagggtgtt

SEQ ID NO: 169599 - DNA, 122 bp, Homo sapiens
tttatcatatgacctcgagggcctccatttctctcctgctaagtgggcaaagataacccccggccccgttagctctcctgcatgggcgagcacgtttgggcttccacagacttccttttgaa

SEQ ID NO: 169600 - DNA, 122 bp, Homo sapiens
aacgatagctaacgatgaatactcagtatgtgtctgccaggtactgtgtaaagtattgtacgtgcatttatatcatttaatcccaaaaccaccttttgaaggggatagcgttattattagtc

SEQ ID NO: 169601 - DNA, 122 bp, Homo sapiens
gaatcccggggtgggtggttccagggcatgatcaagacatcccccaggggctctacactccgctggctcaacactcccatctgtgtaatgggttgaggagcgaggctatccctataggactg

SEQ ID NO: 169602 - DNA, 122 bp, Homo sapiens
gctcaagtgatccgccaccttgacctcccaaagtgctgggattacaggtatgagccaccgcgcccagcctcttgtagctttttgacaagcaggaagttacatcttggactcgactcttggac

SEQ ID NO: 169603 - DNA, 122 bp, Homo sapiens
tcacctcctaaagcccatgcattcccgtcagtaagatggtgcagaaaggcacagccctcacggactgagcgaagatggctgaggtgatgtctgaagtgcattacagtacagtcatgccccat

SEQ ID NO: 169604 - DNA, 122 bp, Homo sapiens
aacaggatccaaagcaaagggggctgcagcccagtggccctggtggatgttgtcccagtacggtccctcatgtctctgggcttaatcactggtattgtttttggcaggtgaggaagcaggca

SEQ ID NO: 169605 - DNA, 122 bp, Homo sapiens
tgatggcagggaggggcagctgaacagcaccccgggtggctgagactgcctcccagtccacgtgggaaccacggcctcaagagccacaggctgagctgccgggagggtgggctgaggggcca

SEQ ID NO: 169606 - DNA, 122 bp, Homo sapiens
ggctccgccgcgtcccggggctgcccggcttccctgctttcggggccacgggccgcgtcgcggctgctccgccatctccgagcgaacgctctgccgcagcctggcccaaccaccgctcccac

SEQ ID NO: 169607 - DNA, 122 bp, Homo sapiens
gccctcttccctgagggttccagggaggggagatccctctcagcatccagatcctcctaacggcagatcctagagtccttgcctaacacagaggagagccttgagtcccagagagaggcggt

SEQ ID NO: 169608 - DNA, 122 bp, Homo sapiens
ttgatttttctcccgtttctctttcctctctagctccttcttagatgttgtattttgtaacgtgttaatagaatttttctttcgtcctgacactttatctattcaggaggtctttgcgagcc

SEQ ID NO: 169609 - DNA, 122 bp, Homo sapiens
cggaggggtccgcgggctcggcccggtccctccgctggggggttaccagccggccggcagcgagatacccagaggcccgtttttccaccgcgttgccatagcaacggcctggccggctgcgc

SEQ ID NO: 169610 - DNA, 122 bp, Homo sapiens
gtccagccgcccgcgaccgctgcaggcgcctggacagctcctcctggggaccggggaaagcgctcttgggacccaggccgaatgctcccgtttgggcacagcctgggggccggggcgcccca

SEQ ID NO: 169611 - DNA, 122 bp, Homo sapiens
aaaaaaaaaaggaactgaatgccgaaatatacggagaagaaactccagttgccacgtccccgaacgtctccacccagtcctgcctgctgtttcgccctcagtctgggcctcgcacagcgcgg

SEQ ID NO: 169612 - DNA, 122 bp, Homo sapiens
ctcaggcttcatttcttcacatcctcacccaaactggttctcacctgtttttactgacaccgtccccgcgggagtgaagtggcgtcttgtggtttggatctgtggctccctcatggctgatg

SEQ ID NO: 169613 - DNA, 122 bp, Homo sapiens
aacggacggtcagccgacagacaagatggcccacgggggtgggcagggaggtcggacggccgctcagaggggcaggtggacggtggcggcaggcgcgggggccggcggggcgcgttggcggt

SEQ ID NO: 169614 - DNA, 122 bp, Homo sapiens
agggcttcgggctatacttgggccacacagccgggaagctgaggccgcggggcaggtctgcgtggcggcgtcgagtccgagcggggaagcccctttgcgggaactctggggcggggcggggc

SEQ ID NO: 169615 - DNA, 122 bp, Homo sapiens
accatgtcgtgtccatcaccaccagtggccctggaactggtgacagtgattctgggatctcggtgagtaaaacccccatcatgaagcctggaaaaccaaaagcggatgccaagaaggtgccc

SEQ ID NO: 169616 - DNA, 122 bp, Homo sapiens
tgcgaggtttggctggagctgggcagcgaggcctgcccacgggtgggagagccgccgacccgtcatgtttgcttctcccgcgcgcagcctcatgggcctgcggtgagatttatggtatctat

SEQ ID NO: 169617 - DNA, 122 bp, Homo sapiens
aaagttcagggacgccaagtgacttgctcaagggagtgaagcggagaagggagagcagggcgtccaccaggccccgccagagtcacgggaaggagccggacatccaatggccacttgatgct

SEQ ID NO: 169618 - DNA, 122 bp, Homo sapiens
atcctccattttctatttttgagttcgacaaaaaggggtcaagaaaatataaatgcatttcgagagttttttagacctccaaaggtcttgaagaataatattttgaggagttaggtataaat

SEQ ID NO: 169619 - DNA, 122 bp, Homo sapiens
cttgggtgatccacccgccttggcctcccaaagtgctgggattacgggtgtgagccaccacgcccggctatgcattttgttttaatgtacgttcgtttgcttgtgtaacaaaacacctaaaa

SEQ ID NO: 169620 - DNA, 122 bp, Homo sapiens
tctgtccccaccttctccccctccactgcctcccggatggggacggagaaacaggggtcccgacaagtgtccacagcaaatcagatgaacaccttgactccgagcagggaggctccttctga

SEQ ID NO: 169621 - DNA, 122 bp, Homo sapiens
ttcctgaatcacaactatccttcaaggccaatctcagataataccttctttggggatattcgttaatctcaaactgacctgtcttccctctgtctcaatttttcttatccctcttatacctt

SEQ ID NO: 169622 - DNA, 122 bp, Homo sapiens
ccaccgcgccacctcctcacctgcagcttgtggactttgtcattgagctccgcccgggcccgctccccatcgctgcacttggactgcagctcctgcacctgcgcctccagcttcttcttctt

SEQ ID NO: 169623 - DNA, 122 bp, Homo sapiens
cctttcctagtcaaagaaagaggtgacagaccgcacctggaaaatcggttcactccaacccgaatactgcgcttttccgacaggcttcaaaaacggcgcaccgcgagattatatcccccacc

SEQ ID NO: 169624 - DNA, 122 bp, Homo sapiens
gccggttgtgcgtgtcctcaggtgtcccgaacaagcgtgagtggcatgtgctcacctgagcgcggcggcttggcggccccgggcgtgtgggtgggggcgcggcggagagctgaggccgggca

SEQ ID NO: 169625 - DNA, 122 bp, Homo sapiens
gcgtggactgggccgagttggggccttagtttccttttctgtaacgtggggcagaactcccgccagtcttctgagggcattgccatgcgtgcctggcatcgtgtgcttgtcgcgtcagtggc

SEQ ID NO: 169626 - DNA, 122 bp, Homo sapiens
ctttcagagaggatctttataagacaattgctcaactaggagggtgtgagtgtatgtgcacgtgcatgctcactcacacacacatgcacactgcagcatttcagagcagggctctataccta

SEQ ID NO: 169627 - DNA, 122 bp, Homo sapiens
ggatcccgcgcgtggggcgcgaagagttgctgacgagcaggctgtttgtccaatgcaaggcgaaagtcgctgaagggggcggggcgaggcgagaggaggcgggcgtgtgttgtggaggaaag

SEQ ID NO: 169628 - DNA, 122 bp, Homo sapiens
cacacacacacaatttttaagcccccaaaggcttaaaatagtactttttgtggtctgtaccggtcagttggatttttactaagaattttaatttatccttgagatacttgatgagtgtatat

SEQ ID NO: 169629 - DNA, 122 bp, Homo sapiens
aggtatgtactattttgacaccaatttttcagaggaagaaactgaggcccagtgagaatacgtgacttgccccaggtgacgtagctagtatgtggcagagccaggtttcaaacccaagcaac

SEQ ID NO: 169630 - DNA, 122 bp, Homo sapiens
gctgctgctgtggcggcggcggcggcggcggcggctgtggctgctgcctgctgctcctcgcggcgaaaagcacaaagcacagcgccctccgcctgcaggcagcccgcccgccgccggccccg

SEQ ID NO: 169631 - DNA, 122 bp, Homo sapiens
caagggcacctgccttcctcgggaagaatgtaaatgcatggaatgcccaagcttcgcccccggctaaacacccccttggcgtccgcctgggggtccccatgaaagtccccgcacgccctccc

SEQ ID NO: 169632 - DNA, 122 bp, Homo sapiens
atatatctggaattaagtatagatattaaaggagactatagctaagatttcttatactaccgtaaaaagtagtgattaaacaaatcaggaaaattataagttgaaacctctctttttaaagg

SEQ ID NO: 169633 - DNA, 122 bp, Homo sapiens
aaccatgggccagctttcaccaagaccctgtgcctgggccaggtggactctgcccatgagcgtgtggtgaagagggaggacggggagaagctggccaaggtgagtcagggcaggggggtggt

SEQ ID NO: 169634 - DNA, 122 bp, Homo sapiens
accggggcgcgcccctctccagctctccccggtacgagcggccgcgtgggcccctgagcgcgcacctgaccccgtccctcacccttcgggccgcgggctggacctctggacgcgctccccgt

SEQ ID NO: 169635 - DNA, 122 bp, Homo sapiens
ctgctcttataggcgagcgcggggcgggcctggctgggggcggtgccgcgcggccccgctcgcctataaggagctgtccgccacccgggtgctgattccagctctcgcgcccgacgaggtgg

SEQ ID NO: 169636 - DNA, 122 bp, Homo sapiens
gaggtagaggaaatgaaggagtcaaagcttccaggtgataaaggacttgtgttgatgtctcgggccaagcatcatgccatctctgctaaactgaacaagcccttcctgtttgacaccaagcc

SEQ ID NO: 169637 - DNA, 122 bp, Homo sapiens
atttggtggattgtggcagtaaatcggggcgagtggggaacccggcgcaggaactgcagccgcggctgggagtggtgctgcccggacgggggcccacggaggtcagaggggaggaggactct

SEQ ID NO: 169638 - DNA, 122 bp, Homo sapiens
aagcgggagcagcgccctcctgtcttcaggaggcgacgccactatttgctctctgggggacgggataccgtcaatggtccccgtccactaaaggccggcagcttcatctaaaacaaaagccg

SEQ ID NO: 169639 - DNA, 122 bp, Homo sapiens
ataatctgcaataaggaaaaactgccacaaacatcactattaactgtggtctgtagggcacgaaggctgatcttttacgttttccctacaatgtatacgtatatctgctaaagaaagtattt

SEQ ID NO: 169640 - DNA, 122 bp, Homo sapiens
ctttcagtctccaggtcacccgcagggtaggtgaccagagccagagaagcggtttattcccggggctccgcactgcacccacgcgcccgcgcctgtgtttgactgcacgaggattctccgga

SEQ ID NO: 169641 - DNA, 122 bp, Homo sapiens
ggccgcacctgccaggccgacgggtctggcccagactggcgccgaggggttcgaggggttcgtgtgctgtggagacgcagaggatccaggcggtgcggtctgagtgaaagccaatggaaaaa

SEQ ID NO: 169642 - DNA, 122 bp, Homo sapiens
caggtggtgcatggtcctcagaaactcctcattctcctcatatccctcaaccggccctttcggcacctggatcagacgcaactgtgggcaagaggccaaaattatctccgggcatcccgaac

SEQ ID NO: 169643 - DNA, 122 bp, Homo sapiens
cctgccagccacctgtttttccagttagaaacactccctctcttcagccgcaccctgccccgggccccagcaggtactcataaccaaacaattgccccaagtgaagccgtcaaggcctttga

SEQ ID NO: 169644 - DNA, 122 bp, Homo sapiens
tggagtgattggaatgaatgcccctcagccattcaaaggtttactaaacatatgaatccacgtgataaaatgctcgtcctagaagcttaagtacaaagagcaggctacaaaatggcccgtgc

SEQ ID NO: 169645 - DNA, 122 bp, Homo sapiens
cttctctcgccgccgcggctgctgcgcgcgtccccgcccagcccagcccagccccgagcacgaccccagccccacgcacgaccctagccccgcgagtcccgcaccgactcgctcccgcccca

SEQ ID NO: 169646 - DNA, 122 bp, Homo sapiens
cgacgactcacacgatcacttaaatacaactgtggtgaaccgcacaagagggacgcgcggcggtctgcggggaatgacgaggccgacctcgtctgcgacccagggagggcaagggtggacca

SEQ ID NO: 169647 - DNA, 122 bp, Homo sapiens
ggaaaggtagtggggtgcttttcggaggtcctatttgaggcccaagatactctcttcctgcgctgatttatcaagagtgcccctcccccacagctagagccgccccagggccatttctgctt

SEQ ID NO: 169648 - DNA, 122 bp, Homo sapiens
aatatagcaagttctggttagcaggaacctcattttagatccatgccatcattgttattgcgagtgacaggaagtagcagctgctgtctccatcagccagggaagataccaagaatccggcc

SEQ ID NO: 169649 - DNA, 122 bp, Homo sapiens
ggagcaagggaaatttgggaatccaatttttcttggtgatgaatcataaacactgagggtcggtgatgtacatgttcccgtccatatatggatatggacatagcaacgtgcccatatgcata

SEQ ID NO: 169650 - DNA, 122 bp, Homo sapiens
cctccgtgggcgggaaagaaaaacaaacgggagccgtctgagatttatgactcttacctgcggcggagatcctctgccaccgctgcccggcagctgaacaaataggctcggagcgacttcag

SEQ ID NO: 169651 - DNA, 122 bp, Homo sapiens
tcgctaaggcaaggtggaggtaggggctgtcctcccgcggctcagttgccttggagacggcgggtgccctggccccgccccgctcggactgacagcggcggccgcatcgcgcctgcgcagtg

SEQ ID NO: 169652 - DNA, 122 bp, Homo sapiens
gcattgggggatggagtggtgggggtgtttcctcagtgtttgagctgaccagattgtgctcgggctggagcccctcagaagttcgccagatccctgcctcaggcttggacgcaccaacaacc

SEQ ID NO: 169653 - DNA, 122 bp, Homo sapiens
atacatatgtgaattgtatgaacgctgtctgaaggcacagattccactaacaggcagcatcgccatccgaccctggcacccggtctccagggacgcgccgtgcacttgggaaaggaggagga

SEQ ID NO: 169654 - DNA, 122 bp, Homo sapiens
tccaggtctcataacttgagttaccacctggaggcatcaggattcacataccgatgtgaacgcaccacagattacgctgtcacagcacaggctgaggagagagcttggcttctttggggagt

SEQ ID NO: 169655 - DNA, 122 bp, Homo sapiens
gcccagagtagagggaggtgctgggtctcgagacgcgtcttcctggggtcccaagtgtggcggtggagctgccgccccttttaatgacaggctgtttccatccccggggtggtcttcagaga

SEQ ID NO: 169656 - DNA, 122 bp, Homo sapiens
tggggccgctcctcggcgcccctgccggcgtgctccctcggtgcgggcgtgtggccaggacgcgggacttggacttggttggatgcctcttggtttggttggttttttttttgttgcttgga

SEQ ID NO: 169657 - DNA, 122 bp, Homo sapiens
ctgagcctctggctctcctacagtgatggcaccacagccccactctccctctacagcccacgagactatggactgctagtgagcagcctggatgagcatgtggccactgtgacccaggaccg

SEQ ID NO: 169658 - DNA, 122 bp, Homo sapiens
ctcctcttcagcatcgcacctgaggtggtcatgtgaggggcgcattcctccagcgccaagcgtcagagcctgcagacaacggagggcagcgcccccccgagatcaggacgaaggaccaccgt

SEQ ID NO: 169659 - DNA, 122 bp, Homo sapiens
tcccgcactcgcgtctgaaaccagaaacgggagtggcttgcggagcaggaatgccgcagccgtgccgccaagttcggagggagaagaagcaggtgggggaccgcaaagccctgtttctagaa

SEQ ID NO: 169660 - DNA, 122 bp, Homo sapiens
cccgaggatgtgaagagaaatgcgccgcgatgaggcggacggaaaggtgtggggccgccgcgcgcccaggtcaccaggggactcgggcccctcccaggccagccccgacgcccagggcttct

SEQ ID NO: 169661 - DNA, 122 bp, Homo sapiens
aggatcaccttctgcagctcgccctgcttcacggacaggtacaactgccgagggtggaaacggagcttcttccgcctgccaagggagcacgggagcggggagagaaggggagctcctcagat

SEQ ID NO: 169662 - DNA, 122 bp, Homo sapiens
gctaattacagcaaattgaaactaattaagcttctcttccctttcccatcaccctgggagcgtcggcgagacccagcccccgcgggcgggcttccaccaagcggtcacccggaggggcgcgg

SEQ ID NO: 169663 - DNA, 122 bp, Homo sapiens
cctcttgaggataagaagccaagccaacaactcacatcagatttcacatgcagtacctatcgatttggcaggcattcctttcttcttgagatcccacaaatatcctaagattccagagcctg

SEQ ID NO: 169664 - DNA, 122 bp, Homo sapiens
cagccctgtgacaagggttcctgtccagtttccccctcccaggatttcgactcagttcagcgaagtcaccgccccgtctgagaaatgaggacaccaaggcttagagcacagccccgaggcgc

SEQ ID NO: 169665 - DNA, 122 bp, Homo sapiens
ccgcagggcaggctggcaggcgggaaactcaagcgcagtttgtaccttacagaatgcaggcgggaattccttctccaggaacccgcggtttttgttcttaaagccaagggattggatgaggc

SEQ ID NO: 169666 - DNA, 122 bp, Homo sapiens
caaagtactcccctttttcccctcctttcctttttgctgccctttttttgagccattctccgcacagttatttaggtattttcttaaaagaaactagatcattttgctcccttgctcaaaac

SEQ ID NO: 169667 - DNA, 122 bp, Homo sapiens
aagtaactggaaatgaaacatacactgcagatgcctttatgtgcatcacctcctgtgattcgcagcaattctttaacagagatattgttattgtgccttttttacagatgagaaaataaaag

SEQ ID NO: 169668 - DNA, 122 bp, Homo sapiens
tcagcataagcctcacatgtcctctcctctctgtcccggtgcagacaagggcatggcccccgccctccggcatctgtacaaggagctcatggggccatggaacaaggatgagatcagcacca

SEQ ID NO: 169669 - DNA, 122 bp, Homo sapiens
tgggacggaagctgccagctcgcttcccccaagctgcctcatggcccgcacgccgcctcacggcccccatgcttcccgccagtcaagatggtctgtggacttagggccagcccttgaggtcc

SEQ ID NO: 169670 - DNA, 122 bp, Homo sapiens
aggaggcggagctggtagtgagccgagaccacgccactgctctcagcttgggtgatagagcgagactctgtctcaaaaaaaagacttggaggaaaatttacagtatatacttgtgacaatgg

SEQ ID NO: 169671 - DNA, 122 bp, Homo sapiens
gtttgggaggaggtttgggggctgggccgggccgtaatggcttctacctgtaaatgaacccgaagagagactctctaccgttccttatcatcctcttggggcacgggacacgtggtagggag

SEQ ID NO: 169672 - DNA, 122 bp, Homo sapiens
atcgcggccgcgcgcgcgcgcactcacgctgctctcgggcgctgggcggggagagccgcgcgcaccggttaattctgccaatcatgcgtctgggcctcccatcgtgtgggccaagccccgcc

SEQ ID NO: 169673 - DNA, 122 bp, Homo sapiens
cggccggggcccgccgccggctcgcgctcgccggtaggcccaggcgctggccccgttgcccgggcaactgcatccaactcgccctgggctggctgcgtctctatggcaaccgcgcgcgccga

SEQ ID NO: 169674 - DNA, 122 bp, Homo sapiens
aggccttagccatagatgacagcacagagaggaaatgaaatgtacaactgcacaggctgccgggcaagctcctgccaggccccgcaggcaacctgcacacgctttctcttcctgaggttgga

SEQ ID NO: 169675 - DNA, 122 bp, Homo sapiens
acgaattaaagagcttcatgagcttgtgagtctccactgccctaaactggaggggatcgtcgtacgtagagacaggcatgggcgtttctgcataacggatcctcaaaacagccctggatggt

SEQ ID NO: 169676 - DNA, 122 bp, Homo sapiens
ctgctttagacagtaatcagacaccttggaccttggttatttgctctttggaacaagcatcgaattgaatccctttgagagttctgtaaagttcagctctgaggtggaagctgagcctctta

SEQ ID NO: 169677 - DNA, 122 bp, Homo sapiens
caacctggcctgggacccgcggctctggaggactatccgcctgacgggcgagaccatcaacgtggaccgcgccctcaaggtgctgacccgcagactctgccaggacacccccaacgtgtgtc

SEQ ID NO: 169678 - DNA, 122 bp, Homo sapiens
ggtgcgtccaaactccccaactccctcagggcagatgggctgggtggggccggccttacccgcctcccctttgcagcaggtcaaaggctctgaggcagatggagcttcaagcaaacaaggag

SEQ ID NO: 169679 - DNA, 122 bp, Homo sapiens
gtccggaaaaccagccaaccactggcttttaaagaacacacacattttacatgcagaaaacgaggcctctgtgtgtgtgtgtgtgtgtgtgtgtgtgtgtgtgtgtgtgtgtgtgtgtgtgt

SEQ ID NO: 169680 - DNA, 122 bp, Homo sapiens
tgttgccactcttgactgtgaaggttccagtgcttgcgtggaggggtttctcacctctcccgggagggcgtgatgctggcagtcaccactaggcagggagaaggaagtcatttgcctctaga

SEQ ID NO: 169681 - DNA, 122 bp, Homo sapiens
agcggcccctgggcggaagacagtttataaaggagaaaatgaagaaggtgggtaatgcaacgaggtgaaaagaaacgttcctactggcgagaaaatgaataatgatattggtctccttcgcc

SEQ ID NO: 169682 - DNA, 122 bp, Homo sapiens
aaacccaaacaagcttctcccttaaaaagataatccagttgtgtatttgttgcacgctgtcgttgcatggtattgttgcctgacgtcctctcactttcaggctgggttctgaaatctgagaa

SEQ ID NO: 169683 - DNA, 122 bp, Homo sapiens
cagctcataaaggcagtgtggacccaaagagtgagcagcagcaagatttattgcaaagagcgaaaaaacaaaccttccacgttggggaaggggacccaagcgggttcccactgctggctcgg

SEQ ID NO: 169684 - DNA, 122 bp, Homo sapiens
agggattaacccgtggtcccagcgctcctgctatttgcattccaaagcagacacctcatgcgctcaaccccgcccgcaggcggctcccgcagtctaagggacctggcgcgagtccgggaagc

SEQ ID NO: 169685 - DNA, 122 bp, Homo sapiens
gacagcttttggctatagagaatgaaactgcttccctttggcggtggaactcttaaacttcgaagagtgaaagaatacaatgaaataaaatgccataagatcactggatttttcagaaaaag

SEQ ID NO: 169686 - DNA, 122 bp, Homo sapiens
tacgatgtaaaagacgaatagataaacccggttccgcagatctgcggcgcgcgcgcctggcgacctcggatacattcattgaagttgccgcgcactcgtacccgggttcacctcgcccctcg

SEQ ID NO: 169687 - DNA, 122 bp, Homo sapiens
ccgctgcggccgccaggcggcgcacccactttcccaccttgaggcggtccagattgtgcccgtattcatccaggatggtcgtcccattgtgcatcaccccattcccagtcatcatccaggtc

SEQ ID NO: 169688 - DNA, 122 bp, Homo sapiens
ggctgacgtcttgcggcagcaagtcgagtgggcggtgcaggaccagccggtggccccccgcgtctgggaggctcccacaccaccagtctccacccaggggcagtagagggaggggaaggcgg

SEQ ID NO: 169689 - DNA, 122 bp, Homo sapiens
gtgataaagacgaggacttaccttggggtagtggggggcaggtggggggcagtgcgtggccgccaaaccgacgttccccagacactcagagatgctaacagaaacaatttaaagaactctca

SEQ ID NO: 169690 - DNA, 122 bp, Homo sapiens
tgtgcgagcccgctggctgaaggatggtgtggagctgaccgatgggcggcaccatcacatcgaccagcttggggatggcacctgctctctgctgatcactggcctggaccgtgctgatgctg

SEQ ID NO: 169691 - DNA, 122 bp, Homo sapiens
gggagaccccaagacccgagaggcccgggggagatggggacccctcccttccccggaggtcgggagtgggggcccccaaactgaagcccctagcaggcaggaaaggccctcacagtgacccc

SEQ ID NO: 169692 - DNA, 122 bp, Homo sapiens
gtggcatgcggtgggggagacagcggcgaggaggctggtttcccagaccccagtgctctccgcattccgtttgtctccaagtttccacccaactctgccagcgtagaggaacggtcctggcc

SEQ ID NO: 169693 - DNA, 122 bp, Homo sapiens
ccggacgtgacgcaagccgctcggcctagggatggtggctggccgggttgtcatggaaaccgctcaggagcagggagctgggagctatgagtgctgactgcgtgaactcggcctccacttcc

SEQ ID NO: 169694 - DNA, 122 bp, Homo sapiens
aactagggctaagagacttagagctcatttgaggtgccacagaaacagaactcactaggccggactcctgtataggagcaggcgctatgtaagaagtgttggttctctaacttcatcaacag

SEQ ID NO: 169695 - DNA, 122 bp, Homo sapiens
tttccagcttcatctacattgtagcatgttcttcttatggctggatgatatgcctctgcacgaatacaccacactttatttacacattcatcaggtcatggacatgtgggttgtgcccactt

SEQ ID NO: 169696 - DNA, 122 bp, Homo sapiens
taattttcatatctatccctccgcacttgattatgttccttgatggcaaaattgtgtcttcgccattttatattctcaaaatttagcaaaaagcgtggtgtatagtggctgctgtatgatgt

SEQ ID NO: 169697 - DNA, 122 bp, Homo sapiens
ggcctgcccaacgcaggtgctagagcgcgaaccaagagaagtcgatcctcctggtctccccggctgcctggtgagtggcagaccacaggctagacttcccaggccccggccctggaaggggc

SEQ ID NO: 169698 - DNA, 122 bp, Homo sapiens
caggggcggcaccagccggagttccgctacctggtggtttctctggggtctgtggggggccggggccgctggggaccgggggcgcctcctgcagccactggagcacagggatccccggcagg

SEQ ID NO: 169699 - DNA, 122 bp, Homo sapiens
ggaggcaggaaaatgcctgaagtccctcaatgggcggatgtcacagtgctgggcgagccacggtgtgtactcggggcctcactttgggagctcagacgtgtcgctggccctgacgctcattg

SEQ ID NO: 169700 - DNA, 122 bp, Homo sapiens
cctaatgcacctggctaactcctagtcatccttcaaaacccctttctagtgatctccctgcgctttaggaaattgtctcaaaactaaggttgagctttggcgaccttccctgggctcccccg

SEQ ID NO: 169701 - DNA, 122 bp, Homo sapiens
gctgctgcccgtgcacctcattccttgaaacctactctgcttagaacaacacaaactaaacgccgccctgtgggccgcgtccctgcaccaccaaccaggcgcctccagaacgcgctcccagg

SEQ ID NO: 169702 - DNA, 122 bp, Homo sapiens
ccggggcgcctccccggagcctgacgggcaggtcgtctgagccctgccaggaggccacgacggaaacccgcccgctgcccagccgtaggcgcccgggcactacctcctttgtccacacgacc

SEQ ID NO: 169703 - DNA, 122 bp, Homo sapiens
catactaggcgatctcgacagtcgctccgtgacagcccaccaacccccaaccctctacctcgcagccaccctaaaggcgacttcaagaagatggaaggatctcacggatctcattcctaatg

SEQ ID NO: 169704 - DNA, 122 bp, Homo sapiens
ctcctactgattggtcagcagacatgagagagaagacacaaggttcccatgagaccttcacggccagcccctaacagctgcctcagctggagagggttgtttcactctaatttgcagatgat

SEQ ID NO: 169705 - DNA, 122 bp, Homo sapiens
acagggtctagcctgaaatttgcctataaaacacaggcccttccttccttttcagccccacggctagcattctcatctaggcaatatcgctttcaccagttaccttaaacgcctcaccagct

SEQ ID NO: 169706 - DNA, 122 bp, Homo sapiens
aaagtacagatactcacatcacatcttcaataaaaatgtttaaaggtgccctattactaacggtgcaaagcctctctctttccaaagtattcaaggcgatttgaagtctgacctcaaacctg

SEQ ID NO: 169707 - DNA, 122 bp, Homo sapiens
ctcctggcataaagttcagttacaatgcagatatcggtgagacaaaaaaaaaaaatgacacgaagaaaggcttgtttacccaccctgaccctgggcactatatggcgctttccaccctccct

SEQ ID NO: 169708 - DNA, 122 bp, Homo sapiens
ccttcctgtggcgtcgccctctctaggtggctcctgcacctgcgcggactcctgcaagtgcgagggatgcaaatgcacctcctgcaagaagagtgagtgcggggacccttcccctctgccgc

SEQ ID NO: 169709 - DNA, 122 bp, Homo sapiens
gggcaggcgcctgggaggtaggagctggtggagatgacagcgtggaactcgtgagccccacgcaacgcctccctgccgcccagggtgggctcctagaagcacagaaatggtcgggctgcggg

SEQ ID NO: 169710 - DNA, 122 bp, Homo sapiens
tctagagaattcccggggggaagattgtccgcctgtctgaggggagcccagaggcacatccggacaagtttcagataacccgtggggatagtttttgctagattttggaagagggggcggga

SEQ ID NO: 169711 - DNA, 122 bp, Homo sapiens
aaagaggaaggagcaaaccccagcaactgtgtcactttccataacggaggctctgatgctcgtctccgggaagaaaagctccctcagtggagccttctcccaacattaaacattggaaacag

SEQ ID NO: 169712 - DNA, 122 bp, Homo sapiens
gacacgtgcatgacatgctgctcatttgttcctcaccgccagctatcttatctccactgacgaccgctgatgagtgcgggcagcctccagacatcctcagacagccttcgatccttcattgt

SEQ ID NO: 169713 - DNA, 122 bp, Homo sapiens
gtgacctgaccgccaagtatattgcgagagtcagtgaattgttagttcttttttataattcgaaaatcaagtattataaggcctgggaaggatgcttatgatattaaattcatattttaaaa

SEQ ID NO: 169714 - DNA, 122 bp, Homo sapiens
acgaggagggtttgtgccagagcaggcggcaccaccactcctcggagactgtgtgggacccgagcgacccctccatcccacggactccaggactcagtcaggggtcgcccttgccttgagct

SEQ ID NO: 169715 - DNA, 122 bp, Homo sapiens
gataattcttcgttgtgaggtactgtcctgtgtcctgaagatgtttagagcatccccggccgtagcatttccccacatctccccaggcgcagtaaccaaaaatgtctccagacactggaaac

SEQ ID NO: 169716 - DNA, 122 bp, Homo sapiens
gggttgccaacctaataagcattattcctgccccaaataagtccaggctatgtggaaaaacgcgaatttctcgttcagcaaagagtaaagctaataccagagttttcctggcctgcagattt

SEQ ID NO: 169717 - DNA, 122 bp, Homo sapiens
cctccgtgtccccgtgtccctccgtgtccccgtgtcccggggagccctacctgtatgggtcgtggatgatgcccctgtagatccacttctccagaacctcgaagtagggagcactggccgcc

SEQ ID NO: 169718 - DNA, 122 bp, Homo sapiens
taggagtcctccatcagttccgctttgggtaaagcaagctctgttgtgacagtttggaaacggttcaccttcctggcctaggaatgcaaacaatggccaagggcaagcacgttttaactgaa

SEQ ID NO: 169719 - DNA, 122 bp, Homo sapiens
ccttctccccgctaggctgggctccggggtgggcggagagtggccgccacaggccatcagcgtccggggttctggaagcagggagggcagaggctggcccagcctatgggagaccctgcaga

SEQ ID NO: 169720 - DNA, 122 bp, Homo sapiens
ccatatataaattatgcccagggctttggccatagcctttccttcccccagtgagaaacccgaaagcaaatgttacccacctctggaggctccaatgtctgagccttcttatgcatagccct

SEQ ID NO: 169721 - DNA, 122 bp, Homo sapiens
acacgaggaactggatccggtcctcgcctagcttctcatgtttcatgagcttgcccaggtcggtgcccatgaacggcatcaccaggtaactgtgggaggggccggagcgctgtcagcggaca

SEQ ID NO: 169722 - DNA, 122 bp, Homo sapiens
cgtgcgtgaggccaggtccacgggcacaccactgtgaacactgattaaacgtggcctccacggcttccaacccccaggacaggaccaaccctctgcccccggctcaggccagagctcggcga

SEQ ID NO: 169723 - DNA, 122 bp, Homo sapiens
ttttcctgcccagatgactttaaatagaaaaatagccctgactctagcatgttctcagcccgtgaacaatgggtatttgctggacaagcggctgcgggccccgtctgcaggcagcttgggcc

SEQ ID NO: 169724 - DNA, 122 bp, Homo sapiens
attggtaagcctcgcccaggacggaggggagtggccgccccggtctggcccggtgagctgcgattttacggctcacaggcccgagtctgggtacgcccagctgtgatggtcgtgagcgtcag

SEQ ID NO: 169725 - DNA, 122 bp, Homo sapiens
taagcccaccgagggaggttagaggaaggcgctgtggctgtgggattaggaggccacagacgggaaccgcgccgagctagactagctgtagaaggctgtctctccaccccgccacagcgctc

SEQ ID NO: 169726 - DNA, 122 bp, Homo sapiens
ataatcccagcactttgggaggtcaaggcgtgcggatcacctgaggttaggagttcaagacgagcctggccaacatggcgaaacccccgtctctactaaaaatacaaaaataatcccagcta

SEQ ID NO: 169727 - DNA, 122 bp, Homo sapiens
cggcagcgtggcacccctgcccacaccaccttccgtctggggctaagctccagtgcctgacgccgcatcccgtctccagggaagcatcaccacagttccaacacggcgtcggaggccccgag

SEQ ID NO: 169728 - DNA, 122 bp, Homo sapiens
gtgtgagaaatgctcttggggtgaggagggaggacttgcagcttcttggatgctacagggcgtggaacatgctgtttccttccactgaaggcctaagatactactaagtggaacaggagaat

SEQ ID NO: 169729 - DNA, 122 bp, Homo sapiens
cccagagggtagacagaggcataggggcgtggggctgagcacaggctggaaaagctcatccgccaggttgtgaagcaaacctctccttcctggcagtgaaatccacatcatgaacggagatg

SEQ ID NO: 169730 - DNA, 122 bp, Homo sapiens
ctccagctcccctgggctgcagtgctgctcccagtggtccagaaacaaggccaggcatggcggctcccagctcagcagcatccctggcgcaggctggcccaggagctctgtgcagggtgccg

SEQ ID NO: 169731 - DNA, 122 bp, Homo sapiens
acttcttgcctttgtagatgctggagttggcatctcgcttctgccggggggaaatgtgcacgctggaatcctcgttttccaattgatcccaaggaacgaaggggcgcagagcgtccgggaag

SEQ ID NO: 169732 - DNA, 122 bp, Homo sapiens
ttaagccggtctgaaaagcgcaatattcgggtgggagtgaactgattttccaggtgcgtccgttacccctttctttgactcggaaagggaactccctgaccccttgagcttcccaggtgagg

SEQ ID NO: 169733 - DNA, 122 bp, Homo sapiens
tagtacttggaggccttctttatttaaaacaaaacaaaaccagttaacactgagagagaccgcagagattgtgcagcctcttcttttacagttggcaaaatggaggctcgggagtttgggga

SEQ ID NO: 169734 - DNA, 122 bp, Homo sapiens
ggcccgcagagaagagtcttggaagctgaggggaggtgacctcagcagcacagtggacagcggtgccagtgacttgggaaggtcagaaaacagaagatggaaagtgggtttggaaaccaggg

SEQ ID NO: 169735 - DNA, 122 bp, Homo sapiens
gtgaagccggccccgaacgccaagtgagtgtgtgccgtgcgcgcgcgggtagctgccgaccgcaacgacataaacttgaaagtgaccgctgtcccggagctccctgctcccaagggacccgt

SEQ ID NO: 169736 - DNA, 122 bp, Homo sapiens
gccctgctccagccctgctccagccctgctccagccgtgctcccctcgctagccctcagtcgaaagcctcctcgcttcggctcagctcaaactcgatttggggctccacccaccgcaagcga

SEQ ID NO: 169737 - DNA, 122 bp, Homo sapiens
atcttccccagggtgtgacctttggcaggttaggtccccaccctggcatcccttccagcccgggcattctgcgactccaggtgcgtgaggaacgtttctggcaccaggcacgccctgggact

SEQ ID NO: 169738 - DNA, 122 bp, Homo sapiens
ggactttaaaacagacctgcgtttccagagctccgctgtgatggctctgcaggaggcgtgcgaggcctacttggtagggctatttgaggacactaacctgtgcgccatccacgccaagcgcg

SEQ ID NO: 169739 - DNA, 122 bp, Homo sapiens
ctttaagcactgtctgaacagaactgcctaccccagtagaagctcttgcgttaagtgccacgcgtaaatgctaatacatcccaacgtattaaagcagggcagggaagctttaaaaatcgtag

SEQ ID NO: 169740 - DNA, 122 bp, Homo sapiens
ctcctgtcttcagcacgggagttgctgagtgggtctaacctaggcgaagtggctcagatacggggttctgttattacctcttccaggacttcaaaaacagaacaatgtggcattgtaataaa

SEQ ID NO: 169741 - DNA, 122 bp, Homo sapiens
ccagacatgatcatatgtaacaaatgcaaagctggggcttgaacatgggctctgggagaacgtgcaaggggacccctctcagaacagagcctacgaaagatctgaccttcctggtgcttgcc

SEQ ID NO: 169742 - DNA, 122 bp, Homo sapiens
tggcataggagaagccaacaataccaggatcctctttcttgacccctagggctgtgaatgcgatggcaaagagggccacctcctcaaaatgaatcaaatgccaagatatgcttcttggtggg

SEQ ID NO: 169743 - DNA, 122 bp, Homo sapiens
gggccggttcagtgggcaggttgactcagcttttcctcttgagctggtcaagttcagacacgttccgaaactgcagtaaaaggagttaagtcctgacttgtctccagctggggctatttaaa

SEQ ID NO: 169744 - DNA, 122 bp, Homo sapiens
cccggcgccagcttttgctttcccagccagggcgcggtggggtttgtccgggcagtgcctcgagcaactgggaaggccaaggcggagggaaacttggcttcggggagaagtgcgatcgcagc

SEQ ID NO: 169745 - DNA, 122 bp, Homo sapiens
agtctggactgggagacagctttctgggagccctgtcccctccccggagaatgcaaattccggagggaggtgagtttccacaagaaccttatcccagagacattgtgaccctggcttcttca

SEQ ID NO: 169746 - DNA, 122 bp, Homo sapiens
gaagtgacactgctaatatatttttttcctcacatcatgtctcttcttaaaatggtttcccgtttcctaaggataaagttcaagctccctaaccaggcctacgaaacccgttaggtcagcct

SEQ ID NO: 169747 - DNA, 122 bp, Homo sapiens
tggggcagggactccgggggaggggcagagggcaggtgccgccgagcaggagggaggacgcggcaggtcacagagcccaccaagtccgaagctggaagttcagattctttgatattcagagg

SEQ ID NO: 169748 - DNA, 122 bp, Homo sapiens
cgcccctgccgagccccgcagcgcggcgccggtgtccagcagcctccaaggcgccgagcgcgggcacgggaacttgagctagcgcaaacttgggcggcctcccagcctgctacccgggccgc

SEQ ID NO: 169749 - DNA, 122 bp, Homo sapiens
acgcccgggctccgcagcagagctagggctgcagggctggggagggtcctgagtgcgaggcgcgtgggacctgggttcagggtgcggagtgagcaaccgggcagcgttgggaggtggtcggg

SEQ ID NO: 169750 - DNA, 122 bp, Homo sapiens
tccaagtctcgaagttgccagttgtgaggctcccaagacgtctcccgcacaccctagggacgattctgcacgggtccctcccgttagccggcggtgcgatccggctccaagggggtgtgtcc

SEQ ID NO: 169751 - DNA, 122 bp, Homo sapiens
tccagggtctagccaagtctccagcccttcctgcattccattccctgtgcctggaacactcgacttcctttggtttggccagttcctacctgtactgcaggtctcttgtgtaacatgcactt

SEQ ID NO: 169752 - DNA, 122 bp, Homo sapiens
gcgcacgcgcgtagacgtccgtcgagtcccaggtggtaggaaacgatgggcttctctgtgcgactgccagcggcctctggcggctcattccgcgcagatctgcgtggcgcccgagccctccc

SEQ ID NO: 169753 - DNA, 122 bp, Homo sapiens
cccgagggggcgggagggcggcagagtgatgcacaatctcaccaatcagaagtcgcctttcgggaaggaggtggggcgatgtcctcggaagaagccagcggattccatgacgcggcggggga

SEQ ID NO: 169754 - DNA, 122 bp, Homo sapiens
gttttacaaggcttagtttacaaattcagtgtccatgacttgaagacatcactatcagctcgaaaagaaaggggtaaacagtagtacagctggatccaggagacaggccagattatttatgt

SEQ ID NO: 169755 - DNA, 122 bp, Homo sapiens
aatcgaggatgagccacaggacaaggggacagtggggacagtcaggacctcaggtacatccgatcccaggggagagatctgggaagcctgcgggcgcatggagatctgtctcagagaggagg

SEQ ID NO: 169756 - DNA, 122 bp, Homo sapiens
gtgcccacctaccgttgatctcgtggaggggggcatcgttcttgttgaagcctttggacacgtaaagacgtcgcacttccgagcaacttttcgacttgagctcggcagccagcagcgcggcg

SEQ ID NO: 169757 - DNA, 122 bp, Homo sapiens
ggaaggggaaggcccagccctcaaagtcagactcctctgtgcccacggcccagccggtgtcggagcagtaaatgaaacggtatgttttctgcaaaagaaacacaagtccacaggctgggcaa

SEQ ID NO: 169758 - DNA, 122 bp, Homo sapiens
cagctttattcctacacgattagacccgttaccccgtgggtctggccgaccgtcctgactcggagatccctgagctgcgccgccgcttccttcgtcaacatccagcagctacttgatgagcg

SEQ ID NO: 169759 - DNA, 122 bp, Homo sapiens
cccaggcaagcactgtacttctagaagaatcttgatgtcagtactttgtaaatccttcctcggcccagccctaaaaatcaccgggtacagacagccatctacaactcagcctcgctgagggt

SEQ ID NO: 169760 - DNA, 122 bp, Homo sapiens
ggctcccagcctcagtttccccattggtaaagcattgacggtggttgcggacggcttctgcggacagagccttgggctccgacgtctgcgcgggtaccggcagcacccccaccccgaaggga

SEQ ID NO: 169761 - DNA, 122 bp, Homo sapiens
acttggcccctaactcagtatgaatggtgtctgtaaaaagaggaaatttggacacagagacgtgcacatagggagaatgctagatgaacataaaggcaaaggccaggtgacacatctataag

SEQ ID NO: 169762 - DNA, 122 bp, Homo sapiens
gcaagatagcagaagcaggaagagagccggccagaagacacctaccctggccggaagacacgtacccctgaagatcgagaaacaggccatctgggtaccacatagcagttacatcagactgg

SEQ ID NO: 169763 - DNA, 122 bp, Homo sapiens
gcgccaggactttgttgaatgaatgactgaactgagcgggcgccgcggggcggggcgtcccgaagcggacctcaaggcgggcggaggcgagagctccgccccggaaggcgggggcgggggcg

SEQ ID NO: 169764 - DNA, 122 bp, Homo sapiens
ggaactccctccaccagccagcgccgcgggtctgtctgccggccccggtggcgtcaacggcgcaggtgcagccggtgagcgccgtctcctagaaacacttccccaaaccccgcggcctcccg

SEQ ID NO: 169765 - DNA, 122 bp, Homo sapiens
tctgcattctcagtgcagcgtggcccgtactggtcacctgggtatagctttactgaatttcgcagatctggaaacggagaagggactggatctccaaacttggactgccttggactgaccct

SEQ ID NO: 169766 - DNA, 122 bp, Homo sapiens
tggtcactagttataggtaactttcacccttccgccggccaccccagccccagggaagaacgttcctttggtgggtgtcggcaaatggggaccggaccccagagtccagaggcggggctagc

SEQ ID NO: 169767 - DNA, 122 bp, Homo sapiens
acttccggctccgggtccttaaaaaaaagacatgtcaaagaaagagtgctgcagaaatgccgaatttaactgttttaatagagagtaatatctaagaatgtaaaggaaaatttatcttacct

SEQ ID NO: 169768 - DNA, 122 bp, Homo sapiens
taccctccccctccccctccccctctccctctccctctttgcacggtctccctctgatgccgagccaaggctggactgtactgcagccatctcggctcactgcaacctccctgcctgattct

SEQ ID NO: 169769 - DNA, 122 bp, Homo sapiens
gcagcgtgggtgccgtggtcacgcctgcgggtggggtgtgagggttgattcatgtgtcagcgctgctgggccacgctgcccagtttagtcaaacgccaatcgcaatttggtgtgcaggtgtt

SEQ ID NO: 169770 - DNA, 122 bp, Homo sapiens
ggggcgaggggccgcggctgggatgaggcgcgccgggagccgcaggtgctggggaggcaacggcgggacggcccgcacctgagtttcctcggaagcgggaaccggctctgaaaggcgatgcc

SEQ ID NO: 169771 - DNA, 122 bp, Homo sapiens
gccggggaactccggtccgtccccaccccgcgcgcggcagagggcaggaccgaaggcgggcgccacctcctgcccgcgtccctgcggtcctagagccggggacccagagacccccgcgtagg

SEQ ID NO: 169772 - DNA, 122 bp, Homo sapiens
tagcacaggaagatatgtttgaaaatactaaatggaataacagaaattacgagagaaatacgatgaattttacctggacgggtaaggaattcttcagatataaactgcacaggatggtctcc

SEQ ID NO: 169773 - DNA, 122 bp, Homo sapiens
acacagttccatggacaaaatgcacttttcaaaccatatgcttacctataagataagatacgtatgtcctactggaattgcaaaaggtcatctttatatatatatatatatatgcatttcta

SEQ ID NO: 169774 - DNA, 122 bp, Homo sapiens
aagggaggggcaggcggaggctcgggcgcatcagccgcggcggagacatgcttgggggagcgcacagcagctccgtgctttggcccagcgcggccttcccccaatctacccccacccgtagc

SEQ ID NO: 169775 - DNA, 122 bp, Homo sapiens
tacaaactgaaagtgctgtgttacagagcccttagggtcagcagcctccgaacccctgcacggaaccaggggctggattactgaactgagtctgtctcacatgcaaagctttcctttccttt

SEQ ID NO: 169776 - DNA, 122 bp, Homo sapiens
caaatgaagctgatgtttccttctgcagcaaggactgcaaagcatccaaaagtccctccccgccaggttttgatggggggttggggtgggaaaaaacagacagctctgggagaaaatggctt

SEQ ID NO: 169777 - DNA, 122 bp, Homo sapiens
cccagttaaagccaaagcaaaggaaaccaaccgcttgcagcggccgctgcataaggagagcgctcacccagcaccctgagacagcctgatgtgtccaggtcctggtagggtgtgcgattgca

SEQ ID NO: 169778 - DNA, 122 bp, Homo sapiens
accatccccacagccctgccccagtaagttcactggacgctggatgctagatgctggcctcgtccgcttgtagccttcacccctgccttccgagtattgtcaagtgagaggcccgctcacgt

SEQ ID NO: 169779 - DNA, 122 bp, Homo sapiens
taggctggtggctggaaaggcagtgtgtacctttgagaataatcagaggtctctgtgggacgaggcaaacaggtggaagataaggcccaaaaactggcccgcctactcttttaggggggtga

SEQ ID NO: 169780 - DNA, 122 bp, Homo sapiens
gccgcacgtctgccttgctctcgggcttcgccatggtgaggggccgggaggggtcacacccggtggggcagagcaagtggggggcacaggtcggggggggggcgaagtaaacaggtcccaag

SEQ ID NO: 169781 - DNA, 122 bp, Homo sapiens
gtgcagcccgaccagtccgtgccctcgtagcagggcggcagctcctcaggcgtgggcgtgcgcccatcacacatatgcaacgacgtcttccacgtggcacccctctgcacatgccgccactc

SEQ ID NO: 169782 - DNA, 122 bp, Homo sapiens
tgaggagatggctgggccagaaggaaagttgaacttgggagttggggaagcctgagtgtccgacacaggtcgctgtgtcccagagcctgagcgtttggctcttaagctgctctgttgtattg

SEQ ID NO: 169783 - DNA, 122 bp, Homo sapiens
acagctcacctgatggcttctgcaatccgagtgctctcctttcgccggtcgctggacaaccggccaattaggtaggaataatccaggccgctgcagaacacgctccccactgcgctgaggag

SEQ ID NO: 169784 - DNA, 122 bp, Homo sapiens
gccaaggctccacctttcgaggtattgagctcaggtcccttcctaacccagtccagaagccgtgggcaagttgttgtcgtgccccacgcttgagagaagtaatggggatgcagactgtttac

SEQ ID NO: 169785 - DNA, 122 bp, Homo sapiens
aggcacttgcttaaaatcactgtggggcacagcccagcagatgtcactctacagaaggaacgtggagtgtaatatctccaccttatacctgacaattcacataatgaaacaatcattaaatt

SEQ ID NO: 169786 - DNA, 122 bp, Homo sapiens
aaatactgactcaaaataccaaaagctctcaccctgaggtggaggggtcaacccaggcttcgtttctaggagaagttgtaagggcttcgtgttctgcactgctaggaaacaccaccctgact

SEQ ID NO: 169787 - DNA, 122 bp, Homo sapiens
gggttgaccagtgagggcctcaatcttccgcagggaacgccgggccacaacgtcgacgcacgaccctgggggttcctgccataaaacagtgagggattctggccaggctgctctgccctctg

SEQ ID NO: 169788 - DNA, 122 bp, Homo sapiens
aggacctgccattatcttccccgggattcttgcacagttagtgaatttcctaaaggatcccggctctctgcctgcttctgctgttaggataggctgccccaagctgccctctgattcctctg

SEQ ID NO: 169789 - DNA, 122 bp, Homo sapiens
gccactgtcaccatcacagtacagcatgttcagcgttttccaggcaggagaggaaaccatcggtctatttccattaattacctgtgatgactgtgttgggaaggggggtggtgagtggctga

SEQ ID NO: 169790 - DNA, 122 bp, Homo sapiens
agctccgccgcagagttcggcgaagccgacgctccctgaccgcgctgcgtctgtctgtcccgcgggtctggagatcttcaaacgatggaacaccggctttgcccttctgagggtctccatcc

SEQ ID NO: 169791 - DNA, 122 bp, Homo sapiens
cacccttactcacatttctcaaggcccgtgttgaatcctgggctctcccgacagcgtcttcgtgcactgtgtgcagagggagcccgcgtcatgcacagcagggaggggagggttttctgtgg

SEQ ID NO: 169792 - DNA, 122 bp, Homo sapiens
agggtcctcagcgcctccgcgccgcttcccacagaggggaaattcagtgtttgtgggacacgtttcctaaggccccgtttatcagtcacagagcacagtgctcagatccagctctgcatggt

SEQ ID NO: 169793 - DNA, 122 bp, Homo sapiens
agctggaaggaggggtccaactgggatctctgacacaaacatggcttaaacaaaaagacacgtaattcattttggaatctcaactgcttttgtgtagacataactttttttttttttttttt

SEQ ID NO: 169794 - DNA, 122 bp, Homo sapiens
ttgacctaaggctgagtttagggaccgagtgcatcagagcagccagaaacgattaccttgcgtgttggagcagggactgtactcacggggcaactgagacccggagaggggaaggggtgtgc

SEQ ID NO: 169795 - DNA, 122 bp, Homo sapiens
gcaaccccaggcagttcttcaggaaaggcggccatctggaaggtgcattcgcctttctgccgtctgcaggcttggcctctagccgggcgtccagcctgcctagccttccacagccctcactg

SEQ ID NO: 169796 - DNA, 122 bp, Homo sapiens
ctgtaaacggaaatgaagctgagggcaaaagtaatcaaccccctggctgacctccgatcccgctccccacgcccatgctggctccagcggtgccccctcccccgccacaaccccggcccccc

SEQ ID NO: 169797 - DNA, 122 bp, Homo sapiens
ttaagaatttcatgttggtgacagaagaattctaaagcaagttcagggcccttctgagcacggggccctgtgcagctgcctgagccacagacccaggaagcgggctctgaccggaattcttt

SEQ ID NO: 169798 - DNA, 122 bp, Homo sapiens
acctcgtgaagctccaaacatggttcctggaggaggttgggggaaaggaggtcctcttctcgtgaacaggccccttgtatccactggaaacaatggaccactgattgcagcaagaggtggag

SEQ ID NO: 169799 - DNA, 122 bp, Homo sapiens
gctccgcctaggtgaggccctgctcggtggtaggtggggtcgggaggctgctggcagggccgccccgagtcaccggagcctctggtggggccgcccggggtcactggagcctctggcggggc

SEQ ID NO: 169800 - DNA, 122 bp, Homo sapiens
tggtcagtgttcgattgacaggtaaatattcagttttactaaaatcaataaggtgtccatcgagcctttagaattttacagtaaaagcaagtgtactattatacgtgactggttggctctga

SEQ ID NO: 169801 - DNA, 122 bp, Homo sapiens
ccgagggcccacgtctcccgagaggctgtggcgcagtctggacccaagccattgtgagagcggcggcgatttcgaaggtccccaagacccactaggtagcagtaccacccagcgggcaggca

SEQ ID NO: 169802 - DNA, 122 bp, Homo sapiens
aggagcgttgtccctgcgagcgcccagcctgaacagaagggaacgaggggggagcaagcccgcggtgcgtgatgctggtcatttatttgccgcagctgccagcacacgtccgctaacctgac

SEQ ID NO: 169803 - DNA, 122 bp, Homo sapiens
tccaccgacgcccagttttcatctctgcgggcttgatcaactcagctttcacggggaaaacgcccaggtcaaacacagttcttcagttattagaaacactgtggtttcccccagttccctgg

SEQ ID NO: 169804 - DNA, 122 bp, Homo sapiens
gttttctccatgcaacttgagtagcagcacagatacgtcaacagtatcaccggggcccttcgttccatgcgtaaacccacacatgcgtaggtgaggcttcttggagctgggtttctctcttc

SEQ ID NO: 169805 - DNA, 122 bp, Homo sapiens
agagagagcaacaggtcctggaactagactttgccaaagattccttgctcagccagacttcggtggcctcctaacctcctcccaggcccatctgtgcactgcattgtcaggttcagttttcg

SEQ ID NO: 169806 - DNA, 122 bp, Homo sapiens
ccttctcgacagacgcccccattgcgacagggggcagatgcacactgcttcagcgtctcccgggagcaaaagggggcaacgcccacagccccctgagcctcagccaggccccggaggtctcg

SEQ ID NO: 169807 - DNA, 122 bp, Homo sapiens
tggatgcgtgtgagccgttttcctggctgttgatggatacatgtgagctgttttcctgcccgttggtggatgtgtgtgagctgttttcctggctattggtgggtacacgtgagcccttttct

SEQ ID NO: 169808 - DNA, 122 bp, Homo sapiens
tacaccaccgtcccctcccaagtcccgggcagtgagaagatgcccggcatggggggcagccggagcctccctttagcagccagagtaggaagggggcttagtgagggagcccagacccaaac

SEQ ID NO: 169809 - DNA, 122 bp, Homo sapiens
gacaggtgtttccagccagctcagcaggctgggcccaggagggaggaaggggaacctgaccgcaggtatttcatcccaggtgcagacttctgctgggggcttaagcctcacttcctctgtga

SEQ ID NO: 169810 - DNA, 122 bp, Homo sapiens
ttcttaattttttttaaagcactaaaactttcagtaaagtaacgggaattatgagaggatcggaccagctaaagttttgtttgtcgcgctgctcatattgatgaccttgaggttgccacacc

SEQ ID NO: 169811 - DNA, 122 bp, Homo sapiens
gcgggcgcggggtcttggcgaacggtcttcggaagcggcggcggcgcgatgaccacgctacgggcctttacctgcgacgacctgttccgcttcaacaacatgtgagtgacacgcgcctaggg

SEQ ID NO: 169812 - DNA, 122 bp, Homo sapiens
ccgaggtgtcgtctgggagtggctgagcgacgatggctcctggactgcctatgaagccagcgtctgtgactatctggagcagcaggtggccaggggcaaccagctcgtggacttggcccccc

SEQ ID NO: 169813 - DNA, 122 bp, Homo sapiens
caatgccaagaaagtatgatttggaattgtgtgataaggtatcatggagggtagactgaacgatttagaatagtgatgatgatagatttcagaagtgaggccaacatggacgaaagaagaaa

SEQ ID NO: 169814 - DNA, 122 bp, Homo sapiens
ggctggttggggttggctccagcctcaaggaggcggcgggcagcggttggccgggagaatcgggcagccaggtgcaggggggtctccccagtgcccacggtgtgagcctggggacaggcccc

SEQ ID NO: 169815 - DNA, 122 bp, Homo sapiens
acgctgatctcttgcccaatcagcgagttcggcttcgcgaggttggtgcccattggctttcgcataaaagctccgaggttacagacgtttccacctcttgccggcctcttaggtaattggcg

SEQ ID NO: 169816 - DNA, 122 bp, Homo sapiens
cactggctctgttggcttgacccaacccttggcagagaaattgagcatttgagactaagccgggtgagtaggttagattcatgtggttgtaagtgatggaaatctgatggaggtttcttagg

SEQ ID NO: 169817 - DNA, 122 bp, Homo sapiens
gcagcgccagggcgcagaccagcaccactcagccagagcccgcagcccggtccagctgcgcgtgtttacctctgggcctagctacagggtccccgccagcccagctctgggcacggcctggg

SEQ ID NO: 169818 - DNA, 122 bp, Homo sapiens
tgcaaggcccctcctctccgaagccattttcctacacatcgggctggagtaattgggagccgaaagatggcaggcagaataaaaaggctcattaggtgagagtaataaaacaaaacaaaaca

SEQ ID NO: 169819 - DNA, 122 bp, Homo sapiens
aacacccgccccaccgccctgctccccaggcccctgctgtcacctcccagcccgccctatcgtgactcctccccatgagctcccttcagactcagagtctcgtagctgtgtccttctggccc

SEQ ID NO: 169820 - DNA, 122 bp, Homo sapiens
tgtgtgactgctgcttctcctcatagggtagctgtccaaacagagggaatttttgaaaaacggtagaagatgaacacagaaccgcaacctgggaaaattcaccaagcatgccaagcttgcca

SEQ ID NO: 169821 - DNA, 122 bp, Homo sapiens
agcgcaaggcgcccagtgtagactggcccgccagctgcagtagcccgagatgtacccgcgcgtgctctagtgtccagaggtgacagtggttaacttggctcttgctccacgaggctggaacg

SEQ ID NO: 169822 - DNA, 122 bp, Homo sapiens
cgggccccggcgaggtggcgctgcaggagctttgcgggcagctggagcgctacctgggcgcggcggcccacggctgcggcggcgccaccgtgcgccacgctgttttcgcggctaaaggccgc

SEQ ID NO: 169823 - DNA, 122 bp, Homo sapiens
agggcggcgggaggacggcaggaccctggaccacccttgtaaaccctaaaccgaggccgacgggaggagggcaggacgctgtacccttgtaaaccctaaacccaaggcggggagggtggcgg

SEQ ID NO: 169824 - DNA, 122 bp, Homo sapiens
ttcggcctgggcagcggtgctgagcgccaggagcaggaatgtagctgccaggaaacgcatcgcggataacgaagttccaagctcgggaaagaagcagcggccgcccgcggtcacaagacaaa

SEQ ID NO: 169825 - DNA, 122 bp, Homo sapiens
tgaggcagtggcgacagcggcggcgagaggatgaacaacaagttcgacgcgtgagtggctcgtggccgcccccggggccccttccccgaacagttcccccgcgcccgcccccgctggggctg

SEQ ID NO: 169826 - DNA, 122 bp, Homo sapiens
acagcctgacacagtgctcgaccttgatagcatggggcccctggcccagagttgctgtgccgtgtccaagggccgtgcccttgcccttggagctgccgtgcctgtgtcctgatggcccaaat

SEQ ID NO: 169827 - DNA, 122 bp, Homo sapiens
ttcctgttgctgagacttcctggatggagccgccctcaccgccgggcccgtggccctgcgcggagctgtgtccaataaagttcttggatgtgacgggcctgtgtctgctcagcttgttgggg

SEQ ID NO: 169828 - DNA, 122 bp, Homo sapiens
caacaatcacccttaggctttgtcaggcatcccagagaatcctccgtcctaccctgggcacgccatgcgcaccaggcagggagggtggctctcagcaaggggctgaggactctggcccatcc

SEQ ID NO: 169829 - DNA, 122 bp, Homo sapiens
gaggggggcgggccagacgagcggggcggggcgagctgctgcctaatcctttgtctgccgcgttccagcccttcccggaagcagcgtcttcctagaaccgcgggctgagcggtggggcccgg

SEQ ID NO: 169830 - DNA, 122 bp, Homo sapiens
ttgagctcagggtgctctgagtgtggtgggagggtgtcgcactgcagccacccagaggttcgagaagccgtggggctcccggacctcccagaagccctgatcctggtcgggtccccgctccg

SEQ ID NO: 169831 - DNA, 122 bp, Homo sapiens
gggcgaagctcgcataaaatatacaaagggagctggttcccgctcattgcagcctcgccccgccccattcccttctctcacccacttccccctccagcaccctgtgggctgctggctccact

SEQ ID NO: 169832 - DNA, 122 bp, Homo sapiens
actattgtttcctaccatcccagattgagaagggtagagagtagccagtttttaggtgaacgtcatgctgacctcatgcaaaccttgtatcttcacagagaggccaatgagacttgaaccct

SEQ ID NO: 169833 - DNA, 122 bp, Homo sapiens
cggaggaccggcctggacggcggggaccggtgcttctgggctcggggcagcaccctggcccggggccagcccaggaaccagctcaggtagttgcccatgacagcagtgcaatggtcgggacc

SEQ ID NO: 169834 - DNA, 122 bp, Homo sapiens
gaatggaagcttaaaacaggctttcagcagggctttccacgcactcagcctctcgcccgccgtctaaacaccttgcaagtcaccgctgcagcgccttgacatgtgaagtgacacccaaagcc

SEQ ID NO: 169835 - DNA, 122 bp, Homo sapiens
ctgtgaattctacactgacttcaagtgcacgaatgagctacaagataaggtggaacctgccggccgggcacggcagacagcacctgatcagcgcctcggagggcggagctggggggcttctc

SEQ ID NO: 169836 - DNA, 122 bp, Homo sapiens
gagctttggttttcctagctgtaaagtgggggccgctctgggcatggtgagaactgggcacggtggagggtctaactcgtcctgcatgagcctggcccgtggctggccctcggttctcctgg

SEQ ID NO: 169837 - DNA, 122 bp, Homo sapiens
gttgacccctcctactacaaacggcaaaaatgtcaccgtatgtgcccttggcttagtccccgtttttgccagggtggttccttcttgttaaatgtctcctccttagtgagttctccctgctc

SEQ ID NO: 169838 - DNA, 122 bp, Homo sapiens
cgcgaggcgtggcatcccgcccctcgctgcattgtacttccgggctcacatttctgcatccggagtatgagaaccctcaaccaggctgaccggatccggaagtggattgcgagccaggagga

SEQ ID NO: 169839 - DNA, 122 bp, Homo sapiens
tgataaggtaactgacatttttctctttgctgtgtaaagtgctatgcagaggcaacttcacgtcccctagctcgctctgttccacctagatggcgccctaagccccgcctgtatggagattc

SEQ ID NO: 169840 - DNA, 122 bp, Homo sapiens
accgtgagaacaaggccggcgtgaacttcagcgagttcacgggtgtgtggaagtacatcacggactggcagaacgtcttccgcacgtacgaccgggacaactccgggatgatcgataagaac

SEQ ID NO: 169841 - DNA, 122 bp, Homo sapiens
aactgtagttttacccatgcttctgaactttatcgccaagggaatgccagtgtttcctggcgcattgattaaagtggcgttctgactgctcagtactagaaatgctgcgaaaagggcttctg

SEQ ID NO: 169842 - DNA, 122 bp, Homo sapiens
acgtgggtgacaaggttcatgggcacagatgcccatgcgcaagccccaagcaccgtgacccgtcgggagggggggacacacggggccagtgggactctgaccaccaacgcccggggtttcct

SEQ ID NO: 169843 - DNA, 122 bp, Homo sapiens
gggaggcagctgcccaaggtgctgagtttgcgtgtgaagctggtttctcagcgagatccacgctggagttggctgcacaactttcctgcctgagtgagatggatcccctagggtcaggggtc

SEQ ID NO: 169844 - DNA, 122 bp, Homo sapiens
cttgctgaatataaggaatggggtggggcaggaaggggcttgcccttagccacagctctacggctgtgcctcattcatttccacagctgccagtgtccctagagtttatcaggtgaattggt

SEQ ID NO: 169845 - DNA, 122 bp, Homo sapiens
ccctcctcgccgagatgaccacacagcacgcagctaacgccaggctccctgaccccggtccggcaacccagagcctcctcgctgctcagctcagcccagccggggacacccccgccccacag

SEQ ID NO: 169846 - DNA, 122 bp, Homo sapiens
agagaggctaaccaaggagctcacggagaccacccacgagaagatccaggctgccgagtacgggctggtggtgctggaggagaagctgaccctcaaacagcagtatgatgaactggaggctg

SEQ ID NO: 169847 - DNA, 122 bp, Homo sapiens
tttcctaaagctggaaatgtcttgttcatcctgctgtcacacagtatataccatcatcatcgttggaacccaaaaaatctgtgttaagtaaataattcaggccaggtgtggtggttcatgcc

SEQ ID NO: 169848 - DNA, 122 bp, Homo sapiens
cgttgcaccccgaagcccatctgagcaccttaagaagtccggctctctagggtgagtgggcgcctgcggcgggctccccccagcatcctctttctgtagcccccctgcccggtccgcaggat

SEQ ID NO: 169849 - DNA, 122 bp, Homo sapiens
cggctgcctagaataacaggcatttgccccagaggccgtggagtggcctcactttggggtcgtgggcagatcgctggctcccacgcctggacttcgggatcgcaggcaggatcccttccagc

SEQ ID NO: 169850 - DNA, 122 bp, Homo sapiens
gatccctctgcagatttccaggctcttggaagaggaccggcgcgtctattaaacccgagtcgctccacgggctctccgcccagagcacaagctgccttcccccgggaactggacctcggcag

SEQ ID NO: 169851 - DNA, 122 bp, Homo sapiens
ctaaaacacctaacacgctttttgggaattatgtttgcttttagcaggttgtccgcctttcgtcttgctttcagctgtctcctcttaaaactatctgacaactttttatcttccatactaat

SEQ ID NO: 169852 - DNA, 122 bp, Homo sapiens
cttgccttatctccccgcagacgtggttcccctgcagcccgaggtgagcagctaccggcgcgggcgcaagaaacgcgtgccctacactaaggtgcagctgaaggagctagagaaggaatacg

SEQ ID NO: 169853 - DNA, 122 bp, Homo sapiens
gtgggtaggtggaagccttccaaagagcggcggttgtctgggagccgtctcagttggccgcgacccgggcgcatgcgcggggcgggcggtgcgccttgggtagcttgtcctctccgaccccg

SEQ ID NO: 169854 - DNA, 122 bp, Homo sapiens
ctcgcccattctaaaaagtcagcgccctcaggcccgcgggtaaccacctcctcctgagcgcggtgaccaggtcaaaggctgtccctagggcctcagtgttctcatctgtatgtcgagcacta

SEQ ID NO: 169855 - DNA, 122 bp, Homo sapiens
ctgcggagggtgcgccaggttccccagcagtgccagcgggtgctgcgctccaattctcgccggacctcagctgcctccctgaggggcacggcttgggacctgcagcccgccatgcctgagcc

SEQ ID NO: 169856 - DNA, 122 bp, Homo sapiens
gagactgtgtgaggcctatcgtatgtatactccctttgatcccgatagccctgaaatcagcgcatgattaacatggctttagtccatcaaagcgcagaagacatgcgaagaaaactgcagaa

SEQ ID NO: 169857 - DNA, 122 bp, Homo sapiens
caagtttatatagggggtttttcaccctcctcctccgaaatagcacagggcgctcacacacgtgtgtgtgtgtgtgcgcgcgcacgtgcatgtatgagtgtgtgtgtggacctgtgtgtgca

SEQ ID NO: 169858 - DNA, 122 bp, Homo sapiens
ggtcgtcatctttttgttgctgccggacaaggtaggacacgactttacgtaatactcctgcgggtctccttgaatggcagcgtttagagacactgtcaaaccgtgaaatgtttaaatgaatg

SEQ ID NO: 169859 - DNA, 122 bp, Homo sapiens
gagccggttctgagtgcagggtcaccattttcctccctttccagcttgtttttgcgccgtcgttccaccccctctccctccggcctagtccactccctccccatgttgggacagcccccctc

SEQ ID NO: 169860 - DNA, 122 bp, Homo sapiens
gccgctcctgggctctgggaggctcccagcagccgaagggcgggatgctcactgcgcaggcgcgagcctcggcggcaacccgggtacacatgttactttttttttgtttttgtgaggaagcc

SEQ ID NO: 169861 - DNA, 122 bp, Homo sapiens
gaagtgtccctaccaggcgagtggccctgccaggccctcctgctgctgctcgcggtcgctcgccaggaaaattttatgtggcatgtcccctaaaagcgctcgcatttcagggtaaaatgttt

SEQ ID NO: 169862 - DNA, 122 bp, Homo sapiens
ccagaccccactcagatgtagttcagaccctggatcacagccgtccagaccccactcagacgcagttcagaccctggatcacagccgtccagaccccactcacactcagttcagaccctgga

SEQ ID NO: 169863 - DNA, 122 bp, Homo sapiens
tcgagggatagaagggagctgggtagtcaggggccgcggccatgctgacgtcagggcagccggcgctcagctccgctcgctgccacagtgcagagacctccctgagggagggggacagcctc

SEQ ID NO: 169864 - DNA, 122 bp, Homo sapiens
caatcagttcaccgccatctacaacagcagcggagagctcatcaacaacatcaagtactacgacggcttcatgggccagcgggtcggcgccatcagctgcctggccttccacccgcactggg

SEQ ID NO: 169865 - DNA, 122 bp, Homo sapiens
cactggccgtacaggtccctccgggacccatgccccatgctctcctggaagctccgctggcgcataaattggtcatagtcctccctggctctcagagggggcctatcttttaaccgggagat

SEQ ID NO: 169866 - DNA, 122 bp, Homo sapiens
cagcttcctgctggctcttcctgactatgccccagcccagcccttgcacccgaccccggccgaggggcacaggtggcacggctcactccggctcccttgcaggctactgcacgggctggggc

SEQ ID NO: 169867 - DNA, 122 bp, Homo sapiens
cagcgagactccgtgggcgtaggaccctcggcgccaggtgcaggatataatctcgtggtgcgccgttttttaagcccgtcggaaaagcgcagtatttgggtgggagtgacccgattttccag

SEQ ID NO: 169868 - DNA, 122 bp, Homo sapiens
gtaaatgtcccattcttaaacactgagagaagaaagagtgggaggagaatggaagaaatacgctgtcaacagggaacgtgatttcttactcaggctaaaggtatccagggatgaagccaatc

SEQ ID NO: 169869 - DNA, 122 bp, Homo sapiens
gcttcaccggtttttccacgaaggtcctttttctgtccccagatggaatccaggaccctgcgttttatggatttgtcgagcctcgttagtctcctctgccgcatgtgacttttctaatttgt

SEQ ID NO: 169870 - DNA, 122 bp, Homo sapiens
attggtcttccggcaggtaggtggggaatgagtgctacccccacccctccctcttcgaaccggaagtgtctctgggtctttccagctggttgtcatttcactcggctcggtcctgaggagaa

SEQ ID NO: 169871 - DNA, 122 bp, Homo sapiens
tctggcttatccgtgactgccggctccccctccaccgcccccatcttttgaggtaccacccgtcacctccgatgctgcttgggctgctgcatcactctgctgctttacccccttccccgccc

SEQ ID NO: 169872 - DNA, 122 bp, Homo sapiens
cgcccacaggaagtctctcatctgggggtgttgggcagtgcttcagcaggacaattcctccgccagcgccccacctttaaacaggtgtgcctgctcaaggcttagttgatgttgccccatgc

SEQ ID NO: 169873 - DNA, 122 bp, Homo sapiens
actccagagcgtcagaggtaggggctggcagggctgcactcagggcagtccttgccccaccgctgggctttgtagcagcctgggctttgcccgttttcctctaggaagtgggcacagagggc

SEQ ID NO: 169874 - DNA, 122 bp, Homo sapiens
gctgaggtgggagtgtgatgggcgtttgccccacagtacgttgagttttctctcactactcgacagagaagagtagcttctgccctcccatctccttcggtagacacaaggcactttttttt

SEQ ID NO: 169875 - DNA, 122 bp, Homo sapiens
ggcgcggagacagcctggggcacgcgcagacaccggggctgcccgagggctgagtgggagcgccggacccattgaacagatgaaaagactgaggccggccacaagagagccgaagaaagttg

SEQ ID NO: 169876 - DNA, 122 bp, Homo sapiens
ttagagagcctgggagactttgcgcattcttaactccgcgacccccctcgggccccctcccgcgctgcgctttgcagttttggtgctggcagtttctaccaagccgctttttctatcttttc

SEQ ID NO: 169877 - DNA, 122 bp, Homo sapiens
cactccctaccatggtcggggcttccaggctgcgcatggccgcctgcggggcagggtggccggcgcgggcccggggcggggctcccggagccgtgtgttaggcccgcggttcggatctctag

SEQ ID NO: 169878 - DNA, 122 bp, Homo sapiens
ccacagtctggagactgtggctgagggagcctcagtgttctgtagggcacctcggggcaccggacatgcacgcacagaaccagggctgcaaccccagcaccggcctctgtcggtggcagcaa

SEQ ID NO: 169879 - DNA, 122 bp, Homo sapiens
gaactgtaaccaaaaataaagtggcactggcaactctctgggaacacatttaactctgctcgtagaagcatagcctgttttaattggctaaagcccaagccaggccctgttttcatctgaat

SEQ ID NO: 169880 - DNA, 122 bp, Homo sapiens
caggttaaaattctttgcatgcagaatgaagaatgaggaggtgctgcgatcgaacgactgcgaggaaacacacccgctctcatggcattcccagtaaactgagaagacgtgattaaacctca

SEQ ID NO: 169881 - DNA, 122 bp, Homo sapiens
gtgcagaggcgctggacaacgggttgccagggcaacagaacctcatgatctttgtggtggcgatccacaggggccacaggaacattccagggtacttgaggagaatcccctcagacagcggg

SEQ ID NO: 169882 - DNA, 122 bp, Homo sapiens
gcgtccgtggggttgggggtatctgggagcgtccgtggggtgggggcatctgggagcgtccgtgggggtgggggtatctgggagcgtctgtggggtgggcgtatctgggagtgtctgtggga

SEQ ID NO: 169883 - DNA, 122 bp, Homo sapiens
ggttataactttaagtatgttgccaaaccttatctattagaaaagacactgactacagggcgagactcagtctcaaaaaaaagaaagagaagacactcagagaggaattacatgagcctcta

SEQ ID NO: 169884 - DNA, 122 bp, Homo sapiens
tttttttcaggtttaaaaaaatactaagtgttccaataaaacatgcacaccacttagatgcggatacttcctaaaaacaggaagtgcatgagcactggtgaggggcattgtgactgcgttga

SEQ ID NO: 169885 - DNA, 122 bp, Homo sapiens
caggctggagtgcaatggcgtgatctcctgggttcaagcgattctcctgcctctttctcacgtctcccgggttcaagcaattctcctgcttgtctcctgagtagctgggattacaggcatgt

SEQ ID NO: 169886 - DNA, 122 bp, Homo sapiens
ggcgggtgtaggcccgggggcgggagggctactggatcccaggtggggcgggtgtaggcccggggacgggagggcgacgggatcccaggtagggcggggcctggctccgggcgcgacggctc

SEQ ID NO: 169887 - DNA, 122 bp, Homo sapiens
gtccccaagggctaacgtcctttagaataaaaaacctaggtacccaagataacaatgtgtcgtcccctttgcacccactgcattccctacctaactccctgtatcccacacaatgggacaca

SEQ ID NO: 169888 - DNA, 122 bp, Homo sapiens
acagtttattgtatgtcaattatatctcagtaaagctgttaccaaaaaaaataaatgaaccgaagctccactgcaccgtgacttctgcatgttgggctccagttccctgtttacaattgtac

SEQ ID NO: 169889 - DNA, 122 bp, Homo sapiens
atactttttcactaaatgtgtctctttaatgattttggaattaagcaagcatgccaaatgcgccaagacatttataactttagaaattgctgtatagtatatatttttggaacaccacaggt

SEQ ID NO: 169890 - DNA, 122 bp, Homo sapiens
agggcttgtgggtgggcggccccggcgcgggagggtgccggggccggagaacccgcaacccggtagaaagcctgtgatcagctgggcagcccagtcctccccgggctcagctcggcagacag

SEQ ID NO: 169891 - DNA, 122 bp, Homo sapiens
caatatcatagtaaggtttcggaagcctgacatcagcttctaaataattccccgagactacggcttttttaacaactgagccatctaagcccttccagggtatgtcatctgtaaggaaaaag

SEQ ID NO: 169892 - DNA, 122 bp, Homo sapiens
atttctcttcatggcgtcacgtgacataattaccaccagaatcaatcaagatgaattgcacgtcagcgcccggtggggatttttgcttagttgatcctggcccaagcctcttgtgcaatcga

SEQ ID NO: 169893 - DNA, 122 bp, Homo sapiens
tggcaacaggctctccttgagggtcactcaccgtcacaggctctctctgcactggagatccggccttctggaggctggcagggaggacgtgctgaagcaggaagggctcagctttgcaccag

SEQ ID NO: 169894 - DNA, 122 bp, Homo sapiens
atgggagaaaatatatgtgaactatgcctcagacaaggaattaataaccagaatatataacgagctcaaacaacttaataggaaaaaagcaaataattacattttaaaatgggcgatactcc

SEQ ID NO: 169895 - DNA, 122 bp, Homo sapiens
cctggaggccgctgacgtgagcggggtactcccaccggggaggtcacgtggccagggcgccgccatgacggcggaagtaatggcggaagtggcaccgttgccaggcagccgttgcctggcgt

SEQ ID NO: 169896 - DNA, 122 bp, Homo sapiens
ccttgcgcgagcgcagcgagtcgatggtgtccaggatccactcttggtagtgcggggaagcggcggacgacgaggcggcggccgccgtggtggcggccgccgccgtctccggcgggggtagg

SEQ ID NO: 169897 - DNA, 122 bp, Homo sapiens
tgtaccattgcactccagccttggcaacaagagcgaaactttgtccacaccacccccccacgcccccacaaaaaaagaccgtgatggataagacagtgaattcataattttgttttagcttc

SEQ ID NO: 169898 - DNA, 122 bp, Homo sapiens
ccgagtggaagaagcaatcggggccgcggcggcggtgaggtagggggcgcgggggccagccgcgtgtgagtgggtccgagtgtgcgtgagtgtgagtgcgtgtgtgtgtgtccacggcgcgg

SEQ ID NO: 169899 - DNA, 122 bp, Homo sapiens
tgggtgccgacggcggcgccgggacgggcgtggggggtagggcgagtcatatgatccgctcggcttcctgggtctggctgctgccgcccgccggtgtccgcccgtgtcgcgccggggcacca

SEQ ID NO: 169900 - DNA, 122 bp, Homo sapiens
attaagaggtccaaagtgtcttccaaatccttgtttcctgtttggtatcatgatgtctttcgcaactacatcactgatctatgtttcccaagactatacaaaggaggaatgcagaaatgaat

SEQ ID NO: 169901 - DNA, 122 bp, Homo sapiens
tgtcaaagttcactatatacagacattcgcgcagatccccctttcggaaacattgctctgcgagtcctcccgtttaaacgcattcaatttttgggtctctctctctctctctctctctcttc

SEQ ID NO: 169902 - DNA, 122 bp, Homo sapiens
attggtccctttagggcactgtctcatactttttctcctgcgatgaggcaaagactatgccgagctgtaaaacccaactgaaatagaacatttttctttattcttctactaggctgcctgtc

SEQ ID NO: 169903 - DNA, 122 bp, Homo sapiens
agggcctggatgattcagtgctggtggaggacgttggtgcagagacggatccgtcagcggcggcaggccctgttgagggtctacgtcatccaggagcaggcgacggtcaagctccagtcctg

SEQ ID NO: 169904 - DNA, 122 bp, Homo sapiens
atctctccttcctccccctccctccccttcccccctttcctctccctccctctcggctcccgcatttcccctcggctgccggcggctccgacatcatgctccggctcctccggccgctgctg

SEQ ID NO: 169905 - DNA, 122 bp, Homo sapiens
tagttccatgtgcgtgcgatgcactctatggtaggatagacccggggaagagtcatttgccggccaggaagggatacttttgagagcgtcagtgctgcatgccgggatttgtagtctgaggg

SEQ ID NO: 169906 - DNA, 122 bp, Homo sapiens
cttggctacaggatcacataactccaacttggtggtccatggccctcaccccacagcacccggccccttcatggggggcagttatcctggcttggtggtaaacctcaagaccctactggagc

SEQ ID NO: 169907 - DNA, 122 bp, Homo sapiens
gggagtcctgttaagcagctttcagggtgactatctgcaaagggattgatctcatctaagcgaagttgagaactggcgtacaatggctcattttggattgactctgcggtcataagcagtgg

SEQ ID NO: 169908 - DNA, 122 bp, Homo sapiens
ccctgactccctagcaacagaactcacaatcctggggcctggcgggcaggcgggcggggccggttgctggggtgatgtcctgtaaggcctcttcccacagtggccccaggggtctggggagg

SEQ ID NO: 169909 - DNA, 122 bp, Homo sapiens
ggagcgggtcggggatgcagaatcctggagccagcggacgacccttcaggtccgggcacccgcgggagtgcagagcctggttcggcccggggcgtgccccgaccgccgcctcccacgagggc

SEQ ID NO: 169910 - DNA, 122 bp, Homo sapiens
tctggggccttaggtcaccgagcctctctgagcgcatttggcacacctctgaaatgaagccgatgtcggctcttgtatttggtaccggagggtttggggcaatatcgggagaatacatttcc

SEQ ID NO: 169911 - DNA, 122 bp, Homo sapiens
aaaccagatagaggttctccagcttttctttgattgtctctgctttagcgtctctaaatccggtcaccatgtcggaccccgaaggcgagaccttgcgaagcacctttccctcttatatggcc

SEQ ID NO: 169912 - DNA, 122 bp, Homo sapiens
agccaactcagctgagcacagtgacgttgggttgcctcgatgctcacaaagtactgaaatcgcctatccaactagctcccactgcactctgtcgccctcccccttctctctccctcccaccc

SEQ ID NO: 169913 - DNA, 122 bp, Homo sapiens
ccaccctgtccatttgctgccccacttccgctcccgcctcccgctgtgtccctgaccatccgccaccggagacgtcacagctaaagccacgcctgtctgagtgatgtcattcctggccaata

SEQ ID NO: 169914 - DNA, 122 bp, Homo sapiens
gcacggtccgtatctcctgctgggtgaggtccttggacacagtgcacttggtgggcagcccgcgcaggctgccaagagagatgccgatgagcttctgaagctgcccgcactgctgcagcacc

SEQ ID NO: 169915 - DNA, 122 bp, Homo sapiens
ccttgggggctccctgctggagcctgccctggttatattgggatctgcgctccaggcaggcgggggatttaaccctgagcgtcccctctttagattgagccagcttgtcttcgcaccctccc

SEQ ID NO: 169916 - DNA, 122 bp, Homo sapiens
tcactctgccccagccctggggccaaagtcccagccctcagctagccccctacctcctgacgatggccctggcatctctgctgccttctctgcaggggaggaggcagcagcagtccaggctg

SEQ ID NO: 169917 - DNA, 122 bp, Homo sapiens
ggacttagagctaaaggtttgcaagtcacttttacttttctggtctcccaatccttgcggcgtttgtgaggtgggtgtggctctatgccccctttaactgtgagctaaataaagataaagct

SEQ ID NO: 169918 - DNA, 122 bp, Homo sapiens
ctaatatttactctttttccgcccgtaattttctttcttccgttctccttccgcaaggaacgtcttggggcttctcgaacatctctcagcatttactgtacgcccccctcccctcgcttttg

SEQ ID NO: 169919 - DNA, 122 bp, Homo sapiens
tataatatgaaataatatcatatgaaaccactcgtctcttccattagtcattgaacccttcgaggctagcgacactgttttcttttttcttttcccctctattcccaacaccgtgtgagcta

SEQ ID NO: 169920 - DNA, 122 bp, Homo sapiens
ttcccacagtcacccttgcgatgggaccctcaggttggcacgtggctggcagctgtgtcccgggagctcttgctccttagtgggcctcgccagccagggcagggcccccggcacccctcacg

SEQ ID NO: 169921 - DNA, 122 bp, Homo sapiens
ctgggctctggagagtcacctcaggggagcgtgaaatgtaaatctgatctcgaaacagggcgagcgaggcagagcattcagcgtccaggatctcagcatgccgggggcgtccgggatctcag

SEQ ID NO: 169922 - DNA, 122 bp, Homo sapiens
tcaggtctctcattcagggtttgagaccccaccgggctcagagacacctgcagcctgcagcggtcccagatcacagcctcagggatgggaccaggagccagcccacatcccacctgcagcag

SEQ ID NO: 169923 - DNA, 122 bp, Homo sapiens
tgggaggcagcgggaggggcccggagaggtgtggagcggcgcggcgggaggctccgtgggcggccacgggagacagcgccggcgggagcgcgcctctcggcctttcctccgcgcccccgcgt

SEQ ID NO: 169924 - DNA, 122 bp, Homo sapiens
agctctttgtatggatcacagacaattgctggtgccatgaatacgaaaatgtgaagtggccgggcgcggtggctcaggcctgtaatcccagcactttgggaggctgaggcgggtggatcacc

SEQ ID NO: 169925 - DNA, 122 bp, Homo sapiens
agtgtcctgtgctctggacttcactgccttttcaaaaccttccaggcctgggcttcattccgtctacatcaaagctcctgatgacacattgagccaggctaatgtattagtaggggaggggc

SEQ ID NO: 169926 - DNA, 122 bp, Homo sapiens
ctcctgcagacttgtctggcaccctgtgcatttgggatttggcacactatgtctcgtctgcggcctccactggacaatgagaccgtaagtgtgtggcttgacagaaagttgttgactctgct

SEQ ID NO: 169927 - DNA, 122 bp, Homo sapiens
agacgccggcggggctgaagaaggcggctccgaggaggtgggagggcgagcctcccctcccgggttcttctgcgtcctctcccgggagggacccacacacacctgagcccggacccaccctt

SEQ ID NO: 169928 - DNA, 122 bp, Homo sapiens
agaggcggagaaactacgcggtgtggctgcaggtggagccttggaccaactggccagcgccgcttccttccaccaggattcctggccccaccgcgcgctaggcggaggctcagcgggggcga

SEQ ID NO: 169929 - DNA, 122 bp, Homo sapiens
tgctcccgttcctcccctttggaattctctcccgagtcacgccggactttttgggtctggcggaggcccacggagcacctccttgcacagcaaaggcccagcgccctgggactggcgtgcgc

SEQ ID NO: 169930 - DNA, 122 bp, Homo sapiens
ggttctgggggactttgaaggcagcgcttttcagtgggggctctggatcttcgtaagagacggagtagagacggcagagaaaacaccacttggaaagaaggagcaatagcagataaaccctg

SEQ ID NO: 169931 - DNA, 122 bp, Homo sapiens
cttgcattcttgtcactgaaaggaagagggaacggagtgtgacagcgcaggttagacccccggcgcagccatccacctgccactttgtcacagggactccacgactaactgccgccctattt

SEQ ID NO: 169932 - DNA, 122 bp, Homo sapiens
gagataacaacactctccactgtctagggccgttgtgtgctaagcccagtggctagtccacggcaggcatccagataaggcccagtagtgcttacttctctacactgttgtccggctgatta

SEQ ID NO: 169933 - DNA, 122 bp, Homo sapiens
ccaccctggcagctctggtttagtgagtggatgggctaccctgggctgctgtgggcattccggggggaggaggtttgcctctctccgccgcttggggtgtgtcctgggagagccggaggggc

SEQ ID NO: 169934 - DNA, 122 bp, Homo sapiens
acagcccaagtccacacagccaaagtccacacagccaaagtccacacagccaaagtcccacgcagcccgagtcccacacagccaaagtcccacgcagcctgagtcccacacagcccgagtcc

SEQ ID NO: 169935 - DNA, 122 bp, Homo sapiens
acagaatgagctgcaggaaggcggaagcactagcgtgctgggcattctgggaactgtagtcggaagtattttcacccaggctggtggagtccttgtcgtcgttccgcttaaacattctggga

SEQ ID NO: 169936 - DNA, 122 bp, Homo sapiens
tacactgttacactggagatgagaagttcctgttgcctagctacatcagagtagtcatgacgtcatagtgcagtgcattccttgtgtctgtggtgatgctgggggaaacgaacctagatcgt

SEQ ID NO: 169937 - DNA, 122 bp, Homo sapiens
cccagccaggctggggtccgcgcggggcctcccgagaggcggcaaggggcgctgggaaggcgcaagcccgcgccggctccctgcggatgcccgggtcggagaggggcgcccgggaggggcgg

SEQ ID NO: 169938 - DNA, 122 bp, Homo sapiens
agaccaaagtaaaaattcagcttgtgaggcacgtagccacacttcagtgctccgtagccacgcgtggcgaacagctcttgtactggagagtgccgatgtagaacattccctgcatcgcgaga

SEQ ID NO: 169939 - DNA, 122 bp, Homo sapiens
ttctcctgcaattctggaggccaggagctcaagatcagtttcaatgggctcaagtcaaggcgtgggcagggctggtttcttttggaggctccaggcaggggaatccattcctttccctttct

SEQ ID NO: 169940 - DNA, 122 bp, Homo sapiens
cccccaggacgaacagagcaccctgcagctgctcaagaaacacctgcagctggagcaaggcgtggagaactacgaggaaagcatcgcgcagctgtcgcgccagtgccgggcgctgctggaga

SEQ ID NO: 169941 - DNA, 122 bp, Homo sapiens
gggtgtgtgcgtgtccggggagcacgagtgtgtgggtgggaatgcttgctgtgtgtggcacgtgcacacgcacgtacatgtgtgttgaggaggaagaacactcactagggctgcagtcctag

SEQ ID NO: 169942 - DNA, 122 bp, Homo sapiens
ttggaattgtgaattctgttcttctcctgggccggtggtgtgtggtgcgatgctcccctgcgatgctcgcagaggcagtgagccgccgctcccagatcgccaccagccatacaaccatgagg

SEQ ID NO: 169943 - DNA, 122 bp, Homo sapiens
ttactgtatctttttcactatagaggcatcctaattgatttttaaattcaagagatttatcgagcaccttctataagccagcggctatacaaagtggacaaagagccctgacatccagcatg

SEQ ID NO: 169944 - DNA, 122 bp, Homo sapiens
gccacgcgcttccagggagtttcttcctgatcattgggctgtgttggtcagtgaagtacccgctgaagtactttagccacacgcggaagaacagcccactacattactatcagcgtctcgag

SEQ ID NO: 169945 - DNA, 122 bp, Homo sapiens
ccccaggcacctaccccaagtccgtctctcccgcctccggcctccctgccgccttcagcacgttcgagtggatgaaagtgaagaggaatgcctctaagaaaggtaagtccgcgggccttgga

SEQ ID NO: 169946 - DNA, 122 bp, Homo sapiens
tggctctgacttgagggtccagtgagctcatgcctgcaaaagactaggcctcatgtctggcggcggcaatagtaactgttcctgttattaatagggaactctttccttcttccccactccct

SEQ ID NO: 169947 - DNA, 122 bp, Homo sapiens
gggctcagtgcagagaaggggaggacatcattcattcagtcagtcattcattcacccactcgcccagtgagtgccaagcacccttgggcactcagcaccatgctggcagcgggacagtcaat

SEQ ID NO: 169948 - DNA, 122 bp, Homo sapiens
ccactgtggcgctagcagagagcacaccctttgttctccacggggtggaagacacctcctcggtgggcagaggggagcagggctgctggtctgcacctacaggctgttctcaaacaggctca

SEQ ID NO: 169949 - DNA, 122 bp, Homo sapiens
tgataatattgataataacataatggagaatactcagtaagtccattaagcgcccaccaccggacatgctgctaagcactttatgtgcatcttacggtgaatcctcccaacagcctaagaga

SEQ ID NO: 169950 - DNA, 122 bp, Homo sapiens
gattccaccacacccaatgctctggagccacaaggagtgtcccttcttccccagcagagccgtgggagggtccttgtctgctctcctttgaaccttggcagcccttggatggagggctccct

SEQ ID NO: 169951 - DNA, 122 bp, Homo sapiens
ccaaggagggggctccggctcgggtgaccccagcctcctcgcccgcagtgactgccagcccggctcagggccttctgcagagccttcatggagcgcatgccccagcaagcctccggctctgc

SEQ ID NO: 169952 - DNA, 122 bp, Homo sapiens
ggccccgggggatatttttagttgcttctttctccttcacttttagctttagcagcatctcgaaacactcaaagcggagaaagactggggggttggggggagctggagagggagtgggggaa

SEQ ID NO: 169953 - DNA, 122 bp, Homo sapiens
ccagcctcttggaggtccacgcccgccgagcccacgctggctggggccggggtgccggcgcgctcgggactcgtctcagcagtcgctcacggtctttgtgtcttctcttccgcccctttccc

SEQ ID NO: 169954 - DNA, 122 bp, Homo sapiens
ggcaggctggagttggaggctgcagtgaggcatgatggcgccagcacactccagcctgggcgacaaagagaggccaagactctaccacaaaatgtttttgaaatggctcagctgggtgtgca

SEQ ID NO: 169955 - DNA, 122 bp, Homo sapiens
agcgagacgaactattggtacggggctagagaggaaggctttgggattgccggggagcagcgagcgaccgacttccgtttccagttaccaaggcacgaggatccggtgttccaacccagggg

SEQ ID NO: 169956 - DNA, 122 bp, Homo sapiens
atgttgtatgtcctgagtttcagtttggaaaatatagtccctggttaaatcaatgggcatcggataaaaactttaatgtctaaaggggctgggtaggtagaatcaatgagtgaagcaagcca

SEQ ID NO: 169957 - DNA, 122 bp, Homo sapiens
gcaccaccatacagacacgattgcgcacccaagagaaacaccattatggggtaggacgaccgcgtcctgtcgtcacagaaccatgcacctgggaagccaggggcaccttcctctcatcaggt

SEQ ID NO: 169958 - DNA, 122 bp, Homo sapiens
ctcgaagctacactgtgaggtgatatgtctctaggtatgggccagaaaaacttccccattcgctcacactcaccccatatcttctcagagtgcagagtctgtgaaaggttaggccatgtcca

SEQ ID NO: 169959 - DNA, 122 bp, Homo sapiens
tgtccattttggaaaaaagaggatcccctcaagagcaaataggcggaaacaatgaccccgcgcccggagtttttctgagctcctaaatagggagagagacccgacaaaacaaacaagcgaag

SEQ ID NO: 169960 - DNA, 122 bp, Homo sapiens
tcacatttcccaatcttatttgcaaacaagcgttcatttcctgcttatcaaggcacagtgcgggtactttgtccattcaaatcattgtcttaagccagtgatgcaaaccaatgagcaaggtt

SEQ ID NO: 169961 - DNA, 122 bp, Homo sapiens
gggaaccgagaaagtgaatgagtaacagggagggtcctggactctcagcatctcccaactcggggtcagggggaggctgtaactggaatgccccccacccccacccccgcctctttctcacc

SEQ ID NO: 169962 - DNA, 122 bp, Homo sapiens
ggccctcctcctactcactgtgagaccctaggcgagtcccttagctcgggagcctaattccgcttcattaacatgggggtaatttaactacctagctagacggttgcaaagggatcagttca

SEQ ID NO: 169963 - DNA, 122 bp, Homo sapiens
acgactcacgtttcttcagagcgtagtttgtgacaggcaccgtgctcagcgctatgcatgcgttaactttttcgcagacgggaaaactgggcaacagggaggctacaggccttgcaggaggc

SEQ ID NO: 169964 - DNA, 122 bp, Homo sapiens
gatgacttcccgctggggagctgttctccgtatcaggtgaacgctgtttctgaataattccgtctttcctcattggaaaccttcttgaattctaaaacgttacaggtaaccaaaaacgaaaa

SEQ ID NO: 169965 - DNA, 122 bp, Homo sapiens
tctgggaaaatttcttgttttacagacttccaattagtgggtcaactgtggaagctgaatcgtgttccttatcactcttcattgtcaaagctcacaacaacactatggaaactgcttcacgg

SEQ ID NO: 169966 - DNA, 122 bp, Homo sapiens
ctttcaataagttctttcccccctctggcgagggctactaaatttgctcagcatttaatacgtaaaattggctaacagtgtctgcacagccagagagaagttgtctagcaaatcgggtcaat

SEQ ID NO: 169967 - DNA, 122 bp, Homo sapiens
ctattaactcccggggcctcctgcggcggcgaggcggtggcacggctcctcccgctccctcggcctccaggttcaataaggattacatcatggagcaagtatgcggggcagcctgagaatca

SEQ ID NO: 169968 - DNA, 122 bp, Homo sapiens
agggacaggggagcaatgccttccgtttgacgaggcgagatgtggggatggagggaaggccgtggaagccacactcatgagtcccaaaggtaccggcagttggcgatttgaggatttctttt

SEQ ID NO: 169969 - DNA, 122 bp, Homo sapiens
atacctgaaaactcggggtaattcttttttcttcatttcgcctctgtccagtttctctgacgccccctgatggtcagtctgtgagtgcttcgctcacgcattcattcaacaagtgaaattaa

SEQ ID NO: 169970 - DNA, 122 bp, Homo sapiens
agaggcacggtggggagcggctcagcggtgtgtggcggtcccaggcaggggactgaacggcgagcttggcttgctggtttacaggcgcctcagctcaggcaccctgtcgcccatggccgtcc

SEQ ID NO: 169971 - DNA, 122 bp, Homo sapiens
ggttgacccggatggggtccatgccctggaagggcttgtgctccggaatggagcccatgtcgttggggtggtggtagaggttgtagtcaggaatcatggggaagagattgctgtccaacgcc

SEQ ID NO: 169972 - DNA, 122 bp, Homo sapiens
gggacggcagggggcgcgggtgaggccgcgggcaggtggatggatgggtggggagtgggccgccctgagcccgggaagaggaaaaatgctcgaggaaaaacacaggcgcccacccccccgct

SEQ ID NO: 169973 - DNA, 122 bp, Homo sapiens
aagagcaaacttgaaatctgggctcttttctctcaaaccatttataagcatgctctgtatcgcaacctgtgctagaagttgtggatgtcaagatggatagtaacaattctagctttacacag

SEQ ID NO: 169974 - DNA, 122 bp, Homo sapiens
taagctgatgcatacagagacggttcctggtcttgaaggccttcccacagtccctgcactcgtgaggcttctccccactgtgggtttttttatgtcggcaaagagctgatctactgttgaaa

SEQ ID NO: 169975 - DNA, 122 bp, Homo sapiens
cgtgggggttaagtccaaccagaacgtgtttattttcccctgtgtctggaagggcctctccggtctccatggcaacgcgatttcctgtcctggttttctcttggatgagatacctgctgaat

SEQ ID NO: 169976 - DNA, 122 bp, Homo sapiens
agctccaaaacgacatggatcacatctggttttgctcccagttttatccctcacacctagcgtagtggttggcaaatactgagaatctgtgtaacatggacttgggaggcagccagtctgaa

SEQ ID NO: 169977 - DNA, 122 bp, Homo sapiens
ggcgaggtgaggagtgcgggcgcggggccgcggcgggcactgctggcctcgcgccgcgggcgagctgcagcctgagggccgccacgatactcacttgatctccctgcgccaggcaatgctgc

SEQ ID NO: 169978 - DNA, 122 bp, Homo sapiens
atctcaggacccagcggtggtcgagttctagcctagaagctgcttggtggagccctggtccggcattgtctgtagagtgtgtgtatacgtgtgtgttttgttgctggaggtttaattttgtt

SEQ ID NO: 169979 - DNA, 122 bp, Homo sapiens
aaagtggtgtgaaaattttcactgatgattaaagctcacacacatccccaagagataaaacgaatgcccctatggagagggttccctttcagaacctaaccactggctggtattcaaagtgg

SEQ ID NO: 169980 - DNA, 122 bp, Homo sapiens
tttggggcttaatagaaagcgagtccattgaggatgagttaatccacatcatggagtggtcgctatgttcctttcatgacctctttaggctcacgtgactgccgtgagcataggaaggacga

SEQ ID NO: 169981 - DNA, 122 bp, Homo sapiens
ggcccgctggtcgcggagccggctcgcgccactacctgcaggggccgccgcgcctctcagcgccacgccgccgccatcttgcatttcaaaccggctgcacttttcagggagtcaactctgac

SEQ ID NO: 169982 - DNA, 122 bp, Homo sapiens
ccccagaggccatgcatagggcaggccccggtggtcagggacccacccagtcctgccaggcgttgggcttgggatgtgcggccggctgggggcacacattcatgccgcaggtccccgtgagt

SEQ ID NO: 169983 - DNA, 122 bp, Homo sapiens
cctgggtttgcgcatgctcagcagtcttcatggcctgaaggttgccagtaatcaacatggcgctttgccaaacacgctcccgtttcagcggcttaggctgggcgccagtatggcggcgccca

SEQ ID NO: 169984 - DNA, 122 bp, Homo sapiens
tttcttgttcttaccggaaaaggcaggggacacactcaccctccctttgggctccacgttcggatagtgtcttccccagctgcaccaccttattaaatcttaggttcaggtcagacagggag

SEQ ID NO: 169985 - DNA, 122 bp, Homo sapiens
gacaagttcagaagagagcgcagcgactacgaccgttcccgcgagagagatgaaagacgtcgaggggacgattggaatgacaggtgagccgtttttaacttcatcttgtccccgtttcatgc

SEQ ID NO: 169986 - DNA, 122 bp, Homo sapiens
catgtatgccaaatttcttgaatccctaagcttcccaattatttcggcctattcaaaaatcgagtccaggtgtggtggctcacgcctataaatcccaacattttgagaggcagaggtgggag

SEQ ID NO: 169987 - DNA, 122 bp, Homo sapiens
tgcgggtagacacccgcagctaatgccctctcgtgaggagcaatacctcaactggtgccccgtgtgaggccagtcaggggtctgcagaaacagattccccgcaattggagcccctcgtgagg

SEQ ID NO: 169988 - DNA, 122 bp, Homo sapiens
agaaccactgagtgggtgagctaccttgggcaaaccccccactcctgactctgactgccacgtgggtggcccgacctctgacctgctgtcatcgtagaggtagaaagcaaacaatctggggc

SEQ ID NO: 169989 - DNA, 122 bp, Homo sapiens
tcttgaattgtcactcccacaattcccacgtgccatagggggaacccagtgggaggtaatcgaatcataggggcgggtctttcctgtgctgttgtccgtagtgaacaagtctcacgtccctg

SEQ ID NO: 169990 - DNA, 122 bp, Homo sapiens
gcgaggggactttggggcgggccagcgccccggccccctgcccggcgcccccgccgccagcgcccttgtcgatcaccttcaggttcaggatgatgcggttccgcttgggctcccgcggcttc

SEQ ID NO: 169991 - DNA, 122 bp, Homo sapiens
caggggccatgagtaaagcacagaaggcaaggcacgctgcgggagaattcagagggcgtccgtgtgggagctgtctaaacggtgtgacttttggatcttctgcctttcgaaattctttcccc

SEQ ID NO: 169992 - DNA, 122 bp, Homo sapiens
aagaaggtttctgggcgctttaaacaaatggctgcctcccagcgctctgagttaagggaccggctacctagcgtctagctgaggaggaagacgcgcagctggagaactgttgcctttgtagt

SEQ ID NO: 169993 - DNA, 122 bp, Homo sapiens
ttgaggactcttcttaagtgacattcatagagctttaactaacagaggcagctacaaccacgttaaaactagctgcctggctcctcagcatcagtgaccagccatcactggaaatgaagtat

SEQ ID NO: 169994 - DNA, 122 bp, Homo sapiens
cactcacctgctccgccgccgccgccgccgccgccgccgccgccgctgcctccgcctccccgtgcgcacccggctcggccctccgcaaactccagaccgggcctctcccgcagcggcgcctg

SEQ ID NO: 169995 - DNA, 122 bp, Homo sapiens
gccgggataacgggatagtccattgctgggccagggctgctgagcgtgggtggggactgccgactgcagtacagacccagacggcaggagcccggcaaagcctgcccttccgaggagcctca

SEQ ID NO: 169996 - DNA, 122 bp, Homo sapiens
gatcccaaggtacaaagaagtagaactcagaggctaacagaacaccaggctcttaaccaccgcctccttaggaggtggcctggctccaagcccaagacgggtggggtcagacttgtgagtgg

SEQ ID NO: 169997 - DNA, 122 bp, Homo sapiens
cgcctcctggggcctgaggcgggaacccgggtcgcgctgctccgaggcctcggcggaccgcgaaaggatggctcaccacccggccagggccagcccctgcaacaagctcagccccgcccgct

SEQ ID NO: 169998 - DNA, 122 bp, Homo sapiens
tgcgctagtcccacccgcggaggggacgcaggcgtgcaaatctgtctcgcctgcaggaagcgccgaaaacgctgcatgcgtcacgctatgtgctgccccgggaattactgcaaaaatggtga

SEQ ID NO: 169999 - DNA, 122 bp, Homo sapiens
agggtgcccgcggccgcctccgggcctggcctcacttgcaggtgaagacctcggtgcgctcgctgcaggtgttgcacttgacgaagcagcaccagtggaatttgcagttgcactgccacacc

SEQ ID NO: 170000 - DNA, 122 bp, Homo sapiens
cctgacccaccaacgcgcagagaagcggagtgcagctaggagtctcttccctcagccctgcggaccagctgactcccaggccctggcagcccctttgaaagctcttactctcctctgtgtga

SEQ ID NO: 170001 - DNA, 122 bp, Homo sapiens
gctatcaagaaaaatttatggctggacgcagtggcgcctcatcccttgagcccaggaattcgagactggcctgggcaacacggcgaaaccctgcctttacaaaaaatacaaaaaattagccg

SEQ ID NO: 170002 - DNA, 122 bp, Homo sapiens
gtcctatgaactccggcttttcaaggctggcatggggatcgtaagatctaatgcaagaaccggcccgccataaaggacgggtgatcatcaccttcattcactcatcaggctgagactggggg

SEQ ID NO: 170003 - DNA, 122 bp, Homo sapiens
attagcccggagactttgtgtaggttactaaacctctcaaagcttcagtttcttcatctgcgttagaatagggccaatagttcattcctacctggaagatagctctttggattaatgcccta

SEQ ID NO: 170004 - DNA, 122 bp, Homo sapiens
ctaaattctacaacagagtggtggatcagatgggaagtgtggcagctggatgccagagcccggctcttaacccagactctttgcctacctttgctccgcctggagttgctggcctgctcctt

SEQ ID NO: 170005 - DNA, 122 bp, Homo sapiens
tctccactttgccgttcgaaaatgcctaggttggtggatcgaccctccgcggagcaaagacggatggctggcaggagcaggttcaggagctgggccaaggtattctctgcttccgcctttgt

SEQ ID NO: 170006 - DNA, 122 bp, Homo sapiens
ggcgacggagccccacaggacggcgagagctttggggggaaggcctgggcgtccggggtgcgtcccaagaggactcgaccctgtgttcactgcgccaggagccgctgcgcgctaagtgcgcc

SEQ ID NO: 170007 - DNA, 122 bp, Homo sapiens
gtatttaataaaaacagaaacagcatgcctatcataggctaataaatcctacctcctgcacgctttaaaacagtatgaagcagctttaacggagctccagataactaatttcaagcatggct

SEQ ID NO: 170008 - DNA, 122 bp, Homo sapiens
tcccactcttcttcatctcgaatgagcttcattaactccagaaaattgggaggacaccctcgctgatccaagagctccagcttgcccctgagggcgggggtcatggcgacccgagctaagag

SEQ ID NO: 170009 - DNA, 122 bp, Homo sapiens
ggccctagctagctgacttgactggcacgcgccgggagcccgggctcgggcccctcggagcgtctgattggctgcggggcagctccggtctgctctgcctgcgccctcattgggcgagaggc

SEQ ID NO: 170010 - DNA, 122 bp, Homo sapiens
gagggggcggcctgagtgccgtagccgagccggggctggagcgcgcggtgagtggtcgggcggccttggaggggagggggcccggccgcgccgcctctcgccccggccgtcgctttgttccg

SEQ ID NO: 170011 - DNA, 122 bp, Homo sapiens
gtgacctccttgctggcgggctcggaggggggcccggccgacgcggtgctctccgcgaggcgctcattgaagggggccctcaggctgtccaagggcccgtggctctcgcctgtggactgctc

SEQ ID NO: 170012 - DNA, 122 bp, Homo sapiens
gggcgcggggtgcgggacggcccagggcacggcggctgcagcgggagcacactgagcgcccgcccgccatgtccaggaagaagacccccaagagcaaaggggccagcacccccgctgcctcc

SEQ ID NO: 170013 - DNA, 122 bp, Homo sapiens
agcggctttccaggtttggggtaggcgggagtatgggcttagaagccggaagtgggttgacgtagcccggaaggggaatacttccaagttgtagtgttgttgttttcagcctgctgctgctg

SEQ ID NO: 170014 - DNA, 122 bp, Homo sapiens
agggcccgagaagagaaaggaagtgaggagcggagaggaagtgcacacttacgcaggatgcggccactcccaccagcacaggatggcctgggcagggtccctctgtgctccatgcagcccca

SEQ ID NO: 170015 - DNA, 122 bp, Homo sapiens
ggggacttgtttgccggatggagacagttgtgggtcctgcggccctgacactgccacagacgggcccttccagaaacctgttgaaaaactgaattcactcacactgtgcataacgccgcttg

SEQ ID NO: 170016 - DNA, 122 bp, Homo sapiens
gaagaagctgctaattagccagaggtgcaatgatgtatcatgactgtcaaagcaaaggagcgaagtcggaactatttttgctgtagagatagccagccttcaggaagggccatgtttcccag

SEQ ID NO: 170017 - DNA, 122 bp, Homo sapiens
tttttccctgttactggaggggcgggtcaccccgcaggtagtcagggattgctgcgcccacgtgggagggagcccccttctgcagcgcgagttccggcgagagcacgtggagagaatcgtgg

SEQ ID NO: 170018 - DNA, 122 bp, Homo sapiens
ggcactttgggaggccaaggcaggaggctgggaggtggaggttgtagcgagccgagatcacgccactgcactccaggctgggcaagattgagcactgagtgagccagactccgtctgcaatc

SEQ ID NO: 170019 - DNA, 122 bp, Homo sapiens
ggtccactgatctcttgatgcacgcgtcccatcagcagcagccgaaagagggtgctcgggcgggagtgaaatccctgtgaaatgtgatcaagaacacaaaatgctgaggcagctccagctaa

SEQ ID NO: 170020 - DNA, 122 bp, Homo sapiens
acaaagaaaaagttgtctgtgtgcgcaaatccaaaacagacttgggtgaaatatattgtgcgtctcctcaggtatgttacactgacatttagcctttgcaaatgtttgaggaaagaggagtg

SEQ ID NO: 170021 - DNA, 122 bp, Homo sapiens
gtgcatgagtgtgagcttacatgcacaagtgagagtgtatatgtaaacctgcactgtgtacgttgcgttgtgacatgtgcgcatgtctctgtgtgttcacgtgtgcacgtgtctctgtgttc

SEQ ID NO: 170022 - DNA, 122 bp, Homo sapiens
attcattgtgagaggaggcactttattcctgagtttcttttttttttctaacacagaagacgcctcagtcagcgcgtaggaaacaggaaggaacccgttgttttaaatagcagacagcagag

SEQ ID NO: 170023 - DNA, 122 bp, Homo sapiens
ttcaacttcagggtgatttttttagcagtaaccagagctgacaatctaactcccctccaccgccccattttggcctcccctgccccccttgttatggggaggggaccccgggtgagggggcc

SEQ ID NO: 170024 - DNA, 122 bp, Homo sapiens
tcgtgggagacagggaaaaaggaatgaagaggagaggaactgaaacagttggatgaatggcgctttgtttacctcgcacacaatcgccagcttggcgggagggcggaaccgaccaaggccag

SEQ ID NO: 170025 - DNA, 122 bp, Homo sapiens
ttggtacaaaggatttgaaaaggatccaaggtgcagtctctaggcacaatgaaattaaaccggaaatcaacaatcgagatatttggaaaagccctcaatatttgtacttctaaataactgaa

SEQ ID NO: 170026 - DNA, 122 bp, Homo sapiens
gcagggctggggaacatggtggcagcgccagtctcacagcgccaggtgggcggcagaaagcggcgctgcccacggcccctggcagcttccctgcatggtgccgccgcccgcccgcgcacccg

SEQ ID NO: 170027 - DNA, 122 bp, Homo sapiens
gactgcgggttcgtctgcccgcgcgcgggctgccctcagagctctgccgccctggcggctcgccctgaacttgcaggcaagaccagtggcaatgatggactcttcccgccccctgattcccc

SEQ ID NO: 170028 - DNA, 122 bp, Homo sapiens
ttaatcattacttatcattcacatttgaaaatcttctcttaggccaggtgtggtggctcacgtctgtaatcccagcattttgggaggctgaggtgggtggatcacttgaggtcaggagtttg

SEQ ID NO: 170029 - DNA, 122 bp, Homo sapiens
agcggggaactgaaagccacccctctgggcctgcccagttcctcagggagctggtgctggcgtgggggagagttgggggacgggatccctggttctagcagggtacaatagacctgtggacg

SEQ ID NO: 170030 - DNA, 122 bp, Homo sapiens
acccctgcactccgggaaacgtgcaagagcagccggcactgtgggcgtcaggggagcagacgcctgctaggaatgagaaagcctagggtggagttgctggggcctcagaaccccactaccca

SEQ ID NO: 170031 - DNA, 122 bp, Homo sapiens
ggtccggccgactttctccaagggcgctcggactttggggagcccttctccctgggggagcgacctcgcccgtggagtgatggccgggcgtccccccgggtgcctttggtcctccgtggagg

SEQ ID NO: 170032 - DNA, 122 bp, Homo sapiens
tctcctgagcctcagttacctattttgcaaattagggatgggaacatccatacctcacgacgccaaacggctaccttgtaaagacgaaaggaggaaatgcaggaaataactccacgtaaggt

SEQ ID NO: 170033 - DNA, 122 bp, Homo sapiens
atgaacaccactgtggccctgggacaaggagctgtggtccgtctgggatcaactaggtggcgaaggggagggagaaaggaagagagagggcttgcgcgcgggagagaggaagggacgggagg

SEQ ID NO: 170034 - DNA, 122 bp, Homo sapiens
gccgcagcgccgggtgtgggcgcaggtggggatagagtgctgggttttgaaagagtgacccgcaaagctgagggtgcagagcaagacacagatctgggaagagcagagaaaaaacgctcctg

SEQ ID NO: 170035 - DNA, 122 bp, Homo sapiens
accacagctggcaacttaaaggcaaaaaagcaaatcctgagacatggctaggatccaccacggaagcaaatctaaatggaagcagtcagcgccacacagggtgagctggggagggtcacctg

SEQ ID NO: 170036 - DNA, 122 bp, Homo sapiens
agctggaagcgcaggacttcaccccagaggccattgtggcgggggtgggcaaccctggcccggttccgcgcgctgtttttttttaatcccctattttccccacccccgcggggccggaagcg

SEQ ID NO: 170037 - DNA, 122 bp, Homo sapiens
ctttgctggagggtggggggtggaaaatacaaggtgagtggatagggaagacctcaggatcgaggttcgcttactttcgtgcctggtcctgcagtgaaaacgaacagaggctatggaccaca

SEQ ID NO: 170038 - DNA, 122 bp, Homo sapiens
tcgtcgtgcagaatgagggccgagtagatgcaggcgagcttggagacggaggccatggcacgggcgagtgtagggcaggcgctgccggacgcggtgctagtcgcaggatgaagtgagggcct

SEQ ID NO: 170039 - DNA, 122 bp, Homo sapiens
acctgcttatatgtaagctgtggactgaaagggtagctggaagaggtcccagtcagatcccgactcaatgacttatgcctagtgtgatcaagatttgccttgccaactactctagtccctct

SEQ ID NO: 170040 - DNA, 122 bp, Homo sapiens
agcccgacctggggtacgggctgcttcacccccgcgtggacctccccctcagctggggtgcggaggctcagcctgggggcccagttgcccctggtccccaagcagcagccccctctgcctcc

SEQ ID NO: 170041 - DNA, 122 bp, Homo sapiens
gttcggaagtaagtactttcccaaagccctgcgaaaacgccccagatgtttcctgcgtcacggaaacaagcccaggttggatctgaagcattcttacgacggtgggtcacagggcctgcccc

SEQ ID NO: 170042 - DNA, 122 bp, Homo sapiens
gtcccaggaagggatcggcctgcaggagtacaggacaggtgcgcgccgggcacgccacgtcgagcaacagcagcaggaagagggggccccaacatgccacaaaggccaggagcaccacgctg

SEQ ID NO: 170043 - DNA, 122 bp, Homo sapiens
tgactggcctccaagccctgccttaatgccccggggcggggtgtgtgtgagggccctccccggaggcctctgaggcactggctgcctgcctgtgccacctctccaagcccctcttctccctg

SEQ ID NO: 170044 - DNA, 122 bp, Homo sapiens
gcaagctcagagcttctggcagcccagaagatccccaaggtgccaacacgaagctgcctgcgctctcgccgaaggccctgtggtcctagcgaactttcgccctttttaaagaacaaacttag

SEQ ID NO: 170045 - DNA, 122 bp, Homo sapiens
gaaggtaggaggtaggtgaggccattctgtatttggggacagtgaggtcaccttcccactcgtgtgtgtgggcggccgatgattgatttctgtcatacctgttaccatttggtgcagtatcg

SEQ ID NO: 170046 - DNA, 122 bp, Homo sapiens
tgcggcagcaggactccacagcctcaggggcagcttgggtatgtgtgtgttcctgtgccacggttatatgtccgtttgggtgtgtgtgtttctgtgtgtgtgtgtgtgtgtgtgtgtgtgtg

SEQ ID NO: 170047 - DNA, 122 bp, Homo sapiens
atgaataaactaataaatggaggagaggagacaggtctttcttataaaagaatttcaattcgtatatgtagaagaaatagaggatagaaatcatcattgaagtaccacagttattgttgcag

SEQ ID NO: 170048 - DNA, 122 bp, Homo sapiens
ccgccacggccaaggcgtgagcacggggcggggcgggagctgctatttctgtctggtgagcgcagcccgcgcagctggcgagggagggggcgcccgcgccgccatattccctcccgccggcc

SEQ ID NO: 170049 - DNA, 122 bp, Homo sapiens
ataaggggatagttgtcccacagctattcaataaaagcctgagcatggttctgattgtgccgatggcagatgccatccctggctgctttgagcctgcccattcttgtgtccctcattgtgac

SEQ ID NO: 170050 - DNA, 122 bp, Homo sapiens
gatccacgtgatgaaaccagcgcaaacctttccaactgcaaatcgaatggcagctgcttccgcttgggcaaagcgtgatttttttttttcctccatcagtggatttttctccagaggaaagc

SEQ ID NO: 170051 - DNA, 122 bp, Homo sapiens
ctatcctcccaccttaaccttaacctcctgagtaggtgggactacagggacactccaccacgacaggctaatttttgctttttttcggagatggagtttcgccatgttacccaggctggtct

SEQ ID NO: 170052 - DNA, 122 bp, Homo sapiens
ctaaagagtagctgctgctacttttgatttcttccttaaagaggatcaattagagccctccgatcgcgtccccaaaggtcctggtctgtgcctgctgagtcaggagaggccgacagcgctcc

SEQ ID NO: 170053 - DNA, 122 bp, Homo sapiens
cgggaaaacagaataaaatgtaagcatactacaaaacaatacaaagccatttttgtcaaacgcctatctaggtaggaaatagattatctctggggtgggatcttttctttttcatagttttc

SEQ ID NO: 170054 - DNA, 122 bp, Homo sapiens
tgggagcctggggagctggaggccaagctggttcgataaggacctgccatttggacaggacggggacgctgacaacgatccagagtcactggctgcgtcctacatgcagggccctattcaaa

SEQ ID NO: 170055 - DNA, 122 bp, Homo sapiens
acctggtttctttgaggatttcttaagaagtcttcagctggaggcaggtggcatgggctacggtagaggcccagatgaaggggctatagaggccatgacaacccgttaatccaaaatgagcc

SEQ ID NO: 170056 - DNA, 122 bp, Homo sapiens
gccgggtgaggaccccagggctgcagatggggcgctgtaaagtagcgccggggctgcccgcgcttctgccttagcctgactccgtctaggccggggagctctggggaaagtccgcgtgccac

SEQ ID NO: 170057 - DNA, 122 bp, Homo sapiens
gtgcccagttgttaatgggactaccagatggaagccagctttggaagcaggccttgttcacgtgttctaatgggtttgaaacacctcaaatatgaagtgatgccaagtgatgccaagagcac

SEQ ID NO: 170058 - DNA, 122 bp, Homo sapiens
cttgggccatttctgtgacctctgagcctccgctttcctatctgtgaaatggggcaggctcgtggggcctggagcattcagcaggcggtaacccagtgggcgttccctgcacggtgccacgc

SEQ ID NO: 170059 - DNA, 122 bp, Homo sapiens
tggcatactctgatccctttcagtatatattttctaatattaaggaatcatctaaaaatacgggtcttcatattgtctaagaatgctaattttggaaaaccgccgatgttcatgctttcctt

SEQ ID NO: 170060 - DNA, 122 bp, Homo sapiens
atgtgtgtgtgagcctgcaggacagcagcattcctctccggcccagccaggagggactggcggagctggccgggacccaggcttggtggcgcccaggaccccggccacgcgcctctgtcttg

SEQ ID NO: 170061 - DNA, 122 bp, Homo sapiens
accgcgctggcggcggcggcgccagacgacgcggggccgggcacgtcctgcctcctcaggcgggacttgaggctcttcatggctaactcttgcctggcccccgcgcgaaccttaaaggctgc

SEQ ID NO: 170062 - DNA, 122 bp, Homo sapiens
cgccgggctccaccttgtcggggcactacccgcggagccgcggtctcgggcatcatctggcggccacacagccttactgcaagccccgcccgagagagccgggcgcgatctggtggccgcgc

SEQ ID NO: 170063 - DNA, 122 bp, Homo sapiens
gccgcatgtccccttccacaatctgatacatgatctgggcattagggccttcatcagggtcgttagcacgaatctttgccaccaccgaccccactgggttgttctcctcaacaaacagctcc

SEQ ID NO: 170064 - DNA, 122 bp, Homo sapiens
aactcctgacctcaggttatccacccacctcggcctcccaaagtgctaatattgcaggcacgacccaccacgcctggcgttgtttgttttttggttgttgttttttgtgtgtgtgttttttt

SEQ ID NO: 170065 - DNA, 122 bp, Homo sapiens
ctccaaggaggaaggctgagtcctgactcagagctgctggcctcctggcctgacatcagccgccccctggtggccatgactgctggtgcagcgaggagacggcagggcatcgccgccaggac

SEQ ID NO: 170066 - DNA, 122 bp, Homo sapiens
gcccctttcggatccatcagatctctgacaactcccgcaatccctgaggctggggtgttgcggggggaagcttaaggtacctcagcccaggttccatccagactcaaactttgccccttcaa

SEQ ID NO: 170067 - DNA, 122 bp, Homo sapiens
aggacccaatatcctgcattttcccttgtgctctaaagctggactttagttgctctgtagcgtaaggtatcccagaggtttattgtaagatatccttggaatccatgggtgaagaggcttat

SEQ ID NO: 170068 - DNA, 122 bp, Homo sapiens
ctataaacggtattacctgccttctaaccagtctctggagcattcctgctccctacaatccgtttaacacagtggcagaataatattaaaatatttaaatgagctatttctttacccagctt

SEQ ID NO: 170069 - DNA, 122 bp, Homo sapiens
ataattacaaaaatgcaaattaactcgacgagtgagtttactctaacagattggcaaagccgcagagactggctgcggctggtgagtaaaccggacggtcatttatcaggagggtttgtcgc

SEQ ID NO: 170070 - DNA, 122 bp, Homo sapiens
tataacctgctctgtttcccagatcagatgccctgattcttacctaaagagcttgtaggccgagggctgtacctctctccacactcgctcagtgctgtcccaggggaagcagaatccacttg

SEQ ID NO: 170071 - DNA, 122 bp, Homo sapiens
gaaaagaaaaaggactcagaaccaccttctccgcatccgtaaaggtccttagactcaccgcggggaggaagcggaccaggcaactccacagcacggaaacacagcgccacgagctccaggcg

SEQ ID NO: 170072 - DNA, 122 bp, Homo sapiens
ttcaagccgttctcctgcctcagattcctgagtatctgggattataggtacctgacaccacgcctggctaatacttgcatttttctttcttttttcttttcttttttttttttttttttttg

SEQ ID NO: 170073 - DNA, 122 bp, Homo sapiens
tggtgataggatatacagccaggattaagaaaagtgatggacactaggcatggtgactgacgcgtgttatcccaacactttgaaagtttgattgaggaggatctctttaggccagcctggat

SEQ ID NO: 170074 - DNA, 122 bp, Homo sapiens
aggccctgcctgggtgcttccctcagtaatggggggtcgtgggtgctctgggttgtcagccgggcagttgagtgggagtcaggggtgctgacctcacaggcacggccagtgaggagcattcc

SEQ ID NO: 170075 - DNA, 122 bp, Homo sapiens
ccggaaaaggaagcccgaaggactcggagcactgggaatgctgggaatcgtggttcctaccgccaatggattgcagtttctcaccggttcccaaagccaagcatgaggtgagcaaggggcaa

SEQ ID NO: 170076 - DNA, 122 bp, Homo sapiens
cagggccacaagcgactctgcatgaagctgtgatggggacacgtgtcgtcgtccgtttgtcggagctcacagaatgagcaacactgcgaatggctctcctgtcagccgggactttagttggc

SEQ ID NO: 170077 - DNA, 122 bp, Homo sapiens
ttattcttttggttttctgttttttttgttgttgttgtttgaaacagggtctccctctatcgcctaggctagagtgcagtgacatgatgatagctccctgcagcctcaaacttgtaggctca

SEQ ID NO: 170078 - DNA, 122 bp, Homo sapiens
acccgccagctcttctccttagccccgcccaactcctcagctggccaatcacggccccagcgtacatgtattggtggcgacatctcccagccaatcaggaggcgggctgggactgtgtgcgc

SEQ ID NO: 170079 - DNA, 122 bp, Homo sapiens
tccgggtcccgagaaaggagggccccaactccaggagatgcggcccaggagctgagaacacgtcggctccgggagaggacagggcttcagggaccttagggccgcccccagcaccgggggag

SEQ ID NO: 170080 - DNA, 122 bp, Homo sapiens
gaatgaaggaagagccctcagatggaacgaaaggcgatgtgcaaggccatcccagagagacggaagcaggtgcgatactaagcctcagcccaagaataaaagagagttcaactgttactctt

SEQ ID NO: 170081 - DNA, 122 bp, Homo sapiens
ctagtgtccctgaggaatcccgcggctcctcaggaccaggaggcagggagctcctggcaccgtgagcagatgaggggctgcctcagcctgggcttcaccgcagagccctgttccccactccg

SEQ ID NO: 170082 - DNA, 122 bp, Homo sapiens
ccagattcccagcgattctcaccaaagtcaggcaacctctggcctacagcttgagaatgacgtccaagcagctcgcctttccctgggcggccgctcagacagcttttcagccaaggcagacc

SEQ ID NO: 170083 - DNA, 122 bp, Homo sapiens
ggaagagagaagaatttgcaaatgaactgacaatggatttaacaggttttagcctgaggtcgcttaaaattttgaacaccacttgcttaggaaacgggggcagtctggaagcaagcactagt

SEQ ID NO: 170084 - DNA, 122 bp, Homo sapiens
ttccaggcgctgccaagggaagcgcagtgctagcaaagcgttgcaaaggcgcaggaagcgcgagcccccagagacttcaccggtgctcgcatttcggggtatcttgcttctggtcccacatt

SEQ ID NO: 170085 - DNA, 122 bp, Homo sapiens
aggcctctgcgtcaagcacagatgccagccatccaggcgcctcccaaccgctccaggagccggggcgctcgtctgcactcacctccagcctgttagatgagctcccgtcaaccccagacttt

SEQ ID NO: 170086 - DNA, 122 bp, Homo sapiens
ggacgggcgctgattggcccgtttgaaatgcgccaggcgggagctcacctgggctcttagcgtcgccgccggcttcgcagagcaccgcgccttagccgcgaagttctagttcttgctgccgg

SEQ ID NO: 170087 - DNA, 122 bp, Homo sapiens
atgttattttttggaccacagacctgagttacagggttgagttgggaagttctctattaccgggcatttttttctggccttcccacagaccatagaatcagagaggagttgaaaaacaatat

SEQ ID NO: 170088 - DNA, 122 bp, Homo sapiens
aagcagcagattaacacttctctgacataattgttctaagctgacatgttcccttttgtccggttgcctgattagacagcatatgagtctgtagctggtgagctctgttaattagtgcattg

SEQ ID NO: 170089 - DNA, 122 bp, Homo sapiens
ttcccagaaccctggcgtccacccccaccctgtcctgtcaccaccgcctgcctcccccaccgactgccccacgcgaccccagagtgccaagggccggctccatgtctcttctccccggcgcc

SEQ ID NO: 170090 - DNA, 122 bp, Homo sapiens
gcagggtggctggagtagaggcaatggccctgcgggaccgtggcctgtaacctcgcagggcgcctggagtaggggcaatgtccgtgcgtgccgctgacctgttgccgcccagggcgcccaga

SEQ ID NO: 170091 - DNA, 122 bp, Homo sapiens
cgcgatttcccggggactgctggggcgcagcggggaggcgggccggggggcggcggggcgcgagcagagcgcggttgacctccctttctctgctcagctccagcgtcatttcggcctcttag

SEQ ID NO: 170092 - DNA, 122 bp, Homo sapiens
cggggcctggtggggccgggaccgcccccttggggaccctgcgggcctcctcgggcgcaccgcacccgggcgcaggaagctgcacctgacggagcataccgacttccagtacagccagcgcg

SEQ ID NO: 170093 - DNA, 122 bp, Homo sapiens
tcacagagtccgcgtgaacatcaaaggtgcaggatgtttgggggctccgctcggcgtctccggcgatgaccatgtgataaatgacagttatgctgcccaggcgtcgtgggattgcaggcgat

SEQ ID NO: 170094 - DNA, 122 bp, Homo sapiens
gctaccttaactcctctattgtttctcttctgcttctaaattggtttcatccgagtgactcgagtgactcgcatttaccaagtattgcctatgagctctgtggtttgtgtgctgcctgtaca

SEQ ID NO: 170095 - DNA, 122 bp, Homo sapiens
aacgttgggttccccgctcagctggaattgcattagatgagaaagggattcagagatactcgctaatctgttaccgtcaggttagaacagaatattgcaattagcatgcaaaaggacacagg

SEQ ID NO: 170096 - DNA, 122 bp, Homo sapiens
tgaagatggaccctgagctctggctggagcgagacaaaggccccgccagctccaggacaccgccccctctaccttggctgcgcacctgattggacagttcccactctagcgcccatgattgg

SEQ ID NO: 170097 - DNA, 122 bp, Homo sapiens
ttcaacaaattcgagcgcctggcaggccctgcaccaagcctagggtgatggcgacccaggcgggtttttactctcaaggagctcaattctagggcagggagaagtaaaattaaaaaaaaaaa

SEQ ID NO: 170098 - DNA, 122 bp, Homo sapiens
aaaatcggttctgagcaaatttcgagtcactgacaaggcggcggtatccagcagagggcgcgccaggcgccagcaccaggcccgaggacgcctggctcatccccaggccggcttccgagagc

SEQ ID NO: 170099 - DNA, 122 bp, Homo sapiens
aatacttaagggtcaaggaaggagttgcaagtgatcacccagcctggagaagcatctgcccgagtcaaggaaactttacaagagaaatccccagtgtgcacccctatgaagagcctacaatg

SEQ ID NO: 170100 - DNA, 122 bp, Homo sapiens
ggcagcctcacagcaggaatgcccggccctcctagcccaggcggaacctgcctgagtcaccgcctggctgcagccccagctgcagagcctctgcagaccagcccacaccccggccatcctgg

SEQ ID NO: 170101 - DNA, 122 bp, Homo sapiens
ccgagaaggggcaaaagcctgaagggggcgggacggcgggcggcctctagtgcgcatgcgcgccgtgcggccttggccaagcgtgatagtcactgcgcctgcgtcaggttttccagcctgaa

SEQ ID NO: 170102 - DNA, 122 bp, Homo sapiens
ccaatcaggttagggaggcgggactagagaggcttcaaaaggcaccactcggcgtcatagcggagagattgacagggaatctggccaatgagaagggctcacttgttttctcgtgcggaaag

SEQ ID NO: 170103 - DNA, 122 bp, Homo sapiens
cacaggtggatgttcccgctgtgaccacctcaccttctgaagtcggggtgtggagactatcggggagctcccagagcgcccacctcctcctgcgtacggcgtctgtgccagcaggaaagccg

SEQ ID NO: 170104 - DNA, 122 bp, Homo sapiens
acaaagaaaagaaggaacaatggtcgtgccaaaaagggccgcggccacatgcagcctattcgctgcactaactgtgcccgatgcgtgcccaaagacaaggccattaagaaattcgtcattcg

SEQ ID NO: 170105 - DNA, 122 bp, Homo sapiens
ctaagcatcgttttcctcgctggctgcgggcgcataaggaactcttttatgccatagccacgcatacatttccatcctttgtctttacttaccagtcgaggctgtgggcatgtgtgctctat

SEQ ID NO: 170106 - DNA, 122 bp, Homo sapiens
tgaactgctgacctcagttgatccactggcttcggcctcccaaagtgctgggattacaggcgtgagccacacgtgcgctgccctgtctgtgttatttaaaagctggaagcttggtaatggtg

SEQ ID NO: 170107 - DNA, 122 bp, Homo sapiens
cagcagttagatttctaaatgaaagcacactggaaaataatgcaggtaatctaaaaaggacggaggaacagcaaggtttggatgaagggtttgactctcttacagatcagagcactggagag

SEQ ID NO: 170108 - DNA, 122 bp, Homo sapiens
ccggtcccagaaccaaagccatgccggggtgtggcctctgaccccacgcggaggggacctcgccttgcgggaccccacctggaacccgacctcccagcctcgcagccggcctgagccgccat

SEQ ID NO: 170109 - DNA, 122 bp, Homo sapiens
cgaagggcgggcacctgcgggtggggcggggcctgaattagcgggagcgcccgggaggggcggggccggggcctgcgtgagcgggtcggggagggggcggagcctgcggggggcggggcctg

SEQ ID NO: 170110 - DNA, 122 bp, Homo sapiens
agaggtcacgcacaaatattaagtctaagtaggtcagttccagtcagactggccccaccacgcctcctccccctcaccattatcctggagggcatcagcagaaaggaaacactgacgtctca

SEQ ID NO: 170111 - DNA, 122 bp, Homo sapiens
gtgcccacggcacagtgggcagcaccacagctgtgggaaagcgcccactcccctgccccccggctacctcacctgcccgtcctgggccagcctagggcaaggggagaacgggagaccagagc

SEQ ID NO: 170112 - DNA, 122 bp, Homo sapiens
tcttgcacttttgctagggttggaggcgctttcctggtagcccctcagagactcagtcagcgggaataagtcctaggggtggggggtgtggcaagccggcctggatcctgtcctgggtcctc

SEQ ID NO: 170113 - DNA, 122 bp, Homo sapiens
agtcatcatggtgtatggttggtagctcaatacaagcaaaacacacattcctttcttcaacgtcactgcccatatcactctccagagttctcctctctctcaaggaaaatgagatttgccat

SEQ ID NO: 170114 - DNA, 122 bp, Homo sapiens
aagcagattctggacttctcagagaaagtccctccagcaggtgctaagatgaacccaaggcgcatttcctcatgagtgcctctcaagtacggtgattatagcagagggctgcaggccaccat

SEQ ID NO: 170115 - DNA, 122 bp, Homo sapiens
caaactcctggaagacatcgattcacagggccacctgcccagggctcctccctgtgcaggcgggggctgaattcccagggtacccccagccctgctcagagctgcagcctctgtacccctgt

SEQ ID NO: 170116 - DNA, 122 bp, Homo sapiens
cacctttcctcagacgggtggccagagaaaaacttctcaaatagaagtcgggacatggcacgccactgagaaccttccagcggtctcctgtgcacgtaaacaaggtccagactccttcgtgg

SEQ ID NO: 170117 - DNA, 122 bp, Homo sapiens
ttctcggagcctcctgccaggcacggtgtgctgggagatgccacatgctaaggtgccttccggtgcagggtgtgtcgggcacgctgggaccgtccgtctacagcctctggcacaggtgtcgt

SEQ ID NO: 170118 - DNA, 122 bp, Homo sapiens
aagaaccgtggagggccagcgctgagcgggccgagggctgggagcgctacccgtgccgaacggaccttgcttgtcaggtccacaccctcctgcccgaatgctggcaagtccacacaccgtgt

SEQ ID NO: 170119 - DNA, 122 bp, Homo sapiens
cccaggactcccatctgggggcgctcgcacacacacccctccctgactcccggggcccggcgcttcctcgccccagaaatgtcccaaccccgggcaatgctgtgggcccctctaaccttggc

SEQ ID NO: 170120 - DNA, 122 bp, Homo sapiens
gctccaactctccccaccaagttcaggtttgacttaagggaaacacagggtcctgctaggcggcctccaggcctggggctaggtagggtacaggaaaaagcgactccaggcctggagggagg

SEQ ID NO: 170121 - DNA, 122 bp, Homo sapiens
cggcctgcccgaccagccagcaccacggcccacaggcctcaaaccacagacgttttcccacggcagcctgggcctctgcagggtcaccacgccgcctccagagccctgccccatccatctgt

SEQ ID NO: 170122 - DNA, 122 bp, Homo sapiens
gacagagctgatgcggctccatcgaggctggctctgtggatacaaggcttccgcgactggcgaggcgacccagacctgacaggcggcctcgcggcacagacacaaagcaggcagacgtgttc

SEQ ID NO: 170123 - DNA, 122 bp, Homo sapiens
gcggcagctccagcgtccctgtgggccgagagcgcagccagagctccaggcggcgccgtccgtccagctccagcgccgcccccgcgctccacagcagcgcgaacacgaacagccgccccagg

SEQ ID NO: 170124 - DNA, 122 bp, Homo sapiens
ataggggacagcatcgatcccacaaacacagccctcattggcctgtggacacctgaaatgcgactacaggggacctaacgtggcttttcattccccagttttgcaaatgcttttgggagaag

SEQ ID NO: 170125 - DNA, 122 bp, Homo sapiens
gttgtcacaactgacgtcaccaggggcggagcctttggacggaagtgacgcttgcgcggccgcggcggagtcgtcatagaggcggggctgcggcggctgcggtgttcctccgacttccggac

SEQ ID NO: 170126 - DNA, 122 bp, Homo sapiens
accctctttctgtttctattccttccccactcatgccccagtgcttccgttggacacatgcgcattttacggtcctgcagggcttgaaagatttctgaccttctaaggtccagtgatttggt

SEQ ID NO: 170127 - DNA, 122 bp, Homo sapiens
gtaagctctttagagggaggagtcgtgattgtctctaacaaaaagaagaccatctgtttccggcagcctgctcagcagaaaccaccagggcttagactctgcatcctaacagctttccatat

SEQ ID NO: 170128 - DNA, 122 bp, Homo sapiens
tgcaaaggcagacagaaacgcgttctgcccctgtccatttagggagctcggcaaacaccacgtgccgctcgctgctgtgacgagcgccttccacccagttatctctccgccctccgcgtttt

SEQ ID NO: 170129 - DNA, 122 bp, Homo sapiens
gcaccgccttctgcatggacggctccagctccagcactttctggaggtccgccttggcctcggcctcattccacacctctgcgtgagcccgggcacgcacgtagtaggccttcacgatgcct

SEQ ID NO: 170130 - DNA, 122 bp, Homo sapiens
atcccatctctactaaaattaaccgggcatggttgcgcatgcctgcaatcccagctagtccggaggctgaggcaggagaatcgcttgaaccctggaggcagaggttgcagtgagctgagatc

SEQ ID NO: 170131 - DNA, 122 bp, Homo sapiens
gaatccttctccatttcttgggggttttacttctttctggaatccttgcatttattcttacgatgtccggtcggttttctgagcattttttgcagctctggaggtgagtggggcgcgtgcgt

SEQ ID NO: 170132 - DNA, 122 bp, Homo sapiens
tcagcaatgtctctgccagggtggtcctccacggcacccctgggctgggctgggcaggtgcgtcttcgaaggaaggctgcgtggtctctgaagttctgtccgccaggcacccaggccgcgct

SEQ ID NO: 170133 - DNA, 122 bp, Homo sapiens
gggcctgggagtctggacacatgggtccctgcttatttcttggtcaccatgtgtcaaagccgtgtgtgtgtgtatgtgtgtgtccttgctagatgaccttggccaggtgcccttacctctct

SEQ ID NO: 170134 - DNA, 122 bp, Homo sapiens
ctacactgtgggcctctgggaggctcccaggcagggtggccggcaggcccaggccgcaggcgaccctcagggctcggaggagaagctcagttgtttcccgcccagggtccccggtgacagcg

SEQ ID NO: 170135 - DNA, 122 bp, Homo sapiens
cttcccagctgcagcagctgcgcctggagcatgaggaggtggcaacacagctgcacctcacgcaggccgccctgcagcaggtgctgaatgagcgtgatgggttatgcgggaggctgctagaa

SEQ ID NO: 170136 - DNA, 122 bp, Homo sapiens
tctctcctcactggggtcagcaagcgttgccgcggtacatggctggaaggacaagtgccacgttggtgcatgtggacacattcgtggtgggaggggtacgcggcacagccggcttcaagctc

SEQ ID NO: 170137 - DNA, 122 bp, Homo sapiens
tgactctgtcaactgtggacttaaccctatgcagagattagaggagagaatagtcaaacacggataagttaacatttaccgaacagtccgtcctaccctggggtaggttttattaacagtct

SEQ ID NO: 170138 - DNA, 122 bp, Homo sapiens
tgtgttactgccactttcaagggtgggaaggaaaaccttcccagtgggcagaactgcaggcggcatgcccggtcaccccaccatctgcaagcagaagtggcctgaggtgagaatgcccagac

SEQ ID NO: 170139 - DNA, 122 bp, Homo sapiens
tctctcaggcacatttgcctcctgccttaacaccctcccttatgctcttttccagagccacgcatgtcccccgtcagtgcacagagtggctcattctaagtggctgtctggctagacctaga

SEQ ID NO: 170140 - DNA, 122 bp, Homo sapiens
ggtgcgcattgcagtgactggcaccggctgtgagctcagaacacggcggctggagctatccgccagcaactcttaagccaaagccctcaccgggctgcctgccagctgtcagagaccaagct

SEQ ID NO: 170141 - DNA, 122 bp, Homo sapiens
acacatccatcgcatgttggcctggaaaatgaagtgctaggaagttgttcattttccattcgctatagaaatagagtgtccacaggagagggcttccagtgctttagggctacattgatgct

SEQ ID NO: 170142 - DNA, 122 bp, Homo sapiens
gctccaggtgcggggaaccgccctgctgggggttccgatgccccctccccatgccctcttcgaggggcagtgtgactccctgccagcccccacttatgcaccgcaggaatccggacaatgac

SEQ ID NO: 170143 - DNA, 122 bp, Homo sapiens
aagaacacaggaccagatgggtaggatttatagctctggtcctagatgtgggacaaggcacgtatcctgcaccagcctcagcttcctcccttatgaaatgagagggatggactaaatgatcc

SEQ ID NO: 170144 - DNA, 122 bp, Homo sapiens
cggagtgaccgtgggcatcgtgcacgtgccccagggtgagaggccctaacagcagcctgtcgggagcacaagctctagagggcttccgggaggaggcttagggagctgggaatccgggagca

SEQ ID NO: 170145 - DNA, 122 bp, Homo sapiens
attaaacttaagtaatccagcacctcaccgagggacatttgtttccaatcctcgtcctcacgggcagcgccgcagccatcaccccgcacccaccccatcagcccagtgctcggttattgcct

SEQ ID NO: 170146 - DNA, 122 bp, Homo sapiens
agaaaactgaaaacatcagctgtttaaaacagacccaaaaaatgactattaggaattaggcgctcacaaaatcatcggcgggttgaaggaatgttcctggaaagattcctagaacaagacca

SEQ ID NO: 170147 - DNA, 122 bp, Homo sapiens
cggggacagcactaggttgtacctggtctgtcttcccttgctcctcgtgtgccaatgcctcgttccccgtttcagcagtttgccagatctttcagcttggtataaaacatatcaaggggata

SEQ ID NO: 170148 - DNA, 122 bp, Homo sapiens
tgagggtaactaagcaggaatgatgaggctggagggtgagatccttccttctgttaaatacgcactccatcaggtaattgataaggttcacttggagctccaaaattctgagcctgcgttca

SEQ ID NO: 170149 - DNA, 122 bp, Homo sapiens
ttcctgtgcgacattactttttagtgggtcagcgcagaaatgtgcttgggctccctgcgacggcgaagcacctttcctcaagggaatctgaagacttttccctgcctttcctctccctcggg

SEQ ID NO: 170150 - DNA, 122 bp, Homo sapiens
attgcttctccattcttgaagttcctaacccccatgaatccacaaccataaccatggccacgcgggtcgaggtgggctccataacgcccttgacggccgtgccaggcctgggtgagatgggc

SEQ ID NO: 170151 - DNA, 122 bp, Homo sapiens
ctgacagcccaggccccgccccaccgccgccgccagagccgccgcgcacgcgcgcttcgacgccacgttcacagccccagaagagagaactaaggcgcatgctcggcaaggaaacgagacca

SEQ ID NO: 170152 - DNA, 122 bp, Homo sapiens
cggaagatagcgggcttttgctgctgatttcacgccagacggaaaacgtataggtagggacggttgagggaccttaaccggacggcctggctttccagaataggcacatgcaaacacttccc

SEQ ID NO: 170153 - DNA, 122 bp, Homo sapiens
tgctaaatcgagaaaccgccctccaaggcttctgattcacagattctgcgaagggactgacggccagaagacagaaaatccagcaacggtaaaaagcggcctggccttccccgggctgttgc

SEQ ID NO: 170154 - DNA, 122 bp, Homo sapiens
cttttattgtctctcccagtacaatgtaagccctagcagcagaagactttgctttaatcacgtgctgtacccccaaagcccagacagtgcctagcacacacgagatgctcgatgaatagtta

SEQ ID NO: 170155 - DNA, 122 bp, Homo sapiens
aaccatccgctggcgaattttgtagactcaaagaccacctgtgaggaaagtcaggtcgcccgaggccccatccccaaggggccgtactcgcagcgtctccatcctctttgcatagacacccc

SEQ ID NO: 170156 - DNA, 122 bp, Homo sapiens
ccggtgtgggccagggcagggcgaggggtgtccctgctgcctcagttcgggggagggcggcgaaggggatagtatgggttttatacgtttccaagtataactttaaattttagttaagcagt

SEQ ID NO: 170157 - DNA, 122 bp, Homo sapiens
acactgggtcccgggttcgtgctcctggtgaggttgggcccctcggggtgccgtccaaagcggcagggagttttgaaagtggagatcgtggtccccatggaaagaaaaaaaacgaagcagta

SEQ ID NO: 170158 - DNA, 122 bp, Homo sapiens
cttgcgcccctcgggttgggggcgcgggagagccccctctattacgagggaaatcattgccgcattaatgcgaggtttccaggcaaggagaggggatcgcttcataaaagatgcattgttcc

SEQ ID NO: 170159 - DNA, 122 bp, Homo sapiens
tcctcaccccaatctgcgcgcaaagggcagcgggacagcgggaacgcggcctgctgctcacgcacctctcttgcggcctgttttcggcagtgacagctcagatgtccaagtcgttgccactt

SEQ ID NO: 170160 - DNA, 122 bp, Homo sapiens
acaccacccggtaacatcatcgggtaacaccatccggtaacaccatccggtaacaccatccggtaacatcatccggtaacatcaccttcagacatcccaggggtatctttctgtgttacctc

SEQ ID NO: 170161 - DNA, 122 bp, Homo sapiens
ccctgcttcccggtgcttgcgctgctgtgaccccggtacctccatgtacccggcgaccgccgtgccccagatcaacatcactatcttgaaaggtcagatggctgcaaagacaagcacggggt

SEQ ID NO: 170162 - DNA, 122 bp, Homo sapiens
ccctgtcaccctcggggtcgtccttgagcggcggcggcgcagcgggggcccagcccagggcgccctcacggcggctcacatcccgcagccgcgcctgcagcgcctcccgctcggcctgcagt

SEQ ID NO: 170163 - DNA, 122 bp, Homo sapiens
tccagatcaaaaatggcggtagttggtgtgtcctcggtttctcggctgctgggtcggtcccgcccacagctggggcggcctatgtcgagtggcgcccatggcgaagagggctcaggtactgg

SEQ ID NO: 170164 - DNA, 122 bp, Homo sapiens
gcgtcccgccaccggaagccgtacacaggccacagagaggatgagctggctagagagacgcgagtcgggcccgcctgcgagacagtcgcatagagcgtcagcgactctggaggacctgaggg

SEQ ID NO: 170165 - DNA, 122 bp, Homo sapiens
ggcccaggtcctcagcctcatagtgtggaacctggcgatcccagggcctgggctggcccccggcgtcacgggaccgggaaggcgctgtggtgctgcggggaattgcggagaagaaggcgggc

SEQ ID NO: 170166 - DNA, 122 bp, Homo sapiens
atgccacctgctcgctccggtcctgcacacggcagataaccctgcacagccccgtgaaatcgaactggaaacacttgcagcctagatccccagctggccccgacatctggagttcatttgct

SEQ ID NO: 170167 - DNA, 122 bp, Homo sapiens
aagctttaattaaaatgggacaagtggcgaagtaaaagtgaatcccaaacaaagattttacgaaagtgcctctctgccagtcttgacggagaggtgaaagctgcaagctttcttactcagat

SEQ ID NO: 170168 - DNA, 122 bp, Homo sapiens
gacggcgctgctgcagtgcgtcttcgcacttacgcggagcggtaatgtgaggaagcctcccgccaaacagatgagggaggaggaggaggggagaggccagagagagaagcggctttcgggaa

SEQ ID NO: 170169 - DNA, 122 bp, Homo sapiens
tcccccgacaccaccacctccttcttcgccttgcatcggtacgataaggcacttgcttgacgggaaagagaaactcagctgccagctggggttcatttgcactttcccccgcctggtctgcg

SEQ ID NO: 170170 - DNA, 122 bp, Homo sapiens
tgctgctgtgcccccagcaccccggggatggctcctcagggatgggccgcgggaaggaatcgcaccgcgcggatcctcccgatctgggcccctcttgcacggaggcccctgggatgcagtca

SEQ ID NO: 170171 - DNA, 122 bp, Homo sapiens
aattttttggctcaaattgttttctctccttgattagattaggtaccttggtaatagttacgtttgtctggaacctagaggttgcaagatcatgaaactgcagttataccttcccagagggg

SEQ ID NO: 170172 - DNA, 122 bp, Homo sapiens
taccccttcctgttcacaggtatttagtattcttaccatcatctttccctgctgtgctcccggcagacaattctaatctgtcatgacactctgatgatcccagacccagctgcattatcatt

SEQ ID NO: 170173 - DNA, 122 bp, Homo sapiens
tagcagtcttacattttaaagaaacaggctcaaaatagcacaacacatatttctaggtttcgatcattaaaattcttcatctgtggactactagccataaataatcaacttgagaaaataaa

SEQ ID NO: 170174 - DNA, 122 bp, Homo sapiens
catggcggtttgctgcacagatggatccatcccctaggtattaagttcagcacccattagcggttcttcctgatgcgttccctccctctgctccactgacaggcccaattgtatgttgttcc

SEQ ID NO: 170175 - DNA, 122 bp, Homo sapiens
tcgggcagcggtcagggtcattctccacgcatcctccgggaagcttgttttcctggacctcggaagctaatcacacagtgaggcaacctgtgagagaccccagcttcccctcctccggggcc

SEQ ID NO: 170176 - DNA, 122 bp, Homo sapiens
tttatggataagacaacgaaagcgcagagaggttcagaagagagcctgtggtcacacagccggaagtagcagagcagagatcggggcctgccagcctggctccagactctgccctgtgactg

SEQ ID NO: 170177 - DNA, 122 bp, Homo sapiens
ctcaaactttagtgtttgcaactggtaacgatcaaccagtggtgatcaactaatgttcttcgggtgttgtttttgtggggcgcattcttatgcaaaatgggaattggggctaaactggtttg

SEQ ID NO: 170178 - DNA, 122 bp, Homo sapiens
gtatatggttgggccctgacgctaccaccattcttctccgtcccccctcccccaagctggcgcctactatccagcccaaggggtgcagcagtttcccactggcgtggcccccaccccagttt

SEQ ID NO: 170179 - DNA, 122 bp, Homo sapiens
tccatatcctatataacacgtggtctctctttttaattctagccacccaccttagtgagacgcaaagtggtttccttttttttgagacagagtctcgctttgtcacccaggctggagtgcag

SEQ ID NO: 170180 - DNA, 122 bp, Homo sapiens
ggttccagaaaaaagttggagagggtggaagaatgttggttcgtggaaggggggtcttggcgtttcctggtgtctgcaggcagcgtgatcttctgcttcaattcccttacgtcgatgttact

SEQ ID NO: 170181 - DNA, 122 bp, Homo sapiens
aagcagcggcagcgcacggcaagatggatcctgacactcagagctggggaaagagccacacgtcctcctgcagcccgagcctctcactgagattaagaggggctctggggcaggcggaggcg

SEQ ID NO: 170182 - DNA, 122 bp, Homo sapiens
cgggcggcggggtgtggcggcgcctttgttccaaaccttggcctgtggttgggggtcctgcggctgggacccgcccctgacccctccctgcccagaggggctgtctttgggtgcagaaggag

SEQ ID NO: 170183 - DNA, 122 bp, Homo sapiens
gggaccttggagctggcagagacatttcctgtctgcggaggatcttgactttggagcatccggccgtcgccgcgagcggccgaacactttcctgcgtcgctgctttaaaaaaaaaaaaaaaa

SEQ ID NO: 170184 - DNA, 122 bp, Homo sapiens
ggcctggacgcctctccctccccacaggctcacacatcagtcacccactcgaactggagccgggccctcgggtgaatcgttagctcctcgagcaccgagactgagacttatacattttaata

SEQ ID NO: 170185 - DNA, 122 bp, Homo sapiens
gtccatgcaggtctccaggcatgtgcatgaacacatctgggtattggtgtgagtgtgctccgatggagaggaaggaacatcatcatcaccccttttcccagttcattcccccactcccttgg

SEQ ID NO: 170186 - DNA, 122 bp, Homo sapiens
tgtataaggagttaaatgaactcttgctgctgccaaatatgttgttatcactaactgcaccgctgctgtcattagtgctgctgccaacactgcaagccctgctgctgccagtgccaattctg

SEQ ID NO: 170187 - DNA, 122 bp, Homo sapiens
aaaaaaaatatcaaataatcccattaaaaagtaagccaaaaggccagatatggtggctcacgcctgtaatcccagcactttgggaggctgaggcaggcggattacttgaggtcaggagtttg

SEQ ID NO: 170188 - DNA, 122 bp, Homo sapiens
tctgggcgggcggggcgcacgccttccgtgtttggtggagaagcagcctgtggtgaggagcgaggagccagaaggacggcttgggagtgccctgggggacctgaattgctgtgagtgttgac

SEQ ID NO: 170189 - DNA, 122 bp, Homo sapiens
cgagcaggggtgcgagggtgctctggtgccagacagtgatgagcagagtccagggcagcacgatgaggacgatcgctaggatgtcccgtctcttcggcatctccaaggctggctgcacccac

SEQ ID NO: 170190 - DNA, 122 bp, Homo sapiens
ctgaaacccctgagcttccctacttcaccctcctcttgccaatatgctcaacctccttgccgtttgtccttttaatgcattgccctggccaaagcccagctttggatgaactcaactgttta

SEQ ID NO: 170191 - DNA, 122 bp, Homo sapiens
ggctcacgcctgtaatcccagcactttaggaggccgaggcgggtggatcacttgaggtcacgagttcgagaccagcctggcaacatagcgaaaccgcttctctactaaaaattagccgggcg

SEQ ID NO: 170192 - DNA, 122 bp, Homo sapiens
ccggtgggacccgctgctctgagtcactcttggcacagaacaccaagcaccctcagaaaccgaattcaccacctttgggaggctcctgggagaaggcaaggaacccaggcggggctcccagg

SEQ ID NO: 170193 - DNA, 122 bp, Homo sapiens
aacaaaggggctattttataaagggggggtggtcaaggtgtagggaaacataaaagagagcgaatttctggtctggtgctgtgggtcacgcctgtaataccagcagtttgggaggccgaggc

SEQ ID NO: 170194 - DNA, 122 bp, Homo sapiens
ggaatgaacatgttggaaataaacgctctcattttgcaggcagataaactgggaatcgtgcgtgtaaagcagcttgctcaaagtcttataactatgaattggaaagtcagattcgagctagg

SEQ ID NO: 170195 - DNA, 122 bp, Homo sapiens
atcttagtgtagttttaattgtttgtttttgtttttgagacagggtctcactgtgtcacccgggctggactgcagtggaacaatctccactcactacaacctccaccaaggtcacccaagcg

SEQ ID NO: 170196 - DNA, 122 bp, Homo sapiens
tggaatgcattcattcattcattcattcattcattcaccactcattcctcccacaaacgtcgtcagcgctgtctctggtccaggcactgtgctgggtgcatttgcaccagacaaggatgtct

SEQ ID NO: 170197 - DNA, 122 bp, Homo sapiens
ccgctgccactctctcgccggctccactcccgcagtcacttcctgcttccctcccgcacacgtggccctcccgcctccgggccccgcccccttggccgcaactggcaactcccgcctgaaga

SEQ ID NO: 170198 - DNA, 122 bp, Homo sapiens
gattttactaagaaaacagactgagttcaggagtctcaccagtagaactttatagtattgcgtttcgattacatgtgtgtgaattttaaaaactgattaccctccagtaaaaatgtggaacc

SEQ ID NO: 170199 - DNA, 122 bp, Homo sapiens
aatattgcatgattccacttggacaaggaacttacagtacagtagcccaaatcacagagacggaaaatagaatggtggttggcgggggctagggaaagtgaaagtggggaatcgtttaatgg

SEQ ID NO: 170200 - DNA, 122 bp, Homo sapiens
tcttctcccctctcacgtcacaagaaaaaccagtcaagaggtcggagagtgtgttataaccgtcctgctgaaaattaagatgtagcaatcacagtttggaggaatccacagcgacagaggag

SEQ ID NO: 170201 - DNA, 122 bp, Homo sapiens
atggttgcttctcagattcactgtggccaggacactgcgtttttggagaccacgtgccggcgggcacacaccctcctgttgctcagatgaaccaaccggcctccattcctgtgcttccgcaa

SEQ ID NO: 170202 - DNA, 122 bp, Homo sapiens
tgtcggataactaatgacaatctaaattctcatcattctagatttatcgcaggttttcaccgagtacacaatattatgtaccatgcctaggaccttttgctatttgataaagtcaacaaaag

SEQ ID NO: 170203 - DNA, 122 bp, Homo sapiens
cggggacgcagggccccctcccagctgagagcactgggacgcccaccgcccctttccctccgctgccaggcgagcatgttgtggtaattctggaacacaagaagagaaattgctgggtttag

SEQ ID NO: 170204 - DNA, 122 bp, Homo sapiens
agccccgccccggggcggcaccttctaagggcctgagcgctgcacagggatgggggcgggcggggcctcccagagccgccaggcgtcccgccccactccgcccacacgcacggcccagccca

SEQ ID NO: 170205 - DNA, 122 bp, Homo sapiens
gccagtgcactccagcctgggtgacatctcttaaaaaaaaaaatcctgaataccacactacgcagtgactaacacatctttcactacagaacagaacctgtaacttggccgtctctcagcag

SEQ ID NO: 170206 - DNA, 122 bp, Homo sapiens
atgatcctcccaactacactcccgctgccacctccaactcctttgccgagacccccttggcggcagctgaaccacggcgaaggccgagactagcctgccctttagtagccaccctcccccac

SEQ ID NO: 170207 - DNA, 122 bp, Homo sapiens
agaatcagaaactgacctctgcctgcccagccgcccctctgcgccgggcaccactcagcacgtgggtgggagtggatgccgctccatctttaggacacttttactttctgtacatagtcctg

SEQ ID NO: 170208 - DNA, 122 bp, Homo sapiens
ttaaagggcttttaaatgaacgatttcttctaggcctcactgctcttcacaggaaaggctcgtcggagactcttggcatggaggactgagaatcaggaatagggaaggtgtccagcgaaggg

SEQ ID NO: 170209 - DNA, 122 bp, Homo sapiens
ggcaagagctgcgagtcgccctggcctccggtggccgaggctgtgccccttcctcgtctgcgaggccccctcctggcatctgtaaggctcccgtggtgcagccgccgcccgctgtcccctgc

SEQ ID NO: 170210 - DNA, 122 bp, Homo sapiens
cttggggaaacaggaatctgggaactgaaaccatctgtcgtcttgaccagaaaagtcccccgctgctgcaggaggcatggattaaccacgtgtctggaaacatgagaccaaatagtggctaa

SEQ ID NO: 170211 - DNA, 122 bp, Homo sapiens
agctcaggtaccgccgcccgcgcctgggggccgcccctcttcctcctaggccctcctctccgggcggcctcggacttggggaccagcatggagaagatccaagccctcactgagcactgggg

SEQ ID NO: 170212 - DNA, 122 bp, Homo sapiens
cagtgtctgaagaaaatctctgcgttaatggacacctgatagtggctttagcagaaagagcgtcaggagaagctgtagtaaccagaacctgggagggagggatggctcaggagtaccccctg

SEQ ID NO: 170213 - DNA, 122 bp, Homo sapiens
gcgcgtctagctcccgcgttccgatcccggaagggaaaacccatgatcctggcgagggtccgtccacacgtggccagggtggctgatcttcccggctgctgtggttgtcaacaccacttctc

SEQ ID NO: 170214 - DNA, 122 bp, Homo sapiens
tactgagtcaaacgacataagcattttcatggatcttgatatattataccaaactcttcccgaaaagactgacatttatttgtagtgcagccaatattagttatgtacttatttcatagcaa

SEQ ID NO: 170215 - DNA, 122 bp, Homo sapiens
gagggtagcaagaggagggcaggccagcgagcggggcggggctggagggcggggcctcctcgcgtcggagcgggcgcgcgctgacttaagcacgcgcccgtgctcgtggcctgggttgcgcg

SEQ ID NO: 170216 - DNA, 122 bp, Homo sapiens
gcagcacggcgcctgatctgcacccccctctgcgggagtgatgcattgcagaacggcggccgggtaccgtgcagacacccacgagaacactgacacagagacactgacagacacacacagat

SEQ ID NO: 170217 - DNA, 122 bp, Homo sapiens
ggggagcagggagcgcgggagcctcatgcaggtgtgcgtttcacacgggggggccaaggtcgcccttcccgaggcagccctgccttctcccccggccctcggcacccagcgcgagtggaggg

SEQ ID NO: 170218 - DNA, 122 bp, Homo sapiens
aggagcccccggatccagggccaaacgacaaggtccccggcagcaacgggccccttggggcggacccctcgcccacccagggccggggattggtgctgggccttctcctggcagcgcgggcc

SEQ ID NO: 170219 - DNA, 122 bp, Homo sapiens
ccttctgatcccccagggctgacccagtcccagaccaggcacgaagagagaggtcagagccggtaagaaggacccccagagtcctccgtcagtgcagaggcaccagtcaccaagtgaacgtc

SEQ ID NO: 170220 - DNA, 122 bp, Homo sapiens
ctgcggcgtctttgggcccttcttgccttccctcagggacttgggggaaggcatctccaccgtgcccccgtagggacagctctccgagccgggatggtggccggtgcactccaccgcgggca

SEQ ID NO: 170221 - DNA, 122 bp, Homo sapiens
aagagagaaaataaatgacattttttaaagaagaagaatccaatggaaaaacactctttgcgctatggaaagatgatgtccttatatcctgggtgagattagaagaggaggctgggaagcag

SEQ ID NO: 170222 - DNA, 122 bp, Homo sapiens
agatctcccttcaacaccaaaaattttatttccctagctggcttgagagctgttagctgtcgttagccctcatcagaaattgtcttagaaaaagataggtacctcagccaaggtcacccctg

SEQ ID NO: 170223 - DNA, 122 bp, Homo sapiens
taaacaactagatctcgtcaaagatcactcgccatcacaagaacagcaccaagaggatggcgctgaaccattcatgagaaccctctcccatgatccgatcacctcctaccaggccccacctc

SEQ ID NO: 170224 - DNA, 122 bp, Homo sapiens
ctgcacttccacattacagaatcccaaggtttctaatactttaagagtctcatgctccaccgactgagctagtcaggcatattctaatgtttcaagagctcctccctccagcctctgcctgc

SEQ ID NO: 170225 - DNA, 122 bp, Homo sapiens
ttggtcggaagagtacgcacgtactgtcggaagtcaaccagctctggcattcgaaaataccggaacagctcatgggcttgcattgtcctgtgttgatagttctctaagctgaattctgttgg

SEQ ID NO: 170226 - DNA, 122 bp, Homo sapiens
tcttacacgcctacgctatatggtacaggctgttgtttgctcctaggctacaaacctgtacggcaagtgaccatactgaatactgcaagcaattgtaacacaatggtaaatatttgtgtatc

SEQ ID NO: 170227 - DNA, 122 bp, Homo sapiens
cacctcgagcctgcggcggccctgcctgagggtctccgggatggccgctcgtcctggtcacgcacccgtgtacaggtctgcagggtgggcaagagtcgtgcaggctcacacccagggctgct

SEQ ID NO: 170228 - DNA, 122 bp, Homo sapiens
tgttaatgagtaacaagcacagcagcgtggtaaaagctctgcagctccagtaattgcacccgccagaagctcttcacatgttgcttattttatgagctagtatttcttatagtaaaccttgg

SEQ ID NO: 170229 - DNA, 122 bp, Homo sapiens
cgtacataaagtggtcaattattgcttaacaaaaccttgttaatgtcagtacattaattccgaggcttttataaaccttttaatgactaccttgtattaggtactcatatttgtgagaatca

SEQ ID NO: 170230 - DNA, 122 bp, Homo sapiens
agcaaaagaggctggggattaatttcctgcgcgctccacaagaggcggggctgggcggggcgggggcgagagggaacgagggcgcctgcgcggagaggagtgaccatagagtcggtcctcca

SEQ ID NO: 170231 - DNA, 122 bp, Homo sapiens
actaacaaggagaataaattcagagggttattccttctaccagaaagttaggccaaggggcgcaaaaaggggtggccatcccgagttggtatgaatgcagggatcttggaaggcttcctggg

SEQ ID NO: 170232 - DNA, 122 bp, Homo sapiens
tggccaggctcgcaccgctgtgggaggcgtggtgggcacccggcttggccaggcttgcaccgctgtgggcggcgtggtgggcaccggcttggccaggctcgcaccgctgtgggcggcgtggt

SEQ ID NO: 170233 - DNA, 122 bp, Homo sapiens
gccgagctcatcagacgggcggttgtccccagagcccgcgggtagcttgttcccgggcggcggctcctgctggatgcagctccttgtgggcctaccaggcttggtggagccacagcagacct

SEQ ID NO: 170234 - DNA, 122 bp, Homo sapiens
ctgtctctgtggattgacctggatgtttcatgcaaatggaatcaaacagcgtgtggccttcgcatcgtacttcacgtgctcagcacgtgtgttccagggacctcacttactcagcacgtgtg

SEQ ID NO: 170235 - DNA, 122 bp, Homo sapiens
gacacagctcctgtcctctgggacctccaggacagcagaggagacaccagcagaggtcctcgtgaagtgatcatggctctgggggcaaaaagaggacatatcagccgagacttgggcgcagg

SEQ ID NO: 170236 - DNA, 122 bp, Homo sapiens
ctcattctggtgaaactggctctgttgaatgttttgcaaaatccaaaagaggaagtaatccgatacttgaccacaagggtgtgttgcctcaatactttgactaaggcaaaccacgagctgtg

SEQ ID NO: 170237 - DNA, 122 bp, Homo sapiens
atgagtagagtctagtttagagtcgataaccacattagcctgtaggctagagatctgtagcgcctattaaaatctgtccaaaactcccccgaaaactgaccaggtgcagtggctcatgccta

SEQ ID NO: 170238 - DNA, 122 bp, Homo sapiens
tgttgaccttagtacacccacatcctgctctggcagagatgacacactagcctgtttccacgtttagcatcatcacctctgacccctaatgccaaacaggggtcagagcatttccccagtgc

SEQ ID NO: 170239 - DNA, 122 bp, Homo sapiens
ggtactaggtgctagtgagtgaggccctaggacaggtgatggtgttggggagagatgggacggtagctcagaagagaaatgggaggacaggtgccctcctggcgattgtgcatagtagcaca

SEQ ID NO: 170240 - DNA, 122 bp, Homo sapiens
cccacagtgtgagtagtgcatggcatggagtcatggctcatttgcgcacacagcacaacacgaactgaggagagtagtttcgggtccttcacagactcagttcctgcttcactgcacctcag

SEQ ID NO: 170241 - DNA, 122 bp, Homo sapiens
gcctgagcctccccccagctccgtgggctcctgtgcggcccaagcctccgcgatgagcgccgccccctgctccatggagcccaatcccatcgaccacccaagaactgaggagtgcaggcaca

SEQ ID NO: 170242 - DNA, 122 bp, Homo sapiens
gaactaatcaggaacaccattgatgagcctgatgccactcaattcctgctgcccagaaggcggggccttttctgagcaagtaaagcaggagagaagcaacactactggttactcaaataaca

SEQ ID NO: 170243 - DNA, 122 bp, Homo sapiens
ccagccgattccttccatccttgtacgaggctgaattctgacgcccaggatgagctccagcggacgtcaagctgatgtgtcatcttatgagtgagggcttctgagctagtgcccatgagctc

SEQ ID NO: 170244 - DNA, 122 bp, Homo sapiens
gaggggaggaagagagggcggaacccagagctcggcggcggtggccgtctcgttgccttacgttccttaccctgatttctcctatatgggagtcgtgtgagctttttgaataaatacatttc

SEQ ID NO: 170245 - DNA, 122 bp, Homo sapiens
aggaacaggaagaagattccgagagaaataaagaggccgagaggagctgagccaggcagccggtggagcaggcagatggaacaacagagacaaagaacagagccacagagtgggcacacagc

SEQ ID NO: 170246 - DNA, 122 bp, Homo sapiens
gatggtgaattgcaccaataatgctgtaggtggcgctgtgtacttgatgcatgtggccagcgtgtctcgaagatttctttggagaacggatggcgtctggcatcgttttagttaaacgtgat

SEQ ID NO: 170247 - DNA, 122 bp, Homo sapiens
gagaatccaagtcagaatagcacaaaatcataataactgatcccccaggggtgggagtcccggggttggggggcagaggcctgggggagtagtcccaggaaggcaggattccagccagttcc

SEQ ID NO: 170248 - DNA, 122 bp, Homo sapiens
cgagagaccagccagaggaaagcggcgcgtggctacgttgttcccggccccctgccggaccgggtgtctggagtgctgatcttgggccaaagcttctgccgctctcccagacactgcgggcc

SEQ ID NO: 170249 - DNA, 122 bp, Homo sapiens
gccagagagagccccatggaaggaaagcccagagatggtcttcgatcttaaagagcatggcgtatagttgggtagataaaacatgaaattgggaagcaggcagcaaattaacaaaggcaaag

SEQ ID NO: 170250 - DNA, 122 bp, Homo sapiens
gccgagaggctgaggccttggctgagccccggtcttcgaggggcggttcccttacccgcccgcacccaccccaggtaggggactcttgaggccaccgtctagtccaaggtgctgtgacccct

SEQ ID NO: 170251 - DNA, 122 bp, Homo sapiens
tttgcactgtgcttgccgccacctcatcacctgtgtttccgcctcggcagccgggagcatcgccatagagacctcaacgcttgtggaaagttctgaggcccaaggggaccctctataattgg

SEQ ID NO: 170252 - DNA, 122 bp, Homo sapiens
ccttgcacttctcgcagaggtgctgcgggtgctccttgctctggtcggacacgtccaggccgtcgggcttctccaggggtctctgcagagagaaggaggaaggggcccaggggagtgagggg

SEQ ID NO: 170253 - DNA, 122 bp, Homo sapiens
ggcagccagcaggcaaagtggcatgctgtgtaattttccaaggtagggaggaagcagtggcggcttctgcttggtcctaccggcttggcttccggggcacacgctgctctggggagaatgcc

SEQ ID NO: 170254 - DNA, 122 bp, Homo sapiens
tgacacgtggactcggccaaattcccaccactaggccgggaaacacgctcatactcactgcgtaaatcccaccgtcgtgggccttgcttccgcccagcgcgcacaccttctccccagtcttc

SEQ ID NO: 170255 - DNA, 122 bp, Homo sapiens
agcatcaattcccatcccatagatactgacctagtagatcagtattggcaaccctggggccggaaagctattttttatttctccggctcccctccacttctgaaaatggagagttgccagct

SEQ ID NO: 170256 - DNA, 122 bp, Homo sapiens
cccgggcccttcacctgatcctcagcttcctgcatatgacctgcaaagagacactcaccccggtgctgacagctctaaccccatccattccatgcctgttagaccagagcgcagcttctctg

SEQ ID NO: 170257 - DNA, 122 bp, Homo sapiens
attttgctgcggtgccccaggcatcttctgggtgtggaggcaactccacgtgagaggtaccggtgcgtcccagtcccagacttgtgccacttttctgagccctctgggccggcctcatgcct

SEQ ID NO: 170258 - DNA, 122 bp, Homo sapiens
acggcacccgatggctattcgagctctcgatctcggagactggagcgggccattcagaggcgcggggccgggcccggcggacgcttgttgttgtccggccgggggaggcggaggtcgctcgc

SEQ ID NO: 170259 - DNA, 122 bp, Homo sapiens
ttcggagtgggcgagggtggtgtgggcccaggacagcccctcagtaggcacccggcctggcggccgccgctgaccctctccggattcccgggctctgggggccgggggaggaagcgaccttg

SEQ ID NO: 170260 - DNA, 122 bp, Homo sapiens
ataaaatggttgctgggaacagcacaggcctccagacctacgcgctgaagacagaggggtcgctctgatagcggggacgccaaggcccctctgcgcttcctgtcccgcacaccctataactc

SEQ ID NO: 170261 - DNA, 122 bp, Homo sapiens
gcgacggcagcacctgcaagggtgggtccaacgcggaatgaggcacagcctgggacagcccgggcccggcgcgccgcggccgcgcgaggcccccgccgtcgccgacgcccgagcgccggagc

SEQ ID NO: 170262 - DNA, 122 bp, Homo sapiens
accctcataggggcacccccgggctgaggaggggcgttcagggaacctcggcctggggcacgtggcctgttctccgtgactcactctgggctgacccctgcctgcagggtccggacgttccc

SEQ ID NO: 170263 - DNA, 122 bp, Homo sapiens
cgggcctggactggccagagcgtcagccctcgccggcagcgagcgcggtgagaggctggacgaggcgaagctcagagacgccaaaaacctgaaagatgctgtcatcgccacccccttccccc

SEQ ID NO: 170264 - DNA, 122 bp, Homo sapiens
acgtagtgaatgcccaatggtgatggttgttatcatttcatgtatttttactcttgttaccgctaagcaccagcatcacaactgttcctccaggagaaatctataattaggggataagaagc

SEQ ID NO: 170265 - DNA, 122 bp, Homo sapiens
ccggcagcgccttgaaataccaaaggcctagccaaagatggaaccgttttgttgggagctcgggtttcccccgccgcgaggctgagccggtggcgcagctgctcaaaggtcacgcccgagac

SEQ ID NO: 170266 - DNA, 122 bp, Homo sapiens
gccagcctgaccctactgctcagaatgtgggaacaggctgggcgctttttacacacgcagcgtctgaggcctactccagaccctccgaggcagagggatctccatagaacccctgggtttgc

SEQ ID NO: 170267 - DNA, 122 bp, Homo sapiens
aaagccacctcacactctgtgtgatgctcaacggtccccagtactgaagttttctcatggcgccaagcccatagctccaactcgagtgacccctgagctggtgctcttgtcaagaccatgtc

SEQ ID NO: 170268 - DNA, 122 bp, Homo sapiens
gatgtgggcctggtaggaaagctctgttgtttgggccaagtagggaagggtcttgaggaacgagtgggtttgttctcatcacagggtctagtcttactgggtcctgggcagagtattagtac

SEQ ID NO: 170269 - DNA, 122 bp, Homo sapiens
tcccatctaggaagtgaggagcgtctctgcccggccgcccgtcgtctgagatgtggggagcgcctctgccccgccgccccatctgggaggtgaggagaccctccgcctggcaaccgccccgt

SEQ ID NO: 170270 - DNA, 122 bp, Homo sapiens
cagaggacagggcggagtcccctggggtcctccggctcggcggggcctttcttcaggctgcggaactcctcgaagtgggcgccttccctcggccactcacctgtcatttatcgagcgcctac

SEQ ID NO: 170271 - DNA, 122 bp, Homo sapiens
gtagaactctgtgtgcatttacttagcaatctgcatttctaaagtgctttgtacacattccgtctatgttaaaagcctcagcagcaggttggaggcgggttctggggctagtgtttccgatg

SEQ ID NO: 170272 - DNA, 122 bp, Homo sapiens
tctgaaacaagtgtaacacttgttagcaccttggccttacatctgtccattaagaaccttcgagacagtggaagtagactgattttgagtggaaccatattctgacaggtcctataagatgt

SEQ ID NO: 170273 - DNA, 122 bp, Homo sapiens
tttctcggagttggtttgtcagctgtgtcctcgctcatccggcggccctgcccctctgcacggagcgatgcatctacacgcgggtgtgcagagtgtgaaaagcattccagctaccgggaaaa

SEQ ID NO: 170274 - DNA, 122 bp, Homo sapiens
cgggtgtgggcgccccacctggtcgccagctttcatcattaacccttgcgcgatccttcccgaaaactagacaccccaaccccacctgatgaaagggatgtttggtcagtggggcgcgagag

SEQ ID NO: 170275 - DNA, 122 bp, Homo sapiens
cagggcttcagagggcctcgcggcctggggattggcaagggtctagaggggaacaaaggacggaaaacaataaggcttcccgaatgaatggcagccactctgtagcctgatttacgctccat

SEQ ID NO: 170276 - DNA, 122 bp, Homo sapiens
ggcccacgtgctcagagccttggccacgcctcccctcttagccccgccccaccagcctaccgggccaggctccgcccccaccaggattcaccacgctgggcccggcaccttcctcaggtttt

SEQ ID NO: 170277 - DNA, 122 bp, Homo sapiens
attatagttccaaaaaaattattcgttcccttcaaattattccttttggaattagccaggcgtggtggtaggcacttgtaatcccaactactcatgaggctgaggcagaagaatcacttgag

SEQ ID NO: 170278 - DNA, 122 bp, Homo sapiens
tgcataatttcatttctcctgttacattgatgacagagtatcatccaggtttctctactgcgaagttattctttttgcctttgtaattaatcactattttctatggaggtattttgtttttt

SEQ ID NO: 170279 - DNA, 122 bp, Homo sapiens
gttatcctgggccctcctggcgaagtccccggtttccgctgtgctctgtggcgacacctccgtccccaccttgtcctggggggcgccctcgccccaccagccccgatcaagttcacagaggg

SEQ ID NO: 170280 - DNA, 122 bp, Homo sapiens
aatgcctttcatgtgtgtatcacatcttacaagctggtgctgcaggaccaccaggccttccgtcgcaagaactggcgctatctcattctggatgaggcgcagaacatcaagaacttcaagtc

SEQ ID NO: 170281 - DNA, 122 bp, Homo sapiens
cgttggggagctgagctgctgcaggtttgattgtcttcccctgcttccaaactagaaagacgaatgcccactttcggattccatcttctgccgcggacgcatccgggacgcgcagccgcccg

SEQ ID NO: 170282 - DNA, 122 bp, Homo sapiens
gagcccacgcgcacccggaactcgcgctggcccgcaagcaccgcgtgcagcccgggttcccgcccgcgcctctccctgcacacatgcctgcaagctgagggagccggttccggccttggcca

SEQ ID NO: 170283 - DNA, 122 bp, Homo sapiens
ctcgtgggaccggcggcattcgtcgttcctccttacggggataattcgagaagtgcggtccgggtagggagagaaatcaggagagaaaatgagaaagagaatcctcgtttcccctcaaagtt

SEQ ID NO: 170284 - DNA, 122 bp, Homo sapiens
ttgctaatctttccctgaatttttaacaaaatcatcctagattagaagaataattctggtcgtctgaaaatgacaaaaatgttgagactttgggctagatagtcctgttaaagacacaacat

SEQ ID NO: 170285 - DNA, 122 bp, Homo sapiens
agtgactcaagggaagttttatagccttctcatccttgtaactacaccaacatctgcttacgttgacatacagaggtttttattttttcttttttaccagttcaggtttatgttgcattttc

SEQ ID NO: 170286 - DNA, 122 bp, Homo sapiens
catgcccactgtactaccccagcagaaatgttaagtgtgaagaaatatcctacctgagaccgagtcctcacataaaaaactttgtagggagccagtgggcatccttggtggactctccaatc

SEQ ID NO: 170287 - DNA, 122 bp, Homo sapiens
agaccagctcgcagcctgggggcagtggttcaagcacaggctttggagccgaaatgactgcgcctgaagtactcttcttccacttccccgctgtgtgaccctgggcacgttacctagctcct

SEQ ID NO: 170288 - DNA, 122 bp, Homo sapiens
tcgcggaggcttggggcagccgggtagctcggaggtcgtggcgctgggggctagcaccagcgctctgtcgggaggcgcagcggttaggtggaccggtcagcggactcaccggccagggcgct

SEQ ID NO: 170289 - DNA, 122 bp, Homo sapiens
agggctggagctcacggctgggctgtggcctgtgccgtcccgtggaggttagaaggtgggcgcagatgtgctcagcttcctgagagacgtctcattataacgccgccccaggcagtaatttg

SEQ ID NO: 170290 - DNA, 122 bp, Homo sapiens
ggcagaaagtccacaccgaggtgctggggtcgcctcagaagctgacaatgccaggagctccgtccagcccagcaaactgaggcaggaggctgggtttcaggtcctgaccggctcagagagag

SEQ ID NO: 170291 - DNA, 122 bp, Homo sapiens
cccctccatccatgtaacggttaatactgtatgctgtgattcactgtgtctatttgccatcgtctagtagagtattcaccaagctagcaactcagttgagctccaactcaaccaatgaattg

SEQ ID NO: 170292 - DNA, 122 bp, Homo sapiens
tgagaagagacaagaccacccagaagatatggccaagcacacccccgctgaggctgtgcgcggctgtgccccgggcaaagctggctcgcttcctagtggtccgccctgccagttatttcatg

SEQ ID NO: 170293 - DNA, 122 bp, Homo sapiens
ttgtcccctgcgcggatgattctgggaaatgtcgatcggctgtgggcggcgcactgggtccgccccgctgtagcctcaggcctgacggcgactcccaggctccgggacgattctgggcagtg

SEQ ID NO: 170294 - DNA, 122 bp, Homo sapiens
cgagactgctctcccgtgacccctagttatgccccactgggatgtgggggcatgggggagcgagggcatcatgccagtgactctatgtacagtgagaagcccctcatccactctcccaccct

SEQ ID NO: 170295 - DNA, 122 bp, Homo sapiens
cctcgttctaaagagtcaatgtagggccgcaggactgtatacggcagagccaggatacgccgtggtcatctgtacatatttctatccatgtattaatcgatcccgagaaatcaggctggacg

SEQ ID NO: 170296 - DNA, 122 bp, Homo sapiens
acctaatgcgtccggagcaggccagagaacctgcatatctaaccagttcccaggcaaggccggtgctgctgggccgcgctcctcacgcggcgggtcaggcaagcggcttgcacacgcgaggg

SEQ ID NO: 170297 - DNA, 122 bp, Homo sapiens
taggaggctgaggagagcagattacttgaactcaggagtttgagcccagcctgtccaacacggcgaaccccgtctctactaaaaattcaaaaattagctgggcatggtggcaggtgcctgta

SEQ ID NO: 170298 - DNA, 122 bp, Homo sapiens
gaataagtgtgtcagttcttaaggtccagcaacacaaagcgaaaagttagtggaggactacgagcgcgatctcgacagagggcgctgggtggtcagtggctccagcaaccacgcggctgggg

SEQ ID NO: 170299 - DNA, 122 bp, Homo sapiens
gaaaacggcctgtttttctctctccctccataccggttctttcccgcaggaaaagtgatccggtgtttcccatccggaagcattgaagcgtttactatcttaaacaacaaaacaatgtcctt

SEQ ID NO: 170300 - DNA, 122 bp, Homo sapiens
gaagggaaaactagggcgcactctcggtcggggtgggagaggaaaggggctggggcttcacggagtttggagtttgaacccacccgcacccctttgagctaggaagtttgacccttcgacga

SEQ ID NO: 170301 - DNA, 122 bp, Homo sapiens
gtgccctccttgtttagtgcgttgccggtgggcgctttaggaaattggtaggaggaaaagcggcttcttttgaaaaggtaacccttaacagagatgaaagtgaaagccaggtttcattggga

SEQ ID NO: 170302 - DNA, 122 bp, Homo sapiens
ctgccgcaggcggggtgctcagttgatactagctgattcccggggcatcctgcccctccacggcaccagctgatacccaggtcatcctggccatctatggcaccagctgatacccggggtgt

SEQ ID NO: 170303 - DNA, 122 bp, Homo sapiens
ccgtctgaacctgatggctccccctctctcccagctgggtgcgggcagccccaggactaccgtggccagcttgccctgcatctccgcgatcttccgcccagggttgtcttcctttagcagct

SEQ ID NO: 170304 - DNA, 122 bp, Homo sapiens
ggggctggagagccctcgagaaaaggaggaagatgcctggattttagttgtctgggtagacggtgactcagcctgtggcatctgccaggacaggagtgtctctctgccctgggagggatgca

SEQ ID NO: 170305 - DNA, 122 bp, Homo sapiens
ctcacttccccctcaggacggccaccccttggggctgggtgcagagcccccatccagccgcggtgagggtggctgtcatccggcgggtcctcaccctggtccctaggcttgccgcagctgat

SEQ ID NO: 170306 - DNA, 122 bp, Homo sapiens
agtgcggagacccagtctgccctccatgctgacgggcggggtttgcgctgtgggatttggcgagaagtggaaaattctatcttgccaaagaaagtgtgtcttagtttgttccggctggacga

SEQ ID NO: 170307 - DNA, 122 bp, Homo sapiens
gaaatattgcagagtgtaaaaatcctcaacagcccactccctcggagctgggggtccacacgcacaggggctgcagtgggaagggggcgaggtcttcctcatagagaaggcaaccttggagc

SEQ ID NO: 170308 - DNA, 122 bp, Homo sapiens
gtaagtagggtgattcaagttttataattagagaaagctgaaggctcattgaatcaagaccggtagcagccttggtttcaattaattctaaacacggcttgagttgctgaggctcctgacta

SEQ ID NO: 170309 - DNA, 122 bp, Homo sapiens
ccgcacacatttcctggcgaacatttggaatctatagctttaggaaaaaccgatctgggacgcgctagtccccaggaactgatgcccccaccctcgggggattgccggcttctccgcaccct

SEQ ID NO: 170310 - DNA, 122 bp, Homo sapiens
gggcagatccttcatgaactggattagtgccctgagaaaagaagcttgagggagcctgttcgcccttccaccacatgaagatgcatagaaggggccatctgtgagaaaggagccctcagcag

SEQ ID NO: 170311 - DNA, 122 bp, Homo sapiens
atttggtttgcaggtatttgagtgtctgtttccctccctgggaaatcatgaggaccgaaacgctccttgtgcgctgtagctctgaggtggctgtcatggcccggacggcgggggaggcgagg

SEQ ID NO: 170312 - DNA, 122 bp, Homo sapiens
caaaccaggcatggcttgcttttcttctgacacgttttaacccctctactaaatttttagcgatatatatttactcttaaaatgaattacaattattctgtgatgttctttgagataatcaa

SEQ ID NO: 170313 - DNA, 122 bp, Homo sapiens
cccctccaccctcataaaagcacccccagggccctgcctgggtcagtgtctcagccacagcggcttcaccatgcacagctgggagcgcctggcagttctggtcctcctaggagcggccgcct

SEQ ID NO: 170314 - DNA, 122 bp, Homo sapiens
tgggctgaaaaccccaaccttccaatcatgccctgctctttatggtgaccagcccccatccggaagctacctagggcctgccagccatcagttaacattagcataccaaaaaaatcacttta

SEQ ID NO: 170315 - DNA, 122 bp, Homo sapiens
gccaatggtggcaagggcggcccaggctggcgctgcggctccccaagccttattggcttgcggctgttcagccagccctctggctgccagggtgtgcagaggtccccagggagttaggacct

SEQ ID NO: 170316 - DNA, 122 bp, Homo sapiens
tgccctggcataattactaatggtgcctcccttcattattaaaagtatcctgcagctgagcgaggtggtgcacacttgtagacccaactactcgggaggctgaaatgggaagatcgattgag

SEQ ID NO: 170317 - DNA, 122 bp, Homo sapiens
gcccgggcttcgtgccatttctggccctggagcgcgcgcgtccccgagcctgtcgcttcccgggccccagggggtgccatgcttggccctatctccagaaaaccaggcagagcgggtgcacc

SEQ ID NO: 170318 - DNA, 122 bp, Homo sapiens
ctctactcctaattgcgcctgctccggcagctccggagggcgtggttaatggaactcatgcgcttgctcagtacttctcttaggttggtctaggaggcttcgaagtgcgcctgcgctggttg

SEQ ID NO: 170319 - DNA, 122 bp, Homo sapiens
ttcccacagtgctagtttctgtgcctgaactctcctctgtcccacctgcctccgcctgtgcgagccggcaccgggccgctttcattgctgggtcttcgtgattcatatccagcaggcgaggg

SEQ ID NO: 170320 - DNA, 122 bp, Homo sapiens
cgcggccggccaccccgctccggtgcagggaccagggtaccggccgccactggtcctcaccgtaatgctctgaaagacgcccccggccgtggctgcccagacgtatttggcgtcgcagtagc

SEQ ID NO: 170321 - DNA, 122 bp, Homo sapiens
aggggtgtgcgccctgcccggtctggctggttggggttggctccagcctcaaggaggcggcgggcagcggttggccgggagaatcgggcagccaggtgcaggggggtctccccagtgcccac

SEQ ID NO: 170322 - DNA, 122 bp, Homo sapiens
aggcattaatttttccagaaagctacccccataaaacaattcctccaagcagggcaccatcgtacctgaaactttcagagatcagtgtcttaactaagattaagctatcctttttcctacct

SEQ ID NO: 170323 - DNA, 122 bp, Homo sapiens
gaaagacattatggaataatttgtgggtgatgaattagagagaggagtaacaggtgataccgaagtctccagcttgaaagatctgagacaataacagtattggagggccaggagatttggtg

SEQ ID NO: 170324 - DNA, 122 bp, Homo sapiens
tttccatagctctcctcccatttttcttcatctttcttcctacatcttggttcacatccacgcatgagagtgattatgtagaaaagtaggcatagtgtcgcatgctgcagtaaagagctaca

SEQ ID NO: 170325 - DNA, 122 bp, Homo sapiens
tcctacttacctgagcggcccgggtgccgcagcagggcgctgacgagtcccgccgagccccgccgcccgggttcaaggccgccttcacgcccacgattccttgttttttgggcagaggtcaa

SEQ ID NO: 170326 - DNA, 122 bp, Homo sapiens
ggggctagggaaaatctggccagtgttgaagaatacaaagctaacctttgcaattccttgcggttctaccgttccgtaggtgccttctagaccaagggccgcaagtggtcaattcactaaat

SEQ ID NO: 170327 - DNA, 122 bp, Homo sapiens
ctggataacaaacttatcaaacgtctatcaaggtccaattcccagtcacactctgtgactcgactgcttcacgtctaaacattgacgtcactgcgcatgtgcacaaatacggatggaagaaa

SEQ ID NO: 170328 - DNA, 122 bp, Homo sapiens
tttctctaatttgaggagaagtggtttgccctgtgacccacttctctgatgggtctagaacggttactaatttttcagtctgttcaggtttttacttgttgtttgggtggagtggccgcttc

SEQ ID NO: 170329 - DNA, 122 bp, Homo sapiens
cagactccagttccttcccagtgccctgggtccttcagggtccttgggatgagacatctccgaacacgagcttttctcagctggcgtctgagggtgatggcgttctgcccacaggcatccgc

SEQ ID NO: 170330 - DNA, 122 bp, Homo sapiens
catgtggtagaaaagtaaagcccattttcaaggagagaattcaagcaggctgtggcacaacgacttgctagagatatttgcatagctaaaagggagccaaatgctaataaccaagacaatgg

SEQ ID NO: 170331 - DNA, 122 bp, Homo sapiens
aatgctggtgcatgttcaggcgacgctccgtgagcgtttcattttcatcagatgaacgcacggccggcaaacaacccgtttctttccccagatgtcttcagccccatttccagcagaacgca

SEQ ID NO: 170332 - DNA, 122 bp, Homo sapiens
catgtgtggcagctactacagaaactacaatggtggccatggctatgggtgctgtggctacggaggcctgggctgtggttatggcggctgtggctatgggtgctgtggctacggaggcctgg

SEQ ID NO: 170333 - DNA, 122 bp, Homo sapiens
ctgctgtcccccaggcctctcccagggccgatcccctccagggccgggtcccctgctgcccgggcctcagccccggctctgacatttacacactgcagccgccggcaccctcggagacagcc

SEQ ID NO: 170334 - DNA, 122 bp, Homo sapiens
tggcgccggccgcgtccaggctgcgggccgaagccgggctcggggcgctgccgcggcgggcgctcgcccagtacctgctcttcctgcggctctacccggtgctcaccaaggcggccaccagg

SEQ ID NO: 170335 - DNA, 122 bp, Homo sapiens
gctgcaccgagtggtcaggacattgaggccgggtcagggagcgtgagataccgggacgagcgggcccagggctgagcccagcggcgtccgggtgggcggtggcgttgagatgggaattggga

SEQ ID NO: 170336 - DNA, 122 bp, Homo sapiens
caggaaccaggtgaggctgtagtactgctccggaaggcctgcaagggacacgagggccgtcgcacacgcaggcactggccgggctctgccacagttttcctgggagccccgcgacaggcagg

SEQ ID NO: 170337 - DNA, 122 bp, Homo sapiens
cgaacacagcgcgggcattttgacaatggacaaaatcttgcccttgactttataatccatcgacatttggggacccataaaccccctaacctctgagaactatttagacaaatactagtcgg

SEQ ID NO: 170338 - DNA, 122 bp, Homo sapiens
ccaggacgtgtcaggcctgggcggggcggaaaactgacaccagggcgaggacaaggatttcgctcctccagggctgccaggggaggggctcgccaccgtcactctccatgggctctggcccc

SEQ ID NO: 170339 - DNA, 122 bp, Homo sapiens
aggcccccggtcgcggcggagcctgtgcattgcgcacattccgcacaagctcagccatggcgtagctccctgaggggcaggactaggtgtcagaacacacctctgccccacctctccaggaa

SEQ ID NO: 170340 - DNA, 122 bp, Homo sapiens
cccgacaaaaccctagaaaagccgtctgcgagccaaaggccgccgggccacaccttcaggcgacgacccaatcaaaatgcagtacttgagatgacggacgtcttcttcacccaatcacatat

SEQ ID NO: 170341 - DNA, 122 bp, Homo sapiens
ctagtgggtctgctggctcgcactgttttcccagggatcctttcagcaggcagcttataacgggaaagttgctgctatggtgtctgagtaagtggggagagtagaaggggatggactgtggc

SEQ ID NO: 170342 - DNA, 122 bp, Homo sapiens
cttgaactcctgaccttgtgatccacccgcctcggcctcccaaagtgctgggattacaggcgtgagccactgtgcctggcagtactaactttcttaaaagtggatgtatttaacagagacac

SEQ ID NO: 170343 - DNA, 122 bp, Homo sapiens
gtgcagagtcactaagcgtgagccgtgaggggttcttcctttacccccatgtgtaacacacgggttcagtgaacgctgatcaaacgctgcctgcctcttatctgccctccctcttctttctc

SEQ ID NO: 170344 - DNA, 122 bp, Homo sapiens
ccatttccgccttgcctgcctagcaaacgtgcaaacattgaaaaagacgcacacgcagaccgcgcctacgtccccaaagtgcgcaagcgcacggcgagaccccgcccctcgccctcccacca

SEQ ID NO: 170345 - DNA, 122 bp, Homo sapiens
ttgcactgcgtcccacagtcgcgcctcgcctcgcctcccggagcccgagtcttccaagggcgctggcagctgcgtcagctcccgctgcccgccccaagcgtccagagctaggagggagttac

SEQ ID NO: 170346 - DNA, 122 bp, Homo sapiens
ccgccccggccggaagacggcctgcgccagcctataggaaggcggtagacagcctataggcgctgtctgcgggcgggggggcggagaccgcgctcgcgaagagcccgcggattggcaaggcc

SEQ ID NO: 170347 - DNA, 122 bp, Homo sapiens
tggcatgggagagatggaagggaggtggccatggggatcagagggcaggaggggaagtggcggacggtggccctcagtcatgcctagccgatccctgggctgaaggcagatttcagaaccca

SEQ ID NO: 170348 - DNA, 122 bp, Homo sapiens
attattgcgaaaagtcggaaaccactcacggtcactccgtagaggctgggtgacatgaaccgatgaacttgcacagaacggaatgcagtgacagggctagattagaaacagacgggcaagtt

SEQ ID NO: 170349 - DNA, 122 bp, Homo sapiens
aggagcgtgtaggcgatgtagacaaagaacacagggcaccagaggcccgcagaggggctgcgcgggtctgctgcgagagcgcccccgacctgcactgccgccaggatgcccagcaccacgta

SEQ ID NO: 170350 - DNA, 122 bp, Homo sapiens
gacttaaagggacagcgcccaccccgccccgccagggtcaggagggagggaagtgacctgcggagtttgtagcagagtcagaccactgagaaattccaggtttctgttttttttttttagcg

SEQ ID NO: 170351 - DNA, 122 bp, Homo sapiens
ccagctctctcgaaaagcgggtaagaggagctctccgacatcagcagcagaatccccactcggaatctcaaaagggaaaacagaggcctatggcttggcgcaggtcaggatagcagcctctt

SEQ ID NO: 170352 - DNA, 122 bp, Homo sapiens
cggcgatcaagcgggcaggctgggagagggcgggcggaagaggcgtggccgccgctactgcgcacgtgcacccaaccagaacctgggggtggtgccgggccttccccgctgcgcggaggcgt

SEQ ID NO: 170353 - DNA, 122 bp, Homo sapiens
catggcccccacagtggaccagctggggccacccaggaagagccagggagtcggtgggagcggcagaagcccttggggacgcttctgggggaggctttcctgggagcagtaggtgaagggag

SEQ ID NO: 170354 - DNA, 122 bp, Homo sapiens
ctcgtatgactgtctgctccttggcagagtcaccaggtgtccagatcagccttagaaacccggtctgatcagtttcctgggaactacaaggctcctgtgaatcctctctccctctgcaagct

SEQ ID NO: 170355 - DNA, 122 bp, Homo sapiens
ttagtccgtttagctaccctcactgggggcaccttgtaaaagtctaaggacaaaagttcacgtcaaatgtgtcctaaggaccaattagcaaaactgaaagggctgaaaactcctacttgaac

SEQ ID NO: 170356 - DNA, 122 bp, Homo sapiens
tgccacgctgcgtcctgcgttccccgcacttgctgtacaagattttcgaaagctggagtgcggctcttctctatttttcccaggggcaccaggacccctaaaagcgcccgtgtatgtgcctc

SEQ ID NO: 170357 - DNA, 122 bp, Homo sapiens
actgcagtatttagcatgccccacccatctgcaaggcattctggatagtgtcaaaacagccggaaatcaagtccgtttatctcaaactttagcattttgggaataaatgatatttgctatgc

SEQ ID NO: 170358 - DNA, 122 bp, Homo sapiens
tgcgtgacactcacctgttcacactctccaggccaggagagctacggtcctctgcaagttcggaatgggtcccccaagatcgcgaagccctcccacactgcgcagcccaggcttcaggttgc

SEQ ID NO: 170359 - DNA, 122 bp, Homo sapiens
tggggcccgggctcgggcctgggctgggggcctcctggagaagccgggaggcggcggcggcggcgctgcccgcggcggtcccgggtcccgggcgggtatacgggcgccgctggctggtgctg

SEQ ID NO: 170360 - DNA, 122 bp, Homo sapiens
gcccggctggcagacatccggcggcatcgccgctgaccctccccgcccgccccgtgcaggcggccacatcctcacctctaaatttagtttgcaggaaggagaacctggggtagggtggggga

SEQ ID NO: 170361 - DNA, 122 bp, Homo sapiens
tacccccgaaatcggtgcctgtaaaatgggctggacgcaggtctcccgggcagggagcagcgaggcgctgcgcggtggcttgtctaaatgcccttcgaaccttttcctgcgctgaaaaaaag

SEQ ID NO: 170362 - DNA, 122 bp, Homo sapiens
gcgacgttcgatgttgaaaaccaaaagctggaggcactgcccctcaagccaggaggcaggcgtgtgtcagcatagtctggccagcagggcaaggctctccctagccttaggggaggctgcag

SEQ ID NO: 170363 - DNA, 122 bp, Homo sapiens
tgcccctagcaaactcccagctcctgcctgacaagttactgcctaacccgtgacttatttcgggaatccctgacgcatttctttaccgtccctcatttcaaagcacaccatgccggcagcac

SEQ ID NO: 170364 - DNA, 122 bp, Homo sapiens
cagagccgtactgaagcacgagcttcaataagacaagcacacttcatagtgagagggcagcggtaccaaagcctttcagagagactatggattagacagaaatgatttgtgagaggaagctg

SEQ ID NO: 170365 - DNA, 122 bp, Homo sapiens
atacaaagttgtgggtaaatccagcgcagtggggggcgcacggccttacctgtgccatggcgactactcaggtcaggggaaggtgaagcaggactgcaaaagagaagaaacctcgggcttag

SEQ ID NO: 170366 - DNA, 122 bp, Homo sapiens
gatggggcggggccgtgctgtcggggcggggcgaccgaatgggcggggttaagcggggtccgggttgtggagggtgcggggccttgatgccaagggcgtggccaacgtccgcggggccgggc

SEQ ID NO: 170367 - DNA, 122 bp, Homo sapiens
aaaaaaaagggtcttagtattcagttcagaaaaggggagaaaccattcctccacccccaccgctccccggaggtctccgatgaaaacggggccgagtaaggggcagagcgctgcctctctgc

SEQ ID NO: 170368 - DNA, 122 bp, Homo sapiens
cctccaactgcagggaggatacagtgagcgagaacacgaagagacccgaaccaagcaggccgccctggatggtgagccactcggtggaggccagctgacggctgtacatctgcatcccagca

SEQ ID NO: 170369 - DNA, 122 bp, Homo sapiens
tcattaaaataattgttgtcccatgtcctcctctgacttccttcagataacctggaaggccggatataggttctctctatccttttcaacttaccaatttgaagcttaacacaatgcaagta

SEQ ID NO: 170370 - DNA, 122 bp, Homo sapiens
ggaagctttgttctttcgctctttgcaataaatcttgctactgctcactctttgggtccacgctgctattatgagctgtgacactcaccgtgaagatctgcagcttcactcctgagcacagc

SEQ ID NO: 170371 - DNA, 122 bp, Homo sapiens
cggtctgtagtgcacaaagagaactttgtagcatcccggggagtgagggggctgcacgtgcgtgttttgttttgctaggctttgttttcaggatgctgacgaccggttaaagatggagcaag

SEQ ID NO: 170372 - DNA, 122 bp, Homo sapiens
caaggtcactgagtggctgcagaatggtcctaagtgctttcttgaggcaggcaatttgtccgtcacatggtgtacagtttctcccttcagctgatcacttacatctcagtaccggcagatac

SEQ ID NO: 170373 - DNA, 122 bp, Homo sapiens
cgtatttcttttcttccctagaaaacagattttgattaacaaaactcacgagacattggtcgtggctggatctgggtgatgggcacgtggggctcatatggcaattctttctacatttgcat

SEQ ID NO: 170374 - DNA, 122 bp, Homo sapiens
gcctcggggatcaggtcccagccggctgtggccctgagcacatcacttcaccttcctaaacgctgattctgcagctgcaggcgcaggataatagctccaacttcttaaggggtttcagggtg

SEQ ID NO: 170375 - DNA, 122 bp, Homo sapiens
ccatcgggcaggttctgatatctccattcacgcgatgagacggtctgtgtgacccaacggcgcccctacgtggccccaggctggatactgattggacccctgccttgtgccctggggacacc

SEQ ID NO: 170376 - DNA, 122 bp, Homo sapiens
atgtaccccgattaggcacgctcgctctctccttagagcacctctggttcacctctcccacgccccctgcattagcacaggcgtttccagagttgcacgcgagctcatttgcaagaccgtct

SEQ ID NO: 170377 - DNA, 122 bp, Homo sapiens
agggggaagtcaggacttacctgtcattactttctacgccatcttggatccacttgtcaacgtccccacaaagcattatgggtaagaaagagcctttaaagtgactccccccggcccccgac

SEQ ID NO: 170378 - DNA, 122 bp, Homo sapiens
cagcgctccgcattcgtgtgtacctcgtggagctttctaaaatttaattccgttggcaggcgaagtcttgggacatttctgacttacatttgggtctcagggagccaaggcactgcggggtt

SEQ ID NO: 170379 - DNA, 122 bp, Homo sapiens
tctgaacttgcctctgagaacccgcagggccgtaaacctgaattccgcgggagagaacggcgtccgtttctctcgcgacacttcatggataacgtagatgcttcaagtccagttcggctctc

SEQ ID NO: 170380 - DNA, 122 bp, Homo sapiens
cgctgcaggcccggcttctggctgcgggggagctgtaccctgaagcctcgccggaactcgcgtctggggccagcagggggcactagagtcaacagggactgtatgcaaaacccacttcctcc

SEQ ID NO: 170381 - DNA, 122 bp, Homo sapiens
tactttttgaactaagcccttaatcttcactactttggactagaatggaaatgtcaccaacgccttcccaattaatttgtcctggctgtaatgactgaaaccagaacttccctttacaccca

SEQ ID NO: 170382 - DNA, 122 bp, Homo sapiens
acgggaggaacaggggttggcttgtccggaggcggacggataacgcgaccccgatccctgcggtactctgcagtcatgtgactcgccgcctggcgcatttcttcaagtgcccaccccctcga

SEQ ID NO: 170383 - DNA, 122 bp, Homo sapiens
gatcccgagcagccacggagcttaggtcccgcagagagctcctgccaagcgcttctctctcgactagttaccaattgagaaaaaaaagggtcagagacacacaaggatggtgatcaaaatcc

SEQ ID NO: 170384 - DNA, 122 bp, Homo sapiens
cagatcaccagccaggtaactgggcagattggctggcggcgagagggtatcaagtatcgtcggaatgagctcttcctggatgtgctggagagtgtgaacctgctcatgtccccacaaggtga

SEQ ID NO: 170385 - DNA, 122 bp, Homo sapiens
cccagacctgtttaattccaaagcacaatattttactgcctgtctctgatcaaggaatagcgtgctgattttcatgactaactgaaaggcactgaaggtaatgtgattacacagttcatatg

SEQ ID NO: 170386 - DNA, 122 bp, Homo sapiens
aagaatacctagcttccaaattatttaccttgtgtttttctaggtctgaatttatattcccgcagtttagaactgctgatatctcctgaggtttgagaagaaagcaacattgatttgttcat

SEQ ID NO: 170387 - DNA, 122 bp, Homo sapiens
aaggtgggggtgcggggcgaggccagagcccttgcagatgagtccagacggggccagaggcgctggcttccgagccgcagctgggcgcatcgattccagggcaaagaggcccccagcggcga

SEQ ID NO: 170388 - DNA, 122 bp, Homo sapiens
acgacgaccacgagtgctgcgagcgcgtggtgatcaacatctccgggctgcgcttcgagacgcagctcaagaccctggcgcagttccccaacacgctgctgggcaaccctaagaaacgcatg

SEQ ID NO: 170389 - DNA, 122 bp, Homo sapiens
aatggtaagggcaaatgcctgagtgcttgactggcttgggtttaagggaaatagaagtaacgagggaaaaggaatataaactactctgtgaggaactttgtggtaaaagcaagtgaagaagt

SEQ ID NO: 170390 - DNA, 122 bp, Homo sapiens
gctccagcgctcttccggggaggctggctcacttctgggacagtggccaacccaggcctgcgaccacctgctgagccggtgaccgacgccgcctgaccctccctcgcccgccagggtccaac

SEQ ID NO: 170391 - DNA, 122 bp, Homo sapiens
gcttaaaggggatggagagagcctgaaatttgggggaagtaggccaaggagtattagcaacgtctgggcctggttgaatttcattacttttcctaggaaagtaaattatgggtggcttgaag

SEQ ID NO: 170392 - DNA, 122 bp, Homo sapiens
tgacacaaaatcacacaaaaaatgcttttacagcctcctcccatttccctgacagacaggcggattatccccattctattcctagagatgaagattcaggaccttgccggccccgagactca

SEQ ID NO: 170393 - DNA, 122 bp, Homo sapiens
ctctcttttaaagttcagcaagagtcacacactgagaaggaaccggtggtggggtgttttcgtaggaaaggggcggcaggtcaggatgagattctcactgtcatgagtatgggtttgggcgg

SEQ ID NO: 170394 - DNA, 122 bp, Homo sapiens
agaggggaaagctgtcttcactgctccgtcgccccagcctggggtcctcttcaccacgcacgtcacctgcagggccacgcggccgggattcccgcttccctgcacccgcaatgcccgagagg

SEQ ID NO: 170395 - DNA, 122 bp, Homo sapiens
actgagcccaagcttccccttctgactctgtggctagactaggagcttcttggaaggcggcgacgagggtggctgcccaaaacattctgcctggttctagtatgcagctgctcacccttggc

SEQ ID NO: 170396 - DNA, 122 bp, Homo sapiens
aatagcagtggattcctcggacggagggtgggggtcaggccaggagcctctggcacactccgtctctcctacccctcagctcggccgccacctgtgagccgttgatgtgcgggaagggcgct

SEQ ID NO: 170397 - DNA, 122 bp, Homo sapiens
atctaggagaagtgcttcagctgcccagtgcgccgtggggagtgttttaacggatcgtgtcgcaggagagcacagcccagcgttggggccgggaccgctggcgcccgacgtcggaagcatac

SEQ ID NO: 170398 - DNA, 122 bp, Homo sapiens
aacaccgcagacgtgtgttacccagggcggggcccctgagagctggggtggttcagagcccgtccccactccgggagcaacgtcagggcggggcggggctggacggacaatgtgacctttgc

SEQ ID NO: 170399 - DNA, 122 bp, Homo sapiens
tattgcattcaaatgcaccacaagcatctttaatagcaacacttcctagggactgtgctacgagggtttgacagactctcaaataccatgtcctctatagggacaggaagagaggtctggta

SEQ ID NO: 170400 - DNA, 122 bp, Homo sapiens
ggatttccgttcggcttgttgtaacactgagcccagctccagggaccctgtctccctcttcgcaggctcccatggggggctgggggagccaggcgggctcggcagcgggtgctgcgctctgt

SEQ ID NO: 170401 - DNA, 122 bp, Homo sapiens
atggggcctcgggggcggggcagcggctcctgtcagcgggtgaaatggcagcggcggagccggcggcggccgcggtcccggggggcggctgagggggccgggccggggctgcggggcgaacg

SEQ ID NO: 170402 - DNA, 122 bp, Homo sapiens
ttcatcaacataattccagggtttactccagtttttccacagtatggttgcctagcaaagcgactataccatcttatttgaggttccttgtgttctgaggccactggagcaatttatgtgga

SEQ ID NO: 170403 - DNA, 122 bp, Homo sapiens
tgagacccatttaaaaacaaccctacctggtgtttttattgtaattcaagtttgaaataccgaggagctttttcacagaataggtttaaaaataaaaccataacaattggcaagggtagtcc

SEQ ID NO: 170404 - DNA, 122 bp, Homo sapiens
gccccgaggggctgctgcggcgatccgggtcgggctacgagggcagcaccagctggaaggcggccttggagggtaagcgcggagcggcctccctctcctggcccagggacccctgcccaggc

SEQ ID NO: 170405 - DNA, 122 bp, Homo sapiens
acagaacacaacagagggacaaagctgcagaatcaaaagctctaagttcacgggacagcacggggaatcaactatcaagccacagaaggggatcaggactgccagtacccagcgcacaagga

SEQ ID NO: 170406 - DNA, 122 bp, Homo sapiens
ccaggtggttgctgcagtgcattcattggtgatatgcacaccaataaacacataacatagcgcacggaagaacggcatgaccaacatttgctcagctctttacagtttacaaggacatgtag

SEQ ID NO: 170407 - DNA, 122 bp, Homo sapiens
tggggatgcggggtgggcggcggggtatttttgggacggaggcctacgggccgagccacgcgcggcctcgcccggcggccccgggatgggccggcaggaggccgccggggtaactccgccgt

SEQ ID NO: 170408 - DNA, 122 bp, Homo sapiens
ccctaagttttgaaattgagactttgtattttctgctgttttttctgtagaagacagattcggaagaaaatcagcattagccatacccgtttcagttgtcacaacatctgttggaatgacat

SEQ ID NO: 170409 - DNA, 122 bp, Homo sapiens
tggctgcccacaggtctgcaggcactcggtacgccgctaacgcggcgaggtagctcggtgcgtctcgcggtaccagtgcgaatcatcgggctatccaggtccgagatcctagtctcctgtcg

SEQ ID NO: 170410 - DNA, 122 bp, Homo sapiens
ggccgggagggggaggggtgcgagtgtgtgtggcgggcccctaggggctccagctcgcagcgacgcgcgcaccgtccgcacctcccgccccgccgccacctcccctgcctccgccgccaccc

SEQ ID NO: 170411 - DNA, 122 bp, Homo sapiens
cccggcacgcgggcggaatggctgagcccagcctggaagcccccgtcaggtccttgggggcgggcgggcgcgcgaagcacagggcggagacagccgggagcccagcctcccgggctgggccg

SEQ ID NO: 170412 - DNA, 122 bp, Homo sapiens
gagcctccagcgtctccagactggcggcgggtttgaactgggccacgagctcctgctgcacgaagcacttgtagacggccggctggaaaacctgcagctgcctgccgccggtggaggggtcc

SEQ ID NO: 170413 - DNA, 122 bp, Homo sapiens
gtgtggccaggatcccaggcagtaaattgtgcggcggggtctggatggaaaggcggggcccgctgaaagaaggcgatccgagttctgctacttcctagtaagggacgtctctggagagattc

SEQ ID NO: 170414 - DNA, 122 bp, Homo sapiens
ctccgacgaaaaaaggaagggctctgttccggaccgggtggggtttgggaagggtagagccggcctcgggtgcccttcttacagggcctgtctcccgctgcgtgcaccaagtgctttgaaag

SEQ ID NO: 170415 - DNA, 122 bp, Homo sapiens
tccagaagcacaagttcatattcaccgagattgccaccgcaccagtcaagccctgaatcacgcgtgtgactcacttgtcagccgatttctctgcagaaagctcttagcagttaatttctggc

SEQ ID NO: 170416 - DNA, 122 bp, Homo sapiens
acaaagggattgtccctcagggttgggagagagacggtgactgtactcgggtcagtcctgcgtctgtgagattgagctcctgttgtccattcatccagggattggtgtttctgaaaaggggg

SEQ ID NO: 170417 - DNA, 122 bp, Homo sapiens
atgaaaaatttctggagatggatgatggcaatgtttgtaccacaacgtgaatgtacttaacgccaccgaaccgtacacttagaatggttaacttggcctagtgtgatggccaccatgcccag

SEQ ID NO: 170418 - DNA, 122 bp, Homo sapiens
tcacctcgtcctctatgccgtggatgatgagcacgggcgacgtgatcttggacaccttctcgatgttagggaaggcgtcgaagcagtaggtcttggtgtcggggaaggcgacgcgcatgccc

SEQ ID NO: 170419 - DNA, 122 bp, Homo sapiens
caggcgtgagccaccacgcccggtgaatttttttttttaaagaaagattccggacacaaacggccacaagttgtatggttcgttttatatgaagagttcagaatagacaaatcgatagagac

SEQ ID NO: 170420 - DNA, 122 bp, Homo sapiens
ctcttcatggggggtagtggccgaatctttcggccagcccagccccccttgcggtgccaccgcccactgttaggcctcttgcccagccagcggttgcgacctgccttgccaatgacccgttt

SEQ ID NO: 170421 - DNA, 122 bp, Homo sapiens
agggccctctctgttgaagggcagaggggagcttcctctgtaatgagcagcatcctcattcggccatcctgcagtttatctgtttgggattgcagatattggttttcatatacctacactca

SEQ ID NO: 170422 - DNA, 122 bp, Homo sapiens
gagtgcgagcccgtttctgaacaccctgtgaagttggtgagaattcaggtgcctatcggccgggctccacctgtgcaccaggtgtggccgcctcactgtgacttcaaaggtccccggggagg

SEQ ID NO: 170423 - DNA, 122 bp, Homo sapiens
ccacggaacctaaattcagacttggtggagcccaaaacctcgcagcctcaggggcactctcgccgggggcgggaccagaagggggtgtggcctctcaggtcgaggcggggttaagggtcata

SEQ ID NO: 170424 - DNA, 122 bp, Homo sapiens
cgacggcgccggggatcgccgagcggggctgggggcgggggcgcgggaggagcggcttaccgtaaagtctcatgcaaaggcgcagagacccaggggcaggagcccaggctcccgctccaccg

SEQ ID NO: 170425 - DNA, 122 bp, Homo sapiens
agctaccatgtattgaggggagatttcactttgtttggattggcactttccctgggatgccgccagagtgagtcactgagaccacccacttgtgtgagtctgcacgtgcagctgcacatgtg

SEQ ID NO: 170426 - DNA, 122 bp, Homo sapiens
gaaggtgcttgttttctgtctctccattcattcggttacaggacacccgacgggacaaagcgtgttgtaaccgaccaccaatggagccggctctgttcacggattatggttgtcttggcaac

SEQ ID NO: 170427 - DNA, 122 bp, Homo sapiens
atcctcaattcttttttctgctttttcagtccattctcatcagacatttgttctcaccaccgtcacttccatagtgtgcggtgtcgacaaaataccatttctaccacttatccccctctggt

SEQ ID NO: 170428 - DNA, 122 bp, Homo sapiens
gctgaggccgggctttcacctgcgcacccggggccgcacgaggcccgggcgggggcggggcgggggcgggagctggaccacctgcaaccattccccggctgcgtattccaatcccggcctcc

SEQ ID NO: 170429 - DNA, 122 bp, Homo sapiens
ccttgacgtcacgctccggatgggaaggcggggcgtgtgctaccgccaggggcggggcggcgcgggcgggccggccgggctgtgcacctgcgcctcggcgggccgcctggggcaccgtcccc

SEQ ID NO: 170430 - DNA, 122 bp, Homo sapiens
cacctagagggtcctaaaccagctaggaagcccccacccgggaccaccaggccccaaccccggctgtatttgcagccacagaggagccccccacccagagtgagaacagacacctgatggaa

SEQ ID NO: 170431 - DNA, 122 bp, Homo sapiens
attgctctacttcttacattccttctagccataagactaaccctttttttttttttgagacgaagtctcactcttgtcccccagtctggagtacagtggtgcgatctcagttcactgcaacc

SEQ ID NO: 170432 - DNA, 122 bp, Homo sapiens
cctctgcccaacccccactgccatcctgagcccagcagggaggtgctgagtggtcaggctcgcctccctgagcacctgcctcccaggagggacacactcccagccacttgcccctttcctcc

SEQ ID NO: 170433 - DNA, 122 bp, Homo sapiens
atgcccagcccctcccccggctcctctaacctcgcgatcccgccccagaccctttagccacgccccaaagccgtgattccttctggccccgccccaggctcccggagctccgccccgtctcg

SEQ ID NO: 170434 - DNA, 122 bp, Homo sapiens
ccagtgtgagtgggtggtgaccccatgagcagctggggcttggggtccctgctccacctccgggccccaccccctgacatcactgtcgcattattgcaccaggtctggctgaccaataagct

SEQ ID NO: 170435 - DNA, 122 bp, Homo sapiens
tcccctccctgccggcaccacgtcccctctgacactgaggtagggcgacatgggcgggagcgggccctctcagggtaaagtcacccagaaggagcaggcgtaggagatagtgactgggagaa

SEQ ID NO: 170436 - DNA, 122 bp, Homo sapiens
tcttcgccgacaccatagaggtgggccttccgcgacgccacaggagcgggtgttcgcctacgtcactggggcgctacagtacctggagctgggcagtcttctcatcagagtggggactaata

SEQ ID NO: 170437 - DNA, 122 bp, Homo sapiens
ccgccggccctgcccgtcagtccaactacggctacctatgtcttgtctgtggcttctgggcgggctggcggccggggcagcgcaatggcatggctttggtctggatgacggccccgcctccg

SEQ ID NO: 170438 - DNA, 122 bp, Homo sapiens
tgtacctctccagcccatagagccccccttccaacccagcagttccccagcctctgcctgcgcaagctggggtgtccatgccagataggacaacactttgaccttcccagcatgtctcctct

SEQ ID NO: 170439 - DNA, 122 bp, Homo sapiens
gcgatttgatcccattggttgcctcggcaacggcgtaatagctcaaccgaagcgctgtcacggtgatttagaaccagtgtgtctctcctgcagcctccattctgggtgcctccacccccttg

SEQ ID NO: 170440 - DNA, 122 bp, Homo sapiens
cgcccccttgccctagccttcctgtgtccttcccacccttagtcccaggcatctgactaccgggaacctcagccagagtccgggagccccccaccccgtccaggagccaacagagcccccgt

SEQ ID NO: 170441 - DNA, 122 bp, Homo sapiens
gtgccctaaaaaatgagaaagactccgctaatgtgtaggcagtcaaccagccctggtcagcgtactcacaggtaggcagacggccgcgcggagagcaccaaggggcagaaggatgctgcttg

SEQ ID NO: 170442 - DNA, 122 bp, Homo sapiens
caaattatttgaactgcatgtggagagctaggccagttctgtgcaatattccagggcctccgtgttaaccagcgggttcccaggaagcctgccagacaagcccacaaacagctgcccaggca

SEQ ID NO: 170443 - DNA, 122 bp, Homo sapiens
cttttggcctgtctttattgaatttcttttcttttcttttctttcttttggagacagtctcgctctgtcgcccaggctggagtgcagtgccccaatcttggctcactgcaacctctgcctcc

SEQ ID NO: 170444 - DNA, 122 bp, Homo sapiens
ttttagcacattcccttatagggcagttataccttcctctgtgactcattatacaggcagcgctaagatgtgtattatatgctcatggtatcctttcttactatccttataatagaataaat

SEQ ID NO: 170445 - DNA, 122 bp, Homo sapiens
gttccgccatttcatgcgtcggttctggaaccagattttcacctggaatgtcccggccggcgagaagaagggagaagcagaggtcagatcaggggctccgggggacgcacgggggcggggag

SEQ ID NO: 170446 - DNA, 122 bp, Homo sapiens
acttgtgtaccaggatgcagagttctccaggtagctggacgctggggactggttggaggtcggagggtgggcatgagggtggtggctgagcgagcgggacgagccctggggctcccacaccg

SEQ ID NO: 170447 - DNA, 122 bp, Homo sapiens
ggcacagacatgcagatgcgcagtctctagggctgctccttagcctcctgggttagcagccgggagccatctgcgctttctcgccgagaaagccgaggctgaacggatagggggcagggagg

SEQ ID NO: 170448 - DNA, 122 bp, Homo sapiens
ccccagccctatcctgacttgcaattggctgaactttcagggggcggggctcacccggtccggtccagttaaaagggtgggagcgtccgggggcccatctctctcgggtggagtcttctgac

SEQ ID NO: 170449 - DNA, 122 bp, Homo sapiens
ctcttgctgagccgtggccctgcaggtggacagccacatcatgaaggtggtgcagcagatcgtgcaccaggctagcgccggccaccagatcatcgtgcagaacgtcaccatggacgaggaga

SEQ ID NO: 170450 - DNA, 122 bp, Homo sapiens
ttgaaaaagtaccagtgcccaggccctctaccccagagagtgtcaatgaattggtctgggcgtgttggaatcaactgagagcttttacacagcaccactgcccaggccccacctgagcccca

SEQ ID NO: 170451 - DNA, 122 bp, Homo sapiens
cgcgccgctaggtttccgtcctctcagagccacgaagccaaagggcatggaaagggcacgcgcatgcgtgtgggggagcccgaggcccggaacagcgccaggtgacttcgagagctggggtc

SEQ ID NO: 170452 - DNA, 122 bp, Homo sapiens
ctgagagcctgattgtggaaagaagtgagatgcaccttattttcaagaagtcctgggaagcgctctcctagcacgtccatttccaggaggagaagcaagcagatgagaggttttccattttg

SEQ ID NO: 170453 - DNA, 122 bp, Homo sapiens
catcctctgtccccacagcctcatctttggggccatcacctgctttacgggatttctgggcgtggtcacgggggcaggagccacgcgctggtgccgcctgaagacccagcgggccgacccac

SEQ ID NO: 170454 - DNA, 122 bp, Homo sapiens
gttggcaagacctagccccacttcccacccccagagccgttcctgtctccctcactcacacgctttccacaagctctgcacttccctgcacctgcctgggtgccctgggaagggctctctcc

SEQ ID NO: 170455 - DNA, 122 bp, Homo sapiens
aagattaaaaatggttacataatactgtcctatggctggcggcaacgaagctcgggatctcggactgcagcgagcccgcggcaggcgggcagggggccgcgcggcaagacctccccgcctcc

SEQ ID NO: 170456 - DNA, 122 bp, Homo sapiens
acagatcggggatcgggccgggggcagctggggtgggctcagcagagcagtccctggccccgcggttaattgaaataaccgggtcaatacacggccgccgggacccagccccatttgatctc

SEQ ID NO: 170457 - DNA, 122 bp, Homo sapiens
gctgtcaatatattcaaatatgtcctgaacaatccctgttgcccaacagcactgacaccacgggaccctcaccccgtctccatccatgtcggggtgtgagcccttcccaggtccatgccccg

SEQ ID NO: 170458 - DNA, 122 bp, Homo sapiens
ggggttcctcggctccaccagcgacatttgtggccggatcgctgtgtagtggagctggcccgggaactgcaggatattgagcggcatccctgaccccctccactggatgccaggagcacagc

SEQ ID NO: 170459 - DNA, 122 bp, Homo sapiens
tcacaggcatttcacaggtgacgtgaggcacgcgcagacacgtccctagcattccacagccgtctgggtcacagcctgctctcagaggagaagccaccccgcgattgtgcctcccgtctctc

SEQ ID NO: 170460 - DNA, 122 bp, Homo sapiens
gtgtccacgtcatgtcctggagagtggatgtttcacattgtttcagatgccagtgactttcgaggatgtggccttgtacctctcccgggaggagtggggacggctggaccacacgcagcaga

SEQ ID NO: 170461 - DNA, 122 bp, Homo sapiens
cagacataatcaaacagaaaacaaaactcatgggggaggataaatatttattcaaacatccgggcaattcctaccaagtgctttatgtgtatatgtcatctggtaacattggagaaaaacca

SEQ ID NO: 170462 - DNA, 122 bp, Homo sapiens
cttcagggagccatttgcaagtaaattgataagctgagtgctgtaacggctcacaagggccgaggactttggcggtggcacgctgctgctggtcctcgctgccatcaagggagtgttctttt

SEQ ID NO: 170463 - DNA, 122 bp, Homo sapiens
aggaaatgtccactcctttgggggtgatttttctcctcaagttgtagccaacattttgtccgtaactgatttcagggcaaacatttctgacatcttcctccagctcagtctgccatgccttg

SEQ ID NO: 170464 - DNA, 122 bp, Homo sapiens
tcatttatctcatcaccctggtgggaaaccttggcatgatcctgctgatcagagcagactcgcggctccacacccccatgtactacttcctcagtcacctggcattcattgatctgtgttac

SEQ ID NO: 170465 - DNA, 122 bp, Homo sapiens
catgcgtgggcttgggccacaggtgcagcgtgaggccctgttcatgaagagtgagcgacacgcagccgaggcacagctggccacagcagagcagcagctacgggggctacggaccgaggcgg

SEQ ID NO: 170466 - DNA, 122 bp, Homo sapiens
ccattttagatagtgcagatataggacatttctatcattacagaaagttctgttggacagcgctgttctggaccacaaaaagtaagaccttgagttctattgtaagtgcagcgggaagcccc

SEQ ID NO: 170467 - DNA, 122 bp, Homo sapiens
ggctgggcccgtggccgctctgtctttcctgggcaggggacgctccgggaggaggggcaacgccagggggcccatcccccggaatccctcttctgcgactggggagtagccggggggctcgt

SEQ ID NO: 170468 - DNA, 122 bp, Homo sapiens
gtgagcgttagtcagatggggatgatggggacgtgccgctcaggcagagcacacaggctccgtggggcggcggagacagcaccggacaggccagcggagtcgggtggctgtgttcgaggccc

SEQ ID NO: 170469 - DNA, 122 bp, Homo sapiens
ccagaccggggtggctcaggtaaaatgtgcttctttggttgtcttaggaaaatgcagccccgtctttccgccaaacgcatcgactacggccaggcgcctgctaacccagcaagctctccgca

SEQ ID NO: 170470 - DNA, 122 bp, Homo sapiens
gtggtgctgttcacgtagccatgtcctggctcatcacaagggacacaaaaccttccccttcggggaaacggagggggacaggcaacacaaggccaggaagctccggtccgcatccagggctg

SEQ ID NO: 170471 - DNA, 122 bp, Homo sapiens
ggcagccgccgcacaggccgtcccggggcagcaggacccgagcagagaccacgaggccaacgccagcagctcgggaactcaccgagacgagacttagatgccaagggttggtaaagagtgtc

SEQ ID NO: 170472 - DNA, 122 bp, Homo sapiens
cagtttttacataaattgggttttggcatcacatctaagaaattacgcaatgcgcagattcgagtcacagcaagtaatgatcacaattagggctcagaggtgcccactgtcacaaagacaca

SEQ ID NO: 170473 - DNA, 122 bp, Homo sapiens
gtcctaaggactgacctcagaggcttttgttccttcacaagtctatgctatgaccttgcccgatcttgggctcaaggtaactttactacataccagataaaacctgtaatcactttatttct

SEQ ID NO: 170474 - DNA, 122 bp, Homo sapiens
cacaaaaggcaggcccagagagactccagagatggcccctgtctcctgtgtgtcctccgccgctgtgtccacttgggcacgtcaaaggtatgatcggtacttatctgatgaaaacaaatctt

SEQ ID NO: 170475 - DNA, 122 bp, Homo sapiens
cgggtgggagcggagcggaagtaactagtgactggaagtaactagggaacgcaaagccggcgctcggaggccggggtgttcagagaaggcgttgcgggggaaaggaatcccggctgctgttg

SEQ ID NO: 170476 - DNA, 122 bp, Homo sapiens
aggtcagattcccttttttggttcctaaccatccataccccttcttttctcatgaagactcgggctaagcattcattagggctgccatctggaggatggacccttagagctgaggggccagc

SEQ ID NO: 170477 - DNA, 122 bp, Homo sapiens
aaaataaatttaaagctccagagaacatttttaataataatgatcttagaagctaacatacgtgaaatggttactacaaagccataatctcctctaatttcatcaaatataagctattatta

SEQ ID NO: 170478 - DNA, 122 bp, Homo sapiens
tgacctgggaggagttagactattagagtttaccctgagagaggccacaagatgcacacacggataacctcttcagggtacaatggcattagtgtgttaggagaggtaagggacaaagttca

SEQ ID NO: 170479 - DNA, 122 bp, Homo sapiens
accagggcccgccacatgggaccagcggccctaaggattccctgccatttttgagctggacgtcacgagccatatgccctgtgatggaggcctcgggtgcaagcaaatccacacccacgcaa

SEQ ID NO: 170480 - DNA, 122 bp, Homo sapiens
ggcccgaggggctggactcagactgagattgaatgcggctttgtcttcctagttcagccccggcccacacctggggctgagtggaatcgggagcttcgaggggtctggacagagagattgat

SEQ ID NO: 170481 - DNA, 122 bp, Homo sapiens
cgcaaaatatgaggcccacaggcaccgcgcacacaaaatatgaggcccacagggactgcgcgcacaaattatgagtcccacagggaccgcgcgcgcaaaatatgaggcccacagggaccgcg

SEQ ID NO: 170482 - DNA, 122 bp, Homo sapiens
ctgcagttactggagtaggaagaggcctcggagaatccctggaagcatctacctaaaagacgcgaggaaacccccaaaggccacaggcacctgcaccaaaccctgagtgccgcaggaagctc

SEQ ID NO: 170483 - DNA, 122 bp, Homo sapiens
ccgagaagtgacagaacccagaggaagctggagagaggcagcgaggaaacgagggcccggcgggcagcagcatgaaattcagcccagtgccctacctgctgcctctcctgcccgcgctggtc

SEQ ID NO: 170484 - DNA, 122 bp, Homo sapiens
gggaatgaaaagagtggaatctgcagaagcacaccgccagtgcgaatgcagtgttcctcccgtcctgctccctacccatcatctccctccctcctgcctgcccactggcacaacttccacct

SEQ ID NO: 170485 - DNA, 122 bp, Homo sapiens
cctctgacgcagctggcggagtgttgagaaaagaagcagcgagctttttcttatcgctcgcgtgtctgtggtcagctactggatttcacatgtacttactgctggcttctcttccggcgtca

SEQ ID NO: 170486 - DNA, 122 bp, Homo sapiens
tgtggcgcctttgccctgatggtgttctttttataaatcatgacagctccagtttcatcacggcagagggacatctctgctggtaaggaacagtgatatgctcactctcttctccaagtgcc

SEQ ID NO: 170487 - DNA, 122 bp, Homo sapiens
cgccggcagctcctctgcagactgaagtctgagcagcttggcccacagcacttgcttggccggtgcctagcctgcactgtgggtcgtgtgtctgtccacttcttaccaacccaggcgaggcc

SEQ ID NO: 170488 - DNA, 122 bp, Homo sapiens
atttgatggcttagctaagggcttaagtggagttggatggcacagaatcctcccattaaacggcactgtcaaattttcaaccagactcaaactaatgctctttagaaaaatcacttgttgtc

SEQ ID NO: 170489 - DNA, 122 bp, Homo sapiens
aggctcctccctcctggtgaaagacagactacggggcgcctggaaaccggtccgagggcgcgcgaggcagaggagagggagcgagttgagggattgacacaaatggtcaggcggcggcggcg

SEQ ID NO: 170490 - DNA, 122 bp, Homo sapiens
cagatgactatgtgtcttaaacccctccagtgagctgtgttttgctttaaaaagctgatgcgccaaaaataaggcttgggctgagtcatcagccctgagtttagggaagggagatggtagag

SEQ ID NO: 170491 - DNA, 122 bp, Homo sapiens
ccagccggcccgcggcaagaagagttccacttccttcccggaaaacgcggccggaaggggcgggctttccgcctgcaccaggcgcttccgccaccatggcttcacgtggggttgttggcatt

SEQ ID NO: 170492 - DNA, 122 bp, Homo sapiens
cagggcctggccgcgccccgctccctccccgccgatccgcctgccctttgtccccgtgaccgccaccccttaacacccagatattctaattcagtacatctgagtgaggtccaggattctat

SEQ ID NO: 170493 - DNA, 122 bp, Homo sapiens
ttaccactggggaacaattcctgtcggccaccgcgcaactgtgcgactgaccagaggaggcgtaaccagggcctactacagcgcagaatagggggcgtggccgccatcctccaagtccattg

SEQ ID NO: 170494 - DNA, 122 bp, Homo sapiens
ttacagctcttaaggcggtgcgtctggagttgttcgttcctcccggtgggctggtggcctcgctggcttcaggattgaagctgcagaccttcccggtgagtgttacagctcataaaagcagt

SEQ ID NO: 170495 - DNA, 122 bp, Homo sapiens
aatatggttccctaatcaaaggactttgaggctgtccatatatcttcagaaccagggacacgggaacaccagcttttctatttgttatttgaaatgatgcccaaaagagaagaggacaagac

SEQ ID NO: 170496 - DNA, 122 bp, Homo sapiens
cgcggcgctccagctccagcaggagctctaggccgctgcgggcccgggctaagcctccggcggcgccaggagcctcatccagcagaaaggccaggagctccagctcgcactcggtcagttgc

SEQ ID NO: 170497 - DNA, 122 bp, Homo sapiens
ggcacaagtgaatcagaaattgtggtgcatatcggaatcaccaggagggcttgttaaaaccgtcttttgagccttacctccagaattacatattcagtaggtcttggtgtagcttgagaatt

SEQ ID NO: 170498 - DNA, 122 bp, Homo sapiens
ccaggtcaggctgtcagccgtcatctctgttgtcatcatgccatcttccatgagtcctctcgaattccttccagcttgatgcttccagccgaccacagctgggaaagcaagatcgttatgaa

SEQ ID NO: 170499 - DNA, 122 bp, Homo sapiens
cttcatctgaatctgacatccatgctattgtttccattcttcctcatttcctattaaatgcgtttggaggctacaaatttccctttgagaacagctttggctgcatctcatggacttggctg

SEQ ID NO: 170500 - DNA, 122 bp, Homo sapiens
tcactgcaaacaatgcatacgctgtagcagttgccagcttggtttgtcagtgctggtctccgtgattggttctcaggtgtgagttgtagcaaagttgcgtgttaatcagagagcgtcctgcc

SEQ ID NO: 170501 - DNA, 122 bp, Homo sapiens
gaccccccggaagcggaaacagaatccccgcgtgccccttcctcactaccctccaaatcccgctgcagccattgccgcagacacgatgccgaaacgaaagaagcagaatcatcaccagccac

SEQ ID NO: 170502 - DNA, 122 bp, Homo sapiens
gaggagaagcgcagagtcagccgcagacgggagggcgatggcctaacccggacgccagcgcggtttgctcagccctagggccgggcgctttcccgctccctgaccgcctcctgttcctccgc

SEQ ID NO: 170503 - DNA, 122 bp, Homo sapiens
tcggtccaccggacatcgcccctggctgcctggtccatgcggaagtcatggaattgtggacgaagtctgaagggagaaccgagcgggggtggcgagcgttcgccggagaagcccgccgcccc

SEQ ID NO: 170504 - DNA, 122 bp, Homo sapiens
ctttgcaatctgctggttgagggggatggtgtgaactcagggaacagcctgagatcgcgccgctgcactccagcctgggcaacagagcaagaccctgtttcaaaaacaaaaaataacactaa

SEQ ID NO: 170505 - DNA, 122 bp, Homo sapiens
gtgatcttcaaaataagaaacgtgccatttcttctctggtatactttcgcggtgggatttcggctgctggaggcaccttctctctgcgctctggtttgccttccctgaccctggccatcggc

SEQ ID NO: 170506 - DNA, 122 bp, Homo sapiens
gtttctcagcttcggttggactctggtttttcagtccctcccggagccgcaagaacacgacgtggttaggaagccaggtctgccacagctcgccgtcgcccaccggtccctcggcggccgcc

SEQ ID NO: 170507 - DNA, 122 bp, Homo sapiens
tagggcccgcgactagagcgtccctgtcttacaggtgcggggacctgtaccttacaggcgcggaggtcaaagcagcccggaattgccccgggacgggcagggccaccctctcacctccttcc

SEQ ID NO: 170508 - DNA, 122 bp, Homo sapiens
tcggcctcccagagtggtgtgagccactatgccctgcagcacttgtcaagtctttctcagcgttcccctcctctccactgcagctcccagtgccccagtctgggcctcgtcttcacttcctg

SEQ ID NO: 170509 - DNA, 122 bp, Homo sapiens
attccaggggtgagaaggacactgcaatctgagccttccatgggacccacgtgtcaagtacggggagagaaagactgtagttttcctactgccactctcctcttccctcagcattttgtttc

SEQ ID NO: 170510 - DNA, 122 bp, Homo sapiens
gaactgaggacaactgagggaactcgcagagcagggcgggaacgcttccagcaatggcggcggctcggcggtgccggcctccaggcagggcattgcgcctgcgcagccggagcgtcggaact

SEQ ID NO: 170511 - DNA, 122 bp, Homo sapiens
gaaggcagctgcagggccggcagtcctggcaaacctagaaggcgggaataaccctggtgacgggcggggccgggctccggcgctaactgcatccactaggtttggtcaacacagagccgcgc

SEQ ID NO: 170512 - DNA, 122 bp, Homo sapiens
ccacaatgatcataagtagtttgcgcttcgttgtgctcttctttgctggtgtgagattctcgagggccaatgtccttcatctgcgtaactctagggactcgcccagaccttggaagaggttc

SEQ ID NO: 170513 - DNA, 122 bp, Homo sapiens
aaaaaaaaaagacttggacatattttgtggggggtacacaattcaacccattacaagggacgtatacatggcttttctttttcattggtaataatttaagattaggaaatctgagaatatgt

SEQ ID NO: 170514 - DNA, 122 bp, Homo sapiens
cgggcgcgctcccttgagtacgtgtaagtgcagaattcaccaggcacccctgagaccccacggccccaggggtctccatctcacctgtccgttccgcgaacacacacctcgatgaagtccac

SEQ ID NO: 170515 - DNA, 122 bp, Homo sapiens
acatgcccacaccgagaccctctgtttaaaaccctctttggggctgggtgtggtggctctcgcctgtaattccagcactttgggaggccaaggtgggcagatcacttgaggccaggagttca

SEQ ID NO: 170516 - DNA, 122 bp, Homo sapiens
gcttccgttccgctggcgggaaaccgccaaccgaaagcggatttaaggcggcgtgtttttcgttctgacaaagtattttcatgtggccttttattatagtatagttaagctagatttaaaat

SEQ ID NO: 170517 - DNA, 122 bp, Homo sapiens
ctccccgctgcaagtgcgtcccagccttctccatggtggtgaagatgctggtggactctacgacgtattcagcaccagcatctcctcatttgattttggagggatcttgcttctggaagatg

SEQ ID NO: 170518 - DNA, 122 bp, Homo sapiens
catgtcgcggccaccaggggtgttcctgaggactccaccgggctcagacgaggcgtcaggcggggacggtgcggatgagcgcctgttgaggccggggctggccaggcagggacagggagcac

SEQ ID NO: 170519 - DNA, 122 bp, Homo sapiens
ctgcattgaggaggcgctggagccgggtgcctgctgtgccacgtgtgtgcagcagggctgcgcctgcgagggctaccagtactatgactgcctacagggtggcttcgtgcgcggccgcgtgc

SEQ ID NO: 170520 - DNA, 122 bp, Homo sapiens
ttctgcgttgccccgctcaggctccctcttttgacgcttcaccgggcaccaggaccgccccgacccaggctggagcctatccagatagggactccccaggctgctctcccctgcacctctat

SEQ ID NO: 170521 - DNA, 122 bp, Homo sapiens
gaatccagagattggttcaggggctatttttttttttaagcagttgggcaccggtggagccggtctaaatgaaagtctacaaaaaccaatttcagatgcagcgtaactgatgactggtaaat

SEQ ID NO: 170522 - DNA, 122 bp, Homo sapiens
cctgcttctctccacccatccccaccctccaccccacaggaagtgcctgaacaagatgtgcgtctatgaccccaagaagtttgagtggaaggagctggcacccatgcagaccgcccgctcac

SEQ ID NO: 170523 - DNA, 122 bp, Homo sapiens
gccccactcgcacacgggctatcactcagcctgcgccccgccctagctcgccagaggctccgccccacccgcctgccaacacgctgtcactcagccttagccctgcccaggccggccctcgg

SEQ ID NO: 170524 - DNA, 122 bp, Homo sapiens
gcagctccattgtggaccggagggattcctggctctatagggtggaggtcggtacactcacgcagcttcttcacatgggcaggtttggggtggttctgtttgttttctttaatgaagcttgt

SEQ ID NO: 170525 - DNA, 122 bp, Homo sapiens
aaatcatggtgaatcttatagcaatgtagatttaatgaaacacttctgatactcaaatagcgttgacgttttaaattaagatctgctttacatgagttttgacaaatgcaaacaccctttcc

SEQ ID NO: 170526 - DNA, 122 bp, Homo sapiens
cgggcctgaccagtgcgggtctgggcggccgggcctcggggcgccctctcctctgcgccgcgcttctccttggaccttgcctccgcggtcggcgcagccagagtctctcccggctgcgctga

SEQ ID NO: 170527 - DNA, 122 bp, Homo sapiens
ccgtggccacatcatatttcagcgtgtggatggccatgccgtggccatgtcatatttcagcgtgtggatggccataccatagccacgtcatatttcagtgtgtggatggccacgccatggct

SEQ ID NO: 170528 - DNA, 122 bp, Homo sapiens
caccgaccccgacaaaacgtatgagctcacaaccgacaatatgcttaaaatccttgccatcgagatgcggttccggtgtgggatcccggttatcatcatgggagaaactggctgtgggaaaa

SEQ ID NO: 170529 - DNA, 122 bp, Homo sapiens
gcagccttgtgtggttctggtgcttgggagggcgtgttccccacgtgcctactgaggagccgctccctggctcagggctcctcctccacccaacaccagcatctccacatggtcaggtgcgg

SEQ ID NO: 170530 - DNA, 122 bp, Homo sapiens
aaaatatagacgagttcgtcacggaccaaaacaagatcgtgagcagctactactggggaacgcgggcgtgcgaccggggtcctgggcccggctagggcggcgggagccttgaccctctgtct

SEQ ID NO: 170531 - DNA, 122 bp, Homo sapiens
gtctttctcctcctcaaggaatcatttcatcagtcaatcaagtcatttgggactggaggccgagtactccctaacatagaaagtctcattcctgcatgctttcctcagcagagggggagaga

SEQ ID NO: 170532 - DNA, 122 bp, Homo sapiens
gacgaggagggggcgctcctcgggcagggatggctcctcaggtgctttctgggcgcggagcggcggaggtgggagagcagcttgggaaaaggagcgcccggaaaagggcagcgctggagtcc

SEQ ID NO: 170533 - DNA, 122 bp, Homo sapiens
actggctgcaaaagccgctcgcagagtgcgccctctaccggaggggtgaaggaacctcatcgtcccaggtccggtactgtggcactccgggaaatcagacgtcatctgaagtccaggaattc

SEQ ID NO: 170534 - DNA, 122 bp, Homo sapiens
gatttacagcttccacccccagtttccattctcccctaaagcactggattcaggtaatcgcggacgcacttggctcctcccgcactggccgctgccctcggcgggacaatgggcgccctagc

SEQ ID NO: 170535 - DNA, 122 bp, Homo sapiens
ctcccgctcggcctcgtgactcccgcggagacctctcggctgtctccggtcgattccattcgtttcctgtggggggcagtaccagcctctctagcaaagccacatctgccctgacgccagtc

SEQ ID NO: 170536 - DNA, 122 bp, Homo sapiens
ttaatgatgcaatattacggaaaagtagcagattcatagaaaccactaggacaaggcaggcgtgattaaacacacagctttgtgccggtttgccaaagtttgagggtgcattttccatcatg

SEQ ID NO: 170537 - DNA, 122 bp, Homo sapiens
catgctggttgttcagccctccaagaatcattcttgatgccctgcaaataccaggcgctgcgctaggccctgcagatgcgacaacgaacgtagatgctgtcccagccacccacactcgctgc

SEQ ID NO: 170538 - DNA, 122 bp, Homo sapiens
ctgcccgttctgcaggtggtggtcgatcaggtggctgatgctctcaaacagcacgtccttcgtccgtacctgcgggacagagacctcggcatcagctcccgggagcccgcctggacccgtgg

SEQ ID NO: 170539 - DNA, 122 bp, Homo sapiens
ggcgtgggtggtaaggaaattaggatcatggattctagacaataatgtatctgagataatcgcgtgatgcaagcacattactattcagtgtgtggcagatactgctaattcactaaaaaact

SEQ ID NO: 170540 - DNA, 122 bp, Homo sapiens
cggctgggccaacctgacaaaccagcgcgacctgggcgtgggccgggacacggagccagtcgctggctttcaccaccaccagataatgcgggccctggcagggcagggccacctctaccaag

SEQ ID NO: 170541 - DNA, 122 bp, Homo sapiens
agccgctgtctgctcggtgttttcaggcggagctctgggccccatgtagggcactcgtctcggtaccgtctccattctcgtccgtgcagtgggaagtgaaatgtcagcactgtatgatcatc

SEQ ID NO: 170542 - DNA, 122 bp, Homo sapiens
ggcggagcctgggagcctgggggcagggccagagctggggcggggcttgagagacgcgaacgtggtcagggtttgggacgcacctgggcggcttaggaactagggcagtcggccaggggacc

SEQ ID NO: 170543 - DNA, 122 bp, Homo sapiens
gctgctgcagaagagcatcctccgtgcccaccagctgcgcagggagagagagcggacagtcgagccctaggcacagcaccccctggggagggcctggcccttcgacccactcccggggggat

SEQ ID NO: 170544 - DNA, 122 bp, Homo sapiens
caccatgtcgaggcccaagcacgcgaaatcccagcacatcatttcggaggaggaccagggcgagcagcagccgcagcagccgacccccccggagtttgtagatgtggcccccgcggtgtcgg

SEQ ID NO: 170545 - DNA, 122 bp, Homo sapiens
aagcaggaggcccagtactgacccccagccctgctcggagcgggggccctactgcgtggacgagaacacggagcgcagaaaccactacctggacctcgccgggattgagaactacacgtcca

SEQ ID NO: 170546 - DNA, 122 bp, Homo sapiens
gccagcacgtcgcgatgaggccggacgccccgcccgcctgcctgcccgcgcaaggcgccgcggggccaccagcacatgcctgggctggacctaggtcccgcctgtggccgagaagggggtcg

SEQ ID NO: 170547 - DNA, 122 bp, Homo sapiens
ttagtcgaatgagcatattggtaggctgggatatcctaagccctgcttggctgcccttgtcgccatccttgggaatactgatttgcctcaacttctcagaataaataaaaacaaattaatgt

SEQ ID NO: 170548 - DNA, 122 bp, Homo sapiens
acacttgcaagttgatattccagagcagttgactggaattctgacctgaattcaattatgcgtatgtgaaatgtggataattacaacaggatgctccgaagggtgctagggagttagagaac

SEQ ID NO: 170549 - DNA, 122 bp, Homo sapiens
ccgagggccgcgtgggaggggcttcccggaggccggccccgtgggtggggagccagcgtgcgtcccagcgagtcagctccacttgatcggcagtttaaagcccgttctaccgtcccccagtc

SEQ ID NO: 170550 - DNA, 122 bp, Homo sapiens
tccgctaaccccagccccccaccacgctattggctatttgaggcatgtggggtttttttccggactagaagtcttgtgttccacctggattttcgggaccactcaacattcctgagctccac

SEQ ID NO: 170551 - DNA, 122 bp, Homo sapiens
cttgggattcagacaagcataatgatacaactccaggagtgccattcacatagactacagcgtgaatggtgcttcctggacttctatgattttgcaactcaaaaagaaccaaaaatgtttgc

SEQ ID NO: 170552 - DNA, 122 bp, Homo sapiens
tgtcaggccccatgctggcggattctgtggtttctgcagtgaaccatactcctgtactcacggcaccccagtcgaaggagatacgcacctaattagacaactactacccagaaggtcagacc

SEQ ID NO: 170553 - DNA, 122 bp, Homo sapiens
tgtctcgggtggtggtgcctactgggactcattttgagccaacatggagcacttcaaacgcgctccttcccaagaagcacactgttcatggaaattaaacactctgagcaggtgtctgtcca

SEQ ID NO: 170554 - DNA, 122 bp, Homo sapiens
ggcgtttcttttccctgacttaactctgggcgagttctcgggcagctttgaacttagcgccgttggtagctgcttgcctgccacggctttagaacctagtaatacctccacccagaggaaaa

SEQ ID NO: 170555 - DNA, 122 bp, Homo sapiens
tccttgcagagatgcctcttccgcaagtctttgggcggagaaaaaccacagggaggtccccgatgacttgggcagcagtggctctgtacttgctttgtgtatgaccttgggttgttgacctg

SEQ ID NO: 170556 - DNA, 122 bp, Homo sapiens
ctctctccgaggtcggccctctacttgcttccggttgcctagaagccgaggcttgcgaaacgaagcccgatagaaactacatcctgctctagtgaaaaacagcgtttctgggtgtatcagag

SEQ ID NO: 170557 - DNA, 122 bp, Homo sapiens
ttccaccaaggaccgaagtacccctgttggcgatgtcaccctccatcttatacttggtcacgaccaggtcctcagcgatagtttgctcctgctgctcatccttgcccgacatcttcctacta

SEQ ID NO: 170558 - DNA, 122 bp, Homo sapiens
taccctgctggaggcttactctgtagcccggctagccagaggcgcccagtgggcgggagacggcgtagaggaactgaggaaaggacaagggcggagagagagaagctggcggcactgcccgt

SEQ ID NO: 170559 - DNA, 122 bp, Homo sapiens
actagagaaacctttcctgttttgtggcttgggttagtgtttagcagtatttttagtaaccgtcctaagtcagtagctatgtaagcactgagtgaagatggagtcacagggcaaactgggct

SEQ ID NO: 170560 - DNA, 122 bp, Homo sapiens
cgcctgggatctcacagatcaggcccccacctctgcccccacagccgcccagccgcctcccgcagaagaagcctgcgccggggtaagccacccccagccagctcggccatccgtgctcctgc

SEQ ID NO: 170561 - DNA, 122 bp, Homo sapiens
ccttaggggaagaaaagacaaggcctcaggcaatgcccatgggccaccgctggctgccctcgctgtgaacaatgcccatgggccaccactggctgtctgctgtgacaggcgcgtctaacaag

SEQ ID NO: 170562 - DNA, 122 bp, Homo sapiens
gacgcattgagctatttggagcgttggtttgcggctgtttctaagcctggactcttgacacggctttgcctgcagctctggactctccctcaggctccagggctccctgtgcccttgcggtg

SEQ ID NO: 170563 - DNA, 122 bp, Homo sapiens
gggaagggaagaagcagcagcaagaaagaagccccctggccctcactctccctccctggacgccccctcttcgaccccatcacacagccgcttgaggcttggaggcagtggatttccgagcc

SEQ ID NO: 170564 - DNA, 122 bp, Homo sapiens
tggagagattgccgacccccggccggcacccacgccttccctgctcgccgggtcctgccacgtccccgcccagcccgactagccggcggcctgcctaacccgcctcgctcccagcactcaca

SEQ ID NO: 170565 - DNA, 122 bp, Homo sapiens
cgcggccggagctgtgggctggtaagtctgcgccgccagggctcgcatggccttcagaagcggtccctgggctgggcgatgacgggtcctggtggcagcaggcccttctttctcgcatcacc

SEQ ID NO: 170566 - DNA, 122 bp, Homo sapiens
acgcgcttcctctcttcccggtcctgtgcgagtccgtgctggtgacacagcagtgaccaacgacagccccgtgttgtcctcccggagcttacggttcagtaagggacacagacacgttccca

SEQ ID NO: 170567 - DNA, 122 bp, Homo sapiens
ttagttctggttattccttctgcatttcatactgagaggctgttttgttttacatagggccgaaaggacactttgacagaatagacttatgcaaacttgcttctgtttggggtcccctgggg

SEQ ID NO: 170568 - DNA, 122 bp, Homo sapiens
aaaacctgccaaggcatgttttcaaagcgtggggctgctttgaactgagcccagcactggcggggctggggtggaaggagcgtggaatcgggtgcgagaggacagtctccttcagattcctg

SEQ ID NO: 170569 - DNA, 122 bp, Homo sapiens
aactgcgcccacccgccatggctgcacccatgggtgtcaccagtgggacaacagtgcaggcgtggccttgctgtagcatgcctggtccacctaatgctttcccagcccctgcctgacctttg

SEQ ID NO: 170570 - DNA, 122 bp, Homo sapiens
ccagctactcgggaggccgaggtgagagaattgcttgaccctgggagatggagactgcagcgagtccttatggcaccactgcattacagctgggtgacaaagcgagaccctgtctcaaacaa

SEQ ID NO: 170571 - DNA, 122 bp, Homo sapiens
aaggagaggggctgtgtgttcatccccacccattagctatgccctcttttctccgaatgtcgatttaaggaagcaagcacctgtcttccgccactgcatcttcctagcaaactttaaaggcc

SEQ ID NO: 170572 - DNA, 122 bp, Homo sapiens
gctcaagtgatcccccggcctctgcctcccaagcgctgggattagagccgtaagacaccacgcccagcctaaggttatgtatttgaagcagtggtagatactgccaagtcacactccacaga

SEQ ID NO: 170573 - DNA, 122 bp, Homo sapiens
cagcagtgtgtctctttatcttaagcaaacaattaaggcttgccacacgttttctcttttcgatttcaagtttaaactatctttagaaatctctttgggtaccatttcaaggagtacagtgt

SEQ ID NO: 170574 - DNA, 122 bp, Homo sapiens
ggtgatctgcccacctcggcctcccagagtgctgggattacaggcatgagccaccatgcccggctaggaaagggtcttactaggaaagatggccaaaagtttcatatgaaaaaaattggatt

SEQ ID NO: 170575 - DNA, 122 bp, Homo sapiens
tctttcttcattatccatacagctctgttacttgttattgtcatccccctcacctcccgccgactttttgaaaatttgaaagcctcttattatagtaaaatttgtttggtgtgttgttggtg

SEQ ID NO: 170576 - DNA, 122 bp, Homo sapiens
tcctccctgggctgttcagagtgtcagaccttatccattccaaatatgacctgtgctatccgctcagctgctcgtaaccaccactctgagaccagcttcttcacaggttccaccagtcatgt

SEQ ID NO: 170577 - DNA, 122 bp, Homo sapiens
cgccccccgcactcacggcccctgagcccgcgcggaggcccgacgccccgcggccgacgccggtccccgccccgggccgccattggctgttgccatggcaccagcccgtcttcccgcgccct

SEQ ID NO: 170578 - DNA, 122 bp, Homo sapiens
gcagggctctaagaaaagtaaagcctaattataaaattttgagatgtactttgataggagcggttctccagagaagctggattgaccaagacagtgggggaaatccgtgaaggacgtaaggt

SEQ ID NO: 170579 - DNA, 122 bp, Homo sapiens
gagcggggtggctggtgagagggtggtgtgcagcactgcgcttcctgagtgctgggctggcggcagcgtggcacccctgcccacaccaccttccgtctggggctaagctccagtgcctgacg

SEQ ID NO: 170580 - DNA, 122 bp, Homo sapiens
aattgtaggcaaatttgcatgtgggggtgtgggtgcagcatatgcctgggcatgcatatacgttttttttttttttttttttttgagacggagtcttgctctgtcgcccaggctggagtgca

SEQ ID NO: 170581 - DNA, 122 bp, Homo sapiens
tgcttgtggtggcgctccacagtcatccggctgaagaagacctgttggactggatcttctcggggtaaagtgtcttcctattcccgttttcccagctccgtgccccggggtatctatagtgc

SEQ ID NO: 170582 - DNA, 122 bp, Homo sapiens
ccctccgttcccgacatggactgctcgtttgctttcctggggccgagctctgcaaaccaacgagccctggcttatgaatcatcgtcttgagctttctcattcgtcatttgtgtgctttgggt

SEQ ID NO: 170583 - DNA, 122 bp, Homo sapiens
cccgctgcgcgcttgcgctctacgcccaagggagccgggctgcagagctggagaaacttccgcggctacgggtgcagttgccttcggttcccggttccgggccgacacccgcgcagggctga

SEQ ID NO: 170584 - DNA, 122 bp, Homo sapiens
ccctggctctctacacctctaagtgcggcagacattggccagccctattatcaagtctcccgggaaacagtcaggagtgtgagggttagacccattgaacagaatgctgagaaccttggaga

SEQ ID NO: 170585 - DNA, 122 bp, Homo sapiens
gtcgcgggctgagctcgcctcctggggagggggcggagcccccccaactaggtcccgccccgttcccagaggctggtcaacgcctccacctaccggccgaaacagccgctcgccgccctccg

SEQ ID NO: 170586 - DNA, 122 bp, Homo sapiens
cccaggcgctgcacctgccccaccgcagcccctcctccctactcaggagagctgtggtggcgtggtagagaagaaagggatatcgcaggcaggagggcttcctttagtgctgtgagtgggtc

SEQ ID NO: 170587 - DNA, 122 bp, Homo sapiens
ctccgccgccgcctcccgagttcggggctctgctgcaatgtctgcgaggctgactttgagcgcctcgctcaccgcccgcccgcagccgcgctcctccctccgccgccgagtccgccgcggcc

SEQ ID NO: 170588 - DNA, 122 bp, Homo sapiens
catcattcttttattttaaaatgtgcatcattgtctcgtgctcggcgcatgcgacctcagcgtggtggcccgctgggggcctcgttcccgcccagctcccgcggagccgcagggagcaggcg

SEQ ID NO: 170589 - DNA, 122 bp, Homo sapiens
gcatcggtctctatggcgacctgaaaccgcagctcccattggcctgttcaatatgagggccgggccaatggggagggccagccctctccttcccgccaatggggtggcgggagctggcccgg

SEQ ID NO: 170590 - DNA, 122 bp, Homo sapiens
atcccctcacccccagcactatggacctgcaggtctccccagtaccaatttagtccagcacgccaagagtcaaagttccaagtctcctgaagggagccttcgagtctacttgccccccgccc

SEQ ID NO: 170591 - DNA, 122 bp, Homo sapiens
aacccgatcaccgctggtcaccatgaaccacattgtgcaaaccttctctcctgtcaacagcggccagcctcccaactacgagatgctcaaggaggagcaggaagtggctatgctgggggtgc

SEQ ID NO: 170592 - DNA, 122 bp, Homo sapiens
ttaagtagtaatcagcggaaatataatagtactcattaaagagtgagtcttatggctttacgacccagaggaggagaggttctagaagcagacagcgccaccagggaaaaggctcagaattt

SEQ ID NO: 170593 - DNA, 122 bp, Homo sapiens
ccactcgatctgccccatggcgacacgaacccggctgggacactgctaggcgcgcactgccgcccctgcgctcccggccgaaccccgccccgcccaggccccgcccccagccccccaggtga

SEQ ID NO: 170594 - DNA, 122 bp, Homo sapiens
ccccgccccctcggaggccgaccggggaggctccagggcctgcagtgggagcgggacagccggccccagcacgccctcaagcctgtcctccccgaagaagaagtgttcatagacctcaggga

SEQ ID NO: 170595 - DNA, 122 bp, Homo sapiens
ccgaggcggagctgctgcgctgggagccggctgggggcgccgctctcagtctggggcgggcgctcgggctgcgcgggctctgggcagcagcagcagcagcagcagcatcctctcttccttta

SEQ ID NO: 170596 - DNA, 122 bp, Homo sapiens
cgcctggcctgcgcttctttctctccaagcgggcacaccacacactcgccattcattacccggcttggttaatgcatcagagtggcaaatttgacttctttgcagaaaagggagggaggaaa

SEQ ID NO: 170597 - DNA, 122 bp, Homo sapiens
gtgtgagccaccgtgcccagcctacatctacattttaaacacaccactctcatttgagtccgaaaacccttgtgaaactagttccagaggaggtttcagccatgtccttcctcccagctgga

SEQ ID NO: 170598 - DNA, 122 bp, Homo sapiens
ctgtggcccacaggaccaggagggcagctgtgcccctaccgagggcagggcaccccaacccgcaggcctggacctgctcctggtctctctctgctcccccattccccctaccatcccgtggg

SEQ ID NO: 170599 - DNA, 122 bp, Homo sapiens
cagggtcacaatccccagatgttgttcatcttggtgacaggccctgtgcttctccaggaccgtttgtgtatgggcccttcccaggtaagcgtgatacgtcctggctgtcctcagtccagggc

SEQ ID NO: 170600 - DNA, 122 bp, Homo sapiens
aactgcaggtttggggctctgcgacccgggggcaggaacagagccttgcaggcggcagcgcgtcacaaaggcggccggagcttggcatttagcttgggccagagcaaggcgcagacccgggg

SEQ ID NO: 170601 - DNA, 122 bp, Homo sapiens
atctgttaagattttgtgggttggctagggagttcttctggactgagtcaagtcagctggcggtagatggtctaggatggactcatcctcttgcctggtatttgacagactaattagtctgc

SEQ ID NO: 170602 - DNA, 122 bp, Homo sapiens
gtgtttcccaaacaaaacgtttaccttatttgaatgatcagataaagggcagtaaaattacgtgatatatgtgaaagtgctttgtaaaccatgacaattgattaatggaatcagatatgtac

SEQ ID NO: 170603 - DNA, 122 bp, Homo sapiens
aggagggcaggggtccacaggggagtgtgtcaagtcagtaagggggcctctggtatatcccgatgactcaggcacaggcaggggggatgtggccagaaggcaaagacacacgccatttaggg

SEQ ID NO: 170604 - DNA, 122 bp, Homo sapiens
aagctagttaagtcttttgtgcatgtgcaattacacttacttaacaagatgctgccatggcgagatctctcacgaaagaaacaagatcaaggatgtactagatggcatctgctagaatcact

SEQ ID NO: 170605 - DNA, 122 bp, Homo sapiens
tttctaggacaaagtcccccaagtagggactgcaggatgagcactagctatacctccagccgagatgtggcagcccagtgctgagtgttctaccagtccaggtcccaggctgctccctcccc

SEQ ID NO: 170606 - DNA, 122 bp, Homo sapiens
ctcaggcccctccaacggaacaggagtcgaggggcagtgaggccgggatgcgtgcgagcgcggggcgcggctggcgctgggccgtgggggcggggcggcgtgcgtgccagcggcgtgcgatt

SEQ ID NO: 170607 - DNA, 122 bp, Homo sapiens
tctgcaaagaaggtaaagctgaacggcttagctgttgccgactagggcccctccttccaccgggcatgtccaggaaccagtctgcttccagtgccacctgtagttgcaacccaggttaatgg

SEQ ID NO: 170608 - DNA, 122 bp, Homo sapiens
gccaccgcgcccggcctcgcccttcctgaaggctcggcctccccgtagcctaagttcgcccgtctgagggatccagcttccccgccgccagggttcgcccttcctgagaactcggtctcctc

SEQ ID NO: 170609 - DNA, 122 bp, Homo sapiens
agcaggacttggatgtagttgcaccccctgggctggggtttccccccggctgatttcctgcggctgctgcaatgaaacaggaaaaagaacacaccaggtgacaagaggctgcagtgggcttc

SEQ ID NO: 170610 - DNA, 122 bp, Homo sapiens
gggctagaggcgcgtttgccaggcagcgcgctgcccctgcgcatcgccagccctgacagacgtgcaccacggaagggacgtgattgtggctgccttctcgggagactcaaattctttggatc

SEQ ID NO: 170611 - DNA, 122 bp, Homo sapiens
taaggggcccggaacaaggcttgcagtgtatgagcctgtcaagtatactgcctacagccccggcctcttcctcttggcctgtaatctcatgcctactacatctgtctgaatcatgtaacctt

SEQ ID NO: 170612 - DNA, 122 bp, Homo sapiens
gccgcagaggaaccctgatggcaggtaccaggcggctgcacacagcccacagctgggctccggggtcagcagcggagacagagaagacccctgctcaggccaaggagccctcccaccctcca

SEQ ID NO: 170613 - DNA, 122 bp, Homo sapiens
ccagagtcctagctgcctctacctgtccaaggggaattttacagtgatcagtccaaaatgcgcggtttgcaacatcttcaccccctcaggaaagccttccagcgccagtgcatcctccctgt

SEQ ID NO: 170614 - DNA, 122 bp, Homo sapiens
caatgggcctgactgccctcccgatccgtgcgggctgctgtagctgcagcagcatgaggtcgttgtcgtgggtccgggagttgtagttggggtgcgtcacctgacgaaccacgcgcagcacc

SEQ ID NO: 170615 - DNA, 122 bp, Homo sapiens
tggccccagttgagatgagtcactggggagcccctgacagctctgagggtggcagccccccgcaggacccaggaagtcagagtccccagggcagccaggcctgagctggcctcgaagccacc

SEQ ID NO: 170616 - DNA, 122 bp, Homo sapiens
ggttttgggaacctcggtctcctgctggctcccaggtgcgctatccgacgcagcgagacgcggtgagcctacagaagggctgaccaggctcacctgacgccccaggtcgacagcaaaccccg

SEQ ID NO: 170617 - DNA, 122 bp, Homo sapiens
aggtggagatgatgacgttcacgttctccacgatgcgctggaaagtctggtagagctcctcgggctccagctgcagctccagcagggcgcggtccatcttgttcatcatcagcacaggcttg

SEQ ID NO: 170618 - DNA, 122 bp, Homo sapiens
gtttaaacacaacttccacccctcacaaatcagaaagctgtaatttcaaagtttcagaaacgttttcggaaagcctcctccaatgggaagcgacttcgccgctgagttaagcgtccgaatcc

SEQ ID NO: 170619 - DNA, 122 bp, Homo sapiens
tggcctaaaattcaaatttaactgagcatgttgaatttctttttttctaaatctggccaccgtagggtggtgtcagctccacctcttcatgcttcctggtgagctcactgacccttggtccc

SEQ ID NO: 170620 - DNA, 122 bp, Homo sapiens
agcccggtaattagtgtaaaccctttgtctgcctttgatacccacagcttctccccgctgcggcttcctccgcctggagcgcgggcggggagggcctgtggggagggcggccagacccctga

SEQ ID NO: 170621 - DNA, 122 bp, Homo sapiens
gtatcggcccagcgatgctggagtggtcgggtcggaggcccagcagcgtctggggaggggcgtgggggaggcgtgtccaaggccggctggccccgccccgccccgccgcctggcctctggcc

SEQ ID NO: 170622 - DNA, 122 bp, Homo sapiens
gcgggggtgctcacacagggctagcccgtgccagacactgtgccaagcacttgccatgtacgggctctctttttcctcacagattcccccgaggcgagcgctattggtaacccatcttccag

SEQ ID NO: 170623 - DNA, 122 bp, Homo sapiens
attataaaatgactacagtgtgagaggcacaaaagttgtgatgtcaaattggggtcttcacgctctaaaatgttggattcactggtgtaatccagaaatactttgggagtttgaggatcagg

SEQ ID NO: 170624 - DNA, 122 bp, Homo sapiens
gagctgtgtggaatgaggggcgctcaggagcatccccttaattccaaggagatcgagtagcgggaacatttattgagcctttactgtgtgtcaccaactgcccaccatagggaggaaaaaag

SEQ ID NO: 170625 - DNA, 122 bp, Homo sapiens
cactgtgggtgtgaggtgttagggggtgggtatgtgaggtttggcgtttcacgtgtgtcccgagtgtgcaggtctctaggggtgtacgacagcggattactatttctgtgtgcacaggagat

SEQ ID NO: 170626 - DNA, 122 bp, Homo sapiens
gtgagtgcctggcgctgcacataagaaaagacgtggcagcaaaccatcctcccgacatgacgtgctgcgttggtgcgtttacgtccctgttccttctgaaagactcaaaattgtgttggagc

SEQ ID NO: 170627 - DNA, 122 bp, Homo sapiens
ccccgcggcgctgcggagggcttgaggctcgcgagcctccttcgccgcgccccacttgctcgtgcactttacacacatgaggtgagcggaacaagggcctccctccgggcgggaggagccgc

SEQ ID NO: 170628 - DNA, 122 bp, Homo sapiens
tgggtggtcgtaactgggcgaagcaactcttcatcctccctctcagccatgattctttgccgttgctttggctgtctgtacgcagcctgggcatgccgttccctcagttctgcataacttgt

SEQ ID NO: 170629 - DNA, 122 bp, Homo sapiens
accatgttgtgagaaatgctccaatttgctttggttttgaatggcaggctcgagaaccaccgcccagaacggaacctattctgtcagcaagagccgggcctcgaatgagaggaagcagaggc

SEQ ID NO: 170630 - DNA, 122 bp, Homo sapiens
caacccagatgtccatcaatggatgaaaggatgagcaaagtgtggtctgtatgtgtaaaacgaaacattattcagcctgaaaaggaaggaagttctggccaggtgcagtggctcttgcctat

SEQ ID NO: 170631 - DNA, 122 bp, Homo sapiens
tttccaccaagtgctggagagctggtgaattgctcactcccggctcattcctctaatgaccgaagcgtctcgcagatgcaacctgccgtggaggagcagggagggagtgatttccaggtgtg

SEQ ID NO: 170632 - DNA, 122 bp, Homo sapiens
gccaactggagctggatttttggcaccacagtaagaatagccaggacatccaaagcaaagcgcacagtgtcattcctggacaggaagaattagtcaaagggaaattagagtatagccacaag

SEQ ID NO: 170633 - DNA, 122 bp, Homo sapiens
ggagacttttgcgacaggagagagactaagagctcgattccaggtagcagtgggagcccgcggcaaagaacgcccagtcccgcaggctgcatcccagaccgcagcgcctagctcggaaaagc

SEQ ID NO: 170634 - DNA, 122 bp, Homo sapiens
actcaggttcgcgggaaggagcactgcgccacggcgttttcgggattcgtggcctgctcccgcagggcacagacactatcttctgtcctttgagtgcccgggcagcattgcgcctgagtatt

SEQ ID NO: 170635 - DNA, 122 bp, Homo sapiens
gaaactctatttgttcacgaattcaacaaatctctatgagcccttcctctgtactggcaccgtgcaaggggctggagattccaaattgagttagacaaagtctcttccctcaaggagcctct

SEQ ID NO: 170636 - DNA, 122 bp, Homo sapiens
caaactgctagaattatatagccttagtttttgactctgtccagatcttcagtatggccccgcctctggagttgaccacgcctgtcattctgagcctcccttctaaccctgtccctgagttg

SEQ ID NO: 170637 - DNA, 122 bp, Homo sapiens
cctccctggctcctcatcaaccctcagcaccaagcgtgggccccacaggtttggggaacgcgtgctgactgaggccgcccgggtggccggcgctgacaagctgaccctggacactgtgcgtg

SEQ ID NO: 170638 - DNA, 122 bp, Homo sapiens
ggtgacagtaacctgcgcagctggggcccaagctctggtcacactggagggagttccagccgcggtcccggggcagcccgcccagcttcagctaaatgccaccgagaacgacgacagacgca

SEQ ID NO: 170639 - DNA, 122 bp, Homo sapiens
cacactcagattcccagctcacggggactcaggccccgcccgcggccatgctcacctcgccgctgcactgtgaagctctccacaaccccgtagttgtgtctgcagtaggtgtccaccgcggc

SEQ ID NO: 170640 - DNA, 122 bp, Homo sapiens
ccagaggaccaggcggcggtaagaaaaagcgctctcgctgtcttctccgttttgtattcccggtttctaagtccgccccttccgtgccccgcgccgtgttggctgacatcacctggtgcccg

SEQ ID NO: 170641 - DNA, 122 bp, Homo sapiens
ggtggggccaggagacaatggagtggaggcttctccgggagatcaggaaaggtcgcgtcgcgcgcctcctcccggcctttgggggggtccgtccgcgtgccgtgcccccacctgttagctcc

SEQ ID NO: 170642 - DNA, 122 bp, Homo sapiens
cgccctccccgcctcagagcagcgtcttgctgaaggcagcggcagcaactaagatggcggcggcgctctctctcgggtccggcgagggtacccggccgggggcggggtggcggcgggagggg

SEQ ID NO: 170643 - DNA, 122 bp, Homo sapiens
ctgtgtatcttcgtccattcttccaggcaacagtaatccactggattaaggtcatggggtcgccaaggctcctcttagcggctactttctctggagtccagccctgaccatccatcagtgca

SEQ ID NO: 170644 - DNA, 122 bp, Homo sapiens
aatccatttgcacagctgagggcaaaagtgtatcgaactaagcttggctattcatcctgccgctcactgaacgtgtagctttgttaatcacagacattataattcattacatctgattattc

SEQ ID NO: 170645 - DNA, 122 bp, Homo sapiens
tcatcaccaccgatctggaagaaaacgaggagcaccaattctcctggggtctgtgctattcgggggtgtgagccaggcatcttgattcttttagacctcaggcacattcaggttgggtgcca

SEQ ID NO: 170646 - DNA, 122 bp, Homo sapiens
tggggagcgagtggagactgacaaggacgatccccggtcccacaggatgcttctgcccagcggatccttattcttcttgcgcatcgtgcacgggcgcaggagtaaacctgatgaaggaagct

SEQ ID NO: 170647 - DNA, 122 bp, Homo sapiens
ggtgttgccgtccagtcatgctgaaatctgagctaaacatgcggagtttacttaggaaaacgctgcgtttggagaatcgtgtgccagggagacggacctgttggtgtcctggtgtgagggat

SEQ ID NO: 170648 - DNA, 122 bp, Homo sapiens
ctggaggatgaaggttccagagaagacaacaacaacaacaacaacaaaaaatcactggcccgtgtaaggtctactcagggcaatcaagaaaatctgaatggggaattaagacagcgagatgt

SEQ ID NO: 170649 - DNA, 122 bp, Homo sapiens
gacaggtagatggaggaggctggagcgccaggttgaccgggggcctcagggcggtcccagcgcacggtgaggaggtggaagctctggctctgagccgccagccgctggggcacgggaaaagc

SEQ ID NO: 170650 - DNA, 122 bp, Homo sapiens
tccctgacagtgctgagccatgcggcaggcccacaggctcccattcctgccgtctctcagcgtctccggccaaaccccagctcctggggttaatggaatgttgagcaatccttggaattttt

SEQ ID NO: 170651 - DNA, 122 bp, Homo sapiens
agaatgattgtgggcatggcatcgccaaatcttccagtgtttcaagagaagccaggaatccgaatgtttttatgtaaactttccctatatttaaaagctagtgtattcgtttcctattggtg

SEQ ID NO: 170652 - DNA, 122 bp, Homo sapiens
atagtcatgcactatgatgcccagctaattattttttgtagaggtcgggtctcgctgtgtcgcccaggctggtcttgaactcctgacctcaagtgagcctcccacctcagtctcccaggctt

SEQ ID NO: 170653 - DNA, 122 bp, Homo sapiens
tcagcagctccattttttgtcctcttccttatccccgtggagtcgaactctccccggcatcgctctctacttcagatcttgctcagttttgcttccggtgggctcctgggagatgctttcct

SEQ ID NO: 170654 - DNA, 122 bp, Homo sapiens
tgtgatccgcccgcctcggcctcccaaagtgttgggattacaggcgtgagccaccgggcccggcctcaactgggtattttctctagcaaccttacctagactcgagatcactggctttcatc

SEQ ID NO: 170655 - DNA, 122 bp, Homo sapiens
gagtgactcggcaacatgcactctgcgccatggaaatgctcagcacctctgacccagtgacgccgcctctgggatgctcttccgggggaaattatccacaatatggggagagatttaagcca

SEQ ID NO: 170656 - DNA, 122 bp, Homo sapiens
tcgcagatggaggagctcttccaggagcgcaagatcaagctggagctcttcctgcagctgcgcatcttcgagagggacgccatcgacgtgagtgtcccgcggctggcgcctgcctgcctgtg

SEQ ID NO: 170657 - DNA, 122 bp, Homo sapiens
aggttgcagtgagcccagatcgtgatattgcgctccagcctgggcgacagaatgagattccgtctccccccacaaaaaaaaggagttatagacagcatggggcaatgacttagtggatattc

SEQ ID NO: 170658 - DNA, 122 bp, Homo sapiens
ctcaccgcttctggctttggagacggcaacacagagcccaccggtcccgagggagctgcccgtcctcgcgggctcccgcctggctcgcagctccttgccagtccccggaggaacggtgagga

SEQ ID NO: 170659 - DNA, 122 bp, Homo sapiens
tggagcagcaacttacctgccaggttcgaacttgaactcggtttgactccaccgtgtaaacgttttcttcatgcattgctaacacaggcgtctcacacaagaaggtccctaaaatgaaagac

SEQ ID NO: 170660 - DNA, 122 bp, Homo sapiens
gcacggtgtccagtgggccaggtgggctgggggagccggggcgagaaggccccgcagagccggcttcgctggggctggcagcacccacaggcagggaggggcccaggctgtgggcggcttcg

SEQ ID NO: 170661 - DNA, 122 bp, Homo sapiens
ccccagcactgggcgcccgcgcctcccaactcagcccgccgccgagcagacggcgcgccgcggtaattgggcacaggggcctttttcagagtcgctcagtcgataaatgaaacgtcagctcc

SEQ ID NO: 170662 - DNA, 122 bp, Homo sapiens
tgagcgtgggccgcacccgccgacctggggggccctggagggagcggctcggaggggcgccggtgcctgggcaggtggatctgggaaagatgccactgttcctgccacgtcactgctggctg

SEQ ID NO: 170663 - DNA, 122 bp, Homo sapiens
gcccaccttcgcaaacgagacttccgggatcccggagggggcggaagtcgaggcctctctcgcttccggctcggccattgtttttggtctaacgggcagtagagtgtccggcttcggtgccg

SEQ ID NO: 170664 - DNA, 122 bp, Homo sapiens
cccacacgcagcggctggccccgcggtgggagtggggacggggctttcgaatgggggccccgggaagagtcttggcagggatgaggaaagaacccgttctagaaagcatctgggtaacacca

SEQ ID NO: 170665 - DNA, 122 bp, Homo sapiens
ggtggcatcggccccaccctcactcgcccacagagtgcaccaggcctgtcgtcaaggacacgggtacggtggcctcggccccgccctcactcatcctgcagagggcactgggccagtggccg

SEQ ID NO: 170666 - DNA, 122 bp, Homo sapiens
ccgccggcgccccgagcagcgggaaccagcgctccagaccggcggcaggcgcgcgtggggcgtccagctcctccagcgccagggccacgcggcccagcaccgcgcttcccgggcccaagccg

SEQ ID NO: 170667 - DNA, 122 bp, Homo sapiens
ctgcacagtcgtgaccggttgtcctgacagacctgctagcacctcccgaggctgggagggcgctaaggggagctggcctgcctgcccgcctgctgcgggcggcacctccggcgcctgagctc

SEQ ID NO: 170668 - DNA, 122 bp, Homo sapiens
tcttccctctttctgcagcgccttctgctagagaagctcatttggaagccactgtttttacgtgcctttgaaagttaacggggtgaaaatgatgtccccttaaaaactgtgctcttttctat

SEQ ID NO: 170669 - DNA, 122 bp, Homo sapiens
ttccaggtcgccccctcggtccccgcacccccaggccgcccgctcaccctcgtcgagtctcgctaatccctcctgatcgcgacccccgcaagagggagaaacgggtgtttccaacccctttc

SEQ ID NO: 170670 - DNA, 122 bp, Homo sapiens
agatgcttacttccattcctgtgtctttgatgttttaatttctggtgatcccaactttaccgtggcagctcaggcagcactggaggatgcccgagccttcctgccagacttagagaagctgc

SEQ ID NO: 170671 - DNA, 122 bp, Homo sapiens
gcgacgtcttctggggcgcctggtatccgtaggagtcaaagccgccgatgaagtcaactgcggaagaggggcggcgcatgttagggatcggcggcgggggcgaggagagggagactgggtcc

SEQ ID NO: 170672 - DNA, 122 bp, Homo sapiens
ccgcgggcacattgggagttgtagtctaattatatatttccgcccttagtgtggggagagcgggaactactcgacccacagagccgatcgcggagcggattctgcttttaggagtacccgcc

SEQ ID NO: 170673 - DNA, 122 bp, Homo sapiens
cgcgaggaacccaagagagagtagtcgtgtgtgcacatgtccatgggaggagcagtggaacgacgtgagaggggtcccaagactaacctcagggttttgcctcaggcagctcggaggatgag

SEQ ID NO: 170674 - DNA, 122 bp, Homo sapiens
gccccggcgggtggcacttaccgctcggacagtgaggccaccccagccaggaaggtgtgccggtcggtttcagccagccgctcctgcaggatctgggctccctcctggaccttgcgcagctg

SEQ ID NO: 170675 - DNA, 122 bp, Homo sapiens
agacactgcataaactgctggactccggacactgcataaagaggtattttaataatgttgcgatgacaggcactgaaatgctaagaactaagtttttcctgccttcctatataaattagcat

SEQ ID NO: 170676 - DNA, 122 bp, Homo sapiens
ttgaaaaattctgggttagaggaaagtaaggaaaaaggatttgcttaataatttcagaatcgaagttatgaggtggtctcacaaggctctgtctggttacaatcaaacatgttcctccccca

SEQ ID NO: 170677 - DNA, 122 bp, Homo sapiens
cggtgctcccgggtgtgcgtctccagctccagctggttggccttcaccgtctggcagatccggcacttgtactccatcttgtagtgggtcttgaggtggcactccatggcagcggggcggtt

SEQ ID NO: 170678 - DNA, 122 bp, Homo sapiens
ccaccccatccacaactaaaaatgcatttactctctttttgcgaaaaagataatccaagtcgtggccagctctaagaccaagatctctgagtaatgtgcatgcctctccatggggtctcagt

SEQ ID NO: 170679 - DNA, 122 bp, Homo sapiens
ttcggggaaggcctgcaaagtgaggcctcgggctagggttggcgggcgcgtggtgggaaccgcgtggaaccgaagggctcccacgggaacaagggcatcactgacggtacggcctctcgggt

SEQ ID NO: 170680 - DNA, 122 bp, Homo sapiens
agccggagcatgacacccgcatgtttcagggatggccaacagcgtctgttccagtggattcgtggcgactccttgagctgagaagaccggggcacatccacgtccacattccccattggatg

SEQ ID NO: 170681 - DNA, 122 bp, Homo sapiens
tctccccctattaaactgtttctgctgcaggccttggagtctcggtgcagtgactcggaccgcgaacctgtgccggttacagccgcacaatctgggaagacgcggagctgtgggcatggagc

SEQ ID NO: 170682 - DNA, 122 bp, Homo sapiens
cggcaaccgcacgcacagcctctgcctgagaccctgggagaggttctgggctagcagaggcgaactgggagggaaagcctcctcccggtggcgcattccagcgggattctttcccggaccgg

SEQ ID NO: 170683 - DNA, 122 bp, Homo sapiens
gcagagtttgaacatgtttatgcttgttttcttttttataaagatgatttattattaatccggaagaatagaatggcactttttcaacatttgacttgtgtaattccaatcctggatagtct

SEQ ID NO: 170684 - DNA, 122 bp, Homo sapiens
cggcacagggtggggcggcctctgcgccctgggatgagcaccacgctcagcagccctccccggcctcaggagcagcatatctgacacgacacggccttcccaggaacaccctccagaccccg

SEQ ID NO: 170685 - DNA, 122 bp, Homo sapiens
gccgtgggaatggaaacatctgccccacgtgccggaagccaagtggtggcgacaactgcgcgccactccgcggcctaccgcgcagatcctctacgtgtgtcctcgcgagacaagctcaccga

SEQ ID NO: 170686 - DNA, 122 bp, Homo sapiens
ggcctctgctccccagcttcccttaggccggggtgattcaggctggcattggctgctgcacggctgcaggaaaccagctgcatctgttggaaggtcctttgaagtttaagtgcacagcctcc

SEQ ID NO: 170687 - DNA, 122 bp, Homo sapiens
cagcggacacgggaagcccatgaatacggaggcagcatcgcagtgaaagacggtggggtgcggtgtgcaaggagagcctttgaggcagtcaggaaaacaccagggtgtgaggggtgtcgtta

SEQ ID NO: 170688 - DNA, 122 bp, Homo sapiens
gggtcgcggtgtgctaagcgaggagtccgagtgtgtgagcttgagagccgcgcgctagagcgacccggcgagggatggcggccaccgggaccgcggccgccgcagccacgggcaggctcctg

SEQ ID NO: 170689 - DNA, 122 bp, Homo sapiens
gcctgaggccaccggccgggcctgcctggaactttgatgggagagtcgtgctgggttaggcgggtcctgagtgaggctgagcccctcccgtggggctcagtgctgcccgccctggctgctgg

SEQ ID NO: 170690 - DNA, 122 bp, Homo sapiens
tctccgggggagacatacccattcattgtgcttggtgctggttcattctcatcactgaagcgtgtgctgtcctaagaggggatcaaggtcggttccattttggggctgtggtgagctccctt

SEQ ID NO: 170691 - DNA, 122 bp, Homo sapiens
ccgccgccccttgttgcagagcttgggctgggcggcttgctggggctcgggggtggggggcggcgatctgtcgccgggccccctcctcctcctcactcctcaccctccagggtagcggctac

SEQ ID NO: 170692 - DNA, 122 bp, Homo sapiens
aggcacgggtaactgccacacagtggcaaagtgccgaccagtggcatggggagcacacatcgtgtgccctccaaacccctgcacagccattctgcctgcatcaacgcacccagtcccttgga

SEQ ID NO: 170693 - DNA, 122 bp, Homo sapiens
ctacctttgtaggaccactgaaacaagggacatccaccacggcccacagccggggcgccacggccccaggaggatatgctaagaaaaccattccacggccgggtgtggtggctcacgcctgt

SEQ ID NO: 170694 - DNA, 122 bp, Homo sapiens
gactctggcatccggttttcataggaggaatcgaaggttcagagccggcgagtgatttgccggaaactccacagggtatgaggctggggttgagaccccctccaaggtgcaaaaagtaccta

SEQ ID NO: 170695 - DNA, 122 bp, Homo sapiens
ctggggccggagaggggtggacgttgtacacaccagtcgtttccattcgctgcctgggctcggttccttccacttctcactcccttagctccggccacactggcctcctgcaggtcttcgaa

SEQ ID NO: 170696 - DNA, 122 bp, Homo sapiens
atcccttctactcctctcctccgtggagcaacccctgctctatggccagtacagtcgcaccgtgaggctgctggacccgatgcggagactccagtttgaaaccacctgcttacagttagctc

SEQ ID NO: 170697 - DNA, 122 bp, Homo sapiens
gctgcgtcacctgatgctgcgtcacctgatccagcgtccggagcgccttacagccattttcggtactggtgccatcacaactgctgatcgtttctgcaggattccagaaaataatgtatcca

SEQ ID NO: 170698 - DNA, 122 bp, Homo sapiens
ggatgttcacaccaccagtccccaactgccttcatctgacctgacctgtacggcccagaccggggaagacaaggcctggagagccatcctgaggaacaacacccttcagtgcccaactctac

SEQ ID NO: 170699 - DNA, 122 bp, Homo sapiens
ctccactggacgcttcctccatcccggcagcagtcttggccggatctccccagggcctcgcgctcttggagccgccgcttccctgcgctgccaggaggccaccgctgctcagccccggggct

SEQ ID NO: 170700 - DNA, 122 bp, Homo sapiens
gcaatatacctttgtaacaaacctgcacatgtacccccaattataaaataaaagttgggacgggtgcagtggctcactcttttaattccagcactttgggagacagaagggggaggatggct

SEQ ID NO: 170701 - DNA, 122 bp, Homo sapiens
actctcctaaagtgcttggaggaaactgatcagactagacacttgatattttgcactcgtcgttttggagcaatcaactccaggcctcttagagggaaaaagtcaggtcaggagcaaaatgc

SEQ ID NO: 170702 - DNA, 122 bp, Homo sapiens
catccgggcactctgctggtcgcggcgggagtggcgtggcgcaggtgaggacacggcggccgagtgtcctcgaccccagcctcagcagcactgcttggcgccccggttcccggtccgactgg

SEQ ID NO: 170703 - DNA, 122 bp, Homo sapiens
tctacagagacagggaagttggggttggggaggtcacacaggctctgagatccgagagcacgaaatgcaggagcatcatccctggtttgcatagacctgggcacacgcccatcgctgtccca

SEQ ID NO: 170704 - DNA, 122 bp, Homo sapiens
tcttcaaccttctgcagggcaacctgctgaagaatgcccgcaaggtggtgaccagccgtccggccgctgtgtcggcgttcctcaggaagtacatccgcaccgagttcaacctcaagggcttc

SEQ ID NO: 170705 - DNA, 122 bp, Homo sapiens
gagatcccaaggtgcttagatgggtgcgccttggccgctggagtctcgatgccccactgtcgtgtctccctccctccatggcccgggagcgcagctgcggccgaggtaccggggaggcctgc

SEQ ID NO: 170706 - DNA, 122 bp, Homo sapiens
cggataactagaatcatctctacgtcttggatgcttcacggaaccatgcctgcaggcgctcgccatgtgaggcgacaggcgcgggcctggacaggacggagggcgtcttcaggaggctctcc

SEQ ID NO: 170707 - DNA, 122 bp, Homo sapiens
gacccccttctccctagtacgctcgctcgggggcccctcctctgctacgccgctggggctcgcccgccacccacagccctcgcagagccctccgggcacaccgcggctggccgcccggggcc

SEQ ID NO: 170708 - DNA, 122 bp, Homo sapiens
ctctgggctggaatctccgggcttccctgcttgggcagaattctggacctgttgcccagacgacacgtgcacattcagatgacccatgctaaggaccaaagggatgccaccggcccaatgta

SEQ ID NO: 170709 - DNA, 122 bp, Homo sapiens
gccccccacccgtgggatctgccccacccctggtgcatgctgagtaccacgcctcggccccgctggcctcctgggactgccgggtagcccaggcatggggctcatgtcccacctcgctgatg

SEQ ID NO: 170710 - DNA, 122 bp, Homo sapiens
tctgtccctgtgctttttcccaacctccggtcccgcttgttgtcacgctctgatggtgggcgccggcggagtcttgcctcttcccctccagcagctgagactgcattacccagccgttcccc

SEQ ID NO: 170711 - DNA, 122 bp, Homo sapiens
gaggcttcggggagcccaaggccaccggcagcgcttgttagaatgcagattcccggggttcgactggaatgagaccccggggagcagcgtttgcagcgggcccgccaggtgacctgcacctg

SEQ ID NO: 170712 - DNA, 122 bp, Homo sapiens
ggtaggaaattcctgtagtcctcccgggcttgctgaagtgctgctccaagttacagtccccgggttgtcaggcgtggcgagagccccttgtgctcagagctctcacggaacacagagcaagc

SEQ ID NO: 170713 - DNA, 122 bp, Homo sapiens
atgtcgtgtactacatattaatatatatgcacatacaatattttgttcttctggtgctaacgactaatggaggcaaatctttctccctttcgtaaagggctaaaactttgcattttaaggaa

SEQ ID NO: 170714 - DNA, 122 bp, Homo sapiens
aacatgaagatagattcacctcaactagaaagtagtatttacctacaataactagcagggcgtaggcagtatttctgggagaagtagagttgttacagatttgaaacattaacgatatcagt

SEQ ID NO: 170715 - DNA, 122 bp, Homo sapiens
agagcacatgtggcacacacagtgcacgcaccacacagcacccgcggcgcacacagcacacgtggcatatggcctccatgaccctgtgtcttgagggcaggtcctactttttgctttgttgt

SEQ ID NO: 170716 - DNA, 122 bp, Homo sapiens
agacggtttttgggtcattccctggcacggggactttattttcataacagcatgaagtgccgtggaactggaataggcgtgtcctctccctcgaccctccccctccttgtccctctgctcac

SEQ ID NO: 170717 - DNA, 122 bp, Homo sapiens
ggttcctcaggaagcagcctgcctctgtttgaaacaggctcaccaccgcctgaggcagtgcgtgtagctccttttaaattctttgtattgagtagaaatgtattcccgccaggcttttagcc

SEQ ID NO: 170718 - DNA, 122 bp, Homo sapiens
gttttctggatacagcatgactgaaccgccccttctcagcaaaggccaacacgtctttctcgagtccaagaccatctcccgttcaagggccctcaccgcgctttgtgagtctgtctcgtggg

SEQ ID NO: 170719 - DNA, 122 bp, Homo sapiens
cttaggctcgaggaagcgtgactgcttacgtgttgaaaataaaggttctgtaagtcccaccgcgggtgcatattgaaaagaaagggatcattagcacgcgaccctcgcctaggagtatataa

SEQ ID NO: 170720 - DNA, 122 bp, Homo sapiens
attatgtgcaaagagaatggcagaggggagtattaaggagctaaacctcggagagtgattcggatcacgagtaagtgttgtgctgaagcatggaaagtctgtgctctggaaaagacactggc

SEQ ID NO: 170721 - DNA, 122 bp, Homo sapiens
ttgcaatgaaccaacacatgctggtgatgagttggcgggagaagaggaagaggtaatcatcgaggatggcagctaggggaaaaatgtgtcatggtgttaccaggcatctctgacaatataaa

SEQ ID NO: 170722 - DNA, 122 bp, Homo sapiens
ccggacagtgggtgcaggacagttggtggtgcagtgcaccctgcgtgagccgaagcagggcgaggcattgccacacccgggaagcgcaagaaatcagggaattccctttccgagtcaaaaaa

SEQ ID NO: 170723 - DNA, 122 bp, Homo sapiens
tggagggctggtgggcagcagtggatcaatggaattgttttggtgtgattccagccaaaacgtgggagaaatcagtttgtttgcttattttgagatttatacaaactcagaaagcatgtctc

SEQ ID NO: 170724 - DNA, 122 bp, Homo sapiens
ctttcgcccgccccaaatcctgaagttccaaatgaggagcgcctgtctgagtccctgcagcgcaggccccagtgtccaaggcagcggggcgctggtgggtgggggcgagtgtgactggcaga

SEQ ID NO: 170725 - DNA, 122 bp, Homo sapiens
cccttgggccctgtttaaaaaatagcttcagcttcactaatcgtcatcaactaataataacgggcaaccgttgtgggcaccagactacactagatgctactcagaagaggatagtgttgtgc

SEQ ID NO: 170726 - DNA, 122 bp, Homo sapiens
actgcactccagccatggtgacaaagtaagaaagaccctgtctcaaaagaaaaaaaaaaacggaaaagaaaaaaagaaagtaattgacttgccaccacacaaccttctcacaccatctttat

SEQ ID NO: 170727 - DNA, 122 bp, Homo sapiens
tcatagcttctatttagtgagctcttactacctgccagggacggtgcaaggtgcaaggtgcggtgcaaggtgcggtgcaaggtacgttccaagcttatcagctattgctaatgatagccaat

SEQ ID NO: 170728 - DNA, 122 bp, Homo sapiens
aagaagtcacaagggacaaagccacactttgtgcacgtcaagaacttggtcttcgatctacgtgcactaagtcacgggcaggtggagtgaaataaccagatttgattaatacatgactttcc

SEQ ID NO: 170729 - DNA, 122 bp, Homo sapiens
cctctgtcacctactgtatatacctaattcttggtttcttcatctgtaaataagaacaatcgtcttttccttgcctttttctaaacgaatatgtaaagtgcccagcacagactccatcacgt

SEQ ID NO: 170730 - DNA, 122 bp, Homo sapiens
caatgccgttcagtgactgcacagagccgtgtcccagacacgctgtcagtgccttcaacacggagccggtttgttcattcggtgctttgtttcattaaataatagggaaatatccatttaaa

SEQ ID NO: 170731 - DNA, 122 bp, Homo sapiens
ccattgacgacccaggacaggagagttttctgcgggccagggcggcggaggcgggacttccgcttcttcgtgtgacgtcatctccgtgggccggtttggccctgaaacagtgtggggcctag

SEQ ID NO: 170732 - DNA, 122 bp, Homo sapiens
agagccccggctgttgctggtgcatgagaggctgggcgtgggggccgcgggtcctgagggcgagggcctgggcctgctccaggaggccgcgttggtcccagagcctgaggtgccagcagacc

SEQ ID NO: 170733 - DNA, 122 bp, Homo sapiens
acggaagtggggtgtgaggcatctctaagggcgcttcctgggtctgtgattctgtaggttcgggaagcctggaggatgtcagggtcacccacagaggacctccactcccccatctgggatga

SEQ ID NO: 170734 - DNA, 122 bp, Homo sapiens
agtttttcagttgtaacatactgcaagtgtttggaaagaggaaaaaggagtggtactgggcgtgtctgtgggctttcaagccctttatcatgcctctttgccaaatggcctagaagtttaaa

SEQ ID NO: 170735 - DNA, 122 bp, Homo sapiens
tccacccacctcggcctcctaaagtgctgggattacaggcctgagccactgctcccggcccgagatacttcaacatagttttgaaagcagagaaaatcttgaagtttttctctccttctttt

SEQ ID NO: 170736 - DNA, 122 bp, Homo sapiens
aacactctcaggctcctccaagcactgagtataggacgttagatattgagctcaaccctacggtaccccaagtctccattctaccgttccacccgggggtgggggtggataatgggatagtg

SEQ ID NO: 170737 - DNA, 122 bp, Homo sapiens
ggcgcatgcgtgttgtaattcaggcgccgaccgcggacgctccagaggtggggtttggttcgaccccgccccttcatgctcgcttcttaaagggcccgggttcgatgattgaatttaccttg

SEQ ID NO: 170738 - DNA, 122 bp, Homo sapiens
cctccgcagctgctggcccgggtgctaagcccttcactgcccggggccagcggcgccagccggctgctcagagtgcgggcccaccgagcctgcacccacctggaactcgcgctggcctgtga

SEQ ID NO: 170739 - DNA, 122 bp, Homo sapiens
ctggcctagatttgaggctccacagtcggaaatgcatggattttgaagcccaaatgtgttcgaattccagtttcaccaattatagtttagtgacttaaagcaaattactcagtcttcctaca

SEQ ID NO: 170740 - DNA, 122 bp, Homo sapiens
ccgttgcttcctcctaatctctcagcctaaattcattcatttaagttgacaactaaatatcgtgtgcctgttgtgtgccaagcgctgttccaagacttaggatactgtagccaccaaattag

SEQ ID NO: 170741 - DNA, 122 bp, Homo sapiens
gctacaatctttctaacagctttgccctacaccaccatctaaatgattatgaccaagtggcgacatagtattttattttcctagaattatgtccagctgtgagaaagccaggttcaaattta

SEQ ID NO: 170742 - DNA, 122 bp, Homo sapiens
accttgtgatccgccctcctcggcctcccaaagtgctgggattacaggcgtgagccaccgcgcctggctatatcctgttcttacattagtcacgggtcctgttcttacattagtcaaggtag

SEQ ID NO: 170743 - DNA, 122 bp, Homo sapiens
tttcacacgtacacacaaaatctggagtccgagataataggtgatgagccgtcctgggaacggtgtcgcaggctgaggatgtccaagacctggcgagtctcgggtcagaggagccggagggg

SEQ ID NO: 170744 - DNA, 122 bp, Homo sapiens
tcctctgccagcagggagattggcagagcaatgcggtttatttccaggaatgtcttcaagcggacgcttccgggggcacacacgagaaaaatcgccacatttttcagcagcggtcagtccgc

SEQ ID NO: 170745 - DNA, 122 bp, Homo sapiens
aatgcaggacgtgattcatgtgtgcaagtaggagagtgtggaagtgaatcatccgcatgccggatcaaggacagtcaaataaaagctggagaaagaagagattatcaatatgagatcccttt

SEQ ID NO: 170746 - DNA, 122 bp, Homo sapiens
gtaactgctgagcaaggctccaccagcacagtccagctttcctctgtgcatgagatacaacgtcagaatgccaatccacctggcaaaaaaaaaaaagggaagggtcagaaatgaaatccaag

SEQ ID NO: 170747 - DNA, 122 bp, Homo sapiens
ggagtagcccatgccatactgtgtccttttaagtcagtaaattgaactaagtcggttattcggcaagcagttcctataaaaaactacatggctaaggtgagtgatgatcactgaaaggaatt

SEQ ID NO: 170748 - DNA, 122 bp, Homo sapiens
tcttcctccacaaagtaattttaatccatatacattcaaaaagcacttgtcatggacagccgtctttcatataccccatctgtggacccctgggtccaggtgcagagtagtggaacattggt

SEQ ID NO: 170749 - DNA, 122 bp, Homo sapiens
gatctgcccacctcagcctcccaaagtgctgggattgcaggggtgagccactgcacccggcgtgagcatgttttaaacatataacattggtgaaacaactgggctgtatgttggcaatagac

SEQ ID NO: 170750 - DNA, 122 bp, Homo sapiens
caaagaccacgacctagacctgtgtgtgcccatcttcaccctcttgcagttcttcttctacgccggctggctcaaggtaggtgggtgatccaggctggaatttcgtgggtggggcgggcatg

SEQ ID NO: 170751 - DNA, 122 bp, Homo sapiens
aagacccccagctggctgcccacagcctgcctggggagacccggtgtgccctggtgtggccgggtcatggctcttggcaagtcagtgcactgatgtgtagggcagtggctctttgttccttg

SEQ ID NO: 170752 - DNA, 122 bp, Homo sapiens
gaaaagtagcctcgatattaaagtgcttgtgtgtccctgagggggtaagcaagtcacagtcgggacactggttcctgtcatcaggtgtagcacaaagaaggaccccaggacatggggtgcag

SEQ ID NO: 170753 - DNA, 122 bp, Homo sapiens
aaatgaagtctggggaggttcccgcctgccgacctgagcggggaggactgacggactcaacgctgcgaagctggaactcaaaccctttctttcggatgagacaagttgtgaaacaaaacccc

SEQ ID NO: 170754 - DNA, 122 bp, Homo sapiens
gggctggagctcgagaactgaatgcgctcgccgggctgagcgtgcgtggatggaggcggtcggcttcagcacgcatgcgggttccggagcgggaggcgggaggacgccgcggctctgactca

SEQ ID NO: 170755 - DNA, 122 bp, Homo sapiens
aaccccatctcagagaaaaggagatattgactcctgttctctacttggaattataccacacgcaaaactgccaaggctgatggctgagataacctctgggatccagacttcaatgctttcta

SEQ ID NO: 170756 - DNA, 122 bp, Homo sapiens
gctgcagacggcagggacggtgccccaggacgaagatcggggagagccgagttccagggtcgccagcagaggaccctcgcgcccgtccggccggacccttcggccagcaccctgcaccccct

SEQ ID NO: 170757 - DNA, 122 bp, Homo sapiens
ccagtgcgcaggtagtccaggatgggtctgaaataggtgctggggcggtcgatgaagaagcggccctccgcgtccgtggaggccttggctaagctagagaacatctctgccagctttgagcc

SEQ ID NO: 170758 - DNA, 122 bp, Homo sapiens
ccctccctctgcggctccctggaaaccggcctggacaacggcacctgggcatccatgcaacgggaccaccgcccgcttaaattcctgttgtggaacaaggctggacggtgatgggaatgctc

SEQ ID NO: 170759 - DNA, 122 bp, Homo sapiens
cctgcatgggccaccttgtaggccacctgggtgaccggcttggggatgacctggagcccacgttactgctcctcctggaccgcctgcggaatgagatcacccggctgcccgccatcaaggcg

SEQ ID NO: 170760 - DNA, 122 bp, Homo sapiens
tggcaggtccctggagccaggcgttaatcattgacctgattagcaagaacgctccgggtgcgcaggcaacacacgccgagggttggtgggtctcccgggaactggaaaaggcaccaaggcca

SEQ ID NO: 170761 - DNA, 122 bp, Homo sapiens
ccacattctaaatccaatggtccagggctcagccctgttcttactgatcactctgtcctccgggaaacggtttcttgtggttccccttcccagcccggctcccttctcttgtctcctctgct

SEQ ID NO: 170762 - DNA, 122 bp, Homo sapiens
attgttagccgcccccgccccgcccaccccggctgtttatttatgcacacgtcactgggccggccccgccctccggcatctcattaaggcagtgtgttcctctcgccctgtcaataatctcc

SEQ ID NO: 170763 - DNA, 122 bp, Homo sapiens
cacctagtaaccgcagcgcgcctacctgccgcacctagtaaccgcagagcgcctacctgccgcacctcggaaccgcagagcgcctacctgccgcacctaggaaccgcagagcgcctacctgc

SEQ ID NO: 170764 - DNA, 122 bp, Homo sapiens
tgctgcttccgccttctctcctggggtttgtgcgccctgactggcagcagggggttgggccgccagacccgcccgtttccgcgccgcccgaaactcagctaaccgctgttccatggcgcgcg

SEQ ID NO: 170765 - DNA, 122 bp, Homo sapiens
caaatcccctgcgtcagcgagtgggcggggctcacctagattccttggcctccgcttctccggcttggccacgttagaagtcccgcaggtccttgaaggtacacaaatcacctatatatcca

SEQ ID NO: 170766 - DNA, 122 bp, Homo sapiens
ttcttttcccagatctcagtactataattattcactaacttcttaggactccaatgtatccgaccaaatttttaaaaaaatttgttctctgagggaggttggtttaaatggactattctgcc

SEQ ID NO: 170767 - DNA, 122 bp, Homo sapiens
acgccgccggctcaaggtgtcccaaagcgaggggcgtttcctggtatgtgctgaggagaacgcggctcccgcccttgcagggtgcaggcgcggaggaagcgtgcgggatgcggccgcctcaa

SEQ ID NO: 170768 - DNA, 122 bp, Homo sapiens
gaggaacaggacccagagacagcagatggacccccttctgggcagaagcctcggcagagccggatgccccaggaagatgaacggccagcagatgagtatgatcagccctgggagtggaagaa

SEQ ID NO: 170769 - DNA, 122 bp, Homo sapiens
gtcctggctgcagcatgcccagcagagctccgggtgcaggaggctgcaaagccaccgccgcgtccaggccccttgagcggaggtgggaacgatccgccttagagttcaaggtgaattgctgt

SEQ ID NO: 170770 - DNA, 122 bp, Homo sapiens
gccatggtcgacccattcttccggggatatggtgagagcctcagaggcactgggagggggcgggtggggggtgcatcagggaagggagtatatgggaggaagaaggactcagagccttcttc

SEQ ID NO: 170771 - DNA, 122 bp, Homo sapiens
ctcgccttccctcgctattgtcattctccctttctcgctcctcctctccgctgtgcagatcgtacttacctgtgaacttctgtgtgtcctctactttgcaaggctgcctaagtgtcaggccc

SEQ ID NO: 170772 - DNA, 122 bp, Homo sapiens
tgctcaagtatatctaacaccttgcagctacaatatacatcaacatctccttagatggaacggagaaaggaaggttttttgcaggcaggtttgaagactaatcaatgctcggatctggaggt

SEQ ID NO: 170773 - DNA, 122 bp, Homo sapiens
gaaaacgaaaccaaacagttgtactccggggttaacacagagcaacttccacctgctgtgcgagttggtgatcctctctcttgccgttcgagagccccagtgaaacttgagtgagatgagag

SEQ ID NO: 170774 - DNA, 122 bp, Homo sapiens
ctctgcctgtttcctgcctagggggctgttgggccagccacgggcttgtggggcagtccgcggccttgctggtccatgtcacctctgaccctgagcatgcatatccctggctggggctcacc

SEQ ID NO: 170775 - DNA, 122 bp, Homo sapiens
tccactcctcctgggactgcggcctcttcaccaactactcagcaccctggcaagtggtcccggagctggtggcccttgggctcccgcccattggccagcgtgccctccactacctgggctcc

SEQ ID NO: 170776 - DNA, 122 bp, Homo sapiens
tgaggctccccaagactacctgaggggccgcccaagcacttcagaagcccaaggagcccccggccacccccgctcctggcctttttgccaacgactttgaaagtgaaatgcacaagcaccag

SEQ ID NO: 170777 - DNA, 122 bp, Homo sapiens
gcagcccccatataagtcgcttgtcctgggccaagggcacctcagaggcctgggtggcaccgcaggtttgcccgtccctgtgggttgctcaccaccggacccacctggagaatcgattggcc

SEQ ID NO: 170778 - DNA, 122 bp, Homo sapiens
ttccagctccacgatccttaaactagaacaacagcgctcctccctaggtctgcagcttcacgaccctcaaactaaaaaaacagcgactgctccccgggtctccagctccacgactcccaaat

SEQ ID NO: 170779 - DNA, 122 bp, Homo sapiens
ggccgcaaaatggtgctcttgtgcaaattaaagaaaggcgccctctcctggctggcaaatcgtagaaaagcaccctcttctggccaactctaggcttggaaaagggagtgatagctgaattt

SEQ ID NO: 170780 - DNA, 122 bp, Homo sapiens
ttttccaacactttcggggctcagggaagatgactctgtaaggacactgagaatcttcctcgcgtgccacggggaggaggactgggggcgtttgaggggctcagcgcaccagaggagtgagg

SEQ ID NO: 170781 - DNA, 122 bp, Homo sapiens
agagtgatgcttagaatgctcctgatgttccattgggtgttcgagcagggggaatggactcggaggtgaactatgagccgagattcattttataaacgggaacacagacacatggacacttg

SEQ ID NO: 170782 - DNA, 122 bp, Homo sapiens
gacctgacctctcctcttgggccacaggaggaaagaggacagaggatgaagctggtgctccggggacctaggctaatctgccaggtatgagaagcgcaccacccacatctgggccacgcagg

SEQ ID NO: 170783 - DNA, 122 bp, Homo sapiens
catttcaagctttgaagagatgagtaaactctcctctccattttcctccatggtcacaatcgatagtgttttcaattgagaagatatgagtttacctaagtgtgtgtgcaaaagcccagttg

SEQ ID NO: 170784 - DNA, 122 bp, Homo sapiens
cacggagcacatattttaatgcgccttcacagtcttccagaaaaacagatgcaacatctacgacattcttcctgctcgctgcaacagcaattaaagagaggattgggtgaggggggaggcct

SEQ ID NO: 170785 - DNA, 122 bp, Homo sapiens
gagcaggatgtgctgtgtgtgtgttgcgggagaggctgggggcgggtaatgtgatggcatcggcatcattctccagtcaatgaccctcaaaagaatcactggagggggtcaaacacaaaatg

SEQ ID NO: 170786 - DNA, 122 bp, Homo sapiens
gagggccgctgctctctagcaggtagcccctgaccctgggctgccctcatctgaagtcttcgctcccccgccctttggtctccgagtcagggagggggcccttgtggacatctgggccagag

SEQ ID NO: 170787 - DNA, 122 bp, Homo sapiens
ctggtctggagctgaggcatacctttgtttttccttccaatgatgggagtgactgcttcccgctttaacaaaacaatacgtgagccatctgggcctccttcacatatcctgaaacacaccac

SEQ ID NO: 170788 - DNA, 122 bp, Homo sapiens
gcccgtgggcaccagggaggtgtcctgggacccccgcgatgggatagacggtgggggccgcgatgcacctgccccgcccgacccgcacgcctcgggtgccgcagcgcagctaccccgcccgc

SEQ ID NO: 170789 - DNA, 122 bp, Homo sapiens
aacttagaggagcccgagctcttcgccaagcgcagagctggccctactcaactccacctgcggggcggacgcctactgtgggccattttgattcttaaaacaaacaaataaacaaacaaaaa

SEQ ID NO: 170790 - DNA, 122 bp, Homo sapiens
ggagctggaggactggctggaggatgtcctggagggcgagatcaacacagaggacgatgacgatgatgatgatgactagttgctatggcaaccatctttcagccccactggtcttttcatgc

SEQ ID NO: 170791 - DNA, 122 bp, Homo sapiens
gccactagcgacaatatggctcctaagcacgtgacccggggcagacggatttccggttcccggggctacgaggcggaagcgaaggcagacgcagtctccgtcgttgacgttagtcgcagtct

SEQ ID NO: 170792 - DNA, 122 bp, Homo sapiens
ccagggactcaccggctgcgaggagccgcgtcttcaccaactgttcacgctcactctccgcggctcggagactcagccgcccttccctgggcactcattggtaagtcctcggaagcgtggac

SEQ ID NO: 170793 - DNA, 122 bp, Homo sapiens
ttttatttacatttctatgcctctgttttctctgtgctcacactattcctctgttctttccgtcccaaacaataatcatactgtttttacaattctaacaatgatagttcttgcttttggtt

SEQ ID NO: 170794 - DNA, 122 bp, Homo sapiens
agggggtgagggagcttcagtcggggcccgaggtagccgtaatgcggccctgggggctgacggccagtgcccgggccccctgcagggctgactggggagggctgggcagccaggttggggtg

SEQ ID NO: 170795 - DNA, 122 bp, Homo sapiens
tgtacattttaaatcctataacaaaaataatctagttttcatttccttactagctagatgcgaatttgtctttttgaatgaccctgtcaataagccagaaagggcaacccagaaaaagtgct

SEQ ID NO: 170796 - DNA, 122 bp, Homo sapiens
gcggctgcagctcgttggcggctgctgcgaggatgctgcctgggcggctgtgctgggtgccgctcctgctggcgctgggcgtggggagcggcagcggcggtggcggggacagccggcagcgc

SEQ ID NO: 170797 - DNA, 122 bp, Homo sapiens
tgagataggtgttcttaattttcattttccaaacaagaaaaacagaagctcagaaatcttcggtaatgcattcaagatcacacagctaagcagagagtcaagattgaaatcagcattcgtct

SEQ ID NO: 170798 - DNA, 122 bp, Homo sapiens
tgacctcgtgatccgcccgcctcggcctcccaaagtgctgggattacaggcgtgagccaccgcgcccggctcctgtgcaattcttacagacccagcttggctgttctccagtgtctcctttg

SEQ ID NO: 170799 - DNA, 122 bp, Homo sapiens
tttctgcgtttctgcagcctcagtccacgccgccaggtctttgcactaagctgtgggctccgtttctcctccgataccatgtttagcaagtgtttcctgagatcacacggggtgccaggggc

SEQ ID NO: 170800 - DNA, 122 bp, Homo sapiens
gggcttttcggtttgtctactcagcgtctctcaaccacacgacaacaacgaccaagtctgcgttgctcagggctctgagcttgggccaggatcggagcctgcaccgagctgaataaacacta

SEQ ID NO: 170801 - DNA, 122 bp, Homo sapiens
gccgccgccgccaccgccgccgcccttcgctcggcgcgcactccagccgggcccagccgccgccgcccgcccccggcccgccccccgcaccgccccccgcaccgccccccgcaccgcccccc

SEQ ID NO: 170802 - DNA, 122 bp, Homo sapiens
ctcagcggctcagtccagaagccccaccacccccgccccccgcgcccctctctgcgcctgcgcgcagcacggtcagccagtcaaccgctgcagagcccgcctccccgacagaggaccaatcg

SEQ ID NO: 170803 - DNA, 122 bp, Homo sapiens
tgtgatccacccgcttcggcctcccaaagtgctgggattacaggcatgagccaccacgcccggcctcctctgaattatttaatagtggccgggggaagcttttgagactggaaagaactatg

SEQ ID NO: 170804 - DNA, 122 bp, Homo sapiens
gagccgagtgttaggctgtgcctgggggcagccctgtggcctgacagtgtcccctcgccccgtcggccgtgtggtcattctgtgtggcccacctgcctcctgtctgagaagccgagtgctgt

SEQ ID NO: 170805 - DNA, 122 bp, Homo sapiens
tgcgtcagggatctgcgcagcacgtgtggaacccaatgagagtccttgctgtgcaggcaccgggatgctcacatagtaaaaactcgagtccatcgggaagcccaggaactgaaaggcataaa

SEQ ID NO: 170806 - DNA, 122 bp, Homo sapiens
caccacactcctccttgtataaaggccgcgcttgggcccgccctcctcacagccccggagcgcggcctgccggggaggtggatctcgcgctccccacacagtcacactccgcgcactcacac

SEQ ID NO: 170807 - DNA, 122 bp, Homo sapiens
ctagaggggtcgtgccaggccctagactcaccgcgcggcttcggccaaggcctcagctgccgccgccagcaccggtaccgccgcttcaggccccctgccccaccgcccgccttccccgctgt

SEQ ID NO: 170808 - DNA, 122 bp, Homo sapiens
gcgtggatgttgagggccatgtcctgctcctcgctgtccaccacgtccagcagataggcacggatgggcccctcggtggcatcggcgctgaagtccaggaccaccactcccagcaccgtgag

SEQ ID NO: 170809 - DNA, 122 bp, Homo sapiens
accattctttgtagattattatatcaagggttcagtctctggctcatcaaagctaaatgccgcaagacctatctagttgctgtgaattatgccagggcgacaatggagagcgtttttaatgg

SEQ ID NO: 170810 - DNA, 122 bp, Homo sapiens
actagctgttggtcatcctaagggcaggcggtctcctgaagttggaccgaaccattaggacgtgccacagtaacagctacgctgctcagaaggcccgaagggtcttcctcagcgacctagcg

SEQ ID NO: 170811 - DNA, 122 bp, Homo sapiens
aatcgcggccaccgccaggtggaacggcaggtgggttcaggtaccagcctggccgggacccggctgtgggaccaacgcttccggtgagcgacagaggcagctccccagggcctggagacccg

SEQ ID NO: 170812 - DNA, 122 bp, Homo sapiens
caattgcctggcatttgagtgattcatctaagtgattcaccttgccagcagatcctccagcgccaatcacatccagcttcagaggatggagaccttgcctgacatttggttacaacagcata

SEQ ID NO: 170813 - DNA, 122 bp, Homo sapiens
acgcggtccggcacactgaaaggggagtgtcgggtaacatgcccgggcaaaagcgagcgccgcccctgcctctccgctgctggctggaacgctgatctatctagttgctggggagacgcccc

SEQ ID NO: 170814 - DNA, 122 bp, Homo sapiens
tcgggtagtgctacctcagcctggtggtcaaagtcattctgccttccccacagctgctgtcgtgaggatttgcttcacatacacttctgatccctttgttcttccaaaaatccttggaactt

SEQ ID NO: 170815 - DNA, 122 bp, Homo sapiens
cgctggaaagcccagcaccgcaagccttggtgacgtcctacccacggtgaacggagtggccgggaccagcgtactcgggaaacttagtctggggattctctcccagagctcacaccaccctc

SEQ ID NO: 170816 - DNA, 122 bp, Homo sapiens
gtccggaactcaaggctgaaggcgtcaacaatttcaccagtcagcagggtcaccaggcctcggtgcaggcgtgcgtcactccacgtgaagctgggggtcggggagtagggggtcagagtctc

SEQ ID NO: 170817 - DNA, 122 bp, Homo sapiens
agccactgtttaaaagtaaacacaccacacatcaacttggggcagctttgtaagcagcttcgcaagccctgaaacttctggctggtagggatgccagctaaaccagatggcatcaaacagtg

SEQ ID NO: 170818 - DNA, 122 bp, Homo sapiens
cgcacggctcgagccttaggcgacagggacgcagcccgccagcgcctgctggtcgctgtgcgtgacggtggacagccgccactctctgccaccgccacgcttcatctggtcttcgcagacaa

SEQ ID NO: 170819 - DNA, 122 bp, Homo sapiens
ttcccttgagtcagcatgatttcagatgttctcagtctcctcccctgacatgttcctctccggtcctcaaaggctgcagcaaaagtatagtaataaactccagacccagaccaactgggttc

SEQ ID NO: 170820 - DNA, 122 bp, Homo sapiens
gtacgccagtccccctctggaaatggggccctggtaccgacagggcaggggtgccggggccgcaacctccccatccagggatactcaccggaggggcggcccaccgcgtcttcgcagccggc

SEQ ID NO: 170821 - DNA, 122 bp, Homo sapiens
gggctgttgggggtgtggggaaggcgctgaccaggataggggggctatgagtctcccttccggaatctaaatcagtcatccacagtacatatatcttaaaaagcacatcttcaacgcttttg

SEQ ID NO: 170822 - DNA, 122 bp, Homo sapiens
gggtctgcacctcgacagtccaggtggcaagtctgatttcgggtgccccgcaatcaacgccgaatactccagggcatcctctaagagcagactgatggtgtcgatgtggacaaaatggtcct

SEQ ID NO: 170823 - DNA, 122 bp, Homo sapiens
gagcctgggccgggccgggcggggactactccggagtcaggaggcagcagcggcggaggacgaggatctctggcagtcagcgccgctcggacgccgccggcaccatgggctgctgcaccgga

SEQ ID NO: 170824 - DNA, 122 bp, Homo sapiens
gctttgtgaggtgaggctttgtgaggtgagccagggcgcacccgggccaggaggccggggcggggcgattcccaggcctggagcgagaagggtgggctactgtggggtaacctggggaggag

SEQ ID NO: 170825 - DNA, 122 bp, Homo sapiens
gaccccgccagcctgcgcctcctcacccggggactagcagaagcctgggcccgcgcctggcgctacgactccggtctttagtctttgtttggagcacgggagaacctgggacggagggaggc

SEQ ID NO: 170826 - DNA, 122 bp, Homo sapiens
aagcctggtcggcaacaaagaccgcgcccgctttttccaccgtcctggtgtggcgagttgcggaatttcaataactgtgacaagggtgactgatttgtgaactagaaaaggtttgaatgtca

SEQ ID NO: 170827 - DNA, 122 bp, Homo sapiens
aaattaacccagctgccctctcagttacaagtccatcccatccaaactccatgccaggtgcgaaaggctctccaggtcaacttgccctgccaacctctaaatgtccttctgtgcctctgcca

SEQ ID NO: 170828 - DNA, 122 bp, Homo sapiens
gcaaacacatgggtgcatacgtgggctccaaggcatacttgggctgcaagggagtcagcacgtcctgagaagatggagggatggggaaagctataaggaaagcagatcaggaaggaggggat

SEQ ID NO: 170829 - DNA, 122 bp, Homo sapiens
ccagtagaggccgcgcggagagagcagagccgagggacccagcgcaaggcgggagccaagcgcggctgctttaagaacgcggagagcgcgcgcccgccgccagctggcccgggctgcgcgcc

SEQ ID NO: 170830 - DNA, 122 bp, Homo sapiens
tccgggaaaaacctgcctcccagtctgccctctctccgtctgtctgtgcttgtttttctacgtttatccctgtcgctttccccacttattctgcaggcatggcgcgcccccagtgccggctt

SEQ ID NO: 170831 - DNA, 122 bp, Homo sapiens
tgcagtgccatactacagcttaagtctctaagtcagggctgccataccatacttaagtctcgaagtcagggctgtctaggttctgacatggctttcagaaataacattttcaaaacaaataa

SEQ ID NO: 170832 - DNA, 122 bp, Homo sapiens
ggccgaggcgaggtgtgggtggggcgggacgccgctgtggaggcggggcctgggcgcggacgggcgcggagcgaggcaccgcaccgccggggcggggagtgggcggggctcgggggcggggc

SEQ ID NO: 170833 - DNA, 122 bp, Homo sapiens
ggggtggaggcggaaggtgaggggagtggcgggaagggtgctcatccccctagggaacaacgagcgaacctgcttggtcccgctgtgcttctcgtgcaggaaagacccaagggagtggataa

SEQ ID NO: 170834 - DNA, 122 bp, Homo sapiens
gatgcatggccttttaacagaaaggagaaccaaaatgtcctcggtatttgaggatcagaacgcagcaacccatctcattcgccacgctgtgggcaacaacgagtttgggactgttgatcatg

SEQ ID NO: 170835 - DNA, 122 bp, Homo sapiens
gctgcaaaccacgagccctcacctccagcagaggttttcgggaaactctggacgaccacgcgcatgcagaggtaagggaatgatccggtcctacctggcgttgacttccaggttcactcaaa

SEQ ID NO: 170836 - DNA, 122 bp, Homo sapiens
ttcttatttcctacgagtttatgtgcttggaagcgagcgtggtcgtggaaaacccgtaaccgctaaattcatctgggtccccaaagactgagccggctggcctcgttatttatgtgagcggc

SEQ ID NO: 170837 - DNA, 122 bp, Homo sapiens
gttgaaaaacagcataaagccatattcgctcccatgtgtacacacaggcatctgctataacgtgaagccactgcaacttcttttctcactgcctattggtcttcccgctctgtgagttacaa

SEQ ID NO: 170838 - DNA, 122 bp, Homo sapiens
ggcacatctgcacatcctgggcctcctgctctctctctgctccgtgcagaggacctgtagcgccacctttgaccccttttttcttctgttccctggagcccgacttggggagggcggacggc

SEQ ID NO: 170839 - DNA, 122 bp, Homo sapiens
tgcagaaagctgccggaggcgaggggctgggactgcgtagactgatggggtggtggggcccggttctcaaacagggcagagcggatccccgccaggggcaacggctcctctaggcccaccaa

SEQ ID NO: 170840 - DNA, 122 bp, Homo sapiens
tttgcatgtctgagggatgtcccagggttgggaagagccaagtctgttccgttcctgctgcggggacttggcctcagctgcttctcttgcttctgcagggagccagagagaggctctgagaa

SEQ ID NO: 170841 - DNA, 122 bp, Homo sapiens
tttctcggatccactttaaaagaagcctgagtatcttacacacggttagccactctcgagcggggtaattcagacggtgagtagggaagaagattgtatggaaatctgcctgttttcccatc

SEQ ID NO: 170842 - DNA, 122 bp, Homo sapiens
agatggcgccccctggggctggctgcgctggctgcggcgctgcgacccccgcccggcctccgcttatattcccagctacatgggaggctgagatgggaggatttcttgagcctgggaggtca

SEQ ID NO: 170843 - DNA, 122 bp, Homo sapiens
ttttacccggcatctgtccctgggatcaggagagccgggaggctggattagatgggtcagcgccctgattgacagtgacacttcctcccgtgcccccgcctgccccccggcctctcccgctg

SEQ ID NO: 170844 - DNA, 122 bp, Homo sapiens
tcaagtgcagagggcacaggatttcggagatcgtggcaatatgtgtcaagtgcaaacttacgaggagaaaccaatgcacattctccagaagaaatgagaacgcatttctgcatgcctccttc

SEQ ID NO: 170845 - DNA, 122 bp, Homo sapiens
gaaccgagtataaaccagtttgggtgttgtcagactcacgtggtgagtcacacctggcgccgcagtgtattggtacctggccgactgggaacaaaaatggctggttcttcagcacaaaagat

SEQ ID NO: 170846 - DNA, 122 bp, Homo sapiens
ggggctcagcagcgttgcatgtacgggcctcgtactgcctcatggaaaatcctccggagccgccctccattgtgggttcctgagagtaggacacattgccatggttttgtgggaatcacgcg

SEQ ID NO: 170847 - DNA, 122 bp, Homo sapiens
gcccacctcttttgctggaatgtctccaccacgtgtcttaggttcctactcctttcctatcgatgttgtaacttagtacaagagacctaaagtgttgtgcatttaattgacactgcagccca

SEQ ID NO: 170848 - DNA, 122 bp, Homo sapiens
gggataaactcaaaccttccttttctcctagagtgtgtgaggaagtgcactggcctcatgcgcagttctctgtgtgagatctgtagggagagaggagcagacagacagcatcccagccctgt

SEQ ID NO: 170849 - DNA, 122 bp, Homo sapiens
gatcaaccacagaagaattcctgttaaatatatcaaactcattgaagtgaggggaagtatcggaaattgaagtcattttgaattgcattttcttgagttcatctttctgccaccaggggtca

SEQ ID NO: 170850 - DNA, 122 bp, Homo sapiens
tgcttttataccttcccagcagctatcaatcactgtcacgagggccaaaaatagcctgctcggaaggctgtcttaggaaaacagcttggtgggcggggcctggcccagctgccagcttggag

SEQ ID NO: 170851 - DNA, 122 bp, Homo sapiens
cctgggtggcctgcatgagctgctgccagtggcgttcccgaatggcagggttctgcagctcgctcacggcacgcagggacgtgatcacgtttttcacggtgttgtcgagccccacgaaggca

SEQ ID NO: 170852 - DNA, 122 bp, Homo sapiens
ggcggggcggccaggaggcaggagatgggcgggtgaggactctccacggcccccgaggtgcgcacagctgaccacccgaggaggggcaggacctgcaccccctccccagaccccctgcgaga

SEQ ID NO: 170853 - DNA, 122 bp, Homo sapiens
tgtcttgtcaatgctgatgacatccatgaacccagcagggtatgttatatcagttcggaccgtgccatcgatcttaatgaaccgctgcatgcaaatcttcttaagtctgttccttaggaaaa

SEQ ID NO: 170854 - DNA, 122 bp, Homo sapiens
gggggtcgcggcatcgggagcccactcactgcatgcaaggcctggggcatgcagggtccacgtcagggccagctcgctgggggaacgcatgctgtcagcacgcagctaggacagagaccacc

SEQ ID NO: 170855 - DNA, 122 bp, Homo sapiens
tgtcccatctgcagagtgtgctgccagggtctatgctcagaaagtgacttcagaacgtagcggtgtggaactgcagcagcactgatttcgctcgtgaacctgcagtgtggacttggtgggga

SEQ ID NO: 170856 - DNA, 122 bp, Homo sapiens
gggtgccaggccagccctctccaactcccagagaggtagtaagtgtaaggctcagagccccgcgcagcccagcccgcgccggggcggtgggtgggtgggtgtctgctatgggattattctta

SEQ ID NO: 170857 - DNA, 122 bp, Homo sapiens
ggcgctaaacagttggttccctatcctgagggaaggaaaggcaagcctcggctccagatccggttccatgccatgttttggaatttgtgtttacgtctgccttcatccccatcctttccgct

SEQ ID NO: 170858 - DNA, 122 bp, Homo sapiens
tccgttcccaagctggtttgaaactaggggtcgggctcggccgtcgtcgttgtttgtcgccgcatccccgcttccgggttaggccgttcctgcccgccccctcctctcctcccttcggaccc

SEQ ID NO: 170859 - DNA, 122 bp, Homo sapiens
ccacccttaagaagtttctttgtaattcttcccatccttgagaatgaactttgtgagatccgccccctgcccgcaaaacattgctccaaactccaccgcctatcccaaaacctataagaatt

SEQ ID NO: 170860 - DNA, 122 bp, Homo sapiens
cggggaaaacaagcgcgacccatgggatcccgacgcgccgcgtggttgccacagctaggtcgccgccaggaaagccccaggtttcctaaggcctcttagtgggtgtggctttgggcaccgac

SEQ ID NO: 170861 - DNA, 122 bp, Homo sapiens
gggtcagcggggtctaccccggccccacctaacctctcggtgcccggccttctaagcccccgtggggggcgtgtgcataaactcacctcagaacccacctcgcctgtcatgacttctgcctc

SEQ ID NO: 170862 - DNA, 122 bp, Homo sapiens
tacgcgtgaagcgggtatggccagcggctcacactgtacgcgtgaagcgggtatggccagcggctcacactgtacacatcaagcgggtgtgggcaagcggctcacactgtatacatgaagca

SEQ ID NO: 170863 - DNA, 122 bp, Homo sapiens
acaggaaggtcctgtgagacgtgcacgtgatggaaggtgcgtcccgagctgcagaaactccggtggcctcattctccactcagtcgcaccgagactcactggcagcaggcggggagcacact

SEQ ID NO: 170864 - DNA, 122 bp, Homo sapiens
tcaaattcggatacttagaaggaatgcgatgaaattgggatgaaggtgttttgctggccccgtggacagaccagacctcctcccatcggagcctcgggtctcacaccagccccccaggcggc

SEQ ID NO: 170865 - DNA, 122 bp, Homo sapiens
cgcccacagggctggggcccttcccaggctgctgggtctccagcccacgttccggatggacgaagtcggctgcgccccggccgcacgccctccgccccaaccccgcctcagctgcgaaacgg

SEQ ID NO: 170866 - DNA, 122 bp, Homo sapiens
acatctgactgccataaaaattatggtgacgagaaagaacgtttgctcaaatgccggggtcgggttgagggctggagaaaggtcccaccccgcagcatctacctcccgggctcctcaccatg

SEQ ID NO: 170867 - DNA, 122 bp, Homo sapiens
tgctgataccgacctcctggttggaaagcctgtagagcagcgcggatgacagtggaacagcgggtcaggcggtgggcgcctgagcgaggggctagagcgggatgggcgggcggagcaagcct

SEQ ID NO: 170868 - DNA, 122 bp, Homo sapiens
ggggtccttttgctcccagaccccgggcccgaaagggccggagcgtgtcccccgccagggcgcaggccccagccccccgcacccctattgtccagccagctggagctccggccagatcccgg

SEQ ID NO: 170869 - DNA, 122 bp, Homo sapiens
ggcgccgccgcttgccgggaaatgcgagctacctggccaggtaaaaggcagccgcttggccgggccccgccccgccgccgcccagctccccaggccgcattccttcccgcctccttctacaa

SEQ ID NO: 170870 - DNA, 122 bp, Homo sapiens
tattgttggtgttttatggccggctcaggcctgcagtgggcggcgctgcgtgcgcccgcacgtttctcttgcaggcgcggcccaaacagccgcgctcatttatttagtgttggaggacgcgg

SEQ ID NO: 170871 - DNA, 122 bp, Homo sapiens
ggcctttaaaccatgtgcacggacatctgggaggaggagcctggaactgccccatactgccggccatcacaagtgttggttgcctgttggttattgggtgaagggctaatcatgtgcatgct

SEQ ID NO: 170872 - DNA, 122 bp, Homo sapiens
aacaacaacaaaaaagaccttaaattaatagctacttctgaaaatcgcttcgtattgtaacgtgtgggttaacccacttttaacgaaggaaaatacagtaaagaaaaatgtattaggaagtt

SEQ ID NO: 170873 - DNA, 122 bp, Homo sapiens
agaattaaagccatttcccgcacgaggctgggaggaaatgagagctctcctggccctgcgcgctgacaaaaggccgctgcgcggtgcccacagcgccccctccagcaggccgcgccggccgc

SEQ ID NO: 170874 - DNA, 122 bp, Homo sapiens
aagggagccacttctgcaaggaaacagtagattcataatgtagaatgaccgtggcaacgtcgttcaaagcacattctttcgaataacaaggctttcgacatgccccacccccgcgcacaaca

SEQ ID NO: 170875 - DNA, 122 bp, Homo sapiens
tgatcttccccgtgagggaagcctgcggggacgcacaggggcctgcagcgcctctcactgcggctcaggggcgaggacgggggaggtgcccagggtttggggatcggtaggtgtcatgacga

SEQ ID NO: 170876 - DNA, 122 bp, Homo sapiens
gccctccctcctttataccgctcccaattccacccaggctctaaagcatagctcaagtcgcggcttgtcagggtccctgcagccaaggccactgcctgcctctgaaagaaacgcatgtagta

SEQ ID NO: 170877 - DNA, 122 bp, Homo sapiens
cctgcagaagctgggcgtccaggcagacaccaacacggtgctgggtgagctggtgaaacacgggacagccaccgagcgggagcgccagacctcaccggacccctgccctcagctccctctag

SEQ ID NO: 170878 - DNA, 122 bp, Homo sapiens
gactacagttcccgtgaccctttgtgtgtttgacgggactacaactcccagaagacctagcgcgccaggcaggcacttccttttctctttatccccaacttccttccaggtcgcaaggtcac

SEQ ID NO: 170879 - DNA, 122 bp, Homo sapiens
cctaattagactccggggcattatccctgcatgcgttgtcgatggcggccaggaaaagggcgaggccaactttatttctgaatttggactgacttaaagaagtggcatcacatttgaagggc

SEQ ID NO: 170880 - DNA, 122 bp, Homo sapiens
gctgccagtcccctgccccgggcaaagcccatctggtccgccgagcaggtaagacaccagcgcccaaggttagacggcaggaagacccgactttgggggtttgcgattcttacgaggcgggg

SEQ ID NO: 170881 - DNA, 122 bp, Homo sapiens
ggacagttgtaacaacaacaacaataataataatgacaatgacagtgagcactgattgagcgcctcctaggagccggggccctgcgtgcgtgcctcccggacatcatctaatttaataaaca

SEQ ID NO: 170882 - DNA, 122 bp, Homo sapiens
gactagcctgagcaacatagtgagtaagacctgtctctactaaaaaatttttaaaccaggcgcttaaaattacattttttaatagacataatcccagctacttggaagattgaggcaggaga

SEQ ID NO: 170883 - DNA, 122 bp, Homo sapiens
ccccgacgcctctcgcggttttccattggctttggctcccctggggtactccttcacatacggcgggcctccgccatgttgggaaggtcacgtcggctgcgtcaccgccccgccccgccccg

SEQ ID NO: 170884 - DNA, 122 bp, Homo sapiens
taagaaaattgaagattggggtggtggaggcagtagggagatgggattgggcacctcccccgtgctggggcctggatttttgtaaataaatttcccaagcgtttctttccacctggagggaa

SEQ ID NO: 170885 - DNA, 122 bp, Homo sapiens
gtatattcaggtacctcggggatctgctggcacattgtaagagcaaagaaactggaaatacggtaaatacacacccacggaaaacacaatcgtacaacagggtacagcacagccgttagaaa

SEQ ID NO: 170886 - DNA, 122 bp, Homo sapiens
aatttctgctcaaataagcagcgcctgggagaagccctccctgacaacagctaccagccacgccccactccactctatcccattatcccggtttgttgttgttgttgttgtttgtttggttt

SEQ ID NO: 170887 - DNA, 122 bp, Homo sapiens
atatttctcacaactcagtttggctccctggaaggcatttcttttgaatcaactgcaattcgtatctaacaatttcatagcttacaagtaagactgctattaaaatgttaactaattctggg

SEQ ID NO: 170888 - DNA, 122 bp, Homo sapiens
gaacgtgcgaagcagcgttaggagccgggaaaagggcagggctactttactttgtctttgcgcttcggatttcctgtgctaggaaaccgcagcacttcccactcctgcccctgatgtctgcg

SEQ ID NO: 170889 - DNA, 122 bp, Homo sapiens
ctttaagtgactcaatgtctttggctgcatagaacctccctttctttgcctgtaggaggccgggggctatgtgaggccatatttggagaatgcagaactgggaaccctgagtgctattgttg

SEQ ID NO: 170890 - DNA, 122 bp, Homo sapiens
aataagctggtgggctgggtggggctggctgattcacgtctctctttggtcatcctctagcggattagcctggatttacgtacattgtggcaggaggattccagtagtagcaagaaaacaaa

SEQ ID NO: 170891 - DNA, 122 bp, Homo sapiens
tgccactccccagcccctacccaaggtctgctcatcccatagtaagtcattctctggagacgcaggagatcctggaggaaggagagagaagggctgagagagcctgagaatggggcctccgg

SEQ ID NO: 170892 - DNA, 122 bp, Homo sapiens
cggcctccctgcagtcccctggcagcggtagcagccacaggggcgggcggctgggccacacgcctcccccgccctcggccccacccggccgcaccctaagccgcgcggcgtcacagagcgca

SEQ ID NO: 170893 - DNA, 122 bp, Homo sapiens
caaactcccgacctcaagtgatccgcccgcctcagcctccgaaagtgctgggattacagacgtgagccatcgcgcacggcttagtcccaagattttagagccaagaagcgtttgcaggagga

SEQ ID NO: 170894 - DNA, 122 bp, Homo sapiens
tccaacaataagagaatatgacaaggctaagtcaggttgaacatctcttccaaacttaaacgcagatatgacacatagtgcagtgtttactatataaccatgttgtgcttatcctttgagga

SEQ ID NO: 170895 - DNA, 122 bp, Homo sapiens
acctttgccgtcatctgtagcaagtcagccacaaacgcaggcccgttatctgagccgatccggaaggacagtcccaatctaggaatcagatctcgaagaagcacacggaacaatcattccaa

SEQ ID NO: 170896 - DNA, 122 bp, Homo sapiens
gggagaggaagactgagcccggctcaggcggctggagcgcgcgggcccgtttcctttcagcgatcagtcccctggcgtcccagcagcgccttccccgcgatcgcgcgtccccagcgcacgtc

SEQ ID NO: 170897 - DNA, 122 bp, Homo sapiens
cctcggtggcccagggcccagctcagccgactgggcagtcgatgtaggtcctgagaagagcggcggcggcggcggcggcggcggcgaaggaaaagcgacactgaagcgaaggctcgcggttt

SEQ ID NO: 170898 - DNA, 122 bp, Homo sapiens
atttgttcaacaccaacagagatgtgtgctgctgcgtggaagatgactgagcatgagacacgcagtgcccgaccgcgtggagcctacgtcctagagaggaggcacaggaacaccagacacga

SEQ ID NO: 170899 - DNA, 122 bp, Homo sapiens
gtgtctcaaaaaaatttttttaattaaaaaaaaaatgttcaggccaggtacggtgactcacgcctgtaatgtcatcactttgggaggtggagtaggcggagtttgagaccaagctgggccac

SEQ ID NO: 170900 - DNA, 122 bp, Homo sapiens
agccagactggggcagggaggagaaaaaggaaggagccgtgacaaatacagggccaagcacgggggcaggagggtgctcccaaccctccaggtgaagagcctgcgactctgtagccttgtag

SEQ ID NO: 170901 - DNA, 122 bp, Homo sapiens
acgaaagtgccttcccagcagccgctacacggagccccggagatcctggtgtccttggatcgcacccactgtgcgtgtcgtgcccgcagggccacccccaaagagtcaagaagtcccagaag

SEQ ID NO: 170902 - DNA, 122 bp, Homo sapiens
ggaggggcttgcgtgcatgggcgtggccagcactgggctggggcggggcctctgggtgggcggagctgctcatctcgcctctccttgttcctcgctccctgtcgccctcaggtcgcccacgt

SEQ ID NO: 170903 - DNA, 122 bp, Homo sapiens
aggtctcggcgagtttctctgatatgcgctcgcgggggtgctgccatttcatctcttccgcgcgggctcatcgtgctctcagggtctcgttgaacaaggcaacgctaagagccatcaccacc

SEQ ID NO: 170904 - DNA, 122 bp, Homo sapiens
gccctcaaatgcttacacagttgctttgagaggggagggatgacgtctgcacacctgagacgtctcaagaggtttcatcctcagtatgtgagtgaccctgtggcccaggctgagtacctagg

SEQ ID NO: 170905 - DNA, 122 bp, Homo sapiens
tctagcccccaaatacccagggaacaatccagctacttgattcagtatcctccaggaagccgaaaccagctcctcggtgggccctgagggcgtccacgtgttacataacccagcacctgatc

SEQ ID NO: 170906 - DNA, 122 bp, Homo sapiens
ctggttgttctttatctcatagttacaatgaatcatataaactgtagactgccactaccacgatacttctgtgacacagaaggaatgtcctatttgcctatctatctgaggaatgttaaata

SEQ ID NO: 170907 - DNA, 122 bp, Homo sapiens
taaggaaaagaagttaacttgtccaaggtcacatggtaaaaaatagccgcaaggtctgaacgaagacccatctaactcaatagcccatacctctttatgactcatccatagcctcccaagtc

SEQ ID NO: 170908 - DNA, 122 bp, Homo sapiens
acacctgcaaagctccatgaggacagagtccatggctgttttattcagcctcacaactagcgtagtgcctagcatgtagtaagcactcaggaaatatttgttgaatgactgaatgagtggat

SEQ ID NO: 170909 - DNA, 122 bp, Homo sapiens
gcggcagcagcggcgaggctgagactctgtccctggatctcgctgctcacaggctacagccgctccgcagacacggggtttcctccaatcaccagccccggcagcaggggcaccacacgcac

SEQ ID NO: 170910 - DNA, 122 bp, Homo sapiens
catctcttaaccttcctgcaagcccttgccaacttcctccaggcttctgcccactgcctgcgcctaaagccaatgccatgtgtttcatattttagtgaccagagcacagtgaggcacgtcag

SEQ ID NO: 170911 - DNA, 122 bp, Homo sapiens
gctgtccgcccgggcatcctcccggtgatggaagcagccgccgccgccgctgcggggtcgcgctgtgccccatccaccgctgccagagaggtgggaaaattcgccgcacggaggccgaaagc

SEQ ID NO: 170912 - DNA, 122 bp, Homo sapiens
ctatctataaacctagccatggccatccccttatgagcgggcgcagtgattataggctttcgctctaagattaaaaatgccctagcccacttcttaccacaaggcacacctacaccccttat

SEQ ID NO: 170913 - DNA, 122 bp, Homo sapiens
ttacagagttgtaccatcatcaccacaatctaattttaaaacatttccatcatcctgaagcgaaatttgtgcccatttacagttattccccattcccactcccagctctaggtgaccacttt

SEQ ID NO: 170914 - DNA, 122 bp, Homo sapiens
gtagcgcagaagcagcagctgcccgcacgtggtaatgatcgtggccacccagtacgtgtccgggttgttcttattagccacttccaatttcattcctggctggaagttgctctgaatgctga

SEQ ID NO: 170915 - DNA, 122 bp, Homo sapiens
gcctgggagcccccgcacggttcagacagaggggccaggctgaagctggagaggaaccagcgtcacacagacggcctctgagaacttggagaccccgttacccacccagcaggggtgtcagg

SEQ ID NO: 170916 - DNA, 122 bp, Homo sapiens
ggggccaggcacacagccgaggccgggaccaagggctgcagaagaaacagcacagccctgcgctgcttgcgaacaagctctagcgggggacggcagtagatacggatgctgcaattcatata

SEQ ID NO: 170917 - DNA, 122 bp, Homo sapiens
tacttgggaggctgagatgagaggacctcttgagccctggagtttgagtctagcctgggccgtttagtgagaccctatttaaaaaaaaaaaaaggtgacaagatggctatgtgatctttgca

SEQ ID NO: 170918 - DNA, 122 bp, Homo sapiens
tgaggaggaagggagagatgggactcagcgccgaggacggcgtctgggccgtgatcatctcgcaccagcagtgctgggccagcacctccccgggcaccgacctgccgctgagcgagatcccg

SEQ ID NO: 170919 - DNA, 122 bp, Homo sapiens
agccaatgctgacccgggagcgccatcttgtgggcgcctcgattgctgcctccgagaaggcgctcgggtacgtcttattccaccgtttcaggacttggggaaatgtagccaataattacatg

SEQ ID NO: 170920 - DNA, 122 bp, Homo sapiens
tatggtttggccgtgtctccacccaagcctcttgttgaattgtagctcccgtaaatcccacgtgtcctggagggacccggtaggaggtaattgaatcatgggggcgggtctttcctgtgcta

SEQ ID NO: 170921 - DNA, 122 bp, Homo sapiens
ccctcgtgtctgcaaggcgaatatgaccatgtttcatccccatgtctgtgttggacacagcgtagtctcaatcagacccggtcacctccctttgctgccatttgagagctgatcgatgctgg

SEQ ID NO: 170922 - DNA, 122 bp, Homo sapiens
ttggggtcggcttccgtcccttgtagcactgccttctgggtaatgtagtttgacggaatccgggtggtacctggagcgcactttctgttctcggtgaggcggcttctcaaggctcccaagaa

SEQ ID NO: 170923 - DNA, 122 bp, Homo sapiens
caggaaggctgcaagggcagaacaagtcaatagggcaggccaagttctctaccctgctagcgctcttccctaggcctaagcagggtctctcttttctcttcagtgactgggggccacactca

SEQ ID NO: 170924 - DNA, 122 bp, Homo sapiens
cccaattaaggtggtttttccgccgccgctcaggcacatgccggaggccagcaagttcggcgcccgtggccgatcagcggttcctcacgccaaaactcggagcctgtggccgtcacgactca

SEQ ID NO: 170925 - DNA, 122 bp, Homo sapiens
cagtgcattggccagtgatgacgagtggtttctacctgtgggtgggtaagtatgaaatgccgagacgaaatcccaaccaattccagagactacttggtcttgcagaaaaaacactcaagcca

SEQ ID NO: 170926 - DNA, 122 bp, Homo sapiens
cagggcagtcttgagcagggtcagggaggggtgctgtggaggggcaacctccagccgtcccgtgtggccaagagctttcagagacagggtgcccctgccaccagacagtgaggagttgcaaa

SEQ ID NO: 170927 - DNA, 122 bp, Homo sapiens
cctgccgcccctggcactcagcgcgggccagaatcggggactggaggcctctggccatggcgcctggagacggggtcgcgcagaccccggacacccgaggggggcgcagcaggccagggcaa

SEQ ID NO: 170928 - DNA, 122 bp, Homo sapiens
gcgcaggcctactctgggcgtggcctgccgctgcgtgtttttttcacggtttctcattctcggtcgctaggctttgagggtgctggggttgctgctgcagagaccagaaaggcaggcgtggc

SEQ ID NO: 170929 - DNA, 122 bp, Homo sapiens
cgggcagccccggccgggggaggatggaggcggatacgtcctaagagctcgctaactaaacggcttaccatggctgcgttaggcaaggaaagaggacctccgtcttccggtgcgcgtagaaa

SEQ ID NO: 170930 - DNA, 122 bp, Homo sapiens
ccgaggcactgttccaggcctctaagggccagagtgtcagacctgagtcttctctggcatcgtagatccttaacacggatcagcaaaggaagctctccaggactctctttgactatgagagg

SEQ ID NO: 170931 - DNA, 122 bp, Homo sapiens
gccgggccgggtcggtcgcctacgcaacagaaggatcatttcttttaaaacgggatggcgcgttagagagggccactgccaagctggagctggaaacttctgcctccatccactttccgctc

SEQ ID NO: 170932 - DNA, 122 bp, Homo sapiens
tgagtccgctttccggccaacccctcctctcagtcttaggccccactgcaagcctactcccgctcaccgtacagaacctaagcacaggatcagagatggggacaggttgactcagtcccatg

SEQ ID NO: 170933 - DNA, 122 bp, Homo sapiens
tgcagctgcagaatctccctttctgcagaactgttgcctccctgctgtagaccagtggttcgccactgggggcgattttacccctcaggggacatttggcaatgtttggagacatatttggt

SEQ ID NO: 170934 - DNA, 122 bp, Homo sapiens
gctttgaaattcttctcttcctcagtgatcactcgagctttctccttcttatagacattccggatgggcatgaccggtccggtcagctgggtggccagtttcagttcttcagcagaactgtc

SEQ ID NO: 170935 - DNA, 122 bp, Homo sapiens
cctgcctgtggaataaacaaatcactcctctgggttgtctagctggtgcaggccccagggcgacgcccctttgaggggaaaatgggggcattccagtttccatgagccctgggactcccctc

SEQ ID NO: 170936 - DNA, 122 bp, Homo sapiens
tggccgagtgtggtctgaccacacttgatccaaagcccttcctctgagctctcagctccacgtcacaacctcgtgaccacgtgcctctcactgtcatgtgcttagatatgtgtgtgtgtgtc

SEQ ID NO: 170937 - DNA, 122 bp, Homo sapiens
cgcggtttgcatgggatggggtgggggcgggctcccctagggacaggtgcctcgagtgcccgtgcctggggtcccgcggccgcttcttcatctcaggaatctctcggaccgcggatcctcag

SEQ ID NO: 170938 - DNA, 122 bp, Homo sapiens
ggagtgccagacagtgggcgcaggacagtaggtgcagggcaccgtgcgcgagccgaagcacggagaggcattgcctcgctcaggaagcgcaaggggtcagggagttccctttcctagtcaaa

SEQ ID NO: 170939 - DNA, 122 bp, Homo sapiens
atattacgtcacagcatatgataaaatgatagtataagtatcctcagagcctgtggcctccgtgcaaggggatgagtggaaagatggtcagagaatgggaagtgtgagatagagagtatgga

SEQ ID NO: 170940 - DNA, 122 bp, Homo sapiens
caacagcgtgcacattcttccccagggcaccacttccgcctccctcatccccactgctcccgatccctgtccacagacccacttcccgccctggtgtgatcctcgtggccactgtggcccct

SEQ ID NO: 170941 - DNA, 122 bp, Homo sapiens
tcctgcacgcagcggccgcgtctccacgccttcctggagcagaaggttgcctgcccgctgcgtggcccccgggttcccagacagcccgccccgtccctagcgctccgaaatggctgccacct

SEQ ID NO: 170942 - DNA, 122 bp, Homo sapiens
catggggctgctctggatccggttccgcatgctgtacctgctgctggcggcagaaggcggcgttcggctgcggccgtacctggggccggaaaaggacagactccgaggcatcaagccttcgt

SEQ ID NO: 170943 - DNA, 122 bp, Homo sapiens
acacccagtacaccttcgagatccaggctgtgaacggcgttactgaccagagccccttctcgcctcagttcgcctctgtgaacatcaccaccaaccaggcaggtaagtgcttccgacgtggg

SEQ ID NO: 170944 - DNA, 122 bp, Homo sapiens
gggagcggagacggagaacaggttatgtgggagccggcgggggcatttgccggcgacacccgagcgggggccggaagtggggccacagctcgcagcaggagctccgggctagaccgtggcgc

SEQ ID NO: 170945 - DNA, 122 bp, Homo sapiens
tgcaaccatccagcagccgccgcagcagccattacccggctgcggtccagagccaagcggcggcagagcgaggggcatcagctaccgccaagtccagagccatttccatcctgcagaagaag

SEQ ID NO: 170946 - DNA, 122 bp, Homo sapiens
tctatcccagtctaccgctgctctctcaggggcatttgtgtccccgtttagggtcctaaacgagctgccgagggaggggtgcaatgaagcaatgcgacttaccgcaattaataatctcaatt

SEQ ID NO: 170947 - DNA, 122 bp, Homo sapiens
taggcaatcaacttttgcgtactcacttccattgtaggatcatgcatgcatgtggacgtgcgcacacacacaaacacaaatgcacacacacacacacacctgccttctcaaacttgtgggac

SEQ ID NO: 170948 - DNA, 122 bp, Homo sapiens
ggatctgtgtaccgtgtgccattgtgtgatcggtccgctgtgggggtggggatctgagtgcggcgtgtcagtgtgcagtggagtgtgcagtctaagcttgcggctgtctccaggcagaagag

SEQ ID NO: 170949 - DNA, 122 bp, Homo sapiens
ttgtaaaagaggacaaaatgtgtgaaatcactgcttttagacattcagcaaaagacaccacgtgactatgatccctgaaagaagggcaaaaacatgagatgagtcctgtaattgtaccagct

SEQ ID NO: 170950 - DNA, 122 bp, Homo sapiens
gctgagtcctggccgccggctctttatgcagccagcgaggcccgtgggcggccggctcgccgagcccggtttctcattggcccagccgcaggctccccgccagcgccccgcccgcgcccctg

SEQ ID NO: 170951 - DNA, 122 bp, Homo sapiens
cgagggccgcactggggagggggccaccagggtctcctaccttgaagggggagaggtgggcgtggcccacgaccccgtggccagcctcgaggtgggacaagttcctctccgccacgtgcacc

SEQ ID NO: 170952 - DNA, 122 bp, Homo sapiens
atcctcctgcctcagcttcccaaagtgctgggattacaggtgtgaaccactgcacccagacgtttactgggtttaaatctgagcccaccccactcaggggtacaggatctggttcatttatc

SEQ ID NO: 170953 - DNA, 122 bp, Homo sapiens
cagcactagttttttgcctgggaagtcgtggacagtaacagtgactggaacatccccttgcgcgtcgtgggcctccagcaccatggtctcctcgctctccagccgcaagatgttgggggtga

SEQ ID NO: 170954 - DNA, 122 bp, Homo sapiens
ccttccttgtccctaagaggcatcttcctcaggggctggtggagctgccatgaaagcaaacgcacagccaaaccccgggtggggggaaggcaaactgcaaacgccgcggcgaccccggcaca

SEQ ID NO: 170955 - DNA, 122 bp, Homo sapiens
gaactgtggcgcttaacccaagactactttcccacgacaatgtctctgaccacagagagtcgatctctgtgctagttaggaattggtggaaagtttcccctaggagaaaggaggtgtgtgac

SEQ ID NO: 170956 - DNA, 122 bp, Homo sapiens
tagcccgttgtgctttgcttcaataaataatggaaagaaagaaaggcagggacaaaaacccggggctggatttagagagttctaaacctttggtttgacagagcatattttttacacttttt

SEQ ID NO: 170957 - DNA, 122 bp, Homo sapiens
cattccagatggctcatatactaactaatttaagttggaaagaatgctaaattcacatctcgctggggtgctaccccagtgtagggatagaataaacagtcacaatatgccaagtgaattat

SEQ ID NO: 170958 - DNA, 122 bp, Homo sapiens
tgtgttttaagtcttttacaaaaccccatctggcatttgggaaagcatacggcggggacgcgcgagaaaggcaggcgccctcctgtgcccaagaggcctcattccccacgcctcccgcagat

SEQ ID NO: 170959 - DNA, 122 bp, Homo sapiens
aagcccgggagctgagtccgcggcgtgaagcggcggaggtcagcagcgagggggcagggccggcgctggcggccacggagcttgcgcgtcgctgggctcggaacccagggacgcgagccagc

SEQ ID NO: 170960 - DNA, 122 bp, Homo sapiens
acctgaaatgtgtacatcctatggtgccaccatgaaaatcaagacatgctgtcacttaatcgctctcatttcactagaggacacatgagctcatgaataacggttgaccccttagccaaaga

SEQ ID NO: 170961 - DNA, 122 bp, Homo sapiens
ttcaggatgtctgcagtgacagcttatcatgaactgtcaggaactgttgagaagggcttacgatgatctttgtaaaaagaaacatctcgtaagagtcaggactctgggcggcagcggcagag

SEQ ID NO: 170962 - DNA, 122 bp, Homo sapiens
tcgcccacgacccgggctgggggataactcaaactttccgtgcctggaaaggctgcctggcggcggaggcggcgccggcgcgcggagtccctgcgggcgcccgcacatcccaggcagctgtg

SEQ ID NO: 170963 - DNA, 122 bp, Homo sapiens
cacatcccggatggtgcctgtgtgtgaccatcacacgcgctctgagcccccagggtgcagcgggcaggcaggtcacagggtgcctggctgattcccggggaggctgtgggccctcaggcagc

SEQ ID NO: 170964 - DNA, 122 bp, Homo sapiens
cagtaaaaaaaaaaaaaaatccccacaccccactgctgtggagcctgcccagtcggatttcggagcccgcgagggccatgacctgcaacacatcagtgaccaggagatgcccaaaagtaagg

SEQ ID NO: 170965 - DNA, 122 bp, Homo sapiens
agtttgcagtggtgtctctgtgcatggttatggtctgggtgaaaaaattatgtttattagcgtcccaaatctaaagatctgtgaaaatgagtttggaggtagtaggtgaaaaaccaagggcc

SEQ ID NO: 170966 - DNA, 122 bp, Homo sapiens
tctgctgtggccgagagcagatgatgaaggctgcaaagcctgaccattcagattttctgccggacgctgaggtggcaaaataaaccaacacagagaggtgtgggtcaggcccgggatgtctg

SEQ ID NO: 170967 - DNA, 122 bp, Homo sapiens
ccacaaacatccatacaatttgaactctgtcctcaagcgagataacgccatcctgggtgacgtgacctatttgcagtcccttcgctccagccgctattgcagcgcgtggcttctaaaatctc

SEQ ID NO: 170968 - DNA, 122 bp, Homo sapiens
ctacataaatatatcaagcccagggaaaaggtgaggagcgcgggttggtagcccttcgtacgtgctccggaaggtgggaactggtaacaggaatcttgcacttggtggacagtgacaggcgg

SEQ ID NO: 170969 - DNA, 122 bp, Homo sapiens
cttaagcctccctacacaatggtcccactacccagcagcttccagcaggcagaaatgcagcggtggcagaggcctcaaatggaattcgctgaagcaggcatccagggggctccccccaccca

SEQ ID NO: 170970 - DNA, 122 bp, Homo sapiens
cccctttatgagaaacctaggatctgtcatcaacctcatttccttgtggttgattttgtgcggattggctcaacacttatttctcagcgagcccggacaggtgatacttgtgctaattctgt

SEQ ID NO: 170971 - DNA, 122 bp, Homo sapiens
cggggcctcagctccagctgggcccgggggcgaggctggttggggtacggccatagtgggcggggcctggccggcgggagcgcaccgccttcccaaagggctcgggggcggggccggcggag

SEQ ID NO: 170972 - DNA, 122 bp, Homo sapiens
cgcctcgagtgccccctcgcgcccaggggtgggagtacagagccaggctcgccattccatcgtattaggtcagtaagattgacaggcacgatacgtatcaataacattgctgtgcacaacac

SEQ ID NO: 170973 - DNA, 122 bp, Homo sapiens
ctgggccccagccgcctgcggcaagccttctcactcaccctgaccctcctctccagtgcacgcctgacgacttctggaagtgcctctcggttttcgccatctgactgcgattgcctccgcgt

SEQ ID NO: 170974 - DNA, 122 bp, Homo sapiens
tatctcatggctcaagatgaggctgtgactgtctggggccagaagtgaccagttcccagacgtaaacaatggttcacagaaaaacacttcagagtgagagggttttagacacaggtgtccca

SEQ ID NO: 170975 - DNA, 122 bp, Homo sapiens
acttctttggggaatgagaacaaacaggcggaggggcacaagcccaccagggccctccgccgcaccgcgcaggtgcggggcaggcacatccgcctccgggcccctgggctattgtttgctgg

SEQ ID NO: 170976 - DNA, 122 bp, Homo sapiens
acacccctgctcaccggctgctggaggcggggctctcggtggcggtggtggcggccaggccgggtggctatactgctgtgcacactgtgctgactgtgaactccgcctcgctggccatgatg

SEQ ID NO: 170977 - DNA, 122 bp, Homo sapiens
cctccggcaacccgagacgtccttctggcagggtccaagcactcacccccttgccacaggcgccttggcccaggttcccacttgtctttattgctcttggggccaatcaccgacccggccac

SEQ ID NO: 170978 - DNA, 122 bp, Homo sapiens
cccaggcccaccgggccaggggcctggagcctggagcctgcagggagaacaagaggaggacgctggctcgccctccagagtgaatgtatggactggccccaggcccagagctgactagatga

SEQ ID NO: 170979 - DNA, 122 bp, Homo sapiens
gaacccctcaggcagttgggggccgcggggccgggaaggtcactgccttttttgggagcccgagcaagccagtgagtttctcccttgggctgtggtctctgacaacgaggtatgaacagaca

SEQ ID NO: 170980 - DNA, 122 bp, Homo sapiens
gctgccctcgccccgggagttagggtgagcccaggggactgacctgggccagctgagagtcgaggggcctccgggccctccctagccccgggcgcctgttcatcggacctaccttgaaaagg

SEQ ID NO: 170981 - DNA, 122 bp, Homo sapiens
cccggcccgggggaccctgctggccaaggaggtcgtcagtccggtcttgtcttccagacccggaggaccgaagcttccggacgacgaggaaccgcccaacatggcctcggaggtgagtggga

SEQ ID NO: 170982 - DNA, 122 bp, Homo sapiens
agcgcttacaaggcacttgataaagaagctctctgatttatagcaaacaccattattgagcggtggcagggagaagccattggggatttgtcttgctggaaactctctctgccggagccatt

SEQ ID NO: 170983 - DNA, 122 bp, Homo sapiens
tgctcgagtggggccggggcgggcggagagcgaggctgcgggaggcagcggtggcaggagcgggtgggcgggggcgctgacgtcagacccgggcccgggcgccggcggccgctcccctgcca

SEQ ID NO: 170984 - DNA, 122 bp, Homo sapiens
atagtcaaaggcggatcttcagtgacccatgaattaagtctttctagtcacagccatcaccgttccttactgccagcaccaccacctacatatgcacacacactctgctcaatgggttctcc

SEQ ID NO: 170985 - DNA, 122 bp, Homo sapiens
ccgcccgacgtgcattcccggtacggtagggccctgcgcgcacggcgccagagggatgggcgggtagagccaactgcctctggttctgctggcctccgctgctcgcgaagggattcctgctc

SEQ ID NO: 170986 - DNA, 122 bp, Homo sapiens
cactgcctctccctcccttccccgcagtaatttttaccaggcaaaatctagtgaggatggcgagaagcttagacaggaagctggggggttcagatctgggaaagcttcttggaagaggtaac

SEQ ID NO: 170987 - DNA, 122 bp, Homo sapiens
tggactaataggaatgcaaaacagtttcttctggactataatagttgcatttacttttatcggtattttcactgtatattatgtgaataaattatgaagagtgtctattttttacccttgtc

SEQ ID NO: 170988 - DNA, 122 bp, Homo sapiens
gccagatcaaggaaagagacaggaaagcagatgattttacctgccttccctaagtgcactcgggaagagaaggatcatctcaaaaagggttaaggaatgagatcatggaaatcacttacaca

SEQ ID NO: 170989 - DNA, 122 bp, Homo sapiens
gggcgtgaattacaatccccagcatgcaccggagtagcgggcgtcatcaacaaccccctacgtgccgcgcgcggcctctagccctcacctgtgctctgcttgttctgtgcataaacaagggt

SEQ ID NO: 170990 - DNA, 122 bp, Homo sapiens
ggctagttgagaggacggtggggagttattttcagagggacatggccagtgctgtggtcacgggagagaagaggatggagctgaggaaacacaggtcaatgttaagcccagcagactagaac

SEQ ID NO: 170991 - DNA, 122 bp, Homo sapiens
agggctaccttgctgtcgtggtggatgagcttgagctcatagtccggcaggatgtccctgcggctattcacgtcctccagcgccatctccaccgcgggctggcaggcctggccccctggcca

SEQ ID NO: 170992 - DNA, 122 bp, Homo sapiens
ggggaggttgcctttgctgctcatctgaatcatgtatgggtccatcactagcgaagcctgcgaggggaaagaagttccctgtgatgttgataacatagcgctgggggacagaggagctacat

SEQ ID NO: 170993 - DNA, 122 bp, Homo sapiens
attattattattattatcgaaacagagtcttgctctctcctctaggctggagtgcagtggcgtgatcttggttcgctgcaaactccatttcccaggttcaagcaattctcttgtctcagcct

SEQ ID NO: 170994 - DNA, 122 bp, Homo sapiens
gatacatccatgcctgaaggcctacttctgacattttcagttatgtggaaccatcagttgcgtttttgttaagccaatgtaagtgaggttcctgtgggtggcggtcaagagttctgcctgtg

SEQ ID NO: 170995 - DNA, 122 bp, Homo sapiens
gccatcacaatctgggtcattggttttttccatgccctgctgcactccgtaatgacttctcgcttgaacttctgtggttccaaccgtatccatcattttctctgtgatattaagccattgct

SEQ ID NO: 170996 - DNA, 122 bp, Homo sapiens
caggtaatgtcttagacactagggataaaacaatgaatacctccacattctggcctctcacgctctagggctcactgtgtgccgggcactcggcatgtagtctcatgactcctcccaacaag

SEQ ID NO: 170997 - DNA, 122 bp, Homo sapiens
ccttggggttgtagcaggtgggggcagtcctttattctgtacacaggaggtgctcagggccggttgtcacagtgccatcctgctgtagctggctgtctgagggggagcaggacagactctca

SEQ ID NO: 170998 - DNA, 122 bp, Homo sapiens
ctatgctttagcaaataacctggctgcattgtgcccctgctttagggatctgtggaacttcgaacttgagagtgatgatttagggtatctggtggaagaaattcctaagcatcagtgttcag

SEQ ID NO: 170999 - DNA, 122 bp, Homo sapiens
tttctctacatgcaggcgccatttctgggtcaaacgtgaagcagccctgctggagaaacccggagaatgacttggctgccctctctgcaggcgtctggaaccaagtggcggtttggaacccg

SEQ ID NO: 171000 - DNA, 122 bp, Homo sapiens
cggcaaggcccggagtccccgccctgccagggaggccgcctgccttcccacactgccggccgccagcacctgcccaggggggccgcagcgccccatgtgccccgccctgcagccttgcagct

SEQ ID NO: 171001 - DNA, 122 bp, Homo sapiens
ggtgaaaatttacggacagcagatgactgcggaacgaggaggagagaaacaggaaggcggcgtttgctctttatttggaataattagcaaagcagaaccagctgaaggctggcaccatgtac

SEQ ID NO: 171002 - DNA, 122 bp, Homo sapiens
ccagagttgggcggggtggggagggtgcacgtagtcactgcgcaggccccagccagggcccgcgccgggccagcccgggaagggacagccgggagccagaggggaagtgatggccccgccgg

SEQ ID NO: 171003 - DNA, 122 bp, Homo sapiens
gccgccgctcgcagcgaacaaagaataatggcggcggactggagccagcggcggccggggcggcagcgactctgcctgcagccagcggcggcgctcatggcggggggcggcgggcggcgggc

SEQ ID NO: 171004 - DNA, 122 bp, Homo sapiens
gccgaggccgaggccgaggcaggaggatggcttgaggtcaagagttcaagaccatgttgtcgcaaatgataggatttcattctttcgtatagttgaatagtgttctgttgtatatatctcac

SEQ ID NO: 171005 - DNA, 122 bp, Homo sapiens
gaacaagacagagagggtctcactgttgagaaaaatttattatcaatgtctcagagccaacgacgacacgaacctacatgaacacaactcttaatttaggacccaagggtgactgtaaacat

SEQ ID NO: 171006 - DNA, 122 bp, Homo sapiens
tccccgctgtcctctaagccgggagcgagggaaggagggttcccagccctgaggaccaatcgacaggtatagggagaagatggactgaaaaacaggccaatagtaatgaagaagagaagctt

SEQ ID NO: 171007 - DNA, 122 bp, Homo sapiens
cggacttctgggctgttcggaggccctggcccacctggagggccctggaagagtttccagcgcttcccgaggtaggcgtgagaagctcgacgcggaccacatctccctcatgcaccgcccgc

SEQ ID NO: 171008 - DNA, 122 bp, Homo sapiens
gctggtcccagccagacccagaaaaattagattaactcggagaagctcgccaagacgatccgtcaggccgcctgaaggacagcgtattgatttccacgttgcgaaaaaattaaatgatatcc

SEQ ID NO: 171009 - DNA, 122 bp, Homo sapiens
ggcgcggcagggagcgggacaggtggcgggagagccgcgagcaggaggatgctgcggggccggcggcgcggggtgggcagggcgcgctgcctgcaggtcagagggcgcagcctgcggcgggg

SEQ ID NO: 171010 - DNA, 122 bp, Homo sapiens
acagagggaaactgcaacacaaattctgacatcaaagcccggggaagcttccgtggttggcggtactctgcgaattgtcatacatcacagcaaggaggaggtgatgccacacccgttggcgg

SEQ ID NO: 171011 - DNA, 122 bp, Homo sapiens
gggcaggcagaactgagcgagccctgggcagccgaggacagggtaggggcaggctctgggcgacggctccttaccagcggcgcctggcctgctgagggtggggggcagccctcattcacccc

SEQ ID NO: 171012 - DNA, 122 bp, Homo sapiens
tgtccgccgtttccacggtcttcacaaagagtactttcataggggcggccgctcgggccgcgagtccaatttatacaaaaatgttgtatttttagccctgggctctgtttagatggcgctcg

SEQ ID NO: 171013 - DNA, 122 bp, Homo sapiens
aataagaatcagcagatccaccagtgacttcaaacttccaggctgcagagctcatgagaacgcgtatccctctgacggcttcagtgtcctcctctctgaaagcccgccctcctttaatgacc

SEQ ID NO: 171014 - DNA, 122 bp, Homo sapiens
gggaactgcccaatttacagcgccaggggacggactggggaattctccaatcagagtcgccgacgttggcagcactgtccaatcagaagcgcggcttcccgagctctgtctaatcaggcccc

SEQ ID NO: 171015 - DNA, 122 bp, Homo sapiens
tcaggcccagctcgtccgcaacctaatgaaagccgaggtgggggttgtccaaacatctcccgaccctcactctgtgcctgacctgggccgcgccctgagccaccgcgcaattgcccacattt

SEQ ID NO: 171016 - DNA, 122 bp, Homo sapiens
ctcggcttactgcaagctccgcctcccaggttcatgtcattctcctgcctcagcctcttgcgagctgatgttttttaagatctgaagtttgatatatacagtcattaattcagagttaagac

SEQ ID NO: 171017 - DNA, 122 bp, Homo sapiens
caaaagaaagaaagaaaaaaagaattctgcttggctagattggaagggctaggatgtaagcgaaaagagaggcaagagtcagcatcagagatcaagggtgcaattatgtgtcacaataagga

SEQ ID NO: 171018 - DNA, 122 bp, Homo sapiens
gcgccaggcccgggtccgctactaccaccaactgagccaacatgtgaccgtggacgtgttcggccggggcgggccggggcagccggtgcccgaaattgggctcctgcacacagtggcccgct

SEQ ID NO: 171019 - DNA, 122 bp, Homo sapiens
aaacgggcagtgtgcagtgttgagggggcgctggggaaacaagctgccggctgaggaggccgcactccccgtgcctcccgggcagacacctcacggcctttctctgggtgtctgaacccaag

SEQ ID NO: 171020 - DNA, 122 bp, Homo sapiens
accagaccgggggaggggtcctcctcggcatggaggtaggggatgctaggctgctggagacgcccgcagaaagaggcgggatggcggggcggatgctggcggcccgggtctggccacctggg

SEQ ID NO: 171021 - DNA, 122 bp, Homo sapiens
cgccgggggccccttctcggcgctcttgtccccggggtagtcggaggaggcgaggttttccggggtgccgtaggctgtctcgaaaaactggtcgaaagcctgtggcaggacgccgttcctgc

SEQ ID NO: 171022 - DNA, 122 bp, Homo sapiens
aagcagccagcccagaaggcacttcttcagatatgtccacattatctcctatgatctttgcggtgacatcctttgggcacatgaaaaccttacttttggttgatttctctgcttcctgcccc

SEQ ID NO: 171023 - DNA, 122 bp, Homo sapiens
gccggtggagggaaacatgtcagggtcacagcgaaggaaaccgagacccacaggggtccccgggcgtccgggacgcgtcgctggttttgctcctagaaggaaaggccttcccgcttttgttc

SEQ ID NO: 171024 - DNA, 122 bp, Homo sapiens
gagcgtttgagttcagagtacagctattctctctcctcgtaatgtaaacacaggttcccacggcggcaatgggagactcccctaaggggctcttgacgtacagggagacttccagatatggt

SEQ ID NO: 171025 - DNA, 122 bp, Homo sapiens
gtgaggtggcccatctgtgggattagataatcaaatgacctcacccagctcacaggacctcgtgcatatcaagcatgtaggcacctccttaaaaaccccacaaagtcgccgagcgtggtggc

SEQ ID NO: 171026 - DNA, 122 bp, Homo sapiens
cctgcttgccagctgatgagtctcactctgcgctagtgctgctctagacttgtcaggaaccgtgctagcctctgggtcctagtgcccccctgcttcacgtgggccagaaactaagggctggg

SEQ ID NO: 171027 - DNA, 122 bp, Homo sapiens
ccacacacagctcccttcatcttttagtaaacttcttgtatctccatctgaacagagactcgcaatccagtgatcacagcagctatgcacaatccttcaacttctccacttattacaaccct

SEQ ID NO: 171028 - DNA, 122 bp, Homo sapiens
gtcccgcctaagagggtcaccctaaaaacaaggaagtaggcagtccagtcctgacctgctcggagttgaagcagtcggcgttggaagagcctgaacacccggcctaccacttgtccttccat

SEQ ID NO: 171029 - DNA, 122 bp, Homo sapiens
agaatgaaatctgcaattttttattaaggactgcagggcccgacataatctggcttttgtcgctctggccctacctcctgctctgcctccttctttctagcctggctggctgttttgcacct

SEQ ID NO: 171030 - DNA, 122 bp, Homo sapiens
gatctagtctgatccgtctccccctgacctatcggtccttggagagtacaacctgggtcccgacagatgctgatgagataattgctccaaggaagtagcatttaccaagcatcttaaagttt

SEQ ID NO: 171031 - DNA, 122 bp, Homo sapiens
acacccctggcccccccggggggcggtgcgaggtaagggcggggccgggcggactaggagcgcgcgtagaggggggggcgccgcgcgcgtggggcgggggcgcgcgtgtgcgtgggcgcggg

SEQ ID NO: 171032 - DNA, 122 bp, Homo sapiens
gtgcacgtggggaggagccgaaggatggggctcggggggcacgttgcagggcagaggcggcggggtggggggagcacccaggctccagtccctggagcctggggagccatggatggagagga

SEQ ID NO: 171033 - DNA, 122 bp, Homo sapiens
taatctgggttagctattctgtatttcattgattacaacactgcttttcacacatcttaacgtatctacttgtgaaataccttacctatccccactagtctataaatccctaagagcaagtc

SEQ ID NO: 171034 - DNA, 122 bp, Homo sapiens
ctccccagccctccctggcatgggccatctccagggctgtcccgagaagggcatagactgcggacagtcccagcaaagccaagcagaagtggcggtactttccatggcattctcctccttca

SEQ ID NO: 171035 - DNA, 122 bp, Homo sapiens
cgccacgcggggcaccgctcccggaagctcggtgaacacgtagtacatcacgctctggcccgccatgaagtgctgctccgccgtctccaggaagcgctccaggtacttctccaggtatctaa

SEQ ID NO: 171036 - DNA, 122 bp, Homo sapiens
gtgttggggcagggctgctctctgagctggggcggaggagaatgaatgcatctgctcagccggctcggctgggtggcttcacctagctttgccgagccccctcccacgccagctgggccccg

SEQ ID NO: 171037 - DNA, 122 bp, Homo sapiens
gtgacgcaggaatcgggactccgggggagcgacgcccacttttggagcagtttgcgcctgcgcggaacgcgtggccggcttccggaatcctaccgggacttttccggtagcgaagcccgcgc

SEQ ID NO: 171038 - DNA, 122 bp, Homo sapiens
gaccgcgcaggctggggagggggaacgtggggaaggcgcaccgcactcccctccccgccccgcctgcgccccgcttctgcagtctgggagaggtgtctctggtctcccagcccaggccgcgg

SEQ ID NO: 171039 - DNA, 122 bp, Homo sapiens
cacgccccgtgccctggttgctcctgagctcaagccattggttgacccaagcataggctccgccccttcttcctgggtcctccaattgctacaccgcgcctgcaacaaacaggcacgccctc

SEQ ID NO: 171040 - DNA, 122 bp, Homo sapiens
tcaggaggcacatgatgtcggcgtgcccagcaggggtgacggtgacgcccatggcctggccgaggtggtagccttttgctgctgtaaagcgactcgtgttccctttgtaattaataagtaat

SEQ ID NO: 171041 - DNA, 122 bp, Homo sapiens
aaagaatatatataattttaaaatctacttaaagctgctcaggccgggtgcagtggctcacgcctgcaatcctaacactttgggaggccaaggtgggcggatcatgaggtcaagagattgag

SEQ ID NO: 171042 - DNA, 122 bp, Homo sapiens
taactctaagctttttccccaccagaacaaatgacagtaacattttgtacaaaaagaaaacgtttttctattcacaccttgaatcattgctctccctgtctttgaaagttaattctgattaa

SEQ ID NO: 171043 - DNA, 122 bp, Homo sapiens
tcctcatcttcatataatgaagtctttccttctcattatgatctgacattaaccagcaggcggaccatgtctaggtgtcttgaccttttgaggttatgtggcttcctctgtaagatgaggga

SEQ ID NO: 171044 - DNA, 122 bp, Homo sapiens
gggcccagagagctccagccaggcagcgggttcgtctccggcgcaagaaggctggtgaggcggagtgcgcgcgtgcacgtggccgctcgaggcgccaccggccgcggggacgcgcgggctgt

SEQ ID NO: 171045 - DNA, 122 bp, Homo sapiens
ccacccaacatacctggagtgcaggcgaggtccaggcaaacgggaaagcgacttcttgtacgaatagccatctcaagatgaagccaggctgtggaaaacttaaggccatctagatgggaagg

SEQ ID NO: 171046 - DNA, 122 bp, Homo sapiens
cttaaactatgccactgggtggcagaggctgtataaaacgcacttgttttcatgcaggagcggggcaagtaaggttgagcctgactgtaaacctagaactgcggaaggactgggacttttgt

SEQ ID NO: 171047 - DNA, 122 bp, Homo sapiens
cacctttttccggagagatcccgcttaacttcccagcaccaagcccaggggcgtgggggccgcgctctgactctccggggagctcccagaggagactggcccctcgcccgcccccactctgg

SEQ ID NO: 171048 - DNA, 122 bp, Homo sapiens
cgcgacagatcgaacaaggacggggcccagaaataagcacagaaataatgcagttacacacgggcaacaccgaggccggcagggacgcccctgatggcagaataatccatctttagtcctca

SEQ ID NO: 171049 - DNA, 122 bp, Homo sapiens
gaagagagaagaaaggaagagggaggggagggaagagaagggaagccgaggggtggagaccgggaaagaagtaccaagacacaaaggaggaaaaattaggtcatcttcagggaaggggacta

SEQ ID NO: 171050 - DNA, 122 bp, Homo sapiens
cccaggggaccggagcccgagggagggacggcggccggacgagggcgccccctgggggagcggacagggacacacaactagcccaggatacagacacacctggacccacagactcagacctt

SEQ ID NO: 171051 - DNA, 122 bp, Homo sapiens
gcaccaacgcgcgatcccctgcggagtggagctaacaattcattattgaagcaccaagggcgagggcagcaagagctataagtaaccagtcgtcgccgccgccgccgccgccgtcgcgcgcg

SEQ ID NO: 171052 - DNA, 122 bp, Homo sapiens
attagctcatttttgtctccagatgtgcactacacactactccactgttaccccattatccgcagtttatggataaagaaactgaggttcagagggattaaataacttggcagaggtctcac

SEQ ID NO: 171053 - DNA, 122 bp, Homo sapiens
atctgtttccttttctctgattttttttttcttctcctttcaaatgaccacctgctttctcggctcttgaactcgaatggattgttagcagcaaagagatgagagacctttctagctgctgg

SEQ ID NO: 171054 - DNA, 122 bp, Homo sapiens
caagccgccttggtgtgggtttgtgtcacgtgtggacatctcctcaggctttgtgtcacgcgtggacatctcctcaggctgtccccagcggtgacgggaggtgtcctggctgctccaggaca

SEQ ID NO: 171055 - DNA, 122 bp, Homo sapiens
gagccatgctagaggagaccctgggaatgggggaatgattacaggctgtgacctcactggcgcagcacctctcagcggcagtggaaaccacagcctagtcctctcaccactgcagaccagaa

SEQ ID NO: 171056 - DNA, 122 bp, Homo sapiens
gtggcaggtgcctgtaaccccagctacttgggagtctgaggcaggtgaactgcttgaacccgggaggcggaggttgtggtggatcgcgccattgcagcctgggcaacaagagcgaaactctg

SEQ ID NO: 171057 - DNA, 122 bp, Homo sapiens
ccactcctggcagaggctctcccactttaatgagcatccatatcactcatctggagagtccggtaaatacagactctttgtatctacccctagaaattctgattttgcaagtctggaatgag

SEQ ID NO: 171058 - DNA, 122 bp, Homo sapiens
caggatgcacaaaggcatttagacacttgcatctgtgtctgtcttccatgcgggacgattcggcagctctgggggtttctgaggctggaaggacttccctgagcagtggccaagccaagggg

SEQ ID NO: 171059 - DNA, 122 bp, Homo sapiens
atttcgtctcagcactgcacagactgccccggtctgtgtttcccaacacgtcctcaagcccgctttccacatggccaaggctgcccttcaccaacggggagtcccccttcagagagctgctc

SEQ ID NO: 171060 - DNA, 122 bp, Homo sapiens
tttctccttggctggaccactctgggccagcatgtgaaacccaccccagagcacagtccacggcaaacttcaaaggatgactggatcaaagactctctagaggagggttctccaaagctttt

SEQ ID NO: 171061 - DNA, 122 bp, Homo sapiens
cctcccttcctaacttttcgagaagcagcccttcagttaacatggatccatcacctctatcggctttgtgaccaaaaccctctgagctgccctctcctcattggtaagacagggacacgacc

SEQ ID NO: 171062 - DNA, 122 bp, Homo sapiens
tgtggaatggaaagaaactaagataggatcaaaaatacaaatcaagatgtgagagaaagacgatcaaaagccctcacgagggggctgggcgtgatggctcacacctgtaatctcaacacttt

SEQ ID NO: 171063 - DNA, 122 bp, Homo sapiens
gtctcctccgcttcctctcacttttcggacaaaccagtccttctgaggcccatgggttcccgggctgcctccggggctgctcctgtgaatggcattcgagtgcccttccagcgcggccactg

SEQ ID NO: 171064 - DNA, 122 bp, Homo sapiens
gaggggggggtctcactgctcagggcccgcgtgacattgcacaggtttagaaacgcacagcgggaaggtggccccggcgggccgagggcgcaggatccctgctccgtccagggtccgtcctg

SEQ ID NO: 171065 - DNA, 122 bp, Homo sapiens
ggggtttcatcgtgttagccaggatgatctcaatctcctgacctcgtgatctgcctgcctcggcctcccaaagattatatagcagtttggttacatagccagagccaaacaatactgaccca

SEQ ID NO: 171066 - DNA, 122 bp, Homo sapiens
gaataagtagcacctggggcacctgagatcattaaagggagccaaggaattttccattcccgcagccccaaagcctttggtgatgtctaactcctccaggggccccactctcagttttcaga

SEQ ID NO: 171067 - DNA, 122 bp, Homo sapiens
agcagggtgtcacacctggaaacctgagtatgatagctgacatttgcttttctccctctgcgatgtcattcctcctccattcctctccttccctgtgttccgttccctctcctttcctctag

SEQ ID NO: 171068 - DNA, 122 bp, Homo sapiens
ggctcgcttcgccacctgcggtcccctgcctcggcttgggaacgccaaggacatcccccacggaagcctgggcccacatccccatgcccttgccgcacgtcaccgccccgctggccccgaat

SEQ ID NO: 171069 - DNA, 122 bp, Homo sapiens
ggagtcagggctgcgcttcccttggcatgggcgtgtgtgcggcgagggcgtgtgtgcgtgcgtgtgtgagagtgtgtgtagagaaaccctttaggcagaccgcagctacgttattctgcaag

SEQ ID NO: 171070 - DNA, 122 bp, Homo sapiens
tgtggagatgcccgtgtgcctggggcgtggcctactagagggagtcagtgtggagatgcccgtgtgcctggggcgtggcctcctggagggaaccagtgcggagatgtcggtgtgcctggggc

SEQ ID NO: 171071 - DNA, 122 bp, Homo sapiens
gcaacttgtaaagtttgaacttagcttgggtgtgaatgatcattattagcgaatacgacacgctgacctccatttccaacctcaagcagagcttgaagggtgccacttccggggcagcaggc

SEQ ID NO: 171072 - DNA, 122 bp, Homo sapiens
tcttcccactcccctacccttaggtaggcccttagactccggcctttgagtccgcttctgcgcagggccggggctggaggcggggcgaaggggcggggccgcaggcgaacgcaagtcccgct

SEQ ID NO: 171073 - DNA, 122 bp, Homo sapiens
aagcatgtgcctcccgcggttctaggggctgagcacaccctggactgagatggacaaagccgttctcttccgctgtttagggctgagtcattgagcaagtgattacacgtggagtaaacgct

SEQ ID NO: 171074 - DNA, 122 bp, Homo sapiens
aaagttcatataatttttatgtgtcacaaaacaggattcttttgatttttttttttttttcgatgacttaaaaatgttggctgggcatggtggcttatgtctatagtcccagcactttagaa

SEQ ID NO: 171075 - DNA, 122 bp, Homo sapiens
cggggacacgcgtttctctataaatataggcctcgggctccggcggtttaagattacaaccgccggggcagagggaaaccaaatctttgtgggcgccgactcggcgagccccgggcgggcgg

SEQ ID NO: 171076 - DNA, 122 bp, Homo sapiens
gggtgtcgtataaaggactgctgctagggtgcgtttttatccgcatttcgttttttctctcggtttggagaggtggggcaggcgtttctggaagagaatgagaacgagtgaagcttaaagga

SEQ ID NO: 171077 - DNA, 122 bp, Homo sapiens
gctgaagattcgactggagtggaggggaggaggggcagggagccacaaagtagaggaggacggaacagaaacggaacagaatggcgccgcccccccagccctgcaggtgggactaaggggga

SEQ ID NO: 171078 - DNA, 122 bp, Homo sapiens
ccttgaggcagccagagctccccagagagtccctgtcatcctccccactctctgaggactcgctctccgactccgaggagcagaacttgtcgctccgctttccgaagcgaacctctctgcct

SEQ ID NO: 171079 - DNA, 122 bp, Homo sapiens
gaagttaagctttagaaatatctcactttggggcctaatttttgtgagtttctcagtctgcgatcagagttgtgttatcaatcacagtgaatgttcgtgaatggttgtgtgttgaaagggca

SEQ ID NO: 171080 - DNA, 122 bp, Homo sapiens
acataatcaattaatctaaatgaatgaggcagcactgaacttcctggcattagcagtgggcggaggaggtactcggttggacagtggagcgtcatctcgtccttgaaaccccaaggttaggt

SEQ ID NO: 171081 - DNA, 122 bp, Homo sapiens
tctggccggagtagtcctgcgtggggtgcggtgggggcggggcgtactcggcagggatgccgttctgtggcggaggggggtactgggcgggggggtagggctgggccatcgcttcaggcgga

SEQ ID NO: 171082 - DNA, 122 bp, Homo sapiens
ccaggagtaaacagcaccccagtcggcagccggcagccccgcccctcggcccgtttcctgcgccagccctggcaacaggccccgcccttcgcgacaagccccgccccgcgccatccgtctgg

SEQ ID NO: 171083 - DNA, 122 bp, Homo sapiens
tggggccgccgccaccgcggcaggacggggaggcgggccatggcgtcctgcgtggggagccggaccctaagcaaggatgatgtgaactacaaaatgcatttccggatgatcaacgagcagca

SEQ ID NO: 171084 - DNA, 122 bp, Homo sapiens
gctgaggactgggcggccgagctcgcggcccacttagctaatgccgggtaatgccgaccccggcccaagagcagcagctgcacttgggaaggaaaactctttaaacaaatcattttggtgtc

SEQ ID NO: 171085 - DNA, 122 bp, Homo sapiens
catgaggtggacgcccccggggaagacttgggtgcacagccaggcgagaaggtaaccgggcgaccgagggccggggaggggcaggacctctgggggcttggctgcgcggggatgtatcctca

SEQ ID NO: 171086 - DNA, 122 bp, Homo sapiens
ggaccgaggcccatacggcgaaatacgcggccatgggagatcgctgcagcgaccgacagccgcatgtttccaacttctgcccgccccttggaggccggaactggaaactggaaggtagagcc

SEQ ID NO: 171087 - DNA, 122 bp, Homo sapiens
ttaacatccaccaagtcctaataattttacctcctaaatgtttctcaaatctcttcgctccgctcacgtcactactcttgggtctttattgtctctctgtggaacagagtagcagcctcatc

SEQ ID NO: 171088 - DNA, 122 bp, Homo sapiens
ctgccgcagggcgccgggaatcagcactatgtcaccccggcacaatgcgtgcaccccacgcgaaggctgtctcaagagctggagaatcagctctgctcctgacaccccaggtcccctcttga

SEQ ID NO: 171089 - DNA, 122 bp, Homo sapiens
tcaggccagcgagggctctgggagcgagtctggctgccaggcgtgggctcccagtgtccacgtcaagccctgccggggacggggtggggggggaggcggggtggtgccctgccttccgttct

SEQ ID NO: 171090 - DNA, 122 bp, Homo sapiens
tagaagagaaaccctaacccagcgttttcaaaatgctgaaagcttatccattctacttaacgttgattaagacacatatcctagatctttcaaattccttgtacactgtattaagctcgtcc

SEQ ID NO: 171091 - DNA, 122 bp, Homo sapiens
taacgtcacaacttaacaaagccctctctcagcacgagggagctcctgcagaatctgtagcgaccggttccctcaggaatgaagttggttgcatttacccctctgttcaggaacgaagatgc

SEQ ID NO: 171092 - DNA, 122 bp, Homo sapiens
aataatggtacggctagcggaggggggaatagagggccctgggaaggcctcagggctcggcggctagtaccagtgcagaaacatccctcctgccgcagctttgtggtaccacccgctgcccg

SEQ ID NO: 171093 - DNA, 122 bp, Homo sapiens
ctggggatttcggttttggcttcagacctgcacaacattcagtcaatagcatttattgggcgtccactgtgcagggtgccccctgctacttcctctcctccccacatcctggggcagggagg

SEQ ID NO: 171094 - DNA, 122 bp, Homo sapiens
aggagccgttacccggtttcattttcagccaaaatccccgcaggttggtcctggcgagggcggggctcggtgggcggggctggccgcgggggcggggccagggtctcacacccatctagagg

SEQ ID NO: 171095 - DNA, 122 bp, Homo sapiens
gcccccacccccacattactcatatctcagctccaaggcagcaatagcaaatcactgtgccggagccactgcttaacatgttttacttccttttagttgagaagctttttggttggtgttca

SEQ ID NO: 171096 - DNA, 122 bp, Homo sapiens
tgtgtgaatcggaagctacactacgcgtgcgccacaacaggccgaatgtgtgcgcatgcgcgcggcccatatggtaaatagtaatgaagaatagtttaggaaagtacctgtacgggtggcgc

SEQ ID NO: 171097 - DNA, 122 bp, Homo sapiens
atctccagaatattgcgtggtcataaaacatcccagaagtgggctggagcaatgagatgccgaaaagcaggcctggctggctgccctgcacccaccctggaggggaccggctggggaaggtg

SEQ ID NO: 171098 - DNA, 122 bp, Homo sapiens
aaagacaaatcagcagcgtgagggatggactgcaaaggaacttgaggaatcttttgggggcgatggaagtgttctgcatgttgatggtgacagtggcttcatggcatatacatctgtcaaaa

SEQ ID NO: 171099 - DNA, 122 bp, Homo sapiens
cgggacctgcagcccgccttgcctgagcctcccccctacccgccgccgtaggctcctgagcggcctgagcctccccgacgagcaccgcccctgctccaaggcgcccagtcccatcgaccacc

SEQ ID NO: 171100 - DNA, 122 bp, Homo sapiens
aaggcgccgccgtcagattttaaagttccagccatcccctcaggccctgagtgagaagttcgcccgattccccgcggttcccgcctccatttcccactaaggagcagttactcaggctccaa

SEQ ID NO: 171101 - DNA, 122 bp, Homo sapiens
gaaggcagaggttgcagtgagctgagatcaaacccttgacctcagatgatctggccacctcggcctcccaaagtgctgggattacaggcatgagccaatgcgcatggcctaaaattatattc

SEQ ID NO: 171102 - DNA, 122 bp, Homo sapiens
ttttcatagtgactgattaagatcccggtgccgggctggcagcgggaggcgtgactgcagcgcgccacatctacagcatgaaaagagatcaacttccccagctctaatcacccaggaaagct

SEQ ID NO: 171103 - DNA, 122 bp, Homo sapiens
cggcggggagtgggagccggcccggctcagtctgatttacggctctgctgaaaaccgcttcgctcccgcagcatcagcaccggaggcggcggctgcagcagcagcagcaacaagtcgggtaa

SEQ ID NO: 171104 - DNA, 122 bp, Homo sapiens
cttccaccatggatgtgcatgtctcagccactggctcaggagagtcctcggaagggacttcggcgggcaggtaccctggagattttctggcccaagtttctttcaggcctcatgttggatta

SEQ ID NO: 171105 - DNA, 122 bp, Homo sapiens
cagcaacaataacaacaacaaaaagaagtttgttttaaactgagatattacttgacaacacggggttggagaacatttctgtttcaggcaggaactgtgatatctttatctgtgatgccctg

SEQ ID NO: 171106 - DNA, 122 bp, Homo sapiens
tgtccacccggaccccgtctgtgagcacttctgagtcaagcgcgggcgcgggcacgggcacgggtaccagcaccccgtccacacccaccaccaccagccagagccgcctcatcgcctcgtcc

SEQ ID NO: 171107 - DNA, 122 bp, Homo sapiens
gcctatgctctgccccatcatgccagcctgctctccagaggggctgaggacacagtaccccgaggatgacttgtggactggccaccccaacatccataccatgagaatggttcctgccctac

SEQ ID NO: 171108 - DNA, 122 bp, Homo sapiens
catcgtcctcaacacacaacatactcatggcaaattgtattatgagttgtttttaggcatcgcttcgaaactaccgcttcttcgtatgacacatctcagactacaccttctttggtattcgc

SEQ ID NO: 171109 - DNA, 122 bp, Homo sapiens
agccagtctcggggtcccactgtgcggataccggattggtaatccgaggcgagccctaagcgcacacgccattggtgggtcctgtgcggccgggacgggaaggcgcaggctctagggtgcct

SEQ ID NO: 171110 - DNA, 122 bp, Homo sapiens
attttgccatgttggtcacgctggtctcgaactcctggcctcatgtgatccacccacctccgcctcccaaattgctagggttgcaagtgtgagccaccacgcccagccaggaaagagatttt

SEQ ID NO: 171111 - DNA, 122 bp, Homo sapiens
ccctgcgatattgggagtcatatcatcggctcccacccagggtattaggaacaagatgaccgaagggatgtatacccactgccctattttcaataatgtcatcctctaccccctggctatta

SEQ ID NO: 171112 - DNA, 122 bp, Homo sapiens
cctcacgcgctggccatgacggccctggcaccggctgccctctggaggccccagtaagtccgcaccaccccggcgccatctcctgccagttctgcctgaggcagcagctgccaccaccgcgc

SEQ ID NO: 171113 - DNA, 122 bp, Homo sapiens
aaggaaggccgcgcgcctcctctccagcccgcagcaagcgggtgccacgaggcactcagccggtccccgaagttcctctcacgcggccccaagaccaccaccgtagtccaggccaacaagcg

SEQ ID NO: 171114 - DNA, 122 bp, Homo sapiens
actatcctcggtgctgtggtgcagagctagttcctctccagctcagccgcgtaggtacgccggggtgtgggcggggcagggaggccagaggactaagccgagccgcagcacttgtgagaggg

SEQ ID NO: 171115 - DNA, 122 bp, Homo sapiens
atatgagacctaaatcataccacactccaggccaggataagttcctggcaatattctatacgatcctcacacccacactcaaccctttcatctacagctttaggaataaagatgttctggcg

SEQ ID NO: 171116 - DNA, 122 bp, Homo sapiens
acagggcgggctgggcgaggacgctcccggggcctggaggcggagtcgggggcgggcgcgcgcagtcatctgactcggtgactcacccgcggccgcgcttcctctgatccgggccgggcggg

SEQ ID NO: 171117 - DNA, 122 bp, Homo sapiens
aatgtgacttcaatcactcaagttctcatcgaggcacactccccactgtcgcttctatctcgttcccagagacccacgggaaaatgtcacaaaatggcacagaaatgccaggatcaagaaaa

SEQ ID NO: 171118 - DNA, 122 bp, Homo sapiens
cgcggtggcttccatggaggttttggcagtgacattcagggcaagggcctgggcggaggccgcggagttcgaccaagtccctggaggaaatctgtctcttctccctgcccatcaaggaatct

SEQ ID NO: 171119 - DNA, 122 bp, Homo sapiens
actcagccctacccagcgcttgcgacaagtgaggaggttgcaggctcccaagtgctcgcccgccccctcctcctccacacacatagtttctatggcagccacagcgtcatcttctgtcaggc

SEQ ID NO: 171120 - DNA, 122 bp, Homo sapiens
ttgtctgaccccagcattgcttcctggctcctttcttcctttttcaggagagcatcctgccgaccacagccctccccactgtgagccttcctgacagcctcatcgcgccccctaccgcccca

SEQ ID NO: 171121 - DNA, 122 bp, Homo sapiens
cccgcatgctccacaccccatcccaggcaccgtgtatccaccttggtgctggtgcaggcccggccctgctggtagacaggctggcctgctcgcttgtccagcttggtccacagtgacttggc

SEQ ID NO: 171122 - DNA, 122 bp, Homo sapiens
ttggctcgcccaggacccacactgcatacacttaccgcttaaagaaacaaaatgggaggccgggcacagtggctcatgcctgtaatcccagcactttgggaggccgaggtgggtgggtcacc

SEQ ID NO: 171123 - DNA, 122 bp, Homo sapiens
agagtttgtgccgtgcactgaccatctgcatcctctctgcctcaccccagcctaggattccgtgacaggccctctgggaagaactccgcgaacaaccccctgccttggagtctgcaatcctt

SEQ ID NO: 171124 - DNA, 122 bp, Homo sapiens
gtcctccctccaaaagcagcctcagagccttctggaagtcaagggcagactgccaggatacgagcacagcaagaaagcaggtgccctcccctgcaaaccctcctctgcaccctctccgctgc

SEQ ID NO: 171125 - DNA, 122 bp, Homo sapiens
gctgatgaaggcaaagccctgtggaggggcgggatggggtcgggcacgagctaggacaggcgaccctaggacaagtgaccctcacacagccccaccgtgcctgcctgcctgcccaccttgga

SEQ ID NO: 171126 - DNA, 122 bp, Homo sapiens
ccgagaatccagtcaccaggtcactgagtcaccgatgggggcgaggacacgggcctgggccggtcagaggggcgggatcgtcacccctggctcaggggcccctccgtccaggcagggagcca

SEQ ID NO: 171127 - DNA, 122 bp, Homo sapiens
actgtagctgtctgcaggtaacaaactgcagaaagtgaactgcgggtaacgaggcactgccggtgtgatttacacgtccaataatgggactggtggaggatgttctggatcatcagcatcat

SEQ ID NO: 171128 - DNA, 122 bp, Homo sapiens
accctttctgtataatgtatagaaatgggtccaaaaaatgttgagatatgaggtataaagcgttcagtaagttcacagatggtcctgctagcaatagcatgtaagaaagtgaagcatatcga

SEQ ID NO: 171129 - DNA, 122 bp, Homo sapiens
tccacaatctccacaaccacatcctcgaagcttcatagaggagaggctggccaactgattcgtgtatcacaaaggaccatgattcaggtaccaagcatctatctgtcagatgccaggagctg

SEQ ID NO: 171130 - DNA, 122 bp, Homo sapiens
gccccgcgtctccccagattatgcggaagccacgagagggtcatgggggaaatcctgactcgtgtgtagggttcgtgcgtgggaggagcagtggtctgtggggcccccagttcccactttct

SEQ ID NO: 171131 - DNA, 122 bp, Homo sapiens
ctagacgcgtcttacagtgggagagctcagcctcactgatagccggggatctctcctgttcgagggctgagatctccggtcccacaaccgcccacaaccaggggcacttctggaagtcccct

SEQ ID NO: 171132 - DNA, 122 bp, Homo sapiens
cctctggtgctgcaccaagacagtagcatcttggagtcaagggacctgcgcctagaaaagcgcaccttgtttcggtaagaggaagatcgctgtcattcacctgaggctcccagagccaaccc

SEQ ID NO: 171133 - DNA, 122 bp, Homo sapiens
ttgctacagcgggttcagcaatggcacctggtccatcgttccccgctcaggatttttccccgagctgtttggaaatcgctggatgctccatttttcaaattcgcttcacgtgtagatgaatt

SEQ ID NO: 171134 - DNA, 122 bp, Homo sapiens
agtgctgcagggatctatactcaggtcttggacaggacttggagatgtgatgagtacttacgaaatggtacctcggagcctctgaagaagggtggtaggttccccagcctcagcaccacctg

SEQ ID NO: 171135 - DNA, 122 bp, Homo sapiens
ataaaccatgttcatcaggatgtcagtagagaagaaatgaaagtagctgagaaaccttgccgagagagaccaaatctcaaagtgaactaaaaatgtcttgaccacaaggatagaaagtgaac

SEQ ID NO: 171136 - DNA, 122 bp, Homo sapiens
gcaaggatctcttcccacttttggaccctgaaagctgggccccgatctcgagttatagaccgcagcgcgcgggcgctcctgaaaggctgcttcaggggaggggttctcccaggtagagtagg

SEQ ID NO: 171137 - DNA, 122 bp, Homo sapiens
agtttcgccatggtagccaggctggtctcgaacacctggccccaagtgatccacccgcctcggcctccggaaatgctgggattacaagtgtgagccaaattttgcatttcttaatagggctt

SEQ ID NO: 171138 - DNA, 122 bp, Homo sapiens
acgcgcaccaactccacgcccctccgcgccgcctgcttcgagggcctcctggaggtggtgcgctacctggtcggcgagcaccaggccaacctggaggtggccaaccggcacggccacatgtg

SEQ ID NO: 171139 - DNA, 122 bp, Homo sapiens
ttcctccctttttgctttgggatgggaatccagggttgggaaatggaaggatcaggatctcggaatctgggaaggattttcgtgcatttatgcttgaacagaaaatgagctataaatattat

SEQ ID NO: 171140 - DNA, 122 bp, Homo sapiens
tcctgggggcagtcgttccagggatagactgaggcctcggcagcccctggaacctcatttcggtccttgtcccggagtcgcacgtcccgggatagcgccgctgcagcgggtgccgcccgtgc

SEQ ID NO: 171141 - DNA, 122 bp, Homo sapiens
ctcctatttacaaagtaatccagctgattaatgaagaacagaaaaatgagagtaccaccacgtgccgcccttgtgtgagatctacccaatggcacacacacacaaagcacacaaaaccgagc

SEQ ID NO: 171142 - DNA, 122 bp, Homo sapiens
ggccggactgctgctttgccgtggcaggccccacccgggacgtggcgctgcgggccggggcggtccagctgtgagtcaggggttaatgtggcgggataactctctgcagagggaaggagctc

SEQ ID NO: 171143 - DNA, 122 bp, Homo sapiens
agcagtcggctgctggtggaataggaaagcacggggctgtaaagctaagtcacgccgtctcggctgcagagcagtttactgggtcacactgaaaaaacttcattagtagtataacatgtcaa

SEQ ID NO: 171144 - DNA, 122 bp, Homo sapiens
gggcctggctgaggacgaggacgtgctgttcactgtgttcgcccagggccagaagaaccgcgtgaagccaccaaaggagtcagcactgtgcctgttcacgctcagggccatcaaggagaaga

SEQ ID NO: 171145 - DNA, 122 bp, Homo sapiens
caccgaggacggtaagggcgcgggcacaaagccgggcaccccgtggacacagcccacaaacgcacatgcagaccctcaggcactggcaccgctctagggctcagagctgggcctttgtgggg

SEQ ID NO: 171146 - DNA, 122 bp, Homo sapiens
tgaaggtgccacaccctgcccctaaactttatcgggtttgatgtttcctgagtcctttgacgtgcctttctctgcagctgttggagtgtgtgcctggctcatcccaaaacctttcatctaac

SEQ ID NO: 171147 - DNA, 122 bp, Homo sapiens
gcgagttcgcgcaaacgggagtgtccaccgctggcgggtcagccactagcgttggctacgcgccggtcactcgggcgacaggaggcggggcggcgcggaagttatcttccaatcaggtgctc

SEQ ID NO: 171148 - DNA, 122 bp, Homo sapiens
cctgtggcaccgggcggcccagagagggcctggccggctcccacctctcaaagccctgctcggacaatgctgctgaggcaaggctccgggacggcccacccaacagaggaatcagacacaaa

SEQ ID NO: 171149 - DNA, 122 bp, Homo sapiens
cattaggtaaaatccaagtcatggagaaacaagagaaaggacttaccctgggagtagagacgtgtgggagcaaaggaaatgcagagaaaagtatgtctgcaacagaaaagcaggaacggact

SEQ ID NO: 171150 - DNA, 122 bp, Homo sapiens
cgggacggcgtggccgcgctcaccaccaccgcggaggccgggctgtaattaggataattgcgctgctcccagcctggggcagctcaggaccccggctgcaccgcgctggcccgggacgggcg

SEQ ID NO: 171151 - DNA, 122 bp, Homo sapiens
aaactccaggtcgcctaggcgctgcgcaggaagcgcttgccagccccggacttctgcgcgcgctgcatgcccattggatgtgctcattcccaccccagccaatcccgaaactcgctcggacg

SEQ ID NO: 171152 - DNA, 122 bp, Homo sapiens
cccctccaggacacgcacattgttccccgcccccgcccccgccaccgctgccgccgtcgccgctgccaccgggctataaaaaccggccgagcccctaaaggtgcggatgcttattatagatc

SEQ ID NO: 171153 - DNA, 122 bp, Homo sapiens
actgcactccagcctgggcaacagagcaagactccgtctcaaaaaaaaaaaaaagattatcgggtctctgagcccccatatccactgcaaaatgagtggactgagataacctttgtgggagc

SEQ ID NO: 171154 - DNA, 122 bp, Homo sapiens
tgcgggtcctgggagtcctggctggacctcattggcttgtggcgccttcactcggagagacgcgcctcaacccggaagtgtgcgaggcgaaatctgcctagcaaccggggaagccgggctgt

SEQ ID NO: 171155 - DNA, 122 bp, Homo sapiens
taaacacacacactttgggctaaggggaattttgatttttcattttaaccccttcataaacgtggacatggcagacaggagtcaaaatagaaaggagcatggagactcagacttccaggtat

SEQ ID NO: 171156 - DNA, 122 bp, Homo sapiens
cgattgtagatgtcctggattttggcttttacagtgaaactattccaggaattcatggaccgtggtctattgaaggaggaggaaagcaaatacctcctcaaaaaaaggtgccacttgcaaaa

SEQ ID NO: 171157 - DNA, 122 bp, Homo sapiens
ccgggcgcccggctgtggggggcgctgggtgtggggcggctccggggccggggatggcggcggccgcggttgcggcggctccgggacgagtgagtggatcctgggaagcgctgtgaaatggg

SEQ ID NO: 171158 - DNA, 122 bp, Homo sapiens
acagcaagcagccgcctagcacagggatctgtccgtgggctggacgcgacagggaggactcggctctgcgcctggggcccgggaccccgactggaggtggggtcggctctgctcctggggcc

SEQ ID NO: 171159 - DNA, 122 bp, Homo sapiens
tttcttgaagccaaagaagagtttgctcataagaccctggcaatggatgtgatgaaaccccggagaaatgatcctttgttgactgtccttactcaggacagtatgactgtggaagatgtaga

SEQ ID NO: 171160 - DNA, 122 bp, Homo sapiens
tacactgcccgggaggtcttccaggtcctgtgcgcccacaggggcaagagcgtcccggagcggagctgtgggcgcctcctcacctccgggtctgcacagtggggctgtatttgcctttgttt

SEQ ID NO: 171161 - DNA, 122 bp, Homo sapiens
agagggagaccctgtctcaaaaacaaacaaaaaatcctagaccgtttacaaacagccttccgtctcttcctggtcaagtcctaaccctggctaacctcgccgtctacagcctgaattttggc

SEQ ID NO: 171162 - DNA, 122 bp, Homo sapiens
ccgccacccccggccccacccgcgagagacggggtccacgcgccttccctgcgcccaaaccgccccgaggcccccagtcccaggagggagcgctgagatcactcggatctccgcaccccgga

SEQ ID NO: 171163 - DNA, 122 bp, Homo sapiens
ctagtcctgcgattcttccattgcacattgcacccctgggcctttcacatctgctcctagcgagcttggagtgtaggtgcgaccagggcgcatctgtgccagtgcgtgtctgcgtgcgtggc

SEQ ID NO: 171164 - DNA, 122 bp, Homo sapiens
tgggggaaggcgtttcggttgtggtgctgcggcagtgagcgcggatcaagacggacgcggcggctggatgactaaaccccgagactctagaaccaaaggactagggggaccagggcggagga

SEQ ID NO: 171165 - DNA, 122 bp, Homo sapiens
tgtcttgtaagagggtagcctgctcagatacaatgtcttgtaagagggtagtctggttttcgagtctagcataaaaattttcaaacataccgaagagtaaaaatactgacaagctagactta

SEQ ID NO: 171166 - DNA, 122 bp, Homo sapiens
gcagcatccctcatgctaaatggtgacacttctcagtgacaatcagcctgaaggaggtgacgcccagcttgccggccgtgggtgtgcccctaggctgtgccacgaggcaccctgaaaagcag

SEQ ID NO: 171167 - DNA, 122 bp, Homo sapiens
cagtgggcgcaggtgaagccagagcggtggctggagctcacctgtgtcagaatcccctagcgggtgcccattgtctgtgtgcacgctcctgggagttgggattccggagtcgtggaaaggac

SEQ ID NO: 171168 - DNA, 122 bp, Homo sapiens
cttagggtagaagtaaaaccaaagccagaaataaacctaaaacacaagactgggattagacgaatcctcgaggttagctgagtgaaaagatcaatatgggggaatgcaggcagcggaatcct

SEQ ID NO: 171169 - DNA, 122 bp, Homo sapiens
aggaggcggggcgcagcgcgggggcaggaggcgggccagggtcagggcagaggctgcggccgcgcgtccccattggccgggacgcagtgagccgcccggagctcggcgcgggcggggcctgc

SEQ ID NO: 171170 - DNA, 122 bp, Homo sapiens
caggcactggccagacccagccagggatcctcgtattcgtcgagcctaatttccagcagccgggtaggcctcaccagaggctcctttccgtgaggccgcccccaattcctgcccctattctc

SEQ ID NO: 171171 - DNA, 122 bp, Homo sapiens
gcctgggtcccaggtgcgtccagcgtacagtgagaggtggccccgctcacgcccagcctccgctccggggctgcaggtacgtcctgggctgctgcttcctggcattctgcataaggagccta

SEQ ID NO: 171172 - DNA, 122 bp, Homo sapiens
tgggcagggcgagtgtgggcacggcgagtgtgggagaccctaggtctgcgccaccgccggcgtgagcctgaaaagctgctgggagaaccagctccgaaacagagtgcccggaagagattgtg

SEQ ID NO: 171173 - DNA, 122 bp, Homo sapiens
gtgcagggacctgcgtttggaagccgctgcttcagagtgttccagagaacggcagcctcacgcaagcatgaagcgtttaactgtgcaacacaaatcaacaacctgggctcctagaattcagg

SEQ ID NO: 171174 - DNA, 122 bp, Homo sapiens
tgaggtgttgttcatgtctatggcttatttttgatgaatgttcctcagatatcctatggacgcttatgaaggcagtcgagtggcatttgcaaaaaaagaaaaattgcagtcagagcacagac

SEQ ID NO: 171175 - DNA, 122 bp, Homo sapiens
caagtgaggcggggcgactgtcaggccacgccccacttcgcgccggccacgcccccaccccgcgtattcacaagggctcacctgggggctgctccctgccagcgcggccagcagcccgaggc

SEQ ID NO: 171176 - DNA, 122 bp, Homo sapiens
cctcctgcccgcggaccttgccgccccgcctccagcccgtgccacggcggccgccattggcgcgggcccatcccagaacggcgcccattggcccggtgcgaagccattcacccagcgcattc

SEQ ID NO: 171177 - DNA, 122 bp, Homo sapiens
acaccctttgtagcccgccaagctggccaagacacacacacacacacacacacacacacacgcacgcacacacacgatcaattacagtgaccaggagactatgcaggggaaacgggcatact

SEQ ID NO: 171178 - DNA, 122 bp, Homo sapiens
gtatctatctagatagacagatacatctccatatcattgacaggatactttctggccgagcgtgagtacaacctatgggtgtggttggagagaacatgtgttccacctgaatggcagatcaa

SEQ ID NO: 171179 - DNA, 122 bp, Homo sapiens
tgcctgcctcaggcacaaagtggtttacccgcaggtgctcaaggcccaccttagtgttggcgtgtcttccccctttgtagaccactttgttgatggcgtcaataatctgcctcttggtagag

SEQ ID NO: 171180 - DNA, 122 bp, Homo sapiens
ctttcgtcagtgcttctgggccgcggccgccacctacagcctccacagtgcccggcgtcccggagctggctccactccagttcctgagcaccaaggctgcagaagctgaggcccctgacgga

SEQ ID NO: 171181 - DNA, 122 bp, Homo sapiens
gccgccgcctcggcggctcgggtccccatatatagtcatatccaccgtcaactgggaggccggcggccggcagcgaatgggcgagcggcccccgcgggaggagcggggagggggcacggggc

SEQ ID NO: 171182 - DNA, 122 bp, Homo sapiens
ctagccggcctcttataaccgagcccggcgcggctcctcctgggccggcccggagcggggcggtggccgcgggcctgggctctccacgcccccgccacgccccacctgcccgcgcgcccaaa

SEQ ID NO: 171183 - DNA, 122 bp, Homo sapiens
caccacgccagacctggattgccagatttagcacataaaaatacaggacccccagttaaacgcctctcggataaaccattattgcatgggatacactcacgctaaaaaaattgttcgtcgtt

SEQ ID NO: 171184 - DNA, 122 bp, Homo sapiens
tgcgctcaaggaggaggtggaccagcgcgaggaagactatgctcgcatcgtggcggccagcgaggcgctgctggccgccgacggcgcagagctgggcccgggcctggcactagacgagtggc

SEQ ID NO: 171185 - DNA, 122 bp, Homo sapiens
ccaacccggtgaaaccccgtctccatcaaaaaatacgaaaaccagtcaggtgtggcggcgcgcgcctgcaatcccaggcactccgcaggctgaggcaggagaatcaggcagggaggctgcag

SEQ ID NO: 171186 - DNA, 122 bp, Homo sapiens
ctgagatccaggcttttgggtttctcacccccacttcctcatcttcgtttattctccagccgtactcatcaatgtctatgtctgtggctgctgagctgatgcaaaatattccctctgtcagg

SEQ ID NO: 171187 - DNA, 122 bp, Homo sapiens
cagggcagggggtggtgggccagactggtccccgggggacttcttcacaggggctgctggcgagctctttctctttagggactgctccataccccatgatggagcacacggtgtagggaagc

SEQ ID NO: 171188 - DNA, 122 bp, Homo sapiens
ggaccgcactagtttgcgcagctctcttttctgtacctacgcacgtcccctgcctcgtgccgctgtcccccaacgcctcttttgcttgcgaggaagaggttgctgtgggacagcccctggcg

SEQ ID NO: 171189 - DNA, 122 bp, Homo sapiens
gcaggtgcccactgctgtgtcccgggttggtggcaggtcctcctccctgagcttcggtcacgaggagcaggaggagaggccgcagtgctcagggccccgtgggcacgagcttcaccccgagc

SEQ ID NO: 171190 - DNA, 122 bp, Homo sapiens
cagctttcaggaattctctgtttgtctgtgttgtgttacccaagtagcctgttatctttgcggtttaagggctgacttggaaattcagactgtcatctatttaaagaaaatggaagtcccca

SEQ ID NO: 171191 - DNA, 122 bp, Homo sapiens
tcagcaaagaatccaaagaagaacaggaccatcgcgagccactttccgcctcttcatccccgtccactgaggaaatccaccgaagccctttgtgtggggttcggaggagagcgggttgcagg

SEQ ID NO: 171192 - DNA, 122 bp, Homo sapiens
aggcagcagggagggggtttggcctcactgactttttcctccaggtgggatttcacacgtcgtgtgactcagatcttaagtatatagtatgaaaactctccatggaatttttttgcagctca

SEQ ID NO: 171193 - DNA, 122 bp, Homo sapiens
gatgggaggcagggaggattcaagtaactgtcctctgatgcaatcgagagtgtgcagacacggtagacagatctgttttactggagggatccagggcagcttcctagaggaagcacacttta

SEQ ID NO: 171194 - DNA, 122 bp, Homo sapiens
cactatccacccgagggctgaccggtgagggaacgacgctaaaggattggttgggcgctgcggggaatctcgacgctcctcactattggcccaagcctcagagacatgaacgtcgattggcc

SEQ ID NO: 171195 - DNA, 122 bp, Homo sapiens
ctctccctcagaagagctgggagatccactgcaaaggcgcacgtttcagtctagccattgcgcagtggtaacgcaggctttcccacgctgcaacagacctgtgctctcaagacagtctcttc

SEQ ID NO: 171196 - DNA, 122 bp, Homo sapiens
ttcctatcccactgatcgttttagagcctgaacagacaaaacatcctggttaccaagactcgaagaatgcataagctgggaccaggcaaaacaaacagatcactgtgggctcacagagcagg

SEQ ID NO: 171197 - DNA, 122 bp, Homo sapiens
ctgcggaagtcccgcccccttgtcaagagaccaaacagaagaccgctgccggtctccccgcgagcgagcgctaagcgtagtcccgactccgaccttaggatgcccttcccccaacctctcac

SEQ ID NO: 171198 - DNA, 122 bp, Homo sapiens
gcctaggcaaccactaatctttctgcctattctggacacttcatatgaatggaatcatcacgtgatcttttgtgactggcttctttcacttaacgttttcaaggtttatccatgtttagcat

SEQ ID NO: 171199 - DNA, 122 bp, Homo sapiens
ctaggacgtctcctcacccacgttaattttttaaagaggaggaaagtaggagaagatgagcgcttcatgtaaggctctgccagcctacgaggaaatgcaatcctccaggctcgcccgagcgt

SEQ ID NO: 171200 - DNA, 122 bp, Homo sapiens
ctcacatcttctcttactgaagccatgatcattcatggaaaaggcactgaggggagtgtgcggagcctttgtgaagggagctgtgcttccctgtgctcccttcacatggaggtgagggggag

SEQ ID NO: 171201 - DNA, 122 bp, Homo sapiens
taaacaattaaatctggatatctatgacagggtcggggagggagagattattacttcagacgaccccaaatcctcatgggttaaaagaaacagcaaacccctgaccagaactggcgagaatg

SEQ ID NO: 171202 - DNA, 122 bp, Homo sapiens
ggccgcgctcgtcgcggagctcctctagctgtgcgaacgtacaggggccgtccaagtagtcgttgacgaacagcgctccctcccccggaggcccccgcgccttttttcgcctgcggcgccgg

SEQ ID NO: 171203 - DNA, 122 bp, Homo sapiens
ggtagctcactggccccggggcgggtccctggccgacaaacccgtaactcacagcagtgacgcttcccgacgccccccggccacatccccacaggaacgctacggcgcacagggcattactg

SEQ ID NO: 171204 - DNA, 122 bp, Homo sapiens
gaggaggatcagacagcagcccagaatagccccaggaggactgaggtgtccctgttatctcgggagagagatgacaccccccacagcaccagggagggagagcttgaacacaccatccaaaa

SEQ ID NO: 171205 - DNA, 122 bp, Homo sapiens
acgccagggacgccacgtactgccaggttctcaacgaggtggagccaaaggggcaggccccgcggtgcgcccggcgctgggctcacgggttgctgcacccggcccaggatcgcgggcggtgc

SEQ ID NO: 171206 - DNA, 122 bp, Homo sapiens
ccaggtttctgcacagactcagtgatctgcaggtgcccagatcattgctatggagggtttcgctcatggacctgggtccccaacactctgccagctgaccatgcccctagtccgagctgagc

SEQ ID NO: 171207 - DNA, 122 bp, Homo sapiens
tctttcctagagagaggtctccctcggttcctgagctgagcacatgctttctcagtgagccggcagaacaggacagaggggcgtctccctggggcctcaaggcttgcgacgtttcttgctca

SEQ ID NO: 171208 - DNA, 122 bp, Homo sapiens
agagggcatttgtgactcagctcagagcaggaaacacatctcacgtcaactgtcagacagcgctgctccgaatcccatcacagtgctccagcagggggcgtcctcaccggccgcggccacag

SEQ ID NO: 171209 - DNA, 122 bp, Homo sapiens
ccgcttcccagccctcgatcgccccacagccaccagggggcgccagagccccgcgcaaagcggctgccaccaagtggctgccaccgcgcgttaccaccctcagggcctgatgcctgggactg

SEQ ID NO: 171210 - DNA, 122 bp, Homo sapiens
caagggtccccacagccaggctctttgcaggtgctgggttcagagtcccagagctgaggccgggagtaggggttcaagtggggtgccccaggcagggtccagtgccagccctctgtggagac

SEQ ID NO: 171211 - DNA, 122 bp, Homo sapiens
acacgtccaattacagtgaaattctgtgccccttacccggctaatttgaacacagctcaccgccaaggcctcctccagcatggccagccctgggcagagatcgtcacgaatggatttgacgg

SEQ ID NO: 171212 - DNA, 122 bp, Homo sapiens
agaatttcccctgcaaagagcatgtacattttgattttacctgtcctcagactgacctttcgctcattataatagtaaaaaacagagccctggttggaggtttaagatgctaataagacatg

SEQ ID NO: 171213 - DNA, 122 bp, Homo sapiens
agcacacgtggtgagagacaaagcctgctgcctgtctgtgagcttcagtgcccaatgagacgcagcaagctttcgcctcttctttctacactcctgcttttattgcacagtacttttttaca

SEQ ID NO: 171214 - DNA, 122 bp, Homo sapiens
aggggcagggcccgccccccagagtgctcactggtctggagtcactgtcaccccacgtggcggctcttcccaggatcaaatgtcacaaatggggatacaagttagcccgaccctacagaacc

SEQ ID NO: 171215 - DNA, 122 bp, Homo sapiens
agacgcccaggccgctcaggctcgaatcttgcggagcagggggcgggacaatagcggccgcggcgccccactcggcagaactccgccaccaggcgcgatgccggaactacatgtcccatgac

SEQ ID NO: 171216 - DNA, 122 bp, Homo sapiens
cgccgtcctctttgtaactcgagcagaccctggcgggccagttgctatggcaatgttcctcgctctgctcggtgaggccgggaggtaggcgggccttggcggacgtcacccacattcggctt

SEQ ID NO: 171217 - DNA, 122 bp, Homo sapiens
tcttttttgggccccagcccgttcctgctccgcgcttctggagcactggccaaggcgggccgattcaggacccaggttacttgggcggcgagctggactgtttctactcctccctcctcctc

SEQ ID NO: 171218 - DNA, 122 bp, Homo sapiens
catccgtttcccctttaagaccagagcggaagactacagtgagaaggccctttgtgtcggcgggaaagaaatatgcctgcccctttaagaaggcggagacgccccagtggcggcgtcttcga

SEQ ID NO: 171219 - DNA, 122 bp, Homo sapiens
cgcggcgtgcgccccctgcgcccccagtactgatccagcttcgcgggggagacgcgcacccgcctcctgcctttagccgggccaggagctctggggcccttctggagcacccgggagccacc

SEQ ID NO: 171220 - DNA, 122 bp, Homo sapiens
gccgaggccgcgtgtcccaaaggccaggtgagaccccatgggaagcgcctccgggagcgacggggtccgcttggcgctgggggccgtggggagccggggtctggagtgcgcgggattcgcag

SEQ ID NO: 171221 - DNA, 122 bp, Homo sapiens
gaccaggcccaggccggacacggagcaggtcaaactccccgtgttgggcgacggtgggaccgcgcctgcgagcaacgcctgcagttccgcccgggacatccgacgagacccggtctctttta

SEQ ID NO: 171222 - DNA, 122 bp, Homo sapiens
cccctcctctcctgaaggttaattgaatctggttacattgtaaatccctgcagtcttattcgaaaattcgtagcatgcgttaggaccctgcaggtgtgaaagaacctgctgccctaactcca

SEQ ID NO: 171223 - DNA, 122 bp, Homo sapiens
cctcacacacctcggctcttgtgaacactagtgttcctgccgaagcacgcctacttaccccgctgagcagagcctgagcctgcaacctccagagacctggggaaagccacatactccgcttc

SEQ ID NO: 171224 - DNA, 122 bp, Homo sapiens
cttgccccctcagtcccggaacacgcctccttcaggacacagcggctgcggagccagccccggtgtctctcacagacgcaccagtgttccaggaatgggacacagaactccgggcaaacccg

SEQ ID NO: 171225 - DNA, 122 bp, Homo sapiens
ggctcacctccctcccgcagcccagccacacctgctctggaaagccctgtagctcctgggcggggtttgccagtcaccgatgctggaagggtttctttggccctgagtgaagagagacccag

SEQ ID NO: 171226 - DNA, 122 bp, Homo sapiens
gttattttgaggaccgggctggtgcgactatactactgccggatggcaaatccgggatctcggctccgagaggctcatctggcaaaagggcgcggaaaccacgggggccctgagactgagtg

SEQ ID NO: 171227 - DNA, 122 bp, Homo sapiens
aaagggccccggcgctcagcagcccaaaccggccagcttgggccgcgggcggggggcagccgccgccatcctcagcttgggcaacgtgctcaactacctggacaggtacaccgtggcaggtg

SEQ ID NO: 171228 - DNA, 122 bp, Homo sapiens
agtatgaagtatttcctggtttccccacctgccaggcatgaggccagccaggtggaacatcgcatgagtggccagaaaaggcaggcgacaaaggccagcttgcatctgaggacggaacttgg

SEQ ID NO: 171229 - DNA, 122 bp, Homo sapiens
tggccacgggccggtgatagacctccaggcagatggggcaggtgtactgcgcctccaggccgctgtcgccgcccgccggcccggccggcggctgccgctgctgagccgaggccaccaggctg

SEQ ID NO: 171230 - DNA, 122 bp, Homo sapiens
gggtaccggagcggttgtcaagacacaatgaccccgacgccagactcaagcggggaaaagcgggcctagagctccagggcgggagcgacgccgacgcctaaaacattcttgaaaaagaagaa

SEQ ID NO: 171231 - DNA, 122 bp, Homo sapiens
tcccggatgcgatattccggtgacaccggacgctgggggcggggcctagtgcgacgagggcggggccggggccggcccggggcggggccgtggccgcagctgcctggcagccagaacctggg

SEQ ID NO: 171232 - DNA, 122 bp, Homo sapiens
ccggggagagctggaaggtgggcccggatctcccacatcactatgagctcattccagccccggccaagcaaagcctggccctactcgctccacatgcatttcagtctcctctcgcctttcat

SEQ ID NO: 171233 - DNA, 122 bp, Homo sapiens
cgccgcagcactccacagaaggtgcagcaggagcggctgcggccggagccggctgtgctgcgggccacggcgtccatcgtccagcccccaaagaggtcttcgtaggccacgaccgtgagcgg

SEQ ID NO: 171234 - DNA, 122 bp, Homo sapiens
cttcccgggggtcgctcccaaagaaccacagaggtagagcgggacgcaatgagccatgaacgcctgggcttcttccctagttttcccgcagtagactctgggggcgcggttgcaaaacctag

SEQ ID NO: 171235 - DNA, 122 bp, Homo sapiens
ccgccgggctcccggaagtcgctgggaagcggcacgcgctggcaggtggggctgcagctgcgggcgggcactgctgggctcgccggttctactgggctcgcctgggcggccccagaatcgca

SEQ ID NO: 171236 - DNA, 122 bp, Homo sapiens
cgacgttcccgctgaagccccgcctcttgtgatggccaatgcctgctccctaccttgaggcgcttctcttgtggtatccaatggcttgcatatctactttaagcctctcctcctgagcggga

SEQ ID NO: 171237 - DNA, 122 bp, Homo sapiens
aagggtctttcctgggcctctcagtgcttcttccaaccccactccccactccccaagtcccgggacccctgcaggggaaggttcctcggacaagtggttgaatctcctttggctctcagtat

SEQ ID NO: 171238 - DNA, 122 bp, Homo sapiens
cctaagccccaccgcctcacctccagtccccacagcgttcgcgctcccagccggggtaagcggaagaaaacaaaggcccggctccatcagggcaccaatcccgctcgtcggcctctttctcg

SEQ ID NO: 171239 - DNA, 122 bp, Homo sapiens
gttgttgttgttgtttttgagacggagtctcgccctgatgcccaggtgggaatgcagtggcgctatctcggctcactgcaacctctatctcccaggttcaagcgattctcctgtctcagcct

SEQ ID NO: 171240 - DNA, 122 bp, Homo sapiens
ccccgccccctccccccagcccccgcttaccgccccctcccaccctctggacggaaataccgccctctcgcgccacaaacaggaagtgacgtacaaagagccagagacgaactctgagagag

SEQ ID NO: 171241 - DNA, 122 bp, Homo sapiens
ggaccgcccttcaggctggccctgaacttaggagatggacgctgagactgaaaagcaatgcgagtaagaaaccgatccacgcaatcaatattcattgagtgccagctaagggtttgtcgtgg

SEQ ID NO: 171242 - DNA, 122 bp, Homo sapiens
gcccgccgccgcctcagccttaggggagaccactacgcctcgtgcccgcgcacgccgcgccgctctcctcggcgcccccgccccgcctgctcctcgcagccccgcccatgtgcctttctgcg

SEQ ID NO: 171243 - DNA, 122 bp, Homo sapiens
tggcatttggttcatcccacagcagcagttctgcttaccaaaagttgcccgctaggcactcgcatttcatacctggccccatgccatcgagctgggcttctaacccatttaaagtttgagaa

SEQ ID NO: 171244 - DNA, 122 bp, Homo sapiens
actcacgatcgaggtgcagcagtcaggccgggaagatcctgcatgttgcgctagggactgcgcgcggcgccaagcgacaaccccccagcggccactgccccggcagcagcagctgcagcagc

SEQ ID NO: 171245 - DNA, 122 bp, Homo sapiens
ctggtcatcagccttgtgacactgatgcacgggaccctctgggggatgcagaagcctgcccggtcaggcaagagtaggtggggtgttttcttgaaaggccttcttcctcttttccctatcac

SEQ ID NO: 171246 - DNA, 122 bp, Homo sapiens
gcggctccgaggggcagggcgaggcttgtgatgccgaggttagttacggccagccacaggcgctgtgcaaggaattggggaaagctccctgccaagaaagggaaacgttagcttagctaaaa

SEQ ID NO: 171247 - DNA, 122 bp, Homo sapiens
aggcgtccaccaattaacccctcccagcttctggtctacagtaacgggtccccaacgccgcgtcttaaccaggcccgaaccgaccaccgccaaccttccctgacacgcctttgccccacccg

SEQ ID NO: 171248 - DNA, 122 bp, Homo sapiens
aagtcgtacaaaaggtccggggaggcgtacctgggcggcgagaggcgagagaactccgcgcgggctttccagtgcccaggcccctgccggctccgaagccgaaatcccttcttccacttcgt

SEQ ID NO: 171249 - DNA, 122 bp, Homo sapiens
gaaccagcagacctacctgcagtgggaaccggcagcatcccagccagggtttgctgtttgcgtgaatggatttctttttaaatcccatattttttttatcatgtcgtaggtaaactaacctg

SEQ ID NO: 171250 - DNA, 122 bp, Homo sapiens
gcctttgtcattcccagaaaccagcagccttacaaagaacaaaaagaagaaggatcatctcggagggggacccaaagctctgactcatgcattctgggggccactgtgaacctttaccctga

SEQ ID NO: 171251 - DNA, 122 bp, Homo sapiens
cagtttccctttctgcaagaagcagagtgggtgatcgctaaagaccctaccagctgtggacgtccttggatcccaggacagttttcagcccttccctgcccttggcccgaactttaacggtc

SEQ ID NO: 171252 - DNA, 122 bp, Homo sapiens
cgggcggggcaggctggcttccggcgggagcggggccgcggatggccgtatacagggcagcgctcggggcttcgctcgcggctgcccgactcttgcccctcggtcgctgttccccgtcgccg

SEQ ID NO: 171253 - DNA, 122 bp, Homo sapiens
cgaccccccgcggcctagctaaaccaagaatccgaaattaaactccgaaacgttccttcccgggagacgaaactctctcccacccctccccctcacagatccttccctccccgaaactgggg

SEQ ID NO: 171254 - DNA, 122 bp, Homo sapiens
tgtgcacggcgggtgggaggcgcgcgggctcgccggggctcgggactgtgttcttgcagccgagaggcccacacaggacaaggaggcctgacccaggctgttggagcccgcgaagagggggt

SEQ ID NO: 171255 - DNA, 122 bp, Homo sapiens
ggtctccctctacctatgtgggctcggtgtggtcgcaagctgcctggtagagagacggcccgtggtttgtaccagaccggagggctcttccgaagagagggaagggtgatcccagcccggcc

SEQ ID NO: 171256 - DNA, 122 bp, Homo sapiens
agagtaggttatatgccccagcaccagcactgagtgcagcccccaggggagtactgtgcacgggctccatggcgacatcaccactatgtatttactggttggtggagactggggaacacaaa

SEQ ID NO: 171257 - DNA, 122 bp, Homo sapiens
agtggaggatgcacttggagtgccttttcccaccttgccagagtggacactgtccgtgggcgctctgcggggctggctgggacagccggctgagaagcgccaccccctcccgcctagggctg

SEQ ID NO: 171258 - DNA, 122 bp, Homo sapiens
tccttcagcctacggacatgaaggagtcaactctaccttccactcgttgccggctttcgccgagaaccccgagaaacggactaccggagtccctatcttgcagcccgatccccgctacccgt

SEQ ID NO: 171259 - DNA, 122 bp, Homo sapiens
cttgactccttccttgggcttttcttcggccatggcgagcgccggagtctcctcagctgccgcttcacaaaagaggtaccaggtccgctccaaacgagcacacaagcagcaccaggagcggc

SEQ ID NO: 171260 - DNA, 122 bp, Homo sapiens
ctggggaggaataaggggagttgcaggagaggccccgcgccccatccaggagcaggcctgcgcctgacacctgtgcccgagaagcctagtccggctaagaagggagagggaacctctgtcct

SEQ ID NO: 171261 - DNA, 122 bp, Homo sapiens
agctgtaaatgtaccttatacagcagagtacaaaagacagctccaagtgagaattaccttcgttctcagtgccaaaacagtggtaacactgtggtgtgcagaaagcccatgaaaacatgggg

SEQ ID NO: 171262 - DNA, 122 bp, Homo sapiens
gaggagagtaccgggccggctcggctgccgcgcgaggagcgcggtcggcggcctggtctgcggctgagatacacagagcgacagagacatttattgttatttgttttttggtggcaaaaagg

SEQ ID NO: 171263 - DNA, 122 bp, Homo sapiens
aaagctagtttgcagcccattgttgccaggaaataacagcattaacatagttaaatcgctcgtagccccgaggggatatttgtacctctgaaaagtgacaaacacactgcgtcacagggact

SEQ ID NO: 171264 - DNA, 122 bp, Homo sapiens
gcgccggcgggacagagccgaccaatcaggcggctcggcagcggggcagaggtcagggggcgggccgaggggaagccaatgacaggctccaattggaggccggaccctggacctttccgggt

SEQ ID NO: 171265 - DNA, 122 bp, Homo sapiens
agggggactctgatcttgcattaattgggcatgtcagttggccttaagaattcaatcagccgggcagtgacccaatctactgctgacaaatgggccccatttgctattcaaaaaattaaaaa

SEQ ID NO: 171266 - DNA, 122 bp, Homo sapiens
ttcacaaaggtgaaaagccacagtcttgctctgaagcagtattaagtcaagcagggaggccgggcgccatggcttacgcctgtaatcccagctacttcgaaggctgaggcaggagaatcgct

SEQ ID NO: 171267 - DNA, 122 bp, Homo sapiens
ttaagaatttaagtttatactgttaaaaacaagactgacttggtttagccttttttctttcgtttattgtgattagtaggtttgtgcttaattttgacacactggatgacataacgaggtga

SEQ ID NO: 171268 - DNA, 122 bp, Homo sapiens
cccgtgtccgagtcggtgctctgcacccctcccaacgtatcctacgcctctgtcattctgcgggactacaagcaaagctcttccaccctgtaagggggaagggtccacatagaaaagcaaga

SEQ ID NO: 171269 - DNA, 122 bp, Homo sapiens
ctgacctgggcaaccggtcaccctgggaagccttccctgcaagggaccctcgggaggagccgcgtgggaggaggagaaggccgtgtggggcgtgttgggctgagatttctgtggggacacaa

SEQ ID NO: 171270 - DNA, 122 bp, Homo sapiens
gcatatcttggttctgcacatctcagggtggggtgctcatttcttttctctcccaatgcacgaagcattgccaaagcctggtgttaaataaaaaggacaatgtagggctccgagattaacta

SEQ ID NO: 171271 - DNA, 122 bp, Homo sapiens
agtttgaagagagttgtgcccctaaaagtgtttgaaacctgtggctttcaagcaaggtaccgttgtccccacagtgttccgtggggtagggggtgatggagactgtgggcaagcctgttgtt

SEQ ID NO: 171272 - DNA, 122 bp, Homo sapiens
cagacggggagattttcccagaaacgacacaggcagcacttttccccattttattcagctcgggcccttgtgactaggcccttagtttctttttatctgaaggagaggaaacttcagcccct

SEQ ID NO: 171273 - DNA, 122 bp, Homo sapiens
gttcctgctggatgtcatcgcagcgctgccctttgacctgctacatgccttcaaggtcaacgtggtcagtgtggctgggctggctgggtgggtgggcttggccaggggacaggcagggccgg

SEQ ID NO: 171274 - DNA, 122 bp, Homo sapiens
gggagcccagcgcacggaaaggaggcgcaggtcaggggcgcacgccccctggggcgggggcgcaggccggctttcaggtaccggccttttgtctgctgccttgggctcgcctgtcagccccg

SEQ ID NO: 171275 - DNA, 122 bp, Homo sapiens
gcgcccagcgacttaacgtgtcattttcactcaactatattatgaagaatatttccacgacgcaggaggctgaggcaggagaatggcacgaacccaggaggtggaggttgcagtgagctgag

SEQ ID NO: 171276 - DNA, 122 bp, Homo sapiens
taaatgaagcctggagcgccatttcagactgaatcaaaccgtagatgccatgtgtacctacgcaacaaatctgcgcattctgcacgtgtatcccggaacgtaaagttaaaaaaaaaaagaat

SEQ ID NO: 171277 - DNA, 122 bp, Homo sapiens
atccgtgccgaggcgcgggctccactccctgaagtggagggacccttgaatctttccttgcgtaggcgcgcggcagagcagcgatttggcgaaaagggccgagactcaggatgcctgcaatg

SEQ ID NO: 171278 - DNA, 122 bp, Homo sapiens
cggcctcatccatgcggcctggcgtgctcagggccgtgggtgagttgctgtggctgccgtcggcctccacgccatcactctggccgcccaggctggggttcatgaggttgccggcggcgaca

SEQ ID NO: 171279 - DNA, 122 bp, Homo sapiens
atcgaagggctgaagatgcggaggaggccgagtcgctaggcgctttcgggggcgctgtgccggtgaggcttaggcaaggggacggggaaccgtggttagatgcagcagcggcggcagcagcc

SEQ ID NO: 171280 - DNA, 122 bp, Homo sapiens
gcagagaaaggcgggagaacacagagccaactggctaagtgtaaggacctctggtcgcaccgtgtgtctgctgcccctgttcagctgtctgtctgccgcaggtggactctgtcccagaatcc

SEQ ID NO: 171281 - DNA, 122 bp, Homo sapiens
tctcccgtggataattgtgtctaattcatttgtcgcggacctggcgcagtcgctctcccccgcagccccgcctcctccccgcgggctcagggcacaaaaagcgcacacgcacacatcaaacg

SEQ ID NO: 171282 - DNA, 122 bp, Homo sapiens
ttttcactgaggagacttggggggagtgctctgctctcggctgagacgcttccccatggccgagggcgagggccggccccccgccggccgcctctggtctctgggggctccaggtgtggact

SEQ ID NO: 171283 - DNA, 122 bp, Homo sapiens
gccgcccgaggagggccccgccttgtgctgccacagccagtcttcggccgctacgtcacgcgcgctcgcccactattcagacgagctctctcaggtccttcctgattggatctctgccagag

SEQ ID NO: 171284 - DNA, 122 bp, Homo sapiens
agcctgccctgctgggagtacagcggttgtggggctgacagagttctgagctgcctgcctcgccccacagggtgatcggaacctcagagacgcccatcatcatcgtgggcaacaagcgggac

SEQ ID NO: 171285 - DNA, 122 bp, Homo sapiens
tcaggaggagccccagccggctcccgttctgaggaggcacctgtgggcatgggggacccccggggccgccccccgatgcctccgctgatgcttaaggtcacacagcaggacatggtagctgg

SEQ ID NO: 171286 - DNA, 122 bp, Homo sapiens
ggctgtgtccgtgcccttcttgctgctctgtgtcctggggacctgccctccggcgcgctgcggccaggcaggtaagttagccgtcctctgtgcctttgggccataccatttcccgggaatct

SEQ ID NO: 171287 - DNA, 122 bp, Homo sapiens
caattgcagcagtaagttttatcttaacacatgtgaaaaagtcagcagattcagagtaagcgaagtaaaaacagactgagagagggtagaagtctctacatgcaagcattccagtcaaacta

SEQ ID NO: 171288 - DNA, 122 bp, Homo sapiens
gtggcctggagcccagcctcccgccccgctcggtcacgtgagcctggctctcacccgcgccggcttccacaccccgcgggactgagaaccgccctcccactagctcgcaggcgcaggcgcag

SEQ ID NO: 171289 - DNA, 122 bp, Homo sapiens
tctatgagttcaacttctttagagttcacacatctttgtccctttccccaaaaaagcaaccgctgggcttccaaactcgctacaagtccagaagccctcctggaaagggtctggccgcagag

SEQ ID NO: 171290 - DNA, 122 bp, Homo sapiens
ggggacgacggtggtgggcgggggcgggggcgggggtggcctgcacgggggcgggctccccgggcccccattggctgcaggcccccccacgccagggctccccccagctcccccccacatcg

SEQ ID NO: 171291 - DNA, 122 bp, Homo sapiens
gccttcgtccagcccgagagcggtttcttcaactgtggctcaggcagcactctccctccgcgtggtgtccgagccagcagggccgtccggccctcctgtgttcatcagaacggctggctcgc

SEQ ID NO: 171292 - DNA, 122 bp, Homo sapiens
acgcgccgggtcggggttttagagacggagctttgagtgcggattccgccagatgggggtcgggaactccgggccaggccctgacgtggattgtgtttgccgcctcctttaaccttgccctc

SEQ ID NO: 171293 - DNA, 122 bp, Homo sapiens
tggggcgagtgctattgattgacgtgcattccaaccaacctacgacgcaaggagagcgcgcgcgagcaagacgatgcccaataaacactcagccccagcggcgggggcggggcttgtgggaa

SEQ ID NO: 171294 - DNA, 122 bp, Homo sapiens
gacccttttcccgggcctccccacctgcggccccgcggaagggaggggaggcaggcctggcggcgctcgtgtgaagaagttaattcaattcgctctgataaccgagttattccgatctggcc

SEQ ID NO: 171295 - DNA, 122 bp, Homo sapiens
ccttagcccatgatttgggatgtccaatcctatgtagtttacttagaacagctcatgccacgttctgtggctgtgcctacttggagcctgggagaaagcgacacaacagtggaagcctagga

SEQ ID NO: 171296 - DNA, 122 bp, Homo sapiens
gcttcctttcacctgggcctccccctcctcccctgagcttccctcaccggcaggccagcccggccctcagggacagctggtgggaaagatgagaatgaacacgtccagcccagccctgagcc

SEQ ID NO: 171297 - DNA, 122 bp, Homo sapiens
ttcaggaaaagaaagtgagcagtcagctctgctgaaatgggctaggagccccgagggcctcggtattgcggcgagagggtaagtgagagggctcgacgtctgcatccctaagcgaactgctg

SEQ ID NO: 171298 - DNA, 122 bp, Homo sapiens
aggcaggggcccggcacctcccgctccacctgtgatggagcatctcccgaaatcagggcccggggactctcagcgtaggcacagcaaccccagggacaagggacgccctgcttgccttggcc

SEQ ID NO: 171299 - DNA, 122 bp, Homo sapiens
cagaaagaggagagtgggacaatatgaatgcactcgaaagtgtgatctgtggaccagccacgatgccatcccttgggagctggttgcagactctcaggccctcaccggacttgcagaattca

SEQ ID NO: 171300 - DNA, 122 bp, Homo sapiens
acctgcccgccccgcctgcccttcctcaccccggtgcctgcgggattgctggagagaacgcggcgatggagccgggcaggacccagataaagcttgaccccaggtaagtgagggcggcgggc

SEQ ID NO: 171301 - DNA, 122 bp, Homo sapiens
aaggggacacagccgtctctgctgagggtcaaccctgcaagtggctaggagtcagtgtctcgtcatcctgggagaggtctcccggccatggagaatgagttctgtaggtaccaaggctgaga

SEQ ID NO: 171302 - DNA, 122 bp, Homo sapiens
agttagcaatcataatagctgatatttgctgagcatctaacacacgctaggcaccgagggcgaggctgcgtttgttactccatggaatctcagagcacctggacaaggtgtgtaggacagct

SEQ ID NO: 171303 - DNA, 122 bp, Homo sapiens
ccggctgcagccttttcaccgggatgggcccggctcggcgttccccggaggctgcgggcccgcccccctgacgtagctgcccatacatggtgtaacttcctcgccgcgcccaggtggagccc

SEQ ID NO: 171304 - DNA, 122 bp, Homo sapiens
tgatttttagcagtgctgttgacacaggagttgcaacagcaacccccatgacttgcccctcgctgggttgaagattatcattgatttatctggagcagaaacagcaggaatccacatcacgc

SEQ ID NO: 171305 - DNA, 122 bp, Homo sapiens
aatctagactttggcctccttccctgctttaactgattgatctcatcatgaggaagaactcggtgactacagaccaaagactccttcattgggtaggaaagactgagaataaatcagtgttc

SEQ ID NO: 171306 - DNA, 122 bp, Homo sapiens
caggaaagcgtccaccatagtgatgctgggctaggctgagagaagctacaagagagcaggcgtgcaagggctccgacggcggctccctgcccgggctgccgctttaaatagccctcgcatca

SEQ ID NO: 171307 - DNA, 122 bp, Homo sapiens
tgtttgtgatgttatccatgatgttcggtaatattaatgtgtggttgaatgcagtaggtccgagagggatactgtgagtcctagagccaccaccagcattaaaacatagaggaatatataat

SEQ ID NO: 171308 - DNA, 122 bp, Homo sapiens
tcatctgcacattagggataagtacagccatccacctgggaggtgtcaagggggtgtggccgcagcacccagcccatgcacaagttcagtgatcattacctgtctcccccagccctgcctga

SEQ ID NO: 171309 - DNA, 122 bp, Homo sapiens
caggcctccctgcccactgacagccttgcgctgaaatgtctatcatctcctttacaaagacggtactgcctgcttccccaagccaagcgtctgcttttctgttttgctgaactcaggttgct

SEQ ID NO: 171310 - DNA, 122 bp, Homo sapiens
gggcgtgaagaaacgtgtaggatgaggaaagagaacttgtgagccttaagagctgcccggcgccgtcttaccaggcctcgcccggcccggccctggccctcagttccctgccagggttggga

SEQ ID NO: 171311 - DNA, 122 bp, Homo sapiens
atggcctgacataagggctgtagtctgtggcatattgcagccatgccattagcatgtgaccgataaactgcatatcctcaacatatcattagtgtgtggcaggttgcagacatgtcatccaa

SEQ ID NO: 171312 - DNA, 122 bp, Homo sapiens
tgtaaaatgggggaaacacacttccacctcggggttgttttagggctccgtgagatgggtcgcggagtgtcctggctctgcgccctgggcttacgaagcgctctgttacttagggacggggc

SEQ ID NO: 171313 - DNA, 122 bp, Homo sapiens
agcgtcggcgcatgcgcagatcgggggcgcgaggcctcacggagctcgtagtttcccggacgggccgctcccggcctcgcggcctcgcctccccacactacaactcccacggggcagcgggc

SEQ ID NO: 171314 - DNA, 122 bp, Homo sapiens
taaggcgccgtggacgcggggggcggggcgagcgcggtcaggccccgccccggtcaggcccggccccgcccccagtcagaccccgcccccgcagcggcgtccgcccagcagttgctcagtcg

SEQ ID NO: 171315 - DNA, 122 bp, Homo sapiens
gcttttataatctaggagcttagggtttagtaggaagagtcgctcattcaatgaattaaacgctcattcctatgtactaggcaccattccgagtgcagtggctacaaagactagtagaacat

SEQ ID NO: 171316 - DNA, 122 bp, Homo sapiens
tgaggtcaggatgctggaatggtggagggagtgtaatattcatgtaggtgttttcatacacgacaaatgttgtgttggatgtcccggtatggaacgcagtcaacactgccgagaagaccatg

SEQ ID NO: 171317 - DNA, 122 bp, Homo sapiens
ggaacttgaaccgtgtccctcctaaacctgccccttgtccgccgcaacgcgccctcgacgcgcacaaaaccctcactttgctactgaggaaagttattcaatggccagagacaccctgcggc

SEQ ID NO: 171318 - DNA, 122 bp, Homo sapiens
ggggtctgcccaggatggaaggcaaagaaatacattgctcccaggggttggacgcctgcccgggaccaggccttgagctgagaacctggaagcccctgccaggatcccttcctggccaggcc

SEQ ID NO: 171319 - DNA, 122 bp, Homo sapiens
ctgacctcagctgatccacctgtctcggcctcccaaagtgctgagattacagacgtgagacgctgcaccgggccagatcttaggattgtaaagtatgtgttgggaattctacatttgaagac

SEQ ID NO: 171320 - DNA, 122 bp, Homo sapiens
cctttcactcagaggattgaagcccaagacttcctaagtgctgtgtggccttagccaagtcgctttccttctctgtttccctctctgtaaagtggcaagaatctctggacttaaaattgcta

SEQ ID NO: 171321 - DNA, 122 bp, Homo sapiens
ctccaggccacagacaccgagggaggcggcagtgggtctgtgactggagggaccccggaacgaggcaggaaaccttcctggttgcacctcaggccaaccactcagcagccgggtgaccccaa

SEQ ID NO: 171322 - DNA, 122 bp, Homo sapiens
catggaaggggcgctgactgcccgggacaaggtcggggttcaggattttgtgctattggacgcgtacaccagcgaatctgcctttgtcgacaacctccgcaagcgtttcagcgagaacctca

SEQ ID NO: 171323 - DNA, 122 bp, Homo sapiens
tactgttgaaacagaattggcctcctttaacttgcacccactggtcctgatttgactcttcgcagctctgcagaatacatcttccaaaatttcaagacagttccctttcacacaggctctct

SEQ ID NO: 171324 - DNA, 122 bp, Homo sapiens
gggtgacacttggtcctggggagtggcgactgtattgtctgtctgcagcatccctatcagcgctaccgttgttccacgcacacagggagtaagtactgggagtcccagccaccgccgcggaa

SEQ ID NO: 171325 - DNA, 122 bp, Homo sapiens
gacacctcaacccggggctctcttttaaagttcagcaagagtcacacactgagaaggaaccggtggtggggtgttttcgtaggaaaggggcggcaggtcaggatgagattctcactgtcatg

SEQ ID NO: 171326 - DNA, 122 bp, Homo sapiens
cctctcctccctgtcctgagccttagccatggccgaggcaggggctgggctgagcgagaccgtcactgagacaacggttaccgtgacaaccgagcccgtgagaaaggcgggggggcggtgct

SEQ ID NO: 171327 - DNA, 122 bp, Homo sapiens
cctcctggatcgatttaggaggctcgggtgggactgggaccaatcgcacctttgttgagccgtcactcattatggggagcccctcccaacaaccatagcgaatatttattgagctccacgct

SEQ ID NO: 171328 - DNA, 122 bp, Homo sapiens
gaaactttaggaaagatgagtgtgactgcgggaagcagaagaaactaagctgagaaaacccggaaaaatactcggcgcagctgctgcggccttgggtcatctcacctccatctaccccgcgt

SEQ ID NO: 171329 - DNA, 122 bp, Homo sapiens
gtacaatctaaacgaatcccggttggctaaacatttgaatttttttacataaggtgggcacgtaaaagaaattggagagggcggggaaggggtgtctgtcatgagctagaaagttagtcttc

SEQ ID NO: 171330 - DNA, 122 bp, Homo sapiens
agaaggtgagacctgggagctgaggctcccggaggacttgcagggacagatagtgcccgacgtaactctttcctgtgacctttttctcggagaacgccggcccggcccttctcatttataaa

SEQ ID NO: 171331 - DNA, 122 bp, Homo sapiens
acttccaggagcgcccctgcgggtaaagtcacatgtacgctctgttctgggctcagcaaccgagtcgtaggagagacggagtggcctggggccaggtcctgagtccgaggagcagctgtctg

SEQ ID NO: 171332 - DNA, 122 bp, Homo sapiens
gagagggccgggctgctggctgcgggtctggctgagcgggccgggggcctctcacctttgcgggccttgtctcccgggatgttctgggcccgcagccgttggtcgaggatgtaaagcatctc

SEQ ID NO: 171333 - DNA, 122 bp, Homo sapiens
aggaaggaaagagagaaccacatatgcaaaactaggaggcagaaagaccaccaaatgtttcgggaaaccaagaggtgtttggtattattagagtccagcctatgtggaactggtgggatatg

SEQ ID NO: 171334 - DNA, 122 bp, Homo sapiens
tttagcactgaaagtcccaggtcccaggaaactctttcgtcctgggcaaactgggatagtcggttacccgataggccattatcagaggctggaggagatgtcatgagatctgctgcttctca

SEQ ID NO: 171335 - DNA, 122 bp, Homo sapiens
ccaagaacatccaaccacagggaaatgcctacgatggggcctgaggtcaaacgcgtctcacggtgtccactgggtgccgcccggggtctaggtaagcatgtgcaagcgcgtgtgcacactaa

SEQ ID NO: 171336 - DNA, 122 bp, Homo sapiens
gagagagggccatagcaggaacgttgggcccagaggagggagcacccagctctgttggaccggggtgagatcagggaggacttcccagacccagtgacagagtgtgctttagaaaagagcct

SEQ ID NO: 171337 - DNA, 122 bp, Homo sapiens
ccccacctctatttctaagtggccatattccatactggcagcagctctcctgaatacccacgaaggcagacatgtgcagagctgccagttaccacctgtcacgggacctatgtgggtgtcag

SEQ ID NO: 171338 - DNA, 122 bp, Homo sapiens
tcgcccccaacaattcagagcaagcggcagacgccttcaccgagactggcgctgtctacccgctacagccctgatgagatgaacaacagtcccaacttcgaagaaaagaagaagttcctgac

SEQ ID NO: 171339 - DNA, 122 bp, Homo sapiens
ttctttccctactctaccttctaccttggtctggacacattctggaacactggacaccctcgccagggccacttctgcactagggctctgtgctggaacccaggcatgctgccagccttttc

SEQ ID NO: 171340 - DNA, 122 bp, Homo sapiens
agccgcaggccccggagatgctgcagcgaggtatggactccggggcacgggcggtcggggcgccggggctgaggacctagccctgacccacgccctctgtggcccgtagctcgagagtacaa

SEQ ID NO: 171341 - DNA, 122 bp, Homo sapiens
ataagaagtagccataaaatgaatttacaaacaaaacagcaagtaaagacatctataatacgatagattgaattgccatattctttaggatgaggcctggaatatgctgaacatacagattg

SEQ ID NO: 171342 - DNA, 122 bp, Homo sapiens
cagtggctctgacctgaagctgataggccaggtcagcctgtgctcggcgggtgttgacctcgatgtcataggcggccttcttcagttcgtaatctctctgtgccttggccatctcgatctca

SEQ ID NO: 171343 - DNA, 122 bp, Homo sapiens
tgaaccgaatcctaattgaggcaggtcagctgggggtgatgtgtttagttgagcacagagcgagggtggagacaggggctcaattattggcgtgttctgtatcctgggatgatgatggtatt

SEQ ID NO: 171344 - DNA, 122 bp, Homo sapiens
tgggccggggcggaggccgaggctgcagggcgggttgagggtcagcagggctcaagaagtcggggggtgggggtgggcgagaggtcggtagcctccggggatcagctagtccccaggggcaa

SEQ ID NO: 171345 - DNA, 122 bp, Homo sapiens
gactggagaggtggggaccctggggaggtggctgctcggagtctaggtgacggggcgagacggggccggtaggtggcgggaggggccgggccggagccggcgggagggccaggcccggaggc

SEQ ID NO: 171346 - DNA, 122 bp, Homo sapiens
acagaaacaattacaggcctccacggagagataatcacttagaaaacaaaccatgtgggccgggcgcagtggctcgcgcctgtaatcccagcacattgggaggccgaggcgggcggatcacg

SEQ ID NO: 171347 - DNA, 122 bp, Homo sapiens
ctggttcagcagcaagttggaaaccatcatgctggcagggctcctttggccaccaagccccgatccccaccttctccccttggatgtgcctgaagccatgtctcagtcccatccttgaagaa

SEQ ID NO: 171348 - DNA, 122 bp, Homo sapiens
ggccttggaaagcggcggagctgccgccatggcagcggcgggggcagagagacgggtcggcgctggggacaaaatgcctcaacgcgtaacggacgccagccacccgacagggcggggccacg

SEQ ID NO: 171349 - DNA, 122 bp, Homo sapiens
gcttggacctgaagcccctatttatagacccatagaaacatcctacaagagttcttgagacggagcccaccctgaccccaaacccagggtcacccagcaccataagcctcagtagaagtgtc

SEQ ID NO: 171350 - DNA, 122 bp, Homo sapiens
ggaacgtagagggggcgggaccaggaacgagagcgcgtgggtttctggggtgtccgccggcgccccctgggattggggagagagggaagggctgaggctcacggtttcggagtaaggggagc

SEQ ID NO: 171351 - DNA, 122 bp, Homo sapiens
cgtgagtgccgccccgcccggtgcccgtccaggccccctcaggccccgccccgcccacctcgccccaccccgcccgacttgcctccggccccgccctgccggggccctgcctcctgagactt

SEQ ID NO: 171352 - DNA, 122 bp, Homo sapiens
ccattccatttgttagaatgcaggtatactgctaatcggatccactagaccaagaatccacgtgggatagcctaagaagacagaagaacctgggtattttcagatgtccctcaacagaaaca

SEQ ID NO: 171353 - DNA, 122 bp, Homo sapiens
tacatacatatatataaaaacttaatctagctgaaccactcaagccaacacaaagcaagacgtgttttttaaacttagatattctggcttcaatatggaaaacatgtgttgccatgcactta

SEQ ID NO: 171354 - DNA, 122 bp, Homo sapiens
gtcccgttcattcaccccttgacagcatatataagccacatcctgtaacttcagctttatcggtaataaagatgatgttttggtgtatgattgccttattcctttgtcttatttctcagttg

SEQ ID NO: 171355 - DNA, 122 bp, Homo sapiens
cccgcggcgccatgagccgcagcctggactcggcgcggagcttcctggagcggctggaagcgcggggcggccgggagggggcagtcctcgccggcgagttcagcgtgagtggcacacggggt

SEQ ID NO: 171356 - DNA, 122 bp, Homo sapiens
ctcagtggcaggcaggcaggcggcaggcagagcgcgctctccgggcagtctgaaggaccgcgggaatgtggaggggtttagagacaggcaacaggaaaccactcagagctctgggctgggtc

SEQ ID NO: 171357 - DNA, 122 bp, Homo sapiens
aggaagtgctggaatcctcggtggcctaaccccggccctcaggacagaacagaaggcaggcggccccggccaggacatgcccagtggaatttcagaggcactttcgggaacacagcgccttc

SEQ ID NO: 171358 - DNA, 122 bp, Homo sapiens
gcagaggcactggtaatttggcttttacttgcctggtacctctggcatggagtggctaaacggtggcaccatgtactagttgctgccatcttcagataaaatattgaatcaatatgacaaaa

SEQ ID NO: 171359 - DNA, 122 bp, Homo sapiens
ggcgccgcctcttgtgacgtaagccgcagaatcctctgtcttagttcggctctattgccgcgagcttgactcttcctgggtctgaggaaaagtaaaagtaattttgtcatttcctgaaactt

SEQ ID NO: 171360 - DNA, 122 bp, Homo sapiens
cacagtcaactgcaggcacagtcagcaccagcgcagcagggacggggcggtcctcactgacgtcctcctactgcagatgcacactgaggctcttggccgcagagcgtggcgtctgcagttca

SEQ ID NO: 171361 - DNA, 122 bp, Homo sapiens
tattaatatatgtttactgtttgttttgtgtctgacttccccactcctctcattagaatgcgagctccaggagaggtctttgtctgttttgttcactaccacatactcagagcccaggtcag

SEQ ID NO: 171362 - DNA, 122 bp, Homo sapiens
gcgcacggtaggtagttccctgcggctggaggcgggtctggcgcgggctgggcggtgctgcggggccgcgggacagcggagcgccgggaagggggctgccttaggggtccaggtgcgcggct

SEQ ID NO: 171363 - DNA, 122 bp, Homo sapiens
aagccttgtttgtccggctcaagacagccgaggcaggccctccactgcagcggatggtcacgcctgcagctagcagtcaccttgctccggcgtctgcatctgcccacagtgaaggcagcgtg

SEQ ID NO: 171364 - DNA, 122 bp, Homo sapiens
cagttctcactcccactgagtgtcgggtttctagggaagccaatcagcgtcgcgcggccccggttctaaagtccccacgcacccaccgggactcggagtctccccagacgccgacgatgggg

SEQ ID NO: 171365 - DNA, 122 bp, Homo sapiens
ccccttaccaagagaggagaggaccaccaggaccaggaacagcgagaggcggcgcgtctccgagcccaggcagcctagaagccgacgcacagggtttccagagccgccctgaccgccgggca

SEQ ID NO: 171366 - DNA, 122 bp, Homo sapiens
cctccactgtggggtattgacgtaattggaaagagaacctcaactgtggggtattgatgtcgttggaaagagaacctccactgtggggtattgacgtcattggaaagagaacctccactgtg

SEQ ID NO: 171367 - DNA, 122 bp, Homo sapiens
gttttgttttggagggttttttttttttttttttgaatcagagttccctaaatagccactcggcatctttgtaagtgatgtgaattctgaaattacttactagaataggacaacagagtact

SEQ ID NO: 171368 - DNA, 122 bp, Homo sapiens
gcatcctcgggttggaaggaagtgctaccactctccagattcttcctttgagtcctagagcgctttactaaatctgagatggaggtagagactaagggaaacaggatcaacattagaaagat

SEQ ID NO: 171369 - DNA, 122 bp, Homo sapiens
gattgagaacggcaactccaataaggcccagttcaagctgaggatcttttcctttatcaacgactccatcgtctacctgcactgcaaactccgcgtctgcatggaatcccccggagccacgt

SEQ ID NO: 171370 - DNA, 122 bp, Homo sapiens
gaaattttagcagggatcctgccaacgggttgggtgtaatgggctgtgatatgctgagatcggtgtttaagtttttctttcctgaattgtaattgttatcagccctgattgctaaagtttgt

SEQ ID NO: 171371 - DNA, 122 bp, Homo sapiens
agagaacctcgcgggagcgctatggtttctaactctgcagttactttggagatgaaggaacgtgagctctcagttacgtggcagtgacgctcactggggtgtctgttttgctgcgagaaaaa

SEQ ID NO: 171372 - DNA, 122 bp, Homo sapiens
ctcctagggctcttgggagacccaaatgagttgttaatccttcaaggacaacacagatcacgttgctgggctgatgtcattgcttttggaaagcaggtcccttgaacagattctcccaaagc

SEQ ID NO: 171373 - DNA, 122 bp, Homo sapiens
gccccccaccccggccgcctgcgacccgggccgtgcgtgctgccgcccgcgccccggccccgcgtcgctgcctagctcttatcctataccggctgcagccggtctccgccggcctcgggggc

SEQ ID NO: 171374 - DNA, 122 bp, Homo sapiens
gggccaggaggccgtggctgtgagggtctcgagggagagcctctcctctggggtggctttcggacaaggctctgcttccccactggcccagcgtctctggctctcccgctgtgcggtctcca

SEQ ID NO: 171375 - DNA, 122 bp, Homo sapiens
aattatttgacgccaccggttcagccccgtagaaagctctgattaggcgcaccgcgcacgcgcagtggcccacttggctggggagttatttgacgccgccgcccctggcagtcggaagttgc

SEQ ID NO: 171376 - DNA, 122 bp, Homo sapiens
atgtgttttaccttctaaatctgctctcctacaattctctacccacttctggcatctggccgggtaccgcgggaacctgaagaaggccacgtcggactgtgtgctcttccgcatgcggttga

SEQ ID NO: 171377 - DNA, 122 bp, Homo sapiens
tgtcctaaaattatggctttctgctctggcctgtggtcacttcccttcctcggggcatcccggcactggcaggaaagctgtgcacatgcttgtgtgaatgacaggaagctcttccgtgggat

SEQ ID NO: 171378 - DNA, 122 bp, Homo sapiens
ggcgctgacagtctggctcttggaggtaagatgggcgtggctgatcccgaactccgcctgcgtttgcagaagcgaagggaaccgagcgagcggagctgagctcgggtaggccgcgcgaggtc

SEQ ID NO: 171379 - DNA, 122 bp, Homo sapiens
gatcagtgcatcatgatcagtaattaattatatcacttctttcaaagtctgttggtgacccgtcactgcagatccattagtcagttaaagcacagacagaagtgtgtagttgtgtcgcctcc

SEQ ID NO: 171380 - DNA, 122 bp, Homo sapiens
aatttatactacaggctaggcatggtggctcacacctgtaatcccagcattttgggaggccgaggccagcgattgcttgagcccaggtgttcgagaccagcctaggcaacatgatgaaaccc

SEQ ID NO: 171381 - DNA, 122 bp, Homo sapiens
cagtgtctgtccctcttgcttctcccccagattgggagaggaaacggaggcctctccctccgggcctagcctgttgcccccagcaaccgggcccaaacaggcctgtggccggccctggcttc

SEQ ID NO: 171382 - DNA, 122 bp, Homo sapiens
ggccagctctcaccgctgggctcttgaagcaggaggcgcgagccgcgccaaagtctgcaacggcctcaagtctcgacgccagcctaggcaaaaggcaatgtatctaaacgaaaagaaaatag

SEQ ID NO: 171383 - DNA, 122 bp, Homo sapiens
tagatttcctcatccagaggaatgcaagagccaccaacaccgcctagtttggaggaaattcgttgtttctgccgccaatagtctgtggacgggcagaacaagcattacaattgaagcaggaa

SEQ ID NO: 171384 - DNA, 122 bp, Homo sapiens
caccgctgtggccagcctatcttgccggtgcagggcgagggtggcgcgcgtgcagagggccgatagcagtcccttcaaaaggaaccggcttctgagccactggagctggcacaatagaagcc

SEQ ID NO: 171385 - DNA, 122 bp, Homo sapiens
tgctgctgcggcggctgtggcggcggcagcggcggtgactgaggatagagagccacagcacgaggagctgccaggcctggacagccagtggcgccagatagaaaacggcgagagtgggcgag

SEQ ID NO: 171386 - DNA, 122 bp, Homo sapiens
gggtgtatctcaaagtgaaagagagtccagttataaatttggggcataaaatatttctaacgagtagtgaaggcaatggtagttgtgcttcaatgtgacgtattctgtatcaactttgaaag

SEQ ID NO: 171387 - DNA, 122 bp, Homo sapiens
ttaagatacctactgaaagagtgaccactttttatttacagacccaggctgtttggaaaacgtgcatatgcacactacttaaagtaagggaagcaaccagtgtacatgttgttagtaatgac

SEQ ID NO: 171388 - DNA, 122 bp, Homo sapiens
gtacctaagcaagtcagttgggtacagcaggacacgccaccattccagggtagctggtaccgccagaaacaggagtgggtcttgtcctgttgcaggcacactgcagtggttttcctgcagct

SEQ ID NO: 171389 - DNA, 122 bp, Homo sapiens
gaccgagtgtggcgggacagacgggtaggggagccaggtctcccgaaggggctagcaatgcgcgtccgagtcgaatgcgggttcccgatgctagacgcccgcaacctgctcccgagtgagaa

SEQ ID NO: 171390 - DNA, 122 bp, Homo sapiens
cttaaatgtttaggacatttatacatccataatcttttaatgtagcttttctctccaagtcgttttaacattatttatctgagaaaaatcactaaaacaattaattaattaattggagaaaa

SEQ ID NO: 171391 - DNA, 122 bp, Homo sapiens
ggacattcgtaggacgggacagtgcccactcgatagaaattccccgtgcgccgggctctgcgcagaagcttttcgaggtgactgcagcctccttatggggagaaacgtcttttttttttttt

SEQ ID NO: 171392 - DNA, 122 bp, Homo sapiens
cgaggtggccgcccacacctggctgctggacgacgaacccgtgcacacctcggagaacgccgaggtggtcttcttcgagaacggcctgcgccacctgctgctgctcaaaaacttgcggccac

SEQ ID NO: 171393 - DNA, 122 bp, Homo sapiens
cagcctttttgtttttttggagcagtctatttgtttatttggggatgggggtggcttatacgtctttaagtctgtcaccttgtctagaggtctgaataacttcagcatttgcaatgtggctc

SEQ ID NO: 171394 - DNA, 122 bp, Homo sapiens
cggtttaggcggaggcggaggcggagcgtttgggggcggccggggcggcttcggcttcatcggagaaggcggcgcggctgcaccaggtttggccgcgggcgcgcggggccagcgccctccag

SEQ ID NO: 171395 - DNA, 122 bp, Homo sapiens
tcgcgctggcccacgcagctgctgagccctgctgttgggcagcaatcagcgatgggtggccgtgggcaggttccctgcactcctggggcctcgtcttcagtctgtgctttgcattgtcctcc

SEQ ID NO: 171396 - DNA, 122 bp, Homo sapiens
gaagaaggcgctcacccaaggaccactgtccgagcggcttcccccggcccggcctggtgccgcgtccccaccagcccggggtggcaggttctactcgggaagcctgttttatgtcttctttc

SEQ ID NO: 171397 - DNA, 122 bp, Homo sapiens
cctacgcgcccgactcgcggggcgctgttcgttcaagactcgccccaaagagcgcaggaacgcgagccgcagcagtttcagggttcagcttaggtgacacaaacgtagctaatgggaggccg

SEQ ID NO: 171398 - DNA, 122 bp, Homo sapiens
ttttctttttttggatagagacagggtctcactgtgttgtccaggccaatctctagctcccggcctcaatcagtcctcctgtgttggcttcttaaattgctggaatttcaggcatgagccac

SEQ ID NO: 171399 - DNA, 122 bp, Homo sapiens
taaggccttccctgggcaagccatttacaatagcaaccctgtcatcctcatcagcattctcgatccctacttcctgctttttttcccctccatagctcttattgccatgtgacatactagct

SEQ ID NO: 171400 - DNA, 122 bp, Homo sapiens
tgtaccccctagggtagcagaaaaaacacttaaaggtgcttggaaggccagcagattagtcgaattcaattcaggctgcctaggcccatctctggacgttgccacttgccagctacttacct

SEQ ID NO: 171401 - DNA, 122 bp, Homo sapiens
tgtccctcccgcttcactgcttcactgcccctctgaaatttctagagcatccaggtccatcgggggtggggcggtgtggtgaggattcaattcatgtgtctgtaggatgcagcagcttctta

SEQ ID NO: 171402 - DNA, 122 bp, Homo sapiens
aaaacaataaagaagacagcacgtcgggagcagcttatgagagaagaagctgaacagaaacgtttaaaaactgtacttgagctacagtatgttttggacaaattgggagatgatgaagtgcg

SEQ ID NO: 171403 - DNA, 122 bp, Homo sapiens
gctccctgggagtcggagaaaccagacctatggtttccatggtgacagatccggctagtccggactcctggctctttatactgcgcaagcgcactgcgcaagcgcacacaactgatttggat

SEQ ID NO: 171404 - DNA, 122 bp, Homo sapiens
agcattccctcttgcatgccagcacaccaataaattaagatattcctggccgcatctgcacgagggaaattagagcattacctggtccccgccagtgtgccagctccgagcggcaggcgcag

SEQ ID NO: 171405 - DNA, 122 bp, Homo sapiens
ctgcacagttggccggcccagctggtctgcagaatctgggggaggctcatggcaggctgacgtcaattggcagagcccagtctggaaggagctcccagtcagcctactcccacacgctcctc

SEQ ID NO: 171406 - DNA, 122 bp, Homo sapiens
tcctcctcctccccttgtggtatgtcctaggagaagcctgtaaccagcctgacatctccccgcttctcatcctgtggtatctgccaggagatagccgcggccgcccctgattctttccaaga

SEQ ID NO: 171407 - DNA, 122 bp, Homo sapiens
tatgggtttgatcctatcttgttgtgctcaagtcttgtctctgtcatccatggtctcctacgaagtcattgccctaagttcatgctgggggagccagaagggaagtccttggatatcttata

SEQ ID NO: 171408 - DNA, 122 bp, Homo sapiens
gaaagtgatagtatatgtgatactactaacccatacagcacatcagtcccaccagctttgcgttccaatcttgatcatttttcatgagctgccccatcattctgcaggaaatctgtgcagca

SEQ ID NO: 171409 - DNA, 122 bp, Homo sapiens
accacgagatgcctctacatcaggatggttcaaagaaacaaagaaaaccagcgatcaccacgtgactggcgaggacatggcgctgtctgggctgcctgtctcctgctgatggatgtggaagc

SEQ ID NO: 171410 - DNA, 122 bp, Homo sapiens
ggcttcggcccagcgtgcgcgtagtttgcgggccgccccgggaccccgacgcccgtcggccgcctcctcctgtaccagcacctggcccagctgcgccaccgcgccagccccggcgcacgctc

SEQ ID NO: 171411 - DNA, 122 bp, Homo sapiens
agggagaccaaatcctgtcccaaggagccaccgaccaatagcagcttaaaccacacagagcgcttccatcagacgtgacctggccaagccagacaggctctctgaaacccagggtatgcgga

SEQ ID NO: 171412 - DNA, 122 bp, Homo sapiens
ccggagccggggcggtgattgcagccccagacagccggcgctggctgtggtcggtgctggcggcggcgcttgggctctgtaagtgatgccaggaccagggctggggccggggagtggggccc

SEQ ID NO: 171413 - DNA, 122 bp, Homo sapiens
gccccactacagtccctcgcaatgcaatcgggcgcggccactgcctccctcggagctccgcgagaggccctccaaaaagacgctggcacggaactcgcggctctcctgcccgttggatcccg

SEQ ID NO: 171414 - DNA, 122 bp, Homo sapiens
gtcataacttctcctttgccgagtgttcgtgtttcccaggaatctgaaatctcaaatatgcgccattccactggagttcaggctttgaactcgggcacaggctgacaggatttccctacaga

SEQ ID NO: 171415 - DNA, 122 bp, Homo sapiens
ggggtcggcgccgagtgggaggatggcggaagtaagtatgaaggtgcccttccctcccgccgctgttctctatggtctcttccttcagcgacgggaaagggggtcctgacgcctgcgcggaa

SEQ ID NO: 171416 - DNA, 122 bp, Homo sapiens
gcgctttcccggaaggtctgtgcgggtccaccagttgtcagggtaacagacttcagctgccgggttctggagtcacatgacccgggctggtcacgtgggccgtgggtttcccaatgccttta

SEQ ID NO: 171417 - DNA, 122 bp, Homo sapiens
ggagtgacaagtgggcacaactatactgctgtgattcgcaactgggtacagtcctacctccggggacacttggggaatgtctggggacatttttggttgcccctgccgggggggggggggtg

SEQ ID NO: 171418 - DNA, 122 bp, Homo sapiens
tggaactctggcccaaggctctctgactgactccttctcggcttagcggctgaagactgacgctgcccgatcgcctctgaagctccacagaccatcacggacaccgagctttgggtaactct

SEQ ID NO: 171419 - DNA, 122 bp, Homo sapiens
ctccgtaaaggaggtgtaatgattttaagtacttcacggactccctggggatagaaagatcgtgtttgtgaaaacactgggtaaactgccacatgccacacgaatgacagagaaatagataa

SEQ ID NO: 171420 - DNA, 122 bp, Homo sapiens
caaggggaactcccctaaatgactggatcactgggatcacccaagtagccccacagacatcgatgtctatagccggtggtcatctctctgccttctctcatcctaagcccctctcgtgtagc

SEQ ID NO: 171421 - DNA, 122 bp, Homo sapiens
ctggatatataacaaagtgactccaagaattgaaacatgatctctatattttgtcagcttcgtgggaggctagaaaattaagtgggcagaaaaaaaatgatctaaaccaagattaagataaa

SEQ ID NO: 171422 - DNA, 122 bp, Homo sapiens
ccatatctgaggtcccagcccgcaacaccagttcccgggccgcagccgccatggtcgcagcggcggccattccccgcagcctcacttccggcaactgtcagtcccggcgagtccgttccccg

SEQ ID NO: 171423 - DNA, 122 bp, Homo sapiens
aaaatagagaagccatatatgccaagatgtttaaaacaaagaagggccttgaggagcagtcggctcctcattgggatcatccggagtggccgcctccaataaagcaatgtagcttggagcct

SEQ ID NO: 171424 - DNA, 122 bp, Homo sapiens
ctccagatgggatcatcgataacttttttgagtcttgagtaaataacttcgggcggggcgcggtggctcacgcctgtaatcccagcactttgggaggccgaggcgggtggatcactttaggt

SEQ ID NO: 171425 - DNA, 122 bp, Homo sapiens
tttcctagtcctttttaagcgaggctccggatggctgggatgtctttaggttagtagtcccgggaggacgcgaacgccggttcaggcagacacggaagaaagcaagcgggccgcaaagagag

SEQ ID NO: 171426 - DNA, 122 bp, Homo sapiens
tgcagaggggccataattgtgctgatgttatagagacttaagtgaccaccccagggctgccgttgctcaggtgtgtttctggcattcccaagttggtacccttacatgcaatattttacatt

SEQ ID NO: 171427 - DNA, 122 bp, Homo sapiens
gggaacatgcaagagctcgccgggcggccctggagaatgcgaagccggaggagaccggttcggcctgctgcagtcttcctaggaaccctcgactcctgtgtgggctaggatgagggtcctct

SEQ ID NO: 171428 - DNA, 122 bp, Homo sapiens
gggtggggacacagccaaaccatatgagtggcatcccatcaacatctttctgtagaagttcgggacaaagcaatactatgtcaccatcattgatgccatgggtcactgtgacttcatcaaga

SEQ ID NO: 171429 - DNA, 122 bp, Homo sapiens
agaacatataatatgtaatgccatccaaaaccaacaacaaacaacatagagcactgaaaccgaagagccacttaaaatttagaattaggaaatttcaatctataattgtcaaacaataagtg

SEQ ID NO: 171430 - DNA, 122 bp, Homo sapiens
gggctaaggcgctgagtcgctaacgtgaaggccgggctcagaagaggattcgggctaaggcgctgagttccgtttggggttgctgtgcatttcagttggagatgtcacaggggagggtggaa

SEQ ID NO: 171431 - DNA, 122 bp, Homo sapiens
actagaagaacccgggatgaaacattttctcccgtgtcttgactctctcctttctttcaccgctgctttaaagggctgccagaaagccacaaagtacaaagcgaggcatttagagaccatag

SEQ ID NO: 171432 - DNA, 122 bp, Homo sapiens
agggctaagggtccccccgttctgtggccgcctccagcacatccacccagagtccctgggcgtgaacacagccgctggggacgatcaccgcctgcccagcgtgcagccctggggctgcgtcc

SEQ ID NO: 171433 - DNA, 122 bp, Homo sapiens
gccaggtcgccaggtctatctcatctagctccacagcacacttgcaacccaattcactagcgccaggccgcaggaccagggaaagcaggcgcccacccacgtgtgtaaaggggagagacagc

SEQ ID NO: 171434 - DNA, 122 bp, Homo sapiens
cgtgaggaatatgtcggtgcagtgtgcaggttaaactgtgagctgctccagcctctctcccgccggctgacggaaaggtggtcaaattaccttcgcaaatctgaagggtgcttggctccagc

SEQ ID NO: 171435 - DNA, 122 bp, Homo sapiens
tctgttggatgtgtccagttgactcctgcattgcctttctggtacgtagcaagtgctggacggtaactaccttttttgttattatgatgggcttgaactaggtgttctaagatctcttcctg

SEQ ID NO: 171436 - DNA, 122 bp, Homo sapiens
caaacagccctccgctgctcctccagctgaagggagtgtcgccctgccaagctgggagaccgtccttctccctggtctttgcattttctttggggagctgtgaatttccagtgggcatggga

SEQ ID NO: 171437 - DNA, 122 bp, Homo sapiens
caggagagggcggtgttcggcccggggtttgaggggtcgggaccaggaggagggacagcccggccgaacctgaacgcacttcaggccgcttgaacagcacacgcaggaactgcgccgacgga

SEQ ID NO: 171438 - DNA, 122 bp, Homo sapiens
ttttattacagagcttcaaggttttgttattctctgtctctcccgctgtaatttaaaccccgtaaggacaggaattttgtctccgtcactactgtacccccgctggatcagcgcttgcaaat

SEQ ID NO: 171439 - DNA, 122 bp, Homo sapiens
cggcgctgtggcccctgccgctcttggtgaagatgaccccgaacctgctgcatctcgccccggagaacttctacatcagccacagccccaattccacggcgggcccctcctgcaccctgctg

SEQ ID NO: 171440 - DNA, 122 bp, Homo sapiens
gtctcagtaagcacaatctatctgggtgacaccagagaggtttctgaagggtctggtgtacgctgaggcagtgaaataggtctgttggcacaggtaagaaggaagtggcatgataaacatca

SEQ ID NO: 171441 - DNA, 122 bp, Homo sapiens
acggaggtataagtagtcaagcaacttgcccaagatcacagagctggcgagtgtgggtcccgctttctttggtgctgggctttgaaatccccaagctttcctgaacttgatgttctcaggtt

SEQ ID NO: 171442 - DNA, 122 bp, Homo sapiens
tgctgagcccaaagcaccaggagcatcctgctgtgctgagccctgcatgggcctcaccctcgcctctcagctgggccctgcctgggcctcaccctcgcctctcagctgggccctgcctgggc

SEQ ID NO: 171443 - DNA, 122 bp, Homo sapiens
tggtgggggaggagggaccggcggcgcccacgtggcctccgcgggccccgccagagcctgcgcccgggccctgaccgcacctctcgccccgcaggaccatggccaacctggagcgcaccttc

SEQ ID NO: 171444 - DNA, 122 bp, Homo sapiens
gtaggactaaaggatagacatgcagaaatgcattttaaaaatctgttagctggaccagaccgacaatgtaacataattgccaaagctttggttcgtgacctgaggttatgtttggtatgaaa

SEQ ID NO: 171445 - DNA, 122 bp, Homo sapiens
acaccaccccttctctgcaatctagctggggagataaattcagtgaatctgtgaatgactcgatgtgaatcagatttatttgagaggagggaggggaggtgatggctcgcaaagactgctgt

SEQ ID NO: 171446 - DNA, 122 bp, Homo sapiens
gagggggcgaggcagggtctgattggccagcacgcggagactggggactccagggcctggcgcgacctcggatacggcgacgcgaaagaggggcgtgggcatggggaagaacctgaggcccg

SEQ ID NO: 171447 - DNA, 122 bp, Homo sapiens
cttcccacagaatggaccatccatgacctaagcttaatggaggcagaggtcaaataacctcgccccagcccagctatggccaagcagtcagctggccccagaggaaagaaagaaaccaaggg

SEQ ID NO: 171448 - DNA, 122 bp, Homo sapiens
gcccagcagcaccacgccgcctctgccgggctggcctctgccgccgggcctgcccgccctcgctacctcttccagagaaggtccaagctatggggggaccccgtggagagccgggggctccc

SEQ ID NO: 171449 - DNA, 122 bp, Homo sapiens
cgtccctgcactcccagagctccgggggtggggacggagccccctcctactgtacacatgcggggagcctgccgctagctgggcctgggccgactcttgcaagatcctcttgtcatcacagc

SEQ ID NO: 171450 - DNA, 122 bp, Homo sapiens
ttcatggccagcgctgggaaggtgggagtggaggtaaggacctggcctcctggcaggggccggcctcagcacccctcgcccgctgccgaggtccccgcctcgccagccccgccccctactcc

SEQ ID NO: 171451 - DNA, 122 bp, Homo sapiens
aaaacccacaaaaacacaaaacacctggtacagccgagtaaaaaggggatgatgaatgcacgatgcaggataacaaaggcaggaatatcaccactaatacaaagcagggtaaacatcaccat

SEQ ID NO: 171452 - DNA, 122 bp, Homo sapiens
agaaaaccctaaaaagttaccaaagaactaaacaaagttatcaattaatttataattaaccgagataatccttgtaaaaataactttcagcggagggtggatggccttaaatttccccacaa

SEQ ID NO: 171453 - DNA, 122 bp, Homo sapiens
cagagaaggatgccaagcctgtagaagcagagacgtcggggatgggggacctgccctgggcgccgccagaggcccaagcgcccagcaccgcaggagctggagacgtcgctgagcaccaggtg

SEQ ID NO: 171454 - DNA, 122 bp, Homo sapiens
gggggcttggagggaagattggggaacctggttagagggggcgcccattgcctatcccctcggtctgccccgtttgcccaccctctccggtgtgtctgtcggttgcagtgttggaggtcggc

SEQ ID NO: 171455 - DNA, 122 bp, Homo sapiens
gctagaattgcacagcaaggaacaggaggttggagtgaccaagctcaacacctcctttctcgtctgtggaaactgtggcatcgagaatgttctgcatggaaaagacagagaaatacctggtg

SEQ ID NO: 171456 - DNA, 122 bp, Homo sapiens
gcctgcgatttgctttggactcacccatttccttctctccctctgaaacgcagaggggtgcgccggagagggaggctgctggcctggctttgttgtttgccagttggaggatctatgggatc

SEQ ID NO: 171457 - DNA, 122 bp, Homo sapiens
ggctccagcagcgcggggcgcgcagacctggagttgcatggaggccagagccacgacacccgcctggggaacggagcagccccaggagctgatccccgtccacctgccccacggagccctcg

SEQ ID NO: 171458 - DNA, 122 bp, Homo sapiens
cctaggaggtgaagaaagctgcccaaacaaacacatctgtagtagtgaggcttttcaaatcgggcctgaggaccgaacctcttgttctagccttactccagggtctaaggtgaccacagagc

SEQ ID NO: 171459 - DNA, 122 bp, Homo sapiens
acacattctctctctgaagggaggctttcctgagacccaggaccagcacagagccacacacggttgtggggaacaacggaagcgatgggaggggaccaagataaaagcacaagtgacagggt

SEQ ID NO: 171460 - DNA, 122 bp, Homo sapiens
taacaggttttcccctccggctgtcaaacctaccatctccataagagagacagccttttccgtatgccagtcatctggtcaaggaccctctgtggctctcactgcccttagaacaggccctc

SEQ ID NO: 171461 - DNA, 122 bp, Homo sapiens
tccctcctttccacaccctgccctgtttggcaccaaacgcctgttctgttttgaaaggttcgtagataaccaatcagggctgtgttatagtgtgtcaggacagcaatactaaaaagccattt
